United States Patent Application Publication US 2011/0183924 A1 - sequence listing, part 185

SEQ ID NO: 449326 - DNA, 594 bp, Homo sapiens
cagggctgtttgaaacacaggacagaatgctacacgcagaaggagtccccactcctgttaattgcagagaatgcagtaaaccccaagcacagcaatgaggggacgggatggaggaacagagaaagctaagggtagcctctgccctcctactccccaggctgtgatccaaaatcccttcagcaatggtggcagtccggcggccgaggctgtcagcggggaggcacgatttgcctatttcccagcgtccagtgtgggagatactacggctgtgtccgtacagaccacagaccagagcttgcaggctggaggccagttctacgtcatgatgacgccccaggatgtgcttcagacaggaacacagaggacgatcgccccccggacacacccttactctccaaaaattgatggaaccagaacaccccgagatgagaggagaagagcccagcacaacgaagcccacctcttgtttctgggtccctgctcccctttgggggtgtgtgtgtgtgttttaattttctttatggaaaaattgacaaaaaaaaaatagagagagaggtatttaactgcaataaactggccccatgtggcccccgc

SEQ ID NO: 449327 - DNA, 459 bp, Homo sapiens
acaaaaaacggggagaaataatgcatttctgtggatacagtgcccaccgccctcctccacttggaaacggtatcctccctgcccatccgtctgtctgtcgcccttctcccggccctcactaagccccggcacttctagtggtctcacctggaggcaagagggaggggacagaggccctgccacgtcccgctgcctcctgctctctggaggtactgagacagggtgctgatgggaaggaggggagcctttggggggccacccggggcctggacctatgcagggaggccacgtcccaccccacctcttgtttctgggtccctgctcccctttgggggtgtgtgtgtgtgttttaattttctttatggaaaaattgacaaaaaaaaaatagagagagaggtatttaactgcaataaactggccccatgtggcccccgcgccttgtctgcttgtgtgtttgtc

SEQ ID NO: 449328 - DNA, 1810 bp, Homo sapiens
gcggcggcggcggcatctcctcctcacatgaccccactgtttgtccccgtgatcagcgcgagcggctcccgtatctcctccgtcccctcctgccgcgcggcgtgagcgccgggctcggggcccccccggccgcccgccccctcccctccctccctcccctcccctcccctcccccccgggccccgcgccccccccgcccccgccccccccatggacatgctggacccgggtctggatcccgctgcctcggccaccgctgctgccgccgccagccacgacaagggacccgaggcggaggagggcgtcgagctgcaggaaggcggggacggcccaggagcggaggagcagacagcggtggccatcaccagcgtccagcaggcggcgttcggcgaccacaacatccagtaccagttccgcacagagacaaatggaggacaggtgacataccgcgtagtccaggtgactgatggtcagctggacggccagggcgacacagctggcgccgtcagcgtcgtgtccaccgctgccttcgcgggggggcagcaggctgtgacccaggtgggtgtggacggggcagcccagcgcccgggccccgccgctgcctctgtgcccccaggtcctgcagcgcccttcccgctggctgtgatccaaaatcccttcagcaatggtggcagtccggcggccgaggctgtcagcggggaggcacgatttgcctatttcccagcgtccagtgtgggagatactacggctgtgtccgtacagaccacagaccagagcttgcaggctggaggccagttctacgtcatgatgacgccccaggatgtgcttcagacaggaacacagaggacgatcgccccccggacacacccttactctccaaaaattgatggaaccagaacaccccgagatgagaggagaagagcccagcacaacgaagtggagcggaggcggagggacaagatcaacaactggatcgtccagctttcgaaaatcattccagactgtaacgcagacaacagcaagacgggagcgagtaaaggagggatcctgtccaaggcctgcgattacatccgggagttgcgccagaccaaccagcgcatgcaggagaccttcaaagaggccgagcggctgcagatggacaacgagctcctgaggcagcagatcgaggagctgaagaatgagaacgccctgcttcgagcccagctgcagcagcacaacctggagatggtgggcgagggcacccggcagtgacgcccgccaccaccacgcagccgccgccgcccacgccggcctctgctgcccccttccccagcccttagcacagagagggacacatgcccctcccccagctgcgtttttttatagtagatttttaacaaaaaacggggagaaataatgcatttctgtggatacagtgcccaccgccctcctccacttggaaacggtatcctccctgcccatccgtctgtctgtcgcccttctcccggccctcactaagccccggcacttctagtggtctcacctggaggcaagagggaggggacagaggccctgccacgtcccgctgcctcctgctctctggaggtactgagacagggtgctgatgggaaggaggggagcctttggggggccacccggggcctggacctatgcagggaggccacgtcccaccccacctcttgtttctgggtccctgctcccctttgggggtgtgtgtgtgtgttttaattttctttatggaaaaattgacaaaaaaaaaatagagagagaggtatttaactgcaataaactggccccatgtggcccccgc

SEQ ID NO: 449329 - DNA, 1264 bp, Homo sapiens
ggcggcggcacgagcggtggccgaggcagcgggatccagacccgggtccagcatatccagtaccagttccgcacagagacaaatggaggacaggctgtgatccaaaatcccttcagcaatggtggcagtccggcggccgaggctgtcagcggggaggcacgatttgcctatttcccagcgtccagtgtgggagatactacggctgtgtccgtacagaccacagaccagagcttgcaggctggaggccagttctacgtcatgatgacgccccaggatgtgcttcagacaggaacacagaggacgatcgccccccggacacacccttactctccaaaaattgatggaaccagaacaccccgagatgagaggagaagagcccagcacaacgaagtggagcggaggcggagggacaagatcaacaactggatcgtccagctttcgaaaatcattccagactgtaacgcagacaacagcaagacgggagcgagtaaaggagggatcctgtccaaggcctgcgattacatccgggagttgcgccagaccaaccagcgcatgcaggagaccttcaaagaggccgagcggctgcagatggacaacgagctcctgaggcagcagatcgaggagctgaagaatgagaacgccctgcttcgagcccagctgcagcagcacaacctggagatggtgggcgagggcacccggcagtgacgcccgccaccaccacgcagccgccgccgcccacgccggcctctgctgcccccttccccagcccttagcacagagagggacacatgcccctcccccagctgcgtttttttatagtagatttttaacaaaaaacggggagaaataatgcatttctgtggatacagtgcccaccgccctcctccacttggaaacggtatcctccctgcccatccgtctgtctgtcgcccttctcccggccctcactaagccccggcacttctagtggtctcacctggaggcaagagggaggggacagaggccctgccacgtcccgctgcctcctgctctctggaggtactgagacagggtgctgatgggaaggaggggagcctttggggggccacccggggcctggacctatgcagggaggccacgtcccaccccacctcttgtttctgggtccctgctcccctttgggggtgtgtgtgtgtgttttaattttctttatggaaaaattgacaaaaaaaaaatagagagagaggtatttaactgcaataaactggccccatgtggcccccgc

SEQ ID NO: 449330 - DNA, 1888 bp, Homo sapiens
gcggcggcggcggcatctcctcctcacatgaccccactgtttgtccccgtgatcagcgcgagcggctcccgtatctcctccgtcccctcctgccgcgcggcgtgagcgccgggctcggggcccccccggccgcccgccccctcccctccctccctcccctcccctcccctcccccccgggccccgcgccccccccgcccccgccccccccatggacatgctggacccgggtctggatcccgctgcctcggccaccgctgctgccgccgccagccacgacaagggacccgaggcggaggagggcgtcgagctgcaggaaggcggggacggcccaggagcggaggagcagacagcggtggccatcaccagcgtccagcaggcggcgttcggcgaccacaacatccagtaccagttccgcacagagacaaatggaggacaggtgacataccgcgtagtccaggtgactgatggtcagctggacggccagggcgacacagctggcgccgtcagcgtcgtgtccaccgctgccttcgcgggggggcagcaggctgtgacccaggtgggtgtggacggggcagcccagcgcccgggccccgccgctgcctctgtgcccccaggtcctgcagcgcccttcccgctggctgtgatccaaaatcccttcagcaatggtggcagtccggcggccgaggctgtcagcggggaggcacgatttgcctatttcccagcgtccagtgtgggagatactacggctgtgtccgtacagaccacagaccagagcttgcaggctggaggccagttctacgtcatgatgacgccccaggatgtgcttcagacaggaacacagaggacgatcgccccccggacacacccttactctccaaaaattgatggaaccagaacaccccgagatgagaggagaagagcccagcacaacgaagtggagcggaggcggagggacaagatcaacaactggatcgtccagctttcgaaaatcattccagactgtaacgcagacaacagcaagacgggagcgagtaaaggagggatcctgtccaaggcctgcgattacatccgggagttgcgccagaccaaccagcgcatgcaggagaccttcaaagaggccgagcggctgcagatggacaacgagctcctgaggcagcagatcgaggagctgaagaatgagaacgccctgcttcgagcccagctgcagcagcacaacctggagatggtgggcgagggcacccggcagtgacgcccgccaccaccacgcagccgccgccgcccacgccggcctctgctgcccccttccccagcccttagcacagagagggacacatgcccctcccccagctgcgtttttttatagtagatttttaacaaaaaacggggagaaataatgcatttctgtggatacagtgcccaccgccctcctccacttggaaacggtatcctccctgcccatccgtctgtctgtcgcccttctcccggccctcactaagccccggcacttctagtggtctcacctggaggcaagagggaggggacagaggccctgccacgtcccgctgcctcctgctctctggaggtactgagacagggtgctgatgggaaggaggggagcctttggggggccacccggggcctggacctatgcagggaggccacgtcccaccccacctcttgtttctgggtccctgctcccctttgggggtgtgtgtgtgtgttttaattttctttatggaaaaattgacaaaaaaaaaatagagagagaggtatttaactgcaataaactggccccatgtggcccccgcaaaaaaaaattcttcagaaataccagaggtcaccccatcaaatcctggagggggggcccggtacccattccgcccttt

SEQ ID NO: 449331 - DNA, 1328 bp, Homo sapiens
cagggctgtttgaaacacaggacagaatgctacacgcagaaggagtccccactcctgttaattgcagagaatgcagtaaaccccaagcacagcaatgaggggacgggatggaggaacagagaaagctaagggtagcctctgccctcctactccccaggctgtgatccaaaatcccttcagcaatggtggcagtccggcggccgaggctgtcagcggggaggcacgatttgcctatttcccagcgtccagtgtgggagatactacggctgtgtccgtacagaccacagaccagagcttgcaggctggaggccagttctacgtcatgatgacgccccaggatgtgcttcagacaggaacacagaggacgatcgccccccggacacacccttactctccaaaaattgatggaaccagaacaccccgagatgagaggagaagagcccagcacaacgaagtggagcggaggcggagggacaagatcaacaactggatcgtccagctttcgaaaatcattccagactgtaacgcagacaacagcaagacgggagcgagtaaaggagggatcctgtccaaggcctgcgattacatccgggagttgcgccagaccaaccagcgcatgcaggagaccttcaaagaggccgagcggctgcagatggacaacgagctcctgaggcagcagatcgaggagctgaagaatgagaacgccctgcttcgagcccagctgcagcagcacaacctggagatggtgggcgagggcacccggcagtgacgcccgccaccaccacgcagccgccgccgcccacgccggcctctgctgcccccttccccagcccttagcacagagagggacacatgcccctcccccagctgcgtttttttatagtagatttttaacaaaaaacggggagaaataatgcatttctgtggatacagtgcccaccgccctcctccacttggaaacggtatcctccctgcccatccgtctgtctgtcgcccttctcccggccctcactaagccccggcacttctagtggtctcacctggaggcaagagggaggggacagaggccctgccacgtcccgctgcctcctgctctctggaggtactgagacagggtgctgatgggaaggaggggagcctttggggggccacccggggcctggacctatgcagggaggccacgtcccaccccacctcttgtttctgggtccctgctcccctttgggggtgtgtgtgtgtgttttaattttctttatggaaaaattgacaaaaaaaaaatagagagagaggtatttaactgcaataaactggccccatgtggcccccgc

SEQ ID NO: 449332 - DNA, 1244 bp, Homo sapiens
attaggcgcgttctgcgtctgtggggacgctcctagagagagtcggccgcagcgagggcacagacaggctcgtggacatcacgactgcaccatggacgtcagccagcaggccccggggcagagtggcatgggggcaggaatggtggttacaccaacggcatgagctcattttccaagatggatctagagcaggtcccacccacgcagaacgcgcctaatagtaggccagttctacgtcatgatgacgccccaggatgtgcttcagacaggaacacagaggacgatcgccccccggacacacccttactctccaaaaattgatggaaccagaacaccccgagatgagaggagaagagcccagcacaacgaagtggagcggaggcggagggacaagatcaacaactggatcgtccagctttcgaaaatcattccagactgtaacgcagacaacagcaagacgggagcgagtaaaggagggatcctgtccaaggcctgcgattacatccgggagttgcgccagaccaaccagcgcatgcaggagaccttcaaagaggccgagcggctgcagatggacaacgagctcctgaggcagcagatcgaggagctgaagaatgagaacgccctgcttcgagcccagctgcagcagcacaacctggagatggtgggcgagggcacccggcagtgacgcccgccaccaccacgcagccgccgccgcccacgccggcctctgctgcccccttccccagcccttagcacagagagggacacatgcccctcccccagctgcgtttttttatagtagatttttaacaaaaaacggggagaaataatgcatttctgtggatacagtgcccaccgccctcctccacttggaaacggtatcctccctgcccatccgtctgtctgtcgcccttctcccggccctcactaagccccggcacttctagtggtctcacctggaggcaagagggaggggacagaggccctgccacgtcccgctgcctcctgctctctggaggtactgagacagggtgctgatgggaaggaggggagcctttggggggccacccggggcctggacctatgcagggaggccacgtcccaccccacctcttgtttctgggtccctgctcccctttgggggtgtgtgtgtgtgttttaattttctttatggaaaaattgacaaaaaaaaaatagagagagaggtatttaactgcaataaactggccccatgtggcccccgc

SEQ ID NO: 449333 - DNA, 2186 bp, Homo sapiens
gcggcggcggcggcatctcctcctcacatgaccccactgtttgtccccgtgatcagcgcgagcggctcccgtatctcctccgtcccctcctgccgcgcggcgtgagcgccgggctcggggcccccccggccgcccgccccctcccctccctccctcccctcccctcccctcccccccgggccccgcgccccccccgcccccgccccccccatggacatgctggacccgggtctggatcccgctgcctcggccaccgctgctgccgccgccagccacgacaagggacccgaggcggaggagggcgtcgagctgcaggaaggcggggacggcccaggagcggaggagcagacagcggtggccatcaccagcgtccagcaggcggcgttcggcgaccacaacatccagtaccagttccgcacagagacaaatggaggacaggtgacataccgcgtagtccaggtgactgatggtcagctggacggccagggcgacacagctggcgccgtcagcgtcgtgtccaccgctgccttcgcgggggggcagcaggctgtgacccaggtgggtgtggacggggcagcccagcgcccgggccccgccgctgcctctgtgcccccaggtcctgcagcgcccttcccgctggctgtgatccaaaatcccttcagcaatggtggcagtccggcggccgaggctgtcagcggggaggcacgatttgcctatttcccagcgtccagtgtgggagatactacggctgtgtccgtacagaccacagaccagagcttgcaggctggaggccagttctacgtcatgatgacgccccaggatgtgcttcagacaggaacacagaggacgatcgccccccggacacacccttactctccaaaaattgatggaaccagaacaccccgagatgagaggagaagagcccagcacaacgaagtggagcggaggcggagggacaagatcaacaactggatcgtccagctttcgaaaatcattccagactgtaacgcagacaacagcaagacgggagcgagtaaaggagggatcctgtccaaggcctgcgattacatccgggagttgcgccagaccaaccagcgcatgcaggagaccttcaaagaggccgagcggctgcagatggacaacgagctcctgaggcagcagatcgaggagctgaagaatgagaacgccctgcttcgagcccagctgcagcagcacaacctggagatggtgggcgagggcacccggcagtgacgcccgccaccaccacgcagccgccgccgcccacgccggcctctgctgcccccttccccagcccttagcacagagagggacacatgcccctcccccagctgcgtttttttatagtagatttttaacaaaaaacggggagaaataatgcatttctgtggatacagtgcccaccgccctcctccacttggaaacggtatcctccctgcccatccgtctgtctgtcgcccttctcccggccctcactaagccccgctcctgctctctggaggtactgagacagggtgctgatgggaaggaggggagcctttggggggccacccggggcctggacctatgcagggaggccacgtcccaccccacctcttgtttctgggtccctgctcccctttgggggtgtgtgtgtgtgttttaattttctttatggaaaaattgacaaaaaaaaaatagagagagaggtatttaactgcaataaactggccccatgtggcccccgcaaaaaaaaaaaaaaaaaaaaaaaaaaaaaaaaaaaaaaaaggggggggcgcgcgcaaagactcatcccgcaggaggggcccacaggatcaacgccagcccccagcagttagtcggacacaaggaggggcccccatatatggggcggtgacaaattaatatgatgcgagagacggcggcgcacatactacaacaacaggcacgtcgagcaggcgagcaaacaggcacgaaacgcggaggagcacacctgcttgagagaaagaacacccacaaatcaacgcgggcgggaggggagcacccaacaggaggacaacaacaacccacccagcaagcgataataagataaacgcgcaggagaggaacacaatacaaacaacagacgcaacgggagatcatacggagggtagtcacacccacggacgcaaagatgcacagcggggatg

SEQ ID NO: 449334 - DNA, 1014 bp, Homo sapiens
tttcaaatctaatacttagcagatgcttgggcaaacagctctgcgataatacatgccccctttttttttcctcctcttgtagaaaaattgatggaaccagaacaccccgagatgagaggagaagagcccagcacaacgaagtggagcggaggcggagggacaagatcaacaactggatcgtccagctttcgaaaatcattccagactgtaacgcagacaacagcaagacgggagcgagtaaaggagggatcctgtccaaggcctgcgattacatccgggagttgcgccagaccaaccagcgcatgcaggagaccttcaaagaggccgagcggctgcagatggacaacgagctcctgaggcagcagatcgaggagctgaagaatgagaacgccctgcttcgagcccagctgcagcagcacaacctggagatggtgggcgagggcacccggcagtgacgcccgccaccaccacgcagccgccgccgcccacgccggcctctgctgcccccttccccagcccttagcacagagagggacacatgcccctcccccagctgcgtttttttatagtagatttttaacaaaaaacggggagaaataatgcatttctgtggatacagtgcccaccgccctcctccacttggaaacggtatcctccctgcccatccgtctgtctgtcgcccttctcccggccctcactaagccccggcacttctagtggtctcacctggaggcaagagggaggggacagaggccctgccacgtcccgctgcctcctgctctctggaggtactgagacagggtgctgatgggaaggaggggagcctttggggggccacccggggcctggacctatgcagggaggccacgtcccaccccacctcttgtttctgggtccctgctcccctttgggggtgtgtgtgtgtgttttaattttctttatggaaaaattgacaaaaaaaaaatagagagagaggtatttaactgcaataaactggccccatgtggcccccgc

SEQ ID NO: 449335 - DNA, 1701 bp, Homo sapiens
gcggcggcggcggcatctcctcctcacatgaccccactgtttgtccccgtgatcagcgcgagcggctcccgtatctcctccgtcccctcctgccgcgcggcgtgagcgccgggctcggggcccccccggccgcccgccccctcccctccctccctcccctcccctcccctcccccccgggccccgcgccccccccgcccccgccccccccatggacatgctggacccgggtctggatcccgctgcctcggccaccgctgctgccgccgccagccacgacaagggacccgaggcggaggagggcgtcgagctgcaggaaggcggggacggcccaggagcggaggagcagacagcggtggccatcaccagcgtccagcaggcggcgttcggcgaccacaacatccagtaccagttccgcacagagacaaatggaggacaggctgtgatccaaaatcccttcagcaatggtggcagtccggcggccgaggctgtcagcggggaggcacgatttgcctatttcccagcgtccagtgtgggagatactacggctgtgtccgtacagaccacagaccagagcttgcaggctggaggccagttctacgtcatgatgacgccccaggatgtgcttcagacaggaacacagaggacgatcgccccccggacacacccttactctccaaaaattgatggaaccagaacaccccgagatgagaggagaagagcccagcacaacgaagtggagcggaggcggagggacaagatcaacaactggatcgtccagctttcgaaaatcattccagactgtaacgcagacaacagcaagacgggagcgagtaaaggagggatcctgtccaaggcctgcgattacatccgggagttgcgccagaccaaccagcgcatgcaggagaccttcaaagaggccgagcggctgcagatggacaacgagctcctgaggcagcaggtgggtgcggggcctggagcgggtcagggcccaggagccccagatgcaaggcgctggccctcagctcccttgacctccgtcgtgtccgccagatcgaggagctgaagaatgagaacgccctgcttcgagcccagctgcagcagcacaacctggagatggtgggcgagggcacccggcagtgacgcccgccaccaccacgcagccgccgccgcccacgccggcctctgctgcccccttccccagcccttagcacagagagggacacatgcccctcccccagctgcgtttttttatagtagatttttaacaaaaaacggggagaaataatgcatttctgtggatacagtgcccaccgccctcctccacttggaaacggtatcctccctgcccatccgtctgtctgtcgcccttctcccggccctcactaagccccggcacttctagtggtctcacctggaggcaagagggaggggacagaggccctgccacgtcccgctgcctcctgctctctggaggtactgagacagggtgctgatgggaaggaggggagcctttggggggccacccggggcctggacctatgcagggaggccacgtcccaccccacctcttgtttctgggtccctgctcccctttgggggtgtgtgtgtgtgttttaattttctttatggaaaaattgacaaaaaaaaaatagagagagaggtatttaactgcaataaactggccccatgtggcccccgc

SEQ ID NO: 449336 - DNA, 1764 bp, Homo sapiens
gcggcggcggcggcatctcctcctcacatgaccccactgtttgtccccgtgatcagcgcgagcggctcccgtatctcctccgtcccctcctgccgcgcggcgtgagcgccgggctcggggcccccccggccgcccgccccctcccctccctccctcccctcccctcccctcccccccgggccccgcgccccccccgcccccgccccccccatggacatgctggacccgggtctggatcccgctgcctcggccaccgctgctgccgccgccagccacgacaagggacccgaggcggaggagggcgtcgagctgcaggaaggcggggacggcccaggagcggaggagcagacagcggtggccatcaccagcgtccagcaggcggcgttcggcgaccacaacatccagtaccagttccgcacagagacaaatggaggacaggtgacataccgcgtagtccaggtgactgatggtcagctggacggccagggcgacacagctggcgccgtcagcgtcgtgtccaccgctgccttcgcgggggggcagcaggctgtgacccaggtgggtgtggacggggcagcccagcgcccgggccccgccgctgcctctgtgcccccaggtcctgcagcgcccttcccgctggctgtgatccaaaatcccttcagcaatggtggcagtccggcggccgaggctgtcagcggggaggcacgatttgcctatttcccagcgtccagtgtgggagatactacggctgtgtccgtacagaccacagaccagagcttgcaggctggaggccagttctacgtcatgatgacgccccaggatgtgcttcagacaggaacacagaggacgatcgccccccggacacacccttactctccaaaaattgatggaaccagaacaccccgagatgagaggagaagagcccagcacaacgaagtggagcggaggcggagggacaagatcaacaactggatcgtccagctttcagtaaaggagggatcctgtccaaggcctgcgattacatccgggagttgcgccagaccaaccagcgcatgcaggagaccttcaaagaggccgagcggctgcagatggacaacgagctcctgaggcagcagatcgaggagctgaagaatgagaacgccctgcttcgagcccagctgcagcagcacaacctggagatggtgggcgagggcacccggcagtgacgcccgccaccaccacgcagccgccgccgcccacgccggcctctgctgcccccttccccagcccttagcacagagagggacacatgcccctcccccagctgcgtttttttatagtagatttttaacaaaaaacggggagaaataatgcatttctgtggatacagtgcccaccgccctcctccacttggaaacggtatcctccctgcccatccgtctgtctgtcgcccttctcccggccctcactaagccccggcacttctagtggtctcacctggaggcaagagggaggggacagaggccctgccacgtcccgctgcctcctgctctctggaggtactgagacagggtgctgatgggaaggaggggagcctttggggggccacccggggcctggacctatgcagggaggccacgtcccaccccacctcttgtttctgggtccctgctcccctttgggggtgtgtgtgtgtgttttaattttctttatggaaaaattgacaaaaaaaaaatagagagagaggtatttaactgcaataaactggccccatgtggcccccgc

SEQ ID NO: 449337 - DNA, 2497 bp, Homo sapiens
cccagtgcagggcctggaccgtgctccatagcaagcactgatcttgggctattggttttggaggaaagagggagcacaaggatggaaggggccagggaagagaggtcacggtgggagaaggagagtccgcatccatcggagggtttgtcactcaggcctgagtgggaggcactggaggcagggagaggccagtcagcagcatgcggccacagcccagagaagccagaggggtttgctggtgggtgggccccagccttttcaagggaacggcaggtctggggagctgccgatctcggggtgtgagggtaacgggcaggctgtggcccacccctccttctcaggctcactggacccctgaccggtttcatcaccattatccaaggctttgaaaagaccccctggccttcctgccacatgtgccctagctatagggcttcgttcccctccacaaatggtgcagacagcatgagccaccctggcagggggctgggggtccgtggggtaggagttgggggtagctgagcgttctttcctgtccccacggtgcctggtgctggggcttggcagccagggttgggacagcctggctttagcaggtcctgagtcaggggtctcaggctccgcagcacacagtccccaggcaggtgtcaggatgggatgtggccagagaaaggcatgtgctctgtctggggatagctgccacccagctgacacagttggcatgagattgtggagttttatggagtaaaatcacaaatctgggttttttaagtaaaaccttctatgagttgccatctctggccttcaacataggatttgggtctttcctgggtgagctggtgctttgtgggccaggccctgggagctgcaagtaccagttgggatctgccattgccctgtggaaggattttaagcaggggtgaaacatggtcagacttggattctagagatgaggaaaacaaaacaaaatcacggtgccagagtctctggggagactggagaatgcagtgcaggggccgcaggagccaaaaaggggcactggtcctgcgaagagtggctctgtccatccctgccttccagtatgtgcccactgtgaccagagctccatttctcaaaagaagccagtgatgccaattaccatgagaaatttccttatttttaactgtcgattaaaatttgtacaagtatggtggggcaggcctgcaaaatgatctccaagtgcctggcctttgatgcccgtcctaaaagcatgtgtggcactggagggcccacgtttctttgttcctcttgagaagctggggtgggggccggctgggctcagggtgcggcccctcacttcccagggctgtggtctcggtggggcctgcactgttcctgggtgtcctcgggctgagcctctgccctgtgaggacggccgctcaggcatgagccgtcagcgaacccgtggctgtgactctgttttccgcagttggagcggaggcggagggacaagatcaacaactggatcgtccagctttcgaaaatcattccagactgtaacgcagacaacagcaagacgggagcggtgagcaccccggaccctcagtgtctgcggtggtcccggcccccgacccttgcatgcagaaagtccaacagccatggggctcgggagtcatccctggggtggaggccggtgggcggtgcctgccctaaggctcctggtcccctcgccccccagagagtaaaggagggatcctgtccaaggcctgcgattacatccgggagttgcgccagaccaaccagcgcatgcaggagaccttcaaagaggccgagcggctgcagatggacaacgagctcctgaggcagcagatcgaggagctgaagaatgagaacgccctgcttcgagcccagctgcagcagcacaacctggagatggtgggcgagggcacccggcagtgacgcccgccaccaccacgcagccgccgccgcccacgccggcctctgctgcccccttccccagcccttagcacagagagggacacatgcccctcccccagctgcgtttttttatagtagatttttaacaaaaaacggggagaaataatgcatttctgtggatacagtgcccaccgccctcctccacttggaaacggtatcctccctgcccatccgtctgtctgtcgcccttctcccggccctcactaagccccggcacttctagtggtctcacctggaggcaagagggaggggacagaggccctgccacgtcccgctgcctcctgctctctggaggtactgagacagggtgctgatgggaaggaggggagcctttggggggccacccggggcctggacctatgcagggaggccacgtcccaccccacctcttgtttctgggtccctgctcccctttgggggtgtgtgtgtgtgttttaattttctttatggaaaaattgacaaaaaaaaaatagagagagaggtatttaactgcaataaactggccccatgtggcccccgc

SEQ ID NO: 449338 - DNA, 1164 bp, Homo sapiens
gcggcggcggcggcatctcctcctcacatgaccccactgtttgtccccgtgatcagcgcgagcggctcccgtatctcctccgtcccctcctgccgcgcggcgtgagcgccgggctcggggcccccccggccgcccgccccctcccctccctccctcccctcccctcccctcccccccgggccccgcgccccccccgcccccgccccccccatggacatgctggacccgggtctggatcccgctgcctcggccaccgctgctgccgccgccagccacgacaagggacccgaggcggaggagggcgtcgagctgcaggaaggcggggacggcccaggagcggaggagcagacagcggtggccatcaccagcgtccagcaggcggcgttcggcgaccacaacatccagtaccagttccgcacagagacaaatggaggacaggtgacataccgcgtagtccaggtgactgatggtcagctggacggccagggcgacacagctggcgccgtcagcgtcgtgtccaccgctgccttcgcgggggggcagcaggctgtgacccaggtgggtgtggacggggcagcccagcgcccgggccccgccgctgcctctgtgcccccaggtcctgcagcgcccttcccgctggccggcctctgctgcccccttccccagcccttagcacagagagggacacatgcccctcccccagctgcgtttttttatagtagatttttaacaaaaaacggggagaaataatgcatttctgtggatacagtgcccaccgccctcctccacttggaaacggtatcctccctgcccatccgtctgtctgtcgcccttctcccggccctcactaagccccggcacttctagtggtctcacctggaggcaagagggaggggacagaggccctgccacgtcccgctgcctcctgctctctggaggtactgagacagggtgctgatgggaaggaggggagcctttggggggccacccggggcctggacctatgcagggaggccacgtcccaccccacctcttgtttctgggtccctgctcccctttgggggtgtgtgtgtgtgttttaattttctttatggaaaaattgacaaaaaaaaaatagagagagaggtatttaactgcaataaactggccccatgtggcccccgc

SEQ ID NO: 449339 - DNA, 819 bp, Homo sapiens
actttgcatccttcaatccaatcaaattttgacactcaatattaaccatcacagggttgtagagaggattcagaaatggtgctggtaaagcaaacagcaatagtgcttgggacacatgaaaccaataaagggtcatctgcctgaagctgctacctcagcatcatgcaatagcatcatcctcatctcctattgtcatcattaccattgccgttgtcttcatatgacatcatcactattagcaccgttgttttgtttcttctagctccagtagtctatgattccacaccacctcacattgttctttgaccataaatctgatttcctcagactgctagaattcttttcttgaatccccatggtggggaatgttctgcttatggcgaggtccaatgtccaagtttaatttcacccacctcactgggccatgatgttctggatgctgcgtggcaagtcagagatgtatttccccccttcagaaccaggtagaccgcagtttctgaaggcttaaggattcagagtggtttaagagcagtaaaccatggcccatcatcattgcataaggaagcaatgaaaggtgttggagtgtggatatgagtcatggaactctggggctatgttgctgccaggccctcaatggattggatggtgtccacctgcataattgaaggtggatcttctttactcagtcgactgattcaaatgctgatctcttccagcaacaccctcacagacacaccagaaataatgttttaccagctatctgtgtatcccttagcccagtaaaactgacacatacaattaactatcaaaaagccaata

SEQ ID NO: 449340 - DNA, 987 bp, Homo sapiens
actttgcatccttcaatccaatcaaattttgacactcaatattaaccatcacagggttgtagagaggattcagaaatggtgctggtaaagcaaacagcaatagtgcttgggacacatgaaaccaataaagggtcatctgcctgaagctgctacctcagcatcatgcaatagcatcatcctcatctcctattgtcatcattaccattgccgttgtcttcatatgacatcatcactattagcaccgttgttttgtttcttctagctccagtagtctatgattccacaccacctcacattgttctttgaccataaatctgatttcctcagactgctagaattcttttcttgaatccccatggtggggaatgttctgcttatggcgaggtccaatgtccaagtttaatttcacccacctcactgggccatgatgttctggatgctgcgtggcaagtcagagatgtatttccccccttcagaaccaggtagaccgcagtttctgaaggcttaaggattcagagtggtttaagagcagtaaaccatggcccatcatcattgcataaggaagcaatgaaaggcccagtccacaggctcatgtctggggccccgggggagtgagggcagcaaagaagaacagacaatgggctccacgcagacctctgcaacacactggagcctgagcccaatgctgcacgacccatcaactacaagaaggagggagaaggtgtatgaccccccctacacccgcaactctcccatgatctccatggacacccaaagatatacactgcagcacccagcaaagacgtggtacttggtgttggagtgtggatatgagtcatggaactctggggctatgttgctgccaggtaagaatctgttctaggaaggataaaatcaatggacatagaaaggcagactggagaagggaaagggagctgagccctgctgatagagtaaacctctggattaaactatgcctgaagccca

SEQ ID NO: 449341 - DNA, 506 bp, Homo sapiens
gaaatacatatatttctttatagagagttatatagaaagagatttattatgagcgattggctcatgtgactatggagactgagatgtcccatgctctgctgtctgcaagctggaggcccaggaaagcgggtggtgtagttcgacaatctgaagttgaaggccccaaaaccaggggtgccaatggtgtaagtcccactttgagtacaaaggcttgagagccagaatcactgatgttcgagggcagaagaagacagatgtcccagctcaagcagagagaaaattctccctttctctgactttttcgtctattcaggccctcaatggattggatggtgtccacctgcataattgaaggtggatcttctttactcagtcgactgattcaaatgctgatctcttccagcaacaccctcacagacacaccagaaataatgttttaccagctatctgtgtatcccttagcccagtaaaactgacacatacaattaactatcaaaaagccaata

SEQ ID NO: 449342 - DNA, 6147 bp, Homo sapiens
gcgggcgcgcgtcccgtccaggtccggagtaaccgccgccgccgccgccaaagctcgccaacatggcggacctggaggctgtgctggccgatgtcagttacctgatggccatggagaagagcaaggcgaccccggccgcccgcgccagcaagaggatcgtcctgccggagcccagtatccggagtgtgatgcagaagtaccttgcagagagaaatgaaataacctttgacaagattttcaatcagaaaattggtttcttgctatttaaagatttttgtttgaatgaaattaatgaagctgtacctcaggtgaagttttatgaagagataaaggaatatgaaaaacttgataatgaggaagaccgcctttgcagaagtcgacaaatttatgatgcctacatcatgaaggaacttctttcctgttcacatcctttctcaaagcaagctgtagaacacgtacaaagtcatttatccaagaaacaagtgacatcaactctttttcagccatacatagaagaaatttgtgaaagccttcgaggtgacatttttcaaaaatttatggaaagtgacaagttcactagattttgtcagtggaaaaacgttgaattaaatatccatttgaccatgaatgagttcagtgtgcataggattattggacgaggaggattcggggaagtttatggttgcaggaaagcagacactggaaaaatgtatgcaatgaaatgcttagataagaagaggatcaaaatgaaacaaggagaaacattagccttaaatgaaagaatcatgttgtctcttgtcagcacaggagactgtcctttcattgtatgtatgacctatgccttccataccccagataaactctgcttcatcctggatctgatgaacgggggcgatttgcactaccacctttcacaacacggtgtgttctctgagaaggagatgcggttttatgccactgaaatcattctgggtctggaacacatgcacaatcggtttgttgtctacagagatttgaagccagcaaatattctcttggatgaacatggacacgcaagaatatcagatcttggtcttgcctgcgatttttccaaaaagaagcctcatgcgagtgttggcacccatgggtacatggctcccgaggtgctgcagaaggggacggcctatgacagcagtgccgactggttctccctgggctgcatgcttttcaaacttctgagaggtcacagccctttcagacaacataaaaccaaagacaagcatgaaattgaccgaatgacactcaccgtgaatgtggaacttccagacaccttctctcctgaactgaagtcccttttggagggcttgcttcagcgagacgttagcaagcggctgggctgtcacggaggcggctcacaggaagtaaaagagcacagctttttcaaaggtgttgactggcagcatgtctacttacaaaagtacccaccacccttgattcctccccggggagaagtcaatgctgctgatgcctttgatattggctcatttgatgaagaggataccaaagggattaagctacttgattgcgaccaagaactctacaagaacttccctttggtcatctctgaacgctggcagcaagaagtaacggaaacagtttatgaagcagtaaatgcagacacagataaaatcgaggccaggaagagagctaaaaataagcaacttggccacgaagaagattacgctctggggaaggactgtattatgcacgggtacatgctgaaactgggaaacccatttctgactcagtggcagcgtcgctatttttacctctttccaaatagacttgaatggagaggagagggagagtcccggcaaaatttactgacaatggaacagattctctctgtggaagaaactcaaattaaagacaaaaaatgcattttgttcagaataaaaggagggaaacaatttgtcttgcaatgtgagagtgatccagagtttgtgcagtggaagaaagagttgaacgaaaccttcaaggaggcccagcggctattgcgtcgtgccccgaagttcctcaacaaacctcggtcaggtactgtggagctcccaaagccatccctctgtcacagaaacagcaacggcctctagcacccagaaacagggagggtcctcgaggaggacacaccagggtctcagccttttggggtgaacgaggatgaggcatctgatctattcgctaccgggactcctccaggctcccgagaggagtcgggacccttcggcttggggtcagctcagctccctgccttgtcacatttgtctgcattagaaactactgaagaaataaaagttctttttctttgctacacactttggtacctatgaacctagaacttgaagtgactcctacttatcacgtaaatttttatgtctgatatcaaacacatcttagactccccagaatggaatttaaagatgttcagtgttgggtaacagattgccctaagcattgccacatattctgtctagtcactgctgattttctatgtctttgctccatactgctgggggatgggagagccacagtgtgtttcttttgtgcacttcgcaactgacttcttgtcctggggttaaaagttgaagatattttctgatgatattaaaagttgaagatatttctgcacttgggccctcctctgggagccgcacccacatgactgccctgcctctgaccagtctgttccggggccccctcagccaggtgggaatgacggacacgtactatccaagtgtatgggattaactaatcattgaaggcattcatccgtccatcattggaaagatttacagtgattctgaaggacaggccgtggagttttaggtttcaggggcaagagcagttttcaaaagtctttgagtccagtgtgcacgagtcgacaagcagtacctggcatgcaggagcactcatgggtgagtccgtctcaggtctcgacaattagcagttgtgtgacagtcattctggttccttctgcctgaccctgggagacatatcagtaatggatgtacaaaagcaggtctgttttatgtcttagtataatttcagatgaattgtattgaaaaaatgctgaggaatgaatgtgtcaaaatgggttaactgtgtatattgactttcatgtcgtcatgcatctgtcatgaatgaatgatactttgcactgggctgtacgacagtgaggaccttagggcatgaagcctttttcctggtcccagcagcatctgccctgtgaagtttgttttctcccactgcctccaggccccactgatacccccaaatagatgctgggttatgagaaccagcgaaatcccccatgtcatcagtcttaaaaaaaaaattttacaaatccacgtatttgtcccattcttggagtagttttagtgtatgtctttacattaactactaacagtataaataacttgacatcgtaattgtctgcatcctgtccttgatatttttagcagttccaaatctttgtttttgtatttgtttgctgtgttcatgggcaaagtaagtactttttaatgcagttattttgagagtttggaagataattaccaaaagggtccattatttcataagagttactttgcaaaaaaaaaaatgtgggtttttttttttgtctatctcaactactagttggggtttaaattaacatacattttctactatctgttatttccagtgtgggaggagggatgtactacttacatgcattctccttatttaaaaaggaagaatagtattcaaattctgtgtgtgtgtgtgtgcactttgcagcccccgaggtggagaggcagtgtctggatcactgtgaatgcattgccccattggtcagttggggacactgttacaaatccactgaagtcctggtaaaactgtcaagagtaacaggcctcttctgttctaccctgctcacttccacggtgagttaccagcctgggcaacacagcaagaccccatctctacaaaaaaaatttttttaagtaattaaccgtttaaattttttcctaaagatttaacatgatttttccctcctatgtaaagtttactggagagacttgaattacttaaattcatgttaatatgatttttttttaatccaggtcacattttaacaaagtttattatgaaacaaatgaaatttgaactctaaaatggtactccttggcttcctcaagtcacaatgaactttatattttctttgtccttaaggactaagatagttgttttatttcagccgaatcacagagataaccactcctgcaggcccccacagctggcccaaaggggctgtctttctgacctggctgtgttagcactgattgagaaatgcaggctcccaaattttaaattgcctttattaaaaacacaaactacagaaaatgggttaagagtatacgcatttcatcaaacacatataggggaaaaaatccttcaatttagagttaaataactcagctttgtatagtagagttagcgctccagtatctaacaatctcagaatcatctctgaaaactggtaactatgcttccatttttaattttgtcctaaatatcagatgtctttgatgtaagggtagggaatggagaaatattttcaattgtgtatttgtattacaaagaacttgaaatttactttcttagttgattatattaaatgatgtatatattatatgtggtttataagctcaacactggccatttttttagttttattgttaaatggtatttttctatgtttaattataatagatctggctttttctggatagcataaagatcactgaactatatatatataagaaacaagagttctattttagcacaaaggcattttatattatttattgaatccataagtttgttttcgtcaaaaacattccatattatttctgctcctttttatttgtatagtttgttatttaaagaaatggcagtccttcctgttcttaatacaataaaattgaaataatgcacctagtaatgtggccgacatctcttctcaccaccatggactgttttcaacaacagttgatcttctggtctgtgctgagaggcgcatgcatgtctttcgtcacgtcgggcagcacacctgctgtgaaatactgctttcatctacctcttcagaaggcttcttgcttgttgacaagtaccgcaaaggctttattctggactggctatctcataaaaggatttctgtaagactttgcagtgtcattccctcagaacctaggtttgtttctaaagccacggtattgtccaggagcccctgtgtgtggggcaggtagctatccctcccatgtcattagtaatcctttaggatttaaggtacaactggacagcatcattccttccccttattgtgccaaatccccaccatcagccttgccattgccttaagatttgattattgcacccaattacctaaccactaaacagaaaggccaccttcactctttgaaaaaggcaagctgtgcttagaaacactgcttttaagagtagcacatttgagtgtgactttttccccccttcactatttcaaaatggttttgaaatggggtcttaaaggtaagcgccctcatacatgactgaaactttgtgagaggtcttatatttgaatggacccttaatgatttatgtgaaatagaatgaagtcctgtctctgtgagagaacgtgcctcctcactcatttgtctctgtctgttttcatagccatcaatatagtaacatatttactatattcttgaatacccttgaagaaagaaatccgttttctattgtgcattgctatacgaagtgaagccagtaaactagatactgtaaatctagatattgtacctagacaaaatatcattggttctatctctttttgtatctgttgtgccagggaaggtttataatcccttctcagtatacactcactagtgcacgtctgaaatagtatcccacgggagatgctgctccacgtctgaggtcacctgccctgtgtggggcacaccaccgtcagcaccaccgtttttacagttactttggagctgctagactggttttctgtgttggtaaattgcctatataaatctgaataaaaaggatctgtacaaagaaaacaaa

SEQ ID NO: 449343 - DNA, 4918 bp, Homo sapiens
gcgggcgcgcgtcccgtccaggtccggagtaaccgccgccgccgccgccaaagctcgccaacatggcggacctggaggctgtgctggccgatgtcagttacctgatggccatggagaagagcaaggcgaccccggccgcccgcgccagcaagaggatcgtcctgccggagcccagtatccggagtgtgatgcagaagtaccttgcagagagaaatgaaataacctttgacaagattttcaatcagaaaattggtttcttgctatttaaagatttttgtttgaatgaaattaatgaagctgtacctcaggtgaagttttatgaagagataaaggaatatgaaaaacttgataatgaggaagaccgcctttgcagaagtcgacaaatttatgatgcctacatcatgaaggaacttctttcctgttcacatcctttctcaaagcaagctgtagaacacgtacaaagtcatttatccaagaaacaagtgacatcaactctttttcagccatacatagaagaaatttgtgaaagccttcgaggtgacatttttcaaaaatttatggaaagtgacaagttcactagattttgtcagtggaaaaacgttgaattaaatatccatttgaccatgaatgagttcagtgtgcataggattattggacgaggaggattcggggaagtttatggttgcaggaaagcagacactggaaaaatgtatgcaatgaaatgcttagataagaagaggatcaaaatgaaacaaggagaaacattagccttaaatgaaagaatcatgttgtctcttgtcagcacaggagactgtcctttcattgtatgtatgacctatgccttccataccccagataaactctgcttcatcctggatctgatgaacgggggcgatttgcactaccacctttcacaacacggtgtgttctctgagaaggagatgcggttttatgccactgaaatcattctgggtctggaacacatgcacaatcggtttgttgtctacagagatttgaagccagcaaatattctcttggatgaacatggacacgcaagaatatcagatcttggtcttgcctgcgatttttccaaaaagaagcctcatgcgagtgttggcacccatgggtacatggctcccgaggtgctgcagaaggggacggcctatgacagcagtgccgactggttctccctgggctgcatgcttttcaaacttctgagaggtcacagccctttcagacaacataaaaccaaagacaagcatgaaattgaccgaatgacactcaccgtgaatgtggaacttccagacaccttctctcctgaactgaagtcccttttggagggcttgcttcagcgagacgttagcaagcggctgggctgtcacggaggcggctcacaggaagtaaaagagcacagctttttcaaaggtgttgactggcagcatgtctacttacaaaagtacccaccacccttgattcctccccggggagaagtcaatgctgctgatgcctttgatattggctcatttgatgaagaggataccaaagggattaagctacttgattgcgaccaagaactctacaagaacttccctttggtcatctctgaacgctggcagcaagaagtaacggaaacagtttatgaagcagtaaatgcagacacagataaaatcgaggccaggaagagagctaaaaataagcaacttggccacgaagaagattacgctctggggaaggactgtattatgcacgggtacatgctgaaactgggaaacccatttctgactcagtggcagcgtcgctatttttacctctttccaaatagacttgaatggagaggagagggagagtcccggcaaaatttactgacaatggaacagattctctctgtggaagaaactcaaattaaagacaaaaaatgcattttgttcagaataaaaggagggaaacaatttgtcttgcaatgtgagagtgatccagagtttgtgcagtggaagaaagagttgaacgaaaccttcaaggaggcccagcggctattgcgtcgtgccccgaagttcctcaacaaacctcggtcaggtactgtggagctcccaaagccatccctctgtcacagaaacagcaacggcctctagcacccagaaacagggagggtcctcgaggaggacacaccagggtctcagccttttggggtgaacgaggatgaggcatctgatctattcgctaccgggactcctccaggctcccgagaggagtcgggacccttcggcttggggtcagctcagctccctgccttgtcacatttgtctgcattagaaactactgaagaaataaaagttctttttctttgctacacactttggtacctatgaacctagaacttgaagtgactcctacttatcacgtaaatttttatgtctgatatcaaacacatcttagactccccagaatggaatttaaagatgttcagtgttgggtaacagattgccctaagcattgccacatattctgtctagtcactgctgattttctatgtctttgctccatactgctgggggatgggagagccacagtgtgtttcttttgtgcacttcgcaactgacttcttgtcctggggttaaaagttgaagatattttctgatgatattaaaagttgaagatatttctgcacttgggccctcctctgggagccgcacccacatgactgccctgcctctgaccagtctgttccggggccccctcagccaggtgggaatgacggacacgtactatccaagtgtatgggattaactaatcattgaaggcattcatccgtccatcattggaaagatttacagtgattctgaaggacaggccgtggagttttaggtttcaggggcaagagcagttttcaaaagtctttgagtccagtgtgcacgagtcgacaagcagtacctggcatgcaggagcactcatgggtgagtccgtctcaggtctcgacaattagcagttgtgtgacagtcattctggttccttctgcctgaccctgggagacatatcagtaatggatgtacaaaagcaggtctgttttatgtcttagtataatttcagatgaattgtattgaaaaaatgctgaggaatgaatgtgtcaaaatgggttaactgtgtatattgactttcatgtcgtcatgcatctgtcatgaatgaatgatactttgcactgggctgtacgacagtgaggaccttagggcatgaagcctttttcctggtcccagcagcatctgccctgtgaagtttgttttctcccactgcctccaggccccactgatacccccaaatagatgctgggttatgagaaccagcgaaatcccccatgtcatcagtcttaaaaaaaaaattttacaaatccacgtatttgtcccattcttggagtagttttagtgtatgtctttacattaactactaacagtataaataacttgacatcgtaattgtctgcatcctgtccttgatatttttagcagttccaaatctttgtttttgtatttgtttgctgtgttcatgggcaaagtaagtactttttaatgcagttattttgagagtttggaagataattaccaaaagggtccattatttcataagagttactttgcaaaaaaaaaaatgtgggtttttttttttgtctatctcaactactagttggggtttaaattaacatacattttctactatctgttatttccagtgtgggaggagggatgtactacttacatgcattctccttatttaaaaaggaagaatagtattcaaattctgttgaaacacacacacacacacacacacacacacacacacactccagaagcagaaaagccattgttcttaaagagtgaatgtcttcccagccctggttaattatagctgtgactgatgccgttcccgtctgcatctcaagctcataggttctcagcatgtgcagttgaggatgcgctgggcctcatgcctgttctagatctccaggataaagggcctgctgttgactccaccagggtctgggcttagcgtctaatatctcgtacctagggcgtgagctgcacaaacgtgttcagaaagattattcaactttcccatacttgttctaaaattgagctgatccgcatctctttcaaaaactagaatttctgctctaagaatagaacataaggctccactcccttttagaaaagatatatgaattggaaaatgctctgaaagtccttttgcttcaaacaaaagtgtaaacttttacacttccccaactcacatttgatttgtaatgatatggttgagaagtacatctagatgtcatttattaaaagtgctttgtaagactagattgagctgtttctgagggcggtcaccagttgtgttggggtctggtttgagtgccttctgccaaaatgttgtgatggaggtgtttctgcgaccagacacaggataccgctgtgtctgcacccggttgcctgcatggccagaggaaaagtcagttggattaaacatcatggtatacttggctgtgtttttttttaattttttaatattttgggatagggcctcgctctgtcacccaggctggagaacagtgggatgatcatggtcactgcggccttgaattcctaggttcaggcaatcctcccacgtcggcctcctgagtagctaggactgcaggtgcatgccacctttcctggctaattaatttgggtagagatggggtcttgaactcttaggctcaagtgatcctccttccttggcctcccaaaatgctggaattagagatgtaagccaccatgcccagccatagtacttggatgttttagaaggttttccaagtattacataattcctagatgttcacccttattacactccaactattaaaaaggtcaaaattcagcctatttttttt

SEQ ID NO: 449344 - DNA, 6804 bp, Homo sapiens
agcggggcgtgcgtggcgtggagtccagaatgagaagaaggaaagcggggccggttccttcaggacccgcctcagggggcaccgcggcggcttggggaccacttggagccccgtcctggggagaaaacagctcacgtctatggccctgactgcttaggcgggagctgcgtgcagctcagcttctccggggcatttttttctacacggttattgctctgtcacccaggctggagttcagcagtgcgatcttggctcattgcagccttgaacctcccgggctcaagtgatcctccctcctcaacctcccaagtagctgggactacagctgggtgagctatgaacaggccaactgcaagggcgagcagtttgtgtttgagaagggcgagtacgcccactgggactggtggaccagcagccagaggacagactcagcagcctgaggcccatcaaagtggacagccaagagcacaagatcatcctctatgaaaaccccaacttcaccgggaagaagatggaaatcatagatgacgatgtacccagcttccacgcccatggctaccaggagaaggtgtcatctgtgtgggtgcggagtggcatgtgggttggctactagtaccctggctaccgtgggctgcagtacctgctggagaagggagactacaaggacagcagcgactttggggcccgtcaccctcaggtgttggagtgtggatatgagtcatggaactctggggctatgttgctgccagtatccggagtgtgatgcagaagtaccttgcagagagaaatgaaataacctttgacaagattttcaatcagaaaattggtttcttgctatttaaagatttttgtttgaatgaaattaatgaagctgtacctcaggtgaagttttatgaagagataaaggaatatgaaaaacttgataatgaggaagaccgcctttgcagaagtcgacaaatttatgatgcctacatcatgaaggaacttctttcctgttcacatcctttctcaaagcaagctgtagaacacgaaagaagttccttcatgatgtaggcatcataaaggaacttctttcctgttcacatcctttctcaaagcaagctgtagaacacgtacaaagtcatttatccaagaaacaagtgacatcaactctttttcagccatacatagaagaaatttgtgaaagccttcgaggtgacatttttcaaaaatttatggaaagtgacaagttcactagattttgtcagtggaaaaacgttgaattaaatatccatttgaccatgaatgagttcagtgtgcataggattattggacgaggaggattcggggaagtttatggttgcaggaaagcagacactggaaaaatgtatgcaatgaaatgcttagataagaagaggatcaaaatgaaacaaggagaaacattagccttaaatgaaagaatcatgttgtctcttgtcagcacaggagactgtcctttcattgtatgtatgacctatgccttccataccccagataaactctgcttcatcctggatctgatgaacgggggcgatttgcactaccacctttcacaacacggtgtgttctctgagaaggagatgcggttttatgccactgaaatcattctgggtctggaacacatgcacaatcggtttgttgtctacagagatttgaagccagcaaatattctcttggatgaacatggacacgcaagaatatcagatcttggtcttgcctgcgatttttccaaaaagaagcctcatgcgagtgttggcacccatgggtacatggctcccgaggtgctgcagaaggggacggcctatgacagcagtgccgactggttctccctgggctgcatgcttttcaaacttctgagaggtcacagccctttcagacaacataaaaccaaagacaagcatgaaattgaccgaatgacactcaccgtgaatgtggaacttccagacaccttctctcctgaactgaagtcccttttggagggcttgcttcagcgagacgttagcaagcggctgggctgtcacggaggcggctcacaggaagtaaaagagcacagctttttcaaaggtgttgactggcagcatgtctacttacaaaagtacccaccacccttgattcctccccggggagaagtcaatgctgctgatgcctttgatattggctcatttgatgaagaggataccaaagggattaagctacttgattgcgaccaagaactctacaagaacttccctttggtcatctctgaacgctggcagcaagaagtaacggaaacagtttatgaagcagtaaatgcagacacagataaaatcgaggccaggaagagagctaaaaataagcaacttggccacgaagaagattacgctctggggaaggactgtattatgcacgggtacatgctgaaactgggaaacccatttctgactcagtggcagcgtcgctatttttacctctttccaaatagacttgaatggagaggagagggagagtcccggcaaaatttactgacaatggaacagattctctctgtggaagaaactcaaattaaagacaaaaaatgcattttgttcagaataaaaggagggaaacaatttgtcttgcaatgtgagagtgatccagagtttgtgcagtggaagaaagagttgaacgaaaccttcaaggaggcccagcggctattgcgtcgtgccccgaagttcctcaacaaacctcggtcaggtactgtggagctcccaaagccatccctctgtcacagaaacagcaacggcctctagcacccagaaacagggagggtcctcgaggaggacacaccagggtctcagccttttggggtgaacgaggatgaggcatctgatctattcgctaccgggactcctccaggctcccgagaggagtcgggacccttcggcttggggtcagctcagctccctgccttgtcacatttgtctgcattagaaactactgaagaaataaaagttctttttctttgctacacactttggtacctatgaacctagaacttgaagtgactcctacttatcacgtaaatttttatgtctgatatcaaacacatcttagactccccagaatggaatttaaagatgttcagtgttgggtaacagattgccctaagcattgccacatattctgtctagtcactgctgattttctatgtctttgctccatactgctgggggatgggagagccacagtgtgtttcttttgtgcacttcgcaactgacttcttgtcctggggttaaaagttgaagatattttctgatgatattaaaagttgaagatatttctgcacttgggccctcctctgggagccgcacccacatgactgccctgcctctgaccagtctgttccggggccccctcagccaggtgggaatgacggacacgtactatccaagtgtatgggattaactaatcattgaaggcattcatccgtccatcattggaaagatttacagtgattctgaaggacaggccgtggagttttaggtttcaggggcaagagcagttttcaaaagtctttgagtccagtgtgcacgagtcgacaagcagtacctggcatgcaggagcactcatgggtgagtccgtctcaggtctcgacaattagcagttgtgtgacagtcattctggttccttctgcctgaccctgggagacatatcagtaatggatgtacaaaagcaggtctgttttatgtcttagtataatttcagatgaattgtattgaaaaaatgctgaggaatgaatgtgtcaaaatgggttaactgtgtatattgactttcatgtcgtcatgcatctgtcatgaatgaatgatactttgcactgggctgtacgacagtgaggaccttagggcatgaagcctttttcctggtcccagcagcatctgccctgtgaagtttgttttctcccactgcctccaggccccactgatacccccaaatagatgctgggttatgagaaccagcgaaatcccccatgtcatcagtcttaaaaaaaaaattttacaaatccacgtatttgtcccattcttggagtagttttagtgtatgtctttacattaactactaacagtataaataacttgacatcgtaattgtctgcatcctgtccttgatatttttagcagttccaaatctttgtttttgtatttgtttgctgtgttcatgggcaaagtaagtactttttaatgcagttattttgagagtttggaagataattaccaaaagggtccattatttcataagagttactttgcaaaaaaaaaaatgtgggtttttttttttgtctatctcaactactagttggggtttaaattaacatacattttctactatctgttatttccagtgtgggaggagggatgtactacttacatgcattctccttatttaaaaaggaagaatagtattcaaattctgtgtgtgtgtgtgtgcactttgcagcccccgaggtggagaggcagtgtctggatcactgtgaatgcattgccccattggtcagttggggacactgttacaaatccactgaagtcctggtaaaactgtcaagagtaacaggcctcttctgttctaccctgctcacttccacggtgagttaccagcctgggcaacacagcaagaccccatctctacaaaaaaaatttttttaagtaattaaccgtttaaattttttcctaaagatttaacatgatttttccctcctatgtaaagtttactggagagacttgaattacttaaattcatgttaatatgatttttttttaatccaggtcacattttaacaaagtttattatgaaacaaatgaaatttgaactctaaaatggtactccttggcttcctcaagtcacaatgaactttatattttctttgtccttaaggactaagatagttgttttatttcagccgaatcacagagataaccactcctgcaggcccccacagctggcccaaaggggctgtctttctgacctggctgtgttagcactgattgagaaatgcaggctcccaaattttaaattgcctttattaaaaacacaaactacagaaaatgggttaagagtatacgcatttcatcaaacacatataggggaaaaaatccttcaatttagagttaaataactcagctttgtatagtagagttagcgctccagtatctaacaatctcagaatcatctctgaaaactggtaactatgcttccatttttaattttgtcctaaatatcagatgtctttgatgtaagggtagggaatggagaaatattttcaattgtgtatttgtattacaaagaacttgaaatttactttcttagttgattatattaaatgatgtatatattatatgtggtttataagctcaacactggccatttttttagttttattgttaaatggtatttttctatgtttaattataatagatctggctttttctggatagcataaagatcactgaactatatatatataagaaacaagagttctattttagcacaaaggcattttatattatttattgaatccataagtttgttttcgtcaaaaacattccatattatttctgctcctttttatttgtatagtttgttatttaaagaaatggcagtccttcctgttcttaatacaataaaattgaaataatgcacctagtaatgtggccgacatctcttctcaccaccatggactgttttcaacaacagttgatcttctggtctgtgctgagaggcgcatgcatgtctttcgtcacgtcgggcagcacacctgctgtgaaatactgctttcatctacctcttcagaaggcttcttgcttgttgacaagtaccgcaaaggctttattctggactggctatctcataaaaggatttctgtaagactttgcagtgtcattccctcagaacctaggtttgtttctaaagccacggtattgtccaggagcccctgtgtgtggggcaggtagctatccctcccatgtcattagtaatcctttaggatttaaggtacaactggacagcatcattccttccccttattgtgccaaatccccaccatcagccttgccattgccttaagatttgattattgcacccaattacctaaccactaaacagaaaggccaccttcactctttgaaaaaggcaagctgtgcttagaaacactgcttttaagagtagcacatttgagtgtgactttttccccccttcactatttcaaaatggttttgaaatggggtcttaaaggtaagcgccctcatacatgactgaaactttgtgagaggtcttatatttgaatggacccttaatgatttatgtgaaatagaatgaagtcctgtctctgtgagagaacgtgcctcctcactcatttgtctctgtctgttttcatagccatcaatatagtaacatatttactatattcttgaatacccttgaagaaagaaatccgttttctattgtgcattgctatacgaagtgaagccagtaaactagatactgtaaatctagatattgtacctagacaaaatatcattggttctatctctttttgtatctgttgtgccagggaaggtttataatcccttctcagtatacactcactagtgcacgtctgaaatagtatcccacgggagatgctgctccacgtctgaggtcacctgccctgtgtggggcacaccaccgtcagcaccaccgtttttacagttactttggagctgctagactggttttctgtgttggtaaattgcctatataaatctgaataaaaaggatctgtacaaagaaaacaaa

SEQ ID NO: 449345 - DNA, 6681 bp, Homo sapiens
actttgcatccttcaatccaatcaaattttgacactcaatattaaccatcacagggttgtagagaggattcagaaatggtgctggtaaagcaaacagcaatagtgcttgggacacatgaaaccaataaagggtcatctgcctgaagctgctacctcagcatcatgcaatagcatcatcctcatctcctattgtcatcattaccattgccgttgtcttcatatgacatcatcactattagcaccgttgttttgtttcttctagctccagtagtctatgattccacaccacctcacattgttctttgaccataaatctgatttcctcagactgctagaattcttttcttgaatccccatggtggggaatgttctgcttatggcgaggtccaatgtccaagtttaatttcacccacctcactgggccatgatgttctggatgctgcgtggcaagtcagagatgtatttccccccttcagaaccaggtagaccgcagtttctgaaggcttaaggattcagagtggtttaagagcagtaaaccatggcccatcatcattgcataaggaagcaatgaaaggtgttggagtgtggatatgagtcatggaactctggggctatgttgctgccagtatccggagtgtgatgcagaagtaccttgcagagagaaatgaaataacctttgacaagattttcaatcagaaaattggtttcttgctatttaaagatttttgtttgaatgaaattaatgaagctgtacctcaggtgaagttttatgaagagataaaggaatatgaaaaacttgataatgaggaagaccgcctttgcagaagtcgacaaatttatgatgcctacatcatgaaggaacttctttcctgttcacatcctttctcaaagcaagctgtagaacacgaaagaagttccttcatgatgtaggcatcataaaggaacttctttcctgttcacatcctttctcaaagcaagctgtagaacacgtacaaagtcatttatccaagaaacaagtgacatcaactctttttcagccatacatagaagaaatttgtgaaagccttcgaggtgacatttttcaaaaatttatggaaagtgacaagttcactagattttgtcagtggaaaaacgttgaattaaatatccatttgaccatgaatgagttcagtgtgcataggattattggacgaggaggattcggggaagtttatggttgcaggaaagcagacactggaaaaatgtatgcaatgaaatgcttagataagaagaggatcaaaatgaaacaaggagaaacattagccttaaatgaaagaatcatgttgtctcttgtcagcacaggagactgtcctttcattgtatgtatgacctatgccttccataccccagataaactctgcttcatcctggatctgatgaacgggggcgatttgcactaccacctttcacaacacggtgtgttctctgagaaggagatgcggttttatgccactgaaatcattctgggtctggaacacatgcacaatcggtttgttgtctacagagatttgaagccagcaaatattctcttggatgaacatggacacgcaagaatatcagatcttggtcttgcctgcgatttttccaaaaagaagcctcatgcgagtgttggcacccatgggtacatggctcccgaggtgctgcagaaggggacggcctatgacagcagtgccgactggttctccctgggctgcatgcttttcaaacttctgagaggtcacagccctttcagacaacataaaaccaaagacaagcatgaaattgaccgaatgacactcaccgtgaatgtggaacttccagacaccttctctcctgaactgaagtcccttttggagggcttgcttcagcgagacgttagcaagcggctgggctgtcacggaggcggctcacaggaagtaaaagagcacagctttttcaaaggtgttgactggcagcatgtctacttacaaaagtacccaccacccttgattcctccccggggagaagtcaatgctgctgatgcctttgatattggctcatttgatgaagaggataccaaagggattaagctacttgattgcgaccaagaactctacaagaacttccctttggtcatctctgaacgctggcagcaagaagtaacggaaacagtttatgaagcagtaaatgcagacacagataaaatcgaggccaggaagagagctaaaaataagcaacttggccacgaagaagattacgctctggggaaggactgtattatgcacgggtacatgctgaaactgggaaacccatttctgactcagtggcagcgtcgctatttttacctctttccaaatagacttgaatggagaggagagggagagtcccggcaaaatttactgacaatggaacagattctctctgtggaagaaactcaaattaaagacaaaaaatgcattttgttcagaataaaaggagggaaacaatttgtcttgcaatgtgagagtgatccagagtttgtgcagtggaagaaagagttgaacgaaaccttcaaggaggcccagcggctattgcgtcgtgccccgaagttcctcaacaaacctcggtcaggtactgtggagctcccaaagccatccctctgtcacagaaacagcaacggcctctagcacccagaaacagggagggtcctcgaggaggacacaccagggtctcagccttttggggtgaacgaggatgaggcatctgatctattcgctaccgggactcctccaggctcccgagaggagtcgggacccttcggcttggggtcagctcagctccctgccttgtcacatttgtctgcattagaaactactgaagaaataaaagttctttttctttgctacacactttggtacctatgaacctagaacttgaagtgactcctacttatcacgtaaatttttatgtctgatatcaaacacatcttagactccccagaatggaatttaaagatgttcagtgttgggtaacagattgccctaagcattgccacatattctgtctagtcactgctgattttctatgtctttgctccatactgctgggggatgggagagccacagtgtgtttcttttgtgcacttcgcaactgacttcttgtcctggggttaaaagttgaagatattttctgatgatattaaaagttgaagatatttctgcacttgggccctcctctgggagccgcacccacatgactgccctgcctctgaccagtctgttccggggccccctcagccaggtgggaatgacggacacgtactatccaagtgtatgggattaactaatcattgaaggcattcatccgtccatcattggaaagatttacagtgattctgaaggacaggccgtggagttttaggtttcaggggcaagagcagttttcaaaagtctttgagtccagtgtgcacgagtcgacaagcagtacctggcatgcaggagcactcatgggtgagtccgtctcaggtctcgacaattagcagttgtgtgacagtcattctggttccttctgcctgaccctgggagacatatcagtaatggatgtacaaaagcaggtctgttttatgtcttagtataatttcagatgaattgtattgaaaaaatgctgaggaatgaatgtgtcaaaatgggttaactgtgtatattgactttcatgtcgtcatgcatctgtcatgaatgaatgatactttgcactgggctgtacgacagtgaggaccttagggcatgaagcctttttcctggtcccagcagcatctgccctgtgaagtttgttttctcccactgcctccaggccccactgatacccccaaatagatgctgggttatgagaaccagcgaaatcccccatgtcatcagtcttaaaaaaaaaattttacaaatccacgtatttgtcccattcttggagtagttttagtgtatgtctttacattaactactaacagtataaataacttgacatcgtaattgtctgcatcctgtccttgatatttttagcagttccaaatctttgtttttgtatttgtttgctgtgttcatgggcaaagtaagtactttttaatgcagttattttgagagtttggaagataattaccaaaagggtccattatttcataagagttactttgcaaaaaaaaaaatgtgggtttttttttttgtctatctcaactactagttggggtttaaattaacatacattttctactatctgttatttccagtgtgggaggagggatgtactacttacatgcattctccttatttaaaaaggaagaatagtattcaaattctgtgtgtgtgtgtgtgcactttgcagcccccgaggtggagaggcagtgtctggatcactgtgaatgcattgccccattggtcagttggggacactgttacaaatccactgaagtcctggtaaaactgtcaagagtaacaggcctcttctgttctaccctgctcacttccacggtgagttaccagcctgggcaacacagcaagaccccatctctacaaaaaaaatttttttaagtaattaaccgtttaaattttttcctaaagatttaacatgatttttccctcctatgtaaagtttactggagagacttgaattacttaaattcatgttaatatgatttttttttaatccaggtcacattttaacaaagtttattatgaaacaaatgaaatttgaactctaaaatggtactccttggcttcctcaagtcacaatgaactttatattttctttgtccttaaggactaagatagttgttttatttcagccgaatcacagagataaccactcctgcaggcccccacagctggcccaaaggggctgtctttctgacctggctgtgttagcactgattgagaaatgcaggctcccaaattttaaattgcctttattaaaaacacaaactacagaaaatgggttaagagtatacgcatttcatcaaacacatataggggaaaaaatccttcaatttagagttaaataactcagctttgtatagtagagttagcgctccagtatctaacaatctcagaatcatctctgaaaactggtaactatgcttccatttttaattttgtcctaaatatcagatgtctttgatgtaagggtagggaatggagaaatattttcaattgtgtatttgtattacaaagaacttgaaatttactttcttagttgattatattaaatgatgtatatattatatgtggtttataagctcaacactggccatttttttagttttattgttaaatggtatttttctatgtttaattataatagatctggctttttctggatagcataaagatcactgaactatatatatataagaaacaagagttctattttagcacaaaggcattttatattatttattgaatccataagtttgttttcgtcaaaaacattccatattatttctgctcctttttatttgtatagtttgttatttaaagaaatggcagtccttcctgttcttaatacaataaaattgaaataatgcacctagtaatgtggccgacatctcttctcaccaccatggactgttttcaacaacagttgatcttctggtctgtgctgagaggcgcatgcatgtctttcgtcacgtcgggcagcacacctgctgtgaaatactgctttcatctacctcttcagaaggcttcttgcttgttgacaagtaccgcaaaggctttattctggactggctatctcataaaaggatttctgtaagactttgcagtgtcattccctcagaacctaggtttgtttctaaagccacggtattgtccaggagcccctgtgtgtggggcaggtagctatccctcccatgtcattagtaatcctttaggatttaaggtacaactggacagcatcattccttccccttattgtgccaaatccccaccatcagccttgccattgccttaagatttgattattgcacccaattacctaaccactaaacagaaaggccaccttcactctttgaaaaaggcaagctgtgcttagaaacactgcttttaagagtagcacatttgagtgtgactttttccccccttcactatttcaaaatggttttgaaatggggtcttaaaggtaagcgccctcatacatgactgaaactttgtgagaggtcttatatttgaatggacccttaatgatttatgtgaaatagaatgaagtcctgtctctgtgagagaacgtgcctcctcactcatttgtctctgtctgttttcatagccatcaatatagtaacatatttactatattcttgaatacccttgaagaaagaaatccgttttctattgtgcattgctatacgaagtgaagccagtaaactagatactgtaaatctagatattgtacctagacaaaatatcattggttctatctctttttgtatctgttgtgccagggaaggtttataatcccttctcagtatacactcactagtgcacgtctgaaatagtatcccacgggagatgctgctccacgtctgaggtcacctgccctgtgtggggcacaccaccgtcagcaccaccgtttttacagttactttggagctgctagactggttttctgtgttggtaaattgcctatataaatctgaataaaaaggatctgtacaaagaaaacaaa

SEQ ID NO: 449346 - DNA, 6070 bp, Homo sapiens
gcgggcgcgcgtcccgtccaggtccggagtaaccgccgccgccgccgccaaagctcgccaacatggcggacctggaggctgtgctggccgatgtcagttacctgatggccatggagaagagcaaggcgaccccggccgcccgcgccagcaagaggatcgtcctgccggagcccaggtttcttgctatttaaagatttttgtttgaatgaaattaatgaagctgtacctcaggtgaagttttatgaagagataaaggaatatgaaaaacttgataatgaggaagaccgcctttgcagaagtcgacaaatttatgatgcctacatcatgaaggaacttctttcctgttcacatcctttctcaaagcaagctgtagaacacgtacaaagtcatttatccaagaaacaagtgacatcaactctttttcagccatacatagaagaaatttgtgaaagccttcgaggtgacatttttcaaaaatttatggaaagtgacaagttcactagattttgtcagtggaaaaacgttgaattaaatatccatttgaccatgaatgagttcagtgtgcataggattattggacgaggaggattcggggaagtttatggttgcaggaaagcagacactggaaaaatgtatgcaatgaaatgcttagataagaagaggatcaaaatgaaacaaggagaaacattagccttaaatgaaagaatcatgttgtctcttgtcagcacaggagactgtcctttcattgtatgtatgacctatgccttccataccccagataaactctgcttcatcctggatctgatgaacgggggcgatttgcactaccacctttcacaacacggtgtgttctctgagaaggagatgcggttttatgccactgaaatcattctgggtctggaacacatgcacaatcggtttgttgtctacagagatttgaagccagcaaatattctcttggatgaacatggacacgcaagaatatcagatcttggtcttgcctgcgatttttccaaaaagaagcctcatgcgagtgttggcacccatgggtacatggctcccgaggtgctgcagaaggggacggcctatgacagcagtgccgactggttctccctgggctgcatgcttttcaaacttctgagaggtcacagccctttcagacaacataaaaccaaagacaagcatgaaattgaccgaatgacactcaccgtgaatgtggaacttccagacaccttctctcctgaactgaagtcccttttggagggcttgcttcagcgagacgttagcaagcggctgggctgtcacggaggcggctcacaggaagtaaaagagcacagctttttcaaaggtgttgactggcagcatgtctacttacaaaagtacccaccacccttgattcctccccggggagaagtcaatgctgctgatgcctttgatattggctcatttgatgaagaggataccaaagggattaagctacttgattgcgaccaagaactctacaagaacttccctttggtcatctctgaacgctggcagcaagaagtaacggaaacagtttatgaagcagtaaatgcagacacagataaaatcgaggccaggaagagagctaaaaataagcaacttggccacgaagaagattacgctctggggaaggactgtattatgcacgggtacatgctgaaactgggaaacccatttctgactcagtggcagcgtcgctatttttacctctttccaaatagacttgaatggagaggagagggagagtcccggcaaaatttactgacaatggaacagattctctctgtggaagaaactcaaattaaagacaaaaaatgcattttgttcagaataaaaggagggaaacaatttgtcttgcaatgtgagagtgatccagagtttgtgcagtggaagaaagagttgaacgaaaccttcaaggaggcccagcggctattgcgtcgtgccccgaagttcctcaacaaacctcggtcaggtactgtggagctcccaaagccatccctctgtcacagaaacagcaacggcctctagcacccagaaacagggagggtcctcgaggaggacacaccagggtctcagccttttggggtgaacgaggatgaggcatctgatctattcgctaccgggactcctccaggctcccgagaggagtcgggacccttcggcttggggtcagctcagctccctgccttgtcacatttgtctgcattagaaactactgaagaaataaaagttctttttctttgctacacactttggtacctatgaacctagaacttgaagtgactcctacttatcacgtaaatttttatgtctgatatcaaacacatcttagactccccagaatggaatttaaagatgttcagtgttgggtaacagattgccctaagcattgccacatattctgtctagtcactgctgattttctatgtctttgctccatactgctgggggatgggagagccacagtgtgtttcttttgtgcacttcgcaactgacttcttgtcctggggttaaaagttgaagatattttctgatgatattaaaagttgaagatatttctgcacttgggccctcctctgggagccgcacccacatgactgccctgcctctgaccagtctgttccggggccccctcagccaggtgggaatgacggacacgtactatccaagtgtatgggattaactaatcattgaaggcattcatccgtccatcattggaaagatttacagtgattctgaaggacaggccgtggagttttaggtttcaggggcaagagcagttttcaaaagtctttgagtccagtgtgcacgagtcgacaagcagtacctggcatgcaggagcactcatgggtgagtccgtctcaggtctcgacaattagcagttgtgtgacagtcattctggttccttctgcctgaccctgggagacatatcagtaatggatgtacaaaagcaggtctgttttatgtcttagtataatttcagatgaattgtattgaaaaaatgctgaggaatgaatgtgtcaaaatgggttaactgtgtatattgactttcatgtcgtcatgcatctgtcatgaatgaatgatactttgcactgggctgtacgacagtgaggaccttagggcatgaagcctttttcctggtcccagcagcatctgccctgtgaagtttgttttctcccactgcctccaggccccactgatacccccaaatagatgctgggttatgagaaccagcgaaatcccccatgtcatcagtcttaaaaaaaaaattttacaaatccacgtatttgtcccattcttggagtagttttagtgtatgtctttacattaactactaacagtataaataacttgacatcgtaattgtctgcatcctgtccttgatatttttagcagttccaaatctttgtttttgtatttgtttgctgtgttcatgggcaaagtaagtactttttaatgcagttattttgagagtttggaagataattaccaaaagggtccattatttcataagagttactttgcaaaaaaaaaaatgtgggtttttttttttgtctatctcaactactagttggggtttaaattaacatacattttctactatctgttatttccagtgtgggaggagggatgtactacttacatgcattctccttatttaaaaaggaagaatagtattcaaattctgtgtgtgtgtgtgtgcactttgcagcccccgaggtggagaggcagtgtctggatcactgtgaatgcattgccccattggtcagttggggacactgttacaaatccactgaagtcctggtaaaactgtcaagagtaacaggcctcttctgttctaccctgctcacttccacggtgagttaccagcctgggcaacacagcaagaccccatctctacaaaaaaaatttttttaagtaattaaccgtttaaattttttcctaaagatttaacatgatttttccctcctatgtaaagtttactggagagacttgaattacttaaattcatgttaatatgatttttttttaatccaggtcacattttaacaaagtttattatgaaacaaatgaaatttgaactctaaaatggtactccttggcttcctcaagtcacaatgaactttatattttctttgtccttaaggactaagatagttgttttatttcagccgaatcacagagataaccactcctgcaggcccccacagctggcccaaaggggctgtctttctgacctggctgtgttagcactgattgagaaatgcaggctcccaaattttaaattgcctttattaaaaacacaaactacagaaaatgggttaagagtatacgcatttcatcaaacacatataggggaaaaaatccttcaatttagagttaaataactcagctttgtatagtagagttagcgctccagtatctaacaatctcagaatcatctctgaaaactggtaactatgcttccatttttaattttgtcctaaatatcagatgtctttgatgtaagggtagggaatggagaaatattttcaattgtgtatttgtattacaaagaacttgaaatttactttcttagttgattatattaaatgatgtatatattatatgtggtttataagctcaacactggccatttttttagttttattgttaaatggtatttttctatgtttaattataatagatctggctttttctggatagcataaagatcactgaactatatatatataagaaacaagagttctattttagcacaaaggcattttatattatttattgaatccataagtttgttttcgtcaaaaacattccatattatttctgctcctttttatttgtatagtttgttatttaaagaaatggcagtccttcctgttcttaatacaataaaattgaaataatgcacctagtaatgtggccgacatctcttctcaccaccatggactgttttcaacaacagttgatcttctggtctgtgctgagaggcgcatgcatgtctttcgtcacgtcgggcagcacacctgctgtgaaatactgctttcatctacctcttcagaaggcttcttgcttgttgacaagtaccgcaaaggctttattctggactggctatctcataaaaggatttctgtaagactttgcagtgtcattccctcagaacctaggtttgtttctaaagccacggtattgtccaggagcccctgtgtgtggggcaggtagctatccctcccatgtcattagtaatcctttaggatttaaggtacaactggacagcatcattccttccccttattgtgccaaatccccaccatcagccttgccattgccttaagatttgattattgcacccaattacctaaccactaaacagaaaggccaccttcactctttgaaaaaggcaagctgtgcttagaaacactgcttttaagagtagcacatttgagtgtgactttttccccccttcactatttcaaaatggttttgaaatggggtcttaaaggtaagcgccctcatacatgactgaaactttgtgagaggtcttatatttgaatggacccttaatgatttatgtgaaatagaatgaagtcctgtctctgtgagagaacgtgcctcctcactcatttgtctctgtctgttttcatagccatcaatatagtaacatatttactatattcttgaatacccttgaagaaagaaatccgttttctattgtgcattgctatacgaagtgaagccagtaaactagatactgtaaatctagatattgtacctagacaaaatatcattggttctatctctttttgtatctgttgtgccagggaaggtttataatcccttctcagtatacactcactagtgcacgtctgaaatagtatcccacgggagatgctgctccacgtctgaggtcacctgccctgtgtggggcacaccaccgtcagcaccaccgtttttacagttactttggagctgctagactggttttctgtgttggtaaattgcctatataaatctgaataaaaaggatctgtacaaagaaaacaaa

SEQ ID NO: 449347 - DNA, 5565 bp, Homo sapiens
gagagacatgaaggccaggccagaccgtgaagggcatcgccggccgatcttgaggagcctaaatgatctgactgcagttagaaaccaagtgttttaactagagagagaccataatcagccttgcagttcacaaagattgctccggctgcagtgtggaggattttcttcaacaacgacttcatggtcctgttttatcacagtttttttatggcgagttcctgcaaaatgactgtcctttcattgtatgtatgacctatgccttccataccccagataaactctgcttcatcctggatctgatgaacgggggcgatttgcactaccacctttcacaacacggtgtgttctctgagaaggagatgcggttttatgccactgaaatcattctgggtctggaacacatgcacaatcggtttgttgtctacagagatttgaagccagcaaatattctcttggatgaacatggacacgcaagaatatcagatcttggtcttgcctgcgatttttccaaaaagaagcctcatgcgagtgttggcacccatgggtacatggctcccgaggtgctgcagaaggggacggcctatgacagcagtgccgactggttctccctgggctgcatgcttttcaaacttctgagaggtcacagccctttcagacaacataaaaccaaagacaagcatgaaattgaccgaatgacactcaccgtgaatgtggaacttccagacaccttctctcctgaactgaagtcccttttggagggcttgcttcagcgagacgttagcaagcggctgggctgtcacggaggcggctcacaggaagtaaaagagcacagctttttcaaaggtgttgactggcagcatgtctacttacaaaagtacccaccacccttgattcctccccggggagaagtcaatgctgctgatgcctttgatattggctcatttgatgaagaggataccaaagggattaagctacttgattgcgaccaagaactctacaagaacttccctttggtcatctctgaacgctggcagcaagaagtaacggaaacagtttatgaagcagtaaatgcagacacagataaaatcgaggccaggaagagagctaaaaataagcaacttggccacgaagaagattacgctctggggaaggactgtattatgcacgggtacatgctgaaactgggaaacccatttctgactcagtggcagcgtcgctatttttacctctttccaaatagacttgaatggagaggagagggagagtcccggcaaaatttactgacaatggaacagattctctctgtggaagaaactcaaattaaagacaaaaaatgcattttgttcagaataaaaggagggaaacaatttgtcttgcaatgtgagagtgatccagagtttgtgcagtggaagaaagagttgaacgaaaccttcaaggaggcccagcggctattgcgtcgtgccccgaagttcctcaacaaacctcggtcaggtactgtggagctcccaaagccatccctctgtcacagaaacagcaacggcctctagcacccagaaacagggagggtcctcgaggaggacacaccagggtctcagccttttggggtgaacgaggatgaggcatctgatctattcgctaccgggactcctccaggctcccgagaggagtcgggacccttcggcttggggtcagctcagctccctgccttgtcacatttgtctgcattagaaactactgaagaaataaaagttctttttctttgctacacactttggtacctatgaacctagaacttgaagtgactcctacttatcacgtaaatttttatgtctgatatcaaacacatcttagactccccagaatggaatttaaagatgttcagtgttgggtaacagattgccctaagcattgccacatattctgtctagtcactgctgattttctatgtctttgctccatactgctgggggatgggagagccacagtgtgtttcttttgtgcacttcgcaactgacttcttgtcctggggttaaaagttgaagatattttctgatgatattaaaagttgaagatatttctgcacttgggccctcctctgggagccgcacccacatgactgccctgcctctgaccagtctgttccggggccccctcagccaggtgggaatgacggacacgtactatccaagtgtatgggattaactaatcattgaaggcattcatccgtccatcattggaaagatttacagtgattctgaaggacaggccgtggagttttaggtttcaggggcaagagcagttttcaaaagtctttgagtccagtgtgcacgagtcgacaagcagtacctggcatgcaggagcactcatgggtgagtccgtctcaggtctcgacaattagcagttgtgtgacagtcattctggttccttctgcctgaccctgggagacatatcagtaatggatgtacaaaagcaggtctgttttatgtcttagtataatttcagatgaattgtattgaaaaaatgctgaggaatgaatgtgtcaaaatgggttaactgtgtatattgactttcatgtcgtcatgcatctgtcatgaatgaatgatactttgcactgggctgtacgacagtgaggaccttagggcatgaagcctttttcctggtcccagcagcatctgccctgtgaagtttgttttctcccactgcctccaggccccactgatacccccaaatagatgctgggttatgagaaccagcgaaatcccccatgtcatcagtcttaaaaaaaaaattttacaaatccacgtatttgtcccattcttggagtagttttagtgtatgtctttacattaactactaacagtataaataacttgacatcgtaattgtctgcatcctgtccttgatatttttagcagttccaaatctttgtttttgtatttgtttgctgtgttcatgggcaaagtaagtactttttaatgcagttattttgagagtttggaagataattaccaaaagggtccattatttcataagagttactttgcaaaaaaaaaaatgtgggtttttttttttgtctatctcaactactagttggggtttaaattaacatacattttctactatctgttatttccagtgtgggaggagggatgtactacttacatgcattctccttatttaaaaaggaagaatagtattcaaattctgtgtgtgtgtgtgtgcactttgcagcccccgaggtggagaggcagtgtctggatcactgtgaatgcattgccccattggtcagttggggacactgttacaaatccactgaagtcctggtaaaactgtcaagagtaacaggcctcttctgttctaccctgctcacttccacggtgagttaccagcctgggcaacacagcaagaccccatctctacaaaaaaaatttttttaagtaattaaccgtttaaattttttcctaaagatttaacatgatttttccctcctatgtaaagtttactggagagacttgaattacttaaattcatgttaatatgatttttttttaatccaggtcacattttaacaaagtttattatgaaacaaatgaaatttgaactctaaaatggtactccttggcttcctcaagtcacaatgaactttatattttctttgtccttaaggactaagatagttgttttatttcagccgaatcacagagataaccactcctgcaggcccccacagctggcccaaaggggctgtctttctgacctggctgtgttagcactgattgagaaatgcaggctcccaaattttaaattgcctttattaaaaacacaaactacagaaaatgggttaagagtatacgcatttcatcaaacacatataggggaaaaaatccttcaatttagagttaaataactcagctttgtatagtagagttagcgctccagtatctaacaatctcagaatcatctctgaaaactggtaactatgcttccatttttaattttgtcctaaatatcagatgtctttgatgtaagggtagggaatggagaaatattttcaattgtgtatttgtattacaaagaacttgaaatttactttcttagttgattatattaaatgatgtatatattatatgtggtttataagctcaacactggccatttttttagttttattgttaaatggtatttttctatgtttaattataatagatctggctttttctggatagcataaagatcactgaactatatatatataagaaacaagagttctattttagcacaaaggcattttatattatttattgaatccataagtttgttttcgtcaaaaacattccatattatttctgctcctttttatttgtatagtttgttatttaaagaaatggcagtccttcctgttcttaatacaataaaattgaaataatgcacctagtaatgtggccgacatctcttctcaccaccatggactgttttcaacaacagttgatcttctggtctgtgctgagaggcgcatgcatgtctttcgtcacgtcgggcagcacacctgctgtgaaatactgctttcatctacctcttcagaaggcttcttgcttgttgacaagtaccgcaaaggctttattctggactggctatctcataaaaggatttctgtaagactttgcagtgtcattccctcagaacctaggtttgtttctaaagccacggtattgtccaggagcccctgtgtgtggggcaggtagctatccctcccatgtcattagtaatcctttaggatttaaggtacaactggacagcatcattccttccccttattgtgccaaatccccaccatcagccttgccattgccttaagatttgattattgcacccaattacctaaccactaaacagaaaggccaccttcactctttgaaaaaggcaagctgtgcttagaaacactgcttttaagagtagcacatttgagtgtgactttttccccccttcactatttcaaaatggttttgaaatggggtcttaaaggtaagcgccctcatacatgactgaaactttgtgagaggtcttatatttgaatggacccttaatgatttatgtgaaatagaatgaagtcctgtctctgtgagagaacgtgcctcctcactcatttgtctctgtctgttttcatagccatcaatatagtaacatatttactatattcttgaatacccttgaagaaagaaatccgttttctattgtgcattgctatacgaagtgaagccagtaaactagatactgtaaatctagatattgtacctagacaaaatatcattggttctatctctttttgtatctgttgtgccagggaaggtttataatcccttctcagtatacactcactagtgcacgtctgaaatagtatcccacgggagatgctgctccacgtctgaggtcacctgccctgtgtggggcacaccaccgtcagcaccaccgtttttacagttactttggagctgctagactggttttctgtgttggtaaattgcctatataaatctgaataaaaaggatctgtacaaagaaaacaaa

SEQ ID NO: 449348 - DNA, 2347 bp, Homo sapiens
gcgggcgcgcgtcccgtccaggtccggagtaaccgccgccgccgccgccaaagctcgccaacatggcggacctggaggctgtgctggccgatgtcagttacctgatggccatggagaagagcaaggcgaccccggccgcccgcgccagcaagaggatcgtcctgccggagcccagtatccggagtgtgatgcagaagtaccttgcagagagaaatgaaataacctttgacaagattttcaatcagaaaattggtttcttgctatttaaagatttttgtttgaatgaaattaatgaagctgtacctcaggtgaagttttatgaagagataaaggaatatgaaaaacttgataatgaggaagaccgcctttgcagaagtcgacaaatttatgatgcctacatcatgaaggaacttctttcctgttcacatcctttctcaaagcaagctgtagaacacgtacaaagtcatttatccaagaaacaagtgacatcaactctttttcagccatacatagaagaaatttgtgaaagccttcgaggtgacatttttcaaaaatttatggaaagtgacaagttcactagattttgtcagtggaaaaacgttgaattaaatatccatttgaccatgaatgagttcagtgtgcataggattattggacgaggaggattcggggaagtttatggttgcaggaaagcagacactggaaaaatgtatgcaatgaaatgcttagataagaagaggatcaaaatgaaacaaggagaaacattagccttaaatgaaagaatcatgttgtctcttgtcagcacaggagactgtcctttcattgtatgtatgacctatgccttccataccccagataaactctgcttcatcctggatctgatgaacgggggcgatttgcactaccacctttcacaacacggtgtgttctctgagaaggagatgcggttttatgccactgaaatcattctgggtctggaacacatgcacaatcggtttgttgtctacagagatttgaagccagcaaatattctcttggatgaacatggacacgcaagaatatcagatcttggtcttgcctgcgatttttccaaaaagaagcctcatgcgagtgttggcacccatgggtacatggctcccgaggtgctgcagaaggggacggcctatgacagcagtgccgactggttctccctgggctgcatgcttttcaaacttctgagaggtcacagccctttcagacaacataaaaccaaagacaagcatgaaattgaccgaatgacactcaccgtgaatgtggaacttccagacaccttctctcctgaactgaagtcccttttggagggcttgcttcagcgagacgttagcaagcggctgggctgtcacggaggcggctcacaggaagtaaaagagcacagctttttcaaaggtgttgactggcagcatgtctacttacaaaagtacccaccacccttgattcctccccggggagaagtcaatgctgctgatgcctttgatattggctcatttgatgaagaggataccaaagggattaagctacttgattgcgaccaagaactctacaagaacttccctttggtcatctctgaacgctggcagcaagaagtaacggaaacagtttatgaagcagtaaatgcagacacagataaaatcgaggccaggaagagagctaaaaataagcaacttggccacgaagaagattacgctctggggaaggactgtattatgcacgggtacatgctgaaactgggaaacccatttctgactcagtggcagcgtcgctatttttacctctttccaaatagacttgaatggagaggagagggagagtcccggcaaaatttactgacaatggaacagattctctctgtggaagaaactcaaattaaagacaaaaaatgcattttgttcagaataaaaggagggaaacaatttgtcttgcaatgtgagagtgatccagagtttgtgcagtggaagaaagagttgaacgaaaccttcaaggaggcccagcggctattgcgtcgtgccccgaagttcctcaacaaacctcggtcaggtactgtggagctcccaaagccatccctctgtcacagaaacagcaacggcctctagcacccagaaacagggagggtcctcgaggaggacacaccagggtctcagccttttggggtgaacgaggatgaggcatctgatctattcgctaccgggactcctccaggctcccgagaggagtcgggacccttcggcttggggtcagctcagctccctgccttgtcacatttgtctgcattagaaactactgaagaaataaaagttctttttctttgcta

SEQ ID NO: 449349 - DNA, 1398 bp, Homo sapiens
agcggggcgtgcgtggcgtggagtccagaatgagaagaaggaaagcggggccggttccttcaggacccgcctcagggggcaccgcggcggcttggggaccacttggagccccgtcctggggagaaaacagctcacgtctatggccctgactgcttaggcgggagctgcgtgcagctcagcttctccggggcatttttttctacacgctgggtgagctatgaacaggccaactgcaagggcgagcagtttgtgtttgagaagggcgagtacgcccactgggactggtggaccagcagccagaggacagactcagcagcctgaggcccatcaaagtggacagccaagagcacaagatcatcctctatgaaaaccccaacttcaccgggaagaagatggaaatcatagatgacgatgtacccagcttccacgcccatggctaccaggagaaggtgtcatctgtgtgggtgcggagtggcatgtgggttggctactagtaccctggctaccgtgggctgcagtacctgctggagaagggagactacaaggacagcagcgactttggggcccgtcaccctcagggacatggatgaagctggaaaccatcattctcagcaaactaacacagaagcagaaaaccaaacaccacatgttctcactcataagtgggagttgaacagtgagaacacatggacacaaggaggggaacatcacacaccgaggcctgtcagggagtgggggacaagagggagagagagcattgggacaaataccaaatgcatgcacggcttaaaacctagatgacaggttgatgggtgcagcaaaccaccatggcacatgtatacctgtgtaacaaacctgcacgttctgcacatgtatcccagaacttataataaaaaagaaaccagtaagtgctcaataaatgttactaacatctatttcttcattcattcttcaaccattacccactgagtgcctatttggatacttggcttagtacctgggtgatgaaataatctacagcaaacccccatggcatgagtttataacaaacctgcacatgtatccccgaacttaaaagttaaaaaaacagaatctgcacaagtctaagctacttccttgaggaaaagactcgagctgagatctcaaagaagagtagaagttgcaggggtaaagaggccaaagaagagtgtctcagatgagagcggcacgtgcaaaggccctgtggtgggaggagcctggtagctctgagaaactccacaaaggcacggtggtggctggaatgcagagatgtgggggcacattgaaaaccttgttaaagtgcttaaaatgattatcataaaggtagaaactaataagtgctaaataaatgttattctcgtccgtttctccaataaatat

SEQ ID NO: 449350 - DNA, 1854 bp, Homo sapiens
  misc_feature (1107)..(1107): n is a, c, g, or t
  misc_feature (1156)..(1156): n is a, c, g, or t
  misc_feature (1194)..(1194): n is a, c, g, or t
  misc_feature (1226)..(1226): n is a, c, g, or t
agcggggcgtgcgtggcgtggagtccagaatgagaagaaggaaagcggggccggttccttcaggacccgcctcagggggcaccgcggcggcttggggaccacttggagccccgtcctggggagaaaacagctcacgtctatggccctgactgcttaggcgggagctgcgtgcagctcagcttctccggggcatttttttctacacggttattgctctgtcacccaggctggagttcagcagtgcgatcttggctcattgcagccttgaacctcccgggctcaagtgatcctccctcctcaacctcccaagtagctgggactacagctgggtgagctatgaacaggccaactgcaagggcgagcagtttgtgtttgagaagggcgagtacgcccactgggactggtggaccagcagccagaggacagactcagcagcctgaggcccatcaaagtggacagccaagagcacaagatcatcctctatgaaaaccccaacttcaccgggaagaagatggaaatcatagatgacgatgtacccagcttccacgcccatggctaccaggagaaggtgtcatctgtgtgggtgcggagtggcatgtgggttggctactagtaccctggctaccgtgggctgcagtacctgctggagaagggagactacaaggacagcagcgactttggggcccgtcaccctcagatgttacagaagcacagagaggttaagtaacttgcccagtgctgcacggaaactaagtggtggagctgggatccgaacccaagctatctgactgtattgacaaacaaaagatgcatcaaaacccaaaagggcgagcgaggtattatggccattactggggagttagaaatttcttttcactggagagataaatggtgtttctgttccagattgtgaactggccatgcctggctctaggctttgggacagttcaactctgttccacatgtctgattctggatcccatgctgaagaggcagctgctgtataaggcatgttctttttgtgatgatggcagaagtttgagagacaagtcacactatgcaaacatggctcaagattctatcatacaacatctgctcgcattcaantggccaaagtcagtcaaggtcagtggggcagaaaagaatatactgcccnaaaaggaaggaaaaagtgagtgaacatgtgttgaacantactccaatttattatcggtaggtcaaggaanctttgcagcctgagtctcgtatggtgattctcaaacctcagcaaacatagatatcatctggggaatctggttcaaaatgcagacctgagactattctcctgcagaatatctgagtcagtggatttgggtggggcccaggaatctgcactttaaacagccactccctggggttattctgatactgatggtccagggtccacactttgagaatcactggtttaatggttctgagcatgtgctgagggctcagagatgcaagttcaaatcccagctccaccctagctttgaccttggtaagtagctttgcttttcagagcctcagttttctcctctaaaaaactgagttggccgggcgctgtggctcatgcctgtaatcccagcactttgggaggctgaggtgggcggatcatctgaggttgtgagtttgagaccagcctgaccaacatggagaaaccctgtctctactaaaaatacaaaattagccgggcatggtgatgcatgcctgtagtcccagctactagggaggctgaggcaggagaatcacttcaacctgggaggcggaggttgcggtgagctgagatcacgccattgcactccagcctgggcaacaagagcgaaactctgtctc

SEQ ID NO: 449351 - DNA, 1450 bp, Homo sapiens
agcggggcgtgcgtggcgtggagtccagaatgagaagaaggaaagcggggccggttccttcaggacccgcctcagggggcaccgcggcggcttggggaccacttggagccccgtcctggggagaaaacagctcacgtctatggccctgactgcttaggcgggagctgcgtgcagctcagcttctccggggcatttttttctacacggttattgctctgtcacccaggctggagttcagcagtgcgatcttggctcattgcagccttgaacctcccgggctcaagtgatcctccctcctcaacctcccaagtagctgggactacagctgggtgagctatgaacaggccaactgcaagggcgagcagtttgtgtttgagaagggcgagtacgcccactgggactggtggaccagcagccagaggacagactcagcagcctgaggcccatcaaagtggacagccaagagcacaagatcatcctctatgaaaaccccaacttcaccgggaagaagatggaaatcatagatgacgatgtacccagcttccacgcccatggctaccaggagaaggtgtcatctgtgtgggtgcggagtggcatgtgggttggctactagtaccctggctaccgtgggctgcagtacctgctggagaagggagactacaaggacagcagcgactttggggcccgtcaccctcagggacatggatgaagctggaaaccatcattctcagcaaactaacacagaagcagaaaaccaaacaccacatgttctcactcataagtgggagttgaacagtgagaacacatggacacaaggaggggaacatcacacaccgaggcctgtcagggagtgggggacaagagggagagagagcattgggacaaataccaaatgcatgcacggcttaaaacctagatgacaggttgatgggtgcagcaaaccaccatggcacatgtatacctgtgtaacaaacctgcacgttctgcacatgtatcccagaacttataataaaaaagaaaccagtaagtgctcaataaatgttactaacatctatttcttcattcattcttcaaccattacccactgagtgcctatttggatacttggcttagtacctgggtgatgaaataatctacagcaaacccccatggcatgagtttataacaaacctgcacatgtatccccgaacttaaaagttaaaaaaacagaatctgcacaagtctaagctacttccttgaggaaaagactcgagctgagatctcaaagaagagtagaagttgcaggggtaaagaggccaaagaagagtgtctcagatgagagcggcacgtgcaaaggccctgtggtggtaagggtggtatcaggctataccacccacacgtgaattctcatggaggtagtgcttttcttatactgtaaaatgtgaaggtgtatacctcgctcctctagcat

SEQ ID NO: 449352 - DNA, 1537 bp, Homo sapiens
agtgtatggtagagattcagtttttttttctttttggaagtccagtgtcttaaatcattcatgaaggagtccatttcctgcactgtggtcaatgtcgccttgctgatctatccccttccccacaggtggggtgattttatgggctgtcttttctgttcctgtagtctgtgtatccctgcactcttgccagattatgttaatgactattgctttgtagtcagtgttgaggtccctaaaacaggggccctccacccctgggcctcccgggcctcccgtggcctgggaatgggggctccacagcaggaggtggggattacagcctgagccccgcctcccgtcagaccagcggcagtattagattctcataggggtgcaaaccctattgtgaactgcacatggaaaggatctaggttgcatgctccaatgagaatctaatgtcccctgcccacagcccgtgaaaaattgtcttccacaaaatcaatccctggtgccaaaacatttggccctataacatgattcttcaggaatgttttaggtattcttgcccttttaggactccatttagaagcatcccctcacatttggaaaagtggaaaaccttgttgaatgagctgaagtggttaaaatgattatcataaaggtagaaaccagtaagtgctccatatacaccatggaatactatgcagccataaaaaaatgagttcatgtcctttgcagggacatggatgaagctggaaaccatcattctcagcaaactaacacagaagcagaaaaccaaacaccacatgttctcactcataagtgggagttgaacagtgagaacacatggacacaaggaggggaacatcacacaccgaggcctgtcagggagtgggggacaagagggagagagagcattgggacaaataccaaatgcatgcacggcttaaaacctagatgacaggttgatgggtgcagcaaaccaccatggcacatgtatacctgtgtaacaaacctgcacgttctgcacatgtatcccagaacttataataaaaaagaaaccagtaagtgctcaataaatgttactaacatctatttcttcattcattcttcaaccattacccactgagtgcctatttggatacttggcttagtacctgggtgatgaaataatctacagcaaacccccatggcatgagtttataacaaacctgcacatgtatccccgaacttaaaagttaaaaaaacagaatctgcacaagtctaagctacttccttgaggaaaagactcgagctgagatctcaaagaagagtagaagttgcaggggtaaagaggccaaagaagagtgtctcagatgagagcggcacgtgcaaaggccctgtggtgggaggagcctggtagctctgagaaactccacaaaggcacggtggtggctggaatgcagagatgtgggggcacattgaaaaccttgttaaagtgcttaaaatgattatcataaaggtagaaactaataagtgctaaataaatgttattctcgtccgtttctccaataaatat

SEQ ID NO: 449353 - DNA, 858 bp, Homo sapiens
agcggggcgtgcgtggcgtggagtccagaatgagaagaaggaaagcggggccggttccttcaggacccgcctcagggggcaccgcggcggcttggggaccacttggagccccgtcctggggagaaaacagctcacgtctatggccctgactgcttaggcgggagctgcgtgcagctcagcttctccggggcatttttttctacacggttattgctctgtcacccaggctggagttcagcagtgcgatcttggctcattgcagccttgaacctcccgggctcaagtgatcctccctcctcaacctcccaagtagctgggactacagctgggtgagctatgaacaggccaactgcaagggcgagcagtttgtgtttgagaagggcgagtacgcccactgggactggtggaccagcagccagaggacagactcagcagcctgaggcccatcaaagtggacagccaagagcacaagatcatcctctatgaaaaccccaacttcaccgggaagaagatggaaatcatagatgacgatgtacccagcttccacgcccatggctaccaggagaaggtgtcatctgtgtgggtgcggagtggcatgtgggttggctactagtaccctggctaccgtgggctgcagtacctgctggagaagggagactacaaggacagcagcgactttggggcccgtcaccctcaggtacagtccgtgcgctgcatccacgacatgcaggggcaccaatgtggtgccttccacccctccaactagtgcccaccccaccatgcctccttcccaggacccaggtctgctgcccaggaaccctccagacctcccagagagtgaataaagtgtgacttgca

SEQ ID NO: 449354 - DNA, 732 bp, Homo sapiens
atcagaaatttcacactagaaaagtgtacctaacttgattcaagtgtgagctcttggaccagggagtgggggacaagagggagagagagcattgggacaaataccaaatgcatgcacggcttaaaacctagatgacaggttgatgggtgcagcaaaccaccatggcacatgtatacctgtgtaacaaacctgcacgttctgcacatgtatcccagaacttataataaaaaagaaaccagtaagtgctcaataaatgttactaacatctatttcttcattcattcttcaaccattacccactgagtgcctatttggatacttggcttagtacctgggtgatgaaataatctacagcaaacccccatggcatgagtttataacaaacctgcacatgtatccccgaacttaaaagttaaaaaaacagaatctgcacaagtctaagctacttccttgaggaaaagactcgagctgagatctcaaagaagagtagaagttgcaggggtaaagaggccaaagaagagtgtctcagatgagagcggcacgtgcaaaggccctgtggtgggaggagcctggtagctctgagaaactccacaaaggcacggtggtggctggaatgcagagatgtgggggcacattgaaaaccttgttaaagtgcttaaaatgattatcataaaggtagaaactaataagtgctaaataaatgttattctcgtccgtttctccaataaatat

SEQ ID NO: 449355 - DNA, 739 bp, Homo sapiens
agcggggcgtgcgtggcgtggagtccagaatgagaagaaggaaagcggggccggttccttcaggacccgcctcagggggcaccgcggcggcttggggaccacttggagccccgtcctggggagaaaacagctcacgtctatggccctgactgcttaggcgggagctgcgtgcagctcagcttctccggggcatttttttctacacgctgggtgagctatgaacaggccaactgcaagggcgagcagtttgtgtttgagaagggcgagtacgcccactgggactggtggaccagcagccagaggacagactcagcagcctgaggcccatcaaagtggacagccaagagcacaagatcatcctctatgaaaaccccaacttcaccgggaagaagatggaaatcatagatgacgatgtacccagcttccacgcccatggctaccaggagaaggtgtcatctgtgtgggtgcggagtggcatgtgggttggctactagtaccctggctaccgtgggctgcagtacctgctggagaagggagactacaaggacagcagcgactttggggcccgtcaccctcaggtacagtccgtgcgctgcatccacgacatgcaggggcaccaatgtggtgccttccacccctccaactagtgcccaccccaccatgcctccttcccaggacccaggtctgctgcccaggaaccctccagacctcccagagagtgaataaagtgtgacttgca

SEQ ID NO: 449356 - DNA, 1143 bp, Homo sapiens
agcggggcgtgcgtggcgtggagtccagaatgagaagaaggaaagcggggccggttccttcaggacccgcctcagggggcaccgcggcggcttggggaccacttggagccccgtcctggggagaaaacagctcacgtctatggccctgactgcttaggcgggagctgcgtgcagctcagcttctccggggcatttttttctacacggttattgctctgtcacccaggctggagttcagcagtgcgatcttggctcattgcagccttgaacctcccgggctcaagtgatcctccctcctcaacctcccaagtagctgggactacagctgggtgagctatgaacaggccaactgcaagggcgagcagtttgtgtttgagaagggcgagtacgcccactgggactggtggaccagcagccagaggacagactcagcagcctgaggcccatcaaagtggacagccaagagcacaagatcatcctctatgaaaaccccaacttcaccgggaagaagatggaaatcatagatgacgatgtacccagcttccacgcccatggctaccaggagaaggtgtcatctgtgtgggtgcggagtggcatgtgggttggctactagtaccctggctaccgtgggctgcagtacctgctggagaagggagactacaaggacagcagcgactttggggcccgtcaccctcaggtgttggagtgtggatatgagtcatggaactctggggctatgttgctgccagtatccggagtgtgatgcagaagtaccttgcagagagaaatgaaataacctttgacaagattttcaatcagaaaattggtttcttgctatttaaagatttttgtttgaatgaaattaatgaagctgtacctcaggtgaagttttatgaagaggtaagaagtaactgttttactgatgcttttctttcaaaagcatatttaaactgtactttggaacatattaagactacttaatatcttacaaatatttagaaattcattgaaagtaattagtagtgcaaaatatagtatcaagtttgagatgctaacaggtatgaaaagctgagtatgccataaaagtcgcattcttaaaggcttcagagtgctatggaagcaatgagggacagttggactaaa

SEQ ID NO: 449357 - DNA, 1020 bp, Homo sapiens
agcggggcgtgcgtggcgtggagtccagaatgagaagaaggaaagcggggccggttccttcaggacccgcctcagggggcaccgcggcggcttggggaccacttggagccccgtcctggggagaaaacagctcacgtctatggccctgactgcttaggcgggagctgcgtgcagctcagcttctccggggcatttttttctacacggacagccaagagcacaagatcatcctctatgaaaaccccaacttcaccgggaagaagatggaaatcatagatgacgatgtacccagcttccacgcccatggctaccaggagaaggtgtcatctgtgtgggtgcggagtggcatgtgggttggctactagtaccctggctaccgtgggctgcagtacctgctggagaagggagactacaaggacagcagcgactttggggcccgtcaccctcaggtacagtccgtgcgctgcatccacgacatgcaggggcaccaatgtggtgccttccacccctccaactagtgcccaccccaccatgcctccttcccaggacccaggtctgctgcccaggaaccctccagacctcccagagagtgaataaagtgtgacttgcaacttgtctgctgtgggtctttgatctcccctggcagctggtgtgtgtgtgtgtgtgtgtgtgtgtgcgtgcgtgtgtgtgatagaaatgagaattggcaagtatctgggctatgagtagggcaacagaacccttactgagtcttacggttctgcagcttcttagctcttaactgtgtgaccttggacacagtgcccaacctctctgagcctttgtttcttcacctgacttgcaattcccttgcctctgagtgtctggctggtctcgaacccctgaacttgtgatctgcctgcctcagcctcccaaaatgctgggattacaggcgtgagccactgcacctggccaaacttgaagaaattatttctaatccccggtcacaaagaaattccctaatagatttttttctctaaa

SEQ ID NO: 449358 - DNA, 1059 bp, Homo sapiens
actttgcatccttcaatccaatcaaattttgacactcaatattaaccatcacagggttgtagagaggattcagaaatggtgctggtaaagcaaacagcaatagtgcttgggacacatgaaaccaataaagggtcatctgcctgaagctgctacctcagcatcatgcaatagcatcatcctcatctcctattgtcatcattaccattgccgttgtcttcatatgacatcatcactattagcaccgttgttttgtttcttctagctccagtagtctatgattccacaccacctcacattgttctttgaccataaatctgatttcctcagactgctagaattcttttcttgaatccccatggtggggaatgttctgcttatggcgaggtccaatgtccaagtttaatttcacccacctcactgggccatgatgttctggatgctgcgtggcaagtcagagatgtatttccccccttcagaaccaggtagaccgcagtttctgaaggcttaaggattcagagtggtttaagagcagtaaaccatggcccatcatcattgcataaggaagcaatgaaaggcccagtccacaggctcatgtctggggccccgggggagtgagggcagcaaagaagaacagacaatgggctccacgcagacctctgcaacacactggagcctgagcccaatgctgcacgacccatcaactacaagaaggagggagaaggtgtatgaccccccctacacccgcaactctcccatgatctccatggacacccaaagatatacactgcagcacccagcaaagacgtggtacttggtgttggagtgtggatatgagtcatggaactctggggctatgttgctgccaggccctcaatggattggatggtgtccacctgcataattgaaggtggatcttctttactcagtcgactgattcaaatgctgatctcttccagcaacaccctcacagacacaccagaaataatgttttaccagctatctgtgtatcccttagcccagtaaaactgacacatacaattaactatcaaaaagccaata

SEQ ID NO: 449359 - DNA, 476 bp, Homo sapiens
gtgagcctgtcacaacggctgcctttgtattccccctcagagtgatccagagtttgtgcagtggaagaaagagttgaacgaaaccttcaaggaggcccagcggctattgcgtcgtgccccgaagttcctcaacaaacctcggtcaggtactgtggagctcccaaagccatccctctgtcacagaaacagcaacggcctctagcacccagaaacagggagggtcctcgaggaggacacaccagggtctcagccttttggggtgaacgaggatgaggcatctgatctattcgctaccgggactcctccaggctcccgagaggagtcgggacccttcggcttggggtcagctcagctccctgccttgtcacatttgtctgcattagaaactactgaagaaataaaagttctttttctttgctacacactttggtacctatgaacctagaacttgaagtgactcctacttatcacgtaaa

SEQ ID NO: 449360 - DNA, 417 bp, Homo sapiens
ttgagtatgactatgtcctaggcagtggggatataaaggagaataacataacaccatctattggagacaccaatgagaaaaccagaattgtagttcaacgcaataaaggctatgctggtaatacttgtgataatccctgaaccaactggtatggccaatcataggcatgagatctcagctagtccagtcagagtgaatctcagagctctttactgtctaaaaagcttgttcttttttcttctaggtgttggagtgtggatatgagtcatggaactctggggctatgttgctgccaggtaagaatctgttctaggaaggataaaatcaatggacatagaaaggcagactggagaagggaaagggagctgagccctgctgatagagtaaacctctggattaaactatgcctgaagccca

SEQ ID NO: 449361 - DNA, 546 bp, Homo sapiens
ccatacatagaagaaatttgtgaaagccttcgaggtgacatttttcaaaaatttatggaaaggtatgaaactttatgcatatatatacacaattttttatcatgtacgtgtacctcatcttatgccgtaaatgctgaccttaaaatgtgtgttaatcatttagcaagtattcactgaccatgtacgatgtgccaggctttgtgttaaactgtttcctcagtactttacattataattttagggtttgtctatcttaacatctctttgaccttcaatttctcagcttcaatagagtctaaaatatacactgaggaacctcaattttaaaaagtatcttattgagagacctttgctaataatgcaaacttgactataatttatctgattcatttgcttggattttggaaacatgtctcccaaagcaggacaagcctgtacttgattcttcatgtaggagtagaatttaaggacataggtcaatgtctgtttatgatcgtgtacatcattaaatacctaataaatatgtcccttggttactcaaactat

SEQ ID NO: 449362 - DNA, 6093 bp, Homo sapiens
gcgggcgcgcgtcccgtccaggtccggagtaaccgccgccgccgccgccaaagctcgccaacatggcggacctggaggctgtgctggccgatgtcagttacctgatggccatggagaagagcaaggcgaccccggccgcccgcgccagcaagaggatcgtcctgccggagcccagtatccggagtgtgatgcagaagtaccttgcagagagaaatgaaataacctttgacaagattttcaatcagaaaattggtttcttgctatttaaagatttttgtttgaatgaaattaatgaagctgtacctcaggtgaagttttatgaagagataaaggaatatgaaaaacttgataatgaggaagaccgcctttgcagaagtcgacaaatttatgatgcctacatcatgaaggaacttctttcctgttcacatcctttctcaaagcaagctgtagaacacgtacaaagtcatttatccaagaaacaagtgacatcaactctttttcagccatacatagaagaaatttgtgaaagccttcgaggtgacatttttcaaaaatttatggaaagtgacaagttcactagattttgtcagtggaaaaacgttgaattaaatatccatttgaccatgaatgagttcagtgtgcataggattattggacgaggaggattcggggaagtttatggttgcaggaaagcagacactggaaaaatgtatgcaatgaaatgcttagataagaagaggatcaaaatgaaacaaggagaaacattagccttaaatgaaagaatcatgttgtctcttgtcagcacaggagactgtcctttcattgtatgtatgacctatgccttccataccccagataaactctgcttcatcctggatctgatgaacgggggcgatttgcactaccacctttcacaacacggtgtgttctctgagaaggagatgcggttttatgccactgaaatcattctgggtctggaacacatgcacaatcggtttgttgtctacagagatttgaagccagcaaatattctcttggatgaacatggacacgcaagaatatcagatcttggtcttgcctgcgatttttccaaaaagaagcctcatgcgagtgttggcacccatgggtacatggctcccgaggtgctgcagaaggggacggcctatgacagcagtgccgactggttctccctgggctgcatgcttttcaaacttctgagaggtcacagccctttcagacaacataaaaccaaagacaagcatgaaattgaccgaatgacactcaccgtgaatgtggaacttccagacaccttctctcctgaactgaagtcccttttggagggcttgcttcagcgagacgttagcaagcggctgggctgtcacggaggcggctcacaggaagtaaaagagcacagctttttcaaaggtgttgactggcagcatgtctacttacaaaagtacccaccacccttgattcctccccggggagaagtcaatgctgctgatgcctttgatattggctcatttgatgaagaggataccaaagggattaagctacttgattgcgaccaagaactctacaagaacttccctttggtcatctctgaacgctggcagcaagaagtaacggaaacagtttatgaagcagtaaatgcagacacagataaaatcgaggccaggaagagagctaaaaataagcaacttggccacgaagaagattacgctctggggaaggactgtattatgcacgggtacatgctgaaactgggaaacccatttctgactcagtggcagcgtcgctatttttacctctttccaaatagacttgaatggagaggagagggagagtcccggcaaaatttactgacaatggaacagattctctctgtggaagaaactcaaattaaagacaaaaaatgcattttgttcagaataaaaggagggaaacaatttgtcttgcaatgtgagagtgatccagagtttgtgcagtggaagaaagagttgaacgaaaccttcaaggaggcccagcggctattgcgtcgtgccccgaagttcctcaacaaacctcggtcaggtactgtggagctcccaaagccatccctctgtcacagaaacagcaacggcctctagcacccagaaacagggagggtcctcgaggaggacacaccagggtctcagccttttggggtgaacgaggatgaggcatctgatctattcgctaccgggactcctccaggctcccgagaggagtcgggacccttcggcttggggtcagctcagctccctgccttgtcacatttgtctgcattagaaactactgaagaaataaaagttctttttctttgctacacactttggtacctatgaacctagaacttgaagtgactcctacttatcacgtaaatttttatgtctgatatcaaacacatcttagactccccagaatggaatttaaagatgttcagtgttgggtaacagattgccctaagcattgccacatattctgtctagtcactgctgattttctatgtctttgctccatactgctgggggatgggagagccacagtgtgtttcttttgtgcacttcgcaactgacttcttgtcctggggttaaaagttgaagatattttctgatgatattaaaagttgaagatatttctgcacttgggccctcctctgggagccgcacccacatgactgccctgcctctgaccagtctgttccggggccccctcagccaggtgggaatgacggacacgtactatccaagtgtatgggattaactaatcattgaaggcattcatccgtccatcattggaaagatttacagtgattctgaaggacaggccgtggagttttaggtttcaggggcaagagcagttttcaaaagtctttgagtccagtgtgcacgagtcgacaagcagtacctggcatgcaggagcactcatgggtgagtccgtctcaggtctcgacaattagcagttgtgtgacagtcattctggttccttctgcctgaccctgggagacatatcagtaatggatgtacaaaagcaggtctgttttatgtcttagtataatttcagatgaattgtattgaaaaaatgctgaggaatgaatgtgtcaaaatgggttaactgtgtatattgactttcatgtcgtcatgcatctgtcatgaatgaatgatactttgcactgggctgtacgacagtgaggaccttagggcatgaagcctttttcctggtcccagcagcatctgccctgtgaagtttgttttctcccactgcctccaggccccactgatacccccaaatagatgctgggttatgagaaccagcgaaatcccccatgtcatcagtcttaaaaaaaaaattttacaaatccacgtatttgtcccattcttggagtagttttagtgtatgtctttacattaactactaacagtataaataacttgacatcgtaattgtctgcatcctgtccttgatatttttagcagttccaaatctttgtttttgtatttgtttgctgtgttcatgggcaaagtaagtactttttaatgcagttattttgagagtttggaagataattaccaaaagggtccattatttcataagagttactttgcaaaaaaaaaaatgtgggtttttttttttgtctatctcaactactagttggggtttaaattaacatacattttctactatctgttatttccagtgtgggaggagggatgtactacttacatgcattctccttatttaaaaaggaagaatagtattcaaattctgtgtgtgtgtgtgtgcactttgcagcccccgaggtggagaggcagtgtctggatcactgtgaatgcattgccccattggtcagttggggacactgttacaaatccactgaagtcctggtaaaactgtcaagagtaacaggcctcttctgttctaccctgctcacttccacggtgagttaccagcctgggcaacacagcaagaccccatctctacaaaatttttccctcctatgtaaagtttactggagagacttgaattacttaaattcatgttaatatgatttttttttaatccaggtcacattttaacaaagtttattatgaaacaaatgaaatttgaactctaaaatggtactccttggcttcctcaagtcacaatgaactttatattttctttgtccttaaggactaagatagttgttttatttcagccgaatcacagagataaccactcctgcaggcccccacagctggcccaaaggggctgtctttctgacctggctgtgttagcactgattgagaaatgcaggctcccaaattttaaattgcctttattaaaaacacaaactacagaaaatgggttaagagtatacgcatttcatcaaacacatataggggaaaaaatccttcaatttagagttaaataactcagctttgtatagtagagttagcgctccagtatctaacaatctcagaatcatctctgaaaactggtaactatgcttccatttttaattttgtcctaaatatcagatgtctttgatgtaagggtagggaatggagaaatattttcaattgtgtatttgtattacaaagaacttgaaatttactttcttagttgattatattaaatgatgtatatattatatgtggtttataagctcaacactggccatttttttagttttattgttaaatggtatttttctatgtttaattataatagatctggctttttctggatagcataaagatcactgaactatatatatataagaaacaagagttctattttagcacaaaggcattttatattatttattgaatccataagtttgttttcgtcaaaaacattccatattatttctgctcctttttatttgtatagtttgttatttaaagaaatggcagtccttcctgttcttaatacaataaaattgaaataatgcacctagtaatgtggccgacatctcttctcaccaccatggactgttttcaacaacagttgatcttctggtctgtgctgagaggcgcatgcatgtctttcgtcacgtcgggcagcacacctgctgtgaaatactgctttcatctacctcttcagaaggcttcttgcttgttgacaagtaccgcaaaggctttattctggactggctatctcataaaaggatttctgtaagactttgcagtgtcattccctcagaacctaggtttgtttctaaagccacggtattgtccaggagcccctgtgtgtggggcaggtagctatccctcccatgtcattagtaatcctttaggatttaaggtacaactggacagcatcattccttccccttattgtgccaaatccccaccatcagccttgccattgccttaagatttgattattgcacccaattacctaaccactaaacagaaaggccaccttcactctttgaaaaaggcaagctgtgcttagaaacactgcttttaagagtagcacatttgagtgtgactttttccccccttcactatttcaaaatggttttgaaatggggtcttaaaggtaagcgccctcatacatgactgaaactttgtgagaggtcttatatttgaatggacccttaatgatttatgtgaaatagaatgaagtcctgtctctgtgagagaacgtgcctcctcactcatttgtctctgtctgttttcatagccatcaatatagtaacatatttactatattcttgaatacccttgaagaaagaaatccgttttctattgtgcattgctatacgaagtgaagccagtaaactagatactgtaaatctagatattgtacctagacaaaatatcattggttctatctctttttgtatctgttgtgccagggaaggtttataatcccttctcagtatacactcactagtgcacgtctgaaatagtatcccacgggagatgctgctccacgtctgaggtcacctgccctgtgtggggcacaccaccgtcagcaccaccgtttttacagttactttggagctgctagactggttttctgtgttggtaaattgcctatataaatctgaataaaaaggatctgtacaaagaaaacaaa

SEQ ID NO: 449363 - DNA, 4346 bp, Homo sapiens
gcgggcgcgcgtcccgtccaggtccggagtaaccgccgccgccgccgccaaagctcgccaacatggcggacctggaggctgtgctggccgatgtcagttacctgatggccatggagaagagcaaggcgaccccggccgcccgcgccagcaagaggatcgtcctgccggagcccagtatccggagtgtgatgcagaagtaccttgcagagagaaatgaaataacctttgacaagattttcaatcagaaaattggtttcttgctatttaaagatttttgtttgaatgaaattaatgaagctgtacctcaggtgaagttttatgaagagataaaggaatatgaaaaacttgataatgaggaagaccgcctttgcagaagtcgacaaatttatgatgcctacatcatgaaggaacttctttcctgttcacatcctttctcaaagcaagctgtagaacacgtacaaagtcatttatccaagaaacaagtgacatcaactctttttcagccatacatagaagaaatttgtgaaagccttcgaggtgacatttttcaaaaatttatggaaagtgacaagttcactagattttgtcagtggaaaaacgttgaattaaatatccatttgaccatgaatgagttcagtgtgcataggattattggacgaggaggattcggggaagtttatggttgcaggaaagcagacactggaaaaatgtatgcaatgaaatgcttagataagaagaggatcaaaatgaaacaaggagaaacattagccttaaatgaaagaatcatgttgtctcttgtcagcacaggagactgtcctttcattgtatgtatgacctatgccttccataccccagataaactctgcttcatcctggatctgatgaacgggggcgatttgcactaccacctttcacaacacggtgtgttctctgagaaggagatgcggttttatgccactgaaatcattctgggtctggaacacatgcacaatcggtttgttgtctacagagatttgaagccagcaaatattctcttggatgaacatggacacgcaagaatatcagatcttggtcttgcctgcgatttttccaaaaagaagcctcatgcgagtgttggcacccatgggtacatggctcccgaggtgctgcagaaggggacggcctatgacagcagtgccgactggttctccctgggctgcatgcttttcaaacttctgagaggtcacagccctttcagacaacataaaaccaaagacaagcatgaaattgaccgaatgacactcaccgtgaatgtggaacttccagacaccttctctcctgaactgaagtcccttttggagggcttgcttcagcgagacgttagcaagcggctgggctgtcacggaggcggctcacaggaagtaaaagagcacagctttttcaaaggtgttgactggcagcatgtctacttacaaaagtacccaccacccttgattcctccccggggagaagtcaatgctgctgatgcctttgatattggctcatttgatgaagaggataccaaagggattaagctacttgattgcgaccaagaactctacaagaacttccctttggtcatctctgaacgctggcagcaagaagtaacggaaacagtttatgaagcagtaaatgcagacacagataaaatcgaggccaggaagagagctaaaaataagcaacttggccacgaagaagattacgctctggggaaggactgtattatgcacgggtacatgctgaaactgggaaacccatttctgactcagtggcagcgtcgctatttttacctctttccaaatagacttgaatggagaggagagggagagtcccggcaaaatttactgacaatggaacagattctctctgtggaagaaactcaaattaaagacaaaaaatgcattttgttcagaataaaaggagggaaacaatttgtcttgcaatgtgagagtgatccagagtttgtgcagtggaagaaagagttgaacgaaaccttcaaggaggcccagcggctattgcgtcgtgccccgaagttcctcaacaaacctcggtcaggtactgtggagctcccaaagccatccctctgtcacagaaacagcaacggcctctagcacccagaaacagggagggtcctcgaggaggacacaccagggtctcagccttttggggtgaacgaggatgaggcatctgatctattcgctaccgggactcctccaggctcccgagaggagtcgggacccttcggcttggggtcagctcagctccctgccttgtcacatttgtctgcattagaaactactgaagaaataaaagttctttttctttgctacacactttggtacctatgaacctagaacttgaagtgactcctacttatcacgtaaatttttatgtctgatatcaaacacatcttagactccccagaatggaatttaaagatgttcagtgttgggtaacagattgccctaagcattgccacatattctgtctagtcactgctgattttctatgtctttgctccatactgctgggggatgggagagccacagtgtgtttcttttgtgcacttcgcaactgacttcttgtcctggggttaaaagttgaagatattttctgatgatattaaaagttgaagatatttctgcacttgggccctcctctgggagccgcacccacatgactgccctgcctctgaccagtctgttccggggccccctcagccaggtgggaatgacggacacgtactatccaagtgtatgggattaactaatcattgaaggcattcatccgtccatcattggaaagatttacagtgattctgaaggacaggccgtggagttttaggtttcaggggcaagagcagttttcaaaagtctttgagtccagtgtgcacgagtcgacaagcagtacctggcatgcaggagcactcatgggtgagtccgtctcaggtctcgacaattagcagttgtgtgacagtcattctggttccttctgcctgaccctgggagacatatcagtaatggatgtacaaaagcaggtctgttttatgtcttagtataatttcagatgaattgtattgaaaaaatgctgaggaatgaatgtgtcaaaatgggttaactgtgtatattgactttcatgtcgtcatgcatctgtcatgaatgaatgatactttgcactgggctgtacgacagtgaggaccttagggcatgaagcctttttcctggtcccagcagcatctgccctgtgaagtttgttttctcccactgcctccaggccccactgatacccccaaatagatgctgggttatgagaaccagcgaaatcccccatgtcatcagtcttaaaaaaaaaattttacaaatccacgtatttgtcccattcttggagtagttttagtgtatgtctttacattaactactaacagtataaataacttgacatcgtaattgtctgcatcctgtccttgatatttttagcagttccaaatctttgtttttgtatttgtttgctgtgttcatgggcaaagtaagtactttttaatgcagttattttgagagtttggaagataattaccaaaagggtccattatttcataagagttactttgcaaaaaaaaaaatgtgggtttttttttttgtctatctcaactactagttggggtttaaattaacatacattttctactatctgttatttccagtgtgggaggagggatgtactacttacatgcattctccttatttaaaaaggaagaatagtattcaaattctgttgaaacacacacacacacacacacacacacacacacacactccagaagcagaaaagccattgttcttaaagagtgaatgtcttcccagccctggttaattatagctgtgactgatgccgttcccgtctgcatctcaagctcataggttctcagcatgtgcagttgaggatgcgctgggcctcatgcctgttctagatctccaggataaagggcctgctgttgactccaccagggtctgggcttagcgtctaatatctcgtacctagggcgtgagctgcacaaacgtgttcagaaagattattcaactttcccatacttgttctaaaattgagctgatccgcatctctttcaaaaactagaatttctgctctaagaatagaacataaggctccactcccttttagaaaagatatatgaattggaaaatgctctgaaagtccttttgcttcaaacaaaagtgtaaacttttacacttccccaactcacatttgatttgtaatgatatggttgagaagtacatctagatgtcatttattaaaagtgctttgtaagacta

SEQ ID NO: 449364 - DNA, 6685 bp, Homo sapiens
agcggggcgtgcgtggcgtggagtccagaatgagaagaaggaaagcggggccggttccttcaggacccgcctcagggggcaccgcggcggcttggggaccacttggagccccgtcctggggagaaaacagctcacgtctatggccctgactgcttaggcgggagctgcgtgcagctcagcttctccggggcatttttttctacacgctgggtgagctatgaacaggccaactgcaagggcgagcagtttgtgtttgagaagggcgagtacgcccactgggactggtggaccagcagccagaggacagactcagcagcctgaggcccatcaaagtggacagccaagagcacaagatcatcctctatgaaaaccccaacttcaccgggaagaagatggaaatcatagatgacgatgtacccagcttccacgcccatggctaccaggagaaggtgtcatctgtgtgggtgcggagtggcatgtgggttggctactagtaccctggctaccgtgggctgcagtacctgctggagaagggagactacaaggacagcagcgactttggggcccgtcaccctcaggtgttggagtgtggatatgagtcatggaactctggggctatgttgctgccagtatccggagtgtgatgcagaagtaccttgcagagagaaatgaaataacctttgacaagattttcaatcagaaaattggtttcttgctatttaaagatttttgtttgaatgaaattaatgaagctgtacctcaggtgaagttttatgaagagataaaggaatatgaaaaacttgataatgaggaagaccgcctttgcagaagtcgacaaatttatgatgcctacatcatgaaggaacttctttcctgttcacatcctttctcaaagcaagctgtagaacacgaaagaagttccttcatgatgtaggcatcataaaggaacttctttcctgttcacatcctttctcaaagcaagctgtagaacacgtacaaagtcatttatccaagaaacaagtgacatcaactctttttcagccatacatagaagaaatttgtgaaagccttcgaggtgacatttttcaaaaatttatggaaagtgacaagttcactagattttgtcagtggaaaaacgttgaattaaatatccatttgaccatgaatgagttcagtgtgcataggattattggacgaggaggattcggggaagtttatggttgcaggaaagcagacactggaaaaatgtatgcaatgaaatgcttagataagaagaggatcaaaatgaaacaaggagaaacattagccttaaatgaaagaatcatgttgtctcttgtcagcacaggagactgtcctttcattgtatgtatgacctatgccttccataccccagataaactctgcttcatcctggatctgatgaacgggggcgatttgcactaccacctttcacaacacggtgtgttctctgagaaggagatgcggttttatgccactgaaatcattctgggtctggaacacatgcacaatcggtttgttgtctacagagatttgaagccagcaaatattctcttggatgaacatggacacgcaagaatatcagatcttggtcttgcctgcgatttttccaaaaagaagcctcatgcgagtgttggcacccatgggtacatggctcccgaggtgctgcagaaggggacggcctatgacagcagtgccgactggttctccctgggctgcatgcttttcaaacttctgagaggtcacagccctttcagacaacataaaaccaaagacaagcatgaaattgaccgaatgacactcaccgtgaatgtggaacttccagacaccttctctcctgaactgaagtcccttttggagggcttgcttcagcgagacgttagcaagcggctgggctgtcacggaggcggctcacaggaagtaaaagagcacagctttttcaaaggtgttgactggcagcatgtctacttacaaaagtacccaccacccttgattcctccccggggagaagtcaatgctgctgatgcctttgatattggctcatttgatgaagaggataccaaagggattaagctacttgattgcgaccaagaactctacaagaacttccctttggtcatctctgaacgctggcagcaagaagtaacggaaacagtttatgaagcagtaaatgcagacacagataaaatcgaggccaggaagagagctaaaaataagcaacttggccacgaagaagattacgctctggggaaggactgtattatgcacgggtacatgctgaaactgggaaacccatttctgactcagtggcagcgtcgctatttttacctctttccaaatagacttgaatggagaggagagggagagtcccggcaaaatttactgacaatggaacagattctctctgtggaagaaactcaaattaaagacaaaaaatgcattttgttcagaataaaaggagggaaacaatttgtcttgcaatgtgagagtgatccagagtttgtgcagtggaagaaagagttgaacgaaaccttcaaggaggcccagcggctattgcgtcgtgccccgaagttcctcaacaaacctcggtcaggtactgtggagctcccaaagccatccctctgtcacagaaacagcaacggcctctagcacccagaaacagggagggtcctcgaggaggacacaccagggtctcagccttttggggtgaacgaggatgaggcatctgatctattcgctaccgggactcctccaggctcccgagaggagtcgggacccttcggcttggggtcagctcagctccctgccttgtcacatttgtctgcattagaaactactgaagaaataaaagttctttttctttgctacacactttggtacctatgaacctagaacttgaagtgactcctacttatcacgtaaatttttatgtctgatatcaaacacatcttagactccccagaatggaatttaaagatgttcagtgttgggtaacagattgccctaagcattgccacatattctgtctagtcactgctgattttctatgtctttgctccatactgctgggggatgggagagccacagtgtgtttcttttgtgcacttcgcaactgacttcttgtcctggggttaaaagttgaagatattttctgatgatattaaaagttgaagatatttctgcacttgggccctcctctgggagccgcacccacatgactgccctgcctctgaccagtctgttccggggccccctcagccaggtgggaatgacggacacgtactatccaagtgtatgggattaactaatcattgaaggcattcatccgtccatcattggaaagatttacagtgattctgaaggacaggccgtggagttttaggtttcaggggcaagagcagttttcaaaagtctttgagtccagtgtgcacgagtcgacaagcagtacctggcatgcaggagcactcatgggtgagtccgtctcaggtctcgacaattagcagttgtgtgacagtcattctggttccttctgcctgaccctgggagacatatcagtaatggatgtacaaaagcaggtctgttttatgtcttagtataatttcagatgaattgtattgaaaaaatgctgaggaatgaatgtgtcaaaatgggttaactgtgtatattgactttcatgtcgtcatgcatctgtcatgaatgaatgatactttgcactgggctgtacgacagtgaggaccttagggcatgaagcctttttcctggtcccagcagcatctgccctgtgaagtttgttttctcccactgcctccaggccccactgatacccccaaatagatgctgggttatgagaaccagcgaaatcccccatgtcatcagtcttaaaaaaaaaattttacaaatccacgtatttgtcccattcttggagtagttttagtgtatgtctttacattaactactaacagtataaataacttgacatcgtaattgtctgcatcctgtccttgatatttttagcagttccaaatctttgtttttgtatttgtttgctgtgttcatgggcaaagtaagtactttttaatgcagttattttgagagtttggaagataattaccaaaagggtccattatttcataagagttactttgcaaaaaaaaaaatgtgggtttttttttttgtctatctcaactactagttggggtttaaattaacatacattttctactatctgttatttccagtgtgggaggagggatgtactacttacatgcattctccttatttaaaaaggaagaatagtattcaaattctgtgtgtgtgtgtgtgcactttgcagcccccgaggtggagaggcagtgtctggatcactgtgaatgcattgccccattggtcagttggggacactgttacaaatccactgaagtcctggtaaaactgtcaagagtaacaggcctcttctgttctaccctgctcacttccacggtgagttaccagcctgggcaacacagcaagaccccatctctacaaaaaaaatttttttaagtaattaaccgtttaaattttttcctaaagatttaacatgatttttccctcctatgtaaagtttactggagagacttgaattacttaaattcatgttaatatgatttttttttaatccaggtcacattttaacaaagtttattatgaaacaaatgaaatttgaactctaaaatggtactccttggcttcctcaagtcacaatgaactttatattttctttgtccttaaggactaagatagttgttttatttcagccgaatcacagagataaccactcctgcaggcccccacagctggcccaaaggggctgtctttctgacctggctgtgttagcactgattgagaaatgcaggctcccaaattttaaattgcctttattaaaaacacaaactacagaaaatgggttaagagtatacgcatttcatcaaacacatataggggaaaaaatccttcaatttagagttaaataactcagctttgtatagtagagttagcgctccagtatctaacaatctcagaatcatctctgaaaactggtaactatgcttccatttttaattttgtcctaaatatcagatgtctttgatgtaagggtagggaatggagaaatattttcaattgtgtatttgtattacaaagaacttgaaatttactttcttagttgattatattaaatgatgtatatattatatgtggtttataagctcaacactggccatttttttagttttattgttaaatggtatttttctatgtttaattataatagatctggctttttctggatagcataaagatcactgaactatatatatataagaaacaagagttctattttagcacaaaggcattttatattatttattgaatccataagtttgttttcgtcaaaaacattccatattatttctgctcctttttatttgtatagtttgttatttaaagaaatggcagtccttcctgttcttaatacaataaaattgaaataatgcacctagtaatgtggccgacatctcttctcaccaccatggactgttttcaacaacagttgatcttctggtctgtgctgagaggcgcatgcatgtctttcgtcacgtcgggcagcacacctgctgtgaaatactgctttcatctacctcttcagaaggcttcttgcttgttgacaagtaccgcaaaggctttattctggactggctatctcataaaaggatttctgtaagactttgcagtgtcattccctcagaacctaggtttgtttctaaagccacggtattgtccaggagcccctgtgtgtggggcaggtagctatccctcccatgtcattagtaatcctttaggatttaaggtacaactggacagcatcattccttccccttattgtgccaaatccccaccatcagccttgccattgccttaagatttgattattgcacccaattacctaaccactaaacagaaaggccaccttcactctttgaaaaaggcaagctgtgcttagaaacactgcttttaagagtagcacatttgagtgtgactttttccccccttcactatttcaaaatggttttgaaatggggtcttaaaggtaagcgccctcatacatgactgaaactttgtgagaggtcttatatttgaatggacccttaatgatttatgtgaaatagaatgaagtcctgtctctgtgagagaacgtgcctcctcactcatttgtctctgtctgttttcatagccatcaatatagtaacatatttactatattcttgaatacccttgaagaaagaaatccgttttctattgtgcattgctatacgaagtgaagccagtaaactagatactgtaaatctagatattgtacctagacaaaatatcattggttctatctctttttgtatctgttgtgccagggaaggtttataatcccttctcagtatacactcactagtgcacgtctgaaatagtatcccacgggagatgctgctccacgtctgaggtcacctgccctgtgtggggcacaccaccgtcagcaccaccgtttttacagttactttggagctgctagactggttttctgtgttggtaaattgcctatataaatctgaataaaaaggatctgtacaaagaaaacaaa

SEQ ID NO: 449365 - DNA, 6089 bp, Homo sapiens
gcgggcgcgcgtcccgtccaggtccggagtaaccgccgccgccgccgccaaagctcgccaacatggcggacctggaggctgtgctggccgatgtcagttacctgatggccatggagaagagcaaggcgaccccggccgcccgcgccagcaagaggatcgtcctgccggagcccagtatccggagtgtgatgcagaagtaccttgcagagagaaatgaaataacctttgacaagattttcaatcagaaaattggtttcttgctatttaaagatttttgtttgaatgaaattaatgaagctgtacctcaggtgaagttttatgaagagataaaggaatatgaaaaacttgataatgaggaagaccgcctttgcagaagtcgacaaatttatgatgcctacatcatgaaggaacttctttcctgttcacatcctttctcaaagcaagctgtagaacacgtacaaagtcatttatccaagaaacaagtgacatcaactctttttcagccatacatagaagaaatttgtgaaagccttcgaggtgacatttttcaaaaatttatggaaagtgacaagttcactagattttgtcagtggaaaaacgttgaattaaatatccatttgaccatgaatgagttcagtgtgcataggattattggacgaggaggattcggggaagtttatggttgcaggaaagcagacactggaaaaatgtatgcaatgaaatgcttagataagaagaggatcaaaatgaaacaaggagaaacattagccttaaatgaaagaatcatgttgtctcttgtcagcacaggagactgtcctttcattgtatgtatgacctatgccttccataccccagataaactctgcttcatcctggatctgatgaacgggggcgatttgcactaccacctttcacaacacggtgtgttctctgagaaggagatgcggttttatgccactgaaatcattctgggtctggaacacatgcacaatcggtttgttgtctacagagatttgaagccagcaaatattctcttggatgaacatggacacgcaagaatatcagatcttggtcttgcctgcgatttttccaaaaagaagcctcatgcgagtgttggcacccatgggtacatggctcccgaggtgctgcagaaggggacggcctatgacagcagtgccgactggttctccctgggctgcatgcttttcaaacttctgagaggtcacagccctttcagacaacataaaaccaaagacaagcatgaaattgaccgaatgacactcaccgtgaatgtggaacttccagacaccttctctcctgaactgaagtcccttttggagggcttgcttcagcgagacgttagcaagcggctgggctgtcacggaggcggctcacaggaagtaaaagagcacagctttttcaaaggtgttgactggcagcatgtctacttacaaaagtacccaccacccttgattcctccccggggagaagtcaatgctgctgatgcctttgatattggctcatttgatgaagaggataccaaagggattaagctacttgattgcgaccaagaactctacaagaacttccctttggtcatctctgaacgctggcagcaagaagtaacggaaacagtttatgaagcagtaaatgcagacacagataaaatcgaggccaggaagagagctaaaaataagcaacttggccacgaagaagattacgctctggggaaggactgtattatgcacgggtacatgctgaaactgggaaacccatttctgactcagtggcagcgtcgctatttttacctctttccaaatagacttgaatggagaggagagggagagtcccggcaaaatttactgacaatggaacagattctctctgtggaagaaactcaaattaaagacaaaaaatgcattttgttcagaataaaaggagggaaacaatttgtcttgcaatgtgagagtgatccagagtttgtgcagtggaagaaagagttgaacgaaaccttcaaggaggcccagcggctattgcgtcgtgccccgaagttcctcaacaaacctcggtcaggtactgtggagctcccaaagccatccctctgtcacagaaacagcaacggcctctagcacccagaaacagggagggtcctcgaggaggacacaccagggtctcagccttttggggtgaacgaggatgaggcatctgatctattcgctaccgggactcctccaggctcccgagaggagtcgggacccttcggcttggggtcagctcagctccctgccttgtcacatttgtctgcattagaaactactgaagaaataaaagttctttttctttgctacacactttggtacctatgaacctagaacttgaagtgactcctacttatcacgtaaatttttatgtctgatatcaaacacatcttagactccccagaatggaatttaaagatgttcagtgttgggtaacagattgccctaagcattgccacatattctgtctagtcactgctgattttctatgtctttgctccatactgctgggggatgggagagccacagtgtgtttcttttgtgcacttcgcaactgacttcttgtcctggggttaaaagttgaagatattttctgatgatattaaaagttgaagatatttctgcacttgggccctcctctgggagccgcacccacatgactgccctgcctctgaccagtctgttccggggccccctcagccaggtgggaatgacggacacgtactatccaagtgtatgggattaactaatcattgaaggcattcatccgtccatcattggaaagatttacagtgattctgaaggacaggccgtggagttttaggtttcaggggcaagagcagttttcaaaagtctttgatccgtctcaggtctcgacaattagcagttgtgtgacagtcattctggttccttctgcctgaccctgggagacatatcagtaatggatgtacaaaagcaggtctgttttatgtcttagtataatttcagatgaattgtattgaaaaaatgctgaggaatgaatgtgtcaaaatgggttaactgtgtatattgactttcatgtcgtcatgcatctgtcatgaatgaatgatactttgcactgggctgtacgacagtgaggaccttagggcatgaagcctttttcctggtcccagcagcatctgccctgtgaagtttgttttctcccactgcctccaggccccactgatacccccaaatagatgctgggttatgagaaccagcgaaatcccccatgtcatcagtcttaaaaaaaaaattttacaaatccacgtatttgtcccattcttggagtagttttagtgtatgtctttacattaactactaacagtataaataacttgacatcgtaattgtctgcatcctgtccttgatatttttagcagttccaaatctttgtttttgtatttgtttgctgtgttcatgggcaaagtaagtactttttaatgcagttattttgagagtttggaagataattaccaaaagggtccattatttcataagagttactttgcaaaaaaaaaaatgtgggtttttttttttgtctatctcaactactagttggggtttaaattaacatacattttctactatctgttatttccagtgtgggaggagggatgtactacttacatgcattctccttatttaaaaaggaagaatagtattcaaattctgtgtgtgtgtgtgtgcactttgcagcccccgaggtggagaggcagtgtctggatcactgtgaatgcattgccccattggtcagttggggacactgttacaaatccactgaagtcctggtaaaactgtcaagagtaacaggcctcttctgttctaccctgctcacttccacggtgagttaccagcctgggcaacacagcaagaccccatctctacaaaaaaaatttttttaagtaattaaccgtttaaattttttcctaaagatttaacatgatttttccctcctatgtaaagtttactggagagacttgaattacttaaattcatgttaatatgatttttttttaatccaggtcacattttaacaaagtttattatgaaacaaatgaaatttgaactctaaaatggtactccttggcttcctcaagtcacaatgaactttatattttctttgtccttaaggactaagatagttgttttatttcagccgaatcacagagataaccactcctgcaggcccccacagctggcccaaaggggctgtctttctgacctggctgtgttagcactgattgagaaatgcaggctcccaaattttaaattgcctttattaaaaacacaaactacagaaaatgggttaagagtatacgcatttcatcaaacacatataggggaaaaaatccttcaatttagagttaaataactcagctttgtatagtagagttagcgctccagtatctaacaatctcagaatcatctctgaaaactggtaactatgcttccatttttaattttgtcctaaatatcagatgtctttgatgtaagggtagggaatggagaaatattttcaattgtgtatttgtattacaaagaacttgaaatttactttcttagttgattatattaaatgatgtatatattatatgtggtttataagctcaacactggccatttttttagttttattgttaaatggtatttttctatgtttaattataatagatctggctttttctggatagcataaagatcactgaactatatatatataagaaacaagagttctattttagcacaaaggcattttatattatttattgaatccataagtttgttttcgtcaaaaacattccatattatttctgctcctttttatttgtatagtttgttatttaaagaaatggcagtccttcctgttcttaatacaataaaattgaaataatgcacctagtaatgtggccgacatctcttctcaccaccatggactgttttcaacaacagttgatcttctggtctgtgctgagaggcgcatgcatgtctttcgtcacgtcgggcagcacacctgctgtgaaatactgctttcatctacctcttcagaaggcttcttgcttgttgacaagtaccgcaaaggctttattctggactggctatctcataaaaggatttctgtaagactttgcagtgtcattccctcagaacctaggtttgtttctaaagccacggtattgtccaggagcccctgtgtgtggggcaggtagctatccctcccatgtcattagtaatcctttaggatttaaggtacaactggacagcatcattccttccccttattgtgccaaatccccaccatcagccttgccattgccttaagatttgattattgcacccaattacctaaccactaaacagaaaggccaccttcactctttgaaaaaggcaagctgtgcttagaaacactgcttttaagagtagcacatttgagtgtgactttttccccccttcactatttcaaaatggttttgaaatggggtcttaaaggtaagcgccctcatacatgactgaaactttgtgagaggtcttatatttgaatggacccttaatgatttatgtgaaatagaatgaagtcctgtctctgtgagagaacgtgcctcctcactcatttgtctctgtctgttttcatagccatcaatatagtaacatatttactatattcttgaatacccttgaagaaagaaatccgttttctattgtgcattgctatacgaagtgaagccagtaaactagatactgtaaatctagatattgtacctagacaaaatatcattggttctatctctttttgtatctgttgtgccagggaaggtttataatcccttctcagtatacactcactagtgcacgtctgaaatagtatcccacgggagatgctgctccacgtctgaggtcacctgccctgtgtggggcacaccaccgtcagcaccaccgtttttacagttactttggagctgctagactggttttctgtgttggtaaattgcctatataaatctgaataaaaaggatctgtacaaagaaaacaaa

SEQ ID NO: 449366 - DNA, 5035 bp, Homo sapiens
tgtgtgtgtgtgtgtctgtgtgtgtgtgtgtgtgtgtgtgggttttttgtgttgttttgtgttgttttttgagacacagtctcactctgtagcccagagctggagtgcactggggcaatctcggcgtactcgcacacacatgtgtacgagtaggtgtgtgtgtgtgtgtgtgtgtgtgtgtgtgtgtgtgtgtgcaccttctctcctgaactgaagtcccttttggagggcttgcttcagcgagacgttagcaagcggctgggctgtcacggaggcggctcacaggaagtaaaagagcacagctttttcaaaggtgttgactggcagcatgtctacttacaaaagtacccaccacccttgattcctccccggggagaagtcaatgctgctgatgcctttgatattggctcatttgatgaagaggataccaaagggattaagctacttgattgcgaccaagaactctacaagaacttccctttggtcatctctgaacgctggcagcaagaagtaacggaaacagtttatgaagcagtaaatgcagacacagataaaatcgaggccaggaagagagctaaaaataagcaacttggccacgaagaagattacgctctggggaaggactgtattatgcacgggtacatgctgaaactgggaaacccatttctgactcagtggcagcgtcgctatttttacctctttccaaatagacttgaatggagaggagagggagagtcccggcaaaatttactgacaatggaacagattctctctgtggaagaaactcaaattaaagacaaaaaatgcattttgttcagaataaaaggagggaaacaatttgtcttgcaatgtgagagtgatccagagtttgtgcagtggaagaaagagttgaacgaaaccttcaaggaggcccagcggctattgcgtcgtgccccgaagttcctcaacaaacctcggtcaggtactgtggagctcccaaagccatccctctgtcacagaaacagcaacggcctctagcacccagaaacagggagggtcctcgaggaggacacaccagggtctcagccttttggggtgaacgaggatgaggcatctgatctattcgctaccgggactcctccaggctcccgagaggagtcgggacccttcggcttggggtcagctcagctccctgccttgtcacatttgtctgcattagaaactactgaagaaataaaagttctttttctttgctacacactttggtacctatgaacctagaacttgaagtgactcctacttatcacgtaaatttttatgtctgatatcaaacacatcttagactccccagaatggaatttaaagatgttcagtgttgggtaacagattgccctaagcattgccacatattctgtctagtcactgctgattttctatgtctttgctccatactgctgggggatgggagagccacagtgtgtttcttttgtgcacttcgcaactgacttcttgtcctggggttaaaagttgaagatattttctgatgatattaaaagttgaagatatttctgcacttgggccctcctctgggagccgcacccacatgactgccctgcctctgaccagtctgttccggggccccctcagccaggtgggaatgacggacacgtactatccaagtgtatgggattaactaatcattgaaggcattcatccgtccatcattggaaagatttacagtgattctgaaggacaggccgtggagttttaggtttcaggggcaagagcagttttcaaaagtctttgagtccagtgtgcacgagtcgacaagcagtacctggcatgcaggagcactcatgggtgagtccgtctcaggtctcgacaattagcagttgtgtgacagtcattctggttccttctgcctgaccctgggagacatatcagtaatggatgtacaaaagcaggtctgttttatgtcttagtataatttcagatgaattgtattgaaaaaatgctgaggaatgaatgtgtcaaaatgggttaactgtgtatattgactttcatgtcgtcatgcatctgtcatgaatgaatgatactttgcactgggctgtacgacagtgaggaccttagggcatgaagcctttttcctggtcccagcagcatctgccctgtgaagtttgttttctcccactgcctccaggccccactgatacccccaaatagatgctgggttatgagaaccagcgaaatcccccatgtcatcagtcttaaaaaaaaaattttacaaatccacgtatttgtcccattcttggagtagttttagtgtatgtctttacattaactactaacagtataaataacttgacatcgtaattgtctgcatcctgtccttgatatttttagcagttccaaatctttgtttttgtatttgtttgctgtgttcatgggcaaagtaagtactttttaatgcagttattttgagagtttggaagataattaccaaaagggtccattatttcataagagttactttgcaaaaaaaaaaatgtgggtttttttttttgtctatctcaactactagttggggtttaaattaacatacattttctactatctgttatttccagtgtgggaggagggatgtactacttacatgcattctccttatttaaaaaggaagaatagtattcaaattctgtgtgtgtgtgtgtgcactttgcagcccccgaggtggagaggcagtgtctggatcactgtgaatgcattgccccattggtcagttggggacactgttacaaatccactgaagtcctggtaaaactgtcaagagtaacaggcctcttctgttctaccctgctcacttccacggtgagttaccagcctgggcaacacagcaagaccccatctctacaaaaaaaatttttttaagtaattaaccgtttaaattttttcctaaagatttaacatgatttttccctcctatgtaaagtttactggagagacttgaattacttaaattcatgttaatatgatttttttttaatccaggtcacattttaacaaagtttattatgaaacaaatgaaatttgaactctaaaatggtactccttggcttcctcaagtcacaatgaactttatattttctttgtccttaaggactaagatagttgttttatttcagccgaatcacagagataaccactcctgcaggcccccacagctggcccaaaggggctgtctttctgacctggctgtgttagcactgattgagaaatgcaggctcccaaattttaaattgcctttattaaaaacacaaactacagaaaatgggttaagagtatacgcatttcatcaaacacatataggggaaaaaatccttcaatttagagttaaataactcagctttgtatagtagagttagcgctccagtatctaacaatctcagaatcatctctgaaaactggtaactatgcttccatttttaattttgtcctaaatatcagatgtctttgatgtaagggtagggaatggagaaatattttcaattgtgtatttgtattacaaagaacttgaaatttactttcttagttgattatattaaatgatgtatatattatatgtggtttataagctcaacactggccatttttttagttttattgttaaatggtatttttctatgtttaattataatagatctggctttttctggatagcataaagatcactgaactatatatatataagaaacaagagttctattttagcacaaaggcattttatattatttattgaatccataagtttgttttcgtcaaaaacattccatattatttctgctcctttttatttgtatagtttgttatttaaagaaatggcagtccttcctgttcttaatacaataaaattgaaataatgcacctagtaatgtggccgacatctcttctcaccaccatggactgttttcaacaacagttgatcttctggtctgtgctgagaggcgcatgcatgtctttcgtcacgtcgggcagcacacctgctgtgaaatactgctttcatctacctcttcagaaggcttcttgcttgttgacaagtaccgcaaaggctttattctggactggctatctcataaaaggatttctgtaagactttgcagtgtcattccctcagaacctaggtttgtttctaaagccacggtattgtccaggagcccctgtgtgtggggcaggtagctatccctcccatgtcattagtaatcctttaggatttaaggtacaactggacagcatcattccttccccttattgtgccaaatccccaccatcagccttgccattgccttaagatttgattattgcacccaattacctaaccactaaacagaaaggccaccttcactctttgaaaaaggcaagctgtgcttagaaacactgcttttaagagtagcacatttgagtgtgactttttccccccttcactatttcaaaatggttttgaaatggggtcttaaaggtaagcgccctcatacatgactgaaactttgtgagaggtcttatatttgaatggacccttaatgatttatgtgaaatagaatgaagtcctgtctctgtgagagaacgtgcctcctcactcatttgtctctgtctgttttcatagccatcaatatagtaacatatttactatattcttgaatacccttgaagaaagaaatccgttttctattgtgcattgctatacgaagtgaagccagtaaactagatactgtaaatctagatattgtacctagacaaaatatcattggttctatctctttttgtatctgttgtgccagggaaggtttataatcccttctcagtatacactcactagtgcacgtctgaaatagtatcccacgggagatgctgctccacgtctgaggtcacctgccctgtgtggggcacaccaccgtcagcaccaccgtttttacagttactttggagctgctagactggttttctgtgttggtaaattgcctatataaatctgaataaaaaggatctgtacaaagaaaacaaa

SEQ ID NO: 449367 - DNA, 1517 bp, Homo sapiens
agcggggcgtgcgtggcgtggagtccagaatgagaagaaggaaagcggggccggttccttcaggacccgcctcagggggcaccgcggcggcttggggaccacttggagccccgtcctggggagaaaacagctcacgtctatggccctgactgcttaggcgggagctgcgtgcagctcagcttctccggggcatttttttctacacggttattgctctgtcacccaggctggagttcagcagtgcgatcttggctcattgcagccttgaacctcccgggctcaagtgatcctccctcctcaacctcccaagtagctgggactacagctgggtgagctatgaacaggccaactgcaagggcgagcagtttgtgtttgagaagggcgagtacgcccactgggactggtggaccagcagccagaggacagactcagcagcctgaggcccatcaaagtggacagccaagagcacaagatcatcctctatgaaaaccccaacttcaccgggaagaagatggaaatcatagatgacgatgtacccagcttccacgcccatggctaccaggagaaggtgtcatctgtgtgggtgcggagtggcatgtgggttggctactagtaccctggctaccgtgggctgcagtacctgctggagaagggagactacaaggacagcagcgactttggggcccgtcaccctcagggacatggatgaagctggaaaccatcattctcagcaaactaacacagaagcagaaaaccaaacaccacatgttctcactcataagtgggagttgaacagtgagaacacatggacacaaggaggggaacatcacacaccgaggcctgtcagggagtgggggacaagagggagagagagcattgggacaaataccaaatgcatgcacggcttaaaacctagatgacaggttgatgggtgcagcaaaccaccatggcacatgtatacctgtgtaacaaacctgcacgttctgcacatgtatcccagaacttataataaaaaagaaaccagtaagtgctcaataaatgttactaacatctatttcttcattcattcttcaaccattacccactgagtgcctatttggatacttggcttagtacctgggtgatgaaataatctacagcaaacccccatggcatgagtttataacaaacctgcacatgtatccccgaacttaaaagttaaaaaaacagaatctgcacaagtctaagctacttccttgaggaaaagactcgagctgagatctcaaagaagagtagaagttgcaggggtaaagaggccaaagaagagtgtctcagatgagagcggcacgtgcaaaggccctgtggtgggaggagcctggtagctctgagaaactccacaaaggcacggtggtggctggaatgcagagatgtgggggcacattgaaaaccttgttaaagtgcttaaaatgattatcataaaggtagaaactaataagtgctaaataaatgttattctcgtccgtttctccaataaatat

SEQ ID NO: 449368 - DNA, 1268 bp, Homo sapiens
agcggggcgtgcgtggcgtggagtccagaatgagaagaaggaaagcggggccggttccttcaggacccgcctcagggggcaccgcggcggcttggggaccacttggagccccgtcctggggagaaaacagctcacgtctatggccctgactgcttaggcgggagctgcgtgcagctcagcttctccggggcatttttttctacacggttattgctctgtcacccaggctggagttcagcagtgcgatcttggctcattgcagccttgaacctcccgggctcaagtgatcctccctcctcaacctcccaagtagctgggactacagctgggtgagctatgaacaggccaactgcaagggcgagcagtttgtgtttgagaagggcgagtacgcccactgggactggtggaccagcagccagaggacagactcagcagcctgaggcccatcaaagtggacagccaagagcacaagatcatcctctatgaaaaccccaacttcaccgggaagaagatggaaatcatagatgacgatgtacccagcttccacgcccatggctaccaggagaaggtgtcatctgtgtgggtgcggagtggcatgtgggttggctactagtaccctggctaccgtgggctgcagtacctgctggagaagggagactacaaggacagcagcgactttggggcccgtcaccctcaggtacagtccgtgcgctgcatccacgacatgcaggggcaccaatgtggtgccttccacccctccaactagtgcccaccccaccatgcctccttcccaggacccaggtctgctgcccaggaaccctccagacctcccagagagtgaataaagtgtgacttgcaacttgtctgctgtgggtctttgatctcccctggcagctggtgtgtgtgtgtgtgtgtgtgtgtgtgcgtgcgtgtgtgtgatagaaatgagaattggcaagtatctgggctatgagtagggcaacagaacccttactgagtcttacggttctgcagcttcttagctcttaactgtgtgaccttggacacagtgcccaacctctctgagcctttgtttcttcacctgacttgcaattcccttgcctctgagtgtctggctggtctcgaacccctgaacttgtgatctgcctgcctcagcctcccaaaatgctgggattacaggcgtgagccactgcacctggccaaacttgaagaaattatttctaatccccggtcacaaagaaattccctaatagatttttttctctaaa

SEQ ID NO: 449369 - DNA, 1631 bp, Homo sapiens
ttttttttctcctccgcacagaagtcgcgctcgggcagcctgcgcgctcgcagcaggaaccaggctccaggcgccggcgccggggccgcggggaggaggcgacttcgctccctgcggcgggcgcggcccgggcgcccgagcctcctcggccttggagagcagcggcggcggcggcaccccgggcgcggcaatactgaacactgcgcagcttgcagaggtctcctggcagccctcattaggaattctgtctggccccgatcagaatactggagacgagaccacgagattgatgagtttgccttgggagtcggtaagaaggtgaagccaggggcgaacatgggtcagaaggtcactggagggatcaagactgtggacatgagggaccccacgtacaggcccctgaagcaggagctccagggtctggattactgcaagcccacccggctggatctgctactggacatgccccctgtgtcctatgatgtccagctgctgcattcatggaacaacaacgaccgatcgctcaatgtctttgtgaaggaggacgacaagctcatctttcaccggcatccggtggcccagagcacggacgctatcaggggcaaagtcgggtatacccgtgggctgcacgtgtggcagatcacgtgggccatgagacagcggggcacacacgccgtggtgggggtggcgacggcagacgcccccctgcactctgtcgggtacacaaccctcgtggggaataaccacgagtcctggggctgggacttggggcgcaaccggctctaccacgatggcaagaaccagccaagcaaaacatacccagcctttctggaaccagatgagacattcattgtccctgactccttcctggtagccctggacatggacgacgggactctgagcttcattgtggatggacagtacatgggagtggcttttcggggactcaagggcaaaaaactgtatcctgtagtgagtgccgtctggggccactgtgagatccgaatgcgctacttgaacggactcgatcccgagccgctgccgctcatggatttgtgccgtcgctcggtgcgcctggccctggggagggagcgcctgggggagatccacacgctgccgctgccggcttccctcaaggcctacctcctctaccagtgacgttcgccatcataccgccagcgcgacagccacctggtgccaactcactgagccgcctgccgctggggccgccgcaccctgcaccttggaccggcatccgtagccatggacagaggtccctggtcttccctcatcctccgtggctgcctccatgggacaaggaccgattccaacacaggctcctctttcccccttcccgacatcagcggaaggcagcatccctgcatgccgtccatatacaacccctctttgaaaaaagacacagagaataaactcctacgaaagccctacattgagctccaatctgctcggggtgggacgggtgcttcccacacctgaccccacccttctttcctaccagcccagagccttgtggcttgtacagttttgaaactcccgttctattttatgatggttgataatagtcagtaacctaataaaggaacgtttgttaaaatatcaaaaaaattgaa

SEQ ID NO: 449370 - DNA, 2200 bp, Homo sapiens
ttttttttctcctccgcacagaagtcgcgctcgggcagcctgcgcgctcgcagcaggaaccaggctccaggcgccggcgccggggccgcggggaggaggcgacttcgctccctgcggcgggcgcggcccgggcgcccgagcctcctcggccttggagagcagcggcggcggcggcaccccgggcgcggcaatactgaacactgcgcagcttgcagaggtctcctggcagccctcattaggaattctgtctggccccgatcagaatactggagacgagaccacgagattgatgagtttgccttgggagtcggtaagaaggtgaagccaggggcgaacatgggtcagaaggtccctggtcttccctcatcctccgtggctgcctccatgggacaaggaccgattccaacacaggctcctctttcccccttcccgacatcagcggaaggcagcatccctgcatgccgtccatatacaacccctctttgaaaaaagacacagagaataaactcctacgaaagccctacattgagctccaatctgctcggggtgggacgggtgcttcccacacctctgggagaaggctgcagccacctgggggtcccagggtggtgggggtggcaggtggtaccacagctctgagagcagataccaggggtactaagaggtgcttagacaagggctggtgcccggcccagggtgcccagcggggccatgccatggcagataaagctcaggacgtcaaaaactcaccatggaccccaaggcagaaaccaagaactgtctgcaggcaaataagcacccagcacccatcctggctgccggtgccccgtaccctgtatttattcttttaacaataacaaaagccatttatttattccatctagaaaggaaaccctgtttcagtcccctctctctggctgttctgttactttccttccacctgtgccctccctgggatatgtatgcctcgcccgccctccctgggcacatgtgcacacgtgcccaggcacaagtatgtctctgggtcccttgccctgcagtttccagggggctctgctccaagttccctagcgggcccctcagggagaaatagcctcacgtgcaatctgggtgtcttcgggggcccgtctggaagggctgcagcaattcccctgtgtctccaggtaaccagctaactcttgggctcaggcacccttgcacagggttgcatttctttagtcttctgtgggtcttttgatgtgggtttgattttgcttttgcttttctagctgagatttcccaagtgcatcctcagaagctctgggtgtgccagaggacccccagaactaagaagggagggcgagtgggtctccattccccgagaagccaggggcagggtgggatggggaagaccaggagcagagtcgagcctcacagaagccagcgcgggtctctgctcagcaccccagccggggctctggacccagggtaacagccccagttcatcccaacccctctcagagcctcaagaggggtagctcggctgccggaagagaggggtgccctatccctggcaacccctccacgtagcgtaccccagcacctgccaccgcctttgccatttctttgagcttgaagttaactctcttagagtctaactttggttcatttctgcacaggtacaatagatgactttatttgtttaaaatgtttaatatatatacatacatatatatatatttgtctgtaagaattatgttttaaacagctgctgtagagtacctttttttaagtaaatcttacagtggagtatattttttaaagcacaaaattggtgccaagactgggtgagaaatgtacattacccccttattattttgacggtttttttttttcggggcaggggaccttacctgtaagacttttaaagattttcctccctcctgtttcaggtgggtcacattctgatgaatgtttcccttgtacagatcccagcttatggccttgacccagccgtcctcacagatgccgggtgaccctctagctctctctgcatctcccaccccccgacaccctgggaccctcgaccccacccttctttcctaccagcccagagccttgtggcttgtacagttttgaaactcccgttctattttatgatggttgataatagtcagtaacctaataaaggaacgtttgttaaaatatcaaaaaaattgaa

SEQ ID NO: 449371 - DNA, 3070 bp, Homo sapiens
ttttttttctcctccgcacagaagtcgcgctcgggcagcctgcgcgctcgcagcaggaaccaggctccaggcgccggcgccggggccgcggggaggaggcgacttcgctccctgcggcgggcgcggcccgggcgcccgagcctcctcggccttggagagcagcggcggcggcggcaccccgggcgcggcaatactgaacactgcgcagcttgcagaggtctcctggcagccctcattaggaattctgtctggccccgatcagaatactggagacgagaccacgagattgatgagtttgccttgggagtcggtaagaaggtgaagccaggggcgaacatgggtcagaaggtcactggagggatcaagactgtggacatgagggaccccacgtacaggcccctgaagcaggagctccagggtctggattactgcaagcccacccggctggatctgctactggacatgccccctgtgtcctatgatgtccagctgctgcattcatggaacaacaacgaccgatcgctcaatgtctttgtgaaggaggacgacaagctcatctttcaccggcatccggtggcccagagcacggacgctatcaggggcaaagtcgggtatacccgtgggctgcacgtgtggcagatcacgtgggccatgagacagcggggcacacacgccgtggtgggggtggcgacggcagacgcccccctgcactctgtcgggtacacaaccctcgtggggaataaccacgagtcctggggctgggacttggggcgcaaccggctctaccacgatggcaagaaccagccaagcaaaacatacccagcctttctggaaccagatgagacattcattgtccctgactccttcctggtagccctggacatggacgacgggactctgagcttcattgtggatggacagtacatgggagtggcttttcggggactcaagggcaaaaaactgtatcctgtagtgagtgccgtctggggccactgtgagatccgaatgcgctacttgaacggactcgatcccgagccgctgccgctcatggatttgtgccgtcgctcggtgcgcctggccctggggagggagcgcctgggggagatccacacgctgccgctgccggcttccctcaaggcctacctcctctaccagtgacgttcgccatcataccgccagcgcgacagccacctggtgccaactcactgagccgcctgccgctggggccgccgcaccctgcaccttggaccggcatccgtagccatggacagaggtccctggtcttccctcatcctccgtggctgcctccatgggacaaggaccgattccaacacaggctcctctttcccccttcccgacatcagcggaaggcagcatccctgcatgccgtccatatacaacccctctttgaaaaaagacacagagaataaactcctacgaaagccctacattgagctccaatctgctcggggtgggacgggtgcttcccacacctctgggagaaggctgcagccacctgggggtcccagggtggtgggggtggcaggtggtaccacagctctgagagcagataccaggggtactaagaggtgcttagacaagggctggtgcccggcccagggtgcccagcggggccatgccatggcagataaagctcaggacgtcaaaaactcaccatggaccccaaggcagaaaccaagaactgtctgcaggcaaataagcacccagcacccatcctggctgccggtgccccgtaccctgtatttattcttttaacaataacaaaagccatttatttattccatctagaaaggaaaccctgtttcagtcccctctctctggctgttctgttactttccttccacctgtgccctccctgggatatgtatgcctcgcccgccctccctgggcacatgtgcacacgtgcccaggcacaagtatgtctctgggtcccttgccctgcagtttccagggggctctgctccaagttccctagcgggcccctcagggagaaatagcctcacgtgcaatctgggtgtcttcgggggcccgtctggaagggctgcagcaattcccctgtgtctccaggtaaccagctaactcttgggctcaggcacccttgcacagggttgcatttctttagtcttctgtgggtcttttgatgtgggtttgattttgcttttgcttttctagctgagatttcccaagtgcatcctcagaagctctgggtgtgccagaggacccccagaactaagaagggagggcgagtgggtctccattccccgagaagccaggggcagggtgggatggggaagaccaggagcagagtcgagcctcacagaagccagcgcgggtctctgctcagcaccccagccggggctctggacccagggtaacagccccagttcatcccaacccctctcagagcctcaagaggggtagctcggctgccggaagagaggggtgccctatccctggcaacccctccacgtagcgtaccccagcacctgccaccgcctttgccatttctttgagcttgaagttaactctcttagagtctaactttggttcatttctgcacaggtacaatagatgactttatttatgttttaaacagctgctgtagagtacctttttttaagtaaatcttacagtggagtatattttttaaagcacaaaattggtgccaagactgggtgagaaatgtacattacccccttattattttgacggtttttttttttcggggcaggggaccttacctgtaagacttttaaagattttcctccctcctgtttcaggtgggtcacattctgatgaatgtttcccttgtacagatcccagcttatggccttgacccagccgtcctcacagatgccgggtgaccctctagctctctctgcatctcccaccccccgacaccctgggaccctcgaccccacccttctttcctaccagcccagagccttgtggcttgtacagttttgaaactcccgttctattttatgatggttgataatagtcagtaacctaataaaggaacgtttgttaaaatatcaaaaaaattgaa

SEQ ID NO: 449372 - DNA, 3179 bp, Homo sapiens
ttttttttctcctccgcacagaagtcgcgctcgggcagcctgcgcgctcgcagcaggaaccaggctccaggcgccggcgccggggccgcggggaggaggcgacttcgctccctgcggcgggcgcggcccgggcgcccgagcctcctcggccttggagagcagcggcggcggcggcaccccgggcgcggcaatactgaacactgcgcagcttgcagaggtctcctggcagccctcattaggaattctgtctggccccgatcagaatactggagacgagaccacgagattgatgagtttgccttgggagtcggtaagaaggtgaagccaggggcgaacatgggtcagaaggtcactggagggatcaagactgtggacatgagggaccccacgtacaggcccctgaagcaggagctccagggtctggattactgcaagcccacccggctggatctgctactggacatgccccctgtgtcctatgatgtccagctgctgcattcatggaacaacaacgaccgatcgctcaatgtctttgtgaaggaggacgacaagctcatctttcaccggcatccggtggcccagagcacggacgctatcaggggcaaagtcgggtatacccgtgggctgcacgtgtggcagatcacgtgggccatgagacagcggggcacacacgccgtggtgggggtggcgacggcagacgcccccctgcactctgtcgggtacacaaccctcgtggggaataaccacgagtcctggggctgggacttggggcgcaaccggctctaccacgatggcaagaaccagccaagcaaaacatacccagcctttctggaaccagatgagacattcattgtccctgactccttcctggtagccctggacatggacgacgggactctgagcttcattgtggatggacagtacatgggagtggcttttcggggactcaagggcaaaaaactgtatcctgtagtgagtgccgtctggggccactgtgagatccgaatgcgctacttgaacggactcgatcccgagccgctgccgctcatggatttgtgccgtcgctcggtgcgcctggccctggggagggagcgcctgggggagatccacacgctgccgctgccggcttccctcaaggcctacctcctctaccagtgacgttcgccatcataccgccagcgcgacagccacctggtgccaactcactgagccgcctgccgctggggccgccgcaccctgcaccttggaccggcatccgtagccatggacagaggtccctggtcttccctcatcctccgtggctgcctccatgggacaaggaccgattccaacacaggctcctctttcccccttcccgacatcagcggaaggcagcatccctgcatgccgtccatatacaacccctctttgaaaaaagacacagagaataaactcctacgaaagccctacattgagctccaatctgctcggggtgggacgggtgcttcccacacctctgggagaaggctgcagccacctgggggtcccagggtggtgggggtggcaggtggtaccacagctctgagagcagataccaggggtactaagaggtgcttagacaagggctggtgcccggcccagggtgcccagcggggccatgccatggcagataaagctcaggacgtcaaaaactcaccatggaccccaaggcagaaaccaagaactgtctgcaggcaaataagcacccagcacccatcctggctgccggtgccccgtaccctgtatttattcttttaacaataacaaaagccatttatttattccatctagaaaggaaaccctgtttcagtcccctctctctggctgttctgttactttccttccacctgtgccctccctgggatatgtatgcctcgcccgccctccctgggcacatgtgcacacgtgcccaggcacaagtatgtctctgggtcccttgccctgcagtttccagggggctctgctccaagttccctagcgggcccctcagggagaaatagcctcacgtgcaatctgggtgtcttcgggggcccgtctggaagggctgcagcaattcccctgtgtctccaggtaaccagctaactcttgggctcaggcacccttgcacagggttgcatttctttagtcttctgtgggtcttttgatgtgggtttgattttgcttttgcttttctagctgagatttcccaagtgcatcctcagaagctctgggtgtgccagaggacccccagaactaagaagggagggcgagtgggtctccattccccgagaagccaggggcagggtgggatggggaagaccaggagcagagtcgagcctcacagaagccagcgcgggtctctgctcagcaccccagccggggctctggacccagggtaacagccccagttcatcccaacccctctcagagcctcaagaggggtagctcggctgccggaagagaggggtgccctatccctggcaacccctccacgtagcgtaccccagcacctgccaccgcctttgccatttctttgagcttgaagttaactctcttagagtctaactttggttcatttctgcacaggtacaatagatgactttatttgtttaaaatgtttaatatatatacatacatatatatatatttgtctgtaagaattatgttttaaacagctgctgtagagtacctttttttaagtaaatcttacagtggagtatattttttaaagcacaaaattggtgccaagactgggtgagaaatgtacattacccccttattattttgacggtttttttttttcggggcaggggaccttacctgtaagacttttaaagattttcctccctcctgtttcaggtgggtcacattctgatgaatgtttcccttgtacagatcccagcttatggccttgacccagccgtcctcacagatgccgggtgaccctctagctctctctgcatctcccaccccccgacaccctgggaccctcaacctctgggaagaaggaagggagggaggaaggacgggaggagggaaggaaggacggaaggacggaaggaaggcaggaaggacatgacatgacttctctgctggctctcctaatcagtgcatctatggacaggtatgtattgcagcagcgacagcacacctgcctcatcctggggctcctctagagtcta

SEQ ID NO: 449373 - DNA, 2155 bp, Homo sapiens
ttttttttctcctccgcacagaagtcgcgctcgggcagcctgcgcgctcgcagcaggaaccaggctccaggcgccggcgccggggccgcggggaggaggcgacttcgctccctgcggcgggcgcggcccgggcgcccgagcctcctcggccttggagagcagcggcggcggcggcaccccgggcgcggcaatactgaacactgcgcagcttgcagaggtctcctggcagccctcattaggaattctgtctggccccgatcagaatactggagacgagaccacgagattgatgagtttgccttgggagtcggtaagaaggtgaagccaggggcgaacatgggtcagaaggtcactggagggatcaagactgtggacatgagggaccccacgtacaggcccctgaagcaggagctccagggtctggattactgcaagcccacccggctggatctgctactggacatgccccctgtgtcctatgatgtccagctgctgcattcatggaacaacaacgaccgatcgctcaatgtctttgtgaaggaggacgacaagctcatctttcaccggcatccggtggcccagagcacggacgctatcaggggcaaagtcgggtatacccgtgggctgcacgtgtggcagatcacgtgggccatgagacagcggggcacacacgccgtggtgggggtggcgacggcagacgcccccctgcactctgtcgggtacacaaccctcgtggggaataaccacgagtcctggggctgggacttggggcgcaaccggctctaccacgatggcaagaaccagccaagcaaaacatacccagcctttctggaaccagatgagacattcattgtccctgactccttcctggtagccctggacatggacgacgggactctgagcttcattgtggatggacagtacatgggagtggcttttcggggactcaagggcaaaaaactgtatcctgtagtgagtgccgtctggggccactgtgagatccgaatgcgctacttgaacggactcgatcccgagccgctgccgctcatggatttgtgccgtcgctcggtgcgcctggccctggggagggagcgcctgggggagatccacacgctgccgctgccggcttccctcaaggcctacctcctctaccagtgacgttcgccatcataccgccagcgcgacagccacctggtgccaactcactgagccgcctgccgctggggccgccgcaccctgcaccttggaccggcatccgtagccatggacagaggtccctggtcttccctcatcctccgtggctgcctccatgggacaaggaccgattccaacacaggctcctctttcccccttcccgacatcagcggaaggcagcatccctgcatgccgtccatatacaacccctctttgaaaaaagacacagagaataaactcctacgaaagccctacattgagctccaatctgctcggggtgggacgggtgcttcccacacctctgggagaaggctgcagccacctgggggtcccagggtggtgggggtggcaggtggtaccacagctctgagagcagataccaggggtactaagaggtgcttagacaagggctggtgcccggcccagggtgcccagcggggccatgccatggcagataaagctcaggacgtcaaaaactcaccatggaccccaaggcagaaaccaagaactgtctgcaggcaaataagcacccagcacccatcctggctgccggtgccccgtaccctgtatttattcttttaacaataacaaaagccatttatttattccatctagaaaggaaaccctgtttcagtcccctctctctggctgttctgttactttccttccacctgtgccctccctgggatatgtatgcctcgcccgccctccctgggcacatgtgcacacgtgcccaggcacaagtatgtctctgggtcccttgccctgcagtttccagggggctctgctccaagttccctagcgggcccctcagggagaaatagcgaccccacccttctttcctaccagcccagagccttgtggcttgtacagttttgaaactcccgttctattttatgatggttgataatagtcagtaacctaataaaggaacgtttgttaaaatatcaaaaaaattgaa

SEQ ID NO: 449374 - DNA, 1347 bp, Homo sapiens
ttttttttctcctccgcacagaagtcgcgctcgggcagcctgcgcgctcgcagcaggaaccaggctccaggcgccggcgccggggccgcggggaggaggcgacttcgctccctgcggcgggcgcggcccgggcgcccgagcctcctcggccttggagagcagcggcggcggcggcaccccgggcgcggcaatactgaacactgcgcagcttgcagaggtctcctggcagccctcattaggaattctgtctggccccgatcagaatactggagacgagaccacgagattgatgagtttgccttgggagtcggtaagaaggtgaagccaggggcgaacatgggtcagaaggtcactggagggatcaagactgtggacatgagggaccccacgtacaggcccctgaagcaggagctccagggtctggattactgcaagcccacccggctggatctgctactggacatgccccctgtgtcctatgatgtccagctgctgcattcatggaacaacaacgaccgatcgctcaatgtctttgtgaaggaggacgacaagctcatctttcaccggcatccggtggcccagagcacggacgctatcaggggcaaagtcgggtatacccgtgggctgcacgtgtggcagatcacgtgggccatgagacagcggggcacacacgccgtggtgggggtggcgacggcagacgcccccctgcactctgtcgggtacacaaccctcgtggggaataaccacgagtcctggggctgggacttggggcgcaaccggctctaccacgatggcaagaaccagccaagcaaaacatacccagcctttctggaaccagatgagacattcattgtccctgactccttcctggtagccctggacatggacgacgggactctgagcttcattgtggatggacagtacatgggagtggcttttcggggactcaagggcaaaaaactgtatcctgtagtgagtgccgtctggggccactgtgagatccgaatgcgctacttgaacggactcgatcccgagccgctgccgctcatggatttgtgccgtcgctcggtgcgcctggccctggggagggagcgcctgggggagatccacacgctgccgctggggccgccgcaccctgcaccttggaccggcatccgtagccatggacagaggtccctggtcttccctcatcctccgtggctgcctccatgggacaaggaccgattccaacacaggctcctctttcccccttcccgacatcagcggaaggcagcatccctgcatgccgtccatatacaacccctctttgaaaaaagacacagagaataaactcctacgaaagcccta

SEQ ID NO: 449375 - DNA, 3125 bp, Homo sapiens
ttttttttctcctccgcacagaagtcgcgctcgggcagcctgcgcgctcgcagcaggaaccaggctccaggcgccggcgccggggccgcggggaggaggcgacttcgctccctgcggcgggcgcggcccgggcgcccgagcctcctcggccttggagagcagcggcggcggcggcaccccgggcgcggcaatactgaacactgcgcagcttgcagaggtctcctggcagccctcattaggaattctgtctggccccgatcagaatactggagacgagaccacgagattgatgagtttgccttgggagtcggtaagaaggtgaagccaggggcgaacatgggtcagaaggtcactggagggatcaagactgtggacatgagggaccccacgtacaggcccctgaagcaggagctccagggtctggattactgcaagcccacccggctggatctgctactggacatgccccctgtgtcctatgatgtccagctgctgcattcatggaacaacaacgaccgatcgctcaatgtctttgtgaaggaggacgacaagctcatctttcaccggcatccggtggcccagagcacggacgctatcaggggcaaagtcgggtatacccgtgggctgcacgtgtggcagatcacgtgggccatgagacagcggggcacacacgccgtggtgggggtggcgacggcagacgcccccctgcactctgtcgggtacacaaccctcgtggggaataaccacgagtcctggggctgggacttggggcgcaaccggctctaccacgatggcaagaaccagccaagcaaaacatacccagcctttctggaaccagatgagacattcattgtccctgactccttcctggtagccctggacatggacgacgggactctgagcttcattgtggatggacagtacatgggagtggcttttcggggactcaagggcaaaaaactgtatcctgtagtgagtgccgtctggggccactgtgagatccgaatgcgctacttgaacggactcgatcccgagccgctgccgctcatggatttgtgccgtcgctcggtgcgcctggccctggggagggagcgcctgggggagatccacacgctgccgctgccggcttccctcaaggcctacctcctctaccagtgacgttcgccatcataccgccagcgcgacagccacctggtgccaactcactgagccgcctgccgctggggccgccgcaccctgcaccttggaccggcatccgtagccatggacagaggtccctggtcttccctcatcctccgtggctgcctccatgggacaaggaccgattccaacacaggctcctctttcccccttcccgacatcagcggaaggcagcatccctgcatgccgtccatatacaacccctctttgaaaaaagacacagagaataaactcctacgaaagccctacattgagctccaatctgctcggggtgggacgggtgcttcccacacctctgggagaaggctgcagccacctgggggtcccagggtggtgggggtggcaggtggtaccacagctctgagagcagataccaggggtactaagaggtgcttagacaagggctggtgcccggcccagggtgcccagcggggccatgccatggcagataaagctcaggacgtcaaaaactcaccatggaccccaaggcagaaaccaagaactgtctgcaggcaaataagcacccagcacccatcctggctgccggtgccccgtaccctgtatttattcttttaacaataacaaaagccatttatttattccatctagaaaggaaaccctgtttcagtcccctctctctggctgttctgttactttccttccacctgtgccctccctgggatatgtatgcctcgcccgccctccctgggcacatgtgcacacgtgcccaggcacaagtatgtctctgggtcccttgccctgcagtttccagggggctctgctccaagttccctagcgggcccctcagggagaaatagcctcacgtgcaatctgggtgtcttcgggggcccgtctggaagggctgcagcaattcccctgtgtctccaggtaaccagctaactcttgggctcaggcacccttgcacagggttgcatttctttagtcttctgtgggtcttttgatgtgggtttgattttgcttttgcttttctagctgagatttcccaagtgcatcctcagaagctctgggtgtgccagaggacccccagaactaagaagggagggcgagtgggtctccattccccgagaagccaggggcagggtgggatggggaagaccaggagcagagtcgagcctcacagaagccagcgcgggtctctgctcagcaccccagccggggctctggacccagggtaacagccccagttcatcccaacccctctcagagcctcaagaggggtagctcggctgccggaagagaggggtgccctatccctggcaacccctccacgtagcgtaccccagcacctgccaccgcctttgccatttctttgagcttgaagttaactctcttagagtctaactttggttcatttctgcacaggtacaatagatgactttatttgtttaaaatgtttaatatatatacatacatatatatatatttgtctgtaagaattatgttttaaacagctgctgtagagtacctttttttaagtaaatcttacagtggagtatattttttaaagcacaaaattggtgccaagactgggtgagaaatgtacattacccccttattattttgacggtttttttttttcggggcaggggaccttacctgtaagacttttaaagattttcctccctcctgtttcaggtgggtcacattctgatgaatgtttcccttgtacagatcccagcttatggccttgacccagccgtcctcacagatgccgggtgaccctctagctctctctgcatctcccaccccccgacaccctgggaccctcgaccccacccttctttcctaccagcccagagccttgtggcttgtacagttttgaaactcccgttctattttatgatggttgataatagtcagtaacctaataaaggaacgtttgttaaaatatcaaaaaaattgaa

SEQ ID NO: 449376 - DNA, 2900 bp, Homo sapiens
ttttttttctcctccgcacagaagtcgcgctcgggcagcctgcgcgctcgcagcaggaaccaggctccaggcgccggcgccggggccgcggggaggaggcgacttcgctccctgcggcgggcgcggcccgggcgcccgagcctcctcggccttggagagcagcggcggcggcggcaccccgggcgcggcaatactgaacactgcgcagcttgcagaggtctcctggcagccctcattaggaattctgtctggccccgatcagaatactggagacgagaccacgagattgatgagtttgccttgggagtcggtaagaaggtgaagccaggggcgaacatgggtcagaaggtcactggagggatcaagactgtggacatgagggaccccacgtacaggcccctgaagcaggagctccagggtctggattactgcaagcccacccggctggatctgctactggacatgccccctgtgtcctatgatgtccagctgctgcattcatggaacaacaacgaccgatcgctcaatgtctttgtgaaggaggacgacaagctcatctttcaccggcatccggtggcccagagcacggacgctatcaggggcaaagtcgggtatacccgtgggctgcacgtgtggcagatcacgtgggccatgagacagcggggcacacacgccgtggtgggggtggcgacggcagacgcccccctgcactctgtcgggtacacaaccctcgtggggaataaccacgagtcctggggctgggacttggggcgcaaccggctctaccacgatggcaagaaccagccaagcaaaacatacccagcctttctggaaccagatgagacattcattgtccctgactccttcctggtagccctggacatggacgacgggactctgagcttcattgtggatggacagtacatgggagtggcttttcggggactcaagggcaaaaaactgtatcctgtagtgagtgccgtctggggccactgtgagatccgaatgcgctacttgaacggactcgatcccgagccgctgccgctcatggatttgtgccgtcgctcggtgcgcctggccctggggagggagcgcctgggggagatccacacgctgccgctgccggcttccctcaaggcctacctcctctaccagtgacgttcgccatcataccgccagcgcgacagccacctggtgccaactcactgagccgcctgccgctggggccgccgcaccctgcaccttggaccggcatccgtagccatggacagaggtccctggtcttccctcatcctccgtggctgcctccatgggacaaggaccgattccaacacaggctcctctttcccccttcccgacatcagcggaaggcagcatccctgcatgccgtccatatacaacccctctttgaaaaaagacacagataaagctcaggacgtcaaaaactcaccatggaccccaaggcagaaaccaagaactgtctgcaggcaaataagcacccagcacccatcctggctgccggtgccccgtaccctgtatttattcttttaacaataacaaaagccatttatttattccatctagaaaggaaaccctgtttcagtcccctctctctggctgttctgttactttccttccacctgtgccctccctgggatatgtatgcctcgcccgccctccctgggcacatgtgcacacgtgcccaggcacaagtatgtctctgggtcccttgccctgcagtttccagggggctctgctccaagttccctagcgggcccctcagggagaaatagcctcacgtgcaatctgggtgtcttcgggggcccgtctggaagggctgcagcaattcccctgtgtctccaggtaaccagctaactcttgggctcaggcacccttgcacagggttgcatttctttagtcttctgtgggtcttttgatgtgggtttgattttgcttttgcttttctagctgagatttcccaagtgcatcctcagaagctctgggtgtgccagaggacccccagaactaagaagggagggcgagtgggtctccattccccgagaagccaggggcagggtgggatggggaagaccaggagcagagtcgagcctcacagaagccagcgcgggtctctgctcagcaccccagccggggctctggacccagggtaacagccccagttcatcccaacccctctcagagcctcaagaggggtagctcggctgccggaagagaggggtgccctatccctggcaacccctccacgtagcgtaccccagcacctgccaccgcctttgccatttctttgagcttgaagttaactctcttagagtctaactttggttcatttctgcacaggtacaatagatgactttatttgtttaaaatgtttaatatatatacatacatatatatatatttgtctgtaagaattatgttttaaacagctgctgtagagtacctttttttaagtaaatcttacagtggagtatattttttaaagcacaaaattggtgccaagactgggtgagaaatgtacattacccccttattattttgacggtttttttttttcggggcaggggaccttacctgtaagacttttaaagattttcctccctcctgtttcaggtgggtcacattctgatgaatgtttcccttgtacagatcccagcttatggccttgacccagccgtcctcacagatgccgggtgaccctctagctctctctgcatctcccaccccccgacaccctgggaccctcgaccccacccttctttcctaccagcccagagccttgtggcttgtacagttttgaaactcccgttctattttatgatggttgataatagtcagtaacctaataaaggaacgtttgttaaaatatcaaaaaaattgaa

SEQ ID NO: 449377 - DNA, 1459 bp, Homo sapiens
aagcccctctcgaaagaagggggcagaaaccaagaactgtctgcaggcaaataagcacccagcacccatcctggctgccggtgccccgtaccctgtatttattcttttaacaataacaaaagccatttatttattccatctagaaaggaaaccctgtttcagtcccctctctctggctgttctgttactttccttccacctgtgccctccctgggatatgtatgcctcgcccgccctccctgggcacatgtgcacacgtgcccaggcacaagtatgtctctgggtcccttgccctgcagtttccagggggctctgctccaagttccctagcgggcccctcagggagaaatagcctcacgtgcaatctgggtgtcttcgggggcccgtctggaagggctgcagcaattcccctgtgtctccaggtaaccagctaactcttgggctcaggcacccttgcacagggttgcatttctttagtcttctgtgggtcttttgatgtgggtttgattttgcttttgcttttctagctgagatttcccaagtgcatcctcagaagctctgggtgtgccagaggacccccagaactaagaagggagggcgagtgggtctccattccccgagaagccaggggcagggtgggatggggaagaccaggagcagagtcgagcctcacagaagccagcgcgggtctctgctcagcaccccagccggggctctggacccagggtaacagccccagttcatcccaacccctctcagagcctcaagaggggtagctcggctgccggaagagaggggtgccctatccctggcaacccctccacgtagcgtaccccagcacctgccaccgcctttgccatttctttgagcttgaagttaactctcttagagtctaactttggttcatttctgcacaggtacaatagatgactttatttgtttaaaatgtttaatatatatacatacatatatatatatttgtctgtaagaattatgttttaaacagctgctgtagagtacctttttttaagtaaatcttacagtggagtatattttttaaagcacaaaattggtgccaagactgggtgagaaatgtacattacccccttattattttgacggtttttttttttcggggcaggggaccttacctgtaagacttttaaagattttcctccctcctgtttcaggtgggtcacattctgatgaatgtttcccttgtacagatcccagcttatggccttgacccagccgtcctcacagatgccgggtgaccctctagctctctctgcatctcccaccccccgacaccctgggaccctcgaccccacccttctttcctaccagcccagagccttgtggcttgtacagttttgaaactcccgttctattttatgatggttgataatagtcagtaacctaataaaggaacgtttgttaaaatatcaaaaaaattgaa

SEQ ID NO: 449378 - DNA, 2908 bp, Homo sapiens
ttttttttctcctccgcacagaagtcgcgctcgggcagcctgcgcgctcgcagcaggaaccaggctccaggcgccggcgccggggccgcggggaggaggcgacttcgctccctgcggcgggcgcggcccgggcgcccgagcctcctcggccttggagagcagcggcggcggcggcaccccgggcgcggcaatactgaacactgcgcagcttgcagaggtctcctggcagccctcattaggaattctgtctggccccgatcagaatactggagacgagaccacgagattgatgagtttgccttgggagtcggtaagaaggtgaagccaggggcgaacatgggtcagaaggtcactggagggatcaagactgtggacatgagggaccccacgtacaggcccctgaagcaggagctccagggtctggattactgcaagcccacccggctggatctgctactggacatgccccctgtgtcctatgatgtccagctgctgcattcatggaacaacaacgaccgatcgctcaatgtctttgtgaaggaggacgacaagctcatctttcaccggcatccggtggcccagagcacggacgctatcaggggcaaagtcgggtatacccgtgggctgcacgtgtggcagatcacgtgggccatgagacagcggggcacacacgccgtggtgggggtggcgacggcagacgcccccctgcactctgtcgggtacacaaccctcgtggggaataaccacgagtcctggggctgggacttggggcgcaaccggctctaccacgatggcaagaaccagccaagcaaaacatacccagcctttctggaaccagatgagacattcattgtccctgactccttcctggtagccctggacatggacgacgggactctgagcttcattgtggatggacagtacatgggagtggcttttcggggactcaagggcaaaaaactgtatcctgtagtgagtgccgtctggggccactgtgagatccgaatgcgctacttgaacggactcgatcccgagccgctgccgctcatggatttgtgccgtcgctcggtgcgcctggccctggggagggagcgcctgggggagatccacacgctgccgctgccggcttccctcaaggcctacctcctctaccagtgacgttcgccatcataccgccagcgcgacagccacctggtgccaactcactgagccgcctgccgctggggccgccgcaccctgcaccttggaccggcatccgtagccatggacagaggtccctggtcttccctcatcctccgtggctgcctccatgggacaaggaccgattccaacacaggctcctctttcccccttcccgacatcagcggaaggcagcatccctgcatgccgtccatatacaacccctctttgaaaaaagacacagagaataaactcctacgaaagccctacattgagctccaatctgctcggggtgggacgggtgcttcccacacctctgggagaaggctgcagccacctgggggtcccagggtggtgggggtggcaggtggtaccacagctctgagagcagataccaggggtactaagaggtgcttagacaagggctggtgcccggcccagggtgcccagcggggccatgccatggcagataaagctcaggacgtcaaaaactcaccatggaccccaaggcagaaaccaagaactgtctgcaggcaaataagcacccagcacccatcctggctgccggtgccccgtaccctgtatttattcttttaacaataacaaaagccatttatttattccatctagaaaggaaaccctgtttcagtcccctctctctggctgttctgttactttccttccacctgtgccctccctgggatatgtatgcctcgcccgccctccctgggcacatgtgcacacgtgcccaggcacaagtatgtctctgggtcccttgccctgcagtttccagggggctctgctccaagttccctagcgggcccctcagggagaaatagcctcacgtgcaatctgggtgtcttcgggggcccgtctggaagggctgcagcaattcccctgtgtctccaggtaaccagctaactcttgggctcaggcacccttgcacagggttgcatttctttagtcttctgtgggtcttttgatgtgggtttgattttgcttttgcttttctagctgagatttcccaagtgcatcctcagaagctctgggtgtgccagaggacccccagaactaagaagggagggcgagtgggtctccattccccgagaagccaggggcagggtgggatggggaagaccaggagcagagtcgagcctcacagaagccagcgcgggtctctgctcagcaccccagccggggctctggacccagggtaacagccccagttcatcccaacccctctcagagcctcaagaggggtagctcggctgccggaagagaggggtgccctatccctggcaacccctccacgtagcgtaccccagcacctgccaccgcctttgccatttctttgagcttgaagttaactctcttagagtctaactttggttcatttctgcacaggtacaatagatgactttatttgtttaaaatgtttaatatatatacatacatatatatatatttgtctgtaagaattatgttttaaacagctgctgtagagtacctttttttaagtaaatcttacagtggagtatattttttaaagcacaaaattggtgccaagactgggtgagaaatgtacattaccccgaccccacccttctttcctaccagcccagagccttgtggcttgtacagttttgaaactcccgttctattttatgatggttgataatagtcagtaacctaataaaggaacgtttgttaaaatatcaaaaaaattgaa

SEQ ID NO: 449379 - DNA, 1448 bp, Homo sapiens
ttttttttctcctccgcacagaagtcgcgctcgggcagcctgcgcgctcgcagcaggaaccaggctccaggcgccggcgccggggccgcggggaggaggcgacttcgctccctgcggcgggcgcggcccgggcgcccgagcctcctcggccttggagagcagcggcggcggcggcaccccgggcgcggcaatactgaacactgcgcagcttgcagaggtctcctggcagccctcattaggaattctgtctggccccgatcagaatactggagacgagaccacgagattgatgagtttgccttgggagtcggtaagaaggtgaagccaggggcgaacatgggtcagaaggtcactggagggatcaagactgtggacatgagggaccccacgtacaggcccctgaagcaggagctccagggtctggattactgcaagcccacccggctggatctgctactggacatgccccctgtgtcctatgatgtccagctgctgcattcatggaacaacaacgaccgatcgctcaatgtctttgtgaaggaggacgacaagctcatctttcaccggcatccggtggcccagagcacggacgctatcaggggcaaagtcgggtatacccgtgggctgcacgtgtggcagatcacgtgggccatgagacagcggggcacacacgccgtggtgggggtggcgacggcagacgcccccctgcactctgtcgggtacacaaccctcgtggggaataaccacgagtcctggggctgggacttggggcgcaaccggctctaccacgatggcaagaaccagccaagcaaaacatacccagcctttctggaaccagatgagacattcattgtccctgactccttcctggtagccctggacatggacgacgggactctgagcttcattgtggatggacagtacatgggagtggcttttcggggactcaagggcaaaaaactgtatcctgtagtgagtgccgtctggggccactgtgagatccgaatgcgctacttgaacggactcgatcccgagccgctgccgctcatggatttgtgccgtcgctcggtgcgcctggccctggggagggagcgcctgggggagatccacacgctgccgctgccggcttccctcaaggcctacctcctctaccagtgacgttcgccatcataccgccagcgcgacagccacctggtgccaactcactgagccgcctgccgctggggccgccgcaccctgcaccttggaccggcatccgtagccatggacagaggtccctggtcttccctcatcctccgtggctgcctccatgggacaaggaccgattccaacacaggctcctctttcccccttcccgacatcagcggaaggcagcatccctgcatgccgtccatatacaacccctctttgaaaaaagacacagagaataaactcctacgaaagcccta

SEQ ID NO: 449380 - DNA, 454 bp, Homo sapiens
  misc_feature (63)..(63): n is a, c, g, or t
ccacatcccctctgcagacttttttcacttggctgatgtttctcctccttcaagttcaccttngacatcatttcctctgtgaaaacttttttttgacatgcaggagagtttatcctaatagattgtgaggtccttgaggacaaagtcaatatctaataaccatctttttatttcacacagcacagcacacaacttatcttataatgttggtcagtataagcagttgaatggatgggtgtatgcatggatggatagatgaatgaatgaatggatggatggatggatggatgaatgaatgaaacatatactactgattattttattccagagttctcaaaatatttgttgctgatattttgagtgctgactgtaattactttgattagataaacaactggaaataatgctgctgaaaaagttctaataaatgtgtattttatcagatgttttctgt

SEQ ID NO: 449381 - DNA, 4359 bp, Homo sapiens
gcagacctaaaggagcgttcgctagcagaggcgctgccggtgcggtgtgctacgcgcgcccacctcccggggaaggaacggcgaggccggggaccgtcgcggagatggatcgcgggccggcagcagtggcgtgcacgctgctcctggctctcgtcgcctgcctagcgccggccagtggccaagaatgtgacagtgcgcattttcgctgtggaagtgggcattgcatccctgcagactggaggtgtgatgggaccaaagactgttcagatgacgcggatgaaattggctgcgctgttgtgacctgccagcagggctatttcaagtgccagagtgagggacaatgcatccccagctcctgggtgtgtgaccaagatcaagactgtgatgatggctcagatgaacgtcaagattgctcacaaagtacatgctcaagtcatcagataacatgctccaatggtcagtgtatcccaagtgaatacaggtgcgaccacgtcagagactgccccgatggagctgatgagaatgactgccagtacccaacatgtgagcagcttacttgtgacaatggggcctgctataacaccagtcagaagtgtgattggaaagttgattgcagggactcctcagatgaaatcaactgcactgagatatgcttgcacaatgagttttcatgtggcaatggagagtgtatccctcgtgcttatgtctgtgaccatgacaatgattgccaagacggcagtgatgaacatgcttgcaactatccgacctgcggtggttaccagttcacttgccccagtggccgatgcatttatcaaaactgggtttgtgatggagaagatgactgtaaagataatggagatgaagatggatgtgaaagcggtcctcatgatgttcataaatgttccccaagagaatggtcttgcccagagtcgggacgatgcatctccatttataaagtttgtgatgggattttagattgcccaggaagagaagatgaaaacaacactagtaccggaaaatactgtagtatgactctgtgctctgccttgaactgccagtaccagtgccatgagacgccgtatggaggagcgtgtttttgtcccccaggttatatcatcaaccacaatgacagccgtacctgtgttgagtttgatgattgccagatatggggaatttgtgaccagaagtgtgaaagccgacctggccgtcacctgtgccactgtgaagaagggtatatcttggagcgtggacagtattgcaaagctaatgattcctttggcgaggcctccattatcttctccaatggtcgggatttgttaattggtgatattcatggaaggagcttccggatcctagtggagtctcagaatcgtggagtggccgtgggtgtggctttccactatcacctgcaaagagttttttggacagacaccgtgcaaaataaggttttttcagttgacattaatggtttaaatatccaagaggttctcaatgtttctgttgaaaccccagagaacctggctgtggactgggttaataataaaatctatctagtggaaaccaaggtcaaccgcatagatatggtaaatttggatggaagctatcgggttacccttataactgaaaacttggggcatcctagaggaattgccgtggacccaactgttggttatttatttttctcagattgggagagcctttctggggaacctaagctggaaagggcattcatggatggcagcaaccgtaaagacttggtgaaaacaaagctgggatggcctgctggggtaactctggatatgatatcgaagcgtgtttactgggttgactctcggtttgattacattgaaactgtaacttatgatggaattcaaaggaagactgtagttcatggaggctccctcattcctcatccctttggagtaagcttatttgaaggtcaggtgttctttacagattggacaaagatggccgtgctgaaggcaaacaagttcacagagaccaacccacaagtgtactaccaggcttccctgaggccctatggagtgactgtttaccattccctcagacagccctatgctaccaatccgtgtaaagataacaatgggggctgtgagcaggtctgtgttctcagccacagaacagataatgatggtttgggtttccgttgcaagtgcacattcggcttccaactggatacagatgagcgccactgcattgctgttcagaatttcctcattttttcatcccaagttgctattcgtgggatcccgttcaccttgtctacccaggaagatgtcatggttccagtttcggggaatccttctttctttgtcgggattgattttgacgcccaggacagcactatctttttttcagatatgtcaaaacacatgatttttaagcaaaagattgatggcacaggaagagaaattctcgcagctaacagggtggaaaatgttgaaagtttggcttttgattggatttcaaagaatctctattggacagactctcattacaagagtatcagtgtcatgaggctagctgataaaacgagacgcacagtagttcagtatttaaataacccacggtcggtggtagttcatccttttgccgggtatctattcttcactgattggttccgtcctgctaaaattatgagagcatggagtgacggatctcacctcttgcctgtaataaacactactcttggatggcccaatggcttggccatcgattgggctgcttcacgattgtactgggtagatgcctattttgataaaattgagcacagcacctttgatggtttagacagaagaagactgggccatatagagcagatgacacatccgtttggacttgccatctttggagagcatttattttttactgactggagactgggtgccattattcgagtcaggaaagcagatggtggagaaatgacagttatccgaagtggcattgcttacatactgcatttgaaatcgtatgatgtcaacatccagactggttctaacgcctgtaatcaacccacgcatcctaacggtgactgcagccacttctgcttcccggtgccaaatttccagcgagtgtgtgggtgcccttatggaatgaggctggcttccaatcacttgacatgcgagggggacccaaccaatgaaccacccacggagcagtgtggcttattttccttcccctgtaaaaatggcagatgtgtgcccaattactatctctgtgatggagtcgatgattgtcatgataacagtgatgagcaactatgtggcacacttaataatacctgttcatcttcggcgttcacctgtggccatggggagtgcattcctgcacactggcgctgtgacaaacgcaacgactgtgtggatggcagtgatgagcacaactgccccacccacgcacctgcttcctgccttgacacccaatacacctgtgataatcaccagtgtatctcaaagaactgggtctgtgacacagacaatgattgtggggatggatctgatgaaaagaactgcaattcgacagagacatgccaacctagtcagtttaattgccccaatcatcgatgtattgacctatcgtttgtctgtgatggtgacaaggattgtgttgatggatctgatgaggttggttgtgtattaaactgtactgcttctcaattcaagtgtgccagtggggataaatgtattggcgtcacaaatcgttgtgatggtgtttttgattgcagtgacaactcggatgaagcgggctgtccaaccaggcctcctggtatgtgccactcagatgaatttcagtgccaagaagatggtatctgcatcccgaacttctgggaatgtgatgggcatccagactgcctctatggatctgatgagcacaatgcctgtgtccccaagacttgcccttcatcatatttccactgtgacaacggaaactgcatccacagggcatggctctgtgatcgggacaatgactgcggggatatgagtgatgagaaggactgccctactcagccctttcgctgtcctagttggcaatggcagtgtcttggccataacatctgtgtgaatctgagtgtagtgtgtgatggcatctttgactgccccaatgggacagatgagtccccactttgcagtaagtttcctgaccacagtttactggccataaactcattctgaacagtagcctggtgtgcatcaccattgtcacagtcactgtgtagctttgtaggaaggatttcagttcctctatgagttcacatctgtgtagggggtaaccataattgaattcaaatacatcaccattggataattttctgattaaatcctttgtacttggttatgt

SEQ ID NO: 449382 - DNA, 345 bp, Homo sapiens
ctcctggtcttctgatccacatctgtgacttgggtttttctcatgacttgtatgcttgtggtagttaagaactatctctgtagccagtactggagatagcctgaatggtaagccttgtgtattcctgtgacacactgaaaaatcgtttgaagcctacccagtggtgctgaacctttgtttgcctttcctctgagtgtaaggactgttcaagaaatacagcagctggcagtagccacagtgaagaaagggttcttttgtaggagccatggccttggaactgctcacctccccttgtctttctttccagggtgaaattcacagagtgaagacagatggcaccaacag

SEQ ID NO: 449383 - DNA, 15638 bp, Homo sapiens
  misc_feature (8693)..(8693): n is a, c, g, or t
gcagacctaaaggagcgttcgctagcagaggcgctgccggtgcggtgtgctacgcgcgcccacctcccggggaaggaacggcgaggccggggaccgtcgcggagatggatcgcgggccggcagcagtggcgtgcacgctgctcctggctctcgtcgcctgcctagcgccggccagtggccaagaatgtgacagtgcgcattttcgctgtggaagtgggcattgcatccctgcagactggaggtgtgatgggaccaaagactgttcagatgacgcggatgaaattggctgcgctgttgtgacctgccagcagggctatttcaagtgccagagtgagggacaatgcatccccagctcctgggtgtgtgaccaagatcaagactgtgatgatggctcagatgaacgtcaagattgctcacaaagtacatgctcaagtcatcagataacatgctccaatggtcagtgtatcccaagtgaatacaggtgcgaccacgtcagagactgccccgatggagctgatgagaatgactgccagtacccaacatgtgagcagcttacttgtgacaatggggcctgctataacaccagtcagaagtgtgattggaaagttgattgcagggactcctcagatgaaatcaactgcactgagatatgcttgcacaatgagttttcatgtggcaatggagagtgtatccctcgtgcttatgtctgtgaccatgacaatgattgccaagacggcagtgatgaacatgcttgcaactatccgacctgcggtggttaccagttcacttgccccagtggccgatgcatttatcaaaactgggtttgtgatggagaagatgactgtaaagataatggagatgaagatggatgtgaaagcggtcctcatgatgttcataaatgttccccaagagaatggtcttgcccagagtcgggacgatgcatctccatttataaagtttgtgatgggattttagattgcccaggaagagaagatgaaaacaacactagtaccggaaaatactgtagtatgactctgtgctctgccttgaactgccagtaccagtgccatgagacgccgtatggaggagcgtgtttttgtcccccaggttatatcatcaaccacaatgacagccgtacctgtgttgagtttgatgattgccagatatggggaatttgtgaccagaagtgtgaaagccgacctggccgtcacctgtgccactgtgaagaagggtatatcttggagcgtggacagtattgcaaagctaatgattcctttggcgaggcctccattatcttctccaatggtcgggatttgttaattggtgatattcatggaaggagcttccggatcctagtggagtctcagaatcgtggagtggccgtgggtgtggctttccactatcacctgcaaagagttttttggacagacaccgtgcaaaataaggttttttcagttgacattaatggtttaaatatccaagaggttctcaatgtttctgttgaaaccccagagaacctggctgtggactgggttaataataaaatctatctagtggaaaccaaggtcaaccgcatagatatggtaaatttggatggaagctatcgggttacccttataactgaaaacttggggcatcctagaggaattgccgtggacccaactgttggttatttatttttctcagattgggagagcctttctggggaacctaagctggaaagggcattcatggatggcagcaaccgtaaagacttggtgaaaacaaagctgggatggcctgctggggtaactctggatatgatatcgaagcgtgtttactgggttgactctcggtttgattacattgaaactgtaacttatgatggaattcaaaggaagactgtagttcatggaggctccctcattcctcatccctttggagtaagcttatttgaaggtcaggtgttctttacagattggacaaagatggccgtgctgaaggcaaacaagttcacagagaccaacccacaagtgtactaccaggcttccctgaggccctatggagtgactgtttaccattccctcagacagccctatgctaccaatccgtgtaaagataacaatgggggctgtgagcaggtctgtgttctcagccacagaacagataatgatggtttgggtttccgttgcaagtgcacattcggcttccaactggatacagatgagcgccactgcattgctgttcagaatttcctcattttttcatcccaagttgctattcgtgggatcccgttcaccttgtctacccaggaagatgtcatggttccagtttcggggaatccttctttctttgtcgggattgattttgacgcccaggacagcactatctttttttcagatatgtcaaaacacatgatttttaagcaaaagattgatggcacaggaagagaaattctcgcagctaacagggtggaaaatgttgaaagtttggcttttgattggatttcaaagaatctctattggacagactctcattacaagagtatcagtgtcatgaggctagctgataaaacgagacgcacagtagttcagtatttaaataacccacggtcggtggtagttcatccttttgccgggtatctattcttcactgattggttccgtcctgctaaaattatgagagcatggagtgacggatctcacctcttgcctgtaataaacactactcttggatggcccaatggcttggccatcgattgggctgcttcacgattgtactgggtagatgcctattttgataaaattgagcacagcacctttgatggtttagacagaagaagactgggccatatagagcagatgacacatccgtttggacttgccatctttggagagcatttattttttactgactggagactgggtgccattattcgagtcaggaaagcagatggtggagaaatgacagttatccgaagtggcattgcttacatactgcatttgaaatcgtatgatgtcaacatccagactggttctaacgcctgtaatcaacccacgcatcctaacggtgactgcagccacttctgcttcccggtgccaaatttccagcgagtgtgtgggtgcccttatggaatgaggctggcttccaatcacttgacatgcgagggggacccaaccaatgaaccacccacggagcagtgtggcttattttccttcccctgtaaaaatggcagatgtgtgcccaattactatctctgtgatggagtcgatgattgtcatgataacagtgatgagcaactatgtggcacacttaataatacctgttcatcttcggcgttcacctgtggccatggggagtgcattcctgcacactggcgctgtgacaaacgcaacgactgtgtggatggcagtgatgagcacaactgccccacccacgcacctgcttcctgccttgacacccaatacacctgtgataatcaccagtgtatctcaaagaactgggtctgtgacacagacaatgattgtggggatggatctgatgaaaagaactgcaattcgacagagacatgccaacctagtcagtttaattgccccaatcatcgatgtattgacctatcgtttgtctgtgatggtgacaaggattgtgttgatggatctgatgaggttggttgtgtattaaactgtactgcttctcaattcaagtgtgccagtggggataaatgtattggcgtcacaaatcgttgtgatggtgtttttgattgcagtgacaactcggatgaagcgggctgtccaaccaggcctcctggtatgtgccactcagatgaatttcagtgccaagaagatggtatctgcatcccgaacttctgggaatgtgatgggcatccagactgcctctatggatctgatgagcacaatgcctgtgtccccaagacttgcccttcatcatatttccactgtgacaacggaaactgcatccacagggcatggctctgtgatcgggacaatgactgcggggatatgagtgatgagaaggactgccctactcagccctttcgctgtcctagttggcaatggcagtgtcttggccataacatctgtgtgaatctgagtgtagtgtgtgatggcatctttgactgccccaatgggacagatgagtccccactttgcaatgggaacagctgctcagatttcaatggtggttgtactcacgagtgtgttcaagagccctttggggctaaatgcctatgtccattgggattcttacttgccaatgattctaagacctgtgaagacatagatgaatgtgatattctaggctcttgtagccagcactgttacaatatgagaggttctttccggtgctcgtgtgatacaggctacatgttagaaagtgatgggaggacttgcaaagttacagcatctgagagtctgctgttacttgtggcaagtcagaacaaaattattgccgacagtgtcacctcccaggtccacaatatctattcattggtcgagaatggttcttacattgtagctgttgattttgattcaattagtggtcgtatcttttggtctgatgcaactcagggtaaaacctggagtgcgtttcaaaatggaacggacagaagagtggtatttgacagtagcatcatcttgactgaaactattgcaatagattgggtaggtcgtaatctttactggacagactatgctctggaaacaattgaagtctccaaaattgatgggagccacaggactgtgctgattagtaaaaacctaacaaatccaagaggactagcattagatcccagaatgaatgagcatctactgttctggtctgactggggccaccaccctcgcatcgagcgagccagcatggacggcagcatgcgcactgtcattgtccaggacaagatcttctggccctgcggcttaactattgactaccccaacagactgctctacttcatggactcctatcttgattacatggacttttgcgattataatggacaccatcggagacaggtgatagccagtgatttgattatacggcacccctatgccctaactctctttgaagactctgtgtactggactgaccgtgctactcgtcgggttatgcgagccaacaagtggcatggagggaaccagtcagttgtaatgtataatattcaatggccccttgggattgttgcggttcatccttcgaaacaaccaaattccgtgaatccatgtgccttttcccgctgcagccatctctgcctgctttcctcacaggggcctcatttttactcctgtgtttgtccttcaggatggagtctgtctcctgatctcctgaattgcttgagagatgatcaacctttcttaataactgtaaggcaacatataatttttggaatctcccttaatcctgaggtgaagagcaatgatgctatggtccccatagcagggatacagaatggtttagatgttgaatttgatgatgctgagcaatacatctattgggttgaaaatccaggtgaaattcacagagtgaagacagatggcaccaacaggacagtatttgcttctatatctatggtggggccttctatgaacctggccttagattggatttcaagaaacctttattctaccaatcctagaactcagtcaatcgaggttttgacactccacggagatatcagatacagaaaaacattgattgccaatgatgggacagctcttggagttggctttccaattggcataactgttgatcctgctcgtgggaagctgtactggtcagaccaaggaactgacagtggggttcctgccaagatcgccagtgctaacatggatggcacatctgtgaaaactctctttactgggaacctcgaacacctggagtgtgtcactcttgacatcgaagagcagaaactctactgggcagtcactggaagaggagtgattgaaagaggaaacgtggatggaacagatcggatgatcctggtacaccagctttcccacccctggggaattgcagtccatgattctttcctttattatactgatgaacagtatgaggtcattgaaagagttgataaggccactggggccaacaaaatagtcttgagagataatgttccaaatctgaggggtcttcaagtttatcacagacgcaatgccgccgaatcctcaaatggctgtagcaacaacatgaatgcctgtcagcagatttgcctgcctgtaccaggaggattgttttcctgcgcctgtgccactggatttaaactcaatcctgataatcggtcctgctctccatataactctttcattgttgtttcaatgctgtctgcaatcagaggctttagcttggaattgtcagatcattcagaaaccatggtgccggtggcaggccaaggacgaaacgcactgcatgtggatgtggatgtgtcctctggctttatttattggtgtgattttagcagctcagtggcatctgataatgcgatccgtagaattaaaccagatggatcttctctgatgaacattgtgacacatggaataggagaaaatggagtccggggtattgcagtggattgggtagcaggaaatctttatttcaccaatgcctttgtttctgaaacactgatagaagttctgcggatcaatactacttaccgccgtgttcttcttaaagtcacagtggacatgcctaggcatattgttgtagatcccaagaacagatacctcttctgggctgactatgggcagagaccaaagattgagcgttctttccttgactgtaccaatcgaacagtgcttgtgtcagagggcattgtcacaccacggggcttggcagtggaccgaagtgatggctacgtttattgggttgatgattctttagatataattgcaaggattcgtatcaatggagagaactctgaagtgattcgttatggcagtcgttacccaactccttatggcatcactgtttttgaaaattctatcatatgggtagataggaatttgaaaaagatcttccaagccagcaaggaaccagagaacacagagccacccacagtgataagagacaatatcaactggctaagagatgtgaccatctttgacaagcaagtccagccccggtcaccagcagaggtcaacaacaacccttgcttggaaaacaatggtgggtgctctcatctctgctttgctctgcctggattgcacaccccaaaatgtgactgtgcctttgggaccctgcaaagtgatggcaagaattgtgccatttcaacagaaaatttcctcatctttgccttgtctaattccttgagaagcttacacttggaccctgaaaaccatagcccacctttccaaacaataaatgtggaaagaactgtcatgtctctagactatgacagtgtaagtgatagaatctacttcacacaaaatttagcctctggagttggacagatttcctatgccaccctgtcttcagggatccatactccaactgtcattgcttcaggtatagggactgctgatggcattgcctttgactggattactagaagaatttattacagtgactacctcaaccagatgattaattccatggctgaagatgggtctaaccgcactgtgatagcccgcgttccaaaaccaagagcaattgtgttagatccctgccaagggtacctgtactgggctgactgggatacacatgccaaaatcgagagagccacattgggaggaaacttccgggtacccattgtgaacagcagtctggtcatgcccagtgggctgactctggactatgaagaggaccttctctactgggtggatgctagtctgcagaggattgaacgcagcactctgacgggcgtggatcgtgaagtcattgtcaatgcagccgttcatgcttttggcttgactctctatggccagtatatttactggactgacttgtacacacaaagaatttaccgagctaacaaatatgacgggtcaggtcagattgcaatgaccacaaatttgctctcccagcccaggggaatcaacactgttgtgaagaaccagaaacaacagtgtaacaatccttgtgaacagtttaatgggggctgcagccatatctgtgcaccaggtccaaatggtgccgagtgccagtgtccacatgagggcaactggtatttggccaacaacaggaagcactgcattgtggacaatggtgaacgatgtggtgcatcttccttcacctgctccaatgggcgctgcatctcggaagagtggaagtgtgataatgacaacgactgtggggatggcagtgatgagatggaaagtgtctgtgcacttcacacctgctcaccgacagccttcacctgtgccaatgggcgatgtgtccaatactcttaccgctgtgattactacaatgactgtggtgatggcagtgatgaggcagggtgcctgttcagggactgcaatgccaccacggagtttatgtgcaataacagaaggtgcatacctcgtgagtttatctgcaatggtgtagacaactgccatgataataacacttcagatgagaaaaattgccctgatcgcacttgccagtctggatacacaaaatgtcataattcaaatatttgtattcctcgcgtttatttgtgtgacggagacaatgactgtggagataacagtgatgaaaaccctacttattgcaccactcacacntgcagcagcagtgagttccaatgcgcatctgggcgctgtattcctcaacattggtattgtgatcaagaaacagattgttttgatgcctctgatgaacctgcctcttgtggtcactctgagcgaacatgcctagctgatgagttcaagtgtgatggtgggaggtgcatcccaagcgaatggatctgtgacggtgataatgactgtggggatatgagtgacgaggataaaaggcaccagtgtcagaatcaaaactgctcggattccgagtttctctgtgtaaatgacagacctccggacaggaggtgcattccccagtcttgggtctgtgatggcgatgtggattgtactgacggctacgatgagaatcagaattgcaccaggagaacttgctctgaaaatgaattcacctgtggttacggactgtgtatcccaaagatattcaggtgtgaccggcacaatgactgtggtgactatagcgacgagaggggctgcttataccagacttgccaacagaatcagtttacctgtcagaacgggcgctgcattagtaaaaccttcgtctgtgatgaggataatgactgtggagacggatctgatgagctgatgcacctgtgccacaccccagaacccacgtgtccacctcacgagttcaagtgtgacaatgggcgctgcatcgagatgatgaaactctgcaaccacctagatgactgtttggacaacagcgatgagaaaggctgtggcattaatgaatgccatgacccttcaatcagtggctgcgatcacaactgcacagacaccttaaccagtttctattgttcctgtcgtcctggttacaagctcatgtctgacaagcggacttgtgttgatattgatgaatgcacagagatgccttttgtctgtagccagaagtgtgagaatgtaataggctcctacatctgtaagtgtgccccaggctacctccgagaaccagatggaaagacctgccggcaaaacagtaacatcgaaccctatctcatttttagcaaccgttactatttgagaaatttaactatagatggctatttttactccctcatcttggaaggactggacaatgttgtggcattagattttgaccgagtagagaagagattgtattggattgatacacagaggcaagtcattgagagaatgtttctgaataagacaaacaaggagacaatcataaaccacagactaccagctgcagaaagtctggctgtagactgggtttccagaaagctctactggttggatgcccgcctggatggcctctttgtctctgacctcaatggtggacaccgccgcatgctggcccagcactgtgtggatgccaacaacaccttctgctttgataatcccagaggacttgcccttcaccctcaatatgggtacctctactgggcagactggggtcaccgcgcatacattgggagagtaggcatggatggaaccaacaagtctgtgataatctccaccaagttagagtggcctaatggcatcaccattgattacaccaatgatctactctactgggcagatgcccacctgggttacatagagtactctgatttggagggccaccatcgacacacggtgtatgatggggcactgcctcaccctttcgctattaccatttttgaagacactatttattggacagattggaatacaaggacagtggaaaagggaaacaaatatgatggatcaaatagacagacactggtgaacacaacacacagaccatttgacatccatgtgtaccatccatataggcagcccattgtgagcaatccctgtggtaccaacaatggtggctgttctcatctctgcctcatcaagccaggaggaaaagggttcacttgcgagtgtccagatgacttccgcacccttcaactgagtggcagcacctactgcatgcccatgtgctccagcacccagttcctgtgcgctaacaatgaaaagtgcattcctatctggtggaaatgtgatggacagaaagactgctcagatggctctgatgaactggccctttgcccgcagcgcttctgccgactgggacagttccagtgcagtgacggcaactgcaccagcccgcagactttatgcaatgctcaccaaaattgccctgatgggtctgatgaagaccgtcttctttgtgagaatcaccactgtgactccaatgaatggcagtgcgccaacaaacgttgcatcccagaatcctggcagtgtgacacatttaacgactgtgaggataactcagatgaagacagttcccactgtgccagcaggacctgccggccgggccagtttcggtgtgctaatggccgctgcatcccgcaggcctggaagtgtgatgtggataatgattgtggagaccactcggatgagcccattgaagaatgcatgagctctgcccatctctgtgacaacttcacagaattcagctgcaaaacaaattaccgctgcatcccaaagtgggccgtgtgcaatggtgtagatgactgcagggacaacagtgatgagcaaggctgtgaggagaggacatgccatcctgtgggggatttccgctgtaaaaatcaccactgcatccctcttcgttggcagtgtgatgggcaaaatgactgtggagataactcagatgaggaaaactgtgctccccgggagtgcacagagagcgagtttcgatgtgtcaatcagcagtgcattccctcgcgatggatctgtgaccattacaacgactgtggggacaactcagatgaacgggactgtgagatgaggacctgccatcctgaatattttcagtgtacaagtggacattgtgtacacagtgaactgaaatgcgatggatccgctgactgtttggatgcgtctgatgaagctgattgtcccacacgctttcctgatggtgcatactgccaggctactatgttcgaatgcaaaaaccatgtttgtatcccgccatattggaaatgtgatggcgatgatgactgtggcgatggttcagatgaagaacttcacctgtgcttggatgttccctgtaattcaccaaaccgtttccggtgtgacaacaatcgctgcatttatagtcatgaggtgtgcaatggtgtggatgactgtggagatggaactgatgagacagaggagcactgtagaaaaccgacccctaaaccttgtacagaatatgaatataagtgtggcaatgggcattgcattccacatgacaatgtgtgtgatgatgccgatgactgtggtgactggtccgatgaactgggttgcaataaaggaaaagaaagaacatgtgctgaaaatatatgcgagcaaaattgtacccaattaaatgaaggaggatttatctgctcctgtacagctgggttcgaaaccaatgtttttgacagaacctcctgtctagatatcaatgaatgtgaacaatttgggacttgtccccagcactgcagaaataccaaaggaagttatgagtgtgtctgtgctgatggcttcacgtctatgagtgaccgccctggaaaacgatgtgcagctgagggtagctctcctttgttgctactgcctgacaatgtccgaattcgaaaatataatctctcatctgagaggttctcagagtatcttcaagatgaggaatatatccaagctgttgattatgattgggatcccaaggacataggcctcagtgttgtgtattacactgtgcgaggggagggctctaggtttggtgctatcaaacgtgcctacatccccaactttgaatccggccgcaataatcttgtgcaggaagttgacctgaaactgaaatacgtaatgcagccagatggaatagcagtggactgggttggaaggcatatttactggtcagatgtcaagaataaacgcattgaggtggctaaacttgatggaaggtacagaaagtggctgatttccactgacctggaccaaccagctgctattgctgtgaatcccaaactagggcttatgttctggactgactggggaaaggaacctaaaatcgagtctgcctggatgaatggagaggaccgcaacatcctggttttcgaggaccttggttggccaactggcctttctatcgattatttgaacaatgaccgaatctactggagtgacttcaaggaggacgttattgaaaccataaaatatgatgggactgataggagagtcattgcaaaggaagcaatgaacccttacagcctggacatctttgaagaccagttatactggatatctaaggaaaagggagaagtatggaaacaaaataaatttgggcaaggaaagaaagagaaaacgctggtagtgaacccttggctcactcaagttcgaatctttcatcaactcagatacaataagtcagtgcccaacctttgcaaacagatctgcagccacctctgccttctgagacctggaggatacagctgtgcctgtccccaaggctccagctttatagaggggagcaccactgagtgtgatgcagccatcgaactgcctatcaacctgccccccccatgcaggtgcatgcacggaggaaattgctattttgatgagactgacctccccaaatgcaagtgtcctagcggctacaccggaaaatattgtgaaatggcgttttcaaaaggcatctctccaggaacaaccgcagtagctgtgctgttgacaatcctcttgatcgtcgtaattggagctctggcaattgcaggattcttccactatagaaggaccggctcccttttgcctgctctgcccaagctgccaagcttaagcagtctcgtcaagccctctgaaaatgggaatggggtgaccttcagatcaggggcagatcttaacatggatattggagtgtctggttttggacctgagactgctattgacaggtcaatggcaatgagtgaagactttgtcatggaaatggggaagcagcccataatatttgaaaacccaatgtactcagccagagacagtgctgtcaaagtggttcagccaatccaggtgactgtatctgaaaatgtggataataagaattatggaagtcccataaacccttctgagatagttccagagacaaacccaacttcaccagctgctgatggaactcaggtgacaaaatggaatctcttcaaacgaaaatctaaacaaactaccaactttgaaaatccaatctatgcacagatggagaacgagcaaaaggaaagtgttgctgcgacaccacctccatcaccttcgctccctgctaagcctaagcctccttcgagaagagacccaactccaacctattctgcaacagaagacacttttaaagacaccgcaaatcttgttaaagaagactctgaagtatagctataccagctatttagggaataattagaaacacacttttgcacatatattttttacaaacagatgaaaaaagttaacattcagtactttatgaaaaaaatatatttttccctgtttgcctatagttggaggtatcctgtgtgtctttttttacttatgccgtctcatatttttacaaataattatcacaatgtactatatgtatatctttgcactgaagttgtctgaaggtaatactataaatatattgtatatttgtaaattttggaaagattatcctgttactgaatttgctaataaagatgtctgctgatttggttggtgatcattatagtaaatgatccaacaagaaaaggaattgactggggacctttagccgtgtctaaagaagaggcaccactcatatttcctataaaattatctaggaaaggaatccaggccccgctcttgggtccatttttacacattagcacttaattaatgttcaatattacatgtcaatttgattaatggctatgttgataggggccactatgtgttgtatagacatctggacttgactgtagactcctcagataatacagaaggtaggaaaagcaattcagtttggcccttctgtgtgttggcattgtctaaccagaactctctgtttcatgtgtgttctctcactagctgccaagacaacatttttatttgtgatgtctatgaggaaatcccatatcattaagtgccagtgtcctgcattgagtttgtggttaattaaatgagctcttctgctgatggaccctggagcaatttctcccctcacctgacattcaaggtggtcacctgccctagtagttggagctcagtagctgaatttctgaaaccaaatctgtgtcttcataaaataaggtgcaaaaaaaaaaaaataccagttaagtaaagcctcaactgggtttttgtttctatgaaaatatcattataatcactatttatttcctaagttgaacctgaatagaaagggaaaccattcttattaagctttttattaggccctgtggctaaatgtgtacatttatattagaatgtactgtacagtccagatcttttctttaattcttattggtttttttttttttttttttttttagagatggagtcttgctatattgccaaggctgatcttgaagtcctgggctcaagtgatcctcccacctcagcctcctgagtggttggggttacgggcgtgagccactgtgcctggcttccagctctcctcttaaatagtgggtatagtctgcacaacaggaaccatggcaggaatatacactttcccatagcaaatagcatacctgactctctgtgctaatattgcacatttgttaaacaatgaatgaatggatggatggatggatggatgaatgaatgaaacatatactactgattattttattccagagttctcaaaatatttgttgctgatattttgagtgctgactgtaattactttgattagataaacaactggaaataatgctgctgaaaaagttctaataaatgtgtattttatcagatgttttctgt

SEQ ID NO: 449384 - DNA, 5677 bp, Homo sapiens
gcagacctaaaggagcgttcgctagcagaggcgctgccggtgcggtgtgctacgcgcgcccacctcccggggaaggaacggcgaggccggggaccgtcgcggagatggatcgcgggccggcagcagtggcgtgcacgctgctcctggctctcgtcgcctgcctagcgccggccagtggccaagaatgtgacagtgcgcattttcgctgtggaagtgggcattgcatccctgcagactggaggtgtgatgggaccaaagactgttcagatgacgcggatgaaattggctgcgctgttgtgacctgccagcagggctatttcaagtgccagagtgagggacaatgcatccccagctcctgggtgtgtgaccaagatcaagactgtgatgatggctcagatgaacgtcaagattgctcacaaagtacatgctcaagtcatcagataacatgctccaatggtcagtgtatcccaagtgaatacaggtgcgaccacgtcagagactgccccgatggagctgatgagaatgactgccagtacccaacatgtgagcagcttacttgtgacaatggggcctgctataacaccagtcagaagtgtgattggaaagttgattgcagggactcctcagatgaaatcaactgcactgagatatgcttgcacaatgagttttcatgtggcaatggagagtgtatccctcgtgcttatgtctgtgaccatgacaatgattgccaagacggcagtgatgaacatgcttgcaactatccgacctgcggtggttaccagttcacttgccccagtggccgatgcatttatcaaaactgggtttgtgatggagaagatgactgtaaagataatggagatgaagatggatgtgaaagcggtcctcatgatgttcataaatgttccccaagagaatggtcttgcccagagtcgggacgatgcatctccatttataaagtttgtgatgggattttagattgcccaggaagagaagatgaaaacaacactagtaccggaaaatactgtagtatgactctgtgctctgccttgaactgccagtaccagtgccatgagacgccgtatggaggagcgtgtttttgtcccccaggttatatcatcaaccacaatgacagccgtacctgtgttgagtttgatgattgccagatatggggaatttgtgaccagaagtgtgaaagccgacctggccgtcacctgtgccactgtgaagaagggtatatcttggagcgtggacagtattgcaaagctaatgattcctttggcgaggcctccattatcttctccaatggtcgggatttgttaattggtgatattcatggaaggagcttccggatcctagtggagtctcagaatcgtggagtggccgtgggtgtggctttccactatcacctgcaaagagttttttggacagacaccgtgcaaaataaggttttttcagttgacattaatggtttaaatatccaagaggttctcaatgtttctgttgaaaccccagagaacctggctgtggactgggttaataataaaatctatctagtggaaaccaaggtcaaccgcatagatatggtaaatttggatggaagctatcgggttacccttataactgaaaacttggggcatcctagaggaattgccgtggacccaactgttggttatttatttttctcagattgggagagcctttctggggaacctaagctggaaagggcattcatggatggcagcaaccgtaaagacttggtgaaaacaaagctgggatggcctgctggggtaactctggatatgatatcgaagcgtgtttactgggttgactctcggtttgattacattgaaactgtaacttatgatggaattcaaaggaagactgtagttcatggaggctccctcattcctcatccctttggagtaagcttatttgaaggtcaggtgttctttacagattggacaaagatggccgtgctgaaggcaaacaagttcacagagaccaacccacaagtgtactaccaggcttccctgaggccctatggagtgactgtttaccattccctcagacagccctatgctaccaatccgtgtaaagataacaatgggggctgtgagcaggtctgtgttctcagccacagaacagataatgatggtttgggtttccgttgcaagtgcacattcggcttccaactggatacagatgagcgccactgcattgctgttcagaatttcctcattttttcatcccaagttgctattcgtgggatcccgttcaccttgtctacccaggaagatgtcatggttccagtttcggggaatccttctttctttgtcgggattgattttgacgcccaggacagcactatctttttttcagatatgtcaaaacacatgatttttaagcaaaagattgatggcacaggaagagaaattctcgcagctaacagggtggaaaatgttgaaagtttggcttttgattggatttcaaagaatctctattggacagactctcattacaagagtatcagtgtcatgaggctagctgataaaacgagacgcacagtagttcagtatttaaataacccacggtcggtggtagttcatccttttgccgggtatctattcttcactgattggttccgtcctgctaaaattatgagagcatggagtgacggatctcacctcttgcctgtaataaacactactcttggatggcccaatggcttggccatcgattgggctgcttcacgattgtactgggtagatgcctattttgataaaattgagcacagcacctttgatggtttagacagaagaagactgggccatatagagcagatgacacatccgtttggacttgccatctttggagagcatttattttttactgactggagactgggtgccattattcgagtcaggaaagcagatggtggagaaatgacagttatccgaagtggcattgcttacatactgcatttgaaatcgtatgatgtcaacatccagactggttctaacgcctgtaatcaacccacgcatcctaacggtgactgcagccacttctgcttcccggtgccaaatttccagcgagtgtgtgggtgcccttatggaatgaggctggcttccaatcacttgacatgcgagggggacccaaccaatgaaccacccacggagcagtgtggcttattttccttcccctgtaaaaatggcagatgtgtgcccaattactatctctgtgatggagtcgatgattgtcatgataacagtgatgagcaactatgtggcacacttaataatacctgttcatcttcggcgttcacctgtggccatggggagtgcattcctgcacactggcgctgtgacaaacgcaacgactgtgtggatggcagtgatgagcacaactgccccacccacgcacctgcttcctgccttgacacccaatacacctgtgataatcaccagtgtatctcaaagaactgggtctgtgacacagacaatgattgtggggatggatctgatgaaaagaactgcaattcgacagagacatgccaacctagtcagtttaattgccccaatcatcgatgtattgacctatcgtttgtctgtgatggtgacaaggattgtgttgatggatctgatgaggttggttgtgtattaaactgtactgcttctcaattcaagtgtgccagtggggataaatgtattggcgtcacaaatcgttgtgatggtgtttttgattgcagtgacaactcggatgaagcgggctgtccaaccaggcctcctggtatgtgccactcagatgaatttcagtgccaagaagatggtatctgcatcccgaacttctgggaatgtgatgggcatccagactgcctctatggatctgatgagcacaatgcctgtgtccccaagacttgcccttcatcatatttccactgtgacaacggaaactgcatccacagggcatggctctgtgatcgggacaatgactgcggggatatgagtgatgagaaggactgccctactcagccctttcgctgtcctagttggcaatggcagtgtcttggccataacatctgtgtgaatctgagtgtagtgtgtgatggcatctttgactgccccaatgggacagatgagtccccactttgcaatgggaacagctgctcagatttcaatggtggttgtactcacgagtgtgttcaagagccctttggggctaaatgcctatgtccattgggattcttacttgccaatgattctaagacctgtgaagacatagatgaatgtgatattctaggctcttgtagccagcactgttacaatatgagaggttctttccggtgctcgtgtgatacaggctacatgttagaaagtgatgggaggacttgcaaagttacagcatctgagagtctgctgttacttgtggcaagtcagaacaaaattattgccgacagtgtcacctcccaggtccacaatatctattcattggtcgagaatggttcttacattgtagctgttgattttgattcaattagtggtcgtatcttttggtctgatgcaactcagggtaaaacctggagtgcgtttcaaaatggaacggacagaagagtggtatttgacagtagcatcatcttgactgaaactattgcaatagattgggtaggtcgtaatctttactggacagactatgctctggaaacaattgaagtctccaaaattgatgggagccacaggactgtgctgattagtaaaaacctaacaaatccaagaggactagcattagatcccagaatgaatgagcatctactgttctggtctgactggggccaccaccctcgcatcgagcgagccagcatggacggcagcatgcgcactgtcattgtccaggacaagatcttctggccctgcggcttaactattgactaccccaacagactgctctacttcatggactcctatcttgattacatggacttttgcgattataatggacaccatcggagacaggtgatagccagtgatttgattatacggcacccctatgccctaactctctttgaagactctgtgtactggactgaccgtgctactcgtcgggttatgcgagccaacaagtggcatggagggaaccagtcagttgtaatgtataatattcaatggccccttgggattgttgcggttcatccttcgaaacaaccaaattccgtgaatccatgtgccttttcccgctgcagccatctctgcctgctttcctcacaggggcctcatttttactcctgtgtttgtccttcaggatggagtctgtctcctgatctcctgaattgcttgagaggtatagtatgctccttatgtgagctctgaagatggagctggtcatagtttgtgccaagcagtggaaactctaaaaccaattgcgactgaacatgtgctgtgtcctttgattcctcaggtgtctgcagaatgatgtgtgttgtatggggtgatgtcactgtgtgccttggttgtaatacagtttctgtatatggaactaatgttatctgtgcatgtaattgaacaatctgtaacctcatattttctctcacctgggtacagttagacttctctgacaagccatgataatgggaagttccaaattcttcacctaagaagtaaacattctcaacgtttgtgtacagctt

SEQ ID NO: 449385 - DNA, 290 bp, Homo sapiens
tatatcagaagcccctgtggtttggactcagactcaggaggtgactcaagcctcaagctcagaagccctctgtcaccatctgttgactcagaagcatgcccaccatcccatgcagtgcttttccaggcactgtcctgtagcagacggagttcaggctttggaagtagacagacctgggttcaaatcacagctccgcttcttccgcctgaagctccataacctaggataagtcgctaagcctccccaagtctcagatttcttacctctaaggtgaaggatggattccactt

SEQ ID NO: 449386 - DNA, 2776 bp, Homo sapiens
ctgagctgcctggcgccgtcttgatactttcagaaagaatgcattccctgtaaaaaaaaaaaaaaaaatactgagagagggagagagagagagaagaagagagagagacggagggagagcgagacagagcgagcaacgcaatctgaccgagcaggtcgtacgccgccgcctcctcctcctctctgctcttcgctacccaggtgacccgaggagggactccgcctccgagcggctgaggaccccggtgcagaggagcctggctcgcagaattgcagagtcgtcgcccctttttacaacctggtcccgttttattctgccatacccagtttttggatttttgtcttccccttcttctctttgctaaacgacccctccaagataatttttaaaaaaccttctcctttgctcacctttgcttcccagccttcccatccccccaccgaaagcaaatcattcaacgacccccgaccctccgacggcaggagccccccgacctcccaggcggaccgccctccctccccgcgcgcgggttccgggcccggcgagagggcgcgagcacagccgaggccatggaggtgacggcggaccagccgcgctgggtgagccaccaccaccccgccgtgctcaacgggcagcacccggacacgcaccacccgggcctcagccactcctacatggacgcggcgcagtacccgctgccggaggaggtggatgtgctttttaacatcgacggtcaaggcaaccacgtcccgccctactacggaaactcggtcagggccacggtgcagaggtaccctccgacccaccacgggagccaggtgtgccgcccgcctctgcttcatggatccctaccctggctggacggcggcaaagccctgggcagccaccacaccgcctccccctggaatctcagccccttctccaagacgtccatccaccacggctccccggggcccctctccgtctaccccccggcctcgtcctcctccttgtcggggggccacgccagcccgcacctcttcaccttcccgcccaccccgccgaaggacgtctccccggacccatcgctgtccaccccaggctcggccggctcggcccggcaggacgagaaagagtgcctcaagtaccaggtgcccctgcccgacagcatgaagctggagtcgtcccactcccgtggcagcatgaccgccctgggtggagcctcctcgtcgacccaccaccccatcaccacctacccgccctacgtgcccgagtacagctccggactcttcccccccagcagcctgctgggcggctcccccaccggcttcggatgcaagtccaggcccaaggcccggtccagcacagaaggcagggagtgtgtgaactgtggggcaacctcgaccccactgtggcggcgagatggcacgggacactacctgtgcaacgcctgcgggctctatcacaaaatgaacggacagaaccggcccctcattaagcccaagcgaaggctgtctgcagccaggagagcagggacgtcctgtgcgaactgtcagaccaccacaaccacactctggaggaggaatgccaatggggaccctgtctgcaatgcctgtgggctctactacaagcttcacaatattaacagacccctgactatgaagaaggaaggcatccagaccagaaaccgaaaaatgtctagcaaatccaaaaagtgcaaaaaagtgcatgactcactggaggacttccccaagaacagctcgtttaacccggccgccctctccagacacatgtcctccctgagccacatctcgcccttcagccactccagccacatgctgaccacgcccacgccgatgcacccgccatccagcctgtcctttggaccacaccacccctccagcatggtcaccgccatgggttagagccctgctcgatgctcacagggcccccagcgagagtccctgcagtccctttcgacttgcatttttgcaggagcagtatcatgaagcctaaacgcgatggatatatgtttttgaaggcagaaagcaaaattatgtttgccactttgcaaaggagctcactgtggtgtctgtgttccaaccactgaatctggaccccatctgtgaataagccattctgactcatatcccctatttaacagggtctctagtgctgtgaaaaaaaaaaatgctgaacattgcatataacttatattgtaagaaatactgtacaatgactttattgcatctgggtagctgtaaggcatgaaggatgccaagaagtttaaggaatatgggagaaatagtgtggaaattaagaagaaactaggtctgatattcaaatggacaaactgccagttttgtttcctttcactggccacagttgtttgatgcattaaaagaaaataaaaaaaagaaaaaagagaaaagaaaaaaaaaggaaaaagttgtaggcgaatcatttgttcaaagctgttggcctctgcaaaggaaataccagttctgggcaatcagtgttaccgttcaccagttgccattgagggtttcagagagcctttttctaggcctacatgctttgtgaacaagtccctgtaattgttgtttgtatgtataattcaaagcaccaaaataagaaaagatgtagatttatttcatcatattatacagaccgaactgttgtataaatttatttactgctagtcttaagaactgctttctttcgtttgtttgtttcaatattttccttctctctcaatttttggttgaataaactagattacattcagttggcctaa

SEQ ID NO: 449387 - DNA, 3185 bp, Homo sapiens
ctgagctgcctggcgccgtcttgatactttcagaaagaatgcattccctgtaaaaaaaaaaaaaaaaatactgagagagggagagagagagagaagaagagagagagacggagggagagcgagacagagcgagcaacgcaatctgaccgagcaggtcgtacgccgccgcctcctcctcctctctgctcttcgctacccaggtgacccgaggagggactccgcctccgagcggctgaggaccccggtgcagaggagcctggctcgcagaattgcagagtcgtcgcccctttttacaacctggtcccgttttattctgccatacccagtttttggatttttgtcttccccttcttctctttgctaaacgacccctccaagataatttttaaaaaaccttctcctttgctcacctttgcttcccagccttcccatccccccaccgaaagcaaatcattcaacgacccccgaccctccgacggcaggagccccccgacctcccaggcggaccgccctccctccccgcgcgcgggttccgggcccggcgagagggcgcgagcacagccgaggccatggaggtgacggcggaccagccgcgctgggtgagccaccaccaccccgccgtgctcaacgggcagcacccggacacgcaccacccgggcctcagccactcctacatggacgcggcgcagtacccgctgccggaggaggtggatgtgctttttaacatcgacggtcaaggcaaccacgtcccgccctactacggaaactcggtcagggccacggtgcagaggtaccctccgacccaccacgggagccaggtgtgccgcccgcctctgcttcatggatccctaccctggctggacggcggcaaagccctgggcagccaccacaccgcctccccctggaatctcagccccttctccaagacgtccatccaccacggctccccggggcccctctccgtctaccccccggcctcgtcctcctccttgtcggggggccacgccagcccgcacctcttcaccttcccgcccaccccgccgaaggacgtctccccggacccatcgctgtccaccccaggctcggccggctcggcccggcaggacgagaaagagtgcctcaagtaccaggtgcccctgcccgacagcatgaagctggagtcgtcccactcccgtggcagcatgaccgccctgggtggagcctcctcgtcgacccaccaccccatcaccacctacccgccctacgtgcccgagtacagctccggactcttcccccccagcagcctgctgggcggctcccccaccggcttcggatgcaagtccaggcccaaggcccggtccagcacagaaggcagggagtgtgtgaactgtggggcaacctcgaccccactgtggcggcgagatggcacgggacactacctgtgcaacgcctgcgggctctatcacaaaatgaacggacagaaccggcccctcattaagcccaagcgaaggctgtctgcagccaggagagcagggacgtcctgtgcgaactgtcagaccaccacaaccacactctggaggaggaatgccaatggggaccctgtctgcaatgcctgtgggctctactacaagcttcacaatattaacagacccctgactatgaagaaggaaggcatccagaccagaaaccgaaaaatgtctagcaaatccaaaaagtgcaaaaaagtgcatgactcactggaggacttccccaagaacagctcgtttaacccggccgccctctccagacacatgtcctccctgagccacatctcgcccttcagccactccagccacatgctgaccacgcccacgccgatgcacccgccatccagcctgtcctttggaccacaccacccctccagcatggtcaccgccatgggttagagccctgctcgatgctcacagggcccccagcgagagtccctgcagtccctttcgacttgcatttttgcaggagcagtatcatgaagcctaaacgcgatggatatatgtttttgaaggcagaaagcaaaattatgtttgccactttgcaaaggagctcactgtggtgtctgtgttccaaccactgaatctggaccccatctgtgaataagccattctgactcatatcccctatttaacagggtctctagtgctgtgaaaaaaaaaaatgctgaacattgcatataacttatattgtaagaaatactgtacaatgactttattgcatctgggtagctgtaaggcatgaaggatgccaagaagtttaaggaatatgggagaaatagtgtggaaattaagaagaaactaggtctgatattcaaatggacaaactgccagttttgtttcctttcactggccacagttgtttgatgcattaaaagaaaataaaaaaaagaaaaaagagaaaagaaaaaaaaaggaaaaagttgtaggcgaatcatttgttcaaagctgttggcctctgcaaaggaaataccagttctgggcaatcagtgttaccgttcaccagttgccattgagggtttcagagagcctttttctaggcctacatgctttgtgaacaagtccctgtaattgttgtttgtatgtataattcaaagcaccaaaataagaaaagatgtagatttatttcatcatattatacagaccgaactgttgtataaatttatttactgctagtcttaagaactgctttctttcgtttgtttgtttcaatattttccttctctctcaatttttggttgaataaactagattacattcagttggcctaaggtggttgtgctcggagggtttcttgtttcttttccattttgtttttggatgatatttattaaatagcttctaagagtccggcggcatctgtcttgtccctattcctgcagcctgtgctgagggtagcagtgtatgagctaccagcgtgcatgtcagcgaccctggcccgacaggccacgtcctgcaatcggcccggctgcctcttcgccctgtcgtgttctgtgttagtgatcactgcctttaatacagtctgttggaataatattataagcataataataaagtgaaaatattttaaaactacaaaatgacatcgtatccacgtggtggccgagctcttctagaatctggtagctctagctaatttcagagaaaggagttaaaagaaacaacttaacaaccagacat

SEQ ID NO: 449388 - DNA, 1311 bp, Homo sapiens
  misc_feature (34)..(34): n is a, c, g, or t
  misc_feature (65)..(66): n is a, c, g, or t
  misc_feature (79)..(79): n is a, c, g, or t
  misc_feature (89)..(89): n is a, c, g, or t
  misc_feature (97)..(97): n is a, c, g, or t
  misc_feature (99)..(99): n is a, c, g, or t
  misc_feature (138)..(138): n is a, c, g, or t
  misc_feature (145)..(145): n is a, c, g, or t
  misc_feature (157)..(157): n is a, c, g, or t
  misc_feature (162)..(162): n is a, c, g, or t
  misc_feature (198)..(198): n is a, c, g, or t
  misc_feature (214)..(214): n is a, c, g, or t
  misc_feature (216)..(217): n is a, c, g, or t
  misc_feature (235)..(235): n is a, c, g, or t
  misc_feature (248)..(248): n is a, c, g, or t
  misc_feature (336)..(336): n is a, c, g, or t
  misc_feature (341)..(341): n is a, c, g, or t
  misc_feature (348)..(348): n is a, c, g, or t
  misc_feature (357)..(357): n is a, c, g, or t
  misc_feature (371)..(371): n is a, c, g, or t
  misc_feature (387)..(387): n is a, c, g, or t
  misc_feature (417)..(417): n is a, c, g, or t
tattttgaagcaggagcgcgccttaagctattanaacaaaaaagaaaagagcaatgcgcagaggnncacagaaagcgcncaaaaataanaatgctananaaaaaatgcgcaaaaaaaaattaaaaaaaaagaaaattngcattanagctgcaagctnataantatagctttgcgcgcgcaaataaaagacatgctgcntttttaaagcgcgctngnnccgcgcgctgctgcgcantaggcagcaattntgcgctgcgcgcttaatgcgcagcaatgctgctgcgcgcttgcatgcgcagctgcgcatgcgcagcatttgctttagcgcagctgcgncagcngcgctanttgcagcgnctgcgcatgcgcangcgctttgcgcttttnagcgcgcgcgcgcgcgcgctgcgcagcatnttgcgcgcggcgcattttttatagccctgctcgatgctcacagggcccccagcgagagtccctgcagtccctttcgacttgcatttttgcaggagcagtatcatgaagcctaaacgcgatggatatatgtttttgaaggcagaaagcaaaattatgtttgccactttgcaaaggagctcactgtggtgtctgtgttccaaccactgaatctggaccccatctgtgaataagccattctgactcatatcccctatttaacagggtctctagtgctgtgaaaaaaaaaaatgctgaacattgcatataacttatattgtaagaaatactgtacaatgactttattgcatctgggtagctgtaaggcatgaaggatgccaagaagtttaaggaatatgggagaaatagtgtggaaattaagaagaaactaggtctgatattcaaatggacaaactgccagttttgtttcctttcactggccacagttgtttgatgcattaaaagaaaataaaaaaaagaaaaaagagaaaagaaaaaaaaaggaaaaagttgtaggcgaatcatttgttcaaagctgttggcctctgcaaaggaaataccagttctgggcaatcagtgttaccgttcaccagttgccattgagggtttcagagagcctttttctaggcctacatgctttgtgaacaagtccctgtaattgttgtttgtatgtataattcaaagcaccaaaataagaaaagatgtagatttatttcatcatattatacagaccgaactgttgtataaatttatttactgctagtcttaagaactgctttctttcgtttgtttgtttcaatattttccttctctctcaatttttggttgaataaactagattacattcagttggcctaa

SEQ ID NO: 449389 - DNA, 2950 bp, Homo sapiens
ctgagctgcctggcgccgtcttgatactttcagaaagaatgcattccctgtaaaaaaaaaaaaaaaaatactgagagagggagagagagagagaagaagagagagagacggagggagagcgagacagagcgagcaacgcaatctgaccgagcaggtcgtacgccgccgcctcctcctcctctctgctcttcgctacccaggtgacccgaggagggactccgcctccgagcggctgaggaccccggtgcagaggagcctggctcgcagaattgcagagtcgtcgcccctttttacaacctggtcccgttttattctgccatacccagtttttggatttttgtcttccccttcttctctttgctaaacgacccctccaagataatttttaaaaaaccttctcctttgctcacctttgcttcccagccttcccatccccccaccgaaagcaaatcattcaacgacccccgaccctccgacggcaggagccccccgacctcccaggcggaccgccctccctccccgcgcgcgggttccgggcccggcgagagggcgcgagcacagccgaggccatggaggtgacggcggaccagccgcgctgggtgagccaccaccaccccgccgtgctcaacgggcagcacccggacacgcaccacccgggcctcagccactcctacatggacgcggcgcagtacccgctgccggaggaggtggatgtgctttttaacatcgacggtcaaggcaaccacgtcccgccctactacggaaactcggtcagggccacggtgcagaggtaccctccgacccaccacgggagccaggtgtgccgcccgcctctgcttcatggatccctaccctggctggacggcggcaaagccctgggcagccaccacaccgcctccccctggaatctcagccccttctccaagacgtccatccaccacggctccccggggcccctctccgtctaccccccggcctcgtcctcctccttgtcggggggccacgccagcccgcacctcttcaccttcccgcccaccccgccgaaggacgtctccccggacccatcgctgtccaccccaggctcggccggctcggcccggcaggacgagaaagagtgcctcaagtaccaggtgcccctgcccgacagcatgaagctggagtcgtcccactcccgtggcagcatgaccgccctgggtggagcctcctcgtcgacccaccaccccatcaccacctacccgccctacgtgcccgagtacagctccggactcttcccccccagcagcctgctgggcggctcccccaccggcttcggatgcaagtccaggcccaaggcccggtccagcacagaaggcagggagtgtgtgaactgtggggcaacctcgaccccactgtggcggcgagatggcacgggacactacctgtgcaacgcctgcgggctctatcacaaaatgaacggacagaaccggcccctcattaagcccaagcgaaggctgtctgcagccaggagagcagggacgtcctgtgcgaactgtcagaccaccacaaccacactctggaggaggaatgccaatggggaccctgtctgcaatgcctgtgggctctactacaagcttcacaatattaacagacccctgactatgaagaaggaaggcatccagaccagaaaccgaaaaatgtctagcaaatccaaaaagtgcaaaaaagtgcatgactcactggaggacttccccaagaacagctcgtttaacccggccgccctctccagacacatgtcctccctgagccacatctcgcccttcagccactccagccacatgctgaccacgcccacgccgatgcacccgccatccagcctgtcctttggaccacaccacccctccagcatggtcaccgccatgggttagagccctgctcgatgctcacagggcccccagcgagagtccctgcagtccctttcgacttgcatttttgcaggagcagtatcatgaagcctaaacgcgatggatatatgtttttgaaggcagaaagcaaaattatgtttgccactttgcaaaggagctcactgtggtgtctgtgttccaaccactgaatctggaccccatctgtgaataagccattctgactcatatcccctatttaacagggtctctagtgctgtgaaaaaaaaaaatgctgaacattgcatataacttatattgtaagaaatactgtacaatgactttattgcatctgggtagctgtaaggcatgaaggatgccaagaagtttaaggaatatgggagaaatagtgtggaaattaagaagaaactaggtctgatattcaaatggacaaactgccagttttgtttcctttcactggccacagttgtttgatgcattaaaagaaaataaaaaaaagaaaaaagagaaaagaaaaaaaaaggaaaaagttgtaggcgaatcatttgttcaaagctgttggcctctgcaaaggaaataccagttctgggcaatcagtgttaccgttcaccagttgccattgagggtttcagagagcctttttctaggcctacatgctttgtgaacaagtccctgtaattgttgtttgtatgtataattcaaagcaccaaaataagaaaagatgtagatttatttcatcatattatacagaccgaactgttgtataaatttatttactgctagtcttaagaactgctttctttcgtttgtttgtttcaatattttccttctctctcaatttttggttgaataaactagattacattcagttggcctaaaaaaaaaaaacaaacaaaaaaacaaaaaaacaaaaaaaagaacaaaagaggggggcgcccccccactaaaaagttcccccgagaggggcgcccaatgtttgcgcgggatcccacaggctttttggtacaaagagggggtccccaaattaggggggccgtaatttaaacacaagg

SEQ ID NO: 449390 - DNA, 1083 bp, Homo sapiens
aagttaagtaatatgcccgaggtacgttttcaatggaagaggctgactgagggtcacccaacttatatctcgaaatttcacaatttctacaagttctgtcctgggaggcaagagtaggtgaaacgagcacactctacgccaggcaaacaaacctcaacgcttagcctcccggcacctcctagggccggaagcttctcagcccaaagccgctgctggctgcaacctccgtcccgcagtccaattagcagccgcgacccggcgcccgcccacgccgcgtcacgagtcagccaaagatggctgcgcccaggtaatttgagcaaaggccacagtgaactccggcgtggctgaggaaggaggaggcacccacaggctgctgggaggagagcataaggctcaaaatggaaaatcataaatccaataataaggaaaacataacaattgttgatatatccagaaaaattaaccagcttccagaagcagaaaggaatctacttgaaaatggatcggtttatgttggattaaatgctgctctttgtggcctcatagcaaacagtctttttcgacgcatcttgaatgtgacaaaggctcgcatagctgctggcttaccaatggcagggataccttttcttacaacagacttaacttacagatgttttgtaagttttcctttgaatacaggtgatttggattgtgaaacctgtaccataacacggagtggactgactggtcttgttattggtggtctataccctgttttcttggctatacctgtaaatggtggtctagcagccaggtatcaatcagctctgttaccacacaaagggaacatcttaagttactggattagaacttctaagcctgtctttagaaagatgttatttcctattttgctccagactatgttttcagcataccttgggtctgaacaatataaactacttataaaggcccttcagttatctgaacctggcaaagaaattcactgattttaaacaaatatgtaaacaaaaataaaatggtaaaaacagtttccgccaagctctctttcctccctcctatccgcgacataatccgacacgattt

SEQ ID NO: 449391 - DNA, 1066 bp, Homo sapiens
aagttaagtaatatgcccgaggtacgttttcaatggaagaggctgactgagggtcacccaacttatatctcgaaatttcacaatttctacaagttctgtcctgggaggcaagagtaggtgaaacgagcacactctacgccaggcaaacaaacctcaacgcttagcctcccggcacctcctagggccggaagcttctcagcccaaagccgctgctggctgcaacctccgtcccgcagtccaattagcagccgcgacccggcgcccgcccacgccgcgtcacgagtcagccaaagatggctgcgcccaggtaatttgagcaaaggccacagtgaactccggcgtggctgaggaaggaggaggcacccacaggctgctgggaggagagcataaggctcaaaatggaaaatcataaatccaataataaggaaaacataacaattgttgatatatccagaaaaattaaccagcttccagaagcagaaaggaatctacttgaaaatggatcggtttatgttggattaaatgctgctctttgtggcctcatagcaaacagtctttttcgacgcatcttgaatgtgacaaaggctcgcatagctgctggcttaccaatggcagggataccttttcttacaacagacttaacttacagatgttttgtgatttggattgtgaaacctgtaccataacacggagtggactgactggtcttgttattggtggtctataccctgttttcttggctatacctgtaaatggtggtctagcagccaggtatcaatcagctctgttaccacacaaagggaacatcttaagttactggattagaacttctaagcctgtctttagaaagatgttatttcctattttgctccagactatgttttcagcataccttgggtctgaacaatataaactacttataaaggcccttcagttatctgaacctggcaaagaaattcactgattttaaacaaatatgtaaacaaaaataaaatggtaaaaacaacagatgcggccggactatttaaattaatatatttacttatcctaagcttgagacgattcg

SEQ ID NO: 449392 - DNA, 478 bp, Homo sapiens
atctatgctatagccttgaagcaaactggataaagaaacaaaagtttttaggattaatagacactgaagacctttactttaatattcagttttatcttaagacttctaggactaatatgtatcacagatgggtttgccatttgatgcaacaatcttttctattgaactatctcaatgttttcttacaggtatcaatcagctctgttaccacacaaagggaacatcttaagttactggattagaacttctaagcctgtctttagaaagatgttatttcctattttgctccagactatgttttcagcataccttgggtctgaacaatataaactacttataaaggcccttcagttatctgaacctggcaaagaaattcactgattttaaacaaatatgtaaacaaaaataaaatggtaaaaacaaaaacagtttatgtctaatgttatgtctaatgttatgcataaacatagacttgtaa

SEQ ID NO: 449393 - DNA, 585 bp, Homo sapiens
aagttaagtaatatgcccgaggtacgttttcaatggaagaggctgactgagggtcacccaacttatatctcgaaatttcacaatttctacaagttctgtcctgggaggcaagagtaggtgaaacgagcacactctacgccaggcaaacaaacctcaacgcttagcctcccggcacctcctagggccggaagcttctcagcccaaagccgctgctggctgcaacctccgtcccgcagtccaattagcagccgcgacccggcgcccgcccacgccgcgtcacgagtcagccaaagatggctgcgcccaggtaatttgagcaaaggccacagtgaactccggcgtggctgaggaaggaggaggcacccacaggctgctgggaggagagcataaggtactggtattccgggggagggggtgaagtaaatgtcccggtgtcaggagaagcacgacgcggtgacacgctagctaccagcagcgctgcgcgtaaatgagagcaagtagaagtgtagttagctcttcctgctgtcttttcactttgcactctagaaggaaagaccttatatttaaattaactcagtagaaagg

SEQ ID NO: 449394 - DNA, 1297 bp, Homo sapiens
aagttaagtaatatgcccgaggtacgttttcaatggaagaggctgactgagggtcacccaacttatatctcgaaatttcacaatttctacaagttctgtcctgggaggcaagagtaggtgaaacgagcacactctacgccaggcaaacaaacctcaacgcttagcctcccggcacctcctagggccggaagcttctcagcccaaagccgctgctggctgcaacctccgtcccgcagtccaattagcagccgcgacccggcgcccgcccacgccgcgtcacgagtcagccaaagatggctgcgcccaggtaatttgagcaaaggccacagtgaactccggcgtggctgaggaaggaggaggcacccacaggctgctgggaggagagcataaggctcaaaatggaaaatcataaatccaataataaggaaaacataacaattgttgatatatccagaaaaattaaccagcttccagaagcagaaaggaatctacttgaaaatggatcggtttatgttggattaaatgctgctctttgtggcctcatagcaaacagtctttttcgacgcatcttgaatgtgacaaaggctcgcatagctgctggcttaccaatggcagggataccttttcttacaacagacttaacttacagatgttttgtaagttttcctttgaatacaggtgatttggattgtgaaacctgtaccataacacggagtggactgactggtcttgttattggtggtctataccctgttttcttggctatacctgtaaatggtggtctagcagccaggtatcaatcagctctgttaccacacaaagggaacatcttaagttactggattagaacttctaagcctgtctttagaaagatgttatttcctattttgctccagactatgttttcagcataccttgggtctgaacaatataaactacttataaaggcccttcagttatctgaacctggcaaagaaattcactgattttaaacaaatatgtaaacaaaaataaaatggtaaaaacaaaaaaaaaaaaaaaaaaaatttgggggccggccgggggcctagagaaaaaagcttctaaaacaccattccgcttggggcccgggcccaaataggtgaatgtacaacttgggcacacacgcggcgcaagggaaataccggccaagaacaagggctgggttccccaccaataaaaaagcggcgggcacccgcgggtccggaacaaccacaggggtccggggcaaacggtctcccacaggtgccacaacgttacgcgcgggcgcagagggtgg

SEQ ID NO: 449395 - DNA, 762 bp, Homo sapiens
  misc_feature (70)..(70): n is a, c, g, or t
aggaaccccctgtccaggcagacccgcgtgcttaggaatgagagccactcccagtggaagagaccataangctcaaaatggaaaatcataaatccaataataaggaaaacataacaattgttgatatatccagaaaaattaaccagcttccagaagcagaaaggaatctacttgaaaatggatcggtttatgttggattaaatgctgctctttgtggcctcatagcaaacagtctttttcgacgcatcttgaatgtgacaaaggctcgcatagctgctggcttaccaatggcagggataccttttcttacaacagacttaacttacagatgttttgtaagttttcctttgaatacaggtgatttggattgtgaaacctgtaccataacacggagtggactgactggtcttgttattggtggtctataccctgttttcttggctatacctgtaaatggtggtctagcagccaggtatcaatcagctctgttaccacacaaagggaacatcttaagttactggattagaacttctaagcctgtctttagaaagatgttatttcctattttgctccagactatgttttcagcataccttgggtctgaacaatataaactacttataaaggcccttcagttatctgaacctggcaaagaaattcactgattttaaacaaatatgtaaacaaaaataaaatggtaaaaacaaaaacagtttatgtctaatgttatgtctaatgttatgcataaacatagacttgtaa

SEQ ID NO: 449396 - DNA, 1020 bp, Homo sapiens
aagttaagtaatatgcccgaggtacgttttcaatggaagaggctgactgagggtcacccaacttatatctcgaaatttcacaatttctacaagttctgtcctgggaggcaagagtaggtgaaacgagcacactctacgccaggcaaacaaacctcaacgcttagcctcccggcacctcctagggccggaagcttctcagcccaaagccgctgctggctgcaacctccgtcccgcagtccaattagcagccgcgacccggcgcccgcccacgccgcgtcacgagtcagccaaagatggctgcgcccaggtaatttgagcaaaggccacagtgaactccggcgtggctgaggaaggaggaggcacccacaggctgctgggaggagagcataagaaaaattaaccagcttccagaagcagaaaggaatctacttgaaaatggatcggtttatgttggattaaatgctgctctttgtggcctcatagcaaacagtctttttcgacgcatcttgaatgtgacaaaggctcgcatagctgctggcttaccaatggcagggataccttttcttacaacagacttaacttacagatgttttgtaagttttcctttgaatacaggtgatttggattgtgaaacctgtaccataacacggagtggactgactggtcttgttattggtggtctataccctgttttcttggctatacctgtaaatggtggtctagcagccaggtatcaatcagctctgttaccacacaaagggaacatcttaagttactggattagaacttctaagcctgtctttagaaagatgttatttcctattttgctccagactatgttttcagcataccttgggtctgaacaatataaactacttataaaggcccttcagttatctgaacctggcaaagaaattcactgattttaaacaaatatgtaaacaaaaataaaatggtaaaaacaaaaacagtttatgtctaatgttatgtctaatgttatgcataaacatagacttgtaa

SEQ ID NO: 449397 - DNA, 1061 bp, Homo sapiens
aagttaagtaatatgcccgaggtacgttttcaatggaagaggctgactgagggtcacccaacttatatctcgaaatttcacaatttctacaagttctgtcctgggaggcaagagtaggtgaaacgagcacactctacgccaggcaaacaaacctcaacgcttagcctcccggcacctcctagggccggaagcttctcagcccaaagccgctgctggctgcaacctccgtcccgcagtccaattagcagccgcgacccggcgcccgcccacgccgcgtcacgagtcagccaaagatggctgcgcccaggtaatttgagcaaaggccacagtgaactccggcgtggctgaggaaggaggaggcacccacaggctgctgggaggagagcataaggctcaaaatggaaaatcataaatccaataataaggaaaacataacaattgttgatatatccagaaaaattaaccagcttccagaagcagaaaggaatctacttgaaaatggatcggtttatgttggattaaatgctgctctttgtggcctcatagcaaacagtctttttcgacgcatcttgaatgtgacaaaggctcgcatagctgctggcttaccaatggcagggataccttttcttacaacagacttaacttacagatgttttgtgatttggattgtgaaacctgtaccataacacggagtggactgactggtcttgttattggtggtctataccctgttttcttggctatacctgtaaatggtggtctagcagccaggtatcaatcagctctgttaccacacaaagggaacatcttaagttactggattagaacttctaagcctgtctttagaaagatgttatttcctattttgctccagactatgttttcagcataccttgggtctgaacaatataaactacttataaaggcccttcagttatctgaacctggcaaagaaattcactgattttaaacaaatatgtaaacaaaaataaaatggtaaaaacaaaaacagtttatgtctaatgttatgtctaatgttatgcataaacatagacttgtaa

SEQ ID NO: 449398 - DNA, 590 bp, Homo sapiens
caattattcctagctattttaagttactcatagatgtaattataccttttaacaggctttgtacaattacatttgatatattacctgaaaaatacctgtgatacacaaaagaggatcttacattctttaaatcatgtttgcttgactatcatgaccttcatttctatgactaatttatttcctaggtgatttggattgtgaaacctgtaccataacacggagtggactgactggtcttgttattggtggtctataccctgttttcttggctatacctgtaaatggtggtctagcagccaggtatcaatcagctctgttaccacacaaagggaacatcttaagttactggattagaacttctaagcctgtctttagaaagatgttatttcctattttgctccagactatgttttcagcataccttgggtctgaacaatataaactacttataaaggcccttcagttatctgaacctggcaaagaaattcactgattttaaacaaatatgtaaacaaaaataaaatggtaaaaacaaaaacagtttatgtctaatgttatgtctaatgttatgcataaacatagacttgtaa

SEQ ID NO: 449399 - DNA, 621 bp, Homo sapiens
taagattttggttctataagggatagatgtcgtatccagttagtgtattcccaaagtcctataacacatgtcaagatcgggaaagctcacacacacaataatgccaaagaaaagttctttcttctcaccctttcaggaatctacttgaaaatggatcggtttatgttggattaaatgctgctctttgtggcctcatagcaaacagtctttttcgacgcatcttgaatgtgacaaaggctcgcatagctgctggcttaccaatggcagggataccttttcttacaacagacttaacttacagatgttttgtaagttttcctttgaatacaggtaaattctacttcactatcaccaaagagtttgccttagtatatgttatttgcagctttagtccatacttattaatatcaagtagctgtatgctgtaatgcagttaagattaaatcttgctagcctatataatgtggcaaataattcatattagtatggtctaccaaccaagatgcacatacacagcagttctaaatactttttctttaattgagatggagttttgctcttgttgcccaggttggagtgccctggcgcaatcttggctcactgcaacctccaccttctggg

SEQ ID NO: 449400 - DNA, 990 bp, Homo sapiens
aagttaagtaatatgcccgaggtacgttttcaatggaagaggctgactgagggtcacccaacttatatctcgaaatttcacaatttctacaagttctgtcctgggaggcaagagtaggtgaaacgagcacactctacgccaggcaaacaaacctcaacgcttagcctcccggcacctcctagggccggaagcttctcagcccaaagccgctgctggctgcaacctccgtcccgcagtccaattagcagccgcgacccggcgcccgcccacgccgcgtcacgagtcagccaaagatggctgcgcccaggtaatttgagcaaaggccacagtgaactccggcgtggctgaggaaggaggaggcacccacaggctgctgggaggagagcataaggaatctacttgaaaatggatcggtttatgttggattaaatgctgctctttgtggcctcatagcaaacagtctttttcgacgcatcttgaatgtgacaaaggctcgcatagctgctggcttaccaatggcagggataccttttcttacaacagacttaacttacagatgttttgtaagttttcctttgaatacaggtgatttggattgtgaaacctgtaccataacacggagtggactgactggtcttgttattggtggtctataccctgttttcttggctatacctgtaaatggtggtctagcagccaggtatcaatcagctctgttaccacacaaagggaacatcttaagttactggattagaacttctaagcctgtctttagaaagatgttatttcctattttgctccagactatgttttcagcataccttgggtctgaacaatataaactacttataaaggcccttcagttatctgaacctggcaaagaaattcactgattttaaacaaatatgtaaacaaaaataaaatggtaaaaacaaaaacagtttatgtctaatgttatgtctaatgttatgcataaacatagacttgtaa

SEQ ID NO: 449401 - DNA, 1083 bp, Homo sapiens
aagttaagtaatatgcccgaggtacgttttcaatggaagaggctgactgagggtcacccaacttatatctcgaaatttcacaatttctacaagttctgtcctgggaggcaagagtaggtgaaacgagcacactctacgccaggcaaacaaacctcaacgcttagcctcccggcacctcctagggccggaagcttctcagcccaaagccgctgctggctgcaacctccgtcccgcagtccaattagcagccgcgacccggcgcccgcccacgccgcgtcacgagtcagccaaagatggctgcgcccaggtaatttgagcaaaggccacagtgaactccggcgtggctgaggaaggaggaggcacccacaggctgctgggaggagagcataaggctcaaaatggaaaatcataaatccaataataaggaaaacataacaattgttgatatatccagaaaaattaaccagcttccagaagcagaaaggaatctacttgaaaatggatcggtttatgttggattaaatgctgctctttgtggcctcatagcaaacagtctttttcgacgcatcttgaatgtgacaaaggctcgcatagctgctggcttaccaatggcagggataccttttcttacaacagacttaacttacagatgttttgtaagttttcctttgaatacaggtgatttggattgtgaaacctgtaccataacacggagtggactgactggtcttgttattggtggtctataccctgttttcttggctatacctgtaaatggtggtctagcagccaggtatcaatcagctctgttaccacacaaagggaacatcttaagttactggattagaacttctaagcctgtctttagaaagatgttatttcctattttgctccagactatgttttcagcataccttgggtctgaacaatataaactacttataaaggcccttcagttatctgaacctggcaaagaaattcactgattttaaacaaatatgtaaacaaaaataaaatggtaaaaacaaaaacagtttatgtctaatgttatgtctaatgttatgcataaacatagacttgtaa

SEQ ID NO: 449402 - DNA, 1088 bp, Homo sapiens
aagttaagtaatatgcccgaggtacgttttcaatggaagaggctgactgagggtcacccaacttatatctcgaaatttcacaatttctacaagttctgtcctgggaggcaagagtaggtgaaacgagcacactctacgccaggcaaacaaacctcaacgcttagcctcccggcacctcctagggccggaagcttctcagcccaaagccgctgctggctgcaacctccgtcccgcagtccaattagcagccgcgacccggcgcccgcccacgccgcgtcacgagtcagccaaagatggctgcgcccaggtaatttgagcaaaggccacagtgaactccggcgtggctgaggaaggaggaggcacccacaggctgctgggaggagagcataaggctcaaaatggaaaatcataaatccaataataaggaaaacataacaattgttgatatatccagaaaaattaaccagcttccagaagcagaaaggaatctacttgaaaatggatcggtttatgttggattaaatgctgctctttgtggcctcatagcaaacagtctttttcgacgcatcttgaatgtgacaaaggctcgcatagctgctggcttaccaatggcagggataccttttcttacaacagacttaacttacagatgttttgtaagttttcctttgaatacaggtgatttggattgtgaaacctgtaccataacacggagtggactgactggtcttgttattggtggtctataccctgttttcttggctatacctgtaaatggtggtctagcagccaggtatcaatcagctctgttaccacacaaagggaacatcttaagttactggattagaacttctaagcctgtctttagaaagatgttatttcctattttgctccagactatgttttcagcataccttgggtctgaacaatataaactacttataaaggcccttcagttatctgaacctggcaaagaaattcactgattttaaacaaatatgtaaacaaaaataaaatggtaaaaacaacagatgcggccggactatttaaattaatatatttacttatcctaagcttgagacgattcg

SEQ ID NO: 449403 - DNA, 870 bp, Homo sapiens
gctaaaccacaagaagcctccagacagccctgagatcacctaaaaagctgctaccaagacagccacgaagatcctaccaaaatgaagcgcttcctcttcctcctactcaccatcagcctcctggttatggtacagatacaaactggactctcaggacaaactgggaggagagcataaggctcaaaatggaaaatcataaatccaataataaggaaaacataacaattgttgatatatccagaaaaattaaccagcttccagaagcagaaaggaatctacttgaaaatggatcggtttatgttggattaaatgctgctctttgtggcctcatagcaaacagtctttttcgacgcatcttgaatgtgacaaaggctcgcatagctgctggcttaccaatggcagggataccttttcttacaacagacttaacttacagatgttttgtaagttttcctttgaatacaggtgatttggattgtgaaacctgtaccataacacggagtggactgactggtcttgttattggtggtctataccctgttttcttggctatacctgtaaatggtggtctagcagccaggtatcaatcagctctgttaccacacaaagggaacatcttaagttactggattagaacttctaagcctgtctttagaaagatgttatttcctattttgctccagactatgttttcagcataccttgggtctgaacaatataaactacttataaaggcccttcagttatctgaacctggcaaagaaattcactgattttaaacaaatatgtaaacaaaaataaaatggtaaaaacaaaaacagtttatgtctaatgttatgtctaatgttatgcataaacatagacttgtaa

SEQ ID NO: 449404 - DNA, 589 bp, Homo sapiens
ttttttgaggggtttaccaaaggctctatggagttgacacgagcagagctttatttaatcataatagtaccagatacaaattactgctgtcttatttatatcccagggaccaaactagtgtttttcatatattggctcatttaattctcagaacaatcctacacactggttactgttgttctccctttcttccagaatgaagcaccccagttctctgctgagcacatgggcatctgcaataaagatttaatttcccagcttctcctgaagctcggtatggccacaacactaaattctgcccgaggagattaagcaaaatagtatgggacttccaagaaatgtttttaaagtcaggggcaggcctttcttcatgccttcttcctctttgctggctggaacgcaaagaccatggcaggaggccaagcagccatcctggaaggtgaaagcctcatactaaggacgtcagacagcgaaataagagcctgggtccttgaccctgtagacatctccctccccatcctggtctgtctgccttgactcctttcatatgagagaaataaacttttaacttgcgtaaaccagaaaaaaa

SEQ ID NO: 449405 - DNA, 599 bp, Homo sapiens
cagtctctcggaatccgcagcctaggtgtggcgccccgaccggactttcacttctggccagccctttccccacctgggcgcgggagcgggtgccagtctttaaacaacctctcgatgggtcccacgaagatgtttccagacccttggaatgccaagttcaagtttagctatgtctcgcggagaggccggtggaagaagcaacgagaatgaagcaccccagttctctgctgagcacatgggcatctgcaataaagatttaatttcccagcttctcctgaagctcggtatggccacaacactaaattctgcccgaggagattaagcaaaatagtatgggacttccaagaaatgtttttaaagtcaggggcaggcctttcttcatgccttcttcctctttgctggctggaacgcaaagaccatggcaggaggccaagcagccatcctggaaggtgaaagcctcatactaaggacgtcagacagcgaaataagagcctgggtccttgaccctgtagacatctccctccccatcctggtctgtctgccttgactcctttcatatgagagaaataaacttttaacttgcgtaaaccagaaaaaaa

SEQ ID NO: 449406 - DNA, 545 bp, Homo sapiens
tctatgagaaaacaagtggacatgttccaagactcccagcagtgggaggggcgtcagattagtgcacaaatgtctgctttaaccgtaatgtagaggaaatacaaggaacttgcattaaataaaagatgcccacaacactaccagacatacaaatgaagcaccccagttctctgctgagcacatgggcatctgcaataaagatttaatttcccagcttctcctgaagctcggtatggccacaacactaaattctgcccgaggagattaagcaaaatagtatgggacttccaagaaatgtttttaaagtcaggggcaggcctttcttcatgccttcttcctctttgctggctggaacgcaaagaccatggcaggaggccaagcagccatcctggaaggtgaaagcctcatactaaggacgtcagacagcgaaataagagcctgggtccttgaccctgtagacatctccctccccatcctggtctgtctgccttgactcctttcatatgagagaaataaacttttaacttgcgtaaaccagaaaaaaa

SEQ ID NO: 449407 - DNA, 1213 bp, Homo sapiens
ttttttgaggggtttaccaaaggctctatggagttgacacgagcagagctttatttaatcataatagtaccagatacaaattactgctgtcttatttatatcccagggaccaaactagtgtttttcatatattggctcatttaattctcagaacaatcctacacactggttactgttgttctccctttcttccagaatgaagcaccccagttctctgctgagcacatgggcatctgcaataaagatttaatttcccagcttctcctgaagctcggtatggccacaacactaaattctgcccgaggagattaagcaaaatagtatgggacttccaagaaatgtttttaaagtcaggggcaggcctttcttcatgccttcttcctctttgctggctggaacgcaaagaccatggcaggaggccaagcagccatcctggaaggtgaaagcctcatactaaggacgtcagacagcgaaataagagcctgggtccttgaccctgtagacatctccctccccatcctggtctgtctgccttgactcctttcatatgagagaaataaacttttaacttgcgtaaaccagaaaaaaattttacaattttttttcacacacagttgaatggaagccagactcatacactaatctcatctccacttttagagatgaggggaacagcttgcccacagtgacagccagtgtgagctgggtttctgttgcccaactcattggggttccaaccctcacctagactgccctatgaaatacctagaacttggtcaggagaaaagataagaggggaaaatgtcagcaaaagccaaagactaagggtagcaggggcagaagtgagagtgggaagtgaaaggtgatataatttccctattccactgagcaggaagaggctgcctttgcatccctctgtgtcgggagacagtctggggacagtcagcaggcaccttgctgcaggagagcccctgcaagagcagcctttgtggagctgtcccttccaccccagtaggagcttctcggacacagcatggcctctctccttcactctggtgtcttcactcagtactgggtcccagattttttttttttttttttttttttttgagatggagtctcactctgttgcccaggctggagtgcagtggctcgatctcggcccactgcaacctcctcctcctcctgggttcaagcggttctcctgcctcag

SEQ ID NO: 449408 - DNA, 426 bp, Homo sapiens
tctatgagaaaacaagtggacatgttccaagactcccagcagtgggaggggcgtcagattagtgcacaaatgtctgctttaaccgtaatgtagaggaaatacaaggaacttgcattaaataaaagatgcccacaacactaccagacatacatttgaggggaaaagtactgttctctgagggacaagagtgaaaccaggaggggaccagaacatagctctactttcccagggtagcattgaggggagaggttggccaatagtgggcgtgagagatcacagctggaggagatttaggggattaaggaggtgcggtgctgatataattactcaggtagccttgaagagttgcttcaaagaatggagagcctccctccccagcacctgtaggcattcatagtacccctctatttctgagtggtaggaaat

SEQ ID NO: 449409 - DNA, 617 bp, Homo sapiens
  misc_feature (590)..(590): n is a, c, g, or t
ttttttgaggggtttaccaaaggctctatggagttgacacgagcagagctttatttaatcataatagtaccagatacaaattactgctgtcttatttatatcccagggaccaaactagtgtttttcatatattggctcatttaattctcagaacaatcctacacactggttactgttgttctccctttcttccagaatgaagcaccccagttctctgctgagcacatgggcatctgcaataaagatttaatttcccagcttctcctgaagctcggtatggccacaacactaaattctgcccgaggagattaagcaaaatagtatgggacttccaagaaatgtttttaaagtcaggggcaggcctttcttcatgccttcttcctctttgctggctggaacgcaaagaccatggcaggaggccaagcagccatcctggaaggtgaaagcctcatactaaggacgtcagacagcgaaataagagcctgggtccttgaccctgtagacatctccctccccatcctggtctgtctgccttgactcctttcatatgagagaaataaacttttaacttgcgtaaaccagaaaaaaanaaacaaaatggcctccgtggaccttta

SEQ ID NO: 449410 - DNA, 3365 bp, Homo sapiens
aagtttccgaggagacttctcaggctgggctggacacacctttccaaggacccccaaactctgctccgtgcacgtcaaatgctcctttcccttgtgtccaaccccctacccctctccctaacacccctcttctcaacaagactcagcctctccccgaggtgggtgagcatccttgaggtttcccacccttaactgctgtgtccccggatggagccagagaaatgtggtgggggggccggggcagagtttcaacattgccccccagaaggaggagccagagatggggtctgtccaggaaaacaggatgccggagcccaggagtcgtcagcctagcagttgcctggcctccagatgcctcccaggggagcagatcctagcatgggccccaggggtgaggaagggcctggaaccagaattgtctggaaccctgatctgtaccaactttagggtcaccttccagccctgtggatggcagtggaatcaggacactcccttgaacagtgaatacgattttgccctggtcaacattggacgattagaggctgtgagcggcttgtcccgagtccagctcctccgtccagggtccctgcataaatttatccctgaggagattctgattcatggccgagacttccggctgctcagagttggttttgaggctggaggcctagagcctcaggcttttcaggtgaccatggccattgtccaagccagagctcagagcaatcaagcccaacagtattcggggataaccctgagcaaggctggccagggttctggctccagaaaaccaccaattcctctcatggagacagcggaagactgggagactgagcggaagaagcaggcagccagaggctggagggtcagcacggtcaacgagaggttcgacgtagccaccagcctcccccgttacttctgggtccctaaccgaattctggacagtgaggtcaggagagcatttggccactttcatcagggccgtggaccggtcagtgtgatggttagggtaatggctgtggattagagggtcatgtgggccagggacatcgtggagggaggaacctctgtgaggtcagtgtgggggcaagggtagcgtggagctaggcatttctcccacaatgaccctcttctgccccatgtgaagcgcttgtcctggcatcaccctgggggcagtgatcttctccgctgtggaggcttctatacagccagtgaccctaacaaggaggatatcagagcagtggagttgatgctccaggctgggcattcagatgttgtcctgggtagacactatggatgagctgcccagccttgcagatgtccaacttgcccacctgaggctgagggccctctgcctgcctgattcatctgtagctgaggataaatggctttcagccctggaaggaacacgatggctggactatgtcagggcttgtcttcgaaaggccagtgacatttcagtattagtgacatccagggttcgttctgtaatacttcaaggctccggtgtttctcctcttccttgattgtgtctggcagctcctccagcagtttccagctgattttgaattctctgagtttttccttcttgctcttcatgacagtgtcagggttcctgacacccttaccttcctgagaaataccccctgggagcgcggaaagcagagcggacaggtcagtgacttctatttttgactcgtgtttttttttccattgagatgtactctctgaagtttggtcttgatttgttttatgagaagtgaggtctgtgagtggggagggggagatttattctcattttcaggacgagacttttgccctacatctttcctagaataagaggtgagaatctcatgatttgtctctagatgtgggaggattgtgtgtaaccatcctttttcttgcttcctctgtccagttaaactcctatacacaagtctacaccccaggatactcccagcctccagctgggaactcttttaacctgcagctgtctgtctgggactgggatttacgttatagcaatgcacagatactacaattccagaatcctggctatgacccagaacactgtccagattcctggctccctagaccacagccaagcttcatggttcctggaccccccagttctgtgtggctcttctctagaggagcattgacccccctgaatcagctctgtccttggcgggacagtccttccctgctggcagtctcttctcgttggctccctcgacctgctatctcctctgaaagcctggctgaccaggaatggggtctcccctcacattggggagcttgccctttacctccagggctgctgctgcctgggtatctgggaccccagatcaggctctggagacgctgctacctgaggggaaggcctgaggtccaggtaagaagggaaaatagactgggagtgggacaagggacttgactctgctgaaccagatgaacaggagctggaaaggcaaggagctgaagcctctgggagtctgggaagtgaagttctactcctcttggcatcaaacaaggtttgggagtgtaggaggtgcgggaaagtgcttgtggcttagattaagtggaatttagggcatagctgaaaggggaaacagaattaaagacaccagaagtagcagagaagcagggggccagagctacaacagtattcttctctgttcctctttgcctcctccccagatgggcctctcatctcccacaatctctggcctccaggatgagctatcccatcttcaggagttattacggaaatggacaccaagaatatctcctgaggatcactccaagaaaagagatccacataccattctcaatcccactgaaattgctggcattctcaaaggcagggcagagggggatctggggtagaggagggttctgtctaatcttttttttttttttgtatctgcacttgcagcctcagctttcacacttcagcccttaagttcactaagaaggtctgagtttctgctgcagatagtggtgttaactgctccaactcttgtcttgcttagtttctacaaatatttttgcttcttgtcatttgaaggattaagaaacaaaaacaatccagaaattgatcggtttttttaggccaatcccatcccttctggataaccagatgttaaatcatgagatcagagatgctgttcatcagtcccaacaagatggcctagaaatcgcattctcacctcgccttgctgctgctttaattccaagttctatttcttcccttatagttttctatgggaatgaggcggatacaggaaacaccctatctcctctgtatttttgtagtggaatttctatttaaggggctcattaaagcatagtatttatacaca

SEQ ID NO: 449411 - DNA, 2977 bp, Homo sapiens
aagtttccgaggagacttctcaggctgggctggacacacctttccaagggcctggaaccagaattgtctggaaccctgatctgtaccaactttagggtcaccttccagccctgtggatggcagtggaatcaggacactcccttgaacagtgaatacgattttgccctggtcaacattggacgattagaggctgtgagcggcttgtcccgagtccagctcctccgtccagggtccctgcataaatttatccctgaggagattctgattcatggccgagacttccggctgctcagagttggttttgaggctggaggcctagagcctcaggcttttcaggtgaccatggccattgtccaagccagagctcagagcaatcaagcccaacagtattcggggataaccctgagcaaggctggccagggttctggctccagaaaaccaccaattcctctcatggagacagcggaagactgggagactgagcggaagaagcaggcagccagaggctggagggtcagcacggtcaacgagaggttcgacgtagccaccagcctcccccgttacttctgggtccctaaccgaattctggacagtgaggtcaggagagcatttggccactttcatcagggccgtggaccgcgcttgtcctggcatcaccctgggggcagtgatcttctccgctgtggaggcttctatacagccagtgaccctaacaaggaggatatcagagcagtggagttgatgctccaggctgggcattcagatgttgtcctgggtagacactatggatgagctgcccagccttgcagatgtccaacttgcccacctgaggctgagggccctctgcctgcctgattcatctgtagctgaggataaatggctttcagccctggaaggaacacgatggctggactatgtcagggcttgtcttcgaaaggccagtgacatttcagtattagtgacatccagggttcgttctgtaatacttcaagctgctttcagcccccgaagcccgaacactgtttggcttccaatcactagtacagcgagagtgggtggcagctggacatcccttcctgactcggcttgggggaactggggccagtgaagaggctccggtgtttctcctcttccttgattgtgtctggcagctcctccagcagtttccagctgattttgaattctctgagtttttccttcttgctcttcatgacagtgtcagggttcctgacacccttaccttcctgagaaataccccctgggagcgcggaaagcagagcggacaggtcagtgacttctatttttgactcgtgtttttttttccattgagatgtactctctgaagtttggtcttgatttgttttatgagaagtgaggtctgtgagtggggagggggagatttattctcattttcaggacgagacttttgccctacatctttcctagaataagaggtgagaatctcatgatttgtctctagatgtgggaggattgtgtgtaaccatcctttttcttgcttcctctgtccagttaaactcctatacacaagtctacaccccaggatactcccagcctccagctgggaactcttttaacctgcagctgtctgtctgggactgggatttacgttatagcaatgcacagatactacaattccagaatcctggctatgacccagaacactgtccagattcctggctccctagaccacagccaagcttcatggttcctggaccccccagttctgtgtggctcttctctagaggagcattgacccccctgaatcagctctgtccttggcgggacagtccttccctgctggcagtctcttctcgttggctccctcgacctgctatctcctctgaaagcctggctgaccaggaatggggtctcccctcacattggggagcttgccctttacctccagggctgctgctgcctgggtatctgggaccccagatcaggctctggagacgctgctacctgaggggaaggcctgaggtccaggtaagaagggaaaatagactgggagtgggacaagggacttgactctgctgaaccagatgaacaggagctggaaaggcaaggagctgaagcctctgggagtctgggaagtgaagttctactcctcttggcatcaaacaaggtttgggagtgtaggaggtgcgggaaagtgcttgtggcttagattaagtggaatttagggcatagctgaaaggggaaacagaattaaagacaccagaagtagcagagaagcagggggccagagctacaacagtattcttctctgttcctctttgcctcctccccagatgggcctctcatctcccacaatctctggcctccaggatgagctatcccatcttcaggagttattacggaaatggacaccaagaatatctcctgaggatcactccaagaaaagagatccacataccattctcaatcccactgaaattgctggcattctcaaaggcagggcagagggggatctggggtagaggagggttctgtctaatcttttttttttttttgtatctgcacttgcagcctcagctttcacacttcagcccttaagttcactaagaaggtctgagtttctgctgcagatagtggtgttaactgctccaactcttgtcttgcttagtttctacaaatatttttgcttcttgtcatttgaaggattaagaaacaaaaacaatccagaaattgatcggtttttttaggccaatcccatcccttctggataaccagatgttaaatcatgagatcagagatgctgttcatcagtcccaacaagatggcctagaaatcgcattctcacctcgccttgctgctgctttaattccaagttctatttcttcccttatagttttctatgggaatgaggcggatacaggaaacaccctatctcctctgtatttttgtagtggaatttctatttaaggggctcattaaagcatagtatttatacaca

SEQ ID NO: 449412 - DNA, 3180 bp, Homo sapiens
aagtttccgaggagacttctcaggctgggctggacacacctttccaagggcctggaaccagaattgtctggaaccctgatctgtaccaactttagggtcaccttccagccctgtggatggcagtggaatcaggacactcccttgaacagtgaatacgattttgccctggtcaacattggacgattagaggctgtgagcggcttgtcccgagtccagctcctccgtccagggtccctgcataaatttatccctgaggagattctgattcatggccgagacttccggctgctcagagttggttttgaggctggaggcctagagcctcaggcttttcaggtgaccatggccattgtccaagccagagctcagagcaatcaagcccaacagtattcggggataaccctgagcaaggctggccagggttctggctccagaaaaccaccaattcctctcatggagacagcggaagactgggagactgagcggaagaagcaggcagccagaggctggagggtcagcacggtcaacgagaggttcgacgtagccaccagcctcccccgttacttctgggtccctaaccgaattctggacagtgaggtcaggagagcatttggccactttcatcagggccgtggaccggtcagtgtgatggttagggtaatggctgtggattagagggtcatgtgggccagggacatcgtggagggaggaacctctgtgaggtcagtgtgggggcaagggtagcgtggagctaggcatttctcccacaatgaccctcttctgccccatgtgaagcgcttgtcctggcatcaccctgggggcagtgatcttctccgctgtggaggcttctatacagccagtgaccctaacaaggaggatatcagagcagtggagttgatgctccaggctgggcattcagatgttgtcctgggtagacactatggatgagctgcccagccttgcagatgtccaacttgcccacctgaggctgagggccctctgcctgcctgattcatctgtagctgaggataaatggctttcagccctggaaggaacacgatggctggactatgtcagggcttgtcttcgaaaggccagtgacatttcagtattagtgacatccagggttcgttctgtaatacttcaagagcgcggtgatcgtgatctcaatggcctcctctcttcactcgtccagctgctttcagcccccgaagcccgaacactgtttggcttccaatcactagtacagcgagagtgggtggcagctggacatcccttcctgactcggcttgggggaactggggccagtgaagaggctccggtgtttctcctcttccttgattgtgtctggcagctcctccagcagtttccagctgattttgaattctctgagtttttccttcttgctcttcatgacagtgtcagggttcctgacacccttaccttcctgagaaataccccctgggagcgcggaaagcagagcggacaggtcagtgacttctatttttgactcgtgtttttttttccattgagatgtactctctgaagtttggtcttgatttgttttatgagaagtgaggtctgtgagtggggagggggagatttattctcattttcaggacgagacttttgccctacatctttcctagaataagaggtgagaatctcatgatttgtctctagatgtgggaggattgtgtgtaaccatcctttttcttgcttcctctgtccagttaaactcctatacacaagtctacaccccaggatactcccagcctccagctgggaactcttttaacctgcagctgtctgtctgggactgggatttacgttatagcaatgcacagatactacaattccagaatcctggctatgacccagaacactgtccagattcctggctccctagaccacagccaagcttcatggttcctggaccccccagttctgtgtggctcttctctagaggagcattgacccccctgaatcagctctgtccttggcgggacagtccttccctgctggcagtctcttctcgttggctccctcgacctgctatctcctctgaaagcctggctgaccaggaatggggtctcccctcacattggggagcttgccctttacctccagggctgctgctgcctgggtatctgggaccccagatcaggctctggagacgctgctacctgaggggaaggcctgaggtccaggtaagaagggaaaatagactgggagtgggacaagggacttgactctgctgaaccagatgaacaggagctggaaaggcaaggagctgaagcctctgggagtctgggaagtgaagttctactcctcttggcatcaaacaaggtttgggagtgtaggaggtgcgggaaagtgcttgtggcttagattaagtggaatttagggcatagctgaaaggggaaacagaattaaagacaccagaagtagcagagaagcagggggccagagctacaacagtattcttctctgttcctctttgcctcctccccagatgggcctctcatctcccacaatctctggcctccaggatgagctatcccatcttcaggagttattacggaaatggacaccaagaatatctcctgaggatcactccaagaaaagagatccacataccattctcaatcccactgaaattgctggcattctcaaaggcagggcagagggggatctggggtagaggagggttctgtctaatcttttttttttttttgtatctgcacttgcagcctcagctttcacacttcagcccttaagttcactaagaaggtctgagtttctgctgcagatagtggtgttaactgctccaactcttgtcttgcttagtttctacaaatatttttgcttcttgtcatttgaaggattaagaaacaaaaacaatccagaaattgatcggtttttttaggccaatcccatcccttctggataaccagatgttaaatcatgagatcagagatgctgttcatcagtcccaacaagatggcctagaaatcgcattctcacctcgccttgctgctgctttaattccaagttctatttcttcccttatagttttctatgggaatgaggcggatacaggaaacaccctatctcctctgtatttttgtagtggaatttctatttaaggggctcattaaagcatagtatttatacaca

SEQ ID NO: 449413 - DNA, 2590 bp, Homo sapiens
tctggagctccccacagacactgatctcagtttcccccgagagtgtgagtgtaggcctctacaggcagctgcctctggggagttggggagcctaggggttaactctagacccccctcaaccctctggaccaaagtctgtccaggaaaacaggatgccggagcccaggagtcgtcagcctagcagttgcctggcctccagatgcctcccagggtcaccttccagccctgtggatggcagtggaatcaggacactcccttgaacagtgaatacgattttgccctggtcaacattggacgattagaggctgtgagcggcttgtcccgagtccagctcctccgtccagggtccctgcataaatttatccctgaggagattctgattcatggccgagacttccggctgctcagagttggttttgaggctggaggcctagagcctcaggcttttcaggtgaccatggccattgtccaagccagagctcagagcaatcaagcccaacagtattcggggataaccctgagcaaggctggccagggttctggctccagaaaaccaccaattcctctcatggagacagcggaagactgggagactgagcggaagaagcaggcagccagaggctggagggtcagcacggtcaacgagaggttcgacgtagccaccagcctcccccgttacttctgggtccctaaccgaattctggacagtgaggtcaggagagcatttggccactttcatcagggccgtggaccgcgcttgtcctggcatcaccctgggggcagtgatcttctccgctgtggaggcttctatacagccagtgaccctaacaaggaggatatcagagcagtggagttgatgctccaggctgggcattcagatgttgtcctgggtagacactatggatgagctgcccagccttgcagatgtccaacttgcccacctgaggctgagggccctctgcctgcctgattcatctgtagctgaggataaatggctttcagccctggaaggaacacgatggctggactatgtcagggcttgtcttcgaaaggccagtgacatttcagtattagtgacatccagggttcgttctgtaatacttcaagagcgcggtgatcgtgatctcaatggcctcctctcttcactcgtccagctgctttcagcccccgaagcccgaacactgtttggcttccaatcactagtacagcgagagtgggtggcagctggacatcccttcctgactcggcttgggggaactggggccagtgaagaggctccggtgtttctcctcttccttgattgtgtctggcagctcctccagcagtttccagctgattttgaattctctgagtttttccttcttgctcttcatgacagtgtcagggttcctgacacccttaccttcctgagaaataccccctgggagcgcggaaagcagagcggacagttaaactcctatacacaagtctacaccccaggatactcccagcctccagctgggaactcttttaacctgcagctgtctgtctgggactgggatttacgttatagcaatgcacagatactacaattccagaatcctggctatgacccagaacactgtccagattcctggctccctagaccacagccaagcttcatggttcctggaccccccagttctgtgtggctcttctctagaggagcattgacccccctgaatcagctctgtccttggcgggacagtccttccctgctggcagtctcttctcgttggctccctcgacctgctatctcctctgaaagcctggctgaccaggaatggggtctcccctcacattggggagcttgccctttacctccagggctgctgctgcctgggtatctgggaccccagatcaggctctggagacgctgctacctgaggggaaggcctgaggtccagatgggcctctcatctcccacaatctctggcctccaggatgagctatcccatcttcaggagttattacggaaatggacaccaagaatatctcctgaggatcactccaagaaaagagatccacataccattctcaatcccactgaaattgctggcattctcaaaggcagggcagagggggatctggggtagaggagggttctgtctaatcttttttttttttttgtatctgcacttgcagcctcagctttcacacttcagcccttaagttcactaagaaggtctgagtttctgctgcagatagtggtgttaactgctccaactcttgtcttgcttagtttctacaaatatttttgcttcttgtcatttgaaggattaagaaacaaaaacaatccagaaattgatcggtttttttaggccaatcccatcccttctggataaccagatgttaaatcatgagatcagagatgctgttcatcagtcccaacaagatggcctagaaatcgcattctcacctcgccttgctgctgctttaattccaagttctatttcttcccttatagttttctatgggaatgaggcggatacaggaaacaccctatctcctctgtatttttgtagtggaatttctatttaaggggctcattaaagcatagtatttatacaca

SEQ ID NO: 449414 - DNA, 2097 bp, Homo sapiens
attttgtataatccattggaggtgaatccggtcagaagggccccgaggttaggctgggacgaagatcctgatgagtgaggccttacaagcccctgctaccctcaattcagattttcattccctgacttccataagttccccctattccctgtgttccccattcccttatcatctcgtcatcctccctctttgggtcccaataatcccttccaacctcttaatttcttttcaggctccggtgtttctcctcttccttgattgtgtctggcagctcctccagcagtttccagctgattttgaattctctgagtttttccttcttgctcttcatgacagtgtcagggttcctgacacccttaccttcctgagaaataccccctgggagcgcggaaagcagagcggacaggtcagtgacttctatttttgactcgtgtttttttttccattgagatgtactctctgaagtttggtcttgatttgttttatgagaagtgaggtctgtgagtggggagggggagatttattctcattttcaggacgagacttttgccctacatctttcctagaataagaggtgagaatctcatgatttgtctctagatgtgggaggattgtgtgtaaccatcctttttcttgcttcctctgtccagttaaactcctatacacaagtctacaccccaggatactcccagcctccagctgggaactcttttaacctgcagctgtctgtctgggactgggatttacgttatagcaatgcacagatactacaattccagaatcctggctatgacccagaacactgtccagattcctggctccctagaccacagccaagcttcatggttcctggaccccccagttctgtgtggctcttctctagaggagcattgacccccctgaatcagctctgtccttggcgggacagtccttccctgctggcagtctcttctcgttggctccctcgacctgctatctcctctgaaagcctggctgaccaggaatggggtctcccctcacattggggagcttgccctttacctccagggctgctgctgcctgggtatctgggaccccagatcaggctctggagacgctgctacctgaggggaaggcctgaggtccaggtaagaagggaaaatagactgggagtgggacaagggacttgactctgctgaaccagatgaacaggagctggaaaggcaaggagctgaagcctctgggagtctgggaagtgaagttctactcctcttggcatcaaacaaggtttgggagtgtaggaggtgcgggaaagtgcttgtggcttagattaagtggaatttagggcatagctgaaaggggaaacagaattaaagacaccagaagtagcagagaagcagggggccagagctacaacagtattcttctctgttcctctttgcctcctccccagatgggcctctcatctcccacaatctctggcctccaggatgagctatcccatcttcaggagttattacggaaatggacaccaagaatatctcctgaggatcactccaagaaaagagatccacataccattctcaatcccactgaaattgctggcattctcaaaggcagggcagagggggatctggggtagaggagggttctgtctaatcttttttttttttttgtatctgcacttgcagcctcagctttcacacttcagcccttaagttcactaagaaggtctgagtttctgctgcagatagtggtgttaactgctccaactcttgtcttgcttagtttctacaaatatttttgcttcttgtcatttgaaggattaagaaacaaaaacaatccagaaattgatcggtttttttaggccaatcccatcccttctggataaccagatgttaaatcatgagatcagagatgctgttcatcagtcccaacaagatggcctagaaatcgcattctcacctcgccttgctgctgctttaattccaagttctatttcttcccttatagttttctatgggaatgaggcggatacaggaaacaccctatctcctctgtatttttgtagtggaatttctatttaaggggctcattaaagcatagtatttatacaca

SEQ ID NO: 449415 - DNA, 2905 bp, Homo sapiens
tctggagctccccacagacactgatctcagtttcccccgagagtgtgagtgtaggcctctacaggcagctgcctctggggagttggggagcctaggggttaactctagacccccctcaaccctctggaccaaagtctgtccaggaaaacaggatgccggagcccaggagtcgtcagcctagcagttgcctggcctccagatgcctcccagggtcaccttccagccctgtggatggcagtggaatcaggacactcccttgaacagtgaatacgattttgccctggtcaacattggacgattagaggctgtgagcggcttgtcccgagtccagctcctccgtccagggtccctgcataaatttatccctgaggagattctgattcatggccgagacttccggctgctcagagttggttttgaggctggaggcctagagcctcaggcttttcaggtgaccatggccattgtccaagccagagctcagagcaatcaagcccaacagtattcggggataaccctgagcaaggctggccagggttctggctccagaaaaccaccaattcctctcatggagacagcggaagactgggagactgagcggaagaagcaggcagccagaggctggagggtcagcacggtcaacgagaggttcgacgtagccaccagcctcccccgttacttctgggtccctaaccgaattctggacagtgaggtcaggagagcatttggccactttcatcagggccgtggaccgcgcttgtcctggcatcaccctgggggcagtgatcttctccgctgtggaggcttctatacagccagtgaccctaacaaggaggatatcagagcagtggagttgatgctccaggctgggcattcagatgttgtcctgggtagacactatggatgagctgcccagccttgcagatgtccaacttgcccacctgaggctgagggccctctgcctgcctgattcatctgtagctgaggataaatggctttcagccctggaaggaacacgatggctggactatgtcagggcttgtcttcgaaaggccagtgacatttcagtattagtgacatccagggttcgttctgtaatacttcaagctgctttcagcccccgaagcccgaacactgtttggcttccaatcactagtacagcgagagtgggtggcagctggacatcccttcctgactcggcttgggggaactggggccagtgaagaggctccggtgtttctcctcttccttgattgtgtctggcagctcctccagcagtttccagctgattttgaattctctgagtttttccttcttgctcttcatgacagtgtcagggttcctgacacccttaccttcctgagaaataccccctgggagcgcggaaagcagagcggacaggtcagtgacttctatttttgactcgtgtttttttttccattgagatgtactctctgaagtttggtcttgatttgttttatgagaagtgaggtctgtgagtggggagggggagatttattctcattttcaggacgagacttttgccctacatctttcctagaataagaggtgagaatctcatgatttgtctctagatgtgggaggattgtgtgtaaccatcctttttcttgcttcctctgtccagttaaactcctatacacaagtctacaccccaggatactcccagcctccagctgggaactcttttaacctgcagctgtctgtctgggactgggatttacgttatagcaatgcacagatactacaattccagaatcctggctatgacccagaacactgtccagattcctggctccctagaccacagccaagcttcatggttcctggaccccccagttctgtgtggctcttctctagaggagcattgacccccctgaatcagctctgtccttggcgggacagtccttccctgctggcagtctcttctcgttggctccctcgacctgctatctcctctgaaagcctggctgaccaggaatggggtctcccctcacattggggagcttgccctttacctccagggctgctgctgcctgggtatctgggaccccagatcaggctctggagacgctgctacctgaggggaaggcctgaggtccaggtaagaagggaaaatagactgggagtgggacaagggacttgactctgctgaaccagatgaacaggagctggaaaggcaaggagctgaagcctctgggagtctgggaagtgaagttctactcctcttggcatcaaacaaggtttgggagtgtaggaggtgcgggaaagtgcttgtggcttagattaagtggaatttagggcatagctgaaaggggaaacagaattaaagacaccagaagtagcagagaagcagggggccagagctacaacagtattcttctctgttcctctttgcctcctccccagatgggcctctcatctcccacaatctctggcctccaggatgagctatcccatcttcaggagttattacggaaatggacaccaagaatatctcctgaggatcactccaagaaaagagatccacataccattctcaatcccactgaaattgctggcattctcaaaggcagggcagagggggatctggggtagaggagggttctgtctaatcttttttttttttttgtatctgcacttgcagcctcagctttcacacttcagcccttaagttcactaagaaggtctgagtttctgctgcagatagtggtgttaactggacaatggggagccaagagataccatcaaaatttaagtggaggggtcagacactgtgttagtgattaatgggcatcaacagacattgggctagtttttgttttttttttttttaactggggtcctagaaagaaggggacagaagaggctccaaaatacagttggg

SEQ ID NO: 449416 - DNA, 2768 bp, Homo sapiens
aagtttccgaggagacttctcaggctgggctggacacacctttccaaggacccccaaactctgctccgtgcacgtcaaatgctcctttcccttgtgtccaaccccctacccctctccctaacacccctcttctcaacaagactcagcctctccccgaggtgggtgagcatccttgaggtttcccacccttaactgctgtgtccccggatggagccagagaaatgtggtgggggggccggggcagagtttcaacattgccccccagaaggaggagccagagatggggtctgtccaggaaaacaggatgccggagcccaggagtcgtcagcctagcagttgcctggcctccagatgcctcccaggggagcagatcctagcatgggccccaggggtgaggaagggcctggaaccagaattgtctggaaccctgatctgtaccaactttagggtcaccttccagccctgtggatggcagtggaatcaggacactcccttgaacagtgaatacgattttgccctggtcaacattggacgattagaggctgtgagcggcttgtcccgagtccagctcctccgtccagggtccctgcataaatttatccctgaggagattctgattcatggccgagacttccggctgctcagagttggttttgaggctggaggcctagagcctcaggcttttcaggtgaccatggccattgtccaagccagagctcagagcaatcaagcccaacagtattcggggataaccctgagcaaggctggccagggttctggctccagaaaaccaccaattcctctcatggagacagcggaagactgggagactgagcggaagaagcaggcagccagaggctggagggtcagcacggtcaacgagaggttcgacgtagccaccaggctccggtgtttctcctcttccttgattgtgtctggcagctcctccagcagtttccagctgattttgaattctctgagtttttccttcttgctcttcatgacagtgtcagggttcctgacacccttaccttcctgagaaataccccctgggagcgcggaaagcagagcggacaggtcagtgacttctatttttgactcgtgtttttttttccattgagatgtactctctgaagtttggtcttgatttgttttatgagaagtgaggtctgtgagtggggagggggagatttattctcattttcaggacgagacttttgccctacatctttcctagaataagaggtgagaatctcatgatttgtctctagatgtgggaggattgtgtgtaaccatcctttttcttgcttcctctgtccagttaaactcctatacacaagtctacaccccaggatactcccagcctccagctgggaactcttttaacctgcagctgtctgtctgggactgggatttacgttatagcaatgcacagatactacaattccagaatcctggctatgacccagaacactgtccagattcctggctccctagaccacagccaagcttcatggttcctggaccccccagttctgtgtggctcttctctagaggagcattgacccccctgaatcagctctgtccttggcgggacagtccttccctgctggcagtctcttctcgttggctccctcgacctgctatctcctctgaaagcctggctgaccaggaatggggtctcccctcacattggggagcttgccctttacctccagggctgctgctgcctgggtatctgggaccccagatcaggctctggagacgctgctacctgaggggaaggcctgaggtccaggtaagaagggaaaatagactgggagtgggacaagggacttgactctgctgaaccagatgaacaggagctggaaaggcaaggagctgaagcctctgggagtctgggaagtgaagttctactcctcttggcatcaaacaaggtttgggagtgtaggaggtgcgggaaagtgcttgtggcttagattaagtggaatttagggcatagctgaaaggggaaacagaattaaagacaccagaagtagcagagaagcagggggccagagctacaacagtattcttctctgttcctctttgcctcctccccagatgggcctctcatctcccacaatctctggcctccaggatgagctatcccatcttcaggagttattacggaaatggacaccaagaatatctcctgaggatcactccaagaaaagagatccacataccattctcaatcccactgaaattgctggcattctcaaaggcagggcagagggggatctggggtagaggagggttctgtctaatcttttttttttttttgtatctgcacttgcagcctcagctttcacacttcagcccttaagttcactaagaaggtctgagtttctgctgcagatagtggtgttaactgctccaactcttgtcttgcttagtttctacaaatatttttgcttcttgtcatttgaaggattaagaaacaaaaacaatccagaaattgatcggtttttttaggccaatcccatcccttctggataaccagatgttaaatcatgagatcagagatgctgttcatcagtcccaacaagatggcctagaaatcgcattctcacctcgccttgctgctgctttaattccaagttctatttcttcccttatagttttctatgggaatgaggcggatacaggaaacaccctatctcctctgtatttttgtagtggaatttctatttaaggggctcattaaagcatagtatttatacaca

SEQ ID NO: 449417 - DNA, 3092 bp, Homo sapiens
tctggagctccccacagacactgatctcagtttcccccgagagtgtgagtgtaggcctctacaggcagctgcctctggggagttggggagcctaggggttaactctagacccccctcaaccctctggaccaaagtctgtccaggaaaacaggatgccggagcccaggagtcgtcagcctagcagttgcctggcctccagatgcctcccagggtcaccttccagccctgtggatggcagtggaatcaggacactcccttgaacagtgaatacgattttgccctggtcaacattggacgattagaggctgtgagcggcttgtcccgagtccagctcctccgtccagggtccctgcataaatttatccctgaggagattctgattcatggccgagacttccggctgctcagagttggttttgaggctggaggcctagagcctcaggcttttcaggtgaccatggccattgtccaagccagagctcagagcaatcaagcccaacagtattcggggataaccctgagcaaggctggccagggttctggctccagaaaaccaccaattcctctcatggagacagcggaagactgggagactgagcggaagaagcaggcagccagaggctggagggtcagcacggtcaacgagaggttcgacgtagccaccagcctcccccgttacttctgggtccctaaccgaattctggacagtgaggtcaggagagcatttggccactttcatcagggccgtggaccgcgcttgtcctggcatcaccctgggggcagtgatcttctccgctgtggaggcttctatacagccagtgaccctaacaaggaggatatcagagcagtggagttgatgctccaggctgggcattcagatgttgtcctgggtagacactatggatgagctgcccagccttgcagatgtccaacttgcccacctgaggctgagggccctctgcctgcctgattcatctgtagctgaggataaatggctttcagccctggaaggaacacgatggctggactatgtcagggcttgtcttcgaaaggccagtgacatttcagtattagtgacatccagggttcgttctgtaatacttcaagctgctttcagcccccgaagcccgaacactgtttggcttccaatcactagtacagcgagagtgggtggcagctggacatcccttcctgactcggcttgggggaactggggccagtgaagaggctccggtgtttctcctcttccttgattgtgtctggcagctcctccagcagtttccagctgattttgaattctctgagtttttccttcttgctcttcatgacagtgtcagggttcctgacacccttaccttcctgagaaataccccctgggagcgcggaaagcagagcggacaggtcagtgacttctatttttgactcgtgtttttttttccattgagatgtactctctgaagtttggtcttgatttgttttatgagaagtgaggtctgtgagtggggagggggagatttattctcattttcaggacgagacttttgccctacatctttcctagaataagaggtgagaatctcatgatttgtctctagatgtgggaggattgtgtgtaaccatcctttttcttgcttcctctgtccagttaaactcctatacacaagtctacaccccaggatactcccagcctccagctgggaactcttttaacctgcagctgtctgtctgggactgggatttacgttatagcaatgcacagatactacaattccagaatcctggctatgacccagaacactgtccagattcctggctccctagaccacagccaagcttcatggttcctggaccccccagttctgtgtggctcttctctagaggagcattgacccccctgaatcagctctgtccttggcgggacagtccttccctgctggcagtctcttctcgttggctccctcgacctgctatctcctctgaaagcctggctgaccaggaatggggtctcccctcacattggggagcttgccctttacctccagggctgctgctgcctgggtatctgggaccccagatcaggctctggagacgctgctacctgaggggaaggcctgaggtccaggtaagaagggaaaatagactgggagtgggacaagggacttgactctgctgaaccagatgaacaggagctggaaaggcaaggagctgaagcctctgggagtctgggaagtgaagttctactcctcttggcatcaaacaaggtttgggagtgtaggaggtgcgggaaagtgcttgtggcttagattaagtggaatttagggcatagctgaaaggggaaacagaattaaagacaccagaagtagcagagaagcagggggccagagctacaacagtattcttctctgttcctctttgcctcctccccagatgggcctctcatctcccacaatctctggcctccaggatgagctatcccatcttcaggagttattacggaaatggacaccaagaatatctcctgaggatcactccaagaaaagagatccacataccattctcaatcccactgaaattgctggcattctcaaaggcagggcagagggggatctggggtagaggagggttctgtctaatcttttttttttttttgtatctgcacttgcagcctcagctttcacacttcagcccttaagttcactaagaaggtctgagtttctgctgcagatagtggtgttaactgctccaactcttgtcttgcttagtttctacaaatatttttgcttcttgtcatttgaaggattaagaaacaaaaacaatccagaaattgatcggtttttttaggccaatcccatcccttctggataaccagatgttaaatcatgagatcagagatgctgttcatcagtcccaacaagatggcctagaaatcgcattctcacctcgccttgctgctgctttaattccaagttctatttcttcccttatagttttctatgggaatgaggcggatacaggaaacaccctatctcctctgtatttttgtagtggaatttctatttaaggggctcattaaagcatagtatttatacaca

SEQ ID NO: 449418 - DNA, 3144 bp, Homo sapiens
aagtttccgaggagacttctcaggctgggctggacacacctttccaaggacccccaaactctgctccgtgcacgtcaaatgctcctttcccttgtgtccaaccccctacccctctccctaacacccctcttctcaacaagactcagcctctccccgaggtgggtgagcatccttgaggggagcagatcctagcatgggccccaggggtgaggaagggcctggaaccagaattgtctggaaccctgatctgtaccaactttagggtcaccttccagccctgtggatggcagtggaatcaggacactcccttgaacagtgaatacgattttgccctggtcaacattggacgattagaggctgtgagcggcttgtcccgagtccagctcctccgtccagggtccctgcataaatttatccctgaggagattctgattcatggccgagacttccggctgctcagagttggttttgaggctggaggcctagagcctcaggcttttcaggtgaccatggccattgtccaagccagagctcagagcaatcaagcccaacagtattcggggataaccctgagcaaggctggccagggttctggctccagaaaaccaccaattcctctcatggagacagcggaagactgggagactgagcggaagaagcaggcagccagaggctggagggtcagcacggtcaacgagaggttcgacgtagccaccagcctcccccgttacttctgggtccctaaccgaattctggacagtgaggtcaggagagcatttggccactttcatcagggccgtggaccgcgcttgtcctggcatcaccctgggggcagtgatcttctccgctgtggaggcttctatacagccagtgaccctaacaaggaggatatcagagcagtggagttgatgctccaggctgggcattcagatgttgtcctgggtagacactatggatgagctgcccagccttgcagatgtccaacttgcccacctgaggctgagggccctctgcctgcctgattcatctgtagctgaggataaatggctttcagccctggaaggaacacgatggctggactatgtcagggcttgtcttcgaaaggccagtgacatttcagtattagtgacatccagggttcgttctgtaatacttcaagctgctttcagcccccgaagcccgaacactgtttggcttccaatcactagtacagcgagagtgggtggcagctggacatcccttcctgactcggcttgggggaactggggccagtgaagaggctccggtgtttctcctcttccttgattgtgtctggcagctcctccagcagtttccagctgattttgaattctctgagtttttccttcttgctcttcatgacagtgtcagggttcctgacacccttaccttcctgagaaataccccctgggagcgcggaaagcagagcggacaggtcagtgacttctatttttgactcgtgtttttttttccattgagatgtactctctgaagtttggtcttgatttgttttatgagaagtgaggtctgtgagtggggagggggagatttattctcattttcaggacgagacttttgccctacatctttcctagaataagaggtgagaatctcatgatttgtctctagatgtgggaggattgtgtgtaaccatcctttttcttgcttcctctgtccagttaaactcctatacacaagtctacaccccaggatactcccagcctccagctgggaactcttttaacctgcagctgtctgtctgggactgggatttacgttatagcaatgcacagatactacaattccagaatcctggctatgacccagaacactgtccagattcctggctccctagaccacagccaagcttcatggttcctggaccccccagttctgtgtggctcttctctagaggagcattgacccccctgaatcagctctgtccttggcgggacagtccttccctgctggcagtctcttctcgttggctccctcgacctgctatctcctctgaaagcctggctgaccaggaatggggtctcccctcacattggggagcttgccctttacctccagggctgctgctgcctgggtatctgggaccccagatcaggctctggagacgctgctacctgaggggaaggcctgaggtccaggtaagaagggaaaatagactgggagtgggacaagggacttgactctgctgaaccagatgaacaggagctggaaaggcaaggagctgaagcctctgggagtctgggaagtgaagttctactcctcttggcatcaaacaaggtttgggagtgtaggaggtgcgggaaagtgcttgtggcttagattaagtggaatttagggcatagctgaaaggggaaacagaattaaagacaccagaagtagcagagaagcagggggccagagctacaacagtattcttctctgttcctctttgcctcctccccagatgggcctctcatctcccacaatctctggcctccaggatgagctatcccatcttcaggagttattacggaaatggacaccaagaatatctcctgaggatcactccaagaaaagagatccacataccattctcaatcccactgaaattgctggcattctcaaaggcagggcagagggggatctggggtagaggagggttctgtctaatcttttttttttttttgtatctgcacttgcagcctcagctttcacacttcagcccttaagttcactaagaaggtctgagtttctgctgcagatagtggtgttaactgctccaactcttgtcttgcttagtttctacaaatatttttgcttcttgtcatttgaaggattaagaaacaaaaacaatccagaaattgatcggtttttttaggccaatcccatcccttctggataaccagatgttaaatcatgagatcagagatgctgttcatcagtcccaacaagatggcctagaaatcgcattctcacctcgccttgctgctgctttaattccaagttctatttcttcccttatagttttctatgggaatgaggcggatacaggaaacaccctatctcctctgtatttttgtagtggaatttctatttaaggggctcattaaagcatagtatttatacaca

SEQ ID NO: 449419 - DNA, 1933 bp, Homo sapiens
ttctatgtgctttctcaatcctcctaccccaaacctttcccctctgtgcctctcacttctccttgccgtatttctcttctcattctcttctgccctagtttcttggacccctcttctttgtcccttcttcctctttatcacccagagcgcggtgatcgtgatctcaatggcctcctctcttcactcgtccagctgctttcagcccccgaagcccgaacactgtttggcttccaatcactagtacagcgagagtgggtggcagctggacatcccttcctgactcggcttgggggaactggggccagtgaagaggctccggtgtttctcctcttccttgattgtgtctggcagctcctccagcagtttccagctgattttgaattctctgagtttttccttcttgctcttcatgacagtgtcagggttcctgacacccttaccttcctgagaaataccccctgggagcgcggaaagcagagcggacagttaaactcctatacacaagtctacaccccaggatactcccagcctccagctgggaactcttttaacctgcagctgtctgtctgggactgggatttacgttatagcaatgcacagatactacaattccagaatcctggctatgacccagaacactgtccagattcctggctccctagaccacagccaagcttcatggttcctggaccccccagttctgtgtggctcttctctagaggagcattgacccccctgaatcagctctgtccttggcgggacagtccttccctgctggcagtctcttctcgttggctccctcgacctgctatctcctctgaaagcctggctgaccaggaatggggtctcccctcacattggggagcttgccctttacctccagggctgctgctgcctgggtatctgggaccccagatcaggctctggagacgctgctacctgaggggaaggcctgaggtccaggtaagaagggaaaatagactgggagtgggacaagggacttgactctgctgaaccagatgaacaggagctggaaaggcaaggagctgaagcctctgggagtctgggaagtgaagttctactcctcttggcatcaaacaaggtttgggagtgtaggaggtgcgggaaagtgcttgtggcttagattaagtggaatttagggcatagctgaaaggggaaacagaattaaagacaccagaagtagcagagaagcagggggccagagctacaacagtattcttctctgttcctctttgcctcctccccagatgggcctctcatctcccacaatctctggcctccaggatgagctatcccatcttcaggagttattacggaaatggacaccaagaatatctcctgaggatcactccaagaaaagagatccacataccattctcaatcccactgaaattgctggcattctcaaaggcagggcagagggggatctggggtagaggagggttctgtctaatcttttttttttttttgtatctgcacttgcagcctcagctttcacacttcagcccttaagttcactaagaaggtctgagtttctgctgcagatagtggtgttaactgctccaactcttgtcttgcttagtttctacaaatatttttgcttcttgtcatttgaaggattaagaaacaaaaacaatccagaaattgatcggtttttttaggccaatcccatcccttctggataaccagatgttaaatcatgagatcagagatgctgttcatcagtcccaacaagatggcctagaaatcgcattctcacctcgccttgctgctgctttaattccaagttctatttcttcccttatagttttctatgggaatgaggcggatacaggaaacaccctatctcctctgtatttttgtagtggaatttctatttaaggggctcattaaagcatagtatttatacaca

SEQ ID NO: 449420 - DNA, 1661 bp, Homo sapiens
tactagacagtgagaagtgaaagacaaaatgtcttgagttccttagggaaagctactccactactcttctgcagctgtcacttatagtccctgggtgtccctaggaagacagaagacctagaatagcacagagggcaccctttttgtccttcctcaagtctgtttactcatcttcctgtctcgtgcacacataaggtgccctaaaatcaaccttaatcagtcccgaggcctagttgaagcctaatgaggagggtagaagagttctcatggggaggcttgtagttctagtcaccagtgcagtgagtgggtggcagcaggacaccctgtcctgatccagattggggaaactagggttatctggtctctctgttgccagttgattttcttttccttttagccaagcttcatggttcctggaccccccagttctgtgtggctcttctctagaggagcattgacccccctgaatcagctctgtccttggcgggacagtccttccctgctggcagtctcttctcgttggctccctcgacctgctatctcctctgaaagcctggctgaccaggaatggggtctcccctcacattggggagcttgccctttacctccagggctgctgctgcctgggtatctgggaccccagatcaggctctggagacgctgctacctgaggggaaggcctgaggtccaggtaagaagggaaaatagactgggagtgggacaagggacttgactctgctgaaccagatgaacaggagctggaaaggcaaggagctgaagcctctgggagtctgggaagtgaagttctactcctcttggcatcaaacaaggtttgggagtgtaggaggtgcgggaaagtgcttgtggcttagattaagtggaatttagggcatagctgaaaggggaaacagaattaaagacaccagaagtagcagagaagcagggggccagagctacaacagtattcttctctgttcctctttgcctcctccccagatgggcctctcatctcccacaatctctggcctccaggatgagctatcccatcttcaggagttattacggaaatggacaccaagaatatctcctgaggatcactccaagaaaagagatccacataccattctcaatcccactgaaattgctggcattctcaaaggcagggcagagggggatctggggtagaggagggttctgtctaatcttttttttttttttgtatctgcacttgcagcctcagctttcacacttcagcccttaagttcactaagaaggtctgagtttctgctgcagatagtggtgttaactgctccaactcttgtcttgcttagtttctacaaatatttttgcttcttgtcatttgaaggattaagaaacaaaaacaatccagaaattgatcggtttttttaggccaatcccatcccttctggataaccagatgttaaatcatgagatcagagatgctgttcatcagtcccaacaagatggcctagaaatcgcattctcacctcgccttgctgctgctttaattccaagttctatttcttcccttatagttttctatgggaatgaggcggatacaggaaacaccctatctcctctgtatttttgtagtggaatttctatttaaggggctcattaaagcatagtatttatacaca

SEQ ID NO: 449421 - DNA, 1846 bp, Homo sapiens
tctggagctccccacagacactgatctcagtttcccccgagagtgtgagtgtaggcctctacaggcagctgcctctggggagttggggagcctaggggttaactctagacccccctcaaccctctggaccaaagtctgtccaggaaaacaggatgccggagcccaggagtcgtcagcctagcagttgcctggcctccagatgcctcccagggtcaccttccagccctgtggatggcagtggaatcaggacactcccttgaacagtgaatacgattttgccctggtcaacattggacgattagaggctgtgagcggcttgtcccgagtccagctcctccgtccagggtccctgcataaatttatccctgaggagattctgattcatggccgagacttccggctgctcagagttggttttgaggctggaggcctagagcctcaggcttttcaggtgaccatggccattgtccaagccagagctcagagcaatcaagcccaacagtattcggggataaccctgagcaaggctggccagggttctggctccagaaaaccaccaattcctctcatggagacagcggaagactgggagactgagcggaagaagcaggcagccagaggctggagggtcagcacggtcaacgagaggttcgacgtagccaccagcctcccccgttacttctgggtccctaaccgaattctggacagtgaggtcaggagagcatttggccactttcatcagggccgtggaccgcgcttgtcctggcatcaccctgggggcagtgatcttctccgctgtggaggcttctatacagccagtgaccctaacaaggaggatatcagagcagtggagttgatgctccaggctgggcattcagatgttgtcctgggtagacactatggatgagctgcccagccttgcagatgtccaacttgcccacctgaggctgagggccctctgcctgcctgattcatctgtagctgaggataaatggctttcagccctggaaggaacacgatggctggactatgtcagggcttgtcttcgaaaggccagtgacatttcagtattagtgacatccagggttcgttctgtaatacttcaagctgctttcagcccccgaagcccgaacactgtttggcttccaatcactagtacagcgagagtgggtggcagctggacatcccttcctgactcggcttgggggaactggggccagtgaagaggctccggtgtttctcctcttccttgattgtgtctggcagctcctccagcagtttccagctgattttgaattctctgagtttttccttcttgctcttcatgacagtgtcagggttcctgacacccttaccttcctgagaaataccccctgggagcgcggaaagcagagcggacaggtcagtgacttctatttttgactcgtgtttttttttccattgagatgtactctctgaagtttggtcttgatttgttttatgagaagtgaggtctgtgagtggggagggggagatttattctcattttcaggacgagacttttgccctacatctttcctagaataagaggtgagaatctcatgatttgtctctagatgtgggaggattgtgtgtaaccatcctttttcttgcttcctctgtccagttaaactcctatacacaagtctacaccccaggatactcccagcctccagctgggaactcttttaacctgcagctgtctgtctgggactgggatttacgttatagcaatgcacagatactacaattccagaatcctggctatgacccagaacactgtccagattcctggctccctagaccacaggtgaagtgtctaaacttc

SEQ ID NO: 449422 - DNA, 961 bp, Homo sapiens
  misc_feature (836)..(836): n is a, c, g, or t
  misc_feature (908)..(908): n is a, c, g, or t
  misc_feature (922)..(922): n is a, c, g, or t
  misc_feature (948)..(948): n is a, c, g, or t
tgccctgatagtaacttgcagtttcagagcacatgcacactgtcagggctagcctgcctgcttacgcgcgctgcggattgttgctccgttgtacctgctggggaattcacctcgttactgcttgatatcttccaccccttacaaaatcagaaaagttgtgttttctaataccaaagaggaggtttggctttctgtgggtgattcccagacactgaagtgcaaagaagagaccctcctagaaaagtaaaatatgactaaaagcaatggagaagagcccaagatggggggcaggatggagagattccagcagggagtccgtaaacgcacacttttggccaagaagaaagtgcagaacattacaaaggaggatgttaaaagttacctgtttcggaatgcttttgtgctgctcacagtcaccgctgtcattgtgggtacaatccttggatttaccctccgaccatacagaatgagctaccgggaagtcaagtacttctcctttcctggggaacttctgatgaggatgttacagatgctggtcttaccacttatcatctccagtcttgtcacaggaatggcggcgctagatagtaaggcatcagggaagatgggaatgcgagctgtagtctattatatgactaccaccatcattgctgtggtgattggcataatcattgtcatcatcatccatcctgggaagggcacaaaggaaaacatgcacagagaaggcaaaattgtacgagtgacagctgcagatgccttcctggacttgatcaggaacatgttcccttccaaaatctggtagaagccctgcttttaaaccgtttaaaacccaactnttgaagaaagagaagccttttaaagtgccccattccaaggccaaccgaaaacccccttggtggggtgcttgngaataaaccaatgnggtcttgaaggcccctgggaaaactntttaacccgaaat

SEQ ID NO: 449423 - DNA, 918 bp, Homo sapiens
tgccctgatagtaacttgcagtttcagagcacatgcacactgtcagggctagcctgcctgcttacgcgcgctgcggattgttgctccgttgtacctgctggggaattcacctcgttactgcttgatatcttccaccccttacaaaatcagaaaagttgtgttttctaataccaaagaggaggtttggctttctgtgggtgattcccagacactgaagtgcaaagaagagaccctcctagaaaagtaaaatatgactaaaagcaatggagaagagcccaagatggggggcaggatggagagattccagcagggagtccgtaaacgcacacttttggccaagaagaaagtgcagaacattacaaaggaggatgttaaaagttacctgtttcggaatgcttttgtgctgctcacagtcaccgctgtcattgtgggtgagtcatttgattaaaaacaaaaaaacctgtatcttgtttctctggggcatctggctgcccggggaatattatcagatgaactagttgtaggtatcaaaatggtagcctaggctttcctctgaacttgatgatttttctccataaaaatgactgttttggcttgtttggagcaatatatagtaaacacatcattaggcatcattaggcattatgcaaatcaattgtgtgaggaagaaaaataaataaaatattttcccatttcatgtaaggataaggaagtgatcatttaatcattaggcatgacaaagcaagcatgctagatttggccaaaatgtcattatatacaatgtcagttgcacttaaaataattatacaattagtacacctaaaatgacatgttggttccaaatagtaattatattctaactggtgctgacttgaagctgagtatcaacgcttaggcacagagaccgaatattttatg

SEQ ID NO: 449424 - DNA, 1006 bp, Homo sapiens
tgccctgatagtaacttgcagtttcagagcacatgcacactgtcagggctagcctgcctgcttacgcgcgctgcggattgttgctccgttgtacctgctggggaattcacctcgttactgcttgatatcttccaccccttacaaaatcagaaaagtcatttgcgaggagtcctttggtttccagttacctcccccacaggcgcacacgctggctgcttgcgttggcagcgacacacatccatgttgtgttttctaataccaaagaggaggtttggctttctgtgggtgattcccagacactgaagtgcaaagaagagaccctcctagaaaagtaaaatatgactaaaagcaatggagaagagcccaagatggggggcaggatggagagattccagcagggagtccgtaaacgcacacttttggccaagaagaaagtgcagaacattacaaaggaggatgttaaaagttacctgtttcggaatgcttttgtgctgctcacagtcaccgctgtcattgtgggtgagtcatttgattaaaaacaaaaaaacctgtatcttgtttctctggggcatctggctgcccggggaatattatcagatgaactagttgtaggtatcaaaatggtagcctaggctttcctctgaacttgatgatttttctccataaaaatgactgttttggcttgtttggagcaatatatagtaaacacatcattaggcatcattaggcattatgcaaatcaattgtgtgaggaagaaaaataaataaaatattttcccatttcatgtaaggataaggaagtgatcatttaatcattaggcatgacaaagcaagcatgctagatttggccaaaatgtcattatatacaatgtcagttgcacttaaaataattatacaattagtacacctaaaatgacatgttggttccaaatagtaattatattctaactggtgctgacttgaagctgagtatcaacgcttaggcacagagaccgaatattttatg

SEQ ID NO: 449425 - DNA, 494 bp, Homo sapiens
agctttgcaggataggattctatgttctatgacaatgagataaccatttattcctgcatgggaaaaggtgaaagagtcatttgtctatgtgattggtgaatcagatggagagattccagcagggagtccgtaaacgcacacttttggccaagaagaaagtgcagaacattacaaaggaggatgttaaaagttacctgtttcggaatgcttttgtgctgctcacagtcaccgctgtcattgtgggtacaatccttggatttaccctccgaccatacagaatgagctaccgggaagtcaagtacttctcctttcctggggaacttctgatgaggatgttacagatgctggtcttaccacttatcatctccagtcttgtcacaggtaccataagcagttgttggtttgtttggttttttttaagtgtgtttattgcaaaagattgcttagaaaagccagtgctttaggtttctgctggatgcatgctctgttctaga

SEQ ID NO: 449426 - DNA, 427 bp, Homo sapiens
tgaggatcccccacctctgaccgagccccgttaccttttatgctagtgggagaagggggagggggcgggagattttcccatctgaatattttatcagtggacacttggatttttaacaagtggaagctttgcaggataggattctatgttctatgacaatgagataaccatttattcctgcatgggaaaaggtgaaagagtcatttgtctatgtgattggtgaatcagatggagccaagaagttgcagaaaaatgttactgtacattccttcctgcccactcttctctttccccacagcacatctctgacttggagaaggaatttccatagacactgcccgagcaggatgatttctgggtttgtaggtaaagctcagaactcaggtattactgaccctattctcttttccacccttggctcactgtt

SEQ ID NO: 449427 - DNA, 3881 bp, Homo sapiens
tgccctgatagtaacttgcagtttcagagcacatgcacactgtcagggctagcctgcctgcttacgcgcgctgcggattgttgctccgttgtacctgctggggaattcacctcgttactgcttgatatcttccaccccttacaaaatcagaaaagttgtgttttctaataccaaagaggaggtttggctttctgtgggtgattcccagacactgaagtgcaaagaagagaccctcctagaaaagtaaaatatgactaaaagcaatggagaagagcccaagatggggggcaggatggagagattccagcagggagtccgtaaacgcacacttttggccaagaagaaagtgcagaacattacaaaggaggatgttaaaagtacaatccttggatttaccctccgaccatacagaatgagctaccgggaagtcaagtacttctcctttcctggggaacttctgatgaggatgttacagatgctggtcttaccacttatcatctccagtcttgtcacaggaatggcggcgctagatagtaaggcatcagggaagatgggaatgcgagctgtagtctattatatgactaccaccatcattgctgtggtgattggcataatcattgtcatcatcatccatcctgggaagggcacaaaggaaaacatgcacagagaaggcaaaattgtacgagtgacagctgcagatgccttcctggacttgatcaggaacatgttccctccaaatctggtagaagcctgctttaaacagtttaaaaccaactatgagaagagaagctttaaagtgcccatccaggccaacgaaacgcttgtgggtgctgtgataaacaatgtgtctgaggccatggagactcttacccgaatcacagaggagctggtcccagttccaggatctgtgaatggagtcaatgccctgggtctagttgtcttctccatgtgcttcggttttgtgattggaaacatgaaggaacaggggcaggccctgagagagttctttgattctcttaacgaagccatcatgagactggtagcagtaataatgtggtatgcccccgtgggtattctcttcctgattgctgggaagattgtggagatggaagacatgggtgtgattggggggcagcttgccatgtacaccgtgactgtcattgttggcttactcattcacgcagtcatcgtcttgccactcctctacttcttggtaacacggaaaaacccttgggtttttattggagggttgctgcaagcactcatcaccgctctggggacctcttcaagttctgccaccctacccatcaccttcaagtgcctggaagagaacaatggcgtggacaagcgcgtcaccagattcgtgctccccgtaggagccaccattaacatggatgggactgccctctatgaggctttggctgccattttcattgctcaagttaacaactttgaactgaacttcggacaaattattacaatcagcatcacagccacagctgccagtattggggcagctggaattcctcaggcgggcctggtcactatggtcattgtgctgacatctgtcggcctgcccactgacgacatcacgctcatcatcgcggtggactggttcctggatcgcctccggaccaccaccaacgtactgggagactccctgggagctgggattgtggagcacttgtcacgacatgaactgaagaacagagatgttgaaatgggtaactcagtgattgaagagaatgaaatgaagaaaccatatcaactgattgcacaggacaatgaaactgagaaacccatcgacagtgaaaccaagatgtagactaacataaagaaacactttcttgagcaccaggtgttaaaaaccattataaaatctttccatctcattacagctcattcgctccagcaagcccgtcatcttccctttcctcccttctgataagactggaaaatagtcctccaaaacacaagggaggattttgggtggccaaagtgtacaattttcatcccacaattgaaatttttaaatcatttcatgttagtcttaccgaataaggtaccaagatcacaaatagtgttgatcagatcttacaagtttatgtggcacacaatcctataaatgtgatttttttatataagttaaagagacaaatagtaggctaaaaacattttaaaatcaacttttgaaatttaaaaatctttcagaatacaattcagttttagtttcaaaatgttaacaacttgaattacaaccggttatcagttggacagtaagattttatccctttctcttctgactggtatacctatttcattagtagctaggtgcacatctacatctagcacagctgtgaggacagacagaaggcaaagtttccatgtggccttgagcaagtcccatctcacctctaggcctcagtgtcctcatctataaaatgagggacttccctagaagtcttcatggtctcttccagcccagacatcctgtgatgtcatgaaagcacctgccctctgtttcccctcagaacaccctgtaccatccatggagcacgaggccttcagaaaagacacttcaatgggagtgaacatttctaactaaggacaggatggctgtgtgtggtggtcaccaggtcctgtgagcaaagtgcaggttatgcaagtcgccaggcaggaggccattccaggagtgggattattcatcaaactctttgcccagttcatcccaatgggggaagtattcccttctttcctactctgggaagaatgtctcctgccactcctcaactgatgatagacttcgaaaacagatgagaagactagcagctagcaagggtgcttgtggtcacactgtggaacactaaagagctaggaaagagttgagcacaggcaacattacaaacaaaggatttgaaaacaccaagagtacaggtcttctttaaggaagaataaaaaagaagaggttcatttttctggctttttttttcacctgaaacactttttctcgagtccaaaatcattccccccgtgaagtctgcttaccaaaacataagacgacttatatatttgaaagaagtcaaatgaatgagctctctaatagaagtccatgagttgagtgggtatttcttatttgaaagtgtttttctttaatcaaaagtccttagaatgagggaaacaaaatatttatttgttttggaatcccacttatcaaatcattcaaaactttcagctggagtggggtttgcttttgttttgtttgtgtccataagagaaatggtagaagatgaatcagtatgaagacactgtcaatgaggttatgagaaaaaaacagcaggggcattagtttcaggcaaggcagctcccaggtttagagattaatttttaccccctaaggaatatccagtcaaagacgctgagtgggagctgtcaggcagtagcagctgtgtttgagtttctggctgaaaatggtgaagaatggacttaattatgctaacaaactgaaaaatctagacatagatcctctgatatacaattagagatatttttatatagaccccaagcattctgtgcataaaagttaacattaggctgtggtgcagtaaccatttaatgtcgaggctctatttcggaaatacactacaaatgttaaagtacgtggctgtcctcttaagacactagtagagcaaagacttaatcatatcaacttaattctgttacacaatatgtgttttttaatatactaaccatttcttatggaaaggtcctgtggggagcccatcctctcgccaagccatcacaggctctgcatacacatgcactcagtgtggactgggaagcattactttgtagatgtattttcaataaagaaaaaaatagtt

SEQ ID NO: 449428 - DNA, 3024 bp, Homo sapiens
gttccattcctgttgcccaggctagagtgcaatggcacagtcttggctcactgcaacctccgcctcctgggttcaagtgattctcctgcctcagcctcctgagtagctgggattagaggcgcccgccaccacgcctggctaatttttgtatttttagtagagacgggtttcaccatgttggccaggctggtctcgaactcctgacctcaggtgaaccacctgccttggcctcccaaagtgctgagattacaggtgtgagccacggtgcccggcctcgaccccaatatttagtgaaaagaatggtactattttatgttttgcaagttttcttaatgtctggcttaatacaagacagttggagtttcctgtttctgcagtttcacaactgcttcagtgagttgtgacatcacacatcatgtagtctttgcaaaactccactatacattcatgagaaaatgagactgagagggacaaatgacatcttagtattattatgagaatggcttaaagagaaggctcgttccccactgttgggactctcacttcagtcaaactaataactgaacattcatcatctatatggccttataacctttaatagctactattatgaatattatgtgtctattacgtaatcttgcagttggtagatacggcgaactgaatgttaagaggtgcttcgctggccagttcctaacgtaagttgaaaacttgtgatgctcacgggagcctcgtttttccctcctccccaccctgcctgcagggatcgcctccggaccaccaccaacgtactgggagactccctgggagctgggattgtggagcacttgtcacgacatgaactgaagaacagagatgttgaaatgggtaactcagtgattgaagagaatgaaatgaagaaaccatatcaactgattgcacaggacaatgaaactgagaaacccatcgacagtgaaaccaagatgtagactaacataaagaaacactttcttgagcaccaggtgttaaaaaccattataaaatctttccatctcattacagctcattcgctccagcaagcccgtcatcttccctttcctcccttctgataagactggaaaatagtcctccaaaacacaagggaggattttgggtggccaaagtgtacaattttcatcccacaattgaaatttttaaatcatttcatgttagtcttaccgaataaggtaccaagatcacaaatagtgttgatcagatcttacaagtttatgtggcacacaatcctataaatgtgatttttttatataagttaaagagacaaatagtaggctaaaaacattttaaaatcaacttttgaaatttaaaaatctttcagaatacaattcagttttagtttcaaaatgttaacaacttgaattacaaccggttatcagttggacagtaagattttatccctttctcttctgactggtatacctatttcattagtagctaggtgcacatctacatctagcacagctgtgaggacagacagaaggcaaagtttccatgtggccttgagcaagtcccatctcacctctaggcctcagtgtcctcatctataaaatgagggacttccctagaagtcttcatggtctcttccagcccagacatcctgtgatgtcatgaaagcacctgccctctgtttcccctcagaacaccctgtaccatccatggagcacgaggccttcagaaaagacacttcaatgggagtgaacatttctaactaaggacaggatggctgtgtgtggtggtcaccaggtcctgtgagcaaagtgcaggttatgcaagtcgccaggcaggaggccattccaggagtgggattattcatcaaactctttgcccagttcatcccaatgggggaagtattcccttctttcctactctgggaagaatgtctcctgccactcctcaactgatgatagacttcgaaaacagatgagaagactagcagctagcaagggtgcttgtggtcacactgtggaacactaaagagctaggaaagagttgagcacaggcaacattacaaacaaaggatttgaaaacaccaagagtacaggtcttctttaaggaagaataaaaaagaagaggttcatttttctggctttttttttcacctgaaacactttttctcgagtccaaaatcattccccccgtgaagtctgcttaccaaaacataagacgacttatatatttgaaagaagtcaaatgaatgagctctctaatagaagtccatgagttgagtgggtatttcttatttgaaagtgtttttctttaatcaaaagtccttagaatgagggaaacaaaatatttatttgttttggaatcccacttatcaaatcattcaaaactttcagctggagtggggtttgcttttgttttgtttgtgtccataagagaaatggtagaagatgaatcagtatgaagacactgtcaatgaggttatgagaaaaaaacagcaggggcattagtttcaggcaaggcagctcccaggtttagagattaatttttaccccctaaggaatatccagtcaaagacgctgagtgggagctgtcaggcagtagcagctgtgtttgagtttctggctgaaaatggtgaagaatggacttaattatgctaacaaactgaaaaatctagacatagatcctctgatatacaattagagatatttttatatagaccccaagcattctgtgcataaaagttaacattaggctgtggtgcagtaaccatttaatgtcgaggctctatttcggaaatacactacaaatgttaaagtacgtggctgtcctcttaagacactagtagagcaaagacttaatcatatcaacttaattctgttacacaatatgtgttttttaatatactaaccatttcttatggaaaggtcctgtggggagcccatcctctcgccaagccatcacaggctctgcatacacatgcactcagtgtggactgggaagcattactttgtagatgtattttcaataaagaaaaaaatagtt

SEQ ID NO: 449429 - DNA, 1978 bp, Homo sapiens
tgccctgatagtaacttgcagtttcagagcacatgcacactgtcagggctagcctgcctgcttacgcgcgctgcggattgttgctccgttgtacctgctggggaattcacctcgttactgcttgatatcttccaccccttacaaaatcagaaaagttgtgttttctaataccaaagaggaggtttggctttctgtgggtgattcccagacactgaagtgcaaagaagagaccctcctagaaaagtaaaatatgactaaaagcaatggagaagagcccaagatggggggcaggatggagagattccagcagggagtccgtaaacgcacacttttggccaagaagaaagtgcagaacattacaaaggaggatgttaaaagtacaatccttggatttaccctccgaccatacagaatgagctaccgggaagtcaagtacttctcctttcctggggaacttctgatgaggatgttacagatgctggtcttaccacttatcatctccagtcttgtcacaggaatggcggcgctagatagtaaggcatcagggaagatgggaatgcgagctgtagtctattatatgactaccaccatcattgctgtggtgattggcataatcattgtcatcatcatccatcctgggaagggcacaaaggaaaacatgcacagagaaggcaaaattgtacgatgaacatttctaactaaggacaggatggctgtgtgtggtggtcaccaggtcctgtgagcaaagtgcaggttatgcaagtcgccaggcaggaggccattccaggagtgggattattcatcaaactctttgcccagttcatcccaatgggggaagtattcccttctttcctactctgggaagaatgtctcctgccactcctcaactgatgatagacttcgaaaacagatgagaagactagcagctagcaagggtgcttgtggtcacactgtggaacactaaagagctaggaaagagttgagcacaggcaacattacaaacaaaggatttgaaaacaccaagagtacaggtcttctttaaggaagaataaaaaagaagaggttcatttttctggctttttttttcacctgaaacactttttctcgagtccaaaatcattccccccgtgaagtctgcttaccaaaacataagacgacttatatatttgaaagaagtcaaatgaatgagctctctaatagaagtccatgagttgagtgggtatttcttatttgaaagtgtttttctttaatcaaaagtccttagaatgagggaaacaaaatatttatttgttttggaatcccacttatcaaatcattcaaaactttcagctggagtggggtttgcttttgttttgtttgtgtccataagagaaatggtagaagatgaatcagtatgaagacactgtcaatgaggttatgagaaaaaaacagcaggggcattagtttcaggcaaggcagctcccaggtttagagattaatttttaccccctaaggaatatccagtcaaagacgctgagtgggagctgtcaggcagtagcagctgtgtttgagtttctggctgaaaatggtgaagaatggacttaattatgctaacaaactgaaaaatctagacatagatcctctgatatacaattagagatatttttatatagaccccaagcattctgtgcataaaagttaacattaggctgtggtgcagtaaccatttaatgtcgaggctctatttcggaaatacactacaaatgttaaagtacgtggctgtcctcttaagacactagtagagcaaagacttaatcatatcaacttaattctgttacacaatatgtgttttttaatatactaaccatttcttatggaaaggtcctgtggggagcccatcctctcgccaagccatcacaggctctgcatacacatgcactcagtgtggactgggaagcattactttgtagatgtattttcaataaagaaaaaaatagtt

SEQ ID NO: 449430 - DNA, 636 bp, Homo sapiens
tgccctgatagtaacttgcagtttcagagcacatgcacactgtcagggctagcctgcctgcttacgcgcgctgcggattgttgctccgttgtacctgctggggaattcacctcgttactgcttgatatcttccaccccttacaaaatcagaaaagtcatttgcgaggagtcctttggtttccagttacctcccccacaggcgcacacgctggctgcttgcgttggcagcgacacacatccatggtacggctggttttcactcggattgattatgggaagggctatggattagagctcctgtaaagcaccaggaggaatcccttgatttttcagaacagctgatttccaccaggaaagagatttactgaaatgtagttaaatagcgtgagtgctttaaagaaaccagaaaccacaagctgtaatgtttggaatgaaaattggtttcatctcatctgttctagaaatcctaaattttaaaatgctaaaaagtcagcgatagtttcctcggaagattccagcatgtgtgtcacaaagaaaaacactacttcatacttctacttgtgataaacgaagctgaattgtgatttcagatgatttatagatgtgcccagagcactttgcttatttcatggaaaa

SEQ ID NO: 449431 - DNA, 3935 bp, Homo sapiens
tgccctgatagtaacttgcagtttcagagcacatgcacactgtcagggctagcctgcctgcttacgcgcgctgcggattgttgctccgttgtacctgctggggaattcacctcgttactgcttgatatcttccaccccttacaaaatcagaaaagttgtgttttctaataccaaagaggaggtttggctttctgtgggtgattcccagacactgaagtgcaaagaagagaccctcctagaaaagtaaaatatgactaaaagcaatggagaagagcccaagatggggggcaggatggagagattccagcagggagtccgtaaacgcacacttttggccaagaagaaagtgcagaacattacaaaggaggatgttaaaagttacctgtttcggaatgcttttgtgctgctcacagtcaccgctgtcattgtgggtacaatccttggatttaccctccgaccatacagaatgagctaccgggaagtcaagtacttctcctttcctggggaacttctgatgaggatgttacagatgctggtcttaccacttatcatctccagtcttgtcacaggaatggcggcgctagatagtaaggcatcagggaagatgggaatgcgagctgtagtctattatatgactaccaccatcattgctgtggtgattggcataatcattgtcatcatcatccatcctgggaagggcacaaaggaaaacatgcacagagaaggcaaaattgtacgagtgacagctgcagatgccttcctggacttgatcaggaacatgttccctccaaatctggtagaagcctgctttaaacagtttaaaaccaactatgagaagagaagctttaaagtgcccatccaggccaacgaaacgcttgtgggtgctgtgataaacaatgtgtctgaggccatggagactcttacccgaatcacagaggagctggtcccagttccaggatctgtgaatggagtcaatgccctgggtctagttgtcttctccatgtgcttcggttttgtgattggaaacatgaaggaacaggggcaggccctgagagagttctttgattctcttaacgaagccatcatgagactggtagcagtaataatgtggtatgcccccgtgggtattctcttcctgattgctgggaagattgtggagatggaagacatgggtgtgattggggggcagcttgccatgtacaccgtgactgtcattgttggcttactcattcacgcagtcatcgtcttgccactcctctacttcttggtaacacggaaaaacccttgggtttttattggagggttgctgcaagcactcatcaccgctctggggacctcttcaagttctgccaccctacccatcaccttcaagtgcctggaagagaacaatggcgtggacaagcgcgtcaccagattcgtgctccccgtaggagccaccattaacatggatgggactgccctctatgaggctttggctgccattttcattgctcaagttaacaactttgaactgaacttcggacaaattattacaatcagcatcacagccacagctgccagtattggggcagctggaattcctcaggcgggcctggtcactatggtcattgtgctgacatctgtcggcctgcccactgacgacatcacgctcatcatcgcggtggactggttcctggatcgcctccggaccaccaccaacgtactgggagactccctgggagctgggattgtggagcacttgtcacgacatgaactgaagaacagagatgttgaaatgggtaactcagtgattgaagagaatgaaatgaagaaaccatatcaactgattgcacaggacaatgaaactgagaaacccatcgacagtgaaaccaagatgtagactaacataaagaaacactttcttgagcaccaggtgttaaaaaccattataaaatctttccatctcattacagctcattcgctccagcaagcccgtcatcttccctttcctcccttctgataagactggaaaatagtcctccaaaacacaagggaggattttgggtggccaaagtgtacaattttcatcccacaattgaaatttttaaatcatttcatgttagtcttaccgaataaggtaccaagatcacaaatagtgttgatcagatcttacaagtttatgtggcacacaatcctataaatgtgatttttttatataagttaaagagacaaatagtaggctaaaaacattttaaaatcaacttttgaaatttaaaaatctttcagaatacaattcagttttagtttcaaaatgttaacaacttgaattacaaccggttatcagttggacagtaagattttatccctttctcttctgactggtatacctatttcattagtagctaggtgcacatctacatctagcacagctgtgaggacagacagaaggcaaagtttccatgtggccttgagcaagtcccatctcacctctaggcctcagtgtcctcatctataaaatgagggacttccctagaagtcttcatggtctcttccagcccagacatcctgtgatgtcatgaaagcacctgccctctgtttcccctcagaacaccctgtaccatccatggagcacgaggccttcagaaaagacacttcaatgggagtgaacatttctaactaaggacaggatggctgtgtgtggtggtcaccaggtcctgtgagcaaagtgcaggttatgcaagtcgccaggcaggaggccattccaggagtgggattattcatcaaactctttgcccagttcatcccaatgggggaagtattcccttctttcctactctgggaagaatgtctcctgccactcctcaactgatgatagacttcgaaaacagatgagaagactagcagctagcaagggtgcttgtggtcacactgtggaacactaaagagctaggaaagagttgagcacaggcaacattacaaacaaaggatttgaaaacaccaagagtacaggtcttctttaaggaagaataaaaaagaagaggttcatttttctggctttttttttcacctgaaacactttttctcgagtccaaaatcattccccccgtgaagtctgcttaccaaaacataagacgacttatatatttgaaagaagtcaaatgaatgagctctctaatagaagtccatgagttgagtgggtatttcttatttgaaagtgtttttctttaatcaaaagtccttagaatgagggaaacaaaatatttatttgttttggaatcccacttatcaaatcattcaaaactttcagctggagtggggtttgcttttgttttgtttgtgtccataagagaaatggtagaagatgaatcagtatgaagacactgtcaatgaggttatgagaaaaaaacagcaggggcattagtttcaggcaaggcagctcccaggtttagagattaatttttaccccctaaggaatatccagtcaaagacgctgagtgggagctgtcaggcagtagcagctgtgtttgagtttctggctgaaaatggtgaagaatggacttaattatgctaacaaactgaaaaatctagacatagatcctctgatatacaattagagatatttttatatagaccccaagcattctgtgcataaaagttaacattaggctgtggtgcagtaaccatttaatgtcgaggctctatttcggaaatacactacaaatgttaaagtacgtggctgtcctcttaagacactagtagagcaaagacttaatcatatcaacttaattctgttacacaatatgtgttttttaatatactaaccatttcttatggaaaggtcctgtggggagcccatcctctcgccaagccatcacaggctctgcatacacatgcactcagtgtggactgggaagcattactttgtagatgtattttcaataaagaaaaaaatagtt

SEQ ID NO: 449432 - DNA, 770 bp, Homo sapiens
tgccctgatagtaacttgcagtttcagagcacatgcacactgtcagggctagcctgcctgcttacgcgcgctgcggattgttgctccgttgtacctgctggggaattcacctcgttactgcttgatatcttccaccccttacaaaatcagaaaagttgtgttttctaataccaaagaggaggtttggctttctgtgggtgattcccagacactgaagtgcaaagaagagaccctcctagaaaagtaaaatatgactaaaagcaatggagaagagcccaagatggggggcaggatggagagattccagcagggagtccgtaaacgcacacttttggccaagaagaaagtgcagaacattacaaaggaggatgttaaaagttacctgtttcggaatgcttttgtgctgctcacagtcaccgctgtcattgtgggtacaatccttggatttaccctccgaccatacagaatgagctaccgggaagtcaagtacttctcctttcctggggaacttctgatgaggatgttacagatgctggtcttaccacttatcatctccagtcttgtcacaggaatggcggcgctagatagtaaggcatcagggaagatgggaatgcgagctgtagtctattatatgactaccaccatcattgctgtggtgattggcataatcattgtcatcatcatccatcctgggaagggcacaatggcgggttgcctttttttggtggtaccaggttcctgtgagcaagtgccggttttccagttgtcct

SEQ ID NO: 449433 - DNA, 3881 bp, Homo sapiens
tgccctgatagtaacttgcagtttcagagcacatgcacactgtcagggctagcctgcctgcttacgcgcgctgcggattgttgctccgttgtacctgctggggaattcacctcgttactgcttgatatcttccaccccttacaaaatcagaaaagttgtgttttctaataccaaagaggaggtttggctttctgtgggtgattcccagacactgaagtgcaaagaagagaccctcctagaaaagtaaaatatgactaaaagcaatggagaagagcccaagatggggggcaggatggagagattccagcagggagtccgtaaacgcacacttttggccaagaagaaagtgcagaacattacaaaggaggatgttaaaagttacctgtttcggaatgcttttgtgctgctcacagtcaccgctgtcattgtgggtacaatccttggatttaccctccgaccatacagaatgagctaccgggaagtcaagtacttctcctttcctggggaacttctgatgaggatgttacagatgctggtcttaccacttatcatctccagtcttgtcacaggaatggcggcgctagatagtaaggcatcagggaagatgggaatgcgagctgtagtctattatatgactaccaccatcattgctgtggtgattggcataatcattgtcatcatcatccatcctgggaagggcacaaaggaaaacatgcacagagaaggcaaaattgtacgagtgacagctgcagatgccttcctggacttgatcaggaacatgttccctccaaatctggtagaagcctgctttaaacagtttaaaaccaactatgagaagagaagctttaaagtgcccatccaggccaacgaaacgcttgtgggtgctgtgataaacaatgtgtctgaggccatggagactcttacccgaatcacagaggagctggtcccagttccaggatctgtgaatggagtcaatgccctgggtctagttgtcttctccatgtgcttcggttttgtgattggaaacatgaaggaacaggggcaggccctgagagagttctttgattctcttaacgaagccatcatgagactggtagcagtaataatgtggtatgcccccgtgggtattctcttcctgattgctgggaagattgtggagatggaagacatgggtgtgattggggggcagcttgccatgtacaccgtgactgtcattgttggcttactcattcacgcagtcatcgtcttgccactcctctacttcttggtaacacggaaaaacccttgggtttttattggagggttgctgcaagcactcatcaccgctctggggacctcttcaagttctgccaccctacccatcaccttcaagtgcctggaagagaacaatggcgtggacaagcgcgtcaccagattcgtgctccccgtaggagccaccattaacatggatgggactgccctctatgaggctttggctgccattttcattgctcaagttaacaactttgaactgaacttcggacaaattattacaatcagcatcacagccacagctgccagtattggggcagctggaattcctcaggcgggcctggtcactatggtcattgtgctgacatctgtcggcctgcccactgacgacatcacgctcatcatcgcggtggactggttcctggatcgcctccggaccaccaccaacgtactgggagactccctgggagctgggattgtggagcacttgtcacgacatgaactgaagaacagagatgttgaaatgggtaactcagtgattgaagagaatgaaatgaagaaaccatatcaactgattgcacaggacaatgaaactgagaaacccatcgacagtgaaaccaagatgtagactaacataaagaaacactttcttgagcaccaggtgttaaaaaccattataaaatctttccatctcattacagctcattcgctccagcaagcccgtcatcttccctttcctcccttctgataagactggaaaatagtcctccaaaacacaagggaggattttgggtggccaaagtgtacaattttcatcccacaattgaaatttttaaatcatttcatgttagtcttaccgaataaggtaccaagatcacaaatagtgttgatcagatcttacaagtttatgtggcacacaatcctataaatgtgatttttttatataagttaaagagacaaatagtaggctaaaaacattttaaaatcaacttttgaaatttaaaaatctttcagaatacaattcagttttagtttcaaaatgttaacaacttgaattacaaccggttatcagttggacagtaagattttatccctttctcttctgactggtatacctatttcattagtagctaggtgcacatctacatctagcacagctgtgaggacagacagaaggcaaagtttccatgtggccttgagcaagtcccatctcacctctaggcctcagtgtcctcatctataaaatgagggacttccctagaagtcttcatggtctcttccagcccagacatcctgtgatgtcatgaaagcacctgccctctgtttcccctcagaacaccctgtaccatccatggagcacgaggccttcagaaaagacacttcaatgggagtgaacatttctaactaaggacaggatggctgtgtgtggtggtcaccaggtcctgtgagcaaagtgcaggttatgcaagtcgccaggcaggaggccattccaggagtgggattattcatcaaactctttgcccagttcatcccaatgggggaagtattcccttctttcctactctgggaagaatgtctcctgccactcctcaactgatgatagacttcgaaaacagatgagaagactagcagctagcaagggtgcttgtggtcacactgtggaacactaaagagctaggaaagagttgagcacaggcaacattacaaacaaaggatttgaaaacaccaagagtacaggtcttctttaaggaagaataaaaaagaagaggttcatttttctggctttttttttcacctgaaacactttttctcgagtccaaaatcattccccccgtgaagtctgcttaccaaaacataagacgacttatatatttgaaagaagtcaaatgaatgagctctctaatagaagtccatgagttgagtgggtatttcttatttgaaagtgtttttctttaatcaaaagtccttagaatgagggaaacaaaatatttatttgttttggaatcccacttatcaaatcattcaaaactttcagctggagtggggtttgcttttgttttgtttgtgtccataagagaaatggtagaagatgaatcagtatgaagacactgtcaatgaggttatgagaaaaaaacagcaggggcattagtttcaggcaaggcagctcccaggtttagagattaatttttaccccctaaggaatatccagtcaaagacgctgagtgggagctgtcaggcagtagcagctgtgtttgagtttctggctgaaaatggtgaagaatggacttaattatgctaacaaactgaaaaatctagacatagatcctctgatatacaattagagatatttttatatagaccccaagcattctgtgcatcggaaatacactacaaatgttaaagtacgtggctgtcctcttaagacactagtagagcaaagacttaatcatatcaacttaattctgttacacaatatgtgttttttaatatactaaccatttcttatggaaaggtcctgtggggagcccatcctctcgccaagccatcacaggctctgcatacacatgcactcagtgtggactgggaagcattactttgtagatgtattttcaataaagaaaaaaatagtt

SEQ ID NO: 449434 - DNA, 800 bp, Homo sapiens
tgccctgatagtaacttgcagtttcagagcacatgcacactgtcagggctagcctgcctgcttacgcgcgctgcggattgttgctccgttgtacctgctggggaattcacctcgttactgcttgatatcttccaccccttacaaaatcagaaaagttgtgttttctaataccaaagaggaggtttggctttctgtgggtgattcccagacactgaagtgcaaagaagagaccctcctagaaaagtaaaatatgactaaaagcaatggagaagagcccaagatggggggcaggatggagagattccagcagggagtccgtaaacgcacacttttggccaagaagaaagtgcagaacattacaaaggaggatgttaaaagttacctgtttcggaatgcttttgtgctgctcacagtcaccgctgtcattgtgggtacaatccttggatttaccctccgaccatacagaatgagctaccgggaagtcaagtacttctcctttcctggggaacttctgatgaggatgttacagatgctggtcttaccacttatcatctccagtcttgtcacagataacatctggttggacagcctattagctattgatgcaagaatgcttgttctcagaaccaccaggacttgagcgggagccttcttggaagcctcatcaagagcacatctctgacttggagaaggaatttccatagacactgcccgagcaggatgatttctgggtttgtaggtaaagctcagaactcaggtattactgaccctattctcttttccacccttggctcactgtt

SEQ ID NO: 449435 - DNA, 3201 bp, Homo sapiens
agcgggagcaggcgcgtcagccgagctcggcggtggcgcgggcggctgggacgcagctgcccccgctcggcgcccgctgcacccttagcagccactgccacctgggcccggagcctccacgatctcgcccggcgattgtgggcaggggcgcctccggatcgatcttctgaaattcaagttttcaagatgaagtttttattgacaactgcctttttaattttaatttccttgtgggtggaagaagcctattctaaggaaaagtcttcaaagaaagggaaggggaaaaagaagcagtatctatgcccatctcagcagtcagcagaggaccttgcccgagtacctgccaactccactagcaatatcttgaacaggttattggtcagttatgatcccaggataagaccaaacttcaaaggcattcctgttgatgtagtagtcaacatttttattaacagttttggatccattcaagaaacaacaatggactatagagttaacatcttcctgagacaaaaatggaatgaccccaggctgaagctccccagtgattttaggggttcagatgcactgacagtggatccaacaatgtacaagtgtttatggaaacctgatttattttttgcaaatgaaaaaagtgccaattttcatgatgtgacccaggaaaacatcctcctctttatttttcgtgatggagatgtccttgtcagcatgaggttatctattactctttcatgccctttggacttgacattgtttcccatggatacacaacgttgcaagatgcaactggagagctttggttacacaactgatgatttacgatttatctggcagtcaggagatcctgtgcaattagaaaaaattgccttgcctcaatttgatatcaaaaaggaagatattgaatatggtaactgtacaaaatactataaaggcacgggctactacacatgcgtggaagtcatcttcaccctgaggaggcaggtcggcttttacatgatgggggtctacgccccaaccctgctcattgttgttctctcctggctttccttctggatcaacccggacgcgagtgctgccagagtgcccctgggtatcttctcagtcctcagcttggcctctgagtgcacaacccttgccgctgagcttcccaaagtttcctatgtgaaggctcttgatgtttggcttattgcttgccttctctttgggtttgcttccctggtggagtatgcagttgtccaggtgatgctgaacaaccccaaaagggttgaagctgaaaaagccagaattgctaaggctgagcaagcagatggaaaaggtggaaatgtggctaaaaagaatactgtgaatggaacagggactcctgttcatattagcactttgcaggttggtgagaccagatgcaaaaaagtttgtacttctaagtctgatctgagatctaatgacttcagcattgttggaagcttaccaagagattttgaactatccaattatgactgctatggaaaacccattgaagttaacaacggacttgggaaatctcaggctaagaacaacaagaagcctccccctgcgaaacctgttattccaacagcagcaaagcgaattgatctttatgcaagagcattgtttcctttctgcttcttgttcttcaatgttatatattggtctatatatttatgataaatcttttccatttgtacaaaataaaattccatttcattgtgacctactcctttcataaatgccaatctgtgagaacttttgaattttcatagcaacattgcattttggatgccatttgattgtaataaaactgtggcaccttaattttgaatggcagcatgatcatgtaatatctgtgctctaataacgatgtatatatgtatagtgaacatattgcttagtaacaaatgaaggacaagcatactacataatataatccatacaattctcttcagttagtgtaaactgcaaatactacagataattctgataataaaatgatatgcacgctgaatcctgctatggtcaccattctaatgtatgtagtatttcaaatttccttccttgtaactttcaaagaaagccatcttattcttgtaaaattttagatggtattatcacagatttaaaaaggttgtattacatattgtttaaactttgtaagtagaaatatatctgttataattatacaggctctgtggagaaataaagttcaaaatatattaatttgtaaaatcagctcgttttaaagtgtgcttgtgttgtcaaaaatatcagatagtaatacacagtgagcatttttaaacaaagggaaacctatatttatgtaactgtatactgaattctgacaaaataaaaaaagataccttattgacgaaatatttaggataaacaaaattctatttaatccaccttaaaacctaaatgtattttcatggatttcatttgttggtacatattacacaaaacattgtgccttaaaatgagtcatacatcttttaaattggaatgcagtaatagatatgtgattttacatcatttttaagaaaccaaggggaagtaataagttgaaaaagaaatccataactattaaaagattttaacttttttattttattaaaatgcttgcatattttaagtaaaattaaaaatgtttactgaatttatttttttatttgaatattttgggattagttacaaaatatttagagattaaataaataatagctttgtttgtgttagacttcacttctacttgtattttctttcttgttaaaagtctagacaactgagatttacttactttgaacttgttccaatccaaaagtaagcactaagtctcattttatgagaccaccatttcttaatatcacatccagtgcacctttgtctttctgccatatctgaaataaaactatcagtaattcacatagataaacataagactaaagaagtatatttacattatctggagagttttgttgcagctacgagtttgtatggcaaattcaataataaagtattgtttatgcaaattgccatatgtaattcagtgctattcaatttattgaagccttgcatttttaaaagattctcactgattatattatttttaatgggatataatcgaatcctttgtagtccttcagcaccctctagttgtaaaggtgatatccggataattttacagtgctacag

SEQ ID NO: 449436 - DNA, 2519 bp, Homo sapiens
agcgggagcaggcgcgtcagccgagctcggcggtggcgcgggcggctgggacgcagctgcccccgctcggcgcccgctgcacccttagcagccactgccacctgggcccggagcctccacgatctcgcccggcgattgtgggcaggggcgcctccggatcgatcttctgaaattcaagttttcaagatgaagtttttattgacaactgcctttttaattttaatttccttgtgggtggaagaagcctattctaaggaaaagtcttcaaagaaagggaaggggaaaaagaagcagtatctatgcccatctcagcagtcagcagaggaccttgcccgagtacctgccaactccactagcaatatcttgaacaggttattggtcagttatgatcccaggataagaccaaacttcaaaggcattcctgttgatgtagtagtcaacatttttattaacagttttggatccattcaagaaacaacaatggactatagagttaacatcttcctgagacaaaaatggaatgaccccaggctgaagctccccagtgattttaggggttcagatgcactgacagtggatccaacaatgtacaagtgtttatggaaacctgatttattttttgcaaatgaaaaaagtgccaattttcatgatgtgacccaggaaaacatcctcctctttatttttcgtgatggagatgtccttgtcagcatgaggttatctattactctttcatgccctttggacttgacattgtttcccatggatacacaacgttgcaagatgcaactggagagctttggttacacaactgatgatttacgatttatctggcagtcaggagatcctgtgcaattagaaaaaattgccttgcctcaatttgatatcaaaaaggaagatattgaatatggtaactgtacaaaatactataaaggcacgggctactacacatgcgtggaagtcatcttcaccctgaggaggcaggtcggcttttacatgatgggggtctacgccccaaccctgctcattgttgttctctcctggctttccttctggatcaacccggacgcgagtgctgccagagtgcccctgggtatcttctcagtcctcagcttggcctctgagtgcacaacccttgccgctgagcttcccaaagtttcctatgtgaaggctcttgatgtttggcttattgcttgccttctctttgggtttgcttccctggtggagtatgcagttgtccaggtgatgctgaacaaccccaaaagggttgaagctgaaaaagccagaattgctaaggctgagcaagcagatggaaaaggtggaaatgtggctaaaaagaatactgtgaatggaacagggactcctgttcatattagcactttgcaggttggtgagaccagatgcaaaaaagtttgtacttctaagtctgatctgagatctaatgacttcagcattgttggaagcttaccaagagattttgaactatccaattatgactgctatggaaaacccattgaagttaacaacggacttgggaaatctcaggctaagaacaacaagaagcctccccctgcgaaacctgttattccaacagcagcaaagcgaattgatctttatgcaagagcattgtttcctttctgcttcttgttcttcaatgttatatattggtctatatatttatgataaatcttttccatttgtacaaaataaaattccatttcattgtgacctactcctttcataaatgccaatctgtgagaacttttgaattttcatagcaacattgcattttggatgccatttgattgtaataaaactgtggcaccttaattttgaatggcagcatgatcatgtaatatctgtgctctaataacgatgtatatatgtatagtgaacatattgcttagtaacaaatgaaggacaagcatactacataatataatccatacaattctcttcagttagtgtaaactgcaaatactacagataattctgataataaaatgatatgcacgctgaatcctgctatggtcaccattctaatgtatgtagtatttcaaatttccttccttgtaactttcaaagaaagccatcttattcttgtaaaattttagatggtattatcacagatttaaaaaggttgtattacatattgtttaaactttgtaagtagaaatatatctgttataattatacaggctctgtggagaaataaagttcaaaatatattaatttgtaaaatcaaaaaaaaagaaaacaggacagcacacacagcaccacaacagccagaacaaacaaaaagaagaggcgcgcgccaccaaaaaacaataagggaaggcgcatcaagagcagccatgcccgatagaaacaagcgccaacgttaatattacaaagcgccatagagcgtctacatacgacacgagagcgacgagtcatgggaacaagatcgagcgggaaaacaaaccacaaagggacgcaacacccgcgtgtgcacacacatgtggtcagacgcctcacatacc

SEQ ID NO: 449437 - DNA, 2908 bp, Homo sapiens
agcgggagcaggcgcgtcagccgagctcggcggtggcgcgggcggctgggacgcagctgcccccgctcggcgcccgctgcacccttagcagccactgccacctgggcccggagcctccacgatctcgcccggcgattgtgggcaggggcgcctccggatcgatcttctgaaattcaagttttcaagatgaagtttttattgacaactgcctttttaattttaatttccttgtgggtggaagaagcctattctaaggaaaagtcttcaaagaaagggaaggggaaaaagaagcagtatctatgcccatctcagcagtcagcagaggaccttgcccgagtacctgccaactccactagcaatatcttgaacaggttattggtcagttatgatcccaggataagaccaaacttcaaaggcattcctgttgatgtagtagtcaacatttttattaacagttttggatccattcaagaaacaacaatggactatagagttaacatcttcctgagacaaaaatggaatgaccccaggctgaagctccccagtgattttaggggttcagatgcactgacagtggatccaacaatgtacaagtgtttatggaaacctgatttattttttgcaaatgaaaaaagtgccaattttcatgatgtgacccaggaaaacatcctcctctttatttttcgtgatggagatgtccttgtcagcatgaggttatctattactctttcatgccctttggacttgacattgtttcccatggatacacaacgttgcaagatgcaactggagagctttggttacacaactgatgatttacgatttatctggcagtcaggagatcctgtgcaattagaaaaaattgccttgcctcaatttgatatcaaaaaggaagatattgaatatggtaactgtacaaaatactataaaggcacgggctactacacatgcgtggaagtcatcttcaccctgaggaggcaggtcggcttttacatgatgggggtctacgccccaaccctgctcattgttgttctctcctggctttccttctggatcaacccggacgcgagtgctgccagagtgcccctgggttggtgagaccagatgcaaaaaagtttgtacttctaagtctgatctgagatctaatgacttcagcattgttggaagcttaccaagagattttgaactatccaattatgactgctatggaaaacccattgaagttaacaacggacttgggaaatctcaggctaagaacaacaagaagcctccccctgcgaaacctgttattccaacagcagcaaagcgaattgatctttatgcaagagcattgtttcctttctgcttcttgttcttcaatgttatatattggtctatatatttatgataaatcttttccatttgtacaaaataaaattccatttcattgtgacctactcctttcataaatgccaatctgtgagaacttttgaattttcatagcaacattgcattttggatgccatttgattgtaataaaactgtggcaccttaattttgaatggcagcatgatcatgtaatatctgtgctctaataacgatgtatatatgtatagtgaacatattgcttagtaacaaatgaaggacaagcatactacataatataatccatacaattctcttcagttagtgtaaactgcaaatactacagataattctgataataaaatgatatgcacgctgaatcctgctatggtcaccattctaatgtatgtagtatttcaaatttccttccttgtaactttcaaagaaagccatcttattcttgtaaaattttagatggtattatcacagatttaaaaaggttgtattacatattgtttaaactttgtaagtagaaatatatctgttataattatacaggctctgtggagaaataaagttcaaaatatattaatttgtaaaatcagctcgttttaaagtgtgcttgtgttgtcaaaaatatcagatagtaatacacagtgagcatttttaaacaaagggaaacctatatttatgtaactgtatactgaattctgacaaaataaaaaaagataccttattgacgaaatatttaggataaacaaaattctatttaatccaccttaaaacctaaatgtattttcatggatttcatttgttggtacatattacacaaaacattgtgccttaaaatgagtcatacatcttttaaattggaatgcagtaatagatatgtgattttacatcatttttaagaaaccaaggggaagtaataagttgaaaaagaaatccataactattaaaagattttaacttttttattttattaaaatgcttgcatattttaagtaaaattaaaaatgtttactgaatttatttttttatttgaatattttgggattagttacaaaatatttagagattaaataaataatagctttgtttgtgttagacttcacttctacttgtattttctttcttgttaaaagtctagacaactgagatttacttactttgaacttgttccaatccaaaagtaagcactaagtctcattttatgagaccaccatttcttaatatcacatccagtgcacctttgtctttctgccatatctgaaataaaactatcagtaattcacatagataaacataagactaaagaagtatatttacattatctggagagttttgttgcagctacgagtttgtatggcaaattcaataataaagtattgtttatgcaaattgccatatgtaattcagtgctattcaatttattgaagccttgcatttttaaaagattctcactgattatattatttttaatgggatataatcgaatcctttgtagtccttcagcaccctctagttgtaaaggtgatatccggataattttacagtgctacag

SEQ ID NO: 449438 - DNA, 2126 bp, Homo sapiens
agcgggagcaggcgcgtcagccgagctcggcggtggcgcgggcggctgggacgcagctgcccccgctcggcgcccgctgcacccttagcagccactgccacctgggcccggagcctccacgatctcgcccggcgattgtgggcaggggcgcctccggatcgatcttctgaaattcaagttttcaagatgaagtttttattgacaactgcctttttaattttaatttccttgtgggtggaagaagcctattctaaggaaaagtcttcaaagaaagggaaggggaaaaagaagcagtatctatgcccatcgttggtgagaccagatgcaaaaaagtttgtacttctaagtctgatctgagatctaatgacttcagcattgttggaagcttaccaagagattttgaactatccaattatgactgctatggaaaacccattgaagttaacaacggacttgggaaatctcaggctaagaacaacaagaagcctccccctgcgaaacctgttattccaacagcagcaaagcgaattgatctttatgcaagagcattgtttcctttctgcttcttgttcttcaatgttatatattggtctatatatttatgataaatcttttccatttgtacaaaataaaattccatttcattgtgacctactcctttcataaatgccaatctgtgagaacttttgaattttcatagcaacattgcattttggatgccatttgattgtaataaaactgtggcaccttaattttgaatggcagcatgatcatgtaatatctgtgctctaataacgatgtatatatgtatagtgaacatattgcttagtaacaaatgaaggacaagcatactacataatataatccatacaattctcttcagttagtgtaaactgcaaatactacagataattctgataataaaatgatatgcacgctgaatcctgctatggtcaccattctaatgtatgtagtatttcaaatttccttccttgtaactttcaaagaaagccatcttattcttgtaaaattttagatggtattatcacagatttaaaaaggttgtattacatattgtttaaactttgtaagtagaaatatatctgttataattatacaggctctgtggagaaataaagttcaaaatatattaatttgtaaaatcagctcgttttaaagtgtgcttgtgttgtcaaaaatatcagatagtaatacacagtgagcatttttaaacaaagggaaacctatatttatgtaactgtatactgaattctgacaaaataaaaaaagataccttattgacgaaatatttaggataaacaaaattctatttaatccaccttaaaacctaaatgtattttcatggatttcatttgttggtacatattacacaaaacattgtgccttaaaatgagtcatacatcttttaaattggaatgcagtaatagatatgtgattttacatcatttttaagaaaccaaggggaagtaataagttgaaaaagaaatccataactattaaaagattttaacttttttattttattaaaatgcttgcatattttaagtaaaattaaaaatgtttactgaatttatttttttatttgaatattttgggattagttacaaaatatttagagattaaataaataatagctttgtttgtgttagacttcacttctacttgtattttctttcttgttaaaagtctagacaactgagatttacttactttgaacttgttccaatccaaaagtaagcactaagtctcattttatgagaccaccatttcttaatatcacatccagtgcacctttgtctttctgccatatctgaaataaaactatcagtaattcacatagataaacataagactaaagaagtatatttacattatctggagagttttgttgcagctacgagtttgtatggcaaattcaataataaagtattgtttatgcaaattgccatatgtaattcagtgctattcaatttattgaagccttgcatttttaaaagattctcactgattatattatttttaatgggatataatcgaatcctttgtagtccttcagcaccctctagttgtaaaggtgatatccggataattttacagtgctacag

SEQ ID NO: 449439 - DNA, 3179 bp, Homo sapiens
  misc_feature (1)..(2): n is a, c, g, or t
  misc_feature (4)..(6): n is a, c, g, or t
  misc_feature (38)..(38): n is a, c, g, or t
  misc_feature (65)..(65): n is a, c, g, or t
nncnnngcggcgtgccgggaggacgcgcgctgccctgngcgggagagggcgcggggcgcctggcngcggcagccgggtccccgctgcggtggcgcccgcggagacgctccgggtggagagatgcagagggccgggatcgatcttctgaaattcaagttttcaagatgaagtttttattgacaactgcctttttaattttaatttccttgtgggtggaagaagcctattctaaggaaaagtcttcaaagaaagggaaggggaaaaagaagcagtatctatgcccatctcagcagtcagcagaggaccttgcccgagtacctgccaactccactagcaatatcttgaacaggttattggtcagttatgatcccaggataagaccaaacttcaaaggcattcctgttgatgtagtagtcaacatttttattaacagttttggatccattcaagaaacaacaatggactatagagttaacatcttcctgagacaaaaatggaatgaccccaggctgaagctccccagtgattttaggggttcagatgcactgacagtggatccaacaatgtacaagtgtttatggaaacctgatttattttttgcaaatgaaaaaagtgccaattttcatgatgtgacccaggaaaacatcctcctctttatttttcgtgatggagatgtccttgtcagcatgaggttatctattactctttcatgccctttggacttgacattgtttcccatggatacacaacgttgcaagatgcaactggagagctttggttacacaactgatgatttacgatttatctggcagtcaggagatcctgtgcaattagaaaaaattgccttgcctcaatttgatatcaaaaaggaagatattgaatatggtaactgtacaaaatactataaaggcacgggctactacacatgcgtggaagtcatcttcaccctgaggaggcaggtcggcttttacatgatgggggtctacgccccaaccctgctcattgttgttctctcctggctttccttctggatcaacccggacgcgagtgctgccagagtgcccctgggtatcttctcagtcctcagcttggcctctgagtgcacaacccttgccgctgagcttcccaaagtttcctatgtgaaggctcttgatgtttggcttattgcttgccttctctttgggtttgcttccctggtggagtatgcagttgtccaggtgatgctgaacaaccccaaaagggttgaagctgaaaaagccagaattgctaaggctgagcaagcagatggaaaaggtggaaatgtggctaaaaagaatactgtgaatggaacagggactcctgttcatattagcactttgcaggttggtgagaccagatgcaaaaaagtttgtacttctaagtctgatctgagatctaatgacttcagcattgttggaagcttaccaagagattttgaactatccaattatgactgctatggaaaacccattgaagttaacaacggacttgggaaatctcaggctaagaacaacaagaagcctccccctgcgaaacctgttattccaacagcagcaaagcgaattgatctttatgcaagagcattgtttcctttctgcttcttgttcttcaatgttatatattggtctatatatttatgataaatcttttccatttgtacaaaataaaattccatttcattgtgacctactcctttcataaatgccaatctgtgagaacttttgaattttcatagcaacattgcattttggatgccatttgattgtaataaaactgtggcaccttaattttgaatggcagcatgatcatgtaatatctgtgctctaataacgatgtatatatgtatagtgaacatattgcttagtaacaaatgaaggacaagcatactacataatataatccatacaattctcttcagttagtgtaaactgcaaatactacagataattctgataataaaatgatatgcacgctgaatcctgctatggtcaccattctaatgtatgtagtatttcaaatttccttccttgtaactttcaaagaaagccatcttattcttgtaaaattttagatggtattatcacagatttaaaaaggttgtattacatattgtttaaactttgtaagtagaaatatatctgttataattatacaggctctgtggagaaataaagttcaaaatatattaatttgtaaaatcagctcgttttaaagtgtgcttgtgttgtcaaaaatatcagatagtaatacacagtgagcatttttaaacaaagggaaacctatatttatgtaactgtatactgaattctgacaaaataaaaaaagataccttattgacgaaatatttaggataaacaaaattctatttaatccaccttaaaacctaaatgtattttcatggatttcatttgttggtacatattacacaaaacattgtgccttaaaatgagtcatacatcttttaaattggaatgcagtaatagatatgtgattttacatcatttttaagaaaccaaggggaagtaataagttgaaaaagaaatccataactattaaaagattttaacttttttattttattaaaatgcttgcatattttaagtaaaattaaaaatgtttactgaatttatttttttatttgaatattttgggattagttacaaaatatttagagattaaataaataatagctttgtttgtgttagacttcacttctacttgtattttctttcttgttaaaagtctagacaactgagatttacttactttgaacttgttccaatccaaaagtaagcactaagtctcattttatgagaccaccatttcttaatatcacatccagtgcacctttgtctttctgccatatctgaaataaaactatcagtaattcacatagataaacataagactaaagaagtatatttacattatctggagagttttgttgcagctacgagtttgtatggcaaattcaataataaagtattgtttatgcaaattgccatatgtaattcagtgctattcaatttattgaagccttgcatttttaaaagattctcactgattatattatttttaatgggatataatcgaatcctttgtagtccttcagcaccctctagttgtaaaggtgatatccggataattttacagtgctacag

SEQ ID NO: 449440 - DNA, 2822 bp, Homo sapiens
tatttgtgccactaatcattgtaaccctttttgttttggggccgaataagttcttaaaaatagcaataaacatacacatgtgcacgcatgtactttttcttcaggactatagagttaacatcttcctgagacaaaaatggaatgaccccaggctgaagctccccagtgattttaggggttcagatgcactgacagtggatccaacaatgtacaagtgtttatggaaacctgatttattttttgcaaatgaaaaaagtgccaattttcatgatgtgacccaggaaaacatcctcctctttatttttcgtgatggagatgtccttgtcagcatgaggttatctattactctttcatgccctttggacttgacattgtttcccatggatacacaacgttgcaagatgcaactggagagctttggttacacaactgatgatttacgatttatctggcagtcaggagatcctgtgcaattagaaaaaattgccttgcctcaatttgatatcaaaaaggaagatattgaatatggtaactgtacaaaatactataaaggcacgggctactacacatgcgtggaagtcatcttcaccctgaggaggcaggtcggcttttacatgatgggggtctacgccccaaccctgctcattgttgttctctcctggctttccttctggatcaacccggacgcgagtgctgccagagtgcccctgggtatcttctcagtcctcagcttggcctctgagtgcacaacccttgccgctgagcttcccaaagtttcctatgtgaaggctcttgatgtttggcttattgcttgccttctctttgggtttgcttccctggtggagtatgcagttgtccaggtgatgctgaacaaccccaaaagggttgaagctgaaaaagccagaattgctaaggctgagcaagcagatggaaaaggtggaaatgtggctaaaaagaatactgtgaatggaacagggactcctgttcatattagcactttgcaggttggtgagaccagatgcaaaaaagtttgtacttctaagtctgatctgagatctaatgacttcagcattgttggaagcttaccaagagattttgaactatccaattatgactgctatggaaaacccattgaagttaacaacggacttgggaaatctcaggctaagaacaacaagaagcctccccctgcgaaacctgttattccaacagcagcaaagcgaattgatctttatgcaagagcattgtttcctttctgcttcttgttcttcaatgttatatattggtctatatatttatgataaatcttttccatttgtacaaaataaaattccatttcattgtgacctactcctttcataaatgccaatctgtgagaacttttgaattttcatagcaacattgcattttggatgccatttgattgtaataaaactgtggcaccttaattttgaatggcagcatgatcatgtaatatctgtgctctaataacgatgtatatatgtatagtgaacatattgcttagtaacaaatgaaggacaagcatactacataatataatccatacaattctcttcagttagtgtaaactgcaaatactacagataattctgataataaaatgatatgcacgctgaatcctgctatggtcaccattctaatgtatgtagtatttcaaatttccttccttgtaactttcaaagaaagccatcttattcttgtaaaattttagatggtattatcacagatttaaaaaggttgtattacatattgtttaaactttgtaagtagaaatatatctgttataattatacaggctctgtggagaaataaagttcaaaatatattaatttgtaaaatcagctcgttttaaagtgtgcttgtgttgtcaaaaatatcagatagtaatacacagtgagcatttttaaacaaagggaaacctatatttatgtaactgtatactgaattctgacaaaataaaaaaagataccttattgacgaaatatttaggataaacaaaattctatttaatccaccttaaaacctaaatgtattttcatggatttcatttgttggtacatattacacaaaacattgtgccttaaaatgagtcatacatcttttaaattggaatgcagtaatagatatgtgattttacatcatttttaagaaaccaaggggaagtaataagttgaaaaagaaatccataactattaaaagattttaacttttttattttattaaaatgcttgcatattttaagtaaaattaaaaatgtttactgaatttatttttttatttgaatattttgggattagttacaaaatatttagagattaaataaataatagctttgtttgtgttagacttcacttctacttgtattttctttcttgttaaaagtctagacaactgagatttacttactttgaacttgttccaatccaaaagtaagcactaagtctcattttatgagaccaccatttcttaatatcacatccagtgcacctttgtctttctgccatatctgaaataaaactatcagtaattcacatagataaacataagactaaagaagtatatttacattatctggagagttttgttgcagctacgagtttgtatggcaaattcaataataaagtattgtttatgcaaattgccatatgtaattcagtgctattcaatttattgaagccttgcatttttaaaagattctcactgattatattatttttaatgggatataatcgaatcctttgtagtccttcagcaccctctagttgtaaaggtgatatccggataattttacagtgctacag

SEQ ID NO: 449441 - DNA, 2481 bp, Homo sapiens
ggcggcgctagggacgggagcgcgcgcgggagctagagagcagtggtctcggcgctcgtccggcccgcagcttcgggtcctcaggcggctgttgctccggaacgggtggttggggaggggggggtggggggactctagacagctgaggcgcgaaagcgatgagtcctcggctcttcctcctccttctccgggacccgctctctgcctccctctccaacgcccggatgatctgagccgcgagggcgccgacagccgggggcccggacgcagcccggctcctcccctcctccgccccttccccagcctgacctggcccgccgctgcagcggtgacccctcccccggctgccgccgtcgccgccgcggtgaccccctccccggctgccgccgccgccgcctcggccgaccagggacctgcccgcctgcggctgctccggacctagaggatcaagacataatgggagcatttttagacaagccaaagatggaaaagcataatgcccaggggcagggtaatgggttgcgatatgggctaagcagcatgcaaggctggcgtgttgaaatggaggatgcacatacggctgtgatcggtttgccaagtggacttgaatcgtggtcattctttgctgtgtatgatgggcatgctggttctcaggttgccaaatactgctgtgagcatttgttagatcacatcaccaataaccaggattttaaagggtctgcaggagcaccttctgtggaaaatgtaaagaatggaatcagaacaggttttctggagattgatgaacacatgagagttatgtcagagaagaaacatggtgcagatagaagtgggtcaacagctgtaggtgtcttaatttctccccaacatacttatttcattaactgtggagactcaagaggtttactttgtaggaacaggaaagttcatttcttcacacaagatcacaaaccaagtaatccgctggagaaagaacgaattcagaatgcaggtggctctgtaatgattcagcgtgtgaatggctctctggctgtatcgagggcccttggggattttgattacaaatgtgtccatggaaaaggtcctactgagcagcttgtctcaccagagcctgaagtccatgatattgaaagatctgaagaagatgatcagttcattatccttgcatgtgatggtatctgggatgttatgggaaatgaagagctctgtgattttgtaagatccagacttgaagtcactgatgaccttgagaaagtttgcaatgaagtagtcgacacctgtttgtataagggaagtcgagacaacatgagtgtgattttgatctgttttccaaatgcacccaaagtatcgccagaagcagtgaagaaggaggcagagttggacaagtacctggaatgcagagtagaagaaatcataaagaagcagggggaaggcgtccccgacttagtccatgtgatgcgcacattagcgagtgagaacatccccagcctcccaccagggggtgaattggcaagcaagaggaatgttattgaagccgtttacaatagactgaatccttacaaaaatgacgacactgactctacatcaacagatgatatgtggtaaaactgctcatctagccatggagtttaccttcacctccaaaggagagtacagctcaactttgttgaaacttttaacatccatcctcaactttaaggaaggggatatgacatgggtgagaatgattacatcagagaacttcagcagtacaacagctagcccagaactgatttttttttttttttttttgtaaatttgagacttatgtaagcgtgatttcaaaccataattcgtgttgtaaatcagactccagcaatttttgttgtatgattttgtttttttgtaaagtgtaattgtccttgtacaaaatgctcatatttaattatgaactgctttaaatcactatcaaagttacaagaaatgtttggcttattgtgtgatgcaacagatatatagccctttcaagtcatgttgtgtttggacttggggttggaacagggagagcagcagccatgtcagctacacgctcaaatgtgcagatgattatggaaaataacctcaaaatcttacaaagctgaacatccaaggagttattgaaaactatcttaaatgttcttggtaggggagttggcattgttgataaagccagtcccttcatttaactgtctttcaggatgttccttcgttgtttccatgagtattgcaggtaataatacagtgtattcataagaatctcaatcttggggctaaatgccttgtttctttgcacctcttttcaagtccttacatttaattactaattgataagcagcagcttcctacatatagtaggaaactgccacatttttgctatcatgattggctgggcctgctgctgttcctagtaagatattctgaattccattttatcaataaagcttgatttaacaaacaagaaaa

SEQ ID NO: 449442 - DNA, 4331 bp, Homo sapiens
  misc_feature (482)..(483): n is a, c, g, or t
ggcggcgctagggacgggagcgcgcgcgggagctagagagcagtggtctcggcgctcgtccggcccgcagcttcgggtcctcaggcggctgttgctccggaacgggtggttggggaggggggggtggggggactctagacagctgaggcgcgaaagcgatgagtcctcggctcttcctcctccttctccgggacccgctctctgcctccctctccaacgcccggatgatctgagccgcgagggcgccgacagccgggggcccggacgcagcccggctcctcccctcctccgccccttccccagcctgacctggcccgccgctgcagcggtgacccctcccccggctgccgccgtcgccgccgcggtgaccccctccccggctgccgccgccgccgcctcggccgaccagggacctgcccgcctgcggctgctccggattttaaataaacttggagccttttcttgaaagacagctggctgtnnagagccttctaccaactgcagttttagatacgttttgaaaatttcatcacctgagacctagaggatcaagacataatgggagcatttttagacaagccaaagatggaaaagcataatgcccaggggcagggtaatgggttgcgatatgggctaagcagcatgcaaggctggcgtgttgaaatggaggatgcacatacggctgtgatcggtttgccaagtggacttgaatcgtggtcattctttgctgtgtatgatgggcatgctggttctcaggttgccaaatactgctgtgagcatttgttagatcacatcaccaataaccaggattttaaagggtctgcaggagcaccttctgtggaaaatgtaaagaatggaatcagaacaggttttctggagattgatgaacacatgagagttatgtcagagaagaaacatggtgcagatagaagtgggtcaacagctgtaggtgtcttaatttctccccaacatacttatttcattaactgtggagactcaagaggtttactttgtaggaacaggaaagttcatttcttcacacaagatcacaaaccaagtaatccgctggagaaagaacgaattcagaatgcaggtggctctgtaatgattcagcgtgtgaatggctctctggctgtatcgagggcccttggggattttgattacaaatgtgtccatggaaaaggtcctactgagcagcttgtctcaccagagcctgaagtccatgatattgaaagatctgaagaagatgatcagttcattatccttgcatgtgatggtatctgggatgttatgggaaatgaagagctctgtgattttgtaagatccagacttgaagtcactgatgaccttgagaaagtttgcaatgaagtagtcgacacctgtttgtataagggaagtcgagacaacatgagtgtgattttgatctgttttccaaatgcacccaaagtatcgccagaagcagtgaagaaggaggcagagttggacaagtacctggaatgcagagtagaaggtggatcatttaacaaaaaataagtagctttattaaagaaaaatcttcaacacaatcaaactttaacattttagcttttagatttttatgtgtctttgacagctagtgtctagtgtatgaaagtggaaaaggacatttctgtagtagctgttaagatgtatgcagttgtcctatcacagttatattagaaataacaactagtgtggaaagtaacccacattctgttcaggatacttttgttttaaaaggctaaaatgtttgtgtgctttaaaattcttaatgaattcactggcatgagtaattttatgccgggaaaatctgatttgtggtctatttaattacaaagagattgtgatggtgataatttgaataccatctttctatgaaaagctgtgtatattaattttaatctctagggccttttttcaataacttgaaaatcacagcctcatcattagcaactttatatacacagctttaaaaaatttgctttaaactgtttcagagcttcttccctaagccataaactgtctcacctaaacaagatagacctcaataaaagacataatatttctccacctggcagaaaagtaactgccaagtaagattaagaaataagttgagcatttctggagtatatttctcataattctgcagagacttccagtttattgcatatatgcagtaaagtgtatatattatgcagtttctctaagtggaaaaacttgacatgactttaatagtgttaaaacatgaaaatgctggtgagctgaggtagaaaaaaaacaagaaaaaaattttaaaaatagcgttaaaatgcattttaggctcctaatgtcgttaatttgcacgttaaagacctctaatcgcatgcaagcattgacctaccacacctacatcccactgtgcctgcattattgaaattactactcactttaattttttttcccctttttactgtttgataccaatcataatcagtctgatactagaatcatgattggttttgttctttagtactgtctagagctactattttgtttttattgctgtccgccacttgatagtcatacatctagtatgtgtttgtactatttagtattgcattcattggacgtactattcaacgaatttgtctccttactgttaccaagggtcttggaatttttatattttaaattaatcattcaatataagttatttataggtatagtacaattttaaaatatttagaatgctacaatcattggttcaaactattgattcatgggaaaatttaaattcataagaataatatgtatagggataagttgatatttaatgtattggcactttaacttgggcagacatgttttcttattggtttaaagaagtaataagtattttaatatttttactatgaaatgggatccaattttagaaatgaattgctacttttctctttagtgtgtacactttaagttttagatggaattatgaaatattcactttacgttattttgttacaataataagttttatatttcttattatcaagcaagagttgccacctggacagagtttacattgatactcaatatttttgatatgttaaagtgttattatacttgtaccattcaattggagattgtcataaattaaatatggtattttttactcagatttgatgagactgcaactagagaataaatattacattaaaattgctgctattttaaaacatagaatgtaactgtttgtattgtaaaagttgtgtgtcctcagtgaaaaatactgccttcagcttccaaagcaggcacctgaatgcctttttcttttctctctctcttctttctttaaatacatgccttcactagattgctgtgacctactaaacctcattttatttgcttggaacatttttggcttctctgtccacaccatagaaaaggacaaaggccttccagctctccttttctcttatttgttcccttctaaatacttgactctctgggggtgtgaaaagattcagctcataatttatactactattaattttgtggtccttctaagccaatttaaaattatacttttgtgtatatattttcaaaatctttgctactgactaccttagctttaaagttgctaatttggagatgactgatagaatccctgaaacttggtggaggggagtggaaaggagcagaatgtgtttgtgtatatgtatgtgaaacatggatcttctatatataaatattctttagaaaaaagcgttcagtctttttacaattctaagtaaaacgtataggtcaacagaaattaaaggaatatttcttaaaattcatttatttttcttttttgaaagcagacagaagcaaggctagtatagtatgaatggtcaggtagtttaaatgcgttgtcccacgtggaacaggagatattaactgtttttaaagctttacattatttttttacaagaatttgttttcctgtaattttcttcacagttaaaatatcctaatttatattttaacaaaagagatgtaagatacatcaaatatagatgattcaaggtaatgttttttagacctgaaactattgattcaatttatcatcagtgtttatttctattgtatctagttatctatccaaataattgtattggcttagcggagactgtatgttaagtgtattagttttagattgtgaaattgtgcagtttaggtaaacatcaaatccctttatttttgtacagcagatttccagcattagaaccatgtagaacaaatatactagatgttaaagattacacaataaaggaacttggcaaaccaaaaaaaaa

SEQ ID NO: 449443 - DNA, 2949 bp, Homo sapiens
ggcggcgctagggacgggagcgcgcgcgggagctagagagcagtggtctcggcgctcgtccggcccgcagcttcgggtcctcaggcggctgttgctccggaacgggtggttggggaggggggggtggggggactctagacagctgaggcgcgaaagcgatgagtcctcggctcttcctcctccttctccgggacccgctctctgcctccctctccaacgcccggatgatctgagccgcgagggcgccgacagccgggggcccggacgcagcccggctcctcccctcctccgccccttccccagcctgacctggcccgccgctgcagcggtgacccctcccccggctgccgccgtcgccgccgcggtgaccccctccccggctgccgccgccgccgcctcggccgaccagggacctgcccgcctgcggctgctccggacctagaggatcaagacataatgggagcatttttagacaagccaaagatggaaaagcataatgcccaggggcagggtaatgggttgcgatatgggctaagcagcatgcaaggctggcgtgttgaaatggaggatgcacatacggctgtgatcggtttgccaagtggacttgaatcgtggtcattctttgctgtgtatgatgggcatgctggttctcaggttgccaaatactgctgtgagcatttgttagatcacatcaccaataaccaggattttaaagggtctgcaggagcaccttctgtggaaaatgtaaagaatggaatcagaacaggttttctggagattgatgaacacatgagagttatgtcagagaagaaacatggtgcagatagaagtgggtcaacagctgtaggtgtcttaatttctccccaacatacttatttcattaactgtggagactcaagaggtttactttgtaggaacaggaaagttcatttcttcacacaagatcacaaaccaagtaatccgctggagaaagaacgaattcagaatgcaggtggctctgtaatgattcagcgtgtgaatggctctctggctgtatcgagggcccttggggattttgattacaaatgtgtccatggaaaaggtcctactgagcagcttgtctcaccagagcctgaagtccatgatattgaaagatctgaagaagatgatcagttcattatccttgcatgtgatggtatctgggatgttatgggaaatgaagagctctgtgattttgtaagatccagacttgaagtcactgatgaccttgagaaagtttgcaatgaagtagtcgacacctgtttgtataagggaagtcgagacaacatgagtgtgattttgatctgttttccaaatgcacccaaagtatcgccagaagcagtgaagaaggaggcagagttggacaagtacctggaatgcagagtagaagaaatcataaagaagcagggggaaggcgtccccgacttagtccatgtgatgcgcacattagcgagtgagaacatccccagcctcccaccagggggtgaattggcaagcaagaggaatgttattgaagccgtttacaatagactgaatccttacaaaaatgacgacactgactctacatcaacagatgatatgtggtaaaactgctcatctagccatggagtttaccttcacctccaaaggagagtacagctcaactttgttgaaacttttaacatccatcctcaactttaaggaaggggatatgacatgggtgagaatgattacatcagagaacttcagcagtacaacagctagcccagaactgatttttttttttttttttttgtaaatttgagacttatgtaagcgtgatttcaaaccataattcgtgttgtaaatcagactccagcaatttttgttgtatgattttgtttttttgtaaagtgtaattgtccttgtacaaaatgctcatatttaattatgaactgctttaaatcactatcaaagttacaagaaatgtttggcttattgtgtgatgcaacagatatatagccctttcaagtcatgttgtgtttggacttggggttggaacagggagagcagcagccatgtcagctacacgctcaaatgtgcagatgattatggaaaataacctcaaaatcttacaaagctgaacatccaaggagttattgaaaactatcttaaatgttcttggtaggggagttggcattgttgataaagccagtcccttcatttaactgtctttcaggatgttccttcgttgtttccatgagtattgcaggtaataatacagtgtattcataagaatctcaatcttggggctaaatgccttgtttctttgcacctcttttcaagtccttacatttaattactaattgataagcagcagcttcctacatatagtaggaaactgccacatttttgctatcatgattggctgggcctgctgctgttcctagtaagatattctgaattccattttatcaataaagcttgatttaacaaacaagaaaacttaatcatgtatgtgtaattcctcttttaccctggccttttaaaacactgtgccgttgtaatgagacgtttctcatagggaaagatgttagtctcttttaattggacaacactgtcactcaaggcatagatgaaactttccttccattagaaagactaaaagatttaattcttggttgtaccttaatctattttttaaataggtttctttcaggctgcttatttttcattaagatgtgtatcagcttggatttgcctactgtttaattaaaatatttattgtcaaagtttgacaatctaacactctatggtaggggtgtgtgtgtgtgtgtttgtgagtgtgtgtttgcctgtgatttttaattggcccatgtctttagaatccaagtggttaagatgtatttgtgatttgaaatatagcatgttgataatatttagctgttggcctttacaaataactttcaaagc

SEQ ID NO: 449444 - DNA, 2427 bp, Homo sapiens
ggcggcgctagggacgggagcgcgcgcgggagctagagagcagtggtctcggcgctcgtccggcccgcagcttcgggtcctcaggcggctgttgctccggaacgggtggttggggaggggggggtggggggactctagacagctgaggcgcgaaagcgatgagtcctcggctcttcctcctccttctccgggacccgctctctgcctccctctccaacgcccggatgatctgagccgcgagggcgccgacagccgggggcccggacgcagcccggctcctcccctcctccgccccttccccagcctgacctggcccgccgctgcagcggtgacccctcccccggctgccgccgtcgccgccgcggtgaccccctccccggctgccgccgccgccgcctcggccgaccagggacctgcccgcctgcggctgctccggacctagaggatcaagacataatgggagcatttttagacaagccaaagatggaaaagcataatgcccaggggcagggtaatgggttgcgatatgggctaagcagcatgcaaggctggcgtgttgaaatggaggatgcacatacggctgtgatcggtttgccaagtggacttgaatcgtggtcattctttgctgtgtatgatgggcatgctggttctcaggttgccaaatactgctgtgagcatttgttagatcacatcaccaataaccaggattttaaagggtctgcaggagcaccttctgtggaaaatgtaaagaatggaatcagaacaggttttctggagattgatgaacacatgagagttatgtcagagaagaaacatggtgcagatagaagtgggtcaacagctgtaggtgtcttaatttctccccaacatacttatttcattaactgtggagactcaagaggtttactttgtaggaacaggaaagttcatttcttcacacaagatcacaaaccaagtaatccgctggagaaagaacgaattcagaatgcaggtggctctgtaatgattcagcgtgtgaatggctctctggctgtatcgagggcccttggggattttgattacaaatgtgtccatggaaaaggtcctactgagcagcttgtctcaccagagcctgaagtccatgatattgaaagatctgaagaagatgatcagttcattatccttgcatgtgatggtatctgggatgttatgggaaatgaagagctctgtgattttgtaagatccagacttgaagtcactgatgaccttgagaaagtttgcaatgaagtagtcgacacctgtttgtataagggaagtcgagacaacatgagtgtgattttgatctgttttccaaatgcacccaaagtatcgccagaagcagtgaagaaggaggcagagttggacaagtacctggaatgcagagtagaagaaatcataaagaagcagggggaaggcgtccccgacttagtccatgtgatgcgcacattagcgagtgagaacatccccagcctcccaccagggggtgaattggcaagcaagaggaatgttattgaagccgtttacaatagactgaatccttacaaaaatgacgacactgactctacatcaacagatgatatgtggtaaaactgctcatctagccatggagtttaccttcacctccaaaggagagtacagctcaactttgttgaaacttttaacatccatcctcaactttaaggaaggggatatgacatgggtgagaatgattacatcagagaacttcagcagtacaacagctagcccagaactgatttttttttttttttttttgtaaatttgagacttatgtaagcgtgatttcaaaccataattcgtgttgtaaatcagactccagcaatttttgttgtatgattttgtttttttgtaaagtgtaattgtccttgtacaatgtttggcttattgtgtgatgcaacagatatatagccctttcaagtcatgttgtgtttggacttggggttggaacagggagagcagcagccatgtcagctacacgctcaaatgtgcagatgattatggaaaataacctcaaaatcttacaaagctgaacatccaaggagttattgaaaactatcttaaatgttcttggtaggggagttggcattgttgataaagccagtcccttcatttaactgtctttcaggatgttccttcgttgtttccatgagtattgcaggtaataatacagtgtattcataagaatctcaatcttggggctaaatgccttgtttctttgcacctcttttcaagtccttacatttaattactaattgataagcagcagcttcctacatatagtaggaaactgccacatttttgctatcatgattggctgggcctgctgctgttcctagtaagatattctgaattccattttatcaataaagcttgatttaacaaacaagaaaa

SEQ ID NO: 449445 - DNA, 1739 bp, Homo sapiens
ggcggcgctagggacgggagcgcgcgcgggagctagagagcagtggtctcggcgctcgtccggcccgcagcttcgggtcctcaggcggctgttgctccggaacgggtggttggggaggggggggtggggggactctagacagctgaggcgcgaaagcgatgagtcctcggctcttcctcctccttctccgggacccgctctctgcctccctctccaacgcccggatgatctgagccgcgagggcgccgacagccgggggcccggacgcagcccggctcctcccctcctccgccccttccccagcctgacctggcccgccgctgcagcggtgacccctcccccggctgccgccgtcgccgccgcggtgaccccctccccggctgccgccgccgccgcctcggccgaccagggacctgcccgcctgcggctgctccggacctagaggatcaagacataatgggagcatttttagacaagccaaagatggaaaagcataatgcccaggggcagggtaatgggttgcgatatgggctaagcagcatgcaaggctggcgtgttgaaatggaggatgcacatacggctgtgatcggtttgccaagtggacttgaatcgtggtcattctttgctgtgtatgatgggcatgctggttctcaggttgccaaatactgctgtgagcatttgttagatcacatcaccaataaccaggattttaaagggtctgcaggagcaccttctgtggaaaatgtaaagaatggaatcagaacaggttttctggagattgatgaacacatgagagttatgtcagagaagaaacatggtgcagatagaagtgggtcaacagctgtaggtgtcttaatttctccccaacatacttatttcattaactgtggagactcaagaggtttactttgtaggaacaggaaagttcatttcttcacacaagatcacaaaccaagtaatccgctggagaaagaacgaattcagaatgcaggtggctctgtaatgattcagcgtgtgaatggctctctggctgtatcgagggcccttggggattttgattacaaatgtgtccatggaaaaggtcctactgagcagcttgtctcaccagagcctgaagtccatgatattgaaagatctgaagaagatgatcagttcattatccttgcatgtgatggtatctgggatgttatgggaaatgaagagctctgtgattttgtaagatccagacttgaagtcactgatgaccttgagaaagtttgcaatgaagtagtcgacacctgtttgtataagggaagtcgagacaacatgagtgtgattttgatctgttttccaaatgcacccaaagtatcgccagaagcagtgaagaaggaggcagagttggacaagtacctggaatgcagagtagaagaaatcataaagaagcagggggaaggcgtccccgacttagtccatgtgatgcgcacattagcgagtgagaacatccccagcctcccaccagggggtgaattggcaagcaagtaagttacattctgtacactcttatgctttatgtcagtgtatgaaaatgttaggtattcattgataaaatgtttgtttgcctaatttctgaactgatgcagttatctgtgttttaacctgtgatttcaatttttttttagtattagaatatctagagtttgtttagacataggtatcagtatcattgtaactaattgcagtgagggttgtctttattggaa

SEQ ID NO: 449446 - DNA, 2347 bp, Homo sapiens
ttctcataatgtattatgatgtaggggagggaggaaggagggccagggtagggggcacaccctctccctgaatgaaattcatttaggggcactgtctgctcgcatgttctgttctgggagaaaatgggtagcagaagctacaatttgtactaagctaatgaaaagagagaaaagaagaatggggaagagaagggcaaagaaggcaaaaagagaagagaagaaaaagggaggagagagaaggagaaatgagaaaagaggaaaccaaatgaagaggatgtgtgagagaaaaaaatatgaaacagacctagaggatcaagacataatgggagcatttttagacaagccaaagatggaaaagcataatgcccaggggcagggtaatgggttgcgatatgggctaagcagcatgcaaggctggcgtgttgaaatggaggatgcacatacggctgtgatcggtttgccaagtggacttgaatcgtggtcattctttgctgtgtatgatgggcatgctggttctcaggttgccaaatactgctgtgagcatttgttagatcacatcaccaataaccaggattttaaagggtctgcaggagcaccttctgtggaaaatgtaaagaatggaatcagaacaggttttctggagattgatgaacacatgagagttatgtcagagaagaaacatggtgcagatagaagtgggtcaacagctgtaggtgtcttaatttctccccaacatacttatttcattaactgtggagactcaagaggtttactttgtaggaacaggaaagttcatttcttcacacaagatcacaaaccaagtaatccgctggagaaagaacgaattcagaatgcaggtggctctgtaatgattcagcgtgtgaatggctctctggctgtatcgagggcccttggggattttgattacaaatgtgtccatggaaaaggtcctactgagcagcttgtctcaccagagcctgaagtccatgatattgaaagatctgaagaagatgatcagttcattatccttgcatgtgatggtatctgggatgttatgggaaatgaagagctctgtgattttgtaagatccagacttgaagtcactgatgaccttgagaaagtttgcaatgaagtagtcgacacctgtttgtataagggaagtcgagacaacatgagtgtgattttgatctgttttccaaatgcacccaaagtatcgccagaagcagtgaagaaggaggcagagttggacaagtacctggaatgcagagtagaagaaatcataaagaagcagggggaaggcgtccccgacttagtccatgtgatgcgcacattagcgagtgagaacatccccagcctcccaccagggggtgaattggcaagcaagaggaatgttattgaagccgtttacaatagactgaatccttacaaaaatgacgacactgactctacatcaacagatgatatgtggtaaaactgctcatctagccatggagtttaccttcacctccaaaggagagtacagctcaactttgttgaaacttttaacatccatcctcaactttaaggaaggggatatgacatgggtgagaatgattacatcagagaacttcagcagtacaacagctagcccagaactgatttttttttttttttttttgtaaatttgagacttatgtaagcgtgatttcaaaccataattcgtgttgtaaatcagactccagcaatttttgttgtatgattttgtttttttgtaaagtgtaattgtccttgtacaaaatgctcatatttaattatgaactgctttaaatcactatcaaagttacaagaaatgtttggcttattgtgtgatgcaacagatatatagccctttcaagtcatgttgtgtttggacttggggttggaacagggagagcagcagccatgtcagctacacgctcaaatgtgcagatgattatggaaaataacctcaaaatcttacaaagctgaacatccaaggagttattgaaaactatcttaaatgttcttggtaggggagttggcattgttgataaagccagtcccttcatttaactgtctttcaggatgttccttcgttgtttccatgagtattgcaggtaataatacagtgtattcataagaatctcaatcttggggctaaatgccttgtttctttgcacctcttttcaagtccttacatttaattactaattgataagcagcagcttcctacatatagtaggaaactgccacatttttgctatcatgattggctgggcctgctgctgttcctagtaagatattctgaattccattttatcaataaagcttgatttaacaaacaagaaaa

SEQ ID NO: 449447 - DNA, 2828 bp, Homo sapiens
ggcggcgctagggacgggagcgcgcgcgggagctagagagcagtggtctcggcgctcgtccggcccgcagcttcgggtcctcaggcggctgttgctccggaacgggtggttggggaggggggggtggggggactctagacagctgaggcgcgaaagcgatgagtcctcggctcttcctcctccttctccgggacccgctctctgcctccctctccaacgcccggatgatctgagccgcgagggcgccgacagccgggggcccggacgcagcccggctcctcccctcctccgccccttccccagcctgacctggcccgccgctgcagcggtgacccctcccccggctgccgccgtcgccgccgcggtgaccccctccccggctgccgccgccgccgcctcggccgaccagggacctgcccgcctgcggctgctccggacctagaggatcaagacataatgggagcatttttagacaagccaaagatggaaaagcataatgcccaggggcagggtaatgggttgcgatatgggctaagcagcatgcaaggctggcgtgttgaaatggaggatgcacatacggctgtgatcggtttgccaagtggacttgaatcgtggtcattctttgctgtgtatgatgggcatgctggttctcaggttgccaaatactgctgtgagcatttgttagatcacatcaccaataaccaggattttaaagggtctgcaggagcaccttctgtggaaaatgtaaagaatggaatcagaacaggttttctggagattgatgaacacatgagagttatgtcagagaagaaacatggtgcagatagaagtgggtcaacagctgtaggtgtcttaatttctccccaacatacttatttcattaactgtggagactcaagaggtttactttgtaggaacaggaaagttcatttcttcacacaagatcacaaaccaagtaatccgctggagaaagaacgaattcagaatgcaggtggctctgtaatgattcagcgtgtgaatggctctctggctgtatcgagggcccttggggattttgattacaaatgtgtccatggaaaaggtcctactgagcagcttgtctcaccagagcctgaagtccatgatattgaaagatctgaagaagatgatcagttcattatccttgcatgtgatggtatctgggatgttatgggaaatgaagagctctgtgattttgtaagatccagacttgaagtcactgatgaccttgagaaagtttgcaatgaagtagtcgacacctgtttgtataagggaagtcgagacaacatgagtgtgattttgatctgttttccaaatgcacccaaagtatcgccagaagcagtgaagaaggaggcagagttggacaagtacctggaatgcagagtagaagaaatcataaagaagcagggggaaggcgtccccgacttagtccatgtgatgcgcacattagcgagtgagaacatccccagcctcccaccagggggtgaattggcaagcaagaggaatgttattgaagccgtttacaatagactgaatccttacaaaaatgacgacactgactctacatcaacagatgatatgtggtaaaactgctcatctagccatggagtttaccttcacctccaaaggagagtacagctcaactttgttgaaacttttaacatccatcctcaactttaaggaaggggatatgacatgggtgagaatgattacatcagagaacttcagcagtacaacagctagcccagaactgatttttttttttttttttttgtaaatttgagacttatgtaagcgtgatttcaaaccataattcgtgttgtaaatcagactccagcaatttttgttgtatgattttgtttttttgtaaagtgtaattgtccttgtacaaaatgctcatatttaattatgaactgctttaaatcactatcaaagttacaagaaatgtttggcttattgtgtgatgcaacagatatatagccctttcaagtcatgttgtgtttggacttggggttggaacagggagagcagcagccatgtcagctacacgctcaaatgtgcagatgattatggaaaataacctcaaaatcttacaaagctgaacatccaaggagttattgaaaactatcttaaatgttcttggtaggggagttggcattgttgataaagccagtcccttcatttaactgtctttcaggatgttccttcgttgtttccatgagtattgcaggtaataatacagtgtattcataagaatctcaatcttggggctaaatgccttgtttctttgcacctcttttcaagtccttacatttaattactaattgataagcagcagcttcctacatatagtaggaaactgccacatttttgctatcatgattggctgggcctgctgctgttcctagtaagatattctgaattccattttatcaataaagcttgatttaacaaacaagaaaaaaaaaaacaaaaaaacagaaaaagaaaaaaaaacacaaaaaaagaagtaaaagaaaaaagaaggggggggggctacaaaagaactcccctgaggggggccaacagatatacggagcgacgcacaatatgcataggaacaaagggagccccaaatgggagaagcaaaataaaagagaagaacgagcgcagacaataaaaaacgtgatgtacagtcgaaacaacgcgaacaagagaacattcggaaagacgaccccataaacccggaggggaacacacactgggcgacaaccacccaaagaagatataaacgcccgagggaaaataaaagcatcagggggacaagcgcg

SEQ ID NO: 449448 - DNA, 2269 bp, Homo sapiens
ggcggcgctagggacgggagcgcgcgcgggagctagagagcagtggtctcggcgctcgtccggcccgcagcttcgggtcctcaggcggctgttgctccggaacgggtggttggggaggggggggtggggggactctagacagctgaggcgcgaaagcgatgagtcctcggctcttcctcctccttctccgggacccgctctctgcctccctctccaacgcccggatgatctgagccgcgagggcgccgacagccgggggcccggacgcagcccggctcctcccctcctccgccccttccccagcctgacctggcccgccgctgcagcggtgacccctcccccggctgccgccgtcgccgccgcggtgaccccctccccggctgccgccgccgccgcctcggccgaccagggacctgcccgcctgcggctgctccggacctagaggatcaagacataatgggagcatttttagacaagccaaagatggaaaagcataatgcccaggggcagggtaatgggttgcgatatgggctaagcagcatgcaaggctggcgtgttgaaatggaggatgcacatacggctgtgatcggtttgccaagtggacttgaatcgtggtcattctttgctgtgtatgatgggcatgctggttctcaggttgccaaatactgctgtgagcatttgttagatcacatcaccaataaccaggattttaaagggtctgcaggagcaccttctgtggaaaatgtaaagaatggaatcagaacaggttttctggagattgatgaacacatgagagttatgtcagagaagaaacatggtgcagatagaagtgggtcaacagctgtaggtgtcttaatttctccccaacatacttatttcattaactgtggagactcaagaggtttactttgtaggaacaggaaagttcatttcttcacacaagatcacaaaccaagtaatccgctggagaaagaacgaattcagaatgcaggtggctctgtaatgattcagcgtgtgaatggctctctggctgtatcgagggcccttggggattttgattacaaatgtgtccatggaaaaggtcctactgagcagcttgtctcaccagagcctgaagtccatgatattgaaagatctgaagaagatgatcagttcattatccttgcatgtgatggtatctgggatgttatgggaaatgaagagctctgtgattttgtaagatccagacttgaagtcactgatgaccttgagaaagtttgcaatgaagtagtcgacacctgtttgtataagggaagtcgagacaacatgagtgtgattttgatctgttttccaaatgcacccaaagtatcgccagaagcagtgaagaaggaggcagagttggacaagtacctggaatgcagagtagaagaaatcataaagaagcagggggaaggcgtccccgacttagtccatgtgatgcgcacattagcgagtgagaacatccccagcctcccaccagggggtgaattggcaagcaagaggaatgttattgaagccgtttacaatagactgaatccttacaaaaatgacgacactgactctacatcaacagatgatatgtggtaaaactgctcatctagccatggagtttaccttcacctccaaaggagagtacagctcaactttgttgaaacttttaacatccatcctcaactttaaggaaggggatatgacatgggtgagaatgattacatcagagaacttcagcagtacaacagctagcccagaactgatttttttttttttttttttgtaaatttgagacttatgtaagcgtgatttcaaaccataattcgtgttgtaaatcagactccagcaatttttgttgtatgattttgtttttttgtaaagtgtaattgtccttgtacaaaatgctcatatttaattatgaactgctttaaatcactatcaaagttacaagaaatgtttggcttattgtgtgatgcaacagatatatagccctttcaagtcatgttgtgtttggacttggggttggaacagggagagcagcagccatgtcagctacacgctcaaatgtgcagatgattatggaaaataacctcaaaatcttacaaagctgaacatccaaggagttattgaaaactatcttaaatgttcttggtagggattgaatgctgtaagcagccctcttacggcttcgaggtcccgagttcagaaatgagcaaccagggtccaaacccccggggcaaacggtttgaccttagacccc

SEQ ID NO: 449449 - DNA, 1777 bp, Homo sapiens
tgtactctctgaggtgctctggaaggaggggcagctccaccctgggagggactgtggcccaggtactgcccgggtgctactttatgggcagcagctcagttgagttagagtctggaagacctcagaagacctcctgtcctatgaggccctccccatggctttagagacgatctgccgaccctctgggagaaaatccagcaagatgcaagccttcagaatctgggatgttaaccagaagaccttctatctgaggaacaaccaactagttgctggatacttgcaaggaccaaatgtcaatttagaagaaaagatagatgtggtacccattgagcctcatgctctgttcttgggaatccatggagggaagatgtgcctgtcctgtgtcaagtctggtgatgagaccagactccagctggaggcagttaacatcactgacctgagcgagaacagaaagcaggacaagcgcttcgccttcatccgctcagacagtggccccaccaccagttttgagtctgccgcctgccccggttggttcctctgcacagcgatggaagctgaccagcccgtcagcctcaccaatatgcctgacgaaggcgtcatggtcaccaaattctacttccaggaggacgagtagtactgcccaggcctgcctgttcccattcttgcatggcaaggactgcagggactgccagtccccctgccccagggctcccggctatgggggcactgaggaccagccattgaggggtggaccctcagaaggcgtcacaacaacctggtcacaggactctgcctcctcttcaactgaccagcctccatgctgcctccagaatggtctttctaatgtgtgaatcagagcacagcagcccctgcacaaagcccttccatgtcgcctctgcattcaggatcaaaccccgaccacctgcccaacctgctctcctcttgccactgcctcttcctccctcattccaccttcccatgccctggatccatcaggccacttgatgacccccaaccaagtggctcccacaccctgttttacaaaaaagaaaagaccagtccatgagggaggtttttaagggtttgtggaaaatgaaaattaggatttcatgatttttttttttcagtccccgtgaaggagagcccttcatttggagattatgttctttcggggagaggctgaggacttaaaatattcctgcatttgtgaaatgatggtgaaagtaagtggtagcttttcccttctttttcttctttttttgtgatgtcccaacttgtaaaaattaaaagttatggtactatgttagccccataattttttttttccttttaaaacacttccataatctggactcctctgtccaggcactgctgcccagcctccaagctccatctccactccagattttttacagctgcctgcagtactttacctcctatcagaagtttctcagctcccaaggctctgagcaaatgtggctcctgggggttctttcttcctctgctgaaggaataaattgctccttgacattgtagagcttctggcacttggagacttgtatgaaagatggctgtgcctctgcctgtctcccccaccgggctgggagctctgcagagcaggaaacatgactcgtatatgtctcaggtccctgcagggccaagcacctagcctcgctcttggcaggtactcagcgaatgaatgctgtatatgttgggtgcaaagttccctacttcctgtgacttcagctctgttttacaataaaatcttgaaaatgcc

SEQ ID NO: 449450 - DNA, 792 bp, Homo sapiens
acacaggttgctgggaagtaggagaaagctggcagccacaggcctcacccagctcccatgcagcccacagccctaaaggccggtttcactcccaccatgccccaccaacagcaatgagtttacttccaggaagctggtgagcagggctgagaacttgctccaggctacaagcctcccagctgagaaaacgagcgaactcacagttcctcgactgtcccatggagcctgcagtggcaatccgcctccttcaaagggtctgtggactttctcggctttcctgatctcagaaacacagcttttacaaaggataaatgaagagaaattcaccagagatacattgtaatgaatctgtaaatcaccaaagctaaagatattatttcacaagtggaatgacagctgacttctcaacaacaacgaaagcaaggagacagttgaaagacatcttgaaaatggaattagcagttcacaaagcacattcgcatataagggcttgttttgaattgatcttggcagcaattctatgagacaagtaaaagcacaagaggaataggaactgcacctcttccttcagtttcagcttgaataatatcaggaagattcgtatcggtctgagttgggtcacgtacccgacgtgctatagctgaggatgggagcgttggggaccttgtctggcttgttcccaatgcctggaagagtgcctggcacacaggattaagccaacacatatgttttgaatgaatgtgtgcacacatgcatgagctggcggcagtcggggttggggtaagcacgaag

SEQ ID NO: 449451 - DNA, 801 bp, Homo sapiens
agcggagattgctcgcgcagagtcgtgataaagctgaggacttgatacgcgtgttcgcaacctcccatgcagcccacagccctaaaggccggtttcactcccaccatgccccaccaacagcaatgagtttacttccaggaagctggtgagcagggctgagaacttgctccaggctacaagcctcccagctgagaaaacgagcgaactcacagttcctcgactgtcccatggagcctgcagtggcaatccgcctccttcaaagggtctgtggactttctcggctttcctgatctcagaaacacagcttttacaaaggataaatgaagagaaattcaccagagatacattgtaatgaatctgtaaatcaccaaagctaaagatattatttcacaagtggaatgacagctgacttctcaacaacaacgaaagcaaggagacagttgaaagacatcttgaaaatggaattagcagttcacaaagcacattcgcatataagggcttgttttgaattgatcttggcagcaattctatgagacaagtaaaagcacaagaggaataggaactgcacctcttccttcagtttcagcttgaataatatcaggaagattcgtatcggtctgagttgggtcacgtacccgacgtgctatagctgaggatgggagcgttggggaccttgtctggcttgttcccaatgcctggaagagtgcctggcacacaggattaagccaacacatatgttttgaatgaatgtgtgcacacatgcatgagctggcggcagtcggggttggggtaagcacgaag

SEQ ID NO: 449452 - DNA, 2248 bp, Homo sapiens
  misc_feature (1796)..(1796): n is a, c, g, or t
tgtactctctgaggtgctctggaaggaggggcagctccaccctgggagggactgtggcccaggtactgcccgggtgctactttatgggcagcagctcagttgagttagagtctggaagacctcagaagacctcctgtcctatgaggccctccccatggctttagagacgatctgccgaccctctgggagaaaatccagcaagatgcaagccttcagaatctgggatgttaaccagaagaccttctatctgaggaacaaccaactagttgctggatacttgcaaggaccaaatgtcaatttagaagaaaagatagatgtggtacccattgagcctcatgctctgttcttgggaatccatggagggaagatgtgcctgtcctgtgtcaagtctggtgatgagaccagactccagctggaggcagttaacatcactgacctgagcgagaacagaaagcaggacaagcgcttcgccttcatccgctcagacagtggccccaccaccagttttgagtctgccgcctgccccggttggttcctctgcacagcgatggaagctgaccagcccgtcagcctcaccaatatgcctgacgaaggcgtcatggtcaccaaattctacttccaggaggacgagtagtactgcccaggcctgcctgttcccattcttgcatggcaaggactgcagggactgccagtccccctgccccagggctcccggctatgggggcactgaggaccagccattgaggggtggaccctcagaaggcgtcacaacaacctggtcacaggactctgcctcctcttcaactgaccagcctccatgctgcctccagaatggtctttctaatgtgtgaatcagagcacagcagcccctgcacaaagcccttccatgtcgcctctgcattcaggatcaaaccccgaccacctgcccaacctgctctcctcttgccactgcctcttcctccctcattccaccttcccatgccctggatccatcaggccacttgatgacccccaaccaagtggctcccacaccctgttttacaaaaaagaaaagaccagtccatgagggaggtttttaagggtttgtggaaaatgaaaattaggatttcatgatttttttttttcagtccccgtgaaggagagcccttcatttggagattatgttctttcggggagaggctgaggacttaaaatattcctgcatttgtgaaatgatggtgaaagtaagtggtagcttttcccttctttttcttctttttttgtgatgtcccaacttgtaaaaattaaaagttatggtactatgttagccccataattttttttttccttttaaaacacttccataatctggactcctctgtccaggcactgctgcccagcctccaagctccatctccactccagattttttacagctgcctgcagtactttacctcctatcagaagtttctcagctcccaaggctctgagcaaatgtggctcctgggggttctttcttcctctgctgaaggaataaattgctccttgacattgtagagcttctggcacttggagacttgtatgaaagatggctgtgcctctgcctgtctcccccaccgggctgggagctctgcagagcaggaaacatgactcgtatatgtctcaggtccctgcagggccaagcacctagcctcgctcttggcaggtactcagcgaatgaatgctgtatatgttgggtgcaaagttccctacttcctgtgacttcagctctgttttacaataaaatcttgaaaatgccaaaaaaaataaaaaaatanacctctccgaattcggcacgagggaaatgggaagaggattgccatggcctggccatcttgttgctgcttggttagatcatatagctaatgaattaggcaggggagctattttttgaagatgatgaactaaatgttgaagacaagtttgagatctgtaaaatgtgattttttacttccacttataatacttgtgattggggaggtttgtggaaattcaattatgatgaaaaacctatcttttttgtaatgttggcatacttggggaatttagtggcaaatacattccccagcaggccttttgttggttgcactaactgcaaggttgctgggaagtagagtccatttggttgatgagctttgactgcggttttggaaccttacctctgggccttagcccaatatgctgtcttgggtcctattcaaataaagttatttctcctggtctcaaaaaa

SEQ ID NO: 449453 - DNA, 1840 bp, Homo sapiens
tgtactctctgaggtgctctggaaggaggggcagctccaccctgggagggactgtggcccaggtactgcccgggtgctactttatgggcagcagctcagttgagttagagtctggaagacctcagaagacctcctgtcctatgaggccctccccatggctttagctgacttgtatgaagaaggaggtggaggaggaggagaaggtgaagacaatgctgactcaaaggagacgatctgccgaccctctgggagaaaatccagcaagatgcaagccttcagaatctgggatgttaaccagaagaccttctatctgaggaacaaccaactagttgctggatacttgcaaggaccaaatgtcaatttagaagaaaagatagatgtggtacccattgagcctcatgctctgttcttgggaatccatggagggaagatgtgcctgtcctgtgtcaagtctggtgatgagaccagactccagctggaggcagttaacatcactgacctgagcgagaacagaaagcaggacaagcgcttcgccttcatccgctcagacagtggccccaccaccagttttgagtctgccgcctgccccggttggttcctctgcacagcgatggaagctgaccagcccgtcagcctcaccaatatgcctgacgaaggcgtcatggtcaccaaattctacttccaggaggacgagtagtactgcccaggcctgcctgttcccattcttgcatggcaaggactgcagggactgccagtccccctgccccagggctcccggctatgggggcactgaggaccagccattgaggggtggaccctcagaaggcgtcacaacaacctggtcacaggactctgcctcctcttcaactgaccagcctccatgctgcctccagaatggtctttctaatgtgtgaatcagagcacagcagcccctgcacaaagcccttccatgtcgcctctgcattcaggatcaaaccccgaccacctgcccaacctgctctcctcttgccactgcctcttcctccctcattccaccttcccatgccctggatccatcaggccacttgatgacccccaaccaagtggctcccacaccctgttttacaaaaaagaaaagaccagtccatgagggaggtttttaagggtttgtggaaaatgaaaattaggatttcatgatttttttttttcagtccccgtgaaggagagcccttcatttggagattatgttctttcggggagaggctgaggacttaaaatattcctgcatttgtgaaatgatggtgaaagtaagtggtagcttttcccttctttttcttctttttttgtgatgtcccaacttgtaaaaattaaaagttatggtactatgttagccccataattttttttttccttttaaaacacttccataatctggactcctctgtccaggcactgctgcccagcctccaagctccatctccactccagattttttacagctgcctgcagtactttacctcctatcagaagtttctcagctcccaaggctctgagcaaatgtggctcctgggggttctttcttcctctgctgaaggaataaattgctccttgacattgtagagcttctggcacttggagacttgtatgaaagatggctgtgcctctgcctgtctcccccaccgggctgggagctctgcagagcaggaaacatgactcgtatatgtctcaggtccctgcagggccaagcacctagcctcgctcttggcaggtactcagcgaatgaatgctgtatatgttgggtgcaaagttccctacttcctgtgacttcagctctgttttacaataaaatcttgaaaatgcc

SEQ ID NO: 449454 - DNA, 2335 bp, Homo sapiens
agcggagattgctcgcgcagagtcgtgataaagctgaggacttgatacgcgtgttcgcaacctcccatgcagcccacagccctaaaggccggtttcactcccaccatgccccaccaacagcaatgagtttacttccaggaagctggtgagcagggctgagaacttgctccaggctacaagcctcccagctgagaaaacgagcgaactcacagttcctcgactgtcccatggagcctgcagtggcaatccgcctccttcaaagggtctgtggactttctcggctttcctggaattagcagttcacaaagcacattcgcatataagggcttgttttgaattgatcttggcagcaattctatgagacaagtaaaagcacaagaggaataggaactgcacctcttccttcagtttcagcttgaataatatcaggaagattcgtatcggtctgagttgggtcacgtacccgacgtgctatagctgaggatgggctgacttgtatgaagaaggaggtggaggaggaggagaaggtgaagacaatgctgactcaaaggggggattataaaactaatcatcaaagccaagaaggcaagagcaagcatgtaccgctgaaaacacaagataactgcataagtaatgactttcagtgcagattcatagctaacccataaactgctggggcaaaaatcatcttggaaggctctgaacctcagaaaggattcacaagacgatctgccgaccctctgggagaaaatccagcaagatgcaagccttcagaatctgggatgttaaccagaagaccttctatctgaggaacaaccaactagttgctggatacttgcaaggaccaaatgtcaatttagaagaaaagatagatgtggtacccattgagcctcatgctctgttcttgggaatccatggagggaagatgtgcctgtcctgtgtcaagtctggtgatgagaccagactccagctggaggcagttaacatcactgacctgagcgagaacagaaagcaggacaagcgcttcgccttcatccgctcagacagtggccccaccaccagttttgagtctgccgcctgccccggttggttcctctgcacagcgatggaagctgaccagcccgtcagcctcaccaatatgcctgacgaaggcgtcatggtcaccaaattctacttccaggaggacgagtagtactgcccaggcctgcctgttcccattcttgcatggcaaggactgcagggactgccagtccccctgccccagggctcccggctatgggggcactgaggaccagccattgaggggtggaccctcagaaggcgtcacaacaacctggtcacaggactctgcctcctcttcaactgaccagcctccatgctgcctccagaatggtctttctaatgtgtgaatcagagcacagcagcccctgcacaaagcccttccatgtcgcctctgcattcaggatcaaaccccgaccacctgcccaacctgctctcctcttgccactgcctcttcctccctcattccaccttcccatgccctggatccatcaggccacttgatgacccccaaccaagtggctcccacaccctgttttacaaaaaagaaaagaccagtccatgagggaggtttttaagggtttgtggaaaatgaaaattaggatttcatgatttttttttttcagtccccgtgaaggagagcccttcatttggagattatgttctttcggggagaggctgaggacttaaaatattcctgcatttgtgaaatgatggtgaaagtaagtggtagcttttcccttctttttcttctttttttgtgatgtcccaacttgtaaaaattaaaagttatggtactatgttagccccataattttttttttccttttaaaacacttccataatctggactcctctgtccaggcactgctgcccagcctccaagctccatctccactccagattttttacagctgcctgcagtactttacctcctatcagaagtttctcagctcccaaggctctgagcaaatgtggctcctgggggttctttcttcctctgctgaaggaataaattgctccttgacattgtagagcttctggcacttggagacttgtatgaaagatggctgtgcctctgcctgtctcccccaccgggctgggagctctgcagagcaggaaacatgactcgtatatgtctcaggtccctgcagggccaagcacctagcctcgctcttggcaggtactcagcgaatgaatgctgtatatgttgggtgcaaagttccctacttcctgtgacttcagctctgttttacaataaaatcttgaaaatgcc

SEQ ID NO: 449455 - DNA, 3715 bp, Homo sapiens
agcggagattgctcgcgcagagtcgtgataaagctgaggacttgatacgcgtgttcgcaacctcccatgcagcccacagccctaaaggccggtttcactcccaccatgccccaccaacagcaatgagtttacttccaggaagctggtgagcagggctgagaacttgctccaggctacaagcctcccagctgagaaaacgagcgaactcacagttcctcgactgtcccatggagcctgcagtggcaatccgcctccttcaaagggtctgtggactttctcggctttcctggaattagcagttcacaaagcacattcgcatataagggcttgttttgaattgatcttggcagcaattctatgagacaagtaaaagcacaagaggaataggaactgcacctcttccttcagtttcagcttgaataatatcaggaagattcgtatcggtctgagttgggtcacgtacccgacgtgctatagctgaggatgggctgacttgtatgaagaaggaggtggaggaggaggagaaggtgaagacaatgctgactcaaaggggggattataaaactaatcatcaaagccaagaaggcaagagcaagcatgtaccgctgaaaacacaagataactgcataagtaatgactttcagtgcagattcatagctaacccataaactgctggggcaaaaatcatcttggaaggctctgaacctcagaaaggattcacaagacgatctgccgaccctctgggagaaaatccagcaagatgcaagccttcagaatctgggatgttaaccagaagaccttctatctgaggaacaaccaactagttgctggatacttgcaaggaccaaatgtcaatttagaaggtgagtggttgccaggaaagccaatgtatgtgggcatcacgtcactttgcccgtctgtctgcagcagcatggcctgcctgcacaaaccctaggtgcaatgtcctaatccttgttgggtctttgtattcaagtttgaagctgggagggcctggctactgaagggcacatatgagggcagcctgaagagggtgtggagaggtagagtctaggtcagaggtcagtgcctataggcacagtggtcccagggccacagctgggaagggcaaataccagaaggcaaggttgaccattcccttcctcaagtgcctattaaggctccatgttcctatgttgttcaaaccctaactcaatcccaaattaatccaccatgtataaggttgagctatgtctcttattcctggacaccatactcagccatattctggtccacacattaaacaagctggatgaccttgaagaagcttcacccactctgttcctcagctttcccttcagtgggatgatatcaactggacaacaggatgtgcgattcttttagttccagccttccaggatgttttcactcccctgtttgttgttgtaggatggtattacctccaccttcccaccttccctatgccctggttctgtctcctgtgcctcgctctgaaagtggatgagacctacaattcctgtcctggtagttctcctaatgaacacactgaagcacgaggaagctgagatttttgttgctacatgagagcatggaggcctcttagggagagaggaggttcagagactcctaggctcctgtggagccccactcatggccttgttcattttccctgcccctcagcaacactcctattgacctggagcacaggtatcctggggaaagtgagggaaatatggacatcacatggaacaacatccaggagactcaggcctctaggagtaactgggtagtgtgcatcctggggaaagtgagggaaatatggacatcacatggaacaacatccaggagactcaggcctctaggagtaactgggtagtgtgcatcctggggaaagtgagggaaatatggacatcacatggaacaacatccaggagactcaggcctctaggagtaactgggtagtgtgcatcctggggaaagtgagggaaatatggacatcacatggaacaacatccaggagactcaggcctctaggagtaactgggtagtgtgcttggtttaatcttctatttacctgcagaccaggaagatgagacctctctgcccttctgacctcgggattttagttttgtggggaccaggggagatagaaaaatacccggggtctcttcattattgctgcttcctcttctattaacctgaccctcccctctgttcttccccagaaaagatagatgtggtacccattgagcctcatgctctgttcttgggaatccatggagggaagatgtgcctgtcctgtgtcaagtctggtgatgagaccagactccagctggaggcagttaacatcactgacctgagcgagaacagaaagcaggacaagcgcttcgccttcatccgctcagacagtggccccaccaccagttttgagtctgccgcctgccccggttggttcctctgcacagcgatggaagctgaccagcccgtcagcctcaccaatatgcctgacgaaggcgtcatggtcaccaaattctacttccaggaggacgagtagtactgcccaggcctgcctgttcccattcttgcatggcaaggactgcagggactgccagtccccctgccccagggctcccggctatgggggcactgaggaccagccattgaggggtggaccctcagaaggcgtcacaacaacctggtcacaggactctgcctcctcttcaactgaccagcctccatgctgcctccagaatggtctttctaatgtgtgaatcagagcacagcagcccctgcacaaagcccttccatgtcgcctctgcattcaggatcaaaccccgaccacctgcccaacctgctctcctcttgccactgcctcttcctccctcattccaccttcccatgccctggatccatcaggccacttgatgacccccaaccaagtggctcccacaccctgttttacaaaaaagaaaagaccagtccatgagggaggtttttaagggtttgtggaaaatgaaaattaggatttcatgatttttttttttcagtccccgtgaaggagagcccttcatttggagattatgttctttcggggagaggctgaggacttaaaatattcctgcatttgtgaaatgatggtgaaagtaagtggtagcttttcccttctttttcttctttttttgtgatgtcccaacttgtaaaaattaaaagttatggtactatgttagccccataattttttttttccttttaaaacacttccataatctggactcctctgtccaggcactgctgcccagcctccaagctccatctccactccagattttttacagctgcctgcagtactttacctcctatcagaagtttctcagctcccaaggctctgagcaaatgtggctcctgggggttctttcttcctctgctgaaggaataaattgctccttgacattgtagagcttctggcacttggagacttgtatgaaagatggctgtgcctctgcctgtctcccccaccgggctgggagctctgcagagcaggaaacatgactcgtatatgtctcaggtccctgcagggccaagcacctagcctcgctcttggcaggtactcagcgaatgaatgctgtatatgttgggtgcaaagttccctacttcctgtgacttcagctctgttttacaataaaatcttgaaaatgcc

SEQ ID NO: 449456 - DNA, 1428 bp, Homo sapiens
  misc_feature (21)..(21): n is a, c, g, or t
tacgggcacgcgaccgcgcgncgggaagaggccggccgtgcagtcggtgagagaccagacccagcggaggcagttaacatcactgacctgagcgagaacagaaagcaggacaagcgcttcgccttcatccgctcagacagtggccccaccaccagttttgagtctgccgcctgccccggttggttcctctgcacagcgatggaagctgaccagcccgtcagcctcaccaatatgcctgacgaaggcgtcatggtcaccaaattctacttccaggaggacgagtagtactgcccaggcctgcctgttcccattcttgcatggcaaggactgcagggactgccagtccccctgccccagggctcccggctatgggggcactgaggaccagccattgaggggtggaccctcagaaggcgtcacaacaacctggtcacaggactctgcctcctcttcaactgaccagcctccatgctgcctccagaatggtctttctaatgtgtgaatcagagcacagcagcccctgcacaaagcccttccatgtcgcctctgcattcaggatcaaaccccgaccacctgcccaacctgctctcctcttgccactgcctcttcctccctcattccaccttcccatgccctggatccatcaggccacttgatgacccccaaccaagtggctcccacaccctgttttacaaaaaagaaaagaccagtccatgagggaggtttttaagggtttgtggaaaatgaaaattaggatttcatgatttttttttttcagtccccgtgaaggagagcccttcatttggagattatgttctttcggggagaggctgaggacttaaaatattcctgcatttgtgaaatgatggtgaaagtaagtggtagcttttcccttctttttcttctttttttgtgatgtcccaacttgtaaaaattaaaagttatggtactatgttagccccataattttttttttccttttaaaacacttccataatctggactcctctgtccaggcactgctgcccagcctccaagctccatctccactccagattttttacagctgcctgcagtactttacctcctatcagaagtttctcagctcccaaggctctgagcaaatgtggctcctgggggttctttcttcctctgctgaaggaataaattgctccttgacattgtagagcttctggcacttggagacttgtatgaaagatggctgtgcctctgcctgtctcccccaccgggctgggagctctgcagagcaggaaacatgactcgtatatgtctcaggtccctgcagggccaagcacctagcctcgctcttggcaggtactcagcgaatgaatgctgtatatgttgggtgcaaagttccctacttcctgtgacttcagctctgttttacaataaaatcttgaaaatgcc

SEQ ID NO: 449457 - DNA, 1364 bp, Homo sapiens
tgtactctctgaggtgctctggaaggaggggcagctccaccctgggagggactgtggcccaggtactgcccgggtgctactttatgggcagcagctcagttgagttagagtctggaagacctcagaagacctcctgtcctatgaggccctccccatggctttagagacgatctgccgaccctctgggagaaaatccagcaagatgcaagccttcagaatctgggatgttaaccagaagaccttctatctgaggaacaaccaactagttgctggatacttgcaaggaccaaatgtcaatttagaagaaaagatagatgtggtacccattgagcctcatgctctgttcttgggaatccatggagggaagatgtgcctgtcctgtgtcaagtctggtgatgagaccagactccagctggaggcagttaacatcactgacctgagcgagaacagaaagcaggacaagcgcttcgccttcatccgctcagacagtggccccaccaccagttttgagtctgccgcctgccccggttggttcctctgcacagcgatggaagctgaccagcccgtcagcctcaccaatatgcctgacgaaggcgtcatggtcaccaaattctacttccaggaggacgagtagtactgcccaggcctgcctgttcccattcttgcatggcaaggactgcagggactgccagtccccctgccccagggctcccggctatgggggcactgaggaccagccattgaggggtggaccctcagaaggcgtcacaacaacctggtcacaggactctgcctcctcttcaactgaccagcctccatgctgcctccagaatggtctttctaatgtgtgaatcagagcacagcagcccctgcacaaagcccttccatgtcgcctctgcattcaggatcaaaccccgaccacctgcccaacctgctctcctcttgccactgcctcttcctccctcattccaccttctacagcagccccagatcaccaaccacaacactctcacctgccagcatgacaagcctaggcgtcggtgaagaattcaccacctcccgtagccaaccaggttctactcactcaacagtgtcacctgccagcaccaccacgccaggcctcagtgaggaatctaccaccgtctacagcagcagcccaggctcaactgaaaccacagtgttccctcgcagcaccacaacctcagctcgtggaggcatctacacccacccacagcagcactggctcgctacacacaacactgacccctgccagctccacaagcgctggccttcaggaagaatctaccacctttccagagctggccaagctcaagtgacacaacaccttcacccccggcacccac

SEQ ID NO: 449458 - DNA, 593 bp, Homo sapiens
agcggagattgctcgcgcagagtcgtgataaagctgaggacttgatacgcgtgttcgcaacctcccatgcagcccacagccctaaaggccggtttcactcccaccatgccccaccaacagcaatgagtttacttccaggaagctggtgagcagggctgagaacttgctccaggctacaagcctcccagctgagaaaacgagcgaactcacagttcctcgactgtcccatggagcctgcagtggcaatccgcctccttcaaagggtctgtggactttctcggctttcctggaattagcagttcacaaagcacattcgcatataagggcttgttttgaattgatcttggcagcaattctatgagacaagtaaaagcacaagaggaataggaactgcacctcttccttcagtttcagcttgaataatatcaggaagattcgtatcggtctgagttgggtcacgtacccgacgtgctatagctgaggatggggtaagctgattggagtttgcaacactgttcacagagccaagatatggaaagaacctaaatgtcaactggtggatgaatggataaagaaattgtggtatatacata

SEQ ID NO: 449459 - DNA, 254 bp, Homo sapiens
ctggcacttggagacttgtatgaaagatggctgtgcctctgcctgtctcccccaccgggctgggagctctgcagagcaggaaacatgactcgtatatgtctcaggtccctgcagggccaagcacctagcctcgctcttggcaggtactcagcgaatgaatgctgtatatgttgggtgcaaagttccctacttcctgtgacttcagctctgttttacaataaaatcttgaaaatgcctatattgttgactatgtc

SEQ ID NO: 449460 - DNA, 1741 bp, Homo sapiens
atttctttataaaccacaactctgggcccgcaatggcagtccactgccttgctgcagtcacagaatggaaatctgcagaggcctccgcagtcacctaatcactctcctcctcttcctgttccattcagagacgatctgccgaccctctgggagaaaatccagcaagatgcaagccttcagaatctgggatgttaaccagaagaccttctatctgaggaacaaccaactagttgctggatacttgcaaggaccaaatgtcaatttagaagaaaagatagatgtggtacccattgagcctcatgctctgttcttgggaatccatggagggaagatgtgcctgtcctgtgtcaagtctggtgatgagaccagactccagctggaggcagttaacatcactgacctgagcgagaacagaaagcaggacaagcgcttcgccttcatccgctcagacagtggccccaccaccagttttgagtctgccgcctgccccggttggttcctctgcacagcgatggaagctgaccagcccgtcagcctcaccaatatgcctgacgaaggcgtcatggtcaccaaattctacttccaggaggacgagtagtactgcccaggcctgcctgttcccattcttgcatggcaaggactgcagggactgccagtccccctgccccagggctcccggctatgggggcactgaggaccagccattgaggggtggaccctcagaaggcgtcacaacaacctggtcacaggactctgcctcctcttcaactgaccagcctccatgctgcctccagaatggtctttctaatgtgtgaatcagagcacagcagcccctgcacaaagcccttccatgtcgcctctgcattcaggatcaaaccccgaccacctgcccaacctgctctcctcttgccactgcctcttcctccctcattccaccttcccatgccctggatccatcaggccacttgatgacccccaaccaagtggctcccacaccctgttttacaaaaaagaaaagaccagtccatgagggaggtttttaagggtttgtggaaaatgaaaattaggatttcatgatttttttttttcagtccccgtgaaggagagcccttcatttggagattatgttctttcggggagaggctgaggacttaaaatattcctgcatttgtgaaatgatggtgaaagtaagtggtagcttttcccttctttttcttctttttttgtgatgtcccaacttgtaaaaattaaaagttatggtactatgttagccccataattttttttttccttttaaaacacttccataatctggactcctctgtccaggcactgctgcccagcctccaagctccatctccactccagattttttacagctgcctgcagtactttacctcctatcagaagtttctcagctcccaaggctctgagcaaatgtggctcctgggggttctttcttcctctgctgaaggaataaattgctccttgacattgtagagcttctggcacttggagacttgtatgaaagatggctgtgcctctgcctgtctcccccaccgggctgggagctctgcagagcaggaaacatgactcgtatatgtctcaggtccctgcagggccaagcacctagcctcgctcttggcaggtactcagcgaatgaatgctgtatatgttgggtgcaaagttccctacttcctgtgacttcagctctgttttacaataaaatcttgaaaatgcc

SEQ ID NO: 449461 - DNA, 1948 bp, Homo sapiens
tgtactctctgaggtgctctggaaggaggggcagctccaccctgggagggactgtggcccaggtactgcccgggtgctactttatgggcagcagctcagttgagttagagtctggaagacctcagaagacctcctgtcctatgaggccctccccatggctttagggggattataaaactaatcatcaaagccaagaaggcaagagcaagcatgtaccgctgaaaacacaagataactgcataagtaatgactttcagtgcagattcatagctaacccataaactgctggggcaaaaatcatcttggaaggctctgaacctcagaaaggattcacaagacgatctgccgaccctctgggagaaaatccagcaagatgcaagccttcagaatctgggatgttaaccagaagaccttctatctgaggaacaaccaactagttgctggatacttgcaaggaccaaatgtcaatttagaagaaaagatagatgtggtacccattgagcctcatgctctgttcttgggaatccatggagggaagatgtgcctgtcctgtgtcaagtctggtgatgagaccagactccagctggaggcagttaacatcactgacctgagcgagaacagaaagcaggacaagcgcttcgccttcatccgctcagacagtggccccaccaccagttttgagtctgccgcctgccccggttggttcctctgcacagcgatggaagctgaccagcccgtcagcctcaccaatatgcctgacgaaggcgtcatggtcaccaaattctacttccaggaggacgagtagtactgcccaggcctgcctgttcccattcttgcatggcaaggactgcagggactgccagtccccctgccccagggctcccggctatgggggcactgaggaccagccattgaggggtggaccctcagaaggcgtcacaacaacctggtcacaggactctgcctcctcttcaactgaccagcctccatgctgcctccagaatggtctttctaatgtgtgaatcagagcacagcagcccctgcacaaagcccttccatgtcgcctctgcattcaggatcaaaccccgaccacctgcccaacctgctctcctcttgccactgcctcttcctccctcattccaccttcccatgccctggatccatcaggccacttgatgacccccaaccaagtggctcccacaccctgttttacaaaaaagaaaagaccagtccatgagggaggtttttaagggtttgtggaaaatgaaaattaggatttcatgatttttttttttcagtccccgtgaaggagagcccttcatttggagattatgttctttcggggagaggctgaggacttaaaatattcctgcatttgtgaaatgatggtgaaagtaagtggtagcttttcccttctttttcttctttttttgtgatgtcccaacttgtaaaaattaaaagttatggtactatgttagccccataattttttttttccttttaaaacacttccataatctggactcctctgtccaggcactgctgcccagcctccaagctccatctccactccagattttttacagctgcctgcagtactttacctcctatcagaagtttctcagctcccaaggctctgagcaaatgtggctcctgggggttctttcttcctctgctgaaggaataaattgctccttgacattgtagagcttctggcacttggagacttgtatgaaagatggctgtgcctctgcctgtctcccccaccgggctgggagctctgcagagcaggaaacatgactcgtatatgtctcaggtccctgcagggccaagcacctagcctcgctcttggcaggtactcagcgaatgaatgctgtatatgttgggtgcaaagttccctacttcctgtgacttcagctctgttttacaataaaatcttgaaaatgcc

SEQ ID NO: 449462 - DNA, 2011 bp, Homo sapiens
tgtactctctgaggtgctctggaaggaggggcagctccaccctgggagggactgtggcccaggtactgcccgggtgctactttatgggcagcagctcagttgagttagagtctggaagacctcagaagacctcctgtcctatgaggccctccccatggctttagctgacttgtatgaagaaggaggtggaggaggaggagaaggtgaagacaatgctgactcaaaggggggattataaaactaatcatcaaagccaagaaggcaagagcaagcatgtaccgctgaaaacacaagataactgcataagtaatgactttcagtgcagattcatagctaacccataaactgctggggcaaaaatcatcttggaaggctctgaacctcagaaaggattcacaagacgatctgccgaccctctgggagaaaatccagcaagatgcaagccttcagaatctgggatgttaaccagaagaccttctatctgaggaacaaccaactagttgctggatacttgcaaggaccaaatgtcaatttagaagaaaagatagatgtggtacccattgagcctcatgctctgttcttgggaatccatggagggaagatgtgcctgtcctgtgtcaagtctggtgatgagaccagactccagctggaggcagttaacatcactgacctgagcgagaacagaaagcaggacaagcgcttcgccttcatccgctcagacagtggccccaccaccagttttgagtctgccgcctgccccggttggttcctctgcacagcgatggaagctgaccagcccgtcagcctcaccaatatgcctgacgaaggcgtcatggtcaccaaattctacttccaggaggacgagtagtactgcccaggcctgcctgttcccattcttgcatggcaaggactgcagggactgccagtccccctgccccagggctcccggctatgggggcactgaggaccagccattgaggggtggaccctcagaaggcgtcacaacaacctggtcacaggactctgcctcctcttcaactgaccagcctccatgctgcctccagaatggtctttctaatgtgtgaatcagagcacagcagcccctgcacaaagcccttccatgtcgcctctgcattcaggatcaaaccccgaccacctgcccaacctgctctcctcttgccactgcctcttcctccctcattccaccttcccatgccctggatccatcaggccacttgatgacccccaaccaagtggctcccacaccctgttttacaaaaaagaaaagaccagtccatgagggaggtttttaagggtttgtggaaaatgaaaattaggatttcatgatttttttttttcagtccccgtgaaggagagcccttcatttggagattatgttctttcggggagaggctgaggacttaaaatattcctgcatttgtgaaatgatggtgaaagtaagtggtagcttttcccttctttttcttctttttttgtgatgtcccaacttgtaaaaattaaaagttatggtactatgttagccccataattttttttttccttttaaaacacttccataatctggactcctctgtccaggcactgctgcccagcctccaagctccatctccactccagattttttacagctgcctgcagtactttacctcctatcagaagtttctcagctcccaaggctctgagcaaatgtggctcctgggggttctttcttcctctgctgaaggaataaattgctccttgacattgtagagcttctggcacttggagacttgtatgaaagatggctgtgcctctgcctgtctcccccaccgggctgggagctctgcagagcaggaaacatgactcgtatatgtctcaggtccctgcagggccaagcacctagcctcgctcttggcaggtactcagcgaatgaatgctgtatatgttgggtgcaaagttccctacttcctgtgacttcagctctgttttacaataaaatcttgaaaatgcc

SEQ ID NO: 449463 - DNA, 3121 bp, Homo sapiens
atttctttataaaccacaactctgggcccgcaatggcagtccactgccttgctgcagtcacagaatggaaatctgcagaggcctccgcagtcacctaatcactctcctcctcttcctgttccattcagagacgatctgccgaccctctgggagaaaatccagcaagatgcaagccttcagaatctgggatgttaaccagaagaccttctatctgaggaacaaccaactagttgctggatacttgcaaggaccaaatgtcaatttagaaggtgagtggttgccaggaaagccaatgtatgtgggcatcacgtcactttgcccgtctgtctgcagcagcatggcctgcctgcacaaaccctaggtgcaatgtcctaatccttgttgggtctttgtattcaagtttgaagctgggagggcctggctactgaagggcacatatgagggcagcctgaagagggtgtggagaggtagagtctaggtcagaggtcagtgcctataggcacagtggtcccagggccacagctgggaagggcaaataccagaaggcaaggttgaccattcccttcctcaagtgcctattaaggctccatgttcctatgttgttcaaaccctaactcaatcccaaattaatccaccatgtataaggttgagctatgtctcttattcctggacaccatactcagccatattctggtccacacattaaacaagctggatgaccttgaagaagcttcacccactctgttcctcagctttcccttcagtgggatgatatcaactggacaacaggatgtgcgattcttttagttccagccttccaggatgttttcactcccctgtttgttgttgtaggatggtattacctccaccttcccaccttccctatgccctggttctgtctcctgtgcctcgctctgaaagtggatgagacctacaattcctgtcctggtagttctcctaatgaacacactgaagcacgaggaagctgagatttttgttgctacatgagagcatggaggcctcttagggagagaggaggttcagagactcctaggctcctgtggagccccactcatggccttgttcattttccctgcccctcagcaacactcctattgacctggagcacaggtatcctggggaaagtgagggaaatatggacatcacatggaacaacatccaggagactcaggcctctaggagtaactgggtagtgtgcatcctggggaaagtgagggaaatatggacatcacatggaacaacatccaggagactcaggcctctaggagtaactgggtagtgtgcatcctggggaaagtgagggaaatatggacatcacatggaacaacatccaggagactcaggcctctaggagtaactgggtagtgtgcatcctggggaaagtgagggaaatatggacatcacatggaacaacatccaggagactcaggcctctaggagtaactgggtagtgtgcttggtttaatcttctatttacctgcagaccaggaagatgagacctctctgcccttctgacctcgggattttagttttgtggggaccaggggagatagaaaaatacccggggtctcttcattattgctgcttcctcttctattaacctgaccctcccctctgttcttccccagaaaagatagatgtggtacccattgagcctcatgctctgttcttgggaatccatggagggaagatgtgcctgtcctgtgtcaagtctggtgatgagaccagactccagctggaggcagttaacatcactgacctgagcgagaacagaaagcaggacaagcgcttcgccttcatccgctcagacagtggccccaccaccagttttgagtctgccgcctgccccggttggttcctctgcacagcgatggaagctgaccagcccgtcagcctcaccaatatgcctgacgaaggcgtcatggtcaccaaattctacttccaggaggacgagtagtactgcccaggcctgcctgttcccattcttgcatggcaaggactgcagggactgccagtccccctgccccagggctcccggctatgggggcactgaggaccagccattgaggggtggaccctcagaaggcgtcacaacaacctggtcacaggactctgcctcctcttcaactgaccagcctccatgctgcctccagaatggtctttctaatgtgtgaatcagagcacagcagcccctgcacaaagcccttccatgtcgcctctgcattcaggatcaaaccccgaccacctgcccaacctgctctcctcttgccactgcctcttcctccctcattccaccttcccatgccctggatccatcaggccacttgatgacccccaaccaagtggctcccacaccctgttttacaaaaaagaaaagaccagtccatgagggaggtttttaagggtttgtggaaaatgaaaattaggatttcatgatttttttttttcagtccccgtgaaggagagcccttcatttggagattatgttctttcggggagaggctgaggacttaaaatattcctgcatttgtgaaatgatggtgaaagtaagtggtagcttttcccttctttttcttctttttttgtgatgtcccaacttgtaaaaattaaaagttatggtactatgttagccccataattttttttttccttttaaaacacttccataatctggactcctctgtccaggcactgctgcccagcctccaagctccatctccactccagattttttacagctgcctgcagtactttacctcctatcagaagtttctcagctcccaaggctctgagcaaatgtggctcctgggggttctttcttcctctgctgaaggaataaattgctccttgacattgtagagcttctggcacttggagacttgtatgaaagatggctgtgcctctgcctgtctcccccaccgggctgggagctctgcagagcaggaaacatgactcgtatatgtctcaggtccctgcagggccaagcacctagcctcgctcttggcaggtactcagcgaatgaatgctgtatatgttgggtgcaaagttccctacttcctgtgacttcagctctgttttacaataaaatcttgaaaatgcc

SEQ ID NO: 449464 - DNA, 1723 bp, Homo sapiens
tgtactctctgaggtgctctggaaggaggggcagctccaccctgggagggactgtggcccaggtactgcccgggtgctactttatgggcagcagctcagttgagttagagtctggaagacctcagaagacctcctgtcctatgaggccctccccatggctttagagacgatctgccgaccctctgggagaaaatccagcaagatgcaagccttcagaatctgggatgttaaccagaagaccttctatctgaggaacaaccaactagttgctggatacttgcaaggaccaaatgtcaatttagaagaaaagatagatgtggtacccattgagcctcatgctctgttcttgggaatccatggagggaagatgtgcctgtcctgtgtcaagtctggtgatgagaccagactccagctggaggcagttaacatcactgacctgagcgagaacagaaagcaggacaagcgcttcgccttcatccgctcagacagtggccccaccaccagttttgagtctgccgcctgccccggttggttcctctgcacagcgatggaagctgaccagcccgtcagcctcaccaatatgcctgacgaaggcgtcatggtcaccaaattctacttccaggaggacgagtagtactgcccaggcctgcctgttcccattcttgcatggcaaggactgcagggactgccagtccccctgccccagggctcccggctatgggggcactgaggaccagccattgaggggtggaccctcagaaggcgtcacaacaacctggtcacaggactctgcctcctcttcaactgaccagcctccatgctgcctccagaatggtctttctaatgtgtgaatcagagcacagcagcccctgcacaaagcccttccatgtcgcctctgcattcaggatcaaaccccgaccacctgcccaacctgctctcctcttgccactgcctcttcctccctcattccaccttcccatgccctggatccatcaggccacttgatgacccccaaccaagtggctcccacaccctgttttacaaaaaagaaaagaccagtccatgagggaggtttttaagggtttgtggaaaatgaaaattaggatttcatgatttttttttttcagtccccgtgaaggagagcccttcatttggagattatgttctttcggggagaggctgaggacttaaaatattcctgcatttgtgaaatgatggtgaaagtaagtggtagcttttcccttctttttcttctttttttgtgatgtcccaacttgtaaaaattaaaagttatggtactatgttagccccataattttttttttccttttaactccatctccactccagattttttacagctgcctgcagtactttacctcctatcagaagtttctcagctcccaaggctctgagcaaatgtggctcctgggggttctttcttcctctgctgaaggaataaattgctccttgacattgtagagcttctggcacttggagacttgtatgaaagatggctgtgcctctgcctgtctcccccaccgggctgggagctctgcagagcaggaaacatgactcgtatatgtctcaggtccctgcagggccaagcacctagcctcgctcttggcaggtactcagcgaatgaatgctgtatatgttgggtgcaaagttccctacttcctgtgacttcagctctgttttacaataaaatcttgaaaatgcc

SEQ ID NO: 449465 - DNA, 5310 bp, Homo sapiens
cgcattgttttcctccgcggatccgcggctggacttggacccagggctctcccgacagcgccctggaacccaaattcaagcaccatccaattcggacgctcatcgcatctcgcctgagcacaaccacggattgcgaactcagcgcagcgcgtggccgctggccgcccgcggcgatctcgatcccgctgacccgaatcctggagcaagtaccccgggcagggaaggggctgcggggaggcggggagggagcaggagggcgcggccggcggggggcaagcttctgaagcgctaggggaccagggaggtgtcggcgcccggtgtgcctggctgacggagagggtcaacgaaattggggtgcagggaggaaggagggacagtggccgagccccgtaactgtactggtgagagcagagtctgggcacctcgttcaattgggctttcgtcgagtcgcatcccgctggactgggaagcgcgaaaagggattatttgaggcgcgctccgtagagagcgtggaaaacctggccccttgctttcccagcaaggaaactagggctccgagacccacggagaactagaccctcctgacgcccctgaagggatgggaagagggacgcatcgttccggactttgtgtcacgggtgctcctctgtccttgtgcaagccggaatctgagcaccctctgaagggttggctcgtgcaaagaggcggcgaatggggccctcgagcaacatcggtcccagcgcctatctccttccttcagcccgctcggcccggggctttgttagactgaggtctcccaaggaggacatccgagctggcaactgcctcctgagcccacggtccccactgagcgccggcctcaggcccgccctcgtcggttctcagcctctggccctgtttccctggcctgggagacccgcctccgctccccaacccccgctcctatcccctcttcgtctgcgcctgcaggcccctccagcccctcctctcgctaacgtggctctgggacccggtcccggcccagactctgctaccggcccctcctcggagccccggatccggtgagggggagacaggtcgagcccctggccctaggcccacctcttttcgaggctttagacacctggattgtcctggttgggggttgggtgggaaggagggtaggtgctgagtgtggggctaagagctaagagtgggggaaatggcttggagaaaggaaagctccggttccacaggctccttggcgcgaccctgctccctctgaggaaggtggactggggcgggcgaccagcccaaaggcttcctgctattgtccccagcccagtctccccttctccatcccttccacagctctcctagactctggctgtgaccccagccattccccagaggtggcttcggggccaggagagagaagggctgtttcctcttcccagcaacgggaggatctggaaaggggagagtcggccaggtctctcccatgtgcttcagatggggtgtgtgaagcagctcggattcttccagggcagagtgatcttttctccaggccaggagttgaggagctgaccagatgctgcttcccagaaacagctacaagaagccctcttaaaggtcagaggtttcctatccccctcaagcccccacaggagtcaccaacccagggccggcttatgggtgagggggcaccccctggggcctgagctgccccgcacaggatgccccgtgccccccacttcatgcccttgctgctactgctgctgctgctctcacttccccatactcaggccgcctttccccaggaccccctccctctgttgatctctgaccttcaaggtacttccccattatcctggtttcggggcctggaggatgatgctgtggctgcagaacttgggctggactttcagagattcctgaccttgaaccggaccttgctagtggctgcccgggatcacgttttctccttcgatcttcaagccgaagaagaaggggaggggctggtgcccaacaagtatctaacatggagaagccaagatgtggagaactgtgctgtacggggaaagctgacggatgagtgctacaactatattcgtgttcttgttccctgggactcccagacgctccttgcctgtggaacgaactcattcagccctgtgtgccgcagctatgggataacttcgctgcagcaggagggtgaggaactgagtgggcaggctcgatgcccctttgatgccacccagtccaacgtggccatctttgcagagggcagcctgtactcagccacagctgcggatttccaggccagtgatgctgtagtttacagaagccttgggccccagcccccactccgctccgccaagtatgactccaagtggctccgagagccacactttgtccaggccttggagcatggagaccatgtctacttcttcttccgcgaggtctctgtggaggatgctcggctggggagggtgcagttctcccgcgtagcccgagtatgtaaacgtgacatgggcggctcgcctcgggccttggaccgccactggacatccttcctgaagcttcggctcaactgctctgtccctggggactctactttctattttgatgttttacaggccttgactgggcctgtgaacctgcatggccgctctgctctctttggggtcttcaccacccagaccaatagcatccctggctctgccgtctgcgccttctacctggatgagattgagcgtgggtttgagggcaagttcaaggagcagaggagtctggatggggcctggactcctgtgtctgaggacagagttccctcacccaggccaggatcctgtgcaggagtagggggagctgccttgttctcctcttcccgagacctccctgatgatgtcctgaccttcatcaaggctcacccgctgctggaccccgctgtaccacctgtcacccatcagcctctactcactctcactagcagggccctactgacccaagtagctgtggatggcatggctggtccccacagtaacatcacagtcatgttccttggctccaatgatgggacagtgctgaaggtgctgaccccaggtgggcgatccgggggacctgagcccatcctcctggaagagattgatgcctacagccctgcccggtgcagtgggaagcggacagcccaaacagcacgacggatcatagggctggagctggacactgagggtcacaggctttttgtggctttttctggctgtattgtctacctccctctcagccggtgtgcccggcatggggcctgtcagaggagctgtttggcttctcaggacccatactgtggatggcatagctccaggggctgtgtggatatcaggggatctggtgggactgatgtggatcaggctgggaaccaggaatccatggagcatggtgactgccaagatggagctactgggagtcagtctggccctggggattctgcttatggcgtgcgccgggacctgcccccagcctcggcctcccgctccgtccccatcccactcctcctggccagtgtggccgcagcttttgccctgggcgcctcagtctctggcctcctggtctcctgtgcttgtcgccgcgcccaccgacgtcggggcaaggacatcgagactccggggctcccgcgccctctctccctccgcagtttggcccggctccacggtgggggcccagagcccccgccgccctccaaggacggggacgcggtgcagacgccgcagctctacaccaccttcctgccgcctccggagggcgtgcccccgccggagctggcctgcctgcccacccccgagtccacgccggagctgccggtcaagcacctccgcgccgccggggacccctgggagtggaaccagaacaggaacaacgccaaggagggtccgggccgctcacggggcgggcacgcggcgggcgggcccgcgccccgcgtgctggtgaggccaccgccgcccggctgtcccgggcaggccgtggaagtcaccaccctggaggaactgctgcgctacctgcacggcccgcagccgcccagaaagggggccgagccccccgcccctttaacctcgcgggcgctcccgccggagcccgcccccgccctcttgggcggccccagccccaggccccacgagtgcgcctcgccgctgaggctggacgtgccccccgagggcaggtgcgcctctgcccccgcccggcccgcgctctccgcccccgctccccggctgggcgtcggcggaggccggaggttgcctttctccggccaccgggccccccctgccctgctcactcgagtcccctcgggaggtccctccaggtactccgggggtcccgggaagcacctcctgtacctgggccggcccgagggctaccggggccgcgccctgaaaagggtggacgtcgagaagccccagttgtccctgaagcctcccctcgtcgggccctcctcccgccaggccgtcccgaacggcggccgtttcaacttttaaagggagcggtccacggcctccagcgtggggagcgcccgagtcctctcggccacgagctggacgctcttcaggacgtttcaccgccccctcgccccgcacctccagccttcccgactcgcagagtctcccgaggccccttttcgcctcgggtttatttattgactgtctttccccctgtcctcgacagaagagtgggaggtgagaagcccgtctcctcagtgagccagcatttcagggggagctggcggactcccactccccgctcccttccagccaagctgccttaactcgcccctcggggctcccccagagactgtgccccgggcgggccgcgcgcgctgtgtccagagtcctcgggcctcctgggtctgggacgtgcctctcctactgtgtaggagcctccgcttcccaatacagccgtgtctgcagccactgcctgacttcactcgggcgggggagggcggcagtcggtcggctcgctctgggcgccctcgctctctgccttcatctgggccctgggctctcccgggtaatgggatggctgcggtcccgccggggggcagtctggaaaggtttcctaaaggagacgagcgaattaacggtgtcgaggtgagccagggccagggggaccccggtaaagtttagttgaggctggggaaggccctcggagctcgtttccagatcgaggtaagagggactttcttaaaggcctagtctatgggatggggcggcggagggaattttttgagaaataaaatgaagctgcagtgtacgttaaaaaaaaaaaccaagggcggccgct

SEQ ID NO: 449466 - DNA, 3211 bp, Homo sapiens
cgcattgttttcctccgcggatccgcggctggacttggacccagggctctcccgacagcgccctggaacccaaattcaagcaccatccaattcggacgctcatcgcatctcgcctgagcacaaccacggattgcgaactcagcgcagcgcgtggccgctggccgcccgcggcgatctcgatcccgctgacccgaatcctggagtcagaggtttcctatccccctcaagcccccacaggagtcaccaacccagggccggcttatgggtgagggggcaccccctggggcctgagctgccccgcacaggatgccccgtgccccccacttcatgcccttgctgctactgctgctgctgctctcacttccccatactcaggccgcctttccccaggaccccctccctctgttgatctctgaccttcaaggtacttccccattatcctggtttcggggcctggaggatgatgctgtggctgcagaacttgggctggactttcagagattcctgaccttgaaccggaccttgctagtggctgcccgggatcacgttttctccttcgatcttcaagccgaagaagaaggggaggggctggtgcccaacaagtatctaacatggagaagccaagatgtggagaactgtgctgtacggggaaagctgacggatgagtgctacaactatattcgtgttcttgttccctgggactcccagacgctccttgcctgtggaacgaactcattcagccctgtgtgccgcagctatgggataacttcgctgcagcaggagggtgaggaactgagtgggcaggctcgatgcccctttgatgccacccagtccaacgtggccatctttgcagagggcagcctgtactcagccacagctgcggatttccaggccagtgatgctgtagtttacagaagccttgggccccagcccccactccgctccgccaagtatgactccaagtggctccgagagccacactttgtccaggccttggagcatggagaccatgtctacttcttcttccgcgaggtctctgtggaggatgctcggctggggagggtgcagttctcccgcgtagcccgagtatgtaaacgtgacatgggcggctcgcctcgggccttggaccgccactggacatccttcctgaagcttcggctcaactgctctgtccctggggactctactttctattttgatgttttacaggccttgactgggcctgtgaacctgcatggccgctctgctctctttggggtcttcaccacccagaccaatagcatccctggctctgccgtctgcgccttctacctggatgagattgagcgtgggtttgagggcaagttcaaggagcagaggagtctggatggggcctggactcctgtgtctgaggacagagttccctcacccaggccaggatcctgtgcaggagtagggggagctgccttgttctcctcttcccgagacctccctgatgatgtcctgaccttcatcaaggctcacccgctgctggaccccgctgtaccacctgtcacccatcagcctctactcactctcactagcagggccctactgacccaagtagctgtggatggcatggctggtccccacagtaacatcacagtcatgttccttggctccaatgatgggacagtgctgaaggtgctgaccccaggtgggcgatccgggggacctgagcccatcctcctggaagagattgatgcctacagccctgcccggtgcagtgggaagcggacagcccaaacagcacgacggatcatagggctggagctggacactgagggtcacaggctttttgtggctttttctggctgtattgtctacctccctctcagccggtgtgcccggcatggggcctgtcagaggagctgtttggcttctcaggacccatactgtggatggcatagctccaggggctgtgtggatatcaggggatctggtgggactgatgtggatcaggctgggaaccaggaatccatggagcatggtgactgccaagatggagctactgggagtcagtctggccctggggattctgcttatggcgtgcgccgggacctgcccccagcctcggcctcccgctccgtccccatcccactcctcctggccagtgtggccgcagcttttgccctgggcgcctcagtctctggcctcctggtctcctgtgcttgtcgccgcgcccaccgacgtcggggcaaggacatcgagactccggggctcccgcgccctctctccctccgcagtttggcccggctccacggtgggggcccagagcccccgccgccctccaaggacggggacgcggtgcagacgccgcagctctacaccaccttcctgccgcctccggagggcgtgcccccgccggagctggcctgcctgcccacccccgagtccacgccggagctgccggtcaagcacctccgcgccgccggggacccctgggagtggaaccagaacaggaacaacgccaaggagggtccgggccgctcacggggcgggcacgcggcgggcgggcccgcgccccgcgtgctggtgaggccaccgccgcccggctgtcccgggcaggccgtggaagtcaccaccctggaggaactgctgcgctacctgcacggcccgcagccgcccagaaagggggccgagccccccgcccctttaacctcgcgggcgctcccgccggagcccgcccccgccctcttgggcggccccagccccaggccccacgagtgcgcctcgccgctgaggctggacgtgccccccgagggcagggagcggtccacggcctccagcgtggggagcgcccgagtcctctcggccacgagctggacgctcttcaggacgtttcaccgccccctcgccccgcacctccagccttcccgactcgcagagtctcccgaggccccttttcgcctcgggtttatttattgactgtctttccccctgtcctcgacagaagagtgggaggtgagaagcccgtctcctcagtgagccagcatttcagggggagctggcggactcccactccccgctcccttccagccaagctgccttaactcgcccctcggggctcccccagagactgtgccccgggcgggccgcgcgcgctgtgtccagagtcctcgggcctcctgggtctgggacgtgcctctcctactgtgtaggagcctccgcttcccaatacagccgtgtctgc

SEQ ID NO: 449467 - DNA, 2270 bp, Homo sapiens
cgcattgttttcctccgcggatccgcggctggacttggacccagggctctcccgacagcgccctggaacccaaattcaagcaccatccaattcggacgctcatcgcatctcgcctgagcacaaccacggattgcgaactcagcgcagcgcgtggccgctggccgcccgcggcgatctcgatcccgctgacccgaatcctggagtcagaggtttcctatccccctcaagcccccacaggagtcaccaacccagggccggcttatgggtgagggggcaccccctggggcctgagctgccccgcacaggatgccccgtgccccccacttcatgcccttgctgctactgctgctgctgctctcacttccccatactcaggccgcctttccccaggaccccctccctctgttgatctctgaccttcaaggtacttccccattatcctggtttcggggcctggaggatgatgctgtggctgcagaacttgggctggactttcagagattcctgaccttgaaccggaccttgctagtggctgcccgggatcacgttttctccttcgatcttcaagccgaagaagaaggggaggggctggtgcccaacaagtatctaacatggagaagccaagatgtggagaactgtgctgtacggggaaagctgacggatgagtgctacaactatattcgtgttcttgttccctgggactcccagacgctccttgcctgtggaacgaactcattcagccctgtgtgccgcagctatgggataacttcgctgcagcaggagggtgaggaactgagtgggcaggctcgatgcccctttgatgccacccagtccaacgtggccatctttgcagagggcagcctgtactcagccacagctgcggatttccaggccagtgatgctgtagtttacagaagccttgggccccagcccccactccgctccgccaagtatgactccaagtggctccgagagccacactttgtccaggccttggagcatggagaccatgtctacttcttcttccgcgaggtctctgtggaggatgctcggctggggagggtgcagttctcccgcgtagcccgagtatgtaaacgtgacatgggcggctcgcctcgggccttggaccgccactggacatccttcctgaagcttcggctcaactgctctgtccctggggactctactttctattttgatgttttacaggccttgactgggcctgtgaacctgcatggccgctctgctctctttggggtcttcaccacccagaccaatagcatccctggctctgccgtctgcgccttctacctggatgagattgagcgtgggtttgagggcaagttcaaggagcagaggagtctggatggggcctggactcctgtgtctgaggacagagttccctcacccaggccaggatcctgtgcaggagtagggggagctgccttgttctcctcttcccgagacctccctgatgatgtcctgaccttcatcaaggctcacccgctgctggaccccgctgtaccacctgtcacccatcagcctctactcactctcactagcagggccctactgacccaagtagctgtggatggcatggctggtccccacagtaacatcacagtcatgttccttggctccaatgatgggacagtgctgaaggtgctgaccccaggtgggcgatccgggggacctgagcccatcctcctggaagagattgatgcctacagccctgcccggtgcagtgggaagcggacagcccaaacagcacgacggatcatagggctggagctggacactgagggtcacaggctttttgtggctttttctggctgtattgtctacctccctctcagccggtgtgcccggcatggggcctgtcagaggagctgtttggcttctcaggacccatactgtggatggcatagctccaggggctgtgtggatatcaggggatctggtgggactgatgtggatcaggctgggaaccaggaatccatggagcatggtgactgccaagatggagctactgggagtcagtctggccctggggattctgcttatggtgagtcctcttgtcccaacctcaccttcccttgctcagcccacatacctgagtgtgtgtcctgtagcagcagcagagcagcattctgaataccctgggagtatcggaaaagggtcggcatcctccagatacccagcatgtagctcagtacttggcacacagtagggtactttttgaacaaataaatcaatgtcctgcatgatga

SEQ ID NO: 449468 - DNA, 303 bp, Homo sapiens
ctcccagtgaccccctttgccaaggctagccctgtagttctagcagtttctagaaaggggccatccccttcccctgcatctctgggcataaagccaccagcacctttgtaaccaaactattaagaagtgtcatcagccccctcccattttcaaggcagcatctcccctacccaagcgtcagcagacttttcttgaatttttacatttacttgtaagggatgtggtaaggggagcataatgcagtctcttctctcctttgtcctgtcttccatcaggtcagaggtttcctatccccctcaagcc

SEQ ID NO: 449469 - DNA, 3526 bp, Homo sapiens
cgcattgttttcctccgcggatccgcggctggacttggacccagggctctcccgacagcgccctggaacccaaattcaagcaccatccaattcggacgctcatcgcatctcgcctgagcacaaccacggattgcgaactcagcgcagcgcgtggccgctggccgcccgcggcgatctcgatcccgctgacccgaatcctggagtcagaggtttcctatccccctcaagcccccacaggagtcaccaacccagggccggcttatgggtgagggggcaccccctggggcctgagctgccccgcacaggatgccccgtgccccccacttcatgcccttgctgctactgctgctgctgctctcacttccccatactcaggccgcctttccccaggaccccctccctctgttgatctctgaccttcaaggtacttccccattatcctggtttcggggcctggaggatgatgctgtggctgcagaacttgggctggactttcagagattcctgaccttgaaccggaccttgctagtggctgcccgggatcacgttttctccttcgatcttcaagccgaagaagaaggggaggggctggtgcccaacaagtatctaacatggagaagccaagatgtggagaactgtgctgtacggggaaagctgacggatgagtgctacaactatattcgtgttcttgttccctgggactcccagacgctccttgcctgtggaacgaactcattcagccctgtgtgccgcagctatgggataacttcgctgcagcaggagggtgaggaactgagtgggcaggctcgatgcccctttgatgccacccagtccaacgtggccatctttgcagagggcagcctgtactcagccacagctgcggatttccaggccagtgatgctgtagtttacagaagccttgggccccagcccccactccgctccgccaagtatgactccaagtggctccgagagccacactttgtccaggccttggagcatggagaccatgtctacttcttcttccgcgaggtctctgtggaggatgctcggctggggagggtgcagttctcccgcgtagcccgagtatgtaaacgtgacatgggcggctcgcctcgggccttggaccgccactggacatccttcctgaagcttcggctcaactgctctgtccctggggactctactttctattttgatgttttacaggccttgactgggcctgtgaacctgcatggccgctctgctctctttggggtcttcaccacccagaccaatagcatccctggctctgccgtctgcgccttctacctggatgagattgagcgtgggtttgagggcaagttcaaggagcagaggagtctggatggggcctggactcctgtgtctgaggacagagttccctcacccaggccaggatcctgtgcaggagtagggggagctgccttgttctcctcttcccgagacctccctgatgatgtcctgaccttcatcaaggctcacccgctgctggaccccgctgtaccacctgtcacccatcagcctctactcactctcactagcagggccctactgacccaagtagctgtggatggcatggctggtccccacagtaacatcacagtcatgttccttggctccaatgatgggacagtgctgaaggtgctgaccccaggtgggcgatccgggggacctgagcccatcctcctggaagagattgatgcctacagccctgcccggtgcagtgggaagcggacagcccaaacagcacgacggatcatagggctggagctggacactgagggtcacaggctttttgtggctttttctggctgtattgtctacctccctctcagccggtgtgcccggcatggggcctgtcagaggagctgtttggcttctcaggacccatactgtggatggcatagctccaggggctgtgtggatatcaggggatctggtgggactgatgtggatcaggctgggaaccaggaatccatggagcatggtgactgccaagatggagctactgggagtcagtctggccctggggattctgcttatggcgtgcgccgggacctgcccccagcctcggcctcccgctccgtccccatcccactcctcctggccagtgtggccgcagcttttgccctgggcgcctcagtctctggcctcctggtctcctgtgcttgtcgccgcgcccaccgacgtcggggcaaggacatcgagactccggggctcccgcgccctctctccctccgcagtttggcccggctccacggtgggggcccagagcccccgccgccctccaaggacggggacgcggtgcagacgccgcagctctacaccaccttcctgccgcctccggagggcgtgcccccgccggagctggcctgcctgcccacccccgagtccacgccggagctgccggtcaagcacctccgcgccgccggggacccctgggagtggaaccagaacaggaacaacgccaaggagggtccgggccgctcacggggcgggcacgcggcgggcgggcccgcgccccgcgtgctggtgaggccaccgccgcccggctgtcccgggcaggccgtggaagtcaccaccctggaggaactgctgcgctacctgcacggcccgcagccgcccagaaagggggccgagccccccgcccctttaacctcgcgggcgctcccgccggagcccgcccccgccctcttgggcggccccagccccaggccccacgagtgcgcctcgccgctgaggctggacgtgccccccgagggcaggtgcgcctctgcccccgcccggcccgcgctctccgcccccgctccccggctgggcgtcggcggaggccggaggttgcctttctccggccaccgggccccccctgccctgctcactcgagtcccctcgggaggtccctccaggtactccgggggtcccgggaagcacctcctgtacctgggccggcccgagggctaccggggccgcgccctgaaaagggtggacgtcgagaagccccagttgtccctgaagcctcccctcgtcgggccctcctcccgccaggccgtcccgaacggcggccgtttcaacttttaaagggagcggtccacggcctccagcgtggggagcgcccgagtcctctcggccacgagctggacgctcttcaggacgtttcaccgccccctcgccccgcacctccagccttcccgactcgcagagtctcccgaggccccttttcgcctcgggtttatttattgactgtctttccccctgtcctcgacagaagagtgggaggtgagaagcccgtctcctcagtgagccagcatttcagggggagctggcggactcccactccccgctcccttccagccaagctgccttaactcgcccctcggggctcccccagagactgtgccccgggcgggccgcgcgcgctgtgtccagagtcctcgggcctcctgggtctgggacgtgcctctcctactgtgtaggagcctccgcttcccaatacagccgtgtctgc

SEQ ID NO: 449470 - DNA, 2363 bp, Homo sapiens
cgcattgttttcctccgcggatccgcggctggacttggacccagggctctcccgacagcgccctggaacccaaattcaagcaccatccaattcggacgctcatcgcatctcgcctgagcacaaccacggattgcgaactcagcgcagcgcgtggccgctggccgcccgcggcgatctcgatcccgctgacccgaatcctggagtcagaggtttcctatccccctcaagcccccacaggagtcaccaacccagggccggcttatgggtgagggggcaccccctggggcctgagctgccccgcacaggatgccccgtgccccccacttcatgcccttgctgctactgctgctgctgctctcacttccccatactcaggccgcctttccccaggaccccctccctctgttgatctctgaccttcaaggtacttccccattatcctggtttcggggcctggaggatgatgctgtggctgcagaacttgggctggactttcagagattcctgaccttgaaccggaccttgctagtggctgcccgggatcacgttttctccttcgatcttcaagccgaagaagaaggggaggggctggtgcccaacaagtatctaacatggagaagccaagatgtggagaactgtgctgtacggggaaagctgacggatgagtgctacaactatattcgtgttcttgttccctgggactcccagacgctccttgcctgtggaacgaactcattcagccctgtgtgccgcagctatgggataacttcgctgcagcaggagggtgaggaactgagtgggcaggctcgatgcccctttgatgccacccagtccaacgtggccatctttgcagagggcagcctgtactcagccacagctgcggatttccaggccagtgatgctgtagtttacagaagccttgggccccagcccccactccgctccgccaagtatgactccaagtggctccgagagccacactttgtccaggccttggagcatggagaccatgtctacttcttcttccgcgaggtctctgtggaggatgctcggctggggagggtgcagttctcccgcgtagcccgagtatgtaaacgtgacatgggcggctcgcctcgggccttggaccgccactggacatccttcctgaagcttcggctcaactgctctgtccctggggactctactttctattttgatgttttacaggccttgactgggcctgtgaacctgcatggccgctctgctctctttggggtcttcaccacccagaccaatagcatccctggctctgccgtctgcgccttctacctggatgagattgagcgtgggtttgagggcaagttcaaggagcagaggagtctggatggggcctggactcctgtgtctgaggacagagttccctcacccaggccaggatcctgtgcaggagtagggggagctgccttgttctcctcttcccgagacctccctgatgatgtcctgaccttcatcaaggctcacccgctgctggaccccgctgtaccacctgtcacccatcagcctctactcactctcactagcagggccctactgacccaagtagctgtggatggcatggctggtccccacagtaacatcacagtcatgttccttggctccaatgatgggacagtgctgaaggtgctgaccccaggtgggcgatccgggggacctgagcccatcctcctggaagagattgatgcctacagccctgcccggtgcagtgggaagcggacagcccaaacagcacgacggatcatagggctggagctggacactgagggtcacaggctttttgtggctttttctggctgtattgtctacctccctctcagccggtgtgcccggcatggggcctgtcagaggagctgtttggcttctcaggacccatactgtggatggcatagctccaggggctgtgtggatatcaggggatctggtgggactgatgtggatcaggctgggaaccaggaatccatggagcatggtgactgccaagatggagctactgggagtcagtctggccctggggattctgcttatggcgtgcgccgggacctgcccccagcctcggcctcccgctccggtcccgccggggggcagtctggaaaggtttcctaaaggagacgagcgaattaacggtgtcgaggtgagccagggccagggggaccccggtaaagtttagttgaggctggggaaggccctcggagctcgtttccagatcgaggtaagagggactttcttaaaggcctagtctatgggatggggcggcggagggaattttttgagaaataaaatgaagctgcagtgtacgttaaaaaaaaaaaccaagggcggccgct

SEQ ID NO: 449471 - DNA, 2444 bp, Homo sapiens
cgcattgttttcctccgcggatccgcggctggacttggacccagggctctcccgacagcgccctggaacccaaattcaagcaccatccaattcggacgctcatcgcatctcgcctgagcacaaccacggattgcgaactcagcgcagcgcgtggccgctggccgcccgcggcgatctcgatcccgctgacccgaatcctggagtcagaggtttcctatccccctcaagcccccacaggagtcaccaacccagggccggcttatgggtgagggggcaccccctggggcctgagctgccccgcacaggatgccccgtgccccccacttcatgcccttgctgctactgctgctgctgctctcacttccccatactcaggccgcctttccccaggaccccctccctctgttgatctctgaccttcaaggtacttccccattatcctggtttcggggcctggaggatgatgctgtggctgcagaacttgggctggactttcagagattcctgaccttgaaccggaccttgctagtggctgcccgggatcacgttttctccttcgatcttcaagccgaagaagaaggggaggggctggtgcccaacaagtatctaacatggagaagccaagatgtggagaactgtgctgtacggggaaagctgacggatgagtgctacaactatattcgtgttcttgttccctgggactcccagacgctccttgcctgtggaacgaactcattcagccctgtgtgccgcagctatgggataacttcgctgcagcaggagggtgaggaactgagtgggcaggctcgatgcccctttgatgccacccagtccaacgtggccatctttgcagagggcagcctgtactcagccacagctgcggatttccaggccagtgatgctgtagtttacagaagccttgggccccagcccccactccgctccgccaagtatgactccaagtggctccgagagccacactttgtccaggccttggagcatggagaccatgtctacttcttcttccgcgaggtctctgtggaggatgctcggctggggagggtgcagttctcccgcgtagcccgagtatgtaaacgtgacatgggcggctcgcctcgggccttggaccgccactggacatccttcctgaagcttcggctcaactgctctgtccctggggactctactttctattttgatgttttacaggccttgactgggcctgtgaacctgcatggccgctctgctctctttggggtcttcaccacccagaccaatagcatccctggctctgccgtctgcgccttctacctggatgagattgagcgtgggtttgagggcaagttcaaggagcagaggagtctggatggggcctggactcctgtgtctgaggacagagttccctcacccaggccaggatcctgtgcaggagtagggggagctgccttgttctcctcttcccgagacctccctgatgatgtcctgaccttcatcaaggctcacccgctgctggaccccgctgtaccacctgtcacccatcagcctctactcactctcactagcagggccctactgacccaagtagctgtggatggcatggctggtccccacagtaacatcacagtcatgttccttggctccaatgatgggacagtgctgaaggtgctgaccccaggtgggcgatccgggggacctgagcccatcctcctggaagagattgatgcctacagccctgcccggtgcagtgggaagcggacagcccaaacagcacgacggatcatagggctggagctggacactgagggtcacaggctttttgtggctttttctggctgtattgtctacctccctctcagccggtgtgcccggcatggggcctgtcagaggagctgtttggcttctcaggacccatactgtggatggcatagctccaggggctgtgtggatatcaggggatctggtgggactgatgtggatcaggctgggaaccaggaatccatggagcatggtgactgccaaggtaaacagaagaggcagctgctgttgcagccaaagctgcacatggccatgatggccacagacaccatcccaggcttggccttttgtccttctctccttctgtggcacagtcaccccatcagttcttcatgaagcttctctttccccccatcttcaccctgtcccttcttcatagatggagctactgggagtcagtctggccctggggattctgcttatggtgagtcctcttgtcccaacctcaccttcccttgctcagcccacatacctgagtgtgtgtcctgtagcagcagcagagcagcattctgaataccctgggagtatcggaaaagggtcggcatcctccagatacccagcatgtagctcagtacttggcacacagtagggtactttttgaacaaataaatcaatgtcctgcatgatga

SEQ ID NO: 449472 - DNA, 2700 bp, Homo sapiens
  misc_feature (1)..(2): n is a, c, g, or t
nngggaatttatttgtccatgggcgaggctggcctgcagtctgttgccttccaggggccaagagctgctctgatcacccagggattctctctccaacccaagtgcctccagctgacctctggctcctgtcctctggctccacctgcaccgccctgctcttcctaaggggccaggaagcccccagaagctctaccatcgacgtgggtggtggcacccggctcaccctgagagcagaggccgtgcagggggctcagttctgagccccagccggcccaccatggcacggcggttccaggaggagctggccgccttcctcttcgagtatgacaccccccgcatggtgctggtgcgtaataagaaggtgggcgttatcttccgactgatccagctggtggtcctggtctacgtcatcgggtgggtgtttctctatgagaagggctaccagacctcgagcggcctcatcagcagtgtctctgtgaaactcaagggcctggccgtgacccagctccctggcctcggcccccaggtctgggatgtggctgactacgtcttcccagcccagggggacaactccttcgtggtcatgaccaatttcatcgtgaccccgaagcagactcaaggctactgcgcagagcacccagaagggggcatatgcaaggaagacagtggctgtacccctgggaaggccaagaggaaggcccaaggcatccgcacgggcaagtgtgtggccttcaacgacactgtgaagacgtgtgagatctttggctggtgccccgtggaggtggatgacgacatcccgcgccctgcccttctccgagaggccgagaacttcactcttttcatcaagaacagcatcagctttccacgcttcaaggtcaacaggcgcaacctggtggaggaggtgaatgctgcccacatgaagacctgcctctttcacaagaccctgcaccccctgtgcccagtcttccagcttggctacgtggtgcaagagtcaggccagaacttcagcaccctggctgagaagggtggagtggttggcatcaccatcgactggcactgtgacctggactggcacgtacggcactgcagacccatctatgagttccatgggctgtacgaagagaaaaatctctccccaggcttcaacttcaggtttgccaggcactttgtggagaacgggaccaactaccgtcacctcttcaaggtgtttgggattcgctttgacatcctggtggacggcaaggccgggaagtttgacatcatccctacaatgaccaccatcggctctggaattggcatctttggggtggccacagttctctgtgacctgctgctgcttcacatcctgcctaagaggcactactacaagcagaagaagttcaaatacgctgaggacatggggccaggggcggctgagcgtgacctcgcagctaccagctccaccctgggcctgcaggagaacatgaggacatcctgatgctcgggccccaactcctgactgggtgcagcgtgaggcttcagcctggagccctggtgggtcccagccagggcagaggggcctccccaggaagtctcctaccctctcagccaggcagagagcagtttgccagaagctcagggtgcatagtaggagagacctgtgcaaatctgagctccggctccgaccccacacaccctgagggaggcctaccctagcctcagccgctcctggtggggaatggctggggctgggcaggaccctcccacacacctgcaccctagcttcgtgcttctctctccggactctcattatccaacccgctgcctccatttctctagatctgtgctctccgatgtggcagtcagtaaccataggtgactaaattaaactaaaataaaatagaatgaaacacaaaattcaattcctcggctgaactagccacatttcaactgctcagtagatacgtgtggttagtggctgccatactggacagctcggggcattttcactgtcaaagaaagttctattagacagccctgcttgagccctgtttcttcctggccttcggtttccctggggaacttatcgacaatgcaagctcctgggcccacccccagacctcctgaaccaaaagctccagggctggccgtatgatctgtgtggatggcaaactccccaggccattctgggacctaagtttaagaagtgccgtcctcgaactttctgactctaagctcctgagcgggagtcagacttagccctgagcctgcacttcctgttcaggtgcagacactgaacagggtctcaaacaccttcagcatgtgtgttgtgtgctcacgtgccacacagtgtctcatgcacacaacccagtgtacacaccacctacgtgcacacagcatccttccacactgtgtatgtgaacagcttgggccctgcaaacacaaccatctacacacatctacacccccaagcacacacacatggtccgtgccatgtcacctccatagggaaaggcttctctccaagtgtgccaggccaggacagccctcccagccatgaatccttactcagctacctcgggttggggtgggagccccagccaaatcctgggctccctgcctgtggctcagccccagctcccaaggcctgcctggctctgtctgaacagaaggtctgggggaagcgaggggtggagtacaataaagggaatgaggacaaac

SEQ ID NO: 449473 - DNA, 2746 bp, Homo sapiens
  misc_feature (1)..(2): n is a, c, g, or t
nngggaatttatttgtccatgggcgaggctggcctgcagtctgttgccttccaggggccaagagctgctctgatcacccagggattctctctccaacccaagtgcctccagctgacctctggctcctgtcctctggctccacctgcaccgccctgctcttcctaaggggccaggaagcccccagaagctctaccatcgacgtgggtggtggcacccggctcaccctgagagcagaggccgtgcagggggctcagttctgagccccagccggcccaccatggcacggcggttccaggaggagctggccgccttcctcttcgagtatgacaccccccgcatggtgctggtgcgtaataagaaggtgggcgttatcttccgactgatccagctggtggtcctggtctacgtcatcgggtgggtgtttctctatgagaagggctaccagacctcgagcggcctcatcagcagtgtctctgtgaaactcaagggcctggccgtgacccagctccctggcctcggcccccaggtctgggatgtggctgactacgtcttcccagcccagggggacaactccttcgtggtcatgaccaatttcatcgtgaccccgaagcagactcaaggctactgcgcagagcacccagaagggggcatatgcaaggaagacagtggctgtacccctgggaaggccaagaggaaggcccaaggcatccgcacgggcaagtgtgtggccttcaacgacactgtgaagacgtgtgagatctttggctggtgccccgtggaggtggatgacgacatcccgcgccctgcccttctccgagaggccgagaacttcactcttttcatcaagaacagcatcagctttccacgcttcaaggtcaacaggcgcaacctggtggaggaggtgaatgctgcccacatgaagacctgcctctttcacaagaccctgcaccccctgtgcccagtcttccagcttggctacgtggtgcaagagtcaggccagaacttcagcaccctggctgagaagggtggagtggttggcatcaccatcgactggcactgtgacctggactggcacgtacggcactgcagacccatctatgagttccatgggctgtacgaagagaaaaatctctccccaggcttcaacttcaggtttgccaggcactttgtggagaacgggaccaactaccgtcacctcttcaaggtgtttgggattcgctttgacatcctggtggacggcaaggccgggaagtttgacatcatccctacaatgaccaccatcggctctggaattggcatctttggggtggccacagttctctgtgacctgctgctgcttcacatcctgcctaagaggcactactacaagcagaagaagttcaaatacgctgaggacatggggccaggggcggctgagcgtgacctcgcagctaccagctccaccctgggcctgcaggagaacatgaggacatcctgatgctcgggccccaactcctgactgggtgcagcgtgaggcttcagcctggagccctggtgggtcccagccagggcagaggggcctccccaggaagtctcctaccctctcagccaggcagagagcagtttgccagaagctcagggtgcatagtaggagagacctgtgcaaatctgagctccggctccgaccccacacaccctgagggaggcctaccctagcctcagccgctcctggtggggaatggctggggctgggcaggaccctcccacacacctgcaccctagcttcgtgcttctctctccggactctcattatccaacccgctgcctccatttctctagatctgtgctctccgatgtggcagtcagtaaccataggtgactaaattaaactaaaataaaatagaatgaaacacaaaattcaattcctcggctgaactagccacatttcaactgctcagtagatacgtgtggttagtggctgccatactggacagctcggggcattttcactgtcaaagaaagttctattagacagccctgcttgagccctgtttcttcctggccttcggtttccctggggaacttatcgacaatgcaagctcctgggcccacccccagacctcctgaaccaaaagctccagggctggccgtatgatctgtgtggatggcaaactccccaggccattctgggacctaagtttaagaagtgccgtcctcgaactttctgactctaagctcctgagcgggagtcagacttagccctgagcctgcacttcctgttcaggtgcagacactgaacagggtctcaaacaccttcagcatgtgtgttgtgtgctcacgtgccacacagtgtctcatgcacacaacccagtgtacacaccacctacgtgcacacagcatccttccacactgtgtatgtgaacagcttgggccctgcaaacacaaccatctacacacatctacacccccaagcacacacacatggtccgtgccatgtcacctccatagggaaaggcttctctccaagtgtgccaggccaggacagccctcccagccatgaatccttactcagctacctcgggttggggtgggagccccagccaaatcctgggctccctgcctgtggctcagccccagctcccaaggcctgcctggctctgtctgaacagaaggtctgggggaagcgaggggtggagtacaataaagggaatgaggacaaacctctgccgtccgtgctctctttccagacctctctgaaacacagtgt

SEQ ID NO: 449474 - DNA, 840 bp, Homo sapiens
  misc_feature (1)..(2): n is a, c, g, or t
nngggaatttatttgtccatgggcgaggctggcctgcagtctgttgccttccaggggccaagagctgctctgatcacccagggattctctctccaacccaagtgcctccagctgacctctggctcctgtcctctggctccacctgcaccgccctgctcttcctaaggggccaggaagcccccagaagctctaccatcgacgtgggtggtggcacccggctcaccctgagagcagaggccgtgcagggggctcagttctgagccccagccggcccaccatggcacggcggttccaggaggagctggccgccttcctcttcgagtatgacaccccccgcatggtgctggtgcgtaataagaaggtgggcgttatcttccgactgatccagctggtggtcctggtctacgtcatcgggtgggtgtttctctatgagaagggctaccagacctcgagcggcctcatcagcagtgtctctgtgaaactcaagggcctggccgtgacccagctccctggcctcggcccccaggtctgggatgtggctgactacgtcttcccagcccagggggacaactccttcgtggtcatgaccaatttcatcgtgaccccgaagcagactcaaggctactgcgcagagcacccagaagggggcatatgcaaggaagacagtggctgtacccctgggaaggccaagaggaaggcccaaggcatccgcacgggcaagtgtgtggccttcaacgacactgtgaagacgtgtgagatctttggctggtgccccgtggaggtggatgacgacatcccgcggtaacactctgaccttccagagagctaagaacagggtcc

SEQ ID NO: 449475 - DNA, 1708 bp, Homo sapiens
tcggaggggcctgtcccagtccatgttcgccgttgagccccagcctcttgccaccccaaagatgccaattccagagccgatggtggtcattgtagggatgatgtcaaacttcccggcctggggcaggacagagttggggtggaaccatcttggtcccctgagagtcctgcagggcctcatccaccctccaggaaactggcctccagtgaggtcagatccagccagggcctcaccaccagggactgaggtgggatgtggagggctccgtacccacccccggattcccacgctgtctccgtgcccttccctgaccccaggccacagttctctgtgacctgctgctgcttcacatcctgcctaagaggcactactacaagcagaagaagttcaaatacgctgaggacatggggccaggggcggctgagcgtgacctcgcagctaccagctccaccctgggcctgcaggagaacatgaggacatcctgatgctcgggccccaactcctgactgggtgcagcgtgaggcttcagcctggagccctggtgggtcccagccagggcagaggggcctccccaggaagtctcctaccctctcagccaggcagagagcagtttgccagaagctcagggtgcatagtaggagagacctgtgcaaatctgagctccggctccgaccccacacaccctgagggaggcctaccctagcctcagccgctcctggtggggaatggctggggctgggcaggaccctcccacacacctgcaccctagcttcgtgcttctctctccggactctcattatccaacccgctgcctccatttctctagatctgtgctctccgatgtggcagtcagtaaccataggtgactaaattaaactaaaataaaatagaatgaaacacaaaattcaattcctcggctgaactagccacatttcaactgctcagtagatacgtgtggttagtggctgccatactggacagctcggggcattttcactgtcaaagaaagttctattagacagccctgcttgagccctgtttcttcctggccttcggtttccctggggaacttatcgacaatgcaagctcctgggcccacccccagacctcctgaaccaaaagctccagggctggccgtatgatctgtgtggatggcaaactccccaggccattctgggacctaagtttaagaagtgccgtcctcgaactttctgactctaagctcctgagcgggagtcagacttagccctgagcctgcacttcctgttcaggtgcagacactgaacagggtctcaaacaccttcagcatgtgtgttgtgtgctcacgtgccacacagtgtctcatgcacacaacccagtgtacacaccacctacgtgcacacagcatccttccacactgtgtatgtgaacagcttgggccctgcaaacacaaccatctacacacatctacacccccaagcacacacacatggtccgtgccatgtcacctccatagggaaaggcttctctccaagtgtgccaggccaggacagccctcccagccatgaatccttactcagctacctcgggttggggtgggagccccagccaaatcctgggctccctgcctgtggctcagccccagctcccaaggcctgcctggctctgtctgaacagaaggtctgggggaagcgaggggtggagtacaataaagggaatgaggacaaac

SEQ ID NO: 449476 - DNA, 744 bp, Homo sapiens
gtatctgtggtaaacccagtgacacgggggagatgacatacaaaaagggcaggacctgagaaagattaagctgcaggctccctgcccataaaacagggtgtgaaaggcatctcagcggctgccccaccatggctacctgggccctcctgctccttgcagccatgctcctgggcaacccaggtctggtcttctctcgtctgagccctgagtactacgacctggcaagagcccacctgcgtgatgaggagaaatcctgcccgtgcctggcccaggagggcccccagggtgacctgttgaccaaaacacaggagctgggccgtgactacaggacctgtctgacgatagtccaaaaactgaagaagatggtggataagcccacccagagaagtgtttccaatgctgcgacccgggtgtgtaggacggggaggtcacgatggcgcgacgtctgcagaaatttcatgaggaggtatcagtctagagttacccagggcctcgtggccggagaaactgcccagcagatctgtgaggacctcaggttgtgtataccttctacaggtcccctctgagccctctcaccttgtcctgtggaagaagcacaggctcctgtcctcagatcccgggaacctcagcaacctctgccggctcctcgcttcctcgatccagaatccactctccagtctccctcccctgactccctctgctgtcctcccctctcacgagaataaagtgtcaagcaagatttta

SEQ ID NO: 449477 - DNA, 988 bp, Homo sapiens
gtatctgtggtaaacccagtgacacgggggagatgacatacaaaaagggcaggacctgagaaagattaagctgcaggctccctgcccataaaacagggtgtgaaaggcatctcagcggctgccccaccatggctacctgggccctcctgctccttgcagccatgctcctgggcaacccagcccctgcctccgcatctgcgtggtgaaggccattggccctcatcggtggatctgcgtttcctcgggcctacactgtctaggattgtgcggggctggtgagagaacaagatctcttccgtgttcaaggcagacttcctgccccctgcaccctgctctctcccaggccttgaggtcagtgtgagccccaagggcaagaacacttctggaagggagagtggatttggctgggccatctggatggaaggtctggtcttctctcgtctgagccctgagtactacgacctggcaagagcccacctgcgtgatgaggagaaatcctgcccgtgcctggcccaggagggcccccagggtgacctgttgaccaaaacacaggagctgggccgtgactacaggacctgtctgacgatagtccaaaaactgaagaagatggtggataagcccacccagagaagtgtttccaatgctgcgacccgggtgtgtaggacggggaggtcacgatggcgcgacgtctgcagaaatttcatgaggaggtatcagtctagagttacccagggcctcgtggccggagaaactgcccagcagatctgtgaggacctcaggttgtgtataccttctacaggtcccctctgagccctctcaccttgtcctgtggaagaagcacaggctcctgtcctcagatcccgggaacctcagcaacctctgccggctcctcgcttcctcgatccagaatccactctccagtctccctcccctgactccctctgctgtcctcccctctcacgagaataaagtgtcaagcaagatttta

SEQ ID NO: 449478 - DNA, 821 bp, Homo sapiens
gtatctgtggtaaacccagtgacacgggggagatgacatacaaaaagggcaggacctgagaaagattaagctgcaggctccctgcccataaaacagggtgtgaaaggcatctcagcggctgccccaccatggctacctgggccctcctgctccttgcagccatgctcctgggcaacccagtgaggtcagtgtgagccccaagggcaagaacacttctggaagggagagtggatttggctgggccatctggatggaaggtctggtcttctctcgtctgagccctgagtactacgacctggcaagagcccacctgcgtgatgaggagaaatcctgcccgtgcctggcccaggagggcccccagggtgacctgttgaccaaaacacaggagctgggccgtgactacaggacctgtctgacgatagtccaaaaactgaagaagatggtggataagcccacccagagaagtgtttccaatgctgcgacccgggtgtgtaggacggggaggtcacgatggcgcgacgtctgcagaaatttcatgaggaggtatcagtctagagttacccagggcctcgtggccggagaaactgcccagcagatctgtgaggacctcaggttgtgtataccttctacaggtcccctctgagccctctcaccttgtcctgtggaagaagcacaggctcctgtcctcagatcccgggaacctcagcaacctctgccggctcctcgcttcctcgatccagaatccactctccagtctccctcccctgactccctctgctgtcctcccctctcacgagaataaagtgtcaagcaagatttta

SEQ ID NO: 449479 - DNA, 844 bp, Homo sapiens
cttaagcaaataacttgacctctctgagcttcagtttcttcatctgtgaaggggagatagcaatcctgatttttgagattggaatgagaattgaaggaggtcaccgtgtgtgtggacctgaccctggggaaatgtcctcagactgaggctattcaaggtcatcagaccctcagtcaaactccaatcccagcccagcacaggcccctggggtcgggagctggggccatatcctcccccacaatcctgggccctgagatctgggctagggaacccttcaggcaggggagcatgaggcctttccctccatggctgcccaggctgtgcctggagagaacagatctcggctgtaggaaatggggccagaaaggggcctcggtgattggctctggcagctcagctggcacttgccaatgctctgggattttatgctggcagatcgggggtccccaccatttcctgtcattggagcttgtggcttttctattcaaggccccacaacctgctcaggctgccgactggcttccaggatgtgcctctgggtgtgttcagtagggtcaggtggctctgggaccttaagcaagtaacattctgagtgcctgcttctccttgaggacccaccacatctgcccacagctggctgttctctcctctccaggtcccctctgagccctctcaccttgtcctgtggaagaagcacaggctcctgtcctcagatcccgggaacctcagcaacctctgccggctcctcgcttcctcgatccagaatccactctccagtctccctcccctgactccctctgctgtcctcccctctcacgagaataaagtgtcaagcaagatttta

SEQ ID NO: 449480 - DNA, 2095 bp, Homo sapiens
gtatctgtggtaaacccagtgacacgggggagatgacatacaaaaagggcaggacctgagaaagattaagctgcaggctccctgcccataaaacagggtgtgaaaggcatctcagcggctgccccaccatggctacctgggccctcctgctccttgcagccatgctcctgggcaacccagcccctgcctccgcatctgcgtggtgaaggccattggccctcatcggtggatctgcgtttcctcgggcctacactgtctaggattgtgcggggctggtgagagaacaagatctcttccgtgttcaaggcagacttcctgccccctgcaccctgctctctcccaggccttgaggtcagtgtgagccccaagggcaagaacacttctggaagggagagtggatttggctgggccatctggatggaaggtctggtcttctctcgtctgagccctgagtactacgacctggcaagagcccacctgcgtgatgaggagaaatcctgcccgtgcctggcccaggagggcccccagggtgacctgttgaccaaaacacaggagctgggccgtgactacaggacctgtctgacgatagtccaaaaactgaagaagatggtggataagcccacccaggatcttactctgagacccaggctggagtgcactggtgtgatcttggctcactgcaacctctgcctccctggcccaagcaattctcctgtctaagcctcctgagtacctggggctccaggtgtgcgccaccatgcccagctaatttttgtacttttgtagaaacagggtctcactgtgttgcccaggctggtctccaacttctgagctgaagcaatccacctgccttggcctcccaaagtgtgggattacaggcatgagccactgcacctggctgctgaagctttttaaaagagctgagggctgggatgtacttagctccacgtccagcactgagtaaatgcttaacgaatgactgtgttactaccaagaattattgtttcactctccctccttccctctcctctgctgccccaaactactcagcatcctggcactgcaggctcgcacttagccctggatacccagattcatcctcctcccctgggatggcatagaagagactttaaaaccaaatgagccaagactccaagctctgaccacacctcccaccccaccagtcttctctatgcaccccctctatctggagcccccagccaggtcctggacccaggtagctacatggcagagcatttaatgtgtgcctggcagccatgggcaccattctccacacagaaggcaggggacaggtgcacaaggcgctgagaccccagcagggctaactgtccttgtctcaggagccctacctggccagtcttgggccaggccttggggactgggagtaggggctgagccccgtctgtacagtctctggccccatgggcaccaggtgccagctcctcgcacccagtactcccattgctagggctgctggaacctgcagggtggcagagctgggcaggactcaccctataaccatgtccactgtggtgctgctgctgcagagaagtgtttccaatgctgcgacccgggtgtgtaggacggggaggtcacgatggcgcgacgtctgcagaaatttcatgaggaggtatcagtctagagttacccagggcctcgtggccggagaaactgcccagcagatctgtgaggacctcaggttgtgtataccttctacaggccccacaacctgctcaggctgccgactggcttccaggatgtgcctctgggtgtgttcagtagggtcaggtggctctgggaccttaagcaagtaacattctgagtgcctgcttctccttgaggacccaccacatctgcccacagctggctgttctctcctctccaggtcccctctgagccctctcaccttgtcctgtggaagaagcacaggctcctgtcctcagatcccgggaacctcagcaacctctgccggctcctcgcttcctcgatccagaatccactctccagtctccctcccctgactccctctgctgtcctcccctctcacgagaataaagtgtcaagcaagatttta

SEQ ID NO: 449481 - DNA, 1101 bp, Homo sapiens
cttaagcaaataacttgacctctctgagcttcagtttcttcatctgtgaaggggagatagcaatcctgatttttgagattggaatgagaattgaaggaggtcaccgtgtgtgtggacctgaccctggggaaatgtcctcagactgaggctattcaaggtcatcagaccctcagtcaaactccaatcccagcccagcacaggcccctggggtcgggagctggggccatatcctcccccacaatcctgggccctgagatctgggctagggaacccttcaggcaggggagcatgaggcctttccctccatggctgcccaggctgtgcctggagagaacagatctcggctgtaggaaatggggccagaaaggggcctcggtgattggctctggcagctcagctggcacttgccaatgctctgggattttatgctggcagatcgggggtccccaccatttcctgtcattggagcttgtggcttttctattcaaggccccacaacctgctcaggctgccgactggcttccaggatgtgcctctgggtgtgttcagtagggtcaggtggctctgggaccttaagcaagtaacattctgagtgcctgcttctccttgaggacccaccacatctgcccacagctggctgttctctcctctccaggtcccctctgagccctctcaccttgtcctgtggaagaagcacaggctcctgtcctcagatcccgggaacctcagcaacctctgccggctcctcgcttcctcgatccagaatccactctccagtctccctcccctgactccctctgctgtcctcccctctcacgagaataaagtgtcaagcaagattttaaaaaaaaaaaatctggaaataaaagatagaaaagtacccgccaggcaccccttccccttcttcccggacccctccccagcgggcaccgacatgaggtaactgcgcatcttctcctcctcctccctccccgcctcctgggcccccaacttggccctagcccccatgagaccttggcccaaggaagacatgggccccaaagttggagggtgatggaggtgagtacagcattggcagtgaacgcagcgtgtggcaatggt

SEQ ID NO: 449482 - DNA, 1929 bp, Homo sapiens
gtatctgtggtaaacccagtgacacgggggagatgacatacaaaaagggcaggacctgagaaagattaagctgcaggctccctgcccataaaacagggtgtgaaaggcatctcagcggctgccccaccatggctacctgggccctcctgctccttgcagccatgctcctgggcaacccagcccctgcctccgcatctgcgtggtgaaggccattggccctcatcggtggatctgcgtttcctcgggcctacactgtctaggattgtgcggggctggtgagagaacaagatctcttccgtgttcaaggcagacttcctgccccctgcaccctgctctctcccaggccttgaggtcagtgtgagccccaagggcaagaacacttctggaagggagagtggatttggctgggccatctggatggaaggtctggtcttctctcgtctgagccctgagtactacgacctggcaagagcccacctgcgtgatgaggagaaatcctgcccgtgcctggcccaggagggcccccagggtgacctgttgaccaaaacacaggagctgggccgtgactacaggacctgtctgacgatagtccaaaaactgaagaagatggtggataagcccacccaggatcttactctgagacccaggctggagtgcactggtgtgatcttggctcactgcaacctctgcctccctggcccaagcaattctcctgtctaagcctcctgagtacctggggctccaggtgtgcgccaccatgcccagctaatttttgtacttttgtagaaacagggtctcactgtgttgcccaggctggtctccaacttctgagctgaagcaatccacctgccttggcctcccaaagtgtgggattacaggcatgagccactgcacctggctgctgaagctttttaaaagagctgagggctgggatgtacttagctccacgtccagcactgagtaaatgcttaacgaatgactgtgttactaccaagaattattgtttcactctccctccttccctctcctctgctgccccaaactactcagcatcctggcactgcaggctcgcacttagccctggatacccagattcatcctcctcccctgggatggcatagaagagactttaaaaccaaatgagccaagactccaagctctgaccacacctcccaccccaccagtcttctctatgcaccccctctatctggagcccccagccaggtcctggacccaggtagctacatggcagagcatttaatgtgtgcctggcagccatgggcaccattctccacacagaaggcaggggacaggtgcacaaggcgctgagaccccagcagggctaactgtccttgtctcaggagccctacctggccagtcttgggccaggccttggggactgggagtaggggctgagccccgtctgtacagtctctggccccatgggcaccaggtgccagctcctcgcacccagtactcccattgctagggctgctggaacctgcagggtggcagagctgggcaggactcaccctataaccatgtccactgtggtgctgctgctgcagagaagtgtttccaatgctgcgacccgggtgtgtaggacggggaggtcacgatggcgcgacgtctgcagaaatttcatgaggaggtatcagtctagagttacccagggcctcgtggccggagaaactgcccagcagatctgtgaggacctcaggttgtgtataccttctacaggtcccctctgagccctctcaccttgtcctgtggaagaagcacaggctcctgtcctcagatcccgggaacctcagcaacctctgccggctcctcgcttcctcgatccagaatccactctccagtctccctcccctgactccctctgctgtcctcccctctcacgagaataaagtgtcaagcaagatttta

SEQ ID NO: 449483 - DNA, 794 bp, Homo sapiens
gtatctgtggtaaacccagtgacacgggggagatgacatacaaaaagggcaggacctgagaaagattaagctgcaggctccctgcccataaaacagggtgtgaaaggcatctcagcggctgccccaccatggctacctgggccctcctgctccttgcagccatgctcctgggcaacccaggtctggtcttctctcgtctgagccctgagtactacgacctggcaagagcccacctgcgtgatgaggagaaatcctgcccgtgcctggcccaggagggcccccagggtgacctgttgaccaaaacacaggagctgggccgtgactacaggacctgtctgacgatagtccaaaaactgaagaagatggtggataagcccacccagagaagtgtttccaatgctgcgacccgggtgtgtaggacggggaggtcacgatggcgcgacgtctgcagaaatttcatgaggaggtatcagtctagagttacccagggcctcgtggccggagaaactgcccagcagatctgtgaggacctcaggttgtgtataccttctacaggccccacaacctgctcaggctgccgactggcttccaggatgtgcctctgggtcccctctgagccctctcaccttgtcctgtggaagaagcacaggctcctgtcctcagatcccgggaacctcagcaacctctgccggctcctcgcttcctcgatccagaatccactctccagtctccctcccctgactccctctgctgtcctcccctctcacgagaataaagtgtcaagcaagatttta

SEQ ID NO: 449484 - DNA, 709 bp, Homo sapiens
ccctgcccataaaacagggtgtgaaaggcatctcagcggctgccccaccatggctacctgggccctcctgctccttgcagccatgctcctgggcaacccaggtaaggccttcccctcgggatcgatcctgatggcccacccagcctcgcactctcaggctggctgaacctggagcttggactctgtgggcacccaggtgcccctgcctccccccggccttctcccccgtcatggaggcctggcctcccctcagagccaggcttagtccagtgtgctgcccagcctgtcactggcctggccaaggaggagagacaggccagggattctggtcctaactctactggccacactgtgtggcctgagacccccctttccctcccaagcccctgcctccgcatctgcgtggtgaaggccattggccctcatcggtggatctgcgtttcctcgggcctacactgtctaggattgtgcggggctggtgagagaacaagatctcttccgtgttcaaggcagacttcctgccccctgcaccctgctctctcccaggccttgaggtcagtgtgagccccaagggcaagaacacttctggaagggagagtggatttggctgggccatctggatggaagaaggtaaaaaaagaaaatcccttgaaaggagattgagggaagtttctagacaaaccgacccccaaatctgtgttgctggggg

SEQ ID NO: 449485 - DNA, 762 bp, Homo sapiens
gtatctgtggtaaacccagtgacacgggggagatgacatacaaaaagggcaggacctgagaaagattaagctgcaggctccctgcccataaaacagggtgtgaaaggcatctcagcggctgccccaccatggctacctgggccctcctgctccttgcagccatgctcctgggcaacccaggtctggtcttctctcgtctgagccctgagtactacgacctggcaagagcccacctgcgtgatgaggagaaatcctgcccgtgcctggcccaggagggcccccagggtgacctgttgaccaaaacacaggagctgggccgtgactacaggacctgtctgacgatagtccaaaaactgaagaagatggtggataagcccacccaggtgaggccaaggggctacagagcctcctgtctgctgctcaatggaggggccagcctgtgaccaggtcggggatcggggagcccgggggcaccttgcacagtgatcctgggggagggcttcctagaagggaatctgtgagtccccgtgtgtctgtggatgaatttcagagaacttgtgaaattgtgactctctggaactgtgtaagtcagacggcagagtatacatggttttcatcatgtatcctcaaagagggcttgtcccagagaagttaggaatcttcccctaaagccctaacatttgtgtccaaggcagagtttgagaagctagttccccaagaggcctgggtcaggactgataaatcccagatctgctacttcca

SEQ ID NO: 449486 - DNA, 1181 bp, Homo sapiens
gtatctgtggtaaacccagtgacacgggggagatgacatacaaaaagggcaggacctgagaaagattaagctgcaggctccctgcccataaaacagggtgtgaaaggcatctcagcggctgccccaccatggctacctgggccctcctgctccttgcagccatgctcctgggcaacccagcccctgcctccgcatctgcgtggtgaaggccattggccctcatcggtggatctgcgtttcctcgggcctacactgtctaggattgtgcggggctggtgagagaacaagatctcttccgtgttcaaggcagacttcctgccccctgcaccctgctctctcccaggccttgaggtcagtgtgagccccaagggcaagaacacttctggaagggagagtggatttggctgggccatctggatggaagaaggtaaaaaaagaaaatcccttgaaaggagattgagggaagtttctagacaaaccgacccccaaatctgtgttgctgggggaacagaggagaagagagagtctcgccctcctggctttctagaaggaacgtgagaacacgtgtttgtgctgagagtgggtcagagcggctccagggcaaagcatgtggacaggtctggtcttctctcgtctgagccctgagtactacgacctggcaagagcccacctgcgtgatgaggagaaatcctgcccgtgcctggcccaggagggcccccagggtgacctgttgaccaaaacacaggagctgggccgtgactacaggacctgtctgacgatagtccaaaaactgaagaagatggtggataagcccacccagagaagtgtttccaatgctgcgacccgggtgtgtaggacggggaggtcacgatggcgcgacgtctgcagaaatttcatgaggaggtatcagtctagagttacccagggcctcgtggccggagaaactgcccagcagatctgtgaggacctcaggttgtgtataccttctacaggtcccctctgagccctctcaccttgtcctgtggaagaagcacaggctcctgtcctcagatcccgggaacctcagcaacctctgccggctcctcgcttcctcgatccagaatccactctccagtctccctcccctgactccctctgctgtcctcccctctcacgagaataaagtgtcaagcaagatttta

SEQ ID NO: 449487 - DNA, 1595 bp, Homo sapiens
gtatctgtggtaaacccagtgacacgggggagatgacatacaaaaagggcaggacctgagaaagattaagctgcaggctccctgcccataaaacagggtgtgaaaggcatctcagcggctgccccaccatggctacctgggccctcctgctccttgcagccatgctcctgggcaacccagcccctgcctccgcatctgcgtggtgaaggccattggccctcatcggtggatctgcgtttcctcgggcctacactgtctaggattgtgcggggctggtgagagaacaagatctcttccgtgttcaaggcagacttcctgccccctgcaccctgctctctcccaggcctgtctggtcttctctcgtctgagccctgagtactacgacctggcaagagcccacctgcgtgatgaggagaaatcctgcccgtgcctggcccaggagggcccccagggtgacctgttgaccaaaacacaggagctgggccgtgactacaggacctgtctgacgatagtccaaaaactgaagaagatggtggataagcccacccagcatcctggcactgcaggctcgcacttagccctggatacccagattcatcctcctcccctgggatggcatagaagagactttaaaaccaaatgagccaagactccaagctctgaccacacctcccaccccaccagtcttctctatgcaccccctctatctggagcccccagccaggtcctggacccaggtagctacatggcagagcatttaatgtgtgcctggcagccatgggcaccattctccacacagaaggcaggggacaggtgcacaaggcgctgagaccccagcagggctaactgtccttgtctcaggagccctacctggccagtcttgggccaggccttggggactgggagtaggggctgagccccgtctgtacagtctctggccccatgggcaccaggtgccagctcctcgcacccagtactcccattgctagggctgctggaacctgcagggtggcagagctgggcaggactcaccctataaccatgtccactgtggtgctgctgctgcagagaagtgtttccaatgctgcgacccgggtgtgtaggacggggaggtcacgatggcgcgacgtctgcagaaatttcatgaggaggtatcagtctagagttacccagggcctcgtggccggagaaactgcccagcagatctgtgaggacctcaggttgtgtataccttctacaggccccacaacctgctcaggctgccgactggcttccaggatgtgcctctgggtgtgttcagtagggtcaggtggctctgggaccttaagcaagtaacattctgagtgcctgcttctccttgaggacccaccacatctgcccacagctggctgttctctcctctccaggtcccctctgagccctctcaccttgtcctgtggaagaagcacaggctcctgtcctcagatcccgggaacctcagcaacctctgccggctcctcgcttcctcgatccagaatccactctccagtctccctcccctgactccctctgctgtcctcccctctcacgagaataaagtgtcaagcaagatttta

SEQ ID NO: 449488 - DNA, 1429 bp, Homo sapiens
gtatctgtggtaaacccagtgacacgggggagatgacatacaaaaagggcaggacctgagaaagattaagctgcaggctccctgcccataaaacagggtgtgaaaggcatctcagcggctgccccaccatggctacctgggccctcctgctccttgcagccatgctcctgggcaacccagcccctgcctccgcatctgcgtggtgaaggccattggccctcatcggtggatctgcgtttcctcgggcctacactgtctaggattgtgcggggctggtgagagaacaagatctcttccgtgttcaaggcagacttcctgccccctgcaccctgctctctcccaggcctgtctggtcttctctcgtctgagccctgagtactacgacctggcaagagcccacctgcgtgatgaggagaaatcctgcccgtgcctggcccaggagggcccccagggtgacctgttgaccaaaacacaggagctgggccgtgactacaggacctgtctgacgatagtccaaaaactgaagaagatggtggataagcccacccagcatcctggcactgcaggctcgcacttagccctggatacccagattcatcctcctcccctgggatggcatagaagagactttaaaaccaaatgagccaagactccaagctctgaccacacctcccaccccaccagtcttctctatgcaccccctctatctggagcccccagccaggtcctggacccaggtagctacatggcagagcatttaatgtgtgcctggcagccatgggcaccattctccacacagaaggcaggggacaggtgcacaaggcgctgagaccccagcagggctaactgtccttgtctcaggagccctacctggccagtcttgggccaggccttggggactgggagtaggggctgagccccgtctgtacagtctctggccccatgggcaccaggtgccagctcctcgcacccagtactcccattgctagggctgctggaacctgcagggtggcagagctgggcaggactcaccctataaccatgtccactgtggtgctgctgctgcagagaagtgtttccaatgctgcgacccgggtgtgtaggacggggaggtcacgatggcgcgacgtctgcagaaatttcatgaggaggtatcagtctagagttacccagggcctcgtggccggagaaactgcccagcagatctgtgaggacctcaggttgtgtataccttctacaggtcccctctgagccctctcaccttgtcctgtggaagaagcacaggctcctgtcctcagatcccgggaacctcagcaacctctgccggctcctcgcttcctcgatccagaatccactctccagtctccctcccctgactccctctgctgtcctcccctctcacgagaataaagtgtcaagcaagatttta

SEQ ID NO: 449489 - DNA, 598 bp, Homo sapiens
tgaactttgttttcatagcaaatgattcttgtgcttccccctaccttcagtttctatgctaagcacattaaaaaaaaaacctgcctaaaaattttttttagtgggtgggaatatactgcttgggcttcagtgttgcttttgcattagatgcagattgatcagtactttgaaaatggatagcttgtttaaaatgagcctggagtgtgcgtgtatgttggctggaggggagagggggaaagttgctgacccagctataccttgagtgttaggagatgtgcagcatgcagaatttattgtgatacaccagaacatagctttggaattaagagaccagattcacataccagctgcaccagttaattgcattgtgacttcggatgggttactctccatgttttggtccttaatttttctgtctataaaatgggaatatgagctacctaccctacaaggttgctgtgagcattaagtgagaacattataggaacattcctggcacaccaacctttggttcatcccattgtaatggtgggcaccagcaaaatacattctgtggtaactgccgttctctggccggttggcacacttctaaaaaaaa

SEQ ID NO: 449490 - DNA, 1851 bp, Homo sapiens
tcatgacaaacactctgctcacacatcctcatgagttcttgccagagctgtgaaggtgaacagccaggttgaagtcatgttcaaagtcgccccggatgccctcccctctgtctcatcaggagtctcccatttccccacagccatgtcacctttgccctggcgtcgctgggctgcacacccaacagtgtctaagcaggtttctaaactataggtcagaacccactcgtgggctgtaaagtcaccttagtggatcaaaactaaaacaggaaatcagatgaagagaatgggatggaatggcaagatcatttcattaaactttagtttttattgtataaatatgtgtactgagatgaaatgtaaaatgagttttactgtggattgtagtcaaaattttttgagaaaactagtctaaggaatgttctgggcaacacactgactgatcaacacaaagtcctagacagattttgagtgaacaagctcaagttcctgttagttaaagtctggtttgttccattcaaagtcaggtacagagagaggcgcgtgcgtgtgttcggaagcacaggtgaatgtaaaggtttgtttcctctcccagcacttaggcatactgcccttttctccacagtgcccctggaggacacacggaataaagtcagcagctggcctgggcagctctgctctctgtgcttgctcacctgtgtgccccagaaagtgtctctgtgacattcctgacttcctctctgtcttttctcctttctttccattcaagaaaaccctctcttagaaacaatagtagccaacatgtgttagcacctaccatgtgctggtgttgactaaggactttatatgcattcggtcctcacaatctacaaggctctccctggagtcagcagacctggcttcagtgttcttgatgagtgagtgacttgggccagtaactcacttcccccttggaagtccagagggcaacacggcctgccctgatcttgggaggcactagaggaatgaagcagctgtgcagccaggacatgtgtgtacacagtgaggggggacacacccgtgccttcccttctcctcgggctgttttcttctctcacgtggccactgtcatcccggaactactgtggcccaactccctccctgaagccctgaacccgaagggtagggattccggagcccctgccacagagactacactacttagagagtcattccaaaagacaaaggggaacctccaaaatgccttccttttcattctgaggagtctgtcccttctgtgcatatttatagtctacacgggagtgtctgatgcaactttgaattatgcaaatgggaaatagtgcacttgtgtacaatctttatattaaaaaatgtgaaataatgcaatcaccaaaaatgttttaatttctcgagaatcacttaatttcaaaatagcttggcctacggaattataaattcttttcaccacagccagatggtagcgccactgggatagacccgtcatcctggttggtggcccgctggttcggcactgctacacacacaggattttcttcttgcaatgatggggactaatatgctgttattttaacattcactgttattataatttaaaatcttttttatatcccataacaatgtcatccaagtattcattaagtagcagtggcagtgctcgtgctgaaaaatgtacccaaaaatcaataactttggtacggaagttaaatgtgacaaaacgctatgaggaaggccaagggagcccatgataccctgggctgttaatttaggagagagcgttctgcaaggtattcaagataatgctgagaaaataaaaagtagcattaaggcaaagat

SEQ ID NO: 449491 - DNA, 1377 bp, Homo sapiens
tcatgacaaacactctgctcacacatcctcatgagttcttgccagagctgtgaaggtgaacagccaggttgaagtcatgttcaaagtcgccccggatgccctcccctctgtctcatcaggagtctcccatttccccacagccatgtcacctttgccctggcgtcgctgggctgcacacccaacagtgtctaagcaggtttctaaactataggtcagaacccactcgtgggctgtaaagtcaccttagtggatcaaaactaaaacaggaaatcagatgaagagaatgggatggaatggcaagatcatttcattaaactttagtttttattgtataaatatgtgtactgagatgaaatgtaaaatgagttttactgtggattgtagtcaaaattttttgagaaaactagtctaaggaatgttctgggcaacacactgactgatcaacacaaagtcctagacagattttgagtgaacaagctcaagttcctgttagttaaagtctggtttgttccattcaaagtcaggtacagagagaggcgcgtgcgtgtgttcggaagcacaggtgaatgtaaaggtttgtttcctctcccagcacttaggcatactgcccttttctccacagtgcccctggaggacacacggaataaagtcagcagctggcctgggcagctctgctctctgtgcttgctcacctgtgtgccccagaaagtgtctctgtgacattcctgacttcctctctgtcttttctcctttctttccattcaagaaaaccctctcttagaaacaatagtagccaacatgtgttagcacctaccatgtgctggtgttgactaaggactttatatgcattcggtcctcacaatctacaaggctctccctggagtcagcagacctggcttcagtgttcttgatgagtgagtgacttgggccagtaactcacttcccccttggaagtccagagggcaacacggcctgccctgatcttgggaggcactagaggaatgaagcagctgtgcagccaggacatgtgtgtacacagtgaggggggacacacccgtgccttcccttctcctcgggctgttttcttctctcacgtggccactgtcatcccggaactactgtggcccaactccctccctgaagccctgaacccgaagggtagggattccggagcccctgccacagagactacactacttagagagtcattccaaaagacaaaggggaacctccaaaatgccttccttttcattctgaggagtctgtcccttctgtgcatatttatagtctacacgggagtgtctgatgcaactttgaattatgcaaatgggaaatagtgcacttgtgtacaatctttatattaaaaaatgtgaaata

SEQ ID NO: 449492 - DNA, 217 bp, Homo sapiens
gggtgagcttgcacacccaacagtgtctaagcaggtttctaaactataggtcagaacccactcgtgggctgtaaagtcaccttagtggatcaaaactaaaacaggaaatcagatgaagagaatgggatggaatggcaagatcatttcattaaactttagtttttattgtataaatatgtgtactgagatgaaatgtaaaatgagttttactgtggat

SEQ ID NO: 449493 - DNA, 1432 bp, Homo sapiens
ataggagagattgaaaattaaatctcaatctctcctatgagagaggggaaaggtaatgtaaacattctagaaaggttgctttttgagagtaagtaagaaatatagcacaataacaaagtgcaggctgagtgggaaagattcttaatcagagctatttctcagaatttatctttaacataaaattagaggcaaccagatttttgttgttataactttttttatgattgaatctgtaatttcacactgattcatgctatatcaaatcagacacttatttaaagaacacattgaaaaattattttactttgcctattaattcctcccccgtattatcacactgaaacttagtaataaatctcactcttcttcctgacagatattcctctttaatggcgtataagttacctgtggaggatgtccaccctctatctcgggcctttttcaagttagaggcgatgaaacagaccttcaacctggaggaatacagcctctctcaggctaccttggagcaggtattcttagaactctgtaaagagcaggagctgggaaatgttgatgataaaattgatacaacagttgaatggaaacttctcccacaggaagacccttaaaatgaagaacctcctaacattcaattttaggtcctactacattgttagtttccataattctacaagaatgtttccttttacttaagttaacaaaagaaaacatttaataaacattcaataatgattacagttttcatttttaaaaatttaggatgaaggaaacaaggaaatatagggaaaagtagtagacaaaattaacaaaatcagacatgttattcatccccaacatgggtctattttgtgcttaaaaataatttaaaaatcatacaatattaggttggttttcggttattatcaataaagctaacactgagaacattttacaaataaaaatatgagttttttagcctgaacttcaaatgtatcagctatttttaaacattatttactcggattctaatttaatgtgacattgactataagaaggtctgataaactgatgaaatggcacagcataacatttaattataatgacattctgattataaaataaatgcatgtgaattttagtacatattgaagttatatggaagaagatagccataatctgtaagaaagtaccgcagttaatattttctttagccaacttatattcaatgtattttttatggatcctttttcaaaggtagtatcagtaggcatagtcattttctgtatcttttcacctcacagttcatgaacatttcccatgtcattatagcacttttgtgttatataattgctgcattaatgttatagctgtattgatgtaataccagagttgttacgttcgggttatatgcaagtttatttcttagaaataaaactttgatggacttttc

SEQ ID NO: 449494 - DNA, 1949 bp, Homo sapiens
ggaacagtcatttccttgcagaataattggcttagggagaaagagacacagaaaacaaaacaagttcatcatgtacagcttggtctggctacaccccttttcagaaaccaggctgtgtaagagctgctggagtaggcacccatttaaagaaaaaatgaagaagcagcaataaagaagttgtaatcgttacctagacaaacagagaactggttttgacagtgtttctagagtgctttttattattttcctgacagttgtgttccaccatgattactttctccttcagcgaataggctaaatgaatatgaaacagaaaagcgtgtatcagcaaaccaaagcacttctgtgcaagaattttcttaagaaatggaggatgaaaagagagagcttattggaatggggcctctcaatacttctaggactgtgtattgctctgttttccagttccatgagaaatgtccagtttcctggaatggctcctcagaatctgggaagggtagataaatttaatagctcttctttaatggttgtgtatacaccaatatctaatttaacccagcagataatgaataaaacagcacttgctcctcttttgaaaggaacaagtgtcattggggcaccaaataaaacacacatggacgaaatacttctggaaaatttaccatatgctatgggaatcatctttaatgaaactttctcttataagttaatatttttccagggatataacagtccactttggaaagaagatttctcaggtgactttccatatcaaatatcattatggaatttttcatgttttcaacataaagaacagaggaggttgggcaacagagatgctttcaatgacacatgagaaaacagggaaagcccatttcattgctgaacttatttcaaggtcaatcgtatgttcctactacaggatgactgcaaaaattgtagagtcatccaacatatatgtgttgagcatgcagatgcatgtgtcaaaggacacatgagtaaccaagactgacaggccccagcctcaggtgagattccaggttagcagcaaagacagacattgaacaattaatgacaagtacaagaaaaagtgtttcatgggcacttagaccaggggttcctaatagtgggattagagaagtcctacctggggaaatgatgtttaaagggagaccagaatgaatagcaggtgtgaggtgctagaagcattgtgtttcagatagaagaaaggtaattgtgaagaccctgaggtgagaaaggacatctgttcctagatctggaagaagagcagtatagctgaacaaggaacatgaaaaggaatgtaatgggagagtgaagctgaagtcactcaagtgctacctcctgtggcatcttgtaaacctaggcaaggaatagccactgagtcactttaatcacggcaaaagtgtaattcggtttccaaaattaggggaacactccagatatagcccggggaatagattgccaagaggctatggagaatgtcaagaaacaaggagtccattatggctggagcagagtgtttgctttcatctcctttttattttctaagactttctaagcatgctgtggtctgcaagaataaaattgctttattaaaaactttcatttatttgcttcctttttctatgtagttaaaagtctactggtgggccagccatggtggctcacacctgtaatcccagcactttgagaggccgaggtgcacggatcacctgaggtcaggagttcgagaccagcctggccaacatggtgaaagcctgtctctactaaaaatacaaaaattagctagacaacgtggcctgtgcctataatcccagctttgggaggctgaggtaggagaatcacttgaacccaggaggtggaggttgcagtgagctgagatcgcaccactgcactccagcctgggcaacagagtgagacttcatctc

SEQ ID NO: 449495 - DNA, 2859 bp, Homo sapiens
aatctctccacggagtagagaaactcatcccaatccggaagagcccgaagaagaagatgaagatgttcaagctgaaagagtccaagcagcaaatgcactcactgctccaaacttggaggaggaaccagtcataactgcaagctgtttacacaaggaatattatgagacaaagaaaagttgcttttcaacaagaaagaagaaaatagccatcagaaatgtttccttttgtgttaaaaaaggtttgaacaattgttccttttattattattataatgttccttattctctagatttaagactacaaaggggacaaatttttattcattgagactggttcatatatcctggttaatgtgtaattataaaacttcttcacatgtcagcagataagtcttttctacttcaaaatcatgtcccaattcaaatggcaagaaacccagtcttggattaagaagaccctgattctctgtattaatgttgtaatacaggagatttttcaaggtgctaactaagcatttgtttcagaaatgttattttgaggtggccacggtggctcgtgcctctaatcctaatactttgagaggctgaggcgggaggcttgaggccaggatttcgagaccagcctgggcaacatagcaagactccatctctacaaaaaatttaaaaattagctgggtgtggtggtgcatgcatgtagttctggctacctgggagactgatgcaggaagatcgcttgagcccaggagatcaaggctgcagcaggcaatgattacaccaccacagtccagcctaggcaacagagcaaaactctgtctctgaaaaaaaaaaaaatcaaccttgaaaattcaaatattgatggtgactctttcttccaggtgaagttttgggattactaggacacaatggagctggtaaaagtacttccattaaaatgataactgggtgcacaaagccaactgcaggagtggtatgtgacatgtgaaggaaattttattttaaatattgatgacatctttctattattcctatcagtaaatcaaatatctttttaaaaaatagatgaaagaatttataaaatttctcttgcgtattcaaaaaatattgtagcttaatggccacttttatctcctttagtagaagggggattggagcaaaaaccaaaggtggatctgacattcattgtcttgtgcaggtggtgttacaaggcagcagagcatcagtaaggcaacagcatgacaacagcctcaagttcttggggtactgccctcaggagaactcactgtggcccaagcttacaatgaaagagcacttggagttgtatgcagctgtgaaaggactgggcaaagaagatgctgctctcagtatttcacgattggtggaagctcttaagctccaggaacaacttaaggctcctgtgaaaactctatcagagggaataaagagaaagctgtgctttgtgctgagcatcctggggaacccatcagtggtgcttctagatgagccgttcaccgggatggaccccgaggggcagcagcaaatgtggcagatacttcaggctaccgttaaaaacaaggagaggggcaccctcttgaccacccattacatgtcagaggctgaggctgtgtgtgaccgtatggccatgatggtgtcaggaacgctaaggtgtattggttccattcaacatctgaaaaacaagtttggtagagattatttactagaaataaaaatgaaagaacctacccaggtggaagctctccacacagagattttgaagcttttcccacaggctgcttggcaggaaagatattcctctttaatggcgtataagttacctgtggaggatgtccaccctctatctcgggcctttttcaagttagaggcgatgaaacagaccttcaacctggaggaatacagcctctctcaggctaccttggagcaggtattcttagaactctgtaaagagcaggagctgggaaatgttgatgataaaattgatacaacagttgaatggaaacttctcccacaggaagacccttaaaatgaagaacctcctaacattcaattttaggtcctactacattgttagtttccataattctacaagaatgtttccttttacttaagttaacaaaagaaaacatttaataaacattcaataatgattacagttttcatttttaaaaatttaggatgaaggaaacaaggaaatatagggaaaagtagtagacaaaattaacaaaatcagacatgttattcatccccaacatgggtctattttgtgcttaaaaataatttaaaaatcatacaatattaggttggttttcggttattatcaataaagctaacactgagaacattttacaaataaaaatatgagttttttagcctgaacttcaaatgtatcagctatttttaaacattatttactcggattctaatttaatgtgacattgactataagaaggtctgataaactgatgaaatggcacagcataacatttaattataatgacattctgattataaaataaatgcatgtgaattttagtacatattgaagttatatggaagaagatagccataatctgtaagaaagtaccgcagttaatattttctttagccaacttatattcaatgtattttttatggatcctttttcaaaggtagtatcagtaggcatagtcattttctgtatcttttcacctcacagttcatgaacatttcccatgtcattatagcacttttgtgttatataattgctgcattaatgttatagctgtattgatgtaataccagagttgttacgttcgggttatatgcaagtttatttcttagaaataaaactttgatggacttttc

SEQ ID NO: 449496 - DNA, 3777 bp, Homo sapiens
aatctctccacggagtagagaaactcatcccaatccggaagagcccgaagaagaagatgaagatgttcaagctgaaagagtccaagcagcaaatgcactcactgctccaaacttggaggaggaaccagtcataactgcaagctgtttacacaaggaatattatgagacaaagaaaagttgcttttcaacaagaaagaagaaaatagccatcagaaatgtttccttttgtgttaaaaaaggtttgaacaattgttccttttattattattataatgttccttattctctagatttaagactacaaaggggacaaatttttattcattgagactggttcatatatcctggttaatgtgtaattataaaacttcttcacatgtcagcagataagtcttttctacttcaaaatcatgtcccaattcaaatggcaagaaacccagtcttggattaagaagaccctgattctctgtattaatgttgtaatacaggagatttttcaaggtgctaactaagcatttgtttcagaaatgttattttgaggtggccacggtggctcgtgcctctaatcctaatactttgagaggctgaggcgggaggcttgaggccaggatttcgagaccagcctgggcaacatagcaagactccatctctacaaaaaatttaaaaattagctgggtgtggtggtgcatgcatgtagttctggctacctgggagactgatgcaggaagatcgcttgagcccaggagatcaaggctgcagcaggcaatgattacaccaccacagtccagcctaggcaacagagcaaaactctgtctctgaaaaaaaaaaaaatcaaccttgaaaattcaaatattgatggtgactctttcttccaggtgaagttttgggattactaggacacaatggagctggtaaaagtacttccattaaaatgataactgggtgcacaaagccaactgcaggagtggtatgtgacatgtgaaggaaattttattttaaatattgatgacatctttctattattcctatcagtaaatcaaatatctttttaaaaaatagatgaaagaatttataaaatttctcttgcgtattcaaaaaatattgtagcttaatggccacttttatctcctttagtagaagggggattggagcaaaaaccaaaggtggatctgacattcattgtcttgtgcaggtggtgttacaaggcagcagagcatcagtaaggcaacagcatgacaacagcctcaagttcttggggtactgccctcaggagaactcactgtggcccaagcttacaatgaaagagcacttggagttgtatgcagctgtgaaaggactgggcaaagaagatgctgctctcagtatttcacgattggtggaagctcttaagctccaggaacaacttaaggctcctgtgaaaactctatcagagggaataaagagaaagctgtgctttgtgctgagcatcctggggaacccatcagtggtgcttctagatgagccgttcaccgggatggaccccgaggggcagcagcaaatgtggcagatacttcaggctaccgttaaaaacaaggagaggggcaccctcttgaccacccattacatgtcagaggctgaggctgtgtgtgaccgtatggccatgatggtgtcaggaacgctaaggtgtattggttccattcaacatctgaaaaacaagtttggtagagattatttactagaaataaaaatgaaagaacctacccaggtggaagctctccacacagagattttgaagcttttcccacaggctgcttggcaggaaagatattcctctttaatggcgtataagttacctgtggaggatgtccaccctctatctcgggcctttttcaagttagaggcgatgaaacagaccttcaacctggaggaatacagcctctctcaggctaccttggagcaggtattcttagaactctgtaaagagcaggagctgggaaatgttgatgataaaattgatacaacagttgaatggaaacttctcccacaggaagacccttaaaatgaagaacctcctaacattcaattttaggtcctactacattgttgtgttccaccatgattactttctccttcagcgaataggctaaatgaatatgaaacagaaaagcgtgtatcagcaaaccaaagcacttctgtgcaagaattttcttaagaaatggaggatgaaaagagagagcttattggaatggggcctctcaatacttctaggactgtgtattgctctgttttccagttccatgagaaatgtccagtttcctggaatggctcctcagaatctgggaagggtagataaatttaatagctcttctttaatggttgtgtatacaccaatatctaatttaacccagcagataatgaataaaacagcacttgctcctcttttgaaaggaacaagtgtcattggggcaccaaataaaacacacatggacgaaatacttctggaaaatttaccatatgctatgggaatcatctttaatgaaactttctcttataagttaatatttttccagggatataacagtccactttggaaagaagatttctcaggtgactttccatatcaaatatcattatggaatttttcatgttttcaacataaagaacagaggaggttgggcaacagagatgctttcaatgacacatgagaaaacagggaaagcccatttcattgctgaacttatttcaaggtcaatcgtatgttcctactacaggatgactgcaaaaattgtagagtcatccaacatatatgtgttgagcatgcagatgcatgtgtcaaaggacacatgagtaaccaagactgacaggccccagcctcaggtgagattccaggttagcagcaaagacagacattgaacaattaatgacaagtacaagaaaaagtgtttcatgggcacttagaccaggggttcctaatagtgggattagagaagtcctacctggggaaatgatgtttaaagggagaccagaatgaatagcaggtgtgaggtgctagaagcattgtgtttcagatagaagaaaggtaattgtgaagaccctgaggtgagaaaggacatctgttcctagatctggaagaagagcagtatagctgaacaaggaacatgaaaaggaatgtaatgggagagtgaagctgaagtcactcaagtgctacctcctgtggcatcttgtaaacctaggcaaggaatagccactgagtcactttaatcacggcaaaagtgtaattcggtttccaaaattaggggaacactccagatatagcccggggaatagattgccaagaggctatggagaatgtcaagaaacaaggagtccattatggctggagcagagtgtttgctttcatctcctttttattttctaagactttctaagcatgctgtggtctgcaagaataaaattgctttattaaaaactttcatttatttgcttcctttttctatgtagttaaaagtctactggtgggccagccatggtggctcacacctgtaatcccagcactttgagaggccgaggtgcacggatcacctgaggtcaggagttcgagaccagcctggccaacatggtgaaagcctgtctctactaaaaatacaaaaattagctagacaacgtggcctgtgcctataatcccagctttgggaggctgaggtaggagaatcacttgaacccaggaggtggaggttgcagtgagctgagatcgcaccactgcactccagcctgggcaacagagtgagacttcatctc

SEQ ID NO: 449497 - DNA, 1469 bp, Homo sapiens
cggggtttccctgtgcacccatggctgggtgccgacgggctgttccttgcattgcagctgtgctttgtgctgagcatcctggggaacccatcagtggtgcttctagatgagccgttcaccgggatggaccccgaggggcagcagcaaatgtggcagatacttcaggctaccgttaaaaacaaggagaggggcaccctcttgaccacccattacatgtcagaggctgaggctgtgtgtgaccgtatggccatgatggtgtcaggaacgctaaggtgtattggttccattcaacatctgaaaaacaagtttggtagagattatttactagaaataaaaatgaaagaacctacccaggtggaagctctccacacagagattttgaagcttttcccacaggctgcttggcaggaaagatattcctctttaatggcgtataagttacctgtggaggatgtccaccctctatctcgggcctttttcaagttagaggcgatgaaacagaccttcaacctggaggaatacagcctctctcaggctaccttggagcaggtattcttagaactctgtaaagagcaggagctgggaaatgttgatgataaaattgatacaacagttgaatggaaacttctcccacaggaagacccttaaaatgaagaacctcctaacattcaattttaggtcctactacattgttagtttccataattctacaagaatgtttccttttacttaagttaacaaaagaaaacatttaataaacattcaataatgattacagttttcatttttaaaaatttaggatgaaggaaacaaggaaatatagggaaaagtagtagacaaaattaacaaaatcagacatgttattcatccccaacatgggtctattttgtgcttaaaaataatttaaaaatcatacaatattaggttggttttcggttattatcaataaagctaacactgagaacattttacaaataaaaatatgagttttttagcctgaacttcaaatgtatcagctatttttaaacattatttactcggattctaatttaatgtgacattgactataagaaggtctgataaactgatgaaatggcacagcataacatttaattataatgacattctgattataaaataaatgcatgtgaattttagtacatattgaagttatatggaagaagatagccataatctgtaagaaagtaccgcagttaatattttctttagccaacttatattcaatgtattttttatggatcctttttcaaaggtagtatcagtaggcatagtcattttctgtatcttttcacctcacagttcatgaacatttcccatgtcattatagcacttttgtgttatataattgctgcattaatgttatagctgtattgatgtaataccagagttgttacgttcgggttatatgcaagtttatttcttagaaataaaactttgatggacttttc

SEQ ID NO: 449498 - DNA, 1440 bp, Homo sapiens
aatctctccacggagtagagaaactcatcccaatccggaagagcccgaagaagaagatgaagatgttcaagctgaaagagtccaagcagcaaatgcactcactgctccaaacttggaggaggaaccagtcataactgcaagctgtttacacaaggaatattatgagacaaagaaaagttgcttttcaacaagaaagaagaaaatagccatcagaaatgtttccttttgtgttaaaaaaggtttgaacaattgttccttttattattattataatgttccttattctctagatttaagactacaaaggggacaaatttttattcattgagactggttcatatatcctggttaatgtgtaattataaaacttcttcacatgtcagcagataagtcttttctacttcaaaatcatgtcccaattcaaatggcaagaaacccagtcttggattaagaagaccctgattctctgtattaatgttgtaatacaggagatttttcaaggtgctaactaagcatttgtttcagaaatgttattttgaggtggccacggtggctcgtgcctctaatcctaatactttgagaggctgaggcgggaggcttgaggccaggatttcgagaccagcctgggcaacatagcaagactccatctctacaaaaaatttaaaaattagctgggtgtggtggtgcatgcatgtagttctggctacctgggagactgatgcaggaagatcgcttgagcccaggagatcaaggctgcagcaggcaatgattacaccaccacagtccagcctaggcaacagagcaaaactctgtctctgaaaaaaaaaaaaatcaaccttgaaaattcaaatattgatggtgactctttcttccaggtgaagttttgggattactaggacacaatggagctggtaaaagtacttccattaaaatgataactgggtgcacaaagccaactgcaggagtggtatgtgacatgtgaaggaaattttattttaaatattgatgacatctttctattattcctatcagtaaatcaaatatctttttaaaaaatagatgaaagaatttataaaatttctcttgcgtattcaaaaaatattgtagcttaatggccacttttatctcctttagtagaagggggattggagcaaaaaccaaaggtggatctgacattcattgtcttgtgcaggtggtgttacaaggcagcagagcatcagtaaggcaacagcatgacaacagcctcaagttcttggggtactgccctcaggagaactcactgtggcccaagcttacaatgaaagagcacttggagttgtatgcagctgtgaaaggactgggcaaagaagatgctgctctcagtatttcacggtacagagagaagtctcacaatttgtagcaggaggaaggggaaaatatgtcatttcttcattatatatt

SEQ ID NO: 449499 - DNA, 2149 bp, Homo sapiens
aatctctccacggagtagagaaactcatcccaatccggaagagcccgaagaagaagatgaagatgttcaagctgaaagagtccaagcagcaaatgcactcactgctccaaacttggaggaggaaccagtcataactgcaagctgtttacacaaggaatattatgagacaaagaaaagttgcttttcaacaagaaagaagaaaatagccatcagaaatgtttccttttgtgttaaaaaaggtttgaacaattgttccttttattattattataatgttccttattctctagatttaagactacaaaggggacaaatttttattcattgagactggttcatatatcctggttaatgtgtaattataaaacttcttcacatgtcagcagataagtcttttctacttcaaaatcatgtcccaattcaaatggcaagaaacccagtcttggattaagaagaccctgattctctgtattaatgttgtaatacaggagatttttcaaggtgctaactaagcatttgtttcagaaatgttattttgaggtggccacggtggctcgtgcctctaatcctaatactttgagaggctgaggcgggaggcttgaggccaggatttcgagaccagcctgggcaacatagcaagactccatctctacaaaaaatttaaaaattagctgggtgtggtggtgcatgcatgtagttctggctacctgggagactgatgcaggaagatcgcttgagcccaggagatcaaggctgcagcaggcaatgattacaccaccacagtccagcctaggcaacagagcaaaactctgtctctgaaaaaaaaaaaaatcaaccttgaaaattcaaatattgatggtgactctttcttccaggtgaagttttgggattactaggacacaatggagctggtaaaagtacttccattaaaatgataactgggtgcacaaagccaactgcaggagtggtatgtgacatgtgaaggaaattttattttaaatattgatgacatctttctattattcctatcagtaaatcaaatatctttttaaaaaatagatgaaagaatttataaaatttctcttgcgtattcaaaaaatattgtagcttaatggccacttttatctcctttagtagaagggggattggagcaaaaaccaaaggtggatctgacattcattgtcttgtgcaggtggtgttacaaggcagcagagcatcagtaaggcaacagcatgacaacagcctcaagttcttggggtactgccctcaggagaactcactgtggcccaagcttacaatgaaagagcacttggagttgtatgcagctgtgaaaggactgggcaaagaagatgctgctctcagtatttcacgattggtggaagctcttaagctccaggaacaacttaaggctcctgtgaaaactctatcagagggaataaagagaaagctgtgctttgtgctgagcatcctggggaacccatcagtggtgcttctagatgagccgttcaccgggatggaccccgaggggcagcagcaaatgtggcagatacttcaggctaccgttaaaaacaaggagaggggcaccctcttgaccacccattacatgtcagaggctgaggctgtgtgtgaccgtatggccatgatggtgtcaggaacgctaaggtgtattggttccattcaacatctgaaaaacaagtttggtagagattatttactagaaataaaaatgaaagaacctacccaggtggaagctctccacacagagattttgaagcttttcccacaggctgcttggcaggaaagatattcctctttaatggcgtataagttacctgtggaggatgtccaccctctatctcgggcctttttcaagttagaggcgatgaaacagaccttcaacctggaggaatacagcctctctcaggctaccttggagcagtgacaggaggaccactgccacagaaaccaccctaaagtcagaagcagcggtaagaagataggcctgatggaagcagagctgacatgcagttgctgactttcacatgcttccaacaagcagattttgcagcagagcaatatgaaacattgattggatgaatacagaagcaaatgaatcagaaaatttagcaggattgtgttagattgggca

SEQ ID NO: 449500 - DNA, 1130 bp, Homo sapiens
ctttctccctcctttctcctccccggatcctccactgcgtcgcccggtctcatcgggcagccgggcgcctagccatattcctctttaatggcgtataagttacctgtggaggatgtccaccctctatctcgggcctttttcaagttagaggcgatgaaacagaccttcaacctggaggaatacagcctctctcaggctaccttggagcaggtattcttagaactctgtaaagagcaggagctgggaaatgttgatgataaaattgatacaacagttgaatggaaacttctcccacaggaagacccttaaaatgaagaacctcctaacattcaattttaggtcctactacattgttagtttccataattctacaagaatgtttccttttacttaagttaacaaaagaaaacatttaataaacattcaataatgattacagttttcatttttaaaaatttaggatgaaggaaacaaggaaatatagggaaaagtagtagacaaaattaacaaaatcagacatgttattcatccccaacatgggtctattttgtgcttaaaaataatttaaaaatcatacaatattaggttggttttcggttattatcaataaagctaacactgagaacattttacaaataaaaatatgagttttttagcctgaacttcaaatgtatcagctatttttaaacattatttactcggattctaatttaatgtgacattgactataagaaggtctgataaactgatgaaatggcacagcataacatttaattataatgacattctgattataaaataaatgcatgtgaattttagtacatattgaagttatatggaagaagatagccataatctgtaagaaagtaccgcagttaatattttctttagccaacttatattcaatgtattttttatggatcctttttcaaaggtagtatcagtaggcatagtcattttctgtatcttttcacctcacagttcatgaacatttcccatgtcattatagcacttttgtgttatataattgctgcattaatgttatagctgtattgatgtaataccagagttgttacgttcgggttatatgcaagtttatttcttagaaataaaactttgatggacttttc

SEQ ID NO: 449501 - DNA, 1998 bp, Homo sapiens
aatctctccacggagtagagaaactcatcccaatccggaagagcccgaagaagaagatgaagatgttcaagctgaaagagtccaagcagcaaatgcactcactgctccaaacttggaggaggaaccagtcataactgcaagctgtttacacaaggaatattatgagacaaagaaaagttgcttttcaacaagaaagaagaaaatagccatcagaaatgtttccttttgtgttaaaaaaggtgaagttttgggattactaggacacaatggagctggtaaaagtacttccattaaaatgataactgggtgcacaaagccaactgcaggagtggtggtgttacaaggcagcagagcatcagtaaggcaacagcatgacaacagcctcaagttcttggggtactgccctcaggagaactcactgtggcccaagcttacaatgaaagagcacttggagttgtatgcagctgtgaaaggactgggcaaagaagatgctgctctcagtatttcacgattggtggaagctcttaagctccaggaacaacttaaggctcctgtgaaaactctatcagagggaataaagagaaagctgtgctttgtgctgagcatcctggggaacccatcagtggtgcttctagatgagccgttcaccgggatggaccccgaggggcagcagcaaatgtggcagatacttcaggctaccgttaaaaacaaggagaggggcaccctcttgaccacccattacatgtcagaggctgaggctgtgtgtgaccgtatggccatgatggtgtcaggaacgctaaggtgtattggttccattcaacatctgaaaaacaagtttggtagagattatttactagaaataaaaatgaaagaacctacccaggtggaagctctccacacagagattttgaagcttttcccacaggctgcttggcaggaaagatattcctctttaatggcgtataagttacctgtggaggatgtccaccctctatctcgggcctttttcaagttagaggcgatgaaacagaccttcaacctggaggaatacagcctctctcaggctaccttggagcaggtattcttagaactctgtaaagagcaggagctgggaaatgttgatgataaaattgatacaacagttgaatggaaacttctcccacaggaagacccttaaaatgaagaacctcctaacattcaattttaggtcctactacattgttagtttccataattctacaagaatgtttccttttacttaagttaacaaaagaaaacatttaataaacattcaataatgattacagttttcatttttaaaaatttaggatgaaggaaacaaggaaatatagggaaaagtagtagacaaaattaacaaaatcagacatgttattcatccccaacatgggtctattttgtgcttaaaaataatttaaaaatcatacaatattaggttggttttcggttattatcaataaagctaacactgagaacattttacaaataaaaatatgagttttttagcctgaacttcaaatgtatcagctatttttaaacattatttactcggattctaatttaatgtgacattgactataagaaggtctgataaactgatgaaatggcacagcataacatttaattataatgacattctgattataaaataaatgcatgtgaattttagtacatattgaagttatatggaagaagatagccataatctgtaagaaagtaccgcagttaatattttctttagccaacttatattcaatgtattttttatggatcctttttcaaaggtagtatcagtaggcatagtcattttctgtatcttttcacctcacagttcatgaacatttcccatgtcattatagcacttttgtgttatataattgctgcattaatgttatagctgtattgatgtaataccagagttgttacgttcgggttatatgcaagtttatttcttagaaataaaactttgatggacttttc

SEQ ID NO: 449502 - DNA, 1891 bp, Homo sapiens
gttggaggatgaaagtacggagtgatccatcggctaagtgtcttgtcacaatgctgacactcaaactgctggagtaggcacccatttaaagaaaaaatgaagaagcagcaataaagaagttgtaatcgttacctagacaaacagagaactggttttgacagtgtttctagagtgctttttattattttcctgacagttgtgttccaccatgattactttctccttcagcgaataggctaaatgaatatgaaacagaaaagcgtgtatcagcaaaccaaagcacttctgtgcaagaattttcttaagaaatggaggatgaaaagagagagcttattggaatggggcctctcaatacttctaggactgtgtattgctctgttttccagttccatgagaaatgtccagtttcctggaatggctcctcagaatctgggaagggtagataaatttaatagctcttctttaatggttgtgtatacaccaatatctaatttaacccagcagataatgaataaaacagcacttgctcctcttttgaaaggaacaagtgtcattggggcaccaaataaaacacacatggacgaaatacttctggaaaatttaccatatgctatgggaatcatctttaatgaaactttctcttataagttaatatttttccagggatataacagtccactttggaaagaagatttctcaggtgactttccatatcaaatatcattatggaatttttcatgttttcaacataaagaacagaggaggttgggcaacagagatgctttcaatgacacatgagaaaacagggaaagcccatttcattgctgaacttatttcaaggtcaatcgtatgttcctactacaggatgactgcaaaaattgtagagtcatccaacatatatgtgttgagcatgcagatgcatgtgtcaaaggacacatgagtaaccaagactgacaggccccagcctcaggtgagattccaggttagcagcaaagacagacattgaacaattaatgacaagtacaagaaaaagtgtttcatgggcacttagaccaggggttcctaatagtgggattagagaagtcctacctggggaaatgatgtttaaagggagaccagaatgaatagcaggtgtgaggtgctagaagcattgtgtttcagatagaagaaaggtaattgtgaagaccctgaggtgagaaaggacatctgttcctagatctggaagaagagcagtatagctgaacaaggaacatgaaaaggaatgtaatgggagagtgaagctgaagtcactcaagtgctacctcctgtggcatcttgtaaacctaggcaaggaatagccactgagtcactttaatcacggcaaaagtgtaattcggtttccaaaattaggggaacactccagatatagcccggggaatagattgccaagaggctatggagaatgtcaagaaacaaggagtccattatggctggagcagagtgtttgctttcatctcctttttattttctaagactttctaagcatgctgtggtctgcaagaataaaattgctttattaaaaactttcatttatttgcttcctttttctatgtagttaaaagtctactggtgggccagccatggtggctcacacctgtaatcccagcactttgagaggccgaggtgcacggatcacctgaggtcaggagttcgagaccagcctggccaacatggtgaaagcctgtctctactaaaaatacaaaaattagctagacaacgtggcctgtgcctataatcccagctttgggaggctgaggtaggagaatcacttgaacccaggaggtggaggttgcagtgagctgagatcgcaccactgcactccagcctgggcaacagagtgagacttcatctc

SEQ ID NO: 449503 - DNA, 2322 bp, Homo sapiens
aatctctccacggagtagagaaactcatcccaatccggaagagcccgaagaagaagatgaagatgttcaagctgaaagagtccaagcagcaaatgcactcactgctccaaacttggaggaggaaccagtcataactgcaagctgtttacacaaggaatattatgagacaaagaaaagttgcttttcaacaagaaagaagaaaatagccatcagaaatgtttccttttgtgttaaaaaaggtttgaacaattgttccttttattattattataatgttccttattctctagatttaagactacaaaggggacaaatttttattcattgagactggttcatatatcctggttaatgtgtaattataaaacttcttcacatgtcagcagataagtcttttctacttcaaaatcatgtcccaattcaaatggcaagaaacccagtcttggattaagaagaccctgattctctgtattaatgttgtaatacaggagatttttcaaggtgctaactaagcatttgtttcagaaatgttattttgaggtggccacggtggctcgtgcctctaatcctaatactttgagaggctgaggcgggaggcttgaggccaggatttcgagaccagcctgggcaacatagcaagactccatctctacaaaaaatttaaaaattagctgggtgtggtggtgcatgcatgtagttctggctacctgggagactgatgcaggaagatcgcttgagcccaggagatcaaggctgcagcaggcaatgattacaccaccacagtccagcctaggcaacagagcaaaactctgtctctgaaaaaaaaaaaaatcaaccttgaaaattcaaatattgatggtgactctttcttccaggtgaagttttgggattactaggacacaatggagctggtaaaagtacttccattaaaatgataactgggtgcacaaagccaactgcaggagtggtatgtgacatgtgaaggaaattttattttaaatattgatgacatctttctattattcctatcagtaaatcaaatatctttttaaaaaatagatgaaagaatttataaaatttctcttgcgtattcaaaaaatattgtagcttaatggccacttttatctcctttagtagaagggggattggagcaaaaaccaaaggtggatctgacattcattgtcttgtgcaggtggtgttacaaggcagcagagcatcagtaaggcaacagcatgacaacagcctcaagttcttggggtactgccctcaggagaactcactgtggcccaagcttacaatgaaagagcacttggagttgtatgcagctgtgaaaggactgggcaaagaagatgctgctctcagtatttcacgattggtggaagctcttaagctccaggaacaacttaaggctcctgtgaaaactctatcagagggaataaagagaaagctgtgctttgtgctgagcatcctggggaacccatcagtggtgcttctagatgagccgttcaccgggatggaccccgaggggcagcagcaaatgtggcagatacttcaggctaccgttaaaaacaaggagaggggcaccctcttgaccacccattacatgtcagaggctgaggctgtgtgtgaccgtatggccatgatggtgtcaggaacgctaaggtgtattggttccattcaacatctgaaaaacaagtttggtagagattatttactagaaataaaaatgaaagaacctacccaggtggaagctctccacacagagattttgaagcttttcccacaggctgcttggcaggaaagatattcctctttaatggcgtataagttacctgtggaggatgtccaccctctatctcgggcctttttcaagttagaggcgatgaaacagaccttcaacctggaggaatacagcctctctcaggctaccttggagcagaagcagtgtgaggcctcactggatgcagatattggcaccacgcttcttgtacaacctgtggtttcagaatcccaactgaaaaagtcagcctaaaagtgtcctgtgaaacacctgggaagataggacgtcaggcaagcaacaacttcaatgcaaaatgtgtcttgttccaaaagtgacaggaggaccactgccacagaaaccaccctaaagtcagaagcagcggtaagaagataggcctgatggaagcagagctgacatgcagttgctgactttcacatgcttccaacaagcagattttgcagcagagcaatatgaaacattgattggatgaatacagaagcaaatgaatcagaaaatttagcaggattgtgttagattgggca

SEQ ID NO: 449504 - DNA, 1390 bp, Homo sapiens
ggcgcacttccgcccgggcgcattgtagccccgcggacagctgggccagggtgcgggcctgcgcctccctcggctcctggcgcgggcctcggggagaggggtggaagatgtctatggatgtgacattcctggggacgggtgcagcatacccatctccaacccggggtgcctctgctgtggtccttcggtgtgaaggcgagtgctggctctttgactgtggggagggaacacagacacagcttatgaaaagccaacttaaagcagggagaattaccaagatcttcatcacacaccttcatggagaccatttctttggccttcctgggctcctctgcacaatcagcctgcagagtggctccatggtgtccaaacagcctattgaaatctatggccctgtagggcttcgggactttatctggcgaaccatggaactctctcacacggagctggtcttccattatgtggttcatgaactggttcctacagcagatcaatgtcctgcagaagaactaaaagaatttgcgcatgtgaatagagcagacagtcctcccaaagaggaacaaggaagaactatcctgttagactcagaagaaaactcataccttctgtttgatgatgaacaatttgttgtaaaagcatttcgcctctttcacagaattccctcatttgggttttcagtcgtggaaaagaaacgcccaggtaaactcaatgcacagaaacttaaagaccttggtgttccaccaggtcctgcctatgggaagctgaaaaatggaatttctgttgttctggaaaatggggttacaatttctccccaagatgtcttaaaaaagcctattgttggaagaaaaatctgcatattgggtgactgctctggggttgtgggtgatggaggagtaaaactgtgctttgaagcagacctgttgatccacgaagcaaccctggatgatgcccagatggacaaagcaaaggagcatggccacagcacaccacagatggcagcaacatttgcaaagttgtgccgtgcaaagaggctggttctgactcacttcagtcagaggtacaaaccagttgccttggccagagaaggagaaacagatggcattgcagaactaaaaaagcaagctgaatcagtgttagatctccaagaagtgactctagcagaagattttatggtgataagcattccaatcaagaaatgaaaccagtgttcctgagtgcacactgacatgtctgtgaatatgttactgaacctatagtccagtttttttatttcttgttttagtctgaaattatttgggccctaataatcctaaaaagaatggagctgcattgatgaattggctcagtatttaaagggagcaaactttttgataataaatctttttaagag

SEQ ID NO: 449505 - DNA, 2180 bp, Homo sapiens
ggcgcacttccgcccgggcgcattgtagccccgcggacagctgggccagggtgcgggcctgcgcctccctcggctcctggcgcgggcctcggggagaggggtggaagatgtctatggatgtgacattcctggggacgggtgcagcatacccatctccaacccggggtgcctctgctgtggtccttcggtgtgaaggcgagtgctggctctttgactgtggggagggaacacagacacagcttcatggagaccatttctttggccttcctgggctcctctgcacaatcagcctgcagagtggctccatggtgtccaaacagcctattgaaatctatggccctgtagggcttcgggactttatctggcgaaccatggaactctctcacacggagctggtcttccattatgtggttcatgaactggttcctacagcagatcaatgtcctgcagaagaactaaaagaatttgcgcatgtgaatagagcagacagtcctcccaaagaggaacaaggaagaactatcctgttagactcagaagaaaactcataccttctgtttgatgatgaacaatttgttgtaaaagcatttcgcctctttcacagaattccctcatttgggttttcagtcgtggaaaagaaacgcccaggtaaactcaatgcacagaaacttaaagaccttggtgttccaccaggtcctgcctatgggaagctgaaaaatggaatttctgttgttctggaaaatggggttacaatttctccccaagatgtcttaaaaaagcctattgttggaagaaaaatctgcatattgggtgactgctctggggttgtgggtgatggaggagtaaaactgtgctttgaagcagacctgttgatccacgaagcaaccctggatgatgcccagatggacaaagcaaaggagcatggccacagcacaccacagatggcagcaacatttgcaaagttgtgccgtgcaaagaggctggttctgactcacttcagtcagaggtacaaaccagttgccttggccagagaaggagaaacagatggcattgcagaactaaaaaagcaagctgaatcagtgttagatctccaagaagtgactctagcagaagattttatggtgataagcattccaatcaagaaatgaaaccagtgttcctgagtgcacactgacatgtctgtgaatatgttactgaacctatagtccagtttttttatttcttgttttagtctgaaattatttgggccctaataatcctaaaaagaatggagctgcattgatgaattggctcagtatttaaagggagcaaactttttgataataaatctttttaagagaaaaaaaacccagcatcctttttgaagtccagatttgtcaaaatgatagactattcagttatacatcttattttgtgctactaccacagatagccaatattccatgcagtcctgggcttagcttctgcccagctttattgctgctattggcaaagagcacaggactcagccctcgtggctaaaaatggtattttggcagtttgtattgaatctgtttgtgttattaacagaagagggagaaatgtcatgagacgttggacaggcaggattgatgatagcatgaccatagctttgctggaatactgaatgcagggtttggctaggtgtttattttaacattttattaaactttctatttgggtcttaacccatggttctcagctggggtgacactgctcctctagaagcaggtttgaaattatgggtatgttttcttgtcacagtgactgagtacggtggtggtagtggtggtactactactactggtatttagtcagcagggataagggatgttagctgtcctgcaaagttttggtcagtcatatacaataaagaatcatctcaccccgaaatgcaaattgcaggcccattgagatacacagcaagttagtttatactcttgatgtgaatatagtttaccaaaattagtgacataatgagtggaattactaggtaagtcaaatcctaaagagtgaatgtgttagaattgcagtgtcataccaaataacattcaaaagaaatgagccatcaagtgaagcttatgaacctggaggtaaaaaatgcttatctgttaaactgaggtttcattgacgtgtccctattaataaacgttatttgccccaca

SEQ ID NO: 449506 - DNA, 2234 bp, Homo sapiens
ggcgcacttccgcccgggcgcattgtagccccgcggacagctgggccagggtgcgggcctgcgcctccctcggctcctggcgcgggcctcggggagaggggtggaagatgtctatggatgtgacattcctggggacgggtgcagcatacccatctccaacccggggtgcctctgctgtggtccttcggtgtgaaggcgagtgctggctctttgactgtggggagggaacacagacacagcttatgaaaagccaacttaaagcagggagaattaccaagatcttcatcacacaccttcatggagaccatttctttggccttcctgggctcctctgcacaatcagcctgcagagtggctccatggtgtccaaacagcctattgaaatctatggccctgtagggcttcgggactttatctggcgaaccatggaactctctcacacggagctggtcttccattatgtggttcatgaactggttcctacagcagatcaatgtcctgcagaagaactaaaagaatttgcgcatgtgaatagagcagacagtcctcccaaagaggaacaaggaagaactatcctgttagactcagaagaaaactcataccttctgtttgatgatgaacaatttgttgtaaaagcatttcgcctctttcacagaattccctcatttgggttttcagtcgtggaaaagaaacgcccaggtaaactcaatgcacagaaacttaaagaccttggtgttccaccaggtcctgcctatgggaagctgaaaaatggaatttctgttgttctggaaaatggggttacaatttctccccaagatgtcttaaaaaagcctattgttggaagaaaaatctgcatattgggtgactgctctggggttgtgggtgatggaggagtaaaactgtgctttgaagcagacctgttgatccacgaagcaaccctggatgatgcccagatggacaaagcaaaggagcatggccacagcacaccacagatggcagcaacatttgcaaagttgtgccgtgcaaagaggctggttctgactcacttcagtcagaggtacaaaccagttgccttggccagagaaggagaaacagatggcattgcagaactaaaaaagcaagctgaatcagtgttagatctccaagaagtgactctagcagaagattttatggtgataagcattccaatcaagaaatgaaaccagtgttcctgagtgcacactgacatgtctgtgaatatgttactgaacctatagtccagtttttttatttcttgttttagtctgaaattatttgggccctaataatcctaaaaagaatggagctgcattgatgaattggctcagtatttaaagggagcaaactttttgataataaatctttttaagagaaaaaaaacccagcatcctttttgaagtccagatttgtcaaaatgatagactattcagttatacatcttattttgtgctactaccacagatagccaatattccatgcagtcctgggcttagcttctgcccagctttattgctgctattggcaaagagcacaggactcagccctcgtggctaaaaatggtattttggcagtttgtattgaatctgtttgtgttattaacagaagagggagaaatgtcatgagacgttggacaggcaggattgatgatagcatgaccatagctttgctggaatactgaatgcagggtttggctaggtgtttattttaacattttattaaactttctatttgggtcttaacccatggttctcagctggggtgacactgctcctctagaagcaggtttgaaattatgggtatgttttcttgtcacagtgactgagtacggtggtggtagtggtggtactactactactggtatttagtcagcagggataagggatgttagctgtcctgcaaagttttggtcagtcatatacaataaagaatcatctcaccccgaaatgcaaattgcaggcccattgagatacacagcaagttagtttatactcttgatgtgaatatagtttaccaaaattagtgacataatgagtggaattactaggtaagtcaaatcctaaagagtgaatgtgttagaattgcagtgtcataccaaataacattcaaaagaaatgagccatcaagtgaagcttatgaacctggaggtaaaaaatgcttatctgttaaactgaggtttcattgacgtgtccctattaataaacgttatttgccccaca

SEQ ID NO: 449507 - DNA, 1843 bp, Homo sapiens
ggcgcacttccgcccgggcgcattgtagccccgcggacagctgggccagggtgcgggcctgcgcctccctcggctcctggcgcgggcctcggggagaggggtggaagatgtctatggatgtgacattcctggggacgggtgcagcatacccatctccaacccggggtgcctctgctgtggtccttcggtgtgaaggcgagtgctggctctttgactgtggggagggaacacagacacagcttatgaaaagccaacttaaagcagaattccctcatttgggttttcagtcgtggaaaagaaacgcccaggtaaactcaatgcacagaaacttaaagaccttggtgttccaccaggtcctgcctatgggaagctgaaaaatggaatttctgttgttctggaaaatggggttacaatttctccccaagatgtcttaaaaaagcctattgttggaagaaaaatctgcatattgggtgactgctctggggttgtgggtgatggaggagtaaaactgtgctttgaagcagacctgttgatccacgaagcaaccctggatgatgcccagatggacaaagcaaaggagcatggccacagcacaccacagatggcagcaacatttgcaaagttgtgccgtgcaaagaggctggttctgactcacttcagtcagaggtacaaaccagttgccttggccagagaaggagaaacagatggcattgcagaactaaaaaagcaagctgaatcagtgttagatctccaagaagtgactctagcagaagattttatggtgataagcattccaatcaagaaatgaaaccagtgttcctgagtgcacactgacatgtctgtgaatatgttactgaacctatagtccagtttttttatttcttgttttagtctgaaattatttgggccctaataatcctaaaaagaatggagctgcattgatgaattggctcagtatttaaagggagcaaactttttgataataaatctttttaagagaaaaaaaacccagcatcctttttgaagtccagatttgtcaaaatgatagactattcagttatacatcttattttgtgctactaccacagatagccaatattccatgcagtcctgggcttagcttctgcccagctttattgctgctattggcaaagagcacaggactcagccctcgtggctaaaaatggtattttggcagtttgtattgaatctgtttgtgttattaacagaagagggagaaatgtcatgagacgttggacaggcaggattgatgatagcatgaccatagctttgctggaatactgaatgcagggtttggctaggtgtttattttaacattttattaaactttctatttgggtcttaacccatggttctcagctggggtgacactgctcctctagaagcaggtttgaaattatgggtatgttttcttgtcacagtgactgagtacggtggtggtagtggtggtactactactactggtatttagtcagcagggataagggatgttagctgtcctgcaaagttttggtcagtcatatacaataaagaatcatctcaccccgaaatgcaaattgcaggcccattgagatacacagcaagttagtttatactcttgatgtgaatatagtttaccaaaattagtgacataatgagtggaattactaggtaagtcaaatcctaaagagtgaatgtgttagaattgcagtgtcataccaaataacattcaaaagaaatgagccatcaagtgaagcttatgaacctggaggtaaaaaatgcttatctgttaaactgaggtttcattgacgtgtccctattaataaacgttatttgccccaca

SEQ ID NO: 449508 - DNA, 1010 bp, Homo sapiens
agacaattttcagcaggaagaagtagaaaggataaaatggatcctgcaccacgggaacctcacagcacctcacggacttcttttggttttctttctctttggggcacctctggactcactccccagcatgaaggcgctgagcccggtgcgcggctgctacgaggcggtgtgctgcctgtcggaacgcagtctggccatcgcccggggccgagggaagggcccggcagctgaggagccgctgagcttgctggacgacatgaaccactgctactcccgcctgcgggaactggtacccggagtcccgagaggcactcagcttagccaggtggaaatcctacagcgcgtcatcgactacattctcgacctgcaggtagtcctggccgagccagcccctggaccccctgatggcccccaccttcccatccagacagccgagctcgctccggaacttgtcatctccaacgacaaaaggagcttttgccactgactcggccgtgtcctgacacctccagaacgcaggtgctggcgcccgttctgcctgggaccccgggaacctctcctgccggaagccggacggcagggatgggccccaacttcgccctgcccacttgacttcaccaaatcccttcctggagactaaacctggtgctcaggagcgaaggactgtgaacttgtggcctgaagagccagagctagctctggccaccagctgggcgacgtcaccctgctcccaccccacccccaagttctaaggtcttttcagagcgtggaggtgtggaaggagtggctgctctccaaactatgccaaggcggcggcagagctggtcttctggtctccttggagaaaggttctgttgccctgatttatgaactctataatagagtatataggttttgtaccttttttacaggaaggtgactttctgtaacaatgcgatgtatattaaactttttataaaagttaacattttgcataataaacgatttttaaacacttgtgtatatgatga

SEQ ID NO: 449509 - DNA, 728 bp, Homo sapiens
ggctcagcgccttcatgctggggagtgagtccagaggtgccccaaagagaaagaaaaccaaaagaagtcccgctacagtgacctgcaggtagtcctggccgagccagcccctggaccccctgatggcccccaccttcccatccagacagccgagctcgctccggaacttgtcatctccaacgacaaaaggagcttttgccactgactcggccgtgtcctgacacctccagaacgcaggtgctggcgcccgttctgcctgggaccccgggaacctctcctgccggaagccggacggcagggatgggccccaacttcgccctgcccacttgacttcaccaaatcccttcctggagactaaacctggtgctcaggagcgaaggactgtgaacttgtggcctgaagagccagagctagctctggccaccagctgggcgacgtcaccctgctcccaccccacccccaagttctaaggtcttttcagagcgtggaggtgtggaaggagtggctgctctccaaactatgccaaggcggcggcagagctggtcttctggtctccttggagaaaggttctgttgccctgatttatgaactctataatagagtatataggttttgtaccttttttacaggaaggtgactttctgtaacaatgcgatgtatattaaactttttataaaagttaacattttgcataataaacgatttttaaacacttgtgtatatgatga

SEQ ID NO: 449510 - DNA, 968 bp, Homo sapiens
  misc_feature (5)..(5): n is a, c, g, or t
  misc_feature (7)..(7): n is a, c, g, or t
aactnanggctaggtacgaggctgggtgtggggacttcttttggttttctttctctttggggcacctctggactcactccccagcatgaaggcgctgagcccggtgcgcggctgctacgaggcggtgtgctgcctgtcggaacgcagtctggccatcgcccggggccgagggaagggcccggcagctgaggagccgctgagcttgctggacgacatgaaccactgctactcccgcctgcgggaactggtacccggagtcccgagaggcactcagcttagccaggtggaaatcctacagcgcgtcatcgactacattctcgacctgcaggtagtcctggccgagccagcccctggaccccctgatggcccccaccttcccatccagacagccgagctcgctccggaacttgtcatctccaacgacaaaaggagcttttgccactgactcggccgtgtcctgacacctccagaacgcaggtgctggcgcccgttctgcctgggaccccgggaacctctcctgccggaagccggacggcagggatgggccccaacttcgccctgcccacttgacttcaccaaatcccttcctggagactaaacctggtgctcaggagcgaaggactgtgaacttgtggcctgaagagccagagctagctctggccaccagctgggcgacgtcaccctgctcccaccccacccccaagttctaaggtcttttcagagcgtggaggtgtggaaggagtggctgctctccaaactatgccaaggcggcggcagagctggtcttctggtctccttggagaaaggttctgttgccctgatttatgaactctataatagagtatataggttttgtaccttttttacaggaaggtgactttctgtaacaatgcgatgtatattaaactttttataaaagttaacattttgcataataaacgatttttaaacacttgtgtatatgatga

SEQ ID NO: 449511 - DNA, 1035 bp, Homo sapiens
  misc_feature (907)..(907): n is a, c, g, or t
  misc_feature (915)..(915): n is a, c, g, or t
  misc_feature (918)..(918): n is a, c, g, or t
  misc_feature (922)..(923): n is a, c, g, or t
agacaattttcagcaggaagaagtagaaaggataaaatggatcctgcaccacgggaacctcacagcacctcacggacttcttttggttttctttctctttggggcacctctggactcactccccagcatgaaggcgctgagcccggtgcgcggctgctacgaggcggtgtgctgcctgtcggaacgcagtctggccatcgcccggggccgagggaagggcccggcagctgaggagccgctgagcttgctggacgacatgaaccactgctactcccgcctgcgggaactggtacccggagtcccgagaggcactcagcttagccaggtggaaatcctacagcgcgtcatcgactacattctcgacctgcaggtagtcctggccgagccagcccctggaccccctgatggcccccaccttcccatccagacagccgagctcgctccggaacttgtcatctccaacgacaaaaggagcttttgccactgactcggccgtgtcctgacacctccagaacgcaggtgctggcgcccgttctgcctgggaccccgggaacctctcctgccggaagccggacggcagggatgggccccaacttcgccctgcccacttgacttcaccaaatcccttcctggagactaaacctggtgctcaggagcgaaggactgtgaacttgtggcctgaagagccagagctagctctggccaccagctgggcgacgtcaccctgctcccaccccacccccaagttctaaggtcttttcagagcgtggaggtgtggaaggagtggctgctctccaaactatgccaaggcggcggcagagctggtcttctggtctccttggagaaaggttctgttgccctgatttatgaactctataatagagtatataggttttgtaccttttanggagggcntcngacnngcagttttacttttaaagaccttggtataagctttacctgggttttggcaaaaaaaacggctttgggggaaggaggcggattcccctgagatgccttattaaattaaaaaag

SEQ ID NO: 449512 - DNA, 1907 bp, Homo sapiens
gcggactggcagggggcagggaagctcaaagatctggggtgctgccaggaaaaagcaaattctggaagttaatggttttgagtgatttttaaatccttgctggcggagaggcccgcctctccccggtatcagcgcttcctcattctttgaatccgcggctccgcggtcttcggcgtcagaccagccggaggaagcctgtttgcaatttaagcgggctgtgaacgcccagggccggcgggggcagggccgaggcgggccattttgaataaagaggcgtgccttccaggcaggctctataagtgaccgccgcggcgagcgtgcgcgcgttgcaggtcactgtagcgggacttcttttggttttctttctctttggggcacctctggactcactccccagcatgaaggcgctgagcccggtgcgcggctgctacgaggcggtgtgctgcctgtcggaacgcagtctggccatcgcccggggccgagggaagggcccggcagctgaggagccgctgagcttgctggacgacatgaaccactgctactcccgcctgcgggaactggtacccggagtcccgagaggcactcagcttagccaggtggaaatcctacagcgcgtcatcgactacattctcgacctgcaggtagtcctggccgagccagcccctggaccccctgatggcccccaccttcccatccaggtaagcctcgaagtcgggacagggctgaacacccaggcaaggatgctgcgggaccctcggagctcccgattgcctcgcgtaactcttccctcttttcctctaatcagacagccgagctcgctccggaacttgtcatctccaacgacaaaaggagcttttgccactgactcggccgtgtcctgacacctccaggtgagtatctcctctcttggagagggaggtttaaacggcaagtcctggagttggcagacgttttgaaaaattgccactcactcggtttagggaaactgaggccagagagggacaagtgacttgcccatggttgcatcaaatgaatggcagagtcagtttccatgtgatgtgcatttaagccttaaatgcgcctgggccctgccctcccgcagtggccgagggtctggcaaagtagacatgggtccgactaaatacaagtctttctgttccatgttgtatagggagctgtcttcggcagccccctcccagctagtgtcaattccaagtaggaggggtagcgcaagctccgcctgtggtctttggcgccaactgggtgggggcagcgtggggcgcggagttatcagctggaggtacagaccaagtttcctccctggcgccggccagtctgcggacggcccccgcctcggcacgctcggcggaaactgactgctccttggtcttctttcctcccccgcccagaacgcaggtgctggcgcccgttctgcctgggaccccgggaacctctcctgccggaagccggacggcagggatgggccccaacttcgccctgcccacttgacttcaccaaatcccttcctggagactaaacctggtgctcaggagcgaaggactgtgaacttgtggcctgaagagccagagctagctctggccaccagctgggcgacgtcaccctgctcccaccccacccccaagttctaaggtcttttcagagcgtggaggtgtggaaggagtggctgctctccaaactatgccaaggcggcggcagagctggtcttctggtctccttggagaaaggttctgttgccctgatttatgaactctataatagagtatataggttttgtaccttttttacaggaaggtgactttctgtaacaatgcgatgtatattaaactttttataaaagttaacattttgcataataaacgatttttaaacacttgtgtatatgatga

SEQ ID NO: 449513 - DNA, 1853 bp, Homo sapiens
gcggactggcagggggcagggaagctcaaagatctggggtgctgccaggaaaaagcaaattctggaagttaatggttttgagtgatttttaaatccttgctggcggagaggcccgcctctccccggtatcagcgcttcctcattctttgaatccgcggctccgcggtcttcggcgtcagaccagccggaggaagcctgtttgcaatttaagcgggctgtgaacgcccagggccggcgggggcagggccgaggcgggccattttgaataaagaggcgtgccttccaggcaggctctataagtgaccgccgcggcgagcgtgcgcgcgttgcaggtcactgtagcgggacttcttttggttttctttctctttggggcacctctggactcactccccagcatgaaggcgctgagcccggtgcgcggctgctacgaggcggtgtgctgcctgtcggaacgcagtctggccatcgcccggggccgagggaagggcccggcagctgaggagccgctgagcttgctggacgacatgaaccactgctactcccgcctgcgggaactggtacccggagtcccgagaggcactcagcttagccaggtggaaatcctacagcgcgtcatcgactacattctcgacctgcaggtagtcctggccgagccagcccctggaccccctgatggcccccaccttcccatccaggtaagcctcgaagtcgggacagggctgaacacccaggcaaggatgctgcgggaccctcggagctcccgattgcctcgcgtaactcttccctcttttcctctaatcagacagccgagctcgctccggaacttgtcatctccaacgacaaaaggagcttttgccactgactcggccgtgtcctgacacctccaggtgagtatctcctctcttggagagggaggtttaaacggcaagtcctggagttggcagacgttttgattgcccatggttgcatcaaatgaatggcagagtcagtttccatgtgatgtgcatttaagccttaaatgcgcctgggccctgccctcccgcagtggccgagggtctggcaaagtagacatgggtccgactaaatacaagtctttctgttccatgttgtatagggagctgtcttcggcagccccctcccagctagtgtcaattccaagtaggaggggtagcgcaagctccgcctgtggtctttggcgccaactgggtgggggcagcgtggggcgcggagttatcagctggaggtacagaccaagtttcctccctggcgccggccagtctgcggacggcccccgcctcggcacgctcggcggaaactgactgctccttggtcttctttcctcccccgcccagaacgcaggtgctggcgcccgttctgcctgggaccccgggaacctctcctgccggaagccggacggcagggatgggccccaacttcgccctgcccacttgacttcaccaaatcccttcctggagactaaacctggtgctcaggagcgaaggactgtgaacttgtggcctgaagagccagagctagctctggccaccagctgggcgacgtcaccctgctcccaccccacccccaagttctaaggtcttttcagagcgtggaggtgtggaaggagtggctgctctccaaactatgccaaggcggcggcagagctggtcttctggtctccttggagaaaggttctgttgccctgatttatgaactctataatagagtatataggttttgtaccttttttacaggaaggtgactttctgtaacaatgcgatgtatattaaactttttataaaagttaacattttgcataataaacgatttttaaacacttgtgtatatgatga

SEQ ID NO: 449514 - DNA, 1417 bp, Homo sapiens
gcggactggcagggggcagggaagctcaaagatctggggtgctgccaggaaaaagcaaattctggaagttaatggttttgagtgatttttaaatccttgctggcggagaggcccgcctctccccggtatcagcgcttcctcattctttgaatccgcggctccgcggtcttcggcgtcagaccagccggaggaagcctgtttgcaatttaagcgggctgtgaacgcccagggccggcgggggcagggccgaggcgggccattttgaataaagaggcgtgccttccaggcaggctctataagtgaccgccgcggcgagcgtgcgcgcgttgcaggtcactgtagcgggacttcttttggttttctttctctttggggcacctctggactcactccccagcatgaaggcgctgagcccggtgcgcggctgctacgaggcggtgtgctgcctgtcggaacgcagtctggccatcgcccggggccgagggaagggcccggcagctgaggagccgctgagcttgctggacgacatgaaccactgctactcccgcctgcgggaactggtacccggagtcccgagaggcactcagcttagccaggtggaaatcctacagcgcgtcatcgactacattctcgacctgcaggtagtcctggccgagccagcccctggaccccctgatggcccccaccttcccatccaggtaagcctcgaagtcgggacagggctgaacacccaggcaaggatgctgcgggaccctcggagctcccgattgcctcgcgtaactcttccctcttttcctctaatcagacagccgagctcgctccggaacttgtcatctccaacgacaaaaggagcttttgccactgactcggccgtgtcctgacacctccaggtgagtatctcctctcttggagagggaggtttaaacggcaagtcctggagttggcagacgttttgaaaaattgccactcactcggtttagggaaactgaggccagagagggacaagtgacttgcccatggttgcatcaaatgaatggcagagtcagtttccatgtgatgtgcatttaagccttaaatgcgcctgggccctgccctcccgcagtggccgagggtctggcaaagtagacatgggtccgactaaatacaagtctttctgttccatgttgtatagggagctgtcttcggcagccccctcccagctagtgtcaattccaagtaggaggggtagcgcaagctccgcctgtggtctttggcgccaactgggtgggggcagcgtggggcgcggagttatcagctggaggtacagaccaagtttcctccctggcgccggccagtctgcggacggcccccgcctcggcacgctcggcggaaactgactgctccttgtcgtggcgattgggatcctaagagtcgccta

SEQ ID NO: 449515 - DNA, 1281 bp, Homo sapiens
gcggactggcagggggcagggaagctcaaagatctggggtgctgccaggaaaaagcaaattctggaagttaatggttttgagtgatttttaaatccttgctggcggagaggcccgcctctccccggtatcagcgcttcctcattctttgaatccgcggctccgcggtcttcggcgtcagaccagccggaggaagcctgtttgcaatttaagcgggctgtgaacgcccagggccggcgggggcagggccgaggcgggccattttgaataaagaggcgtgccttccaggcaggctctataagtgaccgccgcggcgagcgtgcgcgcgttgcaggtcactgtagcgggacttcttttggttttctttctctttggggcacctctggactcactccccagcatgaaggcgctgagcccggtgcgcggctgctacgaggcggtgtgctgcctgtcggaacgcagtctggccatcgcccggggccgagggaagggcccggcagctgaggagccgctgagcttgctggacgacatgaaccactgctactcccgcctgcgggaactggtacccggagtcccgagaggcactcagcttagccaggtggaaatcctacagcgcgtcatcgactacattctcgacctgcaggtagtcctggccgagccagcccctggaccccctgatggcccccaccttcccatccagacagccgagctcgctccggaacttgtcatctccaacgacaaaaggagcttttgccactgactcggccgtgtcctgacacctccagaacgcaggtgctggcgcccgttctgcctgggaccccgggaacctctcctgccggaagccggacggcagggatgggccccaacttcgccctgcccacttgacttcaccaaatcccttcctggagactaaacctggtgctcaggagcgaaggactgtgaacttgtggcctgaagagccagagctagctctggccaccagctgggcgacgtcaccctgctcccaccccacccccaagttctaaggtcttttcagagcgtggaggtgtggaaggagtggctgctctccaaactatgccaaggcggcggcagagctggtcttctggtctccttggagaaaggttctgttgccctgatttatgaactctataatagagtatataggttttgtaccttttttacaggaaggtgactttctgtaacaatgcgatgtatattaaactttttataaaagttaacattttgcataataaacgatttttaaacacttgtgtatatgatga

SEQ ID NO: 449516 - DNA, 1095 bp, Homo sapiens
gcggactggcagggggcagggaagctcaaagatctggggtgctgccaggaaaaagcaaattctggaagttaatggttttgagtgatttttaaatccttgctggcggagaggcccgcctctccccggtatcagcgcttcctcattctttgaatccgcggctccgcggtcttcggcgtcagaccagccggaggaagcctgtttgcaatttaagcgggctgtgaacgcccagggccggcgggggcagggccgaggcgggccattttgaataaagaggcgtgccttccaggcaggctctataagtgaccgccgcggcgagcgtgcgcgcgttgcaggtcactgtagcgggacttcttttggttttctttctctttggggcacctctggactcactccccagcatgaaggcgctgagcccggtgcgcggctgctacgaggcggtgtgctgcctgtcggaacgcagtctggccatcgcccggggccgagggaagggcccggcagctgaggagccgctgagcttgctggacgacatgaaccactgctactcccgcctgcgggaactggtacccggagtcccgagaggcactcagcttagccaggtggaaatcctacagcgcgtcatcgactacattctcgacctgcaggtagtcctggccgagccagcccctggaccccctgatggcccccaccttcccatccagacagccgagctcgctccggaacttgtcatctccaacgacaaaaggagcttttgccactgactcggccgtgtcctgacacctccagaacgcaggtgctggcgcccgttctgcctgggaccccgggaacctctcctgccggaagccggacggcagggatgggccccaacttcgccctgcccacttgacttcaccaaatcccttcctggagactaaacctggtgctcaggagcgaaggactgtgaacttgtggcctgaagagccagagctagctctggccaccagctgggcgacgtcaccctgctcccaccccacccccaagttctaaggtcttttcagagcgtgagtgtgaggtgtgtctcattgcaggggaacggctcggccctgaaaggtgtgccgt

SEQ ID NO: 449517 - DNA, 2063 bp, Homo sapiens
gcggactggcagggggcagggaagctcaaagatctggggtgctgccaggaaaaagcaaattctggaagttaatggttttgagtgatttttaaatccttgctggcggagaggcccgcctctccccggtatcagcgcttcctcattctttgaatccgcggctccgcggtcttcggcgtcagaccagccggaggaagcctgtttgcaatttaagcgggctgtgaacgcccagggccggcgggggcagggccgaggcgggccattttgaataaagaggcgtgccttccaggcaggctctataagtgaccgccgcggcgagcgtgcgcgcgttgcaggtcactgtagcgggacttcttttggttttctttctctttggggcacctctggactcactccccagcatgaaggcgctgagcccggtgcgcggctgctacgaggcggtgtgctgcctgtcggaacgcagtctggccatcgcccggggccgagggaagggcccggcagctgaggagccgctgagcttgctggacgacatgaaccactgctactcccgcctgcgggaactggtacccggagtcccgagaggcactcagcttagccaggtggaaatcctacagcgcgtcatcgactacattctcgacctgcaggtagtcctggccgagccagcccctggaccccctgatggcccccaccttcccatccagacagccgagctcgctccggaacttgtcatctccaacgacaaaaggagcttttgccactgactcggccgtgtcctgacacctccagaacgcaggtgctggcgcccgttctgcctgggaccccgggaacctctcctgccggaagccggacggcagggatgggccccaacttcgccctgcccacttgacttcaccaaatcccttcctggagactaaacctggtgctcaggagcgaaggactgtgaacttgtggcctgaagagccagagctagctctggccaccagctgggcgacgtcaccctgctcccaccccacccccaagttctaaggtcttttcagagcgtggaggtgtggaaggagtggctgctctccaaactatgccaaggcggcggcagagctggtcttctggtctccttggagaaaggttctgttgccctgatttatgaactctataatagagtatataggttttgtaccttttttacaggaaggtgactttctgtaacaatgcgatgtatattaaactttttataaaagttaacattttgcataataaacgatttttaaacacttgtgtatatgatgaaaaaaaaaaacacagaaaaaaacacgaaagaaagaaacagagaaacaaaaacacacgagcagagacgaagacagccagaacacacacgcgagtagaccacaagaccaaaaaagaaaagcaaacggatcaggagcggtaaaaacagaaagacaagcagcagcggagggatacagaagcgagcggggatcgcggaagcgaccagcagaagaccaggccgacggagtcgagacacaaggggcgcagtgagacgggagcgagggcagaaggcacgcggcacgtcgacagcactgcgtaggcgtaggagaaggtcaaactgaaagaaaacagtacgagcagcacggggcgacaaggaaagaaccgagaagagaagcgtagacaagcagggaaggccaaagcagacgagcaggagagggcacgatagactcggaagcgggacaaaaaacagagtaacacgagagcactacagagagagctactgcagaggtcgagctcgaacaaactgagagagacaggaaaacagcaaggaaaaagaaaggagacgaggaggagaggtaaggtaaggaaggagaggaaagaacaggaggagagaaagcggaaatgcaaaggagaggcgaaaagaggagagcggtaaaaaaagggagaaagaaaagaaacgaaaaaggaggaagcgcagacaagagaaaaagaggagaaagagaaaaaagaagcagaaggaacgaaaggaagagagcgcacagaagggagagccgcaaaagactcaggagacagaaaacagcagagac

SEQ ID NO: 449518 - DNA, 1800 bp, Homo sapiens
gcggactggcagggggcagggaagctcaaagatctggggtgctgccaggaaaaagcaaattctggaagttaatggttttgagtgatttttaaatccttgctggcggagaggcccgcctctccccggtatcagcgcttcctcattctttgaatccgcggctccgcggtcttcggcgtcagaccagccggaggaagcctgtttgcaatttaagcgggctgtgaacgcccagggccggcgggggcagggccgaggcgggccattttgaataaagaggcgtgccttccaggcaggctctataagtgaccgccgcggcgagcgtgcgcgcgttgcaggtcactgtagcgggacttcttttggttttctttctctttggggcacctctggactcactccccagcatgaaggcgctgagcccggtgcgcggctgctacgaggcggtgtgctgcctgtcggaacgcagtctggccatcgcccggggccgagggaagggcccggcagctgaggagccgctgagcttgctggacgacatgaaccactgctactcccgcctgcgggaactggtacccggagtcccgagaggcactcagcttagccaggtggaaatcctacagcgcgtcatcgactacattctcgacctgcaggtagtcctggccgagccagcccctggaccccctgatggcccccaccttcccatccagacagccgagctcgctccggaacttgtcatctccaacgacaaaaggagcttttgccactgactcggccgtgtcctgacacctccaggtgagtatctcctctcttggagagggaggtttaaacggcaagtcctggagttggcagacgttttgaaaaattgccactcactcggtttagggaaactgaggccagagagggacaagtgacttgcccatggttgcatcaaatgaatggcagagtcagtttccatgtgatgtgcatttaagccttaaatgcgcctgggccctgccctcccgcagtggccgagggtctggcaaagtagacatgggtccgactaaatacaagtctttctgttccatgttgtatagggagctgtcttcggcagccccctcccagctagtgtcaattccaagtaggaggggtagcgcaagctccgcctgtggtctttggcgccaactgggtgggggcagcgtggggcgcggagttatcagctggaggtacagaccaagtttcctccctggcgccggccagtctgcggacggcccccgcctcggcacgctcggcggaaactgactgctccttggtcttctttcctcccccgcccagaacgcaggtgctggcgcccgttctgcctgggaccccgggaacctctcctgccggaagccggacggcagggatgggccccaacttcgccctgcccacttgacttcaccaaatcccttcctggagactaaacctggtgctcaggagcgaaggactgtgaacttgtggcctgaagagccagagctagctctggccaccagctgggcgacgtcaccctgctcccaccccacccccaagttctaaggtcttttcagagcgtggaggtgtggaaggagtggctgctctccaaactatgccaaggcggcggcagagctggtcttctggtctccttggagaaaggttctgttgccctgatttatgaactctataatagagtatataggttttgtaccttttttacaggaaggtgactttctgtaacaatgcgatgtatattaaactttttataaaagttaacattttgcataataaacgatttttaaacacttgtgtatatgatga

SEQ ID NO: 449519 - DNA, 1013 bp, Homo sapiens
gcggactggcagggggcagggaagctcaaagatctggggtgctgccaggaaaaagcaaattctggaagttaatggttttgagtgatttttaaatccttgctggcggagaggcccgcctctccccggtatcagcgcttcctcattctttgaatccgcggctccgcggtcttcggcgtcagaccagccggaggaagcctgtttgcaatttaagcgggctgtgaacgcccagggccggcgggggcagggccgaggcgggccattttgaataaagaggcgtgccttccaggcaggctctataagtgaccgccgcggcgagcgtgcgcgcgttgcaggtcactgtagcgggacttcttttggttttctttctctttggggcacctctggactcactccccagcatgaaggcgctgagcccggtgcgcggctgctacgaggcggtgtgctgcctgtcggaacgcagtctggccatcgcccggggccgagggaagggcccggcagctgaggagccgctgagcttgctggacgacatgaaccactgctactcccgcctgcgggaactctcctgccggaagccggacggcagggatgggccccaacttcgccctgcccacttgacttcaccaaatcccttcctggagactaaacctggtgctcaggagcgaaggactgtgaacttgtggcctgaagagccagagctagctctggccaccagctgggcgacgtcaccctgctcccaccccacccccaagttctaaggtcttttcagagcgtggaggtgtggaaggagtggctgctctccaaactatgccaaggcggcggcagagctggtcttctggtctccttggagaaaggttctgttgccctgatttatgaactctataatagagtatataggttttgtaccttttttacaggaaggtgactttctgtaacaatgcgatgtatattaaactttttataaaagttaacattttgcataataaacgatttttaaacacttgtgtatatgatga

SEQ ID NO: 449520 - DNA, 430 bp, Homo sapiens
  misc_feature (1)..(1): n is a, c, g, or t
  misc_feature (67)..(67): n is a, c, g, or t
ncttgttcggttcttcgattggcacggtaccactacgttatttaaccaccccctcctgctatgtganctttttcttgtagattttcagtggaaactgggtatggctgtgagctcagacacttgcagatctcttaagtatccttacgttgcagtgatgctaaaagtggcagatcattcaggccaagtaaagaccaagtgctttgaaatgacgattccacagtttcagaatttctacagacagttcaaggaaattgctgcagttattgaaacggtgtgaagacggattctttggttgataaattgctatcattctaaagtcatggacttcactttcggcaacaaaactaaataaggatggaacatttattgaatgaaaaatgcacttttgtttttccatttttttaaataataaaaatcagacaaacaggaa

SEQ ID NO: 449521 - DNA, 1283 bp, Homo sapiens
cacggccgcgaggccgtgccaccctgagccttccccaggtctcccctagtcctgtgtccgcgagccggtgaccttcagccgtccctcttgcattgctccttctcttttgcacctgagccggtagccgttgccattgtaatgaaagctcctcttccccaccctgcactagcccgaagaatgcagatcaaggattgttgggctttgattaggcgacagttattcgaagccaggaacacgcttgtagattttcagtggaaactgggtatggctgtgagctcagacacttgcagatctcttaagtatccttacgttgcagtgatgctaaaagtggcagatcattcaggccaagtaaagaccaagtgctttgaaatgacgattccacagtttcagaatttctacagacagttcaaggaaattgctgcagttattgaaacggtgtgaagacggattctttggttgataaattgctatcattctaaagtcatggacttcactttcggcaacaaaactaaataaggatggaacatttattgaatgaaaaatgcacttttgtttttccatttttttaaataataaaaatcagacaaacaggaaaactgggtagtggtgatgaatgcaaaactttgtgaatgtgctttataaaagtgataattagacactttagaggatatacttggtgataatgtgaatgatgtaatcagactaacagttgaatcattgctgttggaggcagcacaaatttatgtgttacaacaatagtttaaaaacttgtactggatggaacccattttataaacagtcttatttggagtcatgtatataaaaatatatataaattagaaaagtagtatttgattaggataactttacaaattcaatagtatagccatcacttattataatggcaatcagaagagtgaggcttcttttttcaaacttttgtaatcagattaagattgaccattgctcctttacacagtattagtctagcattcaattatttctgttattaatggttgtagaaagttcaaatacatacgcagagttggaaagacgagttttagtctgagttctgtacgacggagttaacccgttagcacaagttattgcattagatgatctctgttgaatttaaatacataaacctgttgttaaacgcttttatactataaagccaccacattgtatggcatttgtttagaagtaagcaaatagaccaccggaatagaatagatggcctagaaatagatcaagacattctggtccgccatattagaaattta

SEQ ID NO: 449522 - DNA, 441 bp, Homo sapiens
ctcatgtgctttttgaaaagtttagtcataagataattatccaaccccacagtagtatttttgcttgcagtaccaaattgcacctatttcttacagcaaccttcagtaattgagaatgtaacactaaaatgcaaacttaatatgttatatagtctccggtagtcagatataattaaaataactacttaaatatcttctaaaagcaaaattaatattattttccccctttctctccagaatttctacagacagttcaaggaaattgctgcagttattgaaacggtgtgaagacggattctttggttgataaattgctatcattctaaagtcatggacttcactttcggcaacaaaactaaataaggatggaacatttattgaatgaaaaatgcacttttgtttttccatttttttaaataataaaaatcagacaaacaggaa

SEQ ID NO: 449523 - DNA, 193 bp, Homo sapiens
  misc_feature (39)..(39): n is a, c, g, or t
gaataagtccgaagcccgtgagtgaaccatcattataancgtgatgatcagctgtttgtcatattgctatcattctaaagtcatggacttcactttcggcaacaaaactaaataaggatggaacatttattgaatgaaaaatgcacttttgtttttccatttttttaaataataaaaatcagacaaacaggaa

SEQ ID NO: 449524 - DNA, 568 bp, Homo sapiens
aaattcaaggcggcccttgattagattctagttgtggatgggcttcccctgctacgtccgccccatgcgccaggccgctaggggcaggacgtggaagcggaagcgctggtctgggggcgttctctcgagtccgggccgcaagtcccagacgctgcccatggaggcgtccagcgagccgccgctggatgctaagtccgatgtcaccaaccagcttgtagattttcagtggaaactgggtatggctgtgagctcagacacttgcagatctcttaagtatccttacgttgcagtgatgctaaaagtggcagatcattcaggccaagtaaagaccaagtgctttgaaatgacgattccacagtttcagaatttctacagacagttcaaggaaattgctgcagttattgaaacggtgtgaagacggattctttggttgataaattgctatcattctaaagtcatggacttcactttcggcaacaaaactaaataaggatggaacatttattgaatgaaaaatgcacttttgtttttccatttttttaaataataaaaatcagacaaacaggaa

SEQ ID NO: 449525 - DNA, 1257 bp, Homo sapiens
aaattcaaggcggcccttgattagattctagttgtggatgggcttcccctgctacgtccgccccatgcgccaggccgctaggggcaggacgtggaagcggaagcgctggtctgggggcgttctctcgagtccgggccgcaagtcccagacgctgcccatggaggcgtccagcgagccgccgctggatgctaagtccgatgtcaccaaccagcttgtagattttcagtggaaactgggtatggctgtgagctcagacacttgcagatctcttaagtatccttacgttgcagtgatgctaaaagtggcagatcattcaggccaagtaaagaccaagtgctttgaaatgacgattccacagtttcagaatttctacagacagttcaaggaaattgctgcagttattgaaacggtgtgaagacggattctttggttgataaattgctatcattctaaagtcatggacttcactttcggcaacaaaactaaataaggatggaacatttattgaatgaaaaatgcacttttgtttttccatttttttaaataataaaaatcagacaaacaggaaaactgggtagtggtgatgaatgcaaaactttgtgaatgtgctttataaaagtgataattagacactttagaggatatacttggtgataatgtgaatgatgtaatcagactaacagttgaatcattgctgttggaggcagcacaaatttatgtgttacaacaatagtttaaaaacttgtactggatggaacccattttataaacagtcttatttggagtcatgtatataaaaatatatataaattagaaaagtagtatttgattaggataactttacaaattcaatagtatagccatcacttattataatggcaatcagaagagtgaggcttcttttttcaaacttttgtaatcagattaagattgaccattgctcctttacacagtattagtctagcattcaattatttctgttattaatggttgtagaaagttcaaatacatacgcagagttggaaagacgagttttagtctgagttctgtacgacggagttaacccgttagcacaagttattgcattagatgatctctgttgaatttaaatacataaacctgttgttaaacgcttttatactataaagccaccacattgtatggcatttgtttagaagtaagcaaatagaccaccggaatagaatagatggcctagaaatagatcaagacattctggtccgccatattagaaattta

SEQ ID NO: 449526 - DNA, 885 bp, Homo sapiens
  misc_feature (684)..(684): n is a, c, g, or t
  misc_feature (816)..(816): n is a, c, g, or t
  misc_feature (833)..(833): n is a, c, g, or t
  misc_feature (839)..(839): n is a, c, g, or t
  misc_feature (844)..(845): n is a, c, g, or t
  misc_feature (855)..(855): n is a, c, g, or t
  misc_feature (858)..(858): n is a, c, g, or t
  misc_feature (867)..(867): n is a, c, g, or t
  misc_feature (875)..(875): n is a, c, g, or t
aaattcaaggcggcccttgattagattctagttgtggatgggcttcccctgctacgtccgccccatgcgccaggccgctaggggcaggacgtggaagcggaagcgctggtctgggggcgttctctcgagtccgggccgcaagtcccagacgctgcccatggaggcgtccagcgagccgccgctggatgctaagtccgatgtcaccaaccagcttgtagattttcagtggaaactgggtatggctgtgagctcagacacttgcagatctcttaagtatccttacgttgcagtgatgctaaaagtggcagatcattcaggccaagtaaagaccaagtgctttgaaatgacgattccacagtttcagaatttctacagacagttcaaggaaattgctgcagttattgaaacggtgtgaagacggattctttggttgataaattgctatcattctaaagtcatggacttcactttcggcaacaaaactaaataaggatggaacatttattgaatgaaaaatgcacttttgtttttccatttttttaaataataaaaatcagacaaacaggaaaaaaaaaaaaaatctcataaaaaaaaatcaatatactataacaataaccaaccatatcatcattcatctactttcctttcctcccctttatcctctttaaaaaaaaaaaaaactangtgggccgcttgggccaagtggtttttagatctgggcaaggtttttcctggcggccgaatttggggcttatttggccacattccccttatggggggcggttttaaattcaatggcccgggttttaaaacggngggactgggaaaacccnggggtnccaanntaatggctgnaanaatcccctntgcaggtngggatatagg

SEQ ID NO: 449527 - DNA, 808 bp, Homo sapiens
aaattcaaggcggcccttgattagattctagttgtggatgggcttcccctgctacgtccgccccatgcgccaggccgctaggggcaggacgtggaagcggaagcgctggtctgggggcgttctctcgagtccgggccgcaagtcccagacgctgcccatggaggcgtccagcgagccgccgctggatgctaagtccgatgtcaccaaccagcttgtagattttcagtggaaactgggtatggctgtgagctcagacacttgcagatctcttaagtatccttacgttgcagtgatgctaaaagtggcagatcattcaggccaagtaaagaccaagtgctttgaaatgacgattccacagtttcagaatttctacagacagttcaaggaaattgctgcagttattgaaacggtgtgaagacggattctttggttgataaattgctatcattctaaagtcatggacttcactttcggcaacaaaactaaataaggatggaacatttattgaatgaaaaatgcacttttgtttttccatttttttaaataataaaaatcagacaaacaggaaaaaaaaaaaaaaaaaaaaaaaaaaaaaaaaaaaaaaaaaaaaaaaaaaaaaaaaaaaaaaaaaaaaaaaaaaaaaaaaaaaaaacttcggggggggccccgtgcccaatttgcccttatagggagccgtttaacaattaactggccgtggtttaaaaccgtctgaatgggaaaacccttggcgttccccacttaaatgccttggaagaaattccccttttccccagtgggggaattgcca

SEQ ID NO: 449528 - DNA, 1296 bp, Homo sapiens
aaattcaaggcggcccttgattagattctagttgtggatgggcttcccctgctacgtccgccccatgcgccaggccgctaggggcaggacgtggaagcggaagcgctggtctgggggcgttctctcgagtccgggccgcaagtcccagacgctgcccatggaggcgtccagcgagccgccgctggatgctaagtccgatgtcaccaaccagcttgtagattttcagtggaaactgggtatggctgtgagctcagacacttgcagatctcttaagtatccttacgttgcagtgatgctaaaagtggcagatcattcaggccaagtaaagaccaagtgctttgaaatgacgattccacagtttcagcctcagctcctggcaacctccagtctcctttctgcttctaatttctacagacagttcaaggaaattgctgcagttattgaaacggtgtgaagacggattctttggttgataaattgctatcattctaaagtcatggacttcactttcggcaacaaaactaaataaggatggaacatttattgaatgaaaaatgcacttttgtttttccatttttttaaataataaaaatcagacaaacaggaaaactgggtagtggtgatgaatgcaaaactttgtgaatgtgctttataaaagtgataattagacactttagaggatatacttggtgataatgtgaatgatgtaatcagactaacagttgaatcattgctgttggaggcagcacaaatttatgtgttacaacaatagtttaaaaacttgtactggatggaacccattttataaacagtcttatttggagtcatgtatataaaaatatatataaattagaaaagtagtatttgattaggataactttacaaattcaatagtatagccatcacttattataatggcaatcagaagagtgaggcttcttttttcaaacttttgtaatcagattaagattgaccattgctcctttacacagtattagtctagcattcaattatttctgttattaatggttgtagaaagttcaaatacatacgcagagttggaaagacgagttttagtctgagttctgtacgacggagttaacccgttagcacaagttattgcattagatgatctctgttgaatttaaatacataaacctgttgttaaacgcttttatactataaagccaccacattgtatggcatttgtttagaagtaagcaaatagaccaccggaatagaatagatggcctagaaatagatcaagacattctggtccgccatattagaaattta

SEQ ID NO: 449529 - DNA, 1195 bp, Homo sapiens
  misc_feature (60)..(60): n is a, c, g, or t
aatcattatcatcatacatacttatctatcatacttcattatcaacttatatttttatcnttatctcatttattaatattaatattatttaatatcactaccccccccaccccgctctcgagtccgggccgcaagtcccagacgctgcccatggaggcgtccagcgagccgccgctggatgctaagtccgatgtcaccaaccagcagtattaaaatgaagatactttatgtaaatatgaccagcgttgaaactaaaagttgagtgtaactgcagtaaaattgaataaatatctgcattccagaatttctacagacagttcaaggaaattgctgcagttattgaaacggtgtgaagacggattctttggttgataaattgctatcattctaaagtcatggacttcactttcggcaacaaaactaaataaggatggaacatttattgaatgaaaaatgcacttttgtttttccatttttttaaataataaaaatcagacaaacaggaaaactgggtagtggtgatgaatgcaaaactttgtgaatgtgctttataaaagtgataattagacactttagaggatatacttggtgataatgtgaatgatgtaatcagactaacagttgaatcattgctgttggaggcagcacaaatttatgtgttacaacaatagtttaaaaacttgtactggatggaacccattttataaacagtcttatttggagtcatgtatataaaaatatatataaattagaaaagtagtatttgattaggataactttacaaattcaatagtatagccatcacttattataatggcaatcagaagagtgaggcttcttttttcaaacttttgtaatcagattaagattgaccattgctcctttacacagtattagtctagcattcaattatttctgttattaatggttgtagaaagttcaaatacatacgcagagttggaaagacgagttttagtctgagttctgtacgacggagttaacccgttagcacaagttattgcattagatgatctctgttgaatttaaatacataaacctgttgttaaacgcttttatactataaagccaccacattgtatggcatttgtttagaagtaagcaaatagaccaccggaatagaatagatggcctagaaatagatcaagacattctggtccgccatattagaaattta

SEQ ID NO: 449530 - DNA, 607 bp, Homo sapiens
aaattcaaggcggcccttgattagattctagttgtggatgggcttcccctgctacgtccgccccatgcgccaggccgctaggggcaggacgtggaagcggaagcgctggtctgggggcgttctctcgagtccgggccgcaagtcccagacgctgcccatggaggcgtccagcgagccgccgctggatgctaagtccgatgtcaccaaccagcttgtagattttcagtggaaactgggtatggctgtgagctcagacacttgcagatctcttaagtatccttacgttgcagtgatgctaaaagtggcagatcattcaggccaagtaaagaccaagtgctttgaaatgacgattccacagtttcagcctcagctcctggcaacctccagtctcctttctgcttctaatttctacagacagttcaaggaaattgctgcagttattgaaacggtgtgaagacggattctttggttgataaattgctatcattctaaagtcatggacttcactttcggcaacaaaactaaataaggatggaacatttattgaatgaaaaatgcacttttgtttttccatttttttaaataataaaaatcagacaaacaggaa

SEQ ID NO: 449531 - DNA, 506 bp, Homo sapiens
  misc_feature (60)..(60): n is a, c, g, or t
aatcattatcatcatacatacttatctatcatacttcattatcaacttatatttttatcnttatctcatttattaatattaatattatttaatatcactaccccccccaccccgctctcgagtccgggccgcaagtcccagacgctgcccatggaggcgtccagcgagccgccgctggatgctaagtccgatgtcaccaaccagcagtattaaaatgaagatactttatgtaaatatgaccagcgttgaaactaaaagttgagtgtaactgcagtaaaattgaataaatatctgcattccagaatttctacagacagttcaaggaaattgctgcagttattgaaacggtgtgaagacggattctttggttgataaattgctatcattctaaagtcatggacttcactttcggcaacaaaactaaataaggatggaacatttattgaatgaaaaatgcacttttgtttttccatttttttaaataataaaaatcagacaaacaggaa

SEQ ID NO: 449532 - DNA, 820 bp, Homo sapiens
  misc_feature (60)..(60): n is a, c, g, or t
aatcattatcatcatacatacttatctatcatacttcattatcaacttatatttttatcnttatctcatttattaatattaatattatttaatatcactaccccccccaccccgctctcgagtccgggccgcaagtcccagacgctgcccatggaggcgtccagcgagccgccgctggatgctaagtccgatgtcaccaaccagcagtattaaaatgaagatactttatgtaaatatgaccagcgttgaaactaaaagttgagtgtaactgcagtaaaattgaataaatatctgcattccaggtaatgttactactaatgtattattttgtcctgtcttattaaagccttgtagattttcagtggaaactgggtatggctgtgagctcagacacttgcagatctcttaagtatccttacgttgcagtgatgctaaaagtggcagatcattcaggccaagtaaagaccaagtgctttgaaatgacgattccacagtttcaggtttgtgatttaactcatccagttttagctcagcttttctgtaatcattgcataaaaagatgtataaaatctttctacgggaaaactttaatggtttttatttgtagattgatatgctttacgtttactagtagtatatgcaagagacattaatttgtcttctttgggaatttgataaattattttcaatataatgtgctgaagttgtgtactgcgccatttgatcgcttgaacagtactcctctctgagtatatttaggaaagttttatcttcaatggcaggatatttactttgcatttaaatgttttattcttattcc

SEQ ID NO: 449533 - DNA, 807 bp, Homo sapiens
aaattcaaggcggcccttgattagattctagttgtggatgggcttcccctgctacgtccgccccatgcgccaggccgctaggggcaggacgtggaagcggaagcgctggtctgggggcgttctctcgagtccgggccgcaagtcccagacgctgcccatggaggcgtccagcgagccgccgctggatgctaagtccgatgtcaccaaccagcttgtagattttcagtggaaactgggtatggctgtgagctcagacacttgcagatctcttaagtatccttacgttgcagtgatgctaaaagtggcagatcattcaggccaagtaaagaccaagtgctttgaaatgacgattccacagtttcagaatttctacagacagttcaaggaaattgctgcagttattgaaacggtgtgaagacggattctttggttgataaattgctatcattctaaagtcatggacttcactttcggcaacaaaactaaataaggatggaacatttattgaatgaaaaatgcacttttgtttttccatttttttaaataataaaaatcagacaaacaggaaaaaaccctaactgaaccctcatccccacactgctctacgttctattcatgcggagcactcgtattagtccccccccattccccttccccttcatcattcgcaccctttaaaaaaaaatttttcccccccttgtgcccgtcttttttagactctggtcatctttattttgggttcccaacttgtgtcttcttggtcaaatccccgttctgtgggaggtgtttctcccaattatatgccct

SEQ ID NO: 449534 - DNA, 851 bp, Homo sapiens
  misc_feature (650)..(650): n is a, c, g, or t
  misc_feature (782)..(782): n is a, c, g, or t
  misc_feature (799)..(799): n is a, c, g, or t
  misc_feature (805)..(805): n is a, c, g, or t
  misc_feature (810)..(811): n is a, c, g, or t
  misc_feature (821)..(821): n is a, c, g, or t
  misc_feature (824)..(824): n is a, c, g, or t
  misc_feature (833)..(833): n is a, c, g, or t
  misc_feature (841)..(841): n is a, c, g, or t
aaattcaaggcggcccttgattagattctagttgtggatgggcttcccctgctacgtccgccccatgcgccaggccgctaggggcaggacgtggaagcggaagcgctggtctgggggcgttctctcgagtccgggccgcaagtcccagacgctgcccatggaggcgtccagcgagccgccgctggatgctaagtccgatgtcaccaaccagcttgtagattttcagtggaaactgggtatggctgtgagctcagacacttgcagatctcttaagtatccttacgttgcagtgatgctaaaagtggcagatcattcaggccaagtaaagaccaagtgctttgaaatgacgattccacagtttcagaatttctacagacagttcaaggaaattgctgcagttattgaaacggtgtgaagacggattctttggttgataaattgctatcattctaaagtcatggacttcactttcggcaacaaaactaaataaggatggaacatttattgaatgaaaaatgcacttttgtttttccatttttttaaataataaaaatcagacaaacaggaaaaaaaaaaaaaaaaaaaaaaaaaaaaaaaaaaaaaaaaaaaaaaaaaaaaaaaaaaaaaaaaaaaaaaaaaaaaaaaactangtgggccgcttgggccaagtggtttttagatctgggcaaggtttttcctggcggccgaatttggggcttatttggccacattccccttatggggggcggttttaaattcaatggcccgggttttaaaacggngggactgggaaaacccnggggtnccaanntaatggctgnaanaatcccctntgcaggtngggatatagg

SEQ ID NO: 449535 - DNA, 844 bp, Homo sapiens
  misc_feature (60)..(60): n is a, c, g, or t
  misc_feature (643)..(643): n is a, c, g, or t
  misc_feature (775)..(775): n is a, c, g, or t
  misc_feature (792)..(792): n is a, c, g, or t
  misc_feature (798)..(798): n is a, c, g, or t
  misc_feature (803)..(804): n is a, c, g, or t
  misc_feature (814)..(814): n is a, c, g, or t
  misc_feature (817)..(817): n is a, c, g, or t
  misc_feature (826)..(826): n is a, c, g, or t
  misc_feature (834)..(834): n is a, c, g, or t
aatcattatcatcatacatacttatctatcatacttcattatcaacttatatttttatcnttatctcatttattaatattaatattatttaatatcactaccccccccaccccgctctcgagtccgggccgcaagtcccagacgctgcccatggaggcgtccagcgagccgccgctggatgctaagtccgatgtcaccaaccagcttgtagattttcagtggaaactgggtatggctgtgagctcagacacttgcagatctcttaagtatccttacgttgcagtgatgctaaaagtggcagatcattcaggccaagtaaagaccaagtgctttgaaatgacgattccacagtttcagaatttctacagacagttcaaggaaattgctgcagttattgaaacggtgtgaagacggattctttggttgataaattgctatcattctaaagtcatggacttcactttcggcaacaaaactaaataaggatggaacatttattgaatgaaaaatgcacttttgtttttccatttttttaaataataaaaatcagacaaacaggaaaaaaaaaaaaaaaaaaaaaaaaaaaaaaaaaaaaaaaaaaaaaaaaaaaaaaaaaaaaaaaaaaaaaaaaaaaaaaaactangtgggccgcttgggccaagtggtttttagatctgggcaaggtttttcctggcggccgaatttggggcttatttggccacattccccttatggggggcggttttaaattcaatggcccgggttttaaaacggngggactgggaaaacccnggggtnccaanntaatggctgnaanaatcccctntgcaggtngggatatagg

SEQ ID NO: 449536 - DNA, 826 bp, Homo sapiens
  misc_feature (625)..(625): n is a, c, g, or t
  misc_feature (757)..(757): n is a, c, g, or t
  misc_feature (774)..(774): n is a, c, g, or t
  misc_feature (780)..(780): n is a, c, g, or t
  misc_feature (785)..(786): n is a, c, g, or t
  misc_feature (796)..(796): n is a, c, g, or t
  misc_feature (799)..(799): n is a, c, g, or t
  misc_feature (808)..(808): n is a, c, g, or t
  misc_feature (816)..(816): n is a, c, g, or t
aaattcaaggcggcccttgattagattctagttgtggatgggcttcccctgctacgtccgccccatgcgccaggccgctaggggcaggacgtggaagcggaagcgctggtctgggggcgttctctcgagtccgggccgcaagtcccagacgctgcccatggaggcgtccagcgagccgccgctggatgctaagtccgatgtcaccaaccagcttgtagattttcagtggaaactgggtatggctgtgagctcagacacttgcagatctcttaagtatccttacgttgcagtgatgctaaaagtggcagatcattcaggccaagtaaagaccaagtgctttgaaatgacgattccacagtttcagaatttctacagacagttcaaggaaattgctgcagttattgaaacggtgtgaagacggattctttggttgataaattgctatcattctaaagtcatggacttcactttcggcaacaaaactaaataaggatggaacatttattgaatgaaaaatgcacttttgtttttccatttttttaaataataaaaatcagacaaacaggaaaaaaaaaaaaaaaaaaaaaaaaaaaaaaaaaaaaaaaaaaaaaaaaaaaaaaactangtgggccgcttgggccaagtggtttttagatctgggcaaggtttttcctggcggccgaatttggggcttatttggccacattccccttatggggggcggttttaaattcaatggcccgggttttaaaacggngggactgggaaaacccnggggtnccaanntaatggctgnaanaatcccctntgcaggtngggatatagg

SEQ ID NO: 449537 - DNA, 702 bp, Homo sapiens
  misc_feature (501)..(501): n is a, c, g, or t
  misc_feature (633)..(633): n is a, c, g, or t
  misc_feature (650)..(650): n is a, c, g, or t
  misc_feature (656)..(656): n is a, c, g, or t
  misc_feature (661)..(662): n is a, c, g, or t
  misc_feature (672)..(672): n is a, c, g, or t
  misc_feature (675)..(675): n is a, c, g, or t
  misc_feature (684)..(684): n is a, c, g, or t
  misc_feature (692)..(692): n is a, c, g, or t
aggcgtgccgcggagtcctattctgagacagacgccaggtggctacccattgccaggcagcaaggccggaggacgccgtgcagcacgcttgtagattttcagtggaaactgggtatggctgtgagctcagacacttgcagatctcttaagtatccttacgttgcagtgatgctaaaagtggcagatcattcaggccaagtaaagaccaagtgctttgaaatgacgattccacagtttcagaatttctacagacagttcaaggaaattgctgcagttattgaaacggtgtgaagacggattctttggttgataaattgctatcattctaaagtcatggacttcactttcggcaacaaaactaaataaggatggaacatttattgaatgaaaaatgcacttttgtttttccatttttttaaataataaaaatcagacaaacaggaaaaaaaaaaaaaaaaaaaaaaaaaaaaaaaaaaaaaaaaaaaaaaaaaaaaaaactangtgggccgcttgggccaagtggtttttagatctgggcaaggtttttcctggcggccgaatttggggcttatttggccacattccccttatggggggcggttttaaattcaatggcccgggttttaaaacggngggactgggaaaacccnggggtnccaanntaatggctgnaanaatcccctntgcaggtngggatatagg

SEQ ID NO: 449538 - DNA, 923 bp, Homo sapiens
aactgcgcagctgctgactggcgggccgccaggcgcgtgcgtagagacgcccacacgcccgctgatgcgcacgcgccctgggccgcgcgtgcgcgcgtggggttccggaatgagccggggaaagcaaggggaaggtttggggttggctcccggtttcgcgcatgcgtgcactgcacaaaccatttggcgggtttttccggccactcagttctgccaccgtcactgagaagctcagcggtagcttttgggaagcaggacgttctcaccaggagagcgtcctctcgagatttctgctccctccattcagggcgtttgggagccaccccttcattttttaaaaaaagtatttctctgtgaccgacggccggggccttctgacggtctgaggtcttgcttgggccagtcacctcctgtcacggtccgcggaggggggaaggataagagggcgaggagctcatcgctcgccacccccgtgggcttcttgggcgcaggtcggagctgggtgggccggctccccggcccctggcttgggcgaccatgtccgcatccgcccagcagctggcggaggagctgcagatcttcggcctagactgcgaggaggctctaattgagaaattggtagagctttgtgttcagtatggacagaatgaggagggaatggtaggcgagcttatagccttctgcaccagcacacataaagttggccttacctcagagatcctgaactcttttgagcatgagtttctgagcaaaagattatcgaaagccaggcatagtacctgcaaggacagtggccatgcaggagctagagacattgtttccattcaagagctaattgaagtggaagaagaagaggaaatcctcttgaactcttacaccacaccttcaaagctgttcttttgcttccgtgttcaccataaatc

SEQ ID NO: 449539 - DNA, 2619 bp, Homo sapiens
aactgcgcagctgctgactggcgggccgccaggcgcgtgcgtagagacgcccacacgcccgctgatgcgcacgcgccctgggccgcgcgtgcgcgcgtggggttccggaatgagccggggaaagcaaggggaaggtttggggttggctcccggtttcgcgcatgcgtgcactgcacaaaccatttggcgggtttttccggccactcagttctgccaccgtcactgagaagctcagcggtagcttttgggaagcaggacgttctcaccaggagagcgtcctctcgagatttctgctccctccattcagggcgtttgggagccaccccttcattttttaaaaaaagtatttctctgtgaccgacggccggggccttctgacggtctgaggtcttgcttgggccagtcacctcctgtcacggtccgcggaggggggaaggataagagggcgaggagctcatcgctcgccacccccgtgggcttcttgggcgcaggtcggagctgggtgggccggctccccggcccctggcttgggcgaccatgtccgcatccgcccagcagctggcggaggagctgcagatcttcggcctagactgcgaggaggctctaattgagaaattggtagagctttgtgttcagtatggacagaatgaggagggaatggtaggcgagcttatagccttctgcaccagcacacataaagttggccttacctcagagatcctgaactcttttgagcatgagtttctgagcaaaagattatcgaaagccaggcatagtacctgcaaggacagtggccatgcaggagctagagacattgtttccattcaagagctaattgaagtggaagaagaagaggaaatcctcttgaactcttacaccacaccttcaaagggttctcagaagcgagctatctctaccccagaaacccccctaacaaaaaggagtgtgtcaactcgtagcccccatcagctactctcaccgtcaagtttctctccaagtgctactccctcccagaaatacaactcacgaagtaaccgaggagaagtggttacctccttcggcttagcacagggagtatcttggtctgggagaggaggagctggaaacatcagcctgaaggtcttgggatgtccagaggcactaactgggagctacaaatccatgtttcagaagctcccagacattcgagaagttctgacctgtaagatagaagaacttggcagcgaactcaaggaacattacaagattgaagctttcactcctttgctagccccagcacaggagcctgtcactctgctgggccagattggctgtgatagcaacgggaagctgaacaacaagtcagtgattctcgagggagaccgggaacattcctcgggtgctcaaattccagtggatttatctgagcttaaggaatattctctgtttcctggacaggttgtaattatggaaggaatcaacaccactggtaggaaacttgttgccaccaaactctacgagggtgtgccacttccattttatcagcccactgaagaggatgcagactttgagcaaagcatggtcctggttgcctgtggaccatacaccacatctgacagcatcacgtatgaccccctgcttgacctgattgctgtcatcaaccatgaccggccagatgtctgcatcctgtttggccctttcctggatgctaagcatgaacaggtggagaattgtctactgacaagtccatttgaagacattttcaagcagtgtctacgaacaattattgaaggcacaagaagctccggctcccaccttgtctttgtcccgtcattgagagatgtgcaccatgagcctgtgtacccccagccgcctttcagctactccgatctgtctcgagaggacaaaaagcaagtacagtttgtgtccgagccctgcagcctctccataaacggagtgatcttcggcttgacatccacagatctgcttttccacctgggggccgaggagatcagtagttcttccggaacttcagacagattcagccgaatactcaagcacatcttgacccagaggagctgcctgtcaccccagatgtcctcatcatcccgtcagagctgaggtacttcgtgaaggatgtcctcggctgtgtctgtgtgaaccctgggcgccttaccaaagggcaggtgggaggcaccttcgcccgactctaccttaggaggccggcagcggacggggcagagaggcagagcccatgcattgctgtgcaggtcgtcaggatctgaggcttctgtcctctgctgttctctgctgtgtgggcccttaaagtcttagccaagagccaagacatagccctgtgacaaggtgaacagttgggtgggaaaggagagaggagccagccagggaggggcagctgcagtgaccaggcccagcagggaggacttgtgcagccgggcctgcctctgagtggtgcctctcctggaaggaagctcttgcttctcagtccatgctccgtgtccagaagtaagccagctgtggatcccgcccactcagaaaaggcgagaaggctttgtgattttctacatgaatcaaacacagaaacaacttttggagaaattaaattctgagtgtgacttctga

SEQ ID NO: 449540 - DNA, 2871 bp, Homo sapiens
aactgcgcagctgctgactggcgggccgccaggcgcgtgcgtagagacgcccacacgcccgctgatgcgcacgcgccctgggccgcgcgtgcgcgcgtggggttccggaatgagccggggaaagcaaggggaaggtttggggttggctcccggtttcgcgcatgcgtgcactgcacaaaccatttggcgggtttttccggccactcagttctgccaccgtcactgagaagctcagcggtagcttttgggaagcaggacgttctcaccaggagagcgtcctctcgagatttctgctccctccattcagggcgtttgggagccaccccttcattttttaaaaaaagtatttctctgtgaccgacggccggggccttctgacggtctgaggtcttgcttgggccagtcacctcctgtcacggtccgcggaggggggaaggataagagggcgaggagctcatcgctcgccacccccgtgggcttcttgggcgcaggtcggagctgggtgggccggctccccggcccctggcttgggcgaccatgtccgcatccgcccagcagctggcggaggagctgcagatcttcggcctagactgcgaggaggctctaattgagaaattggtagagctttgtgttcagtatggacagaatgaggagggaatggtaggcgagcttatagccttctgcaccagcacacataaagttggccttacctcagagatcctgaactcttttgagcatgagtttctgagcaaaagattatcgaaagccaggcatagtacctgcaaggacagtggccatgcaggagctagagacattgtttccattcaagagctaattgaagtggaagaagaagaggaaatcctcttgaactcttacaccacaccttcaaagggttctcagaagcgagctatctctaccccagaaacccccctaacaaaaaggagtgtgtcaactcgtagcccccatcagctactctcaccgtcaagtttctctccaagtgctactccctcccagaaatacaactcacgaagtaaccgaggagaagtggttacctccttcggcttagcacagggagtatcttggtctgggagaggaggagctggaaacatcagcctgaaggtcttgggatgtccagaggcactaactgggagctacaaatccatgtttcagaagctcccagacattcgagaagttctgacctgtaagatagaagaacttggcagcgaactcaaggaacattacaagattgaagctttcactcctttgctagccccagcacaggagcctgtcactctgctgggccagattggctgtgatagcaacgggaagctgaacaacaagtcagtgattctcgagggagaccgggaacattcctcgggtgctcaaattccagtggatttatctgagcttaaggaatattctctgtttcctggacaggttgtaattatggaaggaatcaacaccactggtaggaaacttgttgccaccaaactctacgagggtgtgccacttccattttatcagcccactgaagaggatgcagactttgagcaaagcatggtcctggttgcctgtggaccatacaccacatctgacagcatcacgtatgaccccctgcttgacctgattgctgtcatcaaccatgaccggccagatgtctgcatcctgtttggccctttcctggatgctaagcatgaacaggtggagaattgtctactgacaagtccatttgaagacattttcaagcagtgtctacgaacaattattgaaggcacaagaagctccggctcccaccttgtctttgtcccgtcattgagagatgtgcaccatgagcctgtgtacccccagccgcctttcagctactccgatctgtctcgagaggacaaaaagcaagtacagtttgtgtccgagccctgcagcctctccataaacggagtgatcttcggcttgacatccacagatctgcttttccacctgggggccgaggagatcagtagttcttccggaacttcagacagattcagccgaatactcaagcacatcttgacccagaggagctactacccactctacccgccccaagaagacatggccattgactatgagtcgttctatgtttacgcacagctgcctgtcaccccagatgtcctcatcatcccgtcagagctgaggtacttcgtgaaggatgtcctcggctgtgtctgtgtgaaccctgggcgccttaccaaagggcaggtgggaggcaccttcgcccgactctaccttaggaggccggcagcggacggggcagagaggcagagcccatgcattgctgtgcaggtcgtcaggatctgaggcttctgtcctctgctgttctctgctgtgtgggcccttaaagtcttagccaagagccaagacatagccctgtgacaaggtgaacagttgggtgggaaaggagagaggagccagccagggaggggcagctgcagtgaccaggcccagcagggaggacttgtgcagccgggcctgcctctgagtggtgcctctcctggaaggaagctcttgcttctcagtccatgctccgtgtccagaagtaagccagctgtggatcccgcccactcagaaaaggcgagaaggctttgtgattttctacatgaatcaaacacagaaacaacttttggagaaattaaattctgagtgtgacttctgagtttgacctttcttctattttcttttatttatttattttgtttttagacggagtctcgatctgtcgcccaggctggagtgcagtggtgagatctcggctcactgcaagctctgccgcccgggttcatgccattctcctgcctcagcctcctgagtagctgggactacaggcacccaccacca

SEQ ID NO: 449541 - DNA, 1309 bp, Homo sapiens
catctacattttcttttctgctccccttttttttcatttcccaaatttgtgacctgaaaacaaatgtggacatcctgtttgtggaggataaactgggaattttctctgaaggattttcttcactaccagtacaacatccagctctgcagagaatcaggccctgacaaatttgttgagttgaagttgggcagctccgttctgccgtcatccttgatgggaaggggcatgtgaagcgactcgcgtgtgaagcgagacgggtgcggctccttggctgaggtttgagattcaggtcagcctggctacacacccgcctcatgatggtgccaactttgcatcctcttgcacagtacggtgctggctaatggccttccttgatcttgattatgagggattcctgtgctttcccttctcaacctggtgtcctgcgtccctcctcatgtggggacagactgagctccttgtgggtgggtctttaaacttccccagaggcatcctcctcttgttgctgtgccttggccatttaccttctctctggtttattaaattctccagtcctccctgaagagaaatgggctgaaaaacagagttctgttttcatgctttcttttctttcccagttcttccggaacttcagacagattcagccgaatactcaagcacatcttgacccagaggagctactacccactctacccgccccaagaagacatggccattgactatgagtcgttctatgtttacgcacagctgcctgtcaccccagatgtcctcatcatcccgtcagagctgaggtacttcgtgaaggatgtcctcggctgtgtctgtgtgaaccctgggcgccttaccaaagggcaggtgggaggcaccttcgcccgactctaccttaggaggccggcagcggacggggcagagaggcagagcccatgcattgctgtgcaggtcgtcaggatctgaggcttctgtcctctgctgttctctgctgtgtgggcccttaaagtcttagccaagagccaagacatagccctgtgacaaggtgaacagttgggtgggaaaggagagaggagccagccagggaggggcagctgcagtgaccaggcccagcagggaggacttgtgcagccgggcctgcctctgagtggtgcctctcctggaaggaagctcttgcttctcagtccatgctccgtgtccagaagtaagccagctgtggatcccgcccactcagaaaaggcgagaaggctttgtgattttctacatgaatcaaacacagaaacaacttttggagaaattaaattctgagtgtgacttctga

SEQ ID NO: 449542 - DNA, 775 bp, Homo sapiens
gtgaggaaagaactctgtgctgagcagctgctggcccacagcagctgaggaccatcgttgcaacgatggtcctcagctcaacgttcttccggaacttcagacagattcagccgaatactcaagcacatcttgacccagaggagctactacccactctacccgccccaagaagacatggccattgactatgagtcgttctatgtttacgcacagctgcctgtcaccccagatgtcctcatcatcccgtcagagctgaggtacttcgtgaaggatgtcctcggctgtgtctgtgtgaaccctgggcgccttaccaaagggcaggtgggaggcaccttcgcccgactctaccttaggaggccggcagcggacggggcagagaggcagagcccatgcattgctgtgcaggtcgtcaggatctgaggcttctgtcctctgctgttctctgctgtgtgggcccttaaagtcttagccaagagccaagacatagccctgtgacaaggtgaacagttgggtgggaaaggagagaggagccagccagggaggggcagctgcagtgaccaggcccagcagggaggacttgtgcagccgggcctgcctctgagtggtgcctctcctggaaggaagctcttgcttctcagtccatgctccgtgtccagaagtaagccagctgtggatcccgcccactcagaaaaggcgagaaggctttgtgattttctacatgaatcaaacacagaaacaacttttggagaaattaaattctgagtgtgacttctga

SEQ ID NO: 449543 - DNA, 285 bp, Homo sapiens
aatcggagcctgtccagatggatgggtgtgaagtagaacaaactgtcctttactcccagtgtcccatgggaaacagcgtctctgttcataacagagtgcagttctgagctgcctccctcggggtgggctctgcctccagcctgaggcatcccacctgttgcgcagctgttctaactcaactgcactcacttttctcactcttctgtttgttcttttgccatactagctccggctcccaccttgtctttgtcccgtcattgagagatgtgcaccatgagcctgtgt

SEQ ID NO: 449544 - DNA, 447 bp, Homo sapiens
ttcaacttaaagatattcatggttccttcgttagaagccttcttcaggttggccttgacttgcctaaaacctcagtgaggacttgagtaaagggcagacttggagatggggtggggttcatgctgattccctggaattgtgctatggggtctcctgtggccagatggaaggccagattcagcaaccaaatatcggaaaattggcaaaggttttagaaggtttaaactggccagatgtccaggcacccttcctgcttctgtaaaatgactgactttaatattttacaatgtgctgtattttctcttcttggcaagtgaaatgtcttaaacataatacttttttccacttctgggattgtagttctgacctgtaagatagaagaacttggcagcgaactcaaggaacattacaagattgaagctttcactcctttgctagccccagcac

SEQ ID NO: 449545 - DNA, 2689 bp, Homo sapiens
aactgcgcagctgctgactggcgggccgccaggcgcgtgcgtagagacgcccacacgcccgctgatgcgcacgcgccctgggccgcgcgtgcgcgcgtggggttccggaatgagccggggaaagcaaggggaaggtttggggttggctcccggtttcgcgcatgcgtgcactgcacaaaccatttggcgggtttttccggccactcagttctgccaccgtcactgagaagctcagcggtagcttttgggaagcaggacgttctcaccaggagagcgtcctctcgagatttctgctccctccattcagggcgtttgggagccaccccttcattttttaaaaaaagtatttctctgtgaccgacggccggggccttctgacggtctgaggtcttgcttgggccagtcacctcctgtcacggtccgcggaggggggaaggataagagggcgaggagctcatcgctcgccacccccgtgggcttcttgggcgcaggtcggagctgggtgggccggctccccggcccctggcttgggcgaccatgtccgcatccgcccagcagctggcggaggagctgcagatcttcggcctagactgcgaggaggctctaattgagaaattggtagagctttgtgttcagtatggacagaatgaggagggaatggtaggcgagcttatagccttctgcaccagcacacataaagttggccttacctcagagatcctgaactcttttgagcatgagtttctgagcaaaagattatcgaaagccaggcatagtacctgcaaggacagtggccatgcaggagctagagacattgtttccattcaagagctaattgaagtggaagaagaagaggaaatcctcttgaactcttacaccacaccttcaaagggttctcagaagcgagctatctctaccccagaaacccccctaacaaaaaggagtgtgtcaactcgtagcccccatcagctactctcaccgtcaagtttctctccaagtgctactccctcccagaaatacaactcacgaagtaaccgaggagaagtggttacctccttcggcttagcacagggagtatcttggtctgggagaggaggagctggaaacatcagcctgaaggtcttgggatgtccagaggcactaactgggagctacaaatccatgtttcagaagctcccagacattcgagaagttctgacctgtaagatagaagaacttggcagcgaactcaaggaacattacaagattgaagctttcactcctttgctagccccagcacaggagcctgtcactctgctgggccagattggctgtgatagcaacgggaagctgaacaacaagtcagtgattctcgagggagaccgggaacattcctcgggtgctcaaattccagtggatttatctgagcttaaggaatattctctgtttcctggacaggttgtaattatggaaggaatcaacaccactggtaggaaacttgttgccaccaaactctacgagggtgtgccacttccattttatcagcccactgaagaggatgcagactttgagcaaagcatggtcctggttgcctgtggaccatacaccacatctgacagcatcacgtatgaccccctgcttgacctgattgctgtcatcaaccatgaccggccagatgtctgcatcctgtttggccctttcctggatgctaagcatgaacaggtggagaattgtctactgacaagtccatttgaagacattttcaagcagtgtctacgaacaattattgaaggcacaagaagctccggctcccaccttgtctttgtcccgtcattgagagatgtgcaccatgagcctgtgtacccccagccgcctttcagctactccgatctgtctcgagaggacaaaaagcaagtacagtttgtgtccgagccctgcagcctctccataaacggagtgatcttcggcttgacatccacagatctgcttttccacctgggggccgaggagatcagtagttcttccggaacttcagacagattcagccgaatactcaagcacatcttgacccagaggagctactacccactctacccgccccaagaagacatggccattgactatgagtcgttctatgtttacgcacagctgcctgtcaccccagatgtcctcatcatcccgtcagagctgaggtacttcgtgaaggatgtcctcggctgtgtctgtgtgaaccctgggcgccttaccaaagggcaggtgggaggcaccttcgcccgactctaccttaggaggccggcagcggacggggcagagaggcagagcccatgcattgctgtgcaggtcgtcaggatctgaggcttctgtcctctgctgttctctgctgtgtgggcccttaaagtcttagccaagagccaagacatagccctgtgacaaggtgaacagttgggtgggaaaggagagaggagccagccagggaggggcagctgcagtgaccaggcccagcagggaggacttgtgcagccgggcctgcctctgagtggtgcctctcctggaaggaagctcttgcttctcagtccatgctccgtgtccagaagtaagccagctgtggatcccgcccactcagaaaaggcgagaaggctttgtgattttctacatgaatcaaacacagaaacaacttttggagaaattaaattctgagtgtgacttctga

SEQ ID NO: 449546 - DNA, 2564 bp, Homo sapiens
aactgcgcagctgctgactggcgggccgccaggcgcgtgcgtagagacgcccacacgcccgctgatgcgcacgcgccctgggccgcgcgtgcgcgcgtggggttccggaatgagccggggaaagcaaggggaaggtttggggttggctcccggtttcgcgcatgcgtgcactgcacaaaccatttggcgggtttttccggccactcagttctgccaccgtcactgagaagctcagcggtagcttttgggaagcaggacgttctcaccaggagagcgtcctctcgagatttctgctccctccattcagggcgtttgggagccaccccttcattttttaaaaaaagtatttctctgtgaccgacggccggggccttctgacggtctgaggtcttgcttgggccagtcacctcctgtcacggtccgcggaggggggaaggataagagggcgaggagctcatcgctcgccacccccgtgggcttcttgggcgcaggtcggagctgggtgggccggctccccggcccctggcttgggcgaccatgtccgcatccgcccagcagctggcggaggagctgcagatcttcggcctagactgcgaggaggctctaattgagaaattttctgagcaaaagattatcgaaagccaggcatagtacctgcaaggacagtggccatgcaggagctagagacattgtttccattcaagagctaattgaagtggaagaagaagaggaaatcctcttgaactcttacaccacaccttcaaagggttctcagaagcgagctatctctaccccagaaacccccctaacaaaaaggagtgtgtcaactcgtagcccccatcagctactctcaccgtcaagtttctctccaagtgctactccctcccagaaatacaactcacgaagtaaccgaggagaagtggttacctccttcggcttagcacagggagtatcttggtctgggagaggaggagctggaaacatcagcctgaaggtcttgggatgtccagaggcactaactgggagctacaaatccatgtttcagaagctcccagacattcgagaagttctgacctgtaagatagaagaacttggcagcgaactcaaggaacattacaagattgaagctttcactcctttgctagccccagcacaggagcctgtcactctgctgggccagattggctgtgatagcaacgggaagctgaacaacaagtcagtgattctcgagggagaccgggaacattcctcgggtgctcaaattccagtggatttatctgagcttaaggaatattctctgtttcctggacaggttgtaattatggaaggaatcaacaccactggtaggaaacttgttgccaccaaactctacgagggtgtgccacttccattttatcagcccactgaagaggatgcagactttgagcaaagcatggtcctggttgcctgtggaccatacaccacatctgacagcatcacgtatgaccccctgcttgacctgattgctgtcatcaaccatgaccggccagatgtctgcatcctgtttggccctttcctggatgctaagcatgaacaggtggagaattgtctactgacaagtccatttgaagacattttcaagcagtgtctacgaacaattattgaaggcacaagaagctccggctcccaccttgtctttgtcccgtcattgagagatgtgcaccatgagcctgtgtacccccagccgcctttcagctactccgatctgtctcgagaggacaaaaagcaagtacagtttgtgtccgagccctgcagcctctccataaacggagtgatcttcggcttgacatccacagatctgcttttccacctgggggccgaggagatcagtagttcttccggaacttcagacagattcagccgaatactcaagcacatcttgacccagaggagctactacccactctacccgccccaagaagacatggccattgactatgagtcgttctatgtttacgcacagctgcctgtcaccccagatgtcctcatcatcccgtcagagctgaggtacttcgtgaaggatgtcctcggctgtgtctgtgtgaaccctgggcgccttaccaaagggcaggtgggaggcaccttcgcccgactctaccttaggaggccggcagcggacggggcagagaggcagagcccatgcattgctgtgcaggtcgtcaggatctgaggcttctgtcctctgctgttctctgctgtgtgggcccttaaagtcttagccaagagccaagacatagccctgtgacaaggtgaacagttgggtgggaaaggagagaggagccagccagggaggggcagctgcagtgaccaggcccagcagggaggacttgtgcagccgggcctgcctctgagtggtgcctctcctggaaggaagctcttgcttctcagtccatgctccgtgtccagaagtaagccagctgtggatcccgcccactcagaaaaggcgagaaggctttgtgattttctacatgaatcaaacacagaaacaacttttggagaaattaaattctgagtgtgacttctga

SEQ ID NO: 449547 - DNA, 2852 bp, Homo sapiens
aactgcgcagctgctgactggcgggccgccaggcgcgtgcgtagagacgcccacacgcccgctgatgcgcacgcgccctgggccgcgcgtgcgcgcgtggggttccggaatgagccggggaaagcaaggggaaggtttggggttggctcccggtttcgcgcatgcgtgcactgcacaaaccatttggcgggtttttccggccactcagttctgccaccgtcactgagaagctcagcggtagcttttgggaagcaggacgttctcaccaggagagcgtcctctcgagatttctgctccctccattcagggcgtttgggagccaccccttcattttttaaaaaaagtatttctctgtgaccgacggccggggccttctgacggtctgaggtcttgcttgggccagtcacctcctgtcacggtccgcggaggggggaaggataagagggcgaggagctcatcgctcgccacccccgtgggcttcttgggcgcaggtcggagctgggtgggccggctccccggcccctggcttgggcgaccatgtccgcatccgcccagcagctggcggaggagctgcagatcttcggcctagactgcgaggaggctctaattgagaaattggtagagctttgtgttcagtatggacagaatgaggagggaatggtaggcgagcttatagccttctgcaccagcacacataaagttggccttacctcagagatcctgaactcttttgagcatgagtttctgagcaaaagattatcgaaagccaggcatagtacctgcaaggacagtggccatgcaggagctagagacattgtttccattcaagagctaattgaagtggaagaagaagaggaaatcctcttgaactcttacaccacaccttcaaagggttctcagaagcgagctatctctaccccagaaacccccctaacaaaaaggagtgtgtcaactcgtagcccccatcagctactctcaccgtcaagtttctctccaagtgctactccctcccagaaatacaactcacgaagtaaccgaggagaagtggttacctccttcggcttagcacagggagtatcttggtctgggagaggaggagctggaaacatcagcctgaaggtcttgggatgtccagaggcactaactgggagctacaaatccatgtttcagaagctcccagacattcgagaagttctgacctgtaagatagaagaacttggcagcgaactcaaggaacattacaagattgaagctttcactcctttgctagccccagcacaggagcctgtcactctgctgggccagattggctgtgatagcaacgggaagctgaacaacaagtcagtgattctcgagggagaccgggaacattcctcgggtgctcaaattccagtggatttatctgagcttaaggaatattctctgtttcctggacaggttgtaattatggaaggaatcaacaccactggtaggaaacttgttgccaccaaactctacgagggtgtgccacttccattttatcagcccactgaagaggatgcagactttgagcaaagcatggtcctggttgcctgtggaccatacaccacatctgacagcatcacgtatgaccccctgcttgacctgattgctgtcatcaaccatgaccggccagatgtctgcatcctgtttggccctttcctggatgctaagcatgaacaggtggagaattgtctactgacaagtccatttgaagacattttcaagcagtgtctacgaacaattattgaaggcacaagaagctccggctcccaccttgtctttgtcccgtcattgagagatgtgcaccatgagcctgtgtacccccagccgcctttcagctactccgatctgtctcgagaggacaaaaagcaagtacagtttgtgtccgagccctgcagcctctccataaacggagtgatcttcggcttgacatccacagatctgcttttccacctgggggccgaggagatcagtagttcttccggaacttcagacagattcagccgaatactcaagcacatcttgacccagaggagctactacccactctacccgccccaagaagacatggccattgactatgagtcgttctatgtttacgcacagctgcctgtcaccccagatgtcctcatcatcccgtcagagctgaggtacttcgtgaaggtaggtttgaactctgctttttcccagaaacaccagaacccagtctttgactttcccttctagaccacccggcactcacccctcatgggtcagctgatggggatggggcctctagcaccctgccctgtggccttgtttctttggggaggtggtgggaccagaaaacaaacaactctgtcagtaaaatgcttgagtaaacagtgtcctctcctccctccccaagagaacgagagcccagatgactaggaaggccctcaaatgagggctttcaccaggccacatagaggtgacctggggaagatttcatatgtacacttgcctgtcctctgcctcccaaattctgatatgacctccaagtgggctcagctgggaataccttgaagaagctattgggtcattttgatctctgccaccctttagccctgcctgccttggagttaggtcccttacaaggaatctgcctagaccagtccccctcttgccaaacaagagttagttcaatctcaagaggttaaaaaaaagtttttcacatgagaaagcagtaaacagctagatcaggtttgtctccaagtttaggagctgattgtcattctgccaagtcacctcattcttctgtttgaaagacttaaaaggaattcaaagctttctagtgacaagttaacatatgt

SEQ ID NO: 449548 - DNA, 1869 bp, Homo sapiens
aactgcgcagctgctgactggcgggccgccaggcgcgtgcgtagagacgcccacacgcccgctgatgcgcacgcgccctgggccgcgcgtgcgcgcgtggggttccggaatgagccggggaaagcaaggggaaggtttggggttggctcccggtttcgcgcatgcgtgcactgcacaaaccatttggcgggtttttccggccactcagttctgccaccgtcactgagaagctcagcggtagcttttgggaagcaggacgttctcaccaggagagcgtcctctcgagatttctgctccctccattcagggcgtttgggagccaccccttcattttttaaaaaaagtatttctctgtgaccgacggccggggccttctgacggtctgaggtcttgcttgggccagtcacctcctgtcacggtccgcggaggggggaaggataagagggcgaggagctcatcgctcgccacccccgtgggcttcttgggcgcaggtcggagctgggtgggccggctccccggcccctggcttgggcgaccatgtccgcatccgcccagcagctggcggaggagctgcagatcttcggcctagactgcgaggaggctctaattgagaaattggtagagctttgtgttcagtatggacagaatgaggagggaatggtaggcgagcttatagccttctgcaccagcacacataaagttggccttacctcagagatcctgaactcttttgagcatgagtttctgagcaaaagattatcgaaagccaggcatagtacctgcaaggacagtggccatgcaggagctagagacattgtttccattcaagagctaattgaagtggaagaagaagaggaaatcctcttgaactcttacaccacaccttcaaagggttctcagaagcgagctatctctaccccagaaacccccctaacaaaaaggagtgtgtcaactcgtagcccccatcagctactctcaccgtcaagtttctctccaagtgctactccctcccagaaatacaactcacgaagtaaccgaggagaagtggttacctccttcggcttagcacagggagtatcttggtctgggagaggaggagctggaaacatcagcctgaaggtcttgggatgtccagaggcactaactgggagctacaaatccatgtttcagaagctcccagacattcgagaagttctgacctgtaagatagaagaacttggcagcgaactcaaggaacattacaagattgaagctttcactcctttgctagccccagcacaggagcctgtcactctgctgggccagattggctgtgatagcaacgggaagctgaacaacaagtcagtgattctcgagggagaccgggaacattcctcgggtgctcaaattccagtggatttatctgagcttaaggaatattctctgtttcctggacaggttgtaattatggaaggaatcaacaccactggtaggaaacttgttgccaccaaactctacgagggtgtgccacttccattttatcagcccactgaagaggatgcagactttgagcaaagcatggtcctggttgcctgtggaccatacaccacatctgacagcatcacgtatgaccccctgcttgacctgattgctgtcatcaaccatgaccggccagatgtctgcatcctgttaggcctttcctggatgctacgccatgaaccaggtggagcaattgtctactgacaagtctatttgcagaacattttcaagcaggtatacgaacacttttgcaggcccagaagcttcggtccactggtttggccgattgcgagattgcccatgagctgttacaccagcggcttagtagtcgaactgtgagaggaaacgcgt

SEQ ID NO: 449549 - DNA, 4737 bp, Homo sapiens
gttgctccagtgaagcttcttggggtgggaggggagggaatggggtcagggggcttgaggtgcctagagatggcagctccctctcccgcctcctccccaggtggttcaggctgcagggtggccagcatggcccttcagggcccttatcttggcctggaagtaggtgtacatggccagcaggcccatgaaggacagggaatagagccccacacagaggctgatgtccaggtaagagaagccccctcccagcacctgcagccactggcctcggccccgtccagctcgggcctccagctggccctcagggatgtcgaccagctgcttggagctgcggcccacgcgcctgacctccaaagggccccagaggcggttcttctcagccctggactcagccagcaatgcagcccctgtgtctcgcttgctcaagtgccactgcccaagcggctgctcctgctcattcctctgaagctctgccatgtgctcaggaggctcctggcctggtgcagctctgaggccagggtgcagcttcgggggtcgacttgcctcaggtccctcagccggcacatgtggggtggtgtttgtgggggacttcatcatctcaggcttcccagggtccagagttgaattccggctttccagctccagggctcccatcgccagctctggggcggctgccacattctgcacatccctccgggcagctgacccagctgcagggaagtccaggatgatgttgcttggggagaagtgggccttgaggaagttgagggtggcttccacgtcccacacgggcacatccaggcgttcattgtggcaggcagaacaaagttcacggggtggccactgcaccttggggaactgggggtcctcgctgggggcacctgcaaggcgagcattgaccctgttgtggctagaccagagccagaggacagcggcgttgggactccccacccggtgcatggaggcagcagccatctgctcgaagtggctagcgcagtctcggcagccgaagaagtagcgcacgtagcctcggatggctgggaggacctccttggccttggctgcttcctgtgagtggtctacattttgccgagctgcctgcacagtcaagaagtggaagaggacccacagggagcagggaaagccccggaaatgcggctcactcccctggcagccaatccagttcaccttcttggcaagaacggcaccctctttcctgtcgtccagggcagttttaaagaaactgtagggaattttatttctcttctgcctcttgagccattcattcacggagtgcaggaagttctggactaagggccggccagggaaatacttggccagcactgccacaaactttttcagggccaccaggcgctgcccttccaggaccgggaacctgcccacttctatccgcaggatgtagtgcagtgcagattccaggtcagccatgtagatcttggagcgatctgccaatttccaaacagtgggagctatcttgttagcagtggttggtgcaactgtggtctgggcagcctccctggtgagcccagagagtctctgcaggtaagcggtatagaaggacctggattccatgagcacggggactcgggagacagagccattccggaacagcaggtagcaagaggggaagtcggtgacaccaaactttctcaccacattggcctctgtgttcagcaccctgcgcaccgccacgcctttgtgctgggacaggtccagagccacctctctacccaggtaggagcctcccttttcaaagatcgacagccagtctggatgtctatgccaagtacgtgctgcgcagcatctgccaacaggaatgggtaggagaacgttgccttaagtctctgtgtgaggacagcaatgacctgcaagacccagtgttgagtagtgcccaggcgcagcgcctcatgcagctcatttgctatccacatcgactgctggacaatgaggatggggaaaacccccagcggcagcgcataaagcgcattctccagaacttggaccagtggaccatgcgccagtcttccttggagctgcagctcatgatcaagcagacccctaacaatgagatgaactccctcttggagaacatcgccaaggccacaatcgaggttttccaacagtcagcagagacagggtcatcttctggaagtactgcaagcaacatgcccagcagcagcaagaccaagcctgtgctcagctctctagagcgctctggtgtatggctggtggcccccctcattgctaaactgcccacctcagtccagggacatgtgttaaaggctgctggggaagaattggagaagggtcagcacctgggttcctcttcacgcaaagaacgtgatcgacaaaagcagaagagcatgtccctattgagccagcagcccttcttatcgctggtgctaacatgtctgaaagggcaggatgaacaacgcgagggactccttacctccctctacagccaggtgcaccagattgtgaataattggcgagatgaccagtacttagatgattgcaaaccaaagcagcttatgcatgaggcactcaaactgcggctcaacctggtggggggcatgtttgacacggtgcagcgcagcacccagcagaccacggagtgggccatgctcctcctggagatcatcatcagcggcactgtcgacatgcagtccaacaatgagctcttcactactgtgttggacatgctgagcgtgctcatcaatgggacattggctgcagacatgtctagcatctcgcaaggtagcatggaggaaaacaagcgtgcatacatgaacctggcgaagaagttgcagaaggagttgggggagcgccagtcagacagtctggaaaaggttcgccagctgctgccactgcccaagcagacccgagatgtcatcacgtgtgagccacagggctcccttatcgataccaagggcaacaagattgctggcttcgattccatcttcaagaaggagggtctacaggtttccaccaaacagaagatctcgccctgggatctttttgaggggttgaagccgtcagcaccactctcttggggctggtttggaacagtccgagtggaccggcgagtggctcgaggagaggagcagcagcggttgctgctctaccacacacacctgaggccccggccccgcgcctattacctggagccactgccactgcccccagaagatgaggagccgcctgctcctaccctgctagagcctgagaaaaaggctccagagccccccaaaactgacaaaccgggggctgctccacccagtactgaggaacgcaagaagaagtccaccaagggcaagaaacgcagccagccagctaccaagacagaggactatggaatgggcccgggtcggagcggcccttatggtgtgacagtgcctccggacctcctgcaccacccaaaccctggttctataacacaccttaactacaggcaaggctccataggcctgtacacccagaaccagccactacctgcaggtggccctcgtgtggacccataccgtcctgtgcgcttaccaatgcagaagctgcccacccgaccaacttaccctggagtgctgcccacaaccatgactggcgtcatgggtttagaaccctcctcttataagacctctgtgtaccggcagcagcaacctgcggtgccccaaggacagcgccttcgccaacagctccagcagagtcagggcatgttgggacagtcatctgtccatcagatgactcccagctcttcctacggtttgcagacttcccagggctatactccttatgtttctcatgtgggattgcagcaacacacaggccctgcaggtaccatggtgccccccagctactccagccagccttaccagagcacccacccttctaccaatcctactcttgtagatcctacccgccacctgcaacagcggcccagtggctatgtgcaccagcaggcccccacctatggacatggactgacctccactcaaaggttttcacaccagacactgcagcagacacccatgataagtaccatgactccaatgagtgcccagggcgtccaggcaggcgtccgttcaacagccatcctacctgagcagcagcagcagcagcaacagcagcaacagcaacagcagcagcagcagcaacagcaacagcagcagcagcagcagcagtaccacatccggcagcagcagcagcagcagatcctgcggcagcagcagcaacagcaacagcagcagcagcagcagcagcaacagcaacagcagcagcagcaacagcaacaacagcaacaccagcagcaacagcagcaacaggcggctcctccccaaccccagccccagtcccagccccagttccagcgccaggggcttcagcagacccagcagcagcaacagacagcagctttggtccggcaacttcaacaacagctctctaatacccagccacagcccagtaccaacatatttggacgctactgagccacctggaggaactgcttgtgcactggatgtggccccaccctttcctcttaattcccaatcccattcctgggctagcaccagtagtggttggggccctcccctcaggctccatttttaataagtttttagtatttttgttaatgtgaggcattgagctgttgggttttgtatattatttatatagagaccccagagctgttgcacccaatacacagagcttctttgcaaaggg

SEQ ID NO: 449550 - DNA, 6907 bp, Homo sapiens
ttcagtttctaaaaacaactacattacctgcaatgcacaatgaaacaaagtatgccctctcttcacacaaaaaaaattctattctgttattttcacttaacaaacagctggtgcctccggcgctacgggctgggcaagatggcggccttcgggatcttgagctacgaacaccggcccctgaagcggccgcggctggggcctcccgatgtttaccctcaggaccccaaacagaaggaggatgaactgacggccttgaatgtaaaacaaggtttcaataaccagcctgctgtctctggggatgagcatggcagtgccaagaacgtcagcttcaatcctgccaagatcagttccaacttcagcagcattattgcagagaaattacgttgtaatacccttcctgacactggtcgcaggaagccccaagtgaaccagaaggataacttctggctggtgactgcacgatcccagagtgccattaacacttggttcactgacttggctggcaccaagccactcacgcaactagccaaaaaggtccccattttcagtaagaaggaagaggtgtttgggtacttagccaaatacacagtgcctgtgatgcgggctgcctggctcattaagatgacctgtgcctactatgcagcaatctctgagaccaaggttaagaagagacatgttgaccctttcatggaatggactcagatcatcaccaagtacttatgggagcagttacagaagatggctgaatactaccggccagggcctgcaggaagtgggggctgtggttccacgatagggcccttgccccatgatgtagaggtggcaatccggcagtgggattacaccgagaagctggccatgttcatgtttcaggatggaatgctggacagacatgagttcctgacctgggtgcttgagtgttttgagaagatccgccctggagaggatgaattgcttaaactgctgctgcctctgcttctccgatactctggggaatttgttcagtctgcatacctgtcccgccggcttgcctacttctgtacacggagactggccctgcagctggatggtgtgagcagtcactcatctcatgttatatctgctcagtcaacaagcacgctacccaccacccctgctcctcagcccccaactagcagcacaccctcgactccctttagtgacctgcttatgtgccctcagcaccggcccctggtttttggcctcagctgtatcctacagaccatcctcctgtgctgtcctagtgccttggtttggcactactcactgactgatagcagaattaagaccggctcaccacttgaccacttgcctattgccccgtccaacctgcccatgccagagggtaacagtgccttcactcagcaggtccgtgcaaagttgcgggagatcgagcagcagatcaaggagcggggacaggcagttgaagttcgctggtctttcgataaatgccaggaagctactgcaggcttcaccattggacgggtacttcatactttggaagtgctggacagccatagttttgaacgctctgacttcagcaactctcttgactccctttgtaaccgaatctttggattgggacctagcaaggatgggcatgagatctcctcagatgatgatgctgtggtgtcattgctatgtgaatgggctgtcagctgcaagcgttctggtcggcatcgtgctatggtggtagccaagctcctggagaagagacaggcggagattgaggctgagcgttgtggagaatcagaagccgcagatgagaagggttccatcgcctctggctccctttctgctcccagtgctcccattttccaggatgtcctcctgcagtttctggatacacaggctcccatgctgacggaccctcgaagtgagagtgagcgggtggaattctttaacttagtactgctgttctgtgaactgattcgacatgatgttttctcccacaacatgtatacttgcactctcatctcccgaggggaccttgcctttggagcccctggtccccggcctccctctccctttgatgatcctgccgatgacccagagcacaaggaggctgaaggcagcagcagcagcaagctggaagatccagggctctcagaatctatggacattgaccctagttccagtgttctctttgaggacatggagaagcctgatttctcattgttctcccctactatgccctgtgaggggaagggcagtccatcccctgagaagccagatgtcgagaaggaggtgaagcccccacccaaggagaagattgaagggacccttggggttctttacgaccagccacgacacgtgcagtacgccacccattttcccatcccccaggaggagtcatgcagccatgagtgcaaccagcggttggtcgtactgtttggggtgggaaagcagcgagatgatgcccgccatgccatcaagaaaatcaccaaggatatcttgaaggttctgaaccgcaaagggacagcagaaactgaccagcttgctcctattgtgcctctgaatcctggagacctgacattcttaggtggggaggatgggcagaagcggcgacgcaaccggcctgaagccttccccactgctgaagatatctttgctaagttccagcacctttcacattatgaccaacaccaggtcacggctcaggtctcccggaatgttctggagcagatcacgagctttgcccttggcatgtcataccacttgcctctggtgcagcatgtgcagttcatcttcgacctcatggaatattcactcagcatcagtggcctcatcgactttgccattcagctgctgaatgaactgagtgtagttgaggctgagctgcttctcaaatcctcggatctggtgggcagctacactactagcctgtgcctgtgcatcgtggctgtcctgcggcactatcatgcctgcctcatcctcaaccaggaccagatggcacaggtctttgaggggctgtgtggcgtcgtgaagcatgggatgaaccggtccgatggctcctctgcagagcgctgtatccttgcttatctctatgatctgtacacctcctgtagccatttaaagaacaaatttggggagctcttcagcgacttttgctcaaaggtgaagaacaccatctactgcaacgtggagccatcggaatcaaatatgcgctgggcacctgagttcatgatcgacactctagagaaccctgcagctcacaccttcacctacacggggctaggcaagagtcttagtgagaaccctgctaaccgctacagctttgtctgcaatgcccttatgcacgtctgtgtggggcaccatgatcccgatagggtgaatgacatcgcaatcctgtgtgcagagctgaccggctattgcaagtcactgagtgcagaatggctaggagtgcttaaggccttgtgctgctcctctaacaatggcacttgtggtttcaacgatctcctctgcaatgttgatgtcagtgacctatcttttcatgactcgctggctacttttgttgccatcctcatcgctcggcagtgtttgctcctggaagatctgattcgctgtgctgccatcccttcactccttaatgctgcttgtagtgaacaggactctgagccaggggcccggcttacctgccgcatcctccttcaccttttcaagacaccgcagctcaatccttgccagtctgatggaaacaagcctacagtaggaatccgctcctcctgcgaccgccacctgctggctgcctcccagaaccgcatcgtggatggagccgtgtttgctgttctcaaggctgtgtttgtacttggggatgcggaactgaaaggttcaggcttcactgtgacaggaggaacagaagaacttccagaggaggagggaggaggtggcagtggtggtcggaggcagggtggccgcaacatctctgtggagacagccagtctggatgtctatgccaagtacgtgctgcgcagcatctgccaacaggaatgggtaggagaacgttgccttaagtctctgtgtgaggacagcaatgacctgcaagacccagtgttgagtagtgcccaggcgcagcgcctcatgcagctcatttgctatccacatcgactgctggacaatgaggatggggaaaacccccagcggcagcgcataaagcgcattctccagaacttggaccagtggaccatgcgccagtcttccttggagctgcagctcatgatcaagcagacccctaacaatgagatgaactccctcttggagaacatcgccaaggccacaatcgaggttttccaacagtcagcagagacagggtcatcttctggaagtactgcaagcaacatgcccagcagcagcaagaccaagcctgtgctcagctctctagagcgctctggtgtatggctggtggcccccctcattgctaaactgcccacctcagtccagggacatgtgttaaaggctgctggggaagaattggagaagggtcagcacctgggttcctcttcacgcaaagaacgtgatcgacaaaagcagaagagcatgtccctattgagccagcagcccttcttatcgctggtgctaacatgtctgaaagggcaggatgaacaacgcgagggactccttacctccctctacagccaggtgcaccagattgtgaataattggcgagatgaccagtacttagatgattgcaaaccaaagcagcttatgcatgaggcactcaaactgcggctcaacctggtggggggcatgtttgacacggtgcagcgcagcacccagcagaccacggagtgggccatgctcctcctggagatcatcatcagcggcactgtcgacatgcagtccaacaatgagctcttcactactgtgttggacatgctgagcgtgctcatcaatgggacattggctgcagacatgtctagcatctcgcaaggtagcatggaggaaaacaagcgtgcatacatgaacctggcgaagaagttgcagaaggagttgggggagcgccagtcagacagtctggaaaaggttcgccagctgctgccactgcccaagcagacccgagatgtcatcacgtgtgagccacagggctcccttatcgataccaagggcaacaagattgctggcttcgattccatcttcaagaaggagggtctacaggtttccaccaaacagaagatctcgccctgggatctttttgaggggttgaagccgtcagcaccactctcttggggctggtttggaacagtccgagtggaccggcgagtggctcgaggagaggagcagcagcggttgctgctctaccacacacacctgaggccccggccccgcgcctattacctggagccactgccactgcccccagaagatgaggagccgcctgctcctaccctgctagagcctgagaaaaaggctccagagccccccaaaactgacaaaccgggggctgctccacccagtactgaggaacgcaagaagaagtccaccaagggcaagaaacgcagccagccagctaccaagacagaggactatggaatgggcccgggtcggagcggcccttatggtgtgacagtgcctccggacctcctgcaccacccaaaccctggttctataacacaccttaactacaggcaaggctccataggcctgtacacccagaaccagccactacctgcaggtggccctcgtgtggacccataccgtcctgtgcgcttaccaatgcagaagctgcccacccgaccaacttaccctggagtgctgcccacaaccatgactggcgtcatgggtttagaaccctcctcttataagacctctgtgtaccggcagcagcaacctgcggtgccccaaggacagcgccttcgccaacagctccagcagagtcagggcatgttgggacagtcatctgtccatcagatgactcccagctcttcctacggtttgcagacttcccagggctatactccttatgtttctcatgtgggattgcagcaacacacaggccctgcaggtaccatggtgccccccagctactccagccagccttaccagagcacccacccttctaccaatcctactcttgtagatcctacccgccacctgcaacagcggcccagtggctatgtgcaccagcaggcccccacctatggacatggactgacctccactcaaaggttttcacaccagacactgcagcagacacccatgataagtaccatgactccaatgagtgcccagggcgtccaggcaggcgtccgttcaacagccatcctacctgagcagcagcagcagcagcaacagcagcaacagcaacagcagcagcagcagcaacagcaacagcagcagcagcagcagcagtaccacatccggcagcagcagcagcagcagatcctgcggcagcagcagcaacagcaacagcagcagcagcagcagcagcaacagcaacagcagcagcagcaacagcaacaacagcaacaccagcagcaacagcagcaacaggcggctcctccccaaccccagccccagtcccagccccagttccagcgccaggggcttcagcagacccagcagcagcaacagacagcagctttggtccggcaacttcaacaacagctctctaatacccagccacagcccagtaccaacatatttggacgctactgagccacctggaggaactgcttgtgcactggatgtggccccaccctttcctcttaattcccaatcccattcctgggctagcaccagtagtggttggggccctcccctcaggctccatttttaataagtttttagtatttttgttaatgtgaggcattgagctgttgggttttgtatattatttatatagagaccccagagctgttgcacccaatacacagagcttctttgcaaaggg

SEQ ID NO: 449551 - DNA, 6704 bp, Homo sapiens
gaaaaaacaactaaacgccgctttcctgcctcaggatgaactgacggccttgaatgtaaaacaaggtttcaataaccagcctgctgtctctggggatgagcatggcagtgccaagaacgtcagcttcaatcctgccaagatcagttccaacttcagcagcattattgcagagaaattacgttgtaatacccttcctgacactggtcgcaggaagccccaagtgaaccagaaggataacttctggctggtgactgcacgatcccagagtgccattaacacttggttcactgacttggctggcaccaagccactcacgcaactagccaaaaaggtccccattttcagtaagaaggaagaggtgtttgggtacttagccaaatacacagtgcctgtgatgcgggctgcctggctcattaagatgacctgtgcctactatgcagcaatctctgagaccaaggttaagaagagacatgttgaccctttcatggaatggactcagatcatcaccaagtacttatgggagcagttacagaagatggctgaatactaccggccagggcctgcaggaagtgggggctgtggttccacgatagggcccttgccccatgatgtagaggtggcaatccggcagtgggattacaccgagaagctggccatgttcatgtttcaggatggaatgctggacagacatgagttcctgacctgggtgcttgagtgttttgagaagatccgccctggagaggatgaattgcttaaactgctgctgcctctgcttctccgatactctggggaatttgttcagtctgcatacctgtcccgccggcttgcctacttctgtacacggagactggccctgcagctggatggtgtgagcagtcactcatctcatgttatatctgctcagtcaacaagcacgctacccaccacccctgctcctcagcccccaactagcagcacaccctcgactccctttagtgacctgcttatgtgccctcagcaccggcccctggtttttggcctcagctgtatcctacagaccatcctcctgtgctgtcctagtgccttggtttggcactactcactgactgatagcagaattaagaccggctcaccacttgaccacttgcctattgccccgtccaacctgcccatgccagagggtaacagtgccttcactcagcaggtccgtgcaaagttgcgggagatcgagcagcagatcaaggagcggggacaggcagttgaagttcgctggtctttcgataaatgccaggaagctactgcaggcttcaccattggacgggtacttcatactttggaagtgctggacagccatagttttgaacgctctgacttcagcaactctcttgactccctttgtaaccgaatctttggattgggacctagcaaggatgggcatgagatctcctcagatgatgatgctgtggtgtcattgctatgtgaatgggctgtcagctgcaagcgttctggtcggcatcgtgctatggtggtagccaagctcctggagaagagacaggcggagattgaggctgagcgttgtggagaatcagaagccgcagatgagaagggttccatcgcctctggctccctttctgctcccagtgctcccattttccaggatgtcctcctgcagtttctggatacacaggctcccatgctgacggaccctcgaagtgagagtgagcgggtggaattctttaacttagtactgctgttctgtgaactgattcgacatgatgttttctcccacaacatgtatacttgcactctcatctcccgaggggaccttgcctttggagcccctggtccccggcctccctctccctttgatgatcctgccgatgacccagagcacaaggaggctgaaggcagcagcagcagcaagctggaagatccagggctctcagaatctatggacattgaccctagttccagtgttctctttgaggacatggagaagcctgatttctcattgttctcccctactatgccctgtgaggggaagggcagtccatcccctgagaagccagatgtcgagaaggaggtgaagcccccacccaaggagaagattgaagggacccttggggttctttacgaccagccacgacacgtgcagtacgccacccattttcccatcccccaggaggagtcatgcagccatgagtgcaaccagcggttggtcgtactgtttggggtgggaaagcagcgagatgatgcccgccatgccatcaagaaaatcaccaaggatatcttgaaggttctgaaccgcaaagggacagcagaaactgaccagcttgctcctattgtgcctctgaatcctggagacctgacattcttaggtggggaggatgggcagaagcggcgacgcaaccggcctgaagccttccccactgctgaagatatctttgctaagttccagcacctttcacattatgaccaacaccaggtcacggctcaggtctcccggaatgttctggagcagatcacgagctttgcccttggcatgtcataccacttgcctctggtgcagcatgtgcagttcatcttcgacctcatggaatattcactcagcatcagtggcctcatcgactttgccattcagctgctgaatgaactgagtgtagttgaggctgagctgcttctcaaatcctcggatctggtgggcagctacactactagcctgtgcctgtgcatcgtggctgtcctgcggcactatcatgcctgcctcatcctcaaccaggaccagatggcacaggtctttgaggggctgtgtggcgtcgtgaagcatgggatgaaccggtccgatggctcctctgcagagcgctgtatccttgcttatctctatgatctgtacacctcctgtagccatttaaagaacaaatttggggagctcttcagcgacttttgctcaaaggtgaagaacaccatctactgcaacgtggagccatcggaatcaaatatgcgctgggcacctgagttcatgatcgacactctagagaaccctgcagctcacaccttcacctacacggggctaggcaagagtcttagtgagaaccctgctaaccgctacagctttgtctgcaatgcccttatgcacgtctgtgtggggcaccatgatcccgatagggtgaatgacatcgcaatcctgtgtgcagagctgaccggctattgcaagtcactgagtgcagaatggctaggagtgcttaaggccttgtgctgctcctctaacaatggcacttgtggtttcaacgatctcctctgcaatgttgatgtcagtgacctatcttttcatgactcgctggctacttttgttgccatcctcatcgctcggcagtgtttgctcctggaagatctgattcgctgtgctgccatcccttcactccttaatgctgcttgtagtgaacaggactctgagccaggggcccggcttacctgccgcatcctccttcaccttttcaagacaccgcagctcaatccttgccagtctgatggaaacaagcctacagtaggaatccgctcctcctgcgaccgccacctgctggctgcctcccagaaccgcatcgtggatggagccgtgtttgctgttctcaaggctgtgtttgtacttggggatgcggaactgaaaggttcaggcttcactgtgacaggaggaacagaagaacttccagaggaggagggaggaggtggcagtggtggtcggaggcagggtggccgcaacatctctgtggagacagccagtctggatgtctatgccaagtacgtgctgcgcagcatctgccaacaggaatgggtaggagaacgttgccttaagtctctgtgtgaggacagcaatgacctgcaagacccagtgttgagtagtgcccaggcgcagcgcctcatgcagctcatttgctatccacatcgactgctggacaatgaggatggggaaaacccccagcggcagcgcataaagcgcattctccagaacttggaccagtggaccatgcgccagtcttccttggagctgcagctcatgatcaagcagacccctaacaatgagatgaactccctcttggagaacatcgccaaggccacaatcgaggttttccaacagtcagcagagacagggtcatcttctggaagtactgcaagcaacatgcccagcagcagcaagaccaagcctgtgctcagctctctagagcgctctggtgtatggctggtggcccccctcattgctaaactgcccacctcagtccagggacatgtgttaaaggctgctggggaagaattggagaagggtcagcacctgggttcctcttcacgcaaagaacgtgatcgacaaaagcagaagagcatgtccctattgagccagcagcccttcttatcgctggtgctaacatgtctgaaagggcaggatgaacaacgcgagggactccttacctccctctacagccaggtgcaccagattgtgaataattggcgagatgaccagtacttagatgattgcaaaccaaagcagcttatgcatgaggcactcaaactgcggctcaacctggtggggggcatgtttgacacggtgcagcgcagcacccagcagaccacggagtgggccatgctcctcctggagatcatcatcagcggcactgtcgacatgcagtccaacaatgagctcttcactactgtgttggacatgctgagcgtgctcatcaatgggacattggctgcagacatgtctagcatctcgcaaggtagcatggaggaaaacaagcgtgcatacatgaacctggcgaagaagttgcagaaggagttgggggagcgccagtcagacagtctggaaaaggttcgccagctgctgccactgcccaagcagacccgagatgtcatcacgtgtgagccacagggctcccttatcgataccaagggcaacaagattgctggcttcgattccatcttcaagaaggagggtctacaggtttccaccaaacagaagatctcgccctgggatctttttgaggggttgaagccgtcagcaccactctcttggggctggtttggaacagtccgagtggaccggcgagtggctcgaggagaggagcagcagcggttgctgctctaccacacacacctgaggccccggccccgcgcctattacctggagccactgccactgcccccagaagatgaggagccgcctgctcctaccctgctagagcctgagaaaaaggctccagagccccccaaaactgacaaaccgggggctgctccacccagtactgaggaacgcaagaagaagtccaccaagggcaagaaacgcagccagccagctaccaagacagaggactatggaatgggcccgggtcggagcggcccttatggtgtgacagtgcctccggacctcctgcaccacccaaaccctggttctataacacaccttaactacaggcaaggctccataggcctgtacacccagaaccagccactacctgcaggtggccctcgtgtggacccataccgtcctgtgcgcttaccaatgcagaagctgcccacccgaccaacttaccctggagtgctgcccacaaccatgactggcgtcatgggtttagaaccctcctcttataagacctctgtgtaccggcagcagcaacctgcggtgccccaaggacagcgccttcgccaacagctccagcagagtcagggcatgttgggacagtcatctgtccatcagatgactcccagctcttcctacggtttgcagacttcccagggctatactccttatgtttctcatgtgggattgcagcaacacacaggccctgcaggtaccatggtgccccccagctactccagccagccttaccagagcacccacccttctaccaatcctactcttgtagatcctacccgccacctgcaacagcggcccagtggctatgtgcaccagcaggcccccacctatggacatggactgacctccactcaaaggttttcacaccagacactgcagcagacacccatgataagtaccatgactccaatgagtgcccagggcgtccaggcaggcgtccgttcaacagccatcctacctgagcagcagcagcagcagcaacagcagcaacagcaacagcagcagcagcagcaacagcaacagcagcagcagcagcagcagtaccacatccggcagcagcagcagcagcagatcctgcggcagcagcagcaacagcaacagcagcagcagcagcagcagcaacagcaacagcagcagcagcaacagcaacaacagcaacaccagcagcaacagcagcaacaggcggctcctccccaaccccagccccagtcccagccccagttccagcgccaggggcttcagcagacccagcagcagcaacagacagcagctttggtccggcaacttcaacaacagctctctaatacccagccacagcccagtaccaacatatttggacgctactgagccacctggaggaactgcttgtgcactggatgtggccccaccctttcctcttaattcccaatcccattcctgggctagcaccagtagtggttggggccctcccctcaggctccatttttaataagtttttagtatttttgttaatgtgaggcattgagctgttgggttttgtatattatttatatagagaccccagagctgttgcacccaatacacagagcttctttgcaaaggg

SEQ ID NO: 449552 - DNA, 7332 bp, Homo sapiens
ttcagtttctaaaaacaactacattacctgcaatgcacaatgaaacaaagtatgccctctcttcacacaaaaaaaattctattctgttattttcacttaacaaacagctggtgcctccggcgctacgggctgggcaagatggcggccttcgggatcttgagctacgaacaccggcccctgaagcggccgcggctggggcctcccgatgtttaccctcaggaccccaaacagaaggaggatgaactgacggccttgaatgtaaaacaaggtttcaataaccagcctgctgtctctggggatgagcatggcagtgccaagaacgtcagcttcaatcctgccaagatcagttccaacttcagcagcattattgcagagaaattacgttgtaatacccttcctgacactggtcgcaggaagccccaagtgaaccagaaggataacttctggctggtgactgcacgatcccagagtgccattaacacttggttcactgacttggctggcaccaagccactcacgcaactagccaaaaaggtccccattttcagtaagaaggaagaggtgtttgggtacttagccaaatacacagtgcctgtgatgcgggctgcctggctcattaagatgacctgtgcctactatgcagcaatctctgagaccaaggttaagaagagacatgttgaccctttcatggaatggactcagatcatcaccaagtacttatgggagcagttacagaagatggctgaatactaccggccagggcctgcaggaagtgggggctgtggttccacgatagggcccttgccccatgatgtagaggtggcaatccggcagtgggattacaccgagaagctggccatgttcatgtttcaggatggaatgctggacagacatgagttcctgacctgggtgcttgagtgttttgagaagatccgccctggagaggatgaattgcttaaactgctgctgcctctgcttctccgatactctggggaatttgttcagtctgcatacctgtcccgccggcttgcctacttctgtacacggagactggccctgcagctggatggtgtgagcagtcactcatctcatgttatatctgctcagtcaacaagcacgctacccaccacccctgctcctcagcccccaactagcagcacaccctcgactccctttagtgacctgcttatgtgccctcagcaccggcccctggtttttggcctcagctgtatcctacagaccatcctcctgtgctgtcctagtgccttggtttggcactactcactgactgatagcagaattaagaccggctcaccacttgaccacttgcctattgccccgtccaacctgcccatgccagagggtaacagtgccttcactcagcaggtccgtgcaaagttgcgggagatcgagcagcagatcaaggagcggggacaggcagttgaagttcgctggtctttcgataaatgccaggaagctactgcaggcttcaccattggacgggtacttcatactttggaagtgctggacagccatagttttgaacgctctgacttcagcaactctcttgactccctttgtaaccgaatctttggattgggacctagcaaggatgggcatgagatctcctcagatgatgatgctgtggtgtcattgctatgtgaatgggctgtcagctgcaagcgttctggtcggcatcgtgctatggtggtagccaagctcctggagaagagacaggcggagattgaggctgagcgttgtggagaatcagaagccgcagatgagaagggttccatcgcctctggctccctttctgctcccagtgctcccattttccaggatgtcctcctgcagtttctggatacacaggctcccatgctgacggaccctcgaagtgagagtgagcgggtggaattctttaacttagtactgctgttctgtgaactgattcgacatgatgttttctcccacaacatgtatacttgcactctcatctcccgaggggaccttgcctttggagcccctggtccccggcctccctctccctttgatgatcctgccgatgacccagagcacaaggaggctgaaggcagcagcagcagcaagctggaagatccagggctctcagaatctatggacattgaccctagttccagtgttctctttgaggacatggagaagcctgatttctcattgttctcccctactatgccctgtgaggggaagggcagtccatcccctgagaagccagatgtcgagaaggaggtgaagcccccacccaaggagaagattgaagggacccttggggttctttacgaccagccacgacacgtgcagtacgccacccattttcccatcccccaggaggagtcatgcagccatgagtgcaaccagcggttggtcgtactgtttggggtgggaaagcagcgagatgatgcccgccatgccatcaagaaaatcaccaaggatatcttgaaggttctgaaccgcaaagggacagcagaaactgaccagcttgctcctattgtgcctctgaatcctggagacctgacattcttaggtggggaggatgggcagaagcggcgacgcaaccggcctgaagccttccccactgctgaagatatctttgctaagttccagcacctttcacattatgaccaacaccaggtcacggctcaggtctcccggaatgttctggagcagatcacgagctttgcccttggcatgtcataccacttgcctctggtgcagcatgtgcagttcatcttcgacctcatggaatattcactcagcatcagtggcctcatcgactttgccattcagctgctgaatgaactgagtgtagttgaggctgagctgcttctcaaatcctcggatctggtgggcagctacactactagcctgtgcctgtgcatcgtggctgtcctgcggcactatcatgcctgcctcatcctcaaccaggaccagatggcacaggtctttgaggggctgtgtggcgtcgtgaagcatgggatgaaccggtccgatggctcctctgcagagcgctgtatccttgcttatctctatgatctgtacacctcctgtagccatttaaagaacaaatttggggagctcttcaggtaagagaggtggaaggtaaggggtagcgagtgggacctactcccttcttcccatgaccacccaactcaggaggagaggatggcccgggaccctgctgcctgtctagggtcatttgtggactgtgtcctccacatactgttgtgttaccaagagtgggccctcttcctcagcaggcttgctccccgcctatatctgtggggcccaccctcttcccccttttcctcactgccttcagaggccccagttccttattcccatgtggttcctttcctgcccagtctgttttgtcccatctcccttttcttgtctcaagatccttcatccctcactttctcctttttttcttttctcccctttcctgaccatccctcgacctcagcaggccttcttcaacactactatctcctttcctccatccctgcagcgacttttgctcaaaggtgaagaacaccatctactgcaacgtggagccatcggaatcaaatatgcgctgggcacctgagttcatgatcgacactctagagaaccctgcagctcacaccttcacctacacggggctaggcaagagtcttagtgagaaccctgctaaccgctacagctttgtctgcaatgcccttatgcacgtctgtgtggggcaccatgatcccgatagggtgaatgacatcgcaatcctgtgtgcagagctgaccggctattgcaagtcactgagtgcagaatggctaggagtgcttaaggccttgtgctgctcctctaacaatggcacttgtggtttcaacgatctcctctgcaatgttgatgtcagtgacctatcttttcatgactcgctggctacttttgttgccatcctcatcgctcggcagtgtttgctcctggaagatctgattcgctgtgctgccatcccttcactccttaatgctgcttgtagtgaacaggactctgagccaggggcccggcttacctgccgcatcctccttcaccttttcaagacaccgcagctcaatccttgccagtctgatggaaacaagcctacagtaggaatccgctcctcctgcgaccgccacctgctggctgcctcccagaaccgcatcgtggatggagccgtgtttgctgttctcaaggctgtgtttgtacttggggatgcggaactgaaaggttcaggcttcactgtgacaggaggaacagaagaacttccagaggaggagggaggaggtggcagtggtggtcggaggcagggtggccgcaacatctctgtggagacagccagtctggatgtctatgccaagtacgtgctgcgcagcatctgccaacaggaatgggtaggagaacgttgccttaagtctctgtgtgaggacagcaatgacctgcaagacccagtgttgagtagtgcccaggcgcagcgcctcatgcagctcatttgctatccacatcgactgctggacaatgaggatggggaaaacccccagcggcagcgcataaagcgcattctccagaacttggaccagtggaccatgcgccagtcttccttggagctgcagctcatgatcaagcagacccctaacaatgagatgaactccctcttggagaacatcgccaaggccacaatcgaggttttccaacagtcagcagagacagggtcatcttctggaagtactgcaagcaacatgcccagcagcagcaagaccaagcctgtgctcagctctctagagcgctctggtgtatggctggtggcccccctcattgctaaactgcccacctcagtccagggacatgtgttaaaggctgctggggaagaattggagaagggtcagcacctgggttcctcttcacgcaaagaacgtgatcgacaaaagcagaagagcatgtccctattgagccagcagcccttcttatcgctggtgctaacatgtctgaaagggcaggatgaacaacgcgagggactccttacctccctctacagccaggtgcaccagattgtgaataattggcgagatgaccagtacttagatgattgcaaaccaaagcagcttatgcatgaggcactcaaactgcggctcaacctggtggggggcatgtttgacacggtgcagcgcagcacccagcagaccacggagtgggccatgctcctcctggagatcatcatcagcggcactgtcgacatgcagtccaacaatgagctcttcactactgtgttggacatgctgagcgtgctcatcaatgggacattggctgcagacatgtctagcatctcgcaaggtagcatggaggaaaacaagcgtgcatacatgaacctggcgaagaagttgcagaaggagttgggggagcgccagtcagacagtctggaaaaggttcgccagctgctgccactgcccaagcagacccgagatgtcatcacgtgtgagccacagggctcccttatcgataccaagggcaacaagattgctggcttcgattccatcttcaagaaggagggtctacaggtttccaccaaacagaagatctcgccctgggatctttttgaggggttgaagccgtcagcaccactctcttggggctggtttggaacagtccgagtggaccggcgagtggctcgaggagaggagcagcagcggttgctgctctaccacacacacctgaggccccggccccgcgcctattacctggagccactgccactgcccccagaagatgaggagccgcctgctcctaccctgctagagcctgagaaaaaggctccagagccccccaaaactgacaaaccgggggctgctccacccagtactgaggaacgcaagaagaagtccaccaagggcaagaaacgcagccagccagctaccaagacagaggactatggaatgggcccgggtcggagcggcccttatggtgtgacagtgcctccggacctcctgcaccacccaaaccctggttctataacacaccttaactacaggcaaggctccataggcctgtacacccagaaccagccactacctgcaggtggccctcgtgtggacccataccgtcctgtgcgcttaccaatgcagaagctgcccacccgaccaacttaccctggagtgctgcccacaaccatgactggcgtcatgggtttagaaccctcctcttataagacctctgtgtaccggcagcagcaacctgcggtgccccaaggacagcgccttcgccaacagctccagcagagtcagggcatgttgggacagtcatctgtccatcagatgactcccagctcttcctacggtttgcagacttcccagggctatactccttatgtttctcatgtgggattgcagcaacacacaggccctgcaggtaccatggtgccccccagctactccagccagccttaccagagcacccacccttctaccaatcctactcttgtagatcctacccgccacctgcaacagcggcccagtggctatgtgcaccagcaggcccccacctatggacatggactgacctccactcaaaggttttcacaccagacactgcagcagacacccatgataagtaccatgactccaatgagtgcccagggcgtccaggcaggcgtccgttcaacagccatcctacctgagcagcagcagcagcagcaacagcagcaacagcaacagcagcagcagcagcaacagcaacagcagcagcagcagcagcagtaccacatccggcagcagcagcagcagcagatcctgcggcagcagcagcaacagcaacagcagcagcagcagcagcagcaacagcaacagcagcagcagcaacagcaacaacagcaacaccagcagcaacagcagcaacaggcggctcctccccaaccccagccccagtcccagccccagttccagcgccaggggcttcagcagacccagcagcagcaacagacagcagctttggtccggcaacttcaacaacagctctctaatacccagccacagcccagtaccaacatatttggacgctactgagccacctggaggaactgcttgtgcactggatgtggccccaccctttcctcttaattcccaatcccattcctgggctagcaccagtagtggttggggccctcccctcaggctccatttttaataagtttttagtatttttgttaatgtgaggcattgagctgttgggttttgtatattatttatatagagaccccagagctgttgcacccaatacacagagcttctttgcaaaggg

SEQ ID NO: 449553 - DNA, 7257 bp, Homo sapiens
ttcagtttctaaaaacaactacattacctgcaatgcacaatgaaacaaagtatgccctctcttcacacaaaaaaaattctattctgttattttcacttaacaaacagctggtgcctccggcgctacgggctgggcaagatggcggccttcgggatcttgagctacgaacaccggcccctgaagcggccgcggctggggcctcccgatgtttaccctcaggaccccaaacagaaggaggatgaactgacggccttgaatgtaaaacaaggtttcaataaccagcctgctgtctctggggatgagcatggcagtgccaagaacgtcagcttcaatcctgccaagatcagttccaacttcagcagcattattgcagagaaattacgttgtaatacccttcctgacactggtcgcaggaagccccaagtgaaccagaaggataacttctggctggtgactgcacgatcccagagtgccattaacacttggttcactgacttggctggcaccaagccactcacgcaactagccaaaaaggtccccattttcagtaagaaggaagaggtgtttgggtacttagccaaatacacagtgcctgtgatgcgggctgcctggctcattaagatgacctgtgcctactatgcagcaatctctgagaccaaggttaagaagagacatgttgaccctttcatggaatggactcagatcatcaccaagtacttatgggagcagttacagaagatggctgaatactaccggccagggcctgcaggaagtgggggctgtggttccacgatagggcccttgccccatgatgtagaggtggcaatccggcagtgggattacaccgagaagctggccatgttcatgtttcaggatggaatgctggacagacatgagttcctgacctgggtgcttgagtgttttgagaagatccgccctggagaggatgaattgcttaaactgctgctgcctctgcttctccgatactctggggaatttgttcagtctgcatacctgtcccgccggcttgcctacttctgtacacggagactggccctgcagctggatggtgtgagcagtcactcatctcatgttatatctgctcagtcaacaagcacgctacccaccacccctgctcctcagcccccaactagcagcacaccctcgactccctttagtgacctgcttatgtgccctcagcaccggcccctggtttttggcctcagctgtatcctacagaccatcctcctgtgctgtcctagtgccttggtttggcactactcactgactgatagcagaattaagaccggctcaccacttgaccacttgcctattgccccgtccaacctgcccatgccagagggtaacagtgccttcactcagcaggtccgtgcaaagttgcgggagatcgagcagcagatcaaggagcggggacaggcagttgaagttcgctggtctttcgataaatgccaggaagctactgcaggcttcaccattggacgggtacttcatactttggaagtgctggacagccatagttttgaacgctctgacttcagcaactctcttgactccctttgtaaccgaatctttggattgggacctagcaaggatgggcatgagatctcctcagatgatgatgctgtggtgtcattgctatgtgaatgggctgtcagctgcaagcgttctggtcggcatcgtgctatggtggtagccaagctcctggagaagagacaggcggagattgaggctgagcgttgtggagaatcagaagccgcagatgagaagggttccatcgcctctggctccctttctgctcccagtgctcccattttccaggatgtcctcctgcagtttctggatacacaggctcccatgctgacggaccctcgaagtgagagtgagcgggtggaattctttaacttagtactgctgttctgtgaactgattcgacatgatgttttctcccacaacatgtatacttgcactctcatctcccgaggggaccttgcctttggagcccctggtccccggcctccctctccctttgatgatcctgccgatgacccagagcacaaggaggctgaaggcagcagcagcagcaagctggaagatccagggctctcagaatctatggacattgaccctagttccagtgttctctttgaggacatggagaagcctgatttctcattgttctcccctactatgccctgtgaggggaagggcagtccatcccctgagaagccagatgtcgagaaggaggtgaagcccccacccaaggagaagattgaagggacccttggggttctttacgaccagccacgacacgtgcagtacgccacccattttcccatcccccaggaggagtcatgcagccatgagtgcaaccagcggttggtcgtactgtttggggtgggaaagcagcgagatgatgcccgccatgccatcaagaaaatcaccaaggatatcttgaaggttctgaaccgcaaagggacagcagaaactgaccagcttgctcctattgtgcctctgaatcctggagacctgacattcttaggtggggaggatgggcagaagcggcgacgcaaccggcctgaagccttccccactgctgaagatatctttgctaagttccagcacctttcacattatgaccaacaccaggtcacggctcaggtctcccggaatgttctggagcagatcacgagctttgcccttggcatgtcataccacttgcctctggtgcagcatgtgcagttcatcttcgacctcatggaatattcactcagcatcagtggcctcatcgactttgccattcagctgctgaatgaactgagtgtagttgaggctgagctgcttctcaaatcctcggatctggtgggcagctacactactagcctgtgcctgtgcatcgtggctgtcctgcggcactatcatgcctgcctcatcctcaaccaggaccagatggcacaggtctttgaggggctgtgtggcgtcgtgaagcatgggatgaaccggtccgatggctcctctgcagagcgctgtatccttgcttatctctatgatctgtacacctcctgtagccatttaaagaacaaatttggggagctcttcaggtaagagaggtggaaggtaaggggtagcgagtgggacctactcccttcttcccatgaccacccaactcaggaggagaggatggcccgggaccctgctgcctgtctagggtcatttgtggactgtgtcctccacatactgttgtgttaccaagagtgggccctcttcctcagcaggcttgctccccgcctatatctgtggggcccaccctcttcccccttttcctcactgccttcagaggccccagttccttattcccatgtggttcctttcctgcccagtctgttttgtcccatctcccttttcttgtctcaagatccttcatccctcactttctcctttttttcttttctcccctttcctgaccatccctcgacctcagcaggccttcttcaacactactatctcctttcctccatccctgcagcgacttttgctcaaaggtgaagaacaccatctactgcaacgtggagccatcggaatcaaatatgcgctgggcacctgagttcatgatcgacactctagagaaccctgcagctcacaccttcacctacacggggctaggcaagagtcttagtgagaaccctgctaaccgctacagctttgtctgcaatgcccttatgcacgtctgtgtggggcaccatgatcccgatagggtgaatgacatcgcaatcctgtgtgcagagctgaccggctattgcaagtcactgagtgcagaatggctaggagtgcttaaggccttgtgctgctcctctaacaatggcacttgtggtttcaacgatctcctctgcaatgttgatgtcagtgacctatcttttcatgactcgctggctacttttgttgccatcctcatcgctcggcagtgtttgctcctggaagatctgattcgctgtgctgccatcccttcactccttaatgctgcttgtagtgaacaggactctgagccaggggcccggcttacctgccgcatcctccttcaccttttcaagacaccgcagctcaatccttgccagtctgatggaaacaagcctacagtaggaatccgctcctcctgcgaccgccacctgctggctgcctcccagaaccgcatcgtggatggagccgtgtttgctgttctcaaggctgtgtttgtacttggggatgcggaactgaaaggttcaggcttcactgtgacaggaggaacagaagaacttccagaggaggagggaggaggtggcagtggtggtcggaggcagggtggccgcaacatctctgtggagacagccagtctggatgtctatgccaagtacgtgctgcgcagcatctgccaacaggaatgggtaggagaacgttgccttaagtctctgtgtgaggacagcaatgacctgcaagacccagtgttgagtagtgcccaggcgcagcgcctcatgcagctcatttgctatccacatcgactgctggacaatgaggatggggaaaacccccagcggcagcgcataaagcgcattctccagaacttggaccagtggaccatgcgccagtcttccttggagctgcagctcatgatcaagcagacccctaacaatgagatgaactccctcttggagaacatcgccaaggccacaatcgaggttttccaacagtcagcagagacagggtcatcttctggaagtactgcaagcaacatgcccagcagcagcaagaccaagcctgtgctcagctctctagagcgctctggtgtatggctggtggcccccctcattgctaaactgcccacctcagtccagggacatgtgttaaaggctgctggggaagaattggagaagggtcagcacctgggttcctcttcacgcaaagaacgtgatcgacaaaagcagaagagcatgtccctattgagccagcagcccttcttatcgctggtgctaacatgtctgaaagggcaggatgaacaacgcgagggactccttacctccctctacagccaggtgcaccagattgtgaataattggcgagatgaccagtacttagatgattgcaaaccaaagcagcttatgcatgaggcactcaaactgcggctcaacctggtggggggcatgtttgacacggtgcagcgcagcacccagcagaccacggagtgggccatgctcctcctggagatcatcatcagcggcactgtcgacatgcagtccaacaatgagctcttcactactgtgttggacatgctgagcgtgctcatcaatgggacattggctgcagacatgtctagcatctcgcaaggtagcatggaggaaaacaagcgtgcatacatgaacctggcgaagaagttgcagaaggagttgggggagcgccagtcagacagtctggaaaaggttcgccagctgctgccactgcccaagcagacccgagatgtcatcacgtgtgagccacagggctcccttatcgataccaagggcaacaagattgctggcttcgattccatcttcaagaaggagggtctacaggtttccaccaaacagaagatctcgccctgggatctttttgaggggttgaagccgtcagcaccactctcttggggctggtttggaacagtccgagtggaccggcgagtggctcgaggagaggagcagcagcggttgctgctctaccacacacacctgaggccccggccccgcgcctattacctggagccactgccactgcccccagaagatgaggagccgcctgctcctaccctgctagagcctgagaaaaaggctccagagccccccaaaactgacaaaccgggggctgctccacccagtactgaggaacgcaagaagaagtccaccaagggcaagaaacgcagccagccagctaccaagacagaggactatggaatgggcccgggtcggagcggcccttatggtgtgacagtgcctccggacctcctgcaccacccaaaccctggttctataacacaccttaactacaggcaaggctccataggcctgtacacccagaaccagccactacctgcaggtggccctcgtgtggacccataccgtcctgtgcgcttaccaatgcagaagctgcccacccgaccaacttaccctggagtgctgcccacaaccatgactggcgtcatgggtttagaaccctcctcttataagacctctgtgtaccggcagcagcaacctgcggtgccccaaggacagcgccttcgccaacagctccagcagagtcagggcatgttgggacagtcatctgtccatcagatgactcccagctcttcctacggtttgcagacttcccagggctatactccttatgtttctcatgtgggattgcagcaacacacaggccctgcagatcctacccgccacctgcaacagcggcccagtggctatgtgcaccagcaggcccccacctatggacatggactgacctccactcaaaggttttcacaccagacactgcagcagacacccatgataagtaccatgactccaatgagtgcccagggcgtccaggcaggcgtccgttcaacagccatcctacctgagcagcagcagcagcagcaacagcagcaacagcaacagcagcagcagcagcaacagcaacagcagcagcagcagcagcagtaccacatccggcagcagcagcagcagcagatcctgcggcagcagcagcaacagcaacagcagcagcagcagcagcagcaacagcaacagcagcagcagcaacagcaacaacagcaacaccagcagcaacagcagcaacaggcggctcctccccaaccccagccccagtcccagccccagttccagcgccaggggcttcagcagacccagcagcagcaacagacagcagctttggtccggcaacttcaacaacagctctctaatacccagccacagcccagtaccaacatatttggacgctactgagccacctggaggaactgcttgtgcactggatgtggccccaccctttcctcttaattcccaatcccattcctgggctagcaccagtagtggttggggccctcccctcaggctccatttttaataagtttttagtatttttgttaatgtgaggcattgagctgttgggttttgtatattatttatatagagaccccagagctgttgcacccaatacacagagcttctttgcaaaggg

SEQ ID NO: 449554 - DNA, 6131 bp, Homo sapiens
ttcagtttctaaaaacaactacattacctgcaatgcacaatgaaacaaagtatgccctctcttcacacaaaaaaaattctattctgttattttcacttaacaaacagctggtgcctccggcgctacgggctgggcaagatggcggccttcgggatcttgagctacgaacaccggcccctgaagcggccgcggctggggcctcccgatgtttaccctcaggaccccaaacagaaggaggatgaactgacggccttgaatgtaaaacaaggtttcaataaccagcctgctgtctctggggatgagcatggcagtgccaagaacgtcagcttcaatcctgccaagatcagttccaacttcagcagcattattgcagagaaattacgttgtaatacccttcctgacactggtcgcaggaagccccaagtgaaccagaaggataacttctggctggtgactgcacgatcccagagtgccattaacacttggttcactgacttggctggcaccaagccactcacgcaactagccaaaaaggtccccattttcagtaagaaggaagaggtgtttgggtacttagccaaatacacagtgcctgtgatgcgggctgcctggctcattaagatgacctgtgcctactatgcagcaatctctgagaccaaggttaagaagagacatgttgaccctttcatggaatggactcagatcatcaccaagtacttatgggagcagttacagaagatggctgaatactaccggccagggcctgcaggaagtgggggctgtggttccacgatagggcccttgccccatgatgtagaggtggcaatccggcagtgggattacaccgagaagctggccatgttcatgtttcaggatggaatgctggacagacatgagttcctgacctgggtgcttgagtgttttgagaagatccgccctggagaggatgaattgcttaaactgctgctgcctctgcttctccgatactctggggaatttgttcagtctgcatacctgtcccgccggcttgcctacttctgtacacggagactggccctgcagctggatggtgtgagcagtcactcatctcatgttatatctgctcagtcaacaagcacgctacccaccacccctgctcctcagcccccaactagcagcacaccctcgactccctttagtgacctgcttatgtgccctcagcaccggcccctggtttttggcctcagctgtatcctacagaccatcctcctgtgctgtcctagtgccttggtttggcactactcactgactgatagcagaattaagaccggctcaccacttgaccacttgcctattgccccgtccaacctgcccatgccagagggtaacagtgccttcactcagcaggtccgtgcaaagttgcgggagatcgagcagcagatcaaggagcggggacaggcagttgaagttcgctggtctttcgataaatgccaggaagctactgcaggcttcaccattggacgggtacttcatactttggaagtgctggacagccatagttttgaacgctctgacttcagcaactctcttgactccctttgtaaccgaatctttggattgggacctagcaaggatgggcatgagatctcctcagatgatgatgctgtggtgtcattgctatgtgaatgggctgtcagctgcaagcgttctggtcggcatcgtgctatggtggtagccaagctcctggagaagagacaggcggagattgaggctgagcgttgtggagaatcagaagccgcagatgagaagggttccatcgcctctggctccctttctgctcccagtgctcccattttccaggatgtcctcctgcagtttctggatacacaggctcccatgctgacggaccctcgaagtgagagtgagcgggtggaattctttaacttagtactgctgttctgtgaactgattcgacatgatgttttctcccacaacatgtatacttgcactctcatctcccgaggggaccttgcctttggagcccctggtccccggcctccctctccctttgatgatcctgccgatgacccagagcacaaggaggctgaaggcagcagcagcagcaagctggaagatccagggctctcagaatctatggacattgaccctagttccagtgttctctttgaggacatggagaagcctgatttctcattgttctcccctactatgccctgtgaggggaagggcagtccatcccctgagaagccagatgtcgagaaggaggtgaagcccccacccaaggagaagattgaagggacccttggggttctttacgaccagccacgacacgtgcagtacgccacccattttcccatcccccaggaggagtcatgcagccatgagtgcaaccagcggttggtcgtactgtttggggtgggaaagcagcgagatgatgcccgccatgccatcaagaaaatcaccaaggatatcttgaaggttctgaaccgcaaagggacagcagaaactgaccagcttgctcctattgtgcctctgaatcctggagacctgacattcttaggtggggaggatgggcagaagcggcgacgcaaccggcctgaagccttccccactgctgaagatatctttgctaagttccagcacctttcacattatgaccaacaccaggtcacggctcaggtctcccggaatgttctggagcagatcacgagctttgcccttggcatgtcataccacttgcctctggtgcagcatgtgcagttcatcttcgacctcatggaatattcactcagcatcagtggcctcatcgactttgccattcagctgctgaatgaactgagtgtagttgaggctgagctgcttctcaaatcctcggatctggtgggcagctacactactagcctgtgcctgtgcatcgtggctgtcctgcggcactatcatgcctgcctcatcctcaaccaggaccagatggcacaggtctttgaggggctgtgtggcgtcgtgaagcatgggatgaaccggtccgatggctcctctgcagagcgctgtatccttgcttatctctatgatctgtacacctcctgtagccatttaaagaacaaatttggggagctcttcaggtaagagaggtggaaggtaaggggtagcgagtgggacctactcccttcttcccatgaccacccaactcaggaggagaggatggcccgggaccctgctgcctgtctagggtcatttgtggactgtgtcctccacatactgttgtgttaccaagagtgggccctcttcctcagcaggcttgctccccgcctatatctgtggggcccaccctcttcccccttttcctcactgccttcagaggccccagttccttattcccatgtggttcctttcctgcccagtctgttttgtcccatctcccttttcttgtctcaagatccttcatccctcactttctcctttttttcttttctcccctttcctgaccatccctcgacctcagcaggccttcttcaacactactatctcctttcctccatccctgcagcgacttttgctcaaaggtgaagaacaccatctactgcaacgtggagccatcggaatcaaatatgcgctgggcacctgagttcatgatcgacactctagagaaccctgcagctcacaccttcacctacacggggctaggcaagagtcttagtgagaaccctgctaaccgctacagctttgtctgcaatgcccttatgcacgtctgtgtggggcaccatgatcccgatagggtgaatgacatcgcaatcctgtgtgcagagctgaccggctattgcaagtcactgagtgcagaatggctaggagtgcttaaggccttgtgctgctcctctaacaatggcacttgtggtttcaacgatctcctctgcaatgttgatgtcagtgacctatcttttcatgactcgctggctacttttgttgccatcctcatcgctcggcagtgtttgctcctggaagatctgattcgctgtgctgccatcccttcactccttaatgctgcttgtagtgaacaggactctgagccaggggcccggcttacctgccgcatcctccttcaccttttcaagacaccgcagctcaatccttgccagtctgatggaaacaagcctacagtaggaatccgctcctcctgcgaccgccacctgctggctgcctcccagaaccgcatcgtggatggagccgtgtttgctgttctcaaggctgtgtttgtacttggggatgcggaactgaaaggttcaggcttcactgtgacaggaggaacagaagaacttccagaggaggagggaggaggtggcagtggtggtcggaggcagggtggccgcaacatctctgtggagacagccagtctggatgtctatgccaagtacgtgctgcgcagcatctgccaacaggaatgggtaggagaacgttgccttaagtctctgtgtgaggacagcaatgacctgcaagacccagtgttgagtagtgcccaggcgcagcgcctcatgcagctcatttgctatccacatcgactgctggacaatgaggatggggaaaacccccagcggcagcgcataaagcgcattctccagaacttggaccagtggaccatgcgccagtcttccttggagctgcagctcatgatcaagcagacccctaacaatgagatgaactccctcttggagaacatcgccaaggccacaatcgaggttttccaacagtcagcagagacagggtcatcttctggaagtactgcaagcaacatgcccagcagcagcaagaccaagcctgtgctcagctctctagagcgctctggtgtatggctggtggcccccctcattgctaaactgcccacctcagtccagggacatgtgttaaaggctgctggggaagaattggagaagggtcagcacctgggttcctcttcacgcaaagaacgtgatcgacaaaagcagaagagcatgtccctattgagccagcagcccttcttatcgctggtgctaacatgtctgaaagggcaggatgaacaacgcgagggactccttacctccctctacagccaggtgcaccagattgtgaataattggcgagatgaccagtacttagatgattgcaaaccaaagcagcttatgcatgaggcactcaaactgcggctcaacctggtggggggcatgtttgacacggtgcagcgcagcacccagcagaccacggagtgggccatgctcctcctggagatcatcatcagcggcactgtcgacatgcagtccaacaatgagctcttcactactgtgttggacatgctgagcgtgctcatcaatgggacattggctgcagacatgtctagcatctcgcaaggtagcatggaggaaaacaagcgtgcatacatgaacctggcgaagaagttgcagaaggagttgggggagcgccagtcagacagtctggaaaaggttcgccagctgctgccactgcccaagcagacccgagatgtcatcacgtgtgagccacagggctcccttatcgataccaagggcaacaagattgctggcttcgattccatcttcaagaaggagggtctacaggtttccaccaaacagaagatctcgccctgggatctttttgaggggttgaagccgtcagcaccactctcttggggctggtttggaacagtccgagtggaccggcgagtggctcgaggagaggagcagcagcggttgctgctctaccacacacacctgaggccccggccccgcgcttccagcgccaggggcttcagcagacccagcagcagcaacagacagcagctttggtccggcaacttcaacaacagctctctaatacccagccacagcccagtaccaacatatttggacgctactgagccacctggaggaactgcttgtgcactggatgtggccccaccctttcctcttaattcccaatcccattcctgggctagcaccagtagtggttggggccctcccctcaggctccatttttaataagtttttagtatttttgttaatgtgaggcattgagctgttgggttttgtatattatttatatagagaccccagagctgttgcacccaatacacagagcttctttgcaaaggg

SEQ ID NO: 449555 - DNA, 1837 bp, Homo sapiens
gaaggagggtctacaggtttccaccaaacagaagatggaatcgataccaagggcaacaagattgctggcttcgattccatcttcaagaaggagggtctacaggtttccaccaaacagaagatctcgccctgggatctttttgaggggttgaagccgtcagcaccactctcttggggctggtttggaacagtccgagtggaccggcgagtggctcgaggagaggagcagcagcggttgctgctctaccacacacacctgaggccccggccccgcgcctattacctggagccactgccactgcccccagaagatgaggagccgcctgctcctaccctgctagagcctgagaaaaaggctccagagccccccaaaactgacaaaccgggggctgctccacccagtactgaggaacgcaagaagaagtccaccaagggcaagaaacgcagccagccagctaccaagacagaggactatggaatgggcccgggtcggagcggcccttatggtgtgacagtgcctccggacctcctgcaccacccaaaccctggttctataacacaccttaactacaggcaaggctccataggcctgtacacccagaaccagccactacctgcaggtggccctcgtgtggacccataccgtcctgtgcgcttaccaatgcagaagctgcccacccgaccaacttaccctggagtgctgcccacaaccatgactggcgtcatgggtttagaaccctcctcttataagacctctgtgtaccggcagcagcaacctgcggtgccccaaggacagcgccttcgccaacagctccagcagagtcagggcatgttgggacagtcatctgtccatcagatgactcccagctcttcctacggtttgcagacttcccagggctatactccttatgtttctcatgtgggattgcagcaacacacaggccctgcaggtaccatggtgccccccagctactccagccagccttaccagagcacccacccttctaccaatcctactcttgtagatcctacccgccacctgcaacagcggcccagtggctatgtgcaccagcaggcccccacctatggacatggactgacctccactcaaaggttttcacaccagacactgcagcagacacccatgataagtaccatgactccaatgagtgcccagggcgtccaggcaggcgtccgttcaacagccatcctacctgagcagcagcagcagcagcaacagcagcaacagcaacagcagcagcagcagcaacagcaacagcagcagcagcagcagcagtaccacatccggcagcagcagcagcagcagatcctgcggcagcagcagcaacagcaacagcagcagcagcagcagcagcaacagcaacagcagcagcagcaacagcaacaacagcaacaccagcagcaacagcagcaacaggcggctcctccccaaccccagccccagtcccagccccagttccagcgccaggggcttcagcagacccagcagcagcaacagacagcagctttggtccggcaacttcaacaacagctctctaatacccagccacagcccagtaccaacatatttggacgctactgagccacctggaggaactgcttgtgcactggatgtggccccaccctttcctcttaattcccaatcccattcctgggctagcaccagtagtggttggggccctcccctcaggctccatttttaataagtttttagtatttttgttaatgtgaggcattgagctgttgggttttgtatattatttatatagagaccccagagctgttgcacccaatacacagagcttctttgcaaaggg

SEQ ID NO: 449556 - DNA, 5243 bp, Homo sapiens
  misc_feature (5097)..(5097): n is a, c, g, or t
  misc_feature (5125)..(5125): n is a, c, g, or t
  misc_feature (5129)..(5129): n is a, c, g, or t
  misc_feature (5145)..(5145): n is a, c, g, or t
  misc_feature (5159)..(5159): n is a, c, g, or t
  misc_feature (5166)..(5166): n is a, c, g, or t
  misc_feature (5179)..(5179): n is a, c, g, or t
  misc_feature (5195)..(5195): n is a, c, g, or t
  misc_feature (5222)..(5222): n is a, c, g, or t
ttcagtttctaaaaacaactacattacctgcaatgcacaatgaaacaaagtatgccctctcttcacacaaaaaaaattctattctgttattttcacttaacaaacagctggtgcctccggcgctacgggctgggcaagatggcggccttcgggatcttgagctacgaacaccggcccctgaagcggccgcggctggggcctcccgatgtttaccctcaggaccccaaacagaaggaggatgaactgacggccttgaatgtaaaacaaggtttcaataaccagcctgctgtctctggggatgagcatggcagtgccaagaacgtcagcttcaatcctgccaagatcagttccaacttcagcagcattattgcagagaaattacgttgtaatacccttcctgacactggtcgcaggaagccccaagtgaaccagaaggataacttctggctggtgactgcacgatcccagagtgccattaacacttggttcactgacttggctggcaccaagccactcacgcaactagccaaaaaggtccccattttcagtaagaaggaagaggtgtttgggtacttagccaaatacacagtgcctgtgatgcgggctgcctggctcattaagatgacctgtgcctactatgcagcaatctctgagaccaaggttaagaagagacatgttgaccctttcatggaatggactcagatcatcaccaagtacttatgggagcagttacagaagatggctgaatactaccggccagggcctgcaggaagtgggggctgtggttccacgatagggcccttgccccatgatgtagaggtggcaatccggcagtgggattacaccgagaagctggccatgttcatgtttcaggatggaatgctggacagacatgagttcctgacctgggtgcttgagtgttttgagaagatccgccctggagaggatgaattgcttaaactgctgctgcctctgcttctccgatactctggggaatttgttcagtctgcatacctgtcccgccggcttgcctacttctgtacacggagactggccctgcagctggatggtgtgagcagtcactcatctcatgttatatctgctcagtcaacaagcacgctacccaccacccctgctcctcagcccccaactagcagcacaccctcgactccctttagtgacctgcttatgtgccctcagcaccggcccctggtttttggcctcagctgtatcctacagaccatcctcctgtgctgtcctagtgccttggtttggcactactcactgactgatagcagaattaagaccggctcaccacttgaccacttgcctattgccccgtccaacctgcccatgccagagggtaacagtgccttcactcagcaggtccgtgcaaagttgcgggagatcgagcagcagatcaaggagcggggacaggcagttgaagttcgctggtctttcgataaatgccaggaagctactgcaggcttcaccattggacgggtacttcatactttggaagtgctggacagccatagttttgaacgctctgacttcagcaactctcttgactccctttgtaaccgaatctttggattgggacctagcaaggatgggcatgagatctcctcagatgatgatgctgtggtgtcattgctatgtgaatgggctgtcagctgcaagcgttctggtcggcatcgtgctatggtggtagccaagctcctggagaagagacaggcggagattgaggctgagcgttgtggagaatcagaagccgcagatgagaagggttccatcgcctctggctccctttctgctcccagtgctcccattttccaggatgtcctcctgcagtttctggatacacaggctcccatgctgacggaccctcgaagtgagagtgagcgggtggaattctttaacttagtactgctgttctgtgaactgattcgacatgatgttttctcccacaacatgtatacttgcactctcatctcccgaggggaccttgcctttggagcccctggtccccggcctccctctccctttgatgatcctgccgatgacccagagcacaaggaggctgaaggcagcagcagcagcaagctggaagatccagggctctcagaatctatggacattgaccctagttccagtgttctctttgaggacatggagaagcctgatttctcattgttctcccctactatgccctgtgaggggaagggcagtccatcccctgagaagccagatgtcgagaaggaggtgaagcccccacccaaggagaagattgaagggacccttggggttctttacgaccagccacgacacgtgcagtacgccacccattttcccatcccccaggaggagtcatgcagccatgagtgcaaccagcggttggtcgtactgtttggggtgggaaagcagcgagatgatgcccgccatgccatcaagaaaatcaccaaggatatcttgaaggttctgaaccgcaaagggacagcagaaactgaccagcttgctcctattgtgcctctgaatcctggagacctgacattcttaggtggggaggatgggcagaagcggcgacgcaaccggcctgaagccttccccactgctgaagatatctttgctaagttccagcacctttcacattatgaccaacaccaggtcacggctcaggtctcccggaatgttctggagcagatcacgagctttgcccttggcatgtcataccacttgcctctggtgcagcatgtgcagttcatcttcgacctcatggaatattcactcagcatcagtggcctcatcgactttgccattcagctgctgaatgaactgagtgtagttgaggctgagctgcttctcaaatcctcggatctggtgggcagctacactactagcctgtgcctgtgcatcgtggctgtcctgcggcactatcatgcctgcctcatcctcaaccaggaccagatggcacaggtctttgaggggctgtgtggcgtcgtgaagcatgggatgaaccggtccgatggctcctctgcagagcgctgtatccttgcttatctctatgatctgtacacctcctgtagccatttaaagaacaaatttggggagctcttcaggtaagagaggtggaaggtaaggggtagcgagtgggacctactcccttcttcccatgaccacccaactcaggaggagaggatggcccgggaccctgctgcctgtctagggtcatttgtggactgtgtcctccacatactgttgtgttaccaagagtgggccctcttcctcagcaggcttgctccccgcctatatctgtggggcccaccctcttcccccttttcctcactgccttcagaggccccagttccttattcccatgtggttcctttcctgcccagtctgttttgtcccatctcccttttcttgtctcaagatccttcatccctcactttctcctttttttcttttctcccctttcctgaccatccctcgacctcagcaggccttcttcaacactactatctcctttcctccatccctgcagcgacttttgctcaaaggtgaagaacaccatctactgcaacgtggagccatcggaatcaaatatgcgctgggcacctgagttcatgatcgacactctagagaaccctgcagctcacaccttcacctacacggggctaggcaagagtcttagtgagaaccctgctaaccgctacagctttgtctgcaatgcccttatgcacgtctgtgtggggcaccatgatcccgatagggtgaatgacatcgcaatcctgtgtgcagagctgaccggctattgcaagtcactgagtgcagaatggctaggagtgcttaaggccttgtgctgctcctctaacaatggcacttgtggtttcaacgatctcctctgcaatgttgatgtcagtgacctatcttttcatgactcgctggctacttttgttgccatcctcatcgctcggcagtgtttgctcctggaagatctgattcgctgtgctgccatcccttcactccttaatgctgcttgtagtgaacaggactctgagccaggggcccggcttacctgccgcatcctccttcaccttttcaagacaccgcagctcaatccttgccagtctgatggaaacaagcctacagtaggaatccgctcctcctgcgaccgccacctgctggctgcctcccagaaccgcatcgtggatggagccgtgtttgctgttctcaaggctgtgtttgtacttggggatgcggaactgaaaggttcaggcttcactgtgacaggaggaacagaagaacttccagaggaggagggaggaggtggcagtggtggtcggaggcagggtggccgcaacatctctgtggagacagccagtctggatgtctatgccaagtacgtgctgcgcagcatctgccaacaggaatgggtaggagaacgttgccttaagtctctgtgtgaggacagcaatgacctgcaagacccagtgttgagtagtgcccaggcgcagcgcctcatgcagctcatttgctatccacatcgactgctggacaatgaggatggggaaaacccccagcggcagcgcataaagcgcattctccagaacttggaccagtggaccatgcgccagtcttccttggagctgcagctcatgatcaagcagacccctaacaatgagatgaactccctcttggagaacatcgccaaggccacaatcgaggttttccaacagtcagcagagacagggtcatcttctggaagtactgcaagcaacatgcccagcagcagcaagaccaagcctgtgctcagctctctagagcgctctggtgtatggctggtggcccccctcattgctaaactgcccacctcagtccagggacatgtgttaaaggctgctggggaagaattggagaagggtcagcacctgggttcctcttcacgcaaagaacgtgatcgacaaaagcagaagagcatgtccctattgagccagcagcccttcttatcgctggtgctaacatgtctgaaagggcaggatgaacaacgcgagggactccttacctccctctacagccaggtgcaccagattgggnaataattgggcgagaatgaccagttccnttanaatggattgggcaaancccaaaagccaagnttttttnggccttggagggnccccttaaaaaacttnggggggggttttaaaaacctttggggngggggggggggggccaatttg

SEQ ID NO: 449557 - DNA, 4158 bp, Homo sapiens
ttcagtttctaaaaacaactacattacctgcaatgcacaatgaaacaaagtatgccctctcttcacacaaaaaaaattctattctgttattttcacttaacaaacagctggtgcctccggcgctacgggctgggcaagatggcggccttcgggatcttgagctacgaacaccggcccctgaagcggccgcggctggggcctcccgatgtttaccctcaggaccccaaacagaaggaggatgaactgacggccttgaatgtaaaacaaggtttcaataaccagcctgctgtctctggggatgagcatggcagtgccaagaacgtcagcttcaatcctgccaagatcagttccaacttcagcagcattattgcagagaaattacgttgtaatacccttcctgacactggtcgcaggaagccccaagtgaaccagaaggataacttctggctggtgactgcacgatcccagagtgccattaacacttggttcactgacttggctggcaccaagccactcacgcaactagccaaaaaggtccccattttcagtaagaaggaagaggtgtttgggtacttagccaaatacacagtgcctgtgatgcgggctgcctggctcattaagatgacctgtgcctactatgcagcaatctctgagaccaaggttaagaagagacatgttgaccctttcatggaatggactcagatcatcaccaagtacttatgggagcagttacagaagatggctgaatactaccggccagggcctgcaggaagtgggggctgtggttccacgatagggcccttgccccatgatgtagaggtggcaatccggcagtgggattacaccgagaagctggccatgttcatgtttcaggatggaatgctggacagacatgagttcctgacctgggtgcttgagtgttttgagaagatccgccctggagaggatgaattgcttaaactgctgctgcctctgcttctccgatactctggggaatttgttcagtctgcatacctgtcccgccggcttgcctacttctgtacacggagactggccctgcagctggatggtgtgagcagtcactcatctcatgttatatctgctcagtcaacaagcacgctacccaccacccctgctcctcagcccccaactagcagcacaccctcgactccctttagtgacctgcttatgtgccctcagcaccggcccctggtttttggcctcagctgtatcctacagaccatcctcctgtgctgtcctagtgccttggtttggcactactcactgactgatagcagaattaagaccggctcaccacttgaccacttgcctattgccccgtccaacctgcccatgccagagggtaacagtgccttcactcagcaggtccgtgcaaagttgcgggagatcgagcagcagatcaaggagcggggacaggcagttgaagttcgctggtctttcgataaatgccaggaagctactgcaggcttcaccattggacgggtacttcatactttggaagtgctggacagccatagttttgaacgctctgacttcagcaactctcttgactccctttgtaaccgaatctttggattgggacctagcaaggatgggcatgagatctcctcagatgatgatgctgtggtgtcattgctatgtgaatgggctgtcagctgcaagcgttctggtcggcatcgtgctatggtggtagccaagctcctggagaagagacaggcggagattgaggctgagcgttgtggagaatcagaagccgcagatgagaagggttccatcgcctctggctccctttctgctcccagtgctcccattttccaggatgtcctcctgcagtttctggatacacaggctcccatgctgacggaccctcgaagtgagagtgagcgggtggaattctttaacttagtactgctgttctgtgaactgattcgacatgatgttttctcccacaacatgtatacttgcactctcatctcccgaggggaccttgcctttggagcccctggtccccggcctccctctccctttgatgatcctgccgatgacccagagcacaaggaggctgaaggcagcagcagcagcaagctggaagatccagggctctcagaatctatggacattgaccctagttccagtgttctctttgaggacatggagaagcctgatttctcattgttctcccctactatgccctgtgaggggaagggcagtccatcccctgagaagccagatgtcgagaaggaggtgaagcccccacccaaggagaagattgaagggacccttggggttctttacgaccagccacgacacgtgcagtacgccacccattttcccatcccccaggaggagtcatgcagccatgagtgcaaccagcggttggtcgtactgtttggggtgggaaagcagcgagatgatgcccgccatgccatcaagaaaatcaccaaggatatcttgaaggttctgaaccgcaaagggacagcagaaactgaccagcttgctcctattgtgcctctgaatcctggagacctgacattcttaggtggggaggatgggcagaagcggcgacgcaaccggcctgaagccttccccactgctgaagatatctttgctaagttccagcacctttcacattatgaccaacaccaggtcacggctcaggtctcccggaatgttctggagcagatcacgagctttgcccttggcatgtcataccacttgcctctggtgcagcatgtgcagttcatcttcgacctcatggaatattcactcagcatcagtggcctcatcgactttgccattcagctgctgaatgaactgagtgtagttgaggctgagctgcttctcaaatcctcggatctggtgggcagctacactactagcctgtgcctgtgcatcgtggctgtcctgcggcactatcatgcctgcctcatcctcaaccaggaccagatggcacaggtctttgaggggctgtgtggcgtcgtgaagcatgggatgaaccggtccgatggctcctctgcagagcgctgtatccttgcttatctctatgatctgtacacctcctgtagccatttaaagaacaaatttggggagctcttcaggtaagagaggtggaaggtaaggggtagcgagtgggacctactcccttcttcccatgaccacccaactcaggaggagaggatggcccgggaccctgctgcctgtctagggtcatttgtggactgtgtcctccacatactgttgtgttaccaagagtgggccctcttcctcagcaggcttgctccccgcctatatctgtggggcccaccctcttcccccttttcctcactgccttcagaggccccagttccttattcccatgtggttcctttcctgcccagtctgttttgtcccatctcccttttcttgtctcaagatccttcatccctcactttctcctttttttcttttctcccctttcctgaccatccctcgacctcagcaggccttcttcaacactactatctcctttcctccatccctgcagcgacttttgctcaaaggtgaagaacaccatctactgcaacgtggagccatcggaatcaaatatgcgctgggcacctgagttcatgatcgacactctagagaaccctgcagctcacaccttcacctacacggggctaggcaagagtcttagtgagaaccctgctaaccgctacagctttgtctgcaatgcccttatgcacgtctgtgtggggcaccatgatcccgatagggtgaatgacatcgcaatcctgtgtgcagagctgaccggctattgcaagtcactgagtgcagaatggctaggagtgcttaaggccttgtgctgctcctctaacaatggcacttgtggtttcaacgatctcctctgcaatgttgatgtcagtgacctatcttttcatgactcgctggctacttttgttgccatcctcatcgctcggcagtgtttgctcctggaagatctgattcgctgtgctgccatcccttcactccttaatgctggtgaactaccaatctgtaacccctagcatttctagacctcaaatttcaatacacactggacggccatcctctcattgttcactgtgggagaccttgctgcggctccctggccttcctcag

SEQ ID NO: 449558 - DNA, 559 bp, Homo sapiens
agtagctgggattacaggcatccactaccacgctcagctatttttttttgtatttttgctagagatggggtttcaccatgttgccaggctggtctagaactcctgacctcaagtgatccacccaccttagcctcccaaagtgctgggattacaggtgtgagccaccgcacccagccctatttttcatttttgtaacagaaaaatagctaatgcagaattgaaaaattcctaaccattaaggttatgagacactaaaatagagtatcatcttatgcaacttattccccagactggaagtctggttagtgacacgaggaatgaatgaaataacctgctaacgtttctttcaggtcagggacccaaggtttatactgaccccctctcctcacctccctcatgccttgacctctgaccctcttatctttggaggttttcacaccagacactgcagcagacacccatgataagtaccatgactccaatgagtgcccagggcgtccaggcaggcgtccgttcaacagccatcctacctgagcagcagcagcagcagcaacagcag

SEQ ID NO: 449559 - DNA, 400 bp, Homo sapiens
gtaagagcctgggattgtgagactagggggatgaggcaagctgctctgcatactctcggccctgattccctctctccttcttccctccagggctatactccttatgtttctcatgtgggattgcagcaacacacaggccctgcaggtaccatggtgccccccagctactccagccagccttaccagagcacccacccttctaccaatcctactcttgtagatcctacccgccacctgcaacagcggcccagtggctatgtgcaccagcaggcccccacctatggacatggactgacctccactcaaaggtacccaaagtagtggtgagctaggaagagatgcagaggtataagggagcatttgacttgggaaagcctgtgcctgaaagtggtgggactgg

SEQ ID NO: 449560 - DNA, 413 bp, Homo sapiens
agcggcccttatggtgtgacagtgcctccggacctcctgcaccacccaaaccctggttctataacacaccttaactacaggcaaggctccataggcctgtacacccagaaccagccactacctgcaggtgagtgccagccactaggaatgctggagggacctacctgtacactccccctgcccaaaggatgatgccattcccctgaggagctatggatgtcaaggacactgagcaagagacagagggatgaggagcctagaggtcagcccactctccttttcaggtggccctcgtgtggacccataccgtcctgtgcgcttaccaatgcagaagctgcccacccgaccaacttaccctggagtgctgcccacaaccatgactggcgtcatgggtttagaaccctcctcttata

SEQ ID NO: 449561 - DNA, 322 bp, Homo sapiens
cagtggtggtcggaggcagggtggccgcaacatctctgtggagacagccagtctggatgtctatgccaagtacgtgctgcgcagcatctgccaacaggtcagtttcaccttcctcccacacctcctaaatgcctctgtgtaatatagttctgtttccagcccatgatcacaccagctccctactatacattgtgttccttaacaactccagcccatcccccatattcctaaccccctcactggttgttcccagtccctgattgtcagcttcctcaggaatgggtaggagaacgttgccttaagtctctgtgtgaggacagca

SEQ ID NO: 449562 - DNA, 320 bp, Homo sapiens
atgttacattcctttctgagatgatgtgtgggacagcatgtggggtaaccaaccacactttgtccctcaacaatttctgggatttctatttgatcactcttattattgccttaggtgtgtccctctctcttttggcccacctttttgtgttctcctaacttatgtttcctcattcccttcctccagcggaccctcgaagtgagagtgagcgggtggaattctttaacttagtactgctgttctgtgaactgattcgacatgatgttttctcccacaacatgtatacttgcactctcatctcccgaggggaccttgccttt

SEQ ID NO: 449563 - DNA, 694 bp, Homo sapiens
ttgagacggagtctcgctcttgtcgctcaggctggagtacagtggtgcgatctcggctcactgcaacctctgcctcccaagttcaaacaattctcccgcctcagcctcttgagtaactgggattacaggtcgcccatcaccacgcccagctaatttttgtatttttagtagagatggggttttgccatgttggccaggctggtcttgaactcctgacctcaggtgatccgcctgtctcagcctccctaaatgtagtctttcttaaagatggggacatagaggtccctttcagacctccaggagtctgtgattcaatgttgcaggagatcaggaattggcatcagattgttgggtagctgggggtaacacgatgatgactagcctgggtgtggggcctctatcacagaacttggaccagtggaccatgcgccagtcttccttggagctgcagctcatgatcaagcagacccctaacaatgtgagtagtgcctggaccctccctttcctgtgctcacgttcagctccatgtgtcagggaggcggtccaccacagaagaacctagatcctacccttgggctcttgagctgaaagataagaggggatgggaaaatggtgaacaagtggagctgatgataagggaaatgggttgagagtgttggagctctgagctgtggggaagcttggtggtggtggt

SEQ ID NO: 449564 - DNA, 547 bp, Homo sapiens
aactcaggcgtcccaactcagattggaactaagctttcctgaaactctggcctttgtccctgagccatctgactgacttgttgtggccctggcaggtggggggcatgtttgacacggtgcagcgcagcacccagcagaccacggagtgggccatgctcctcctggagatcatcatcagcggcactgtcgacatgcagtccaacaagtaaagcatccccacccgctccctgcagtttcatacccaagaagctccccctactcccatgccaggtgcacccactgagattggtgtggctgttactgtggactccgtggccctgggctccccatacagttttcgtgacctagggatgacatattaagcacctctccctgcattgtgtcctctgctgaggcctttttctatcttcacctctttcttactttggttttctctctggcttcctgtctcagtgagctcttcactactgtgttggacatgctgagcgtgctcatcaatgggacattggctgcagacatgtctagcatctcgcaaggtagcatggag

SEQ ID NO: 449565 - DNA, 548 bp, Homo sapiens
aaaaaactcaagcatgaactcaggcgtcccaactcagattggaactaagctttcctgaaactctggcctttgtccctgagccatctgactgacttgttgtggccctggcaggtggggggcatgtttgacacggtgcagcgcagcacccagcagaccacggagtgggccatgctcctcctggagatcatcatcagcggcactgtcgacatgcagtccaacaagtaaagcatccccacccgctccctgcagtttcatacccaagaagctccccctactcccatgccaggtgcacccactgagattggtgtggctgttactgtggactccgtggccctgggctccccatacagttttcgtgacctagggatgacatattaagcacctctccctgcattgtgtcctctgctgaggcctttttctatcttcacctctttcttactttggttttctctctggcttcctgtctcagtgagctcttcactactgtgttggacatgctgagcgtgctcatcaatgggacattggctgcagacatgtctagcatctcg

SEQ ID NO: 449566 - DNA, 386 bp, Homo sapiens
ttgggccaacgcaccgtcaagcagacccctaacaaggagatgaactccctcttggagaacatcgccaaggccacaatcgaggttttccaacagtcagcagagacagggtcatcttctggaagtactgcaagcaacatgcccagcattttttgtatttttgctagagatggggtttcaccatgttgccaggctggtctagaactcctgacctcaagtgatccacccaccttagcctcccaaagtgctgggattacaggtgtgagccaccgcacccagccacagtttttttttaagcccataaatacttcagtgtgtgtctataaaaggagggtgattctgcccccagggggacactgcagtgtctggggataatctgtgcatgtcac

SEQ ID NO: 449567 - DNA, 7373 bp, Homo sapiens
tagagccagcctttcagggtttaataggttctttctcatgcatacatagtttctaatgttcacaatagccccttgaaggaggtgttagcgcacctatttttcagatgccggaactaagaaacgaactgatctgtaatagacggagttcctaaccaatgcaaatattattgaagacttttctaggccaaaaccgagctaggctatgggaaccgaagtccagtcagaactcagcaccacagaggcctccttcttccctggtttgcatccccagctcattctgcgcctccggaacgtttcatagatttttgctgagtgaaatcgacttgctgccgccaccgccgaaaaactcccggggcacagagctccgcccccaccgggccaggccccacctcctctgcagtcggtattgtccgatggttcccggcgtacctcggcttccctcggtagtttccggcaatggtcgagagtttctaacgtgcccccttgttgtctctcggccgccgtcctctcaaccaccgccccccttttcggctccctctcccccttcccgttcccccagtcagcctggccctgctggtgcctccggcgctacgggctgggcaagatggcggccttcgggatcttgagctacgaacaccggcccctgaagcggccgcggctggggcctcccgatgtttaccctcaggaccccaaacagaaggaggatgaactgacggccttgaatgtaaaacaaggtttcaataaccagcctgctgtctctggggatgagcatggcagtgccaagaacgtcagcttcaatcctgccaagatcagttccaacttcagcagcattattgcagagaaattacgttgtaatacccttcctgacactggtcgcaggaagccccaagtgaaccagaaggataacttctggctggtgactgcacgatcccagagtgccattaacacttggttcactgacttggctggcaccaagccactcacgcaactagccaaaaaggtccccattttcagtaagaaggaagaggtgtttgggtacttagccaaatacacagtgcctgtgatgcgggctgcctggctcattaagatgacctgtgcctactatgcagcaatctctgagaccaaggttaagaagagacatgttgaccctttcatggaatggactcagatcatcaccaagtacttatgggagcagttacagaagatggctgaatactaccggccagggcctgcaggaagtgggggctgtggttccacgatagggcccttgccccatgatgtagaggtggcaatccggcagtgggattacaccgagaagctggccatgttcatgtttcaggatggaatgctggacagacatgagttcctgacctgggtgcttgagtgttttgagaagatccgccctggagaggatgaattgcttaaactgctgctgcctctgcttctccgatactctggggaatttgttcagtctgcatacctgtcccgccggcttgcctacttctgtacacggagactggccctgcagctggatggtgtgagcagtcactcatctcatgttatatctgctcagtcaacaagcacgctacccaccacccctgctcctcagcccccaactagcagcacaccctcgactccctttagtgacctgcttatgtgccctcagcaccggcccctggtttttggcctcagctgtatcctacagaccatcctcctgtgctgtcctagtgccttggtttggcactactcactgactgatagcagaattaagaccggctcaccacttgaccacttgcctattgccccgtccaacctgcccatgccagagggtaacagtgccttcactcagcaggtccgtgcaaagttgcgggagatcgagcagcagatcaaggagcggggacaggcagttgaagttcgctggtctttcgataaatgccaggaagctactgcaggcttcaccattggacgggtacttcatactttggaagtgctggacagccatagttttgaacgctctgacttcagcaactctcttgactccctttgtaaccgaatctttggattgggacctagcaaggatgggcatgagatctcctcagatgatgatgctgtggtgtcattgctatgtgaatgggctgtcagctgcaagcgttctggtcggcatcgtgctatggtggtagccaagctcctggagaagagacaggcggagattgaggctgagcgttgtggagaatcagaagccgcagatgagaagggttccatcgcctctggctccctttctgctcccagtgctcccattttccaggatgtcctcctgcagtttctggatacacaggctcccatgctgacggaccctcgaagtgagagtgagcgggtggaattctttaacttagtactgctgttctgtgaactgattcgacatgatgttttctcccacaacatgtatacttgcactctcatctcccgaggggaccttgcctttggagcccctggtccccggcctccctctccctttgatgatcctgccgatgacccagagcacaaggaggctgaaggcagcagcagcagcaagctggaagatccagggctctcagaatctatggacattgaccctagttccagtgttctctttgaggacatggagaagcctgatttctcattgttctcccctactatgccctgtgaggggaagggcagtccatcccctgagaagccagatgtcgagaaggaggtgaagcccccacccaaggagaagattgaagggacccttggggttctttacgaccagccacgacacgtgcagtacgccacccattttcccatcccccaggaggagtcatgcagccatgagtgcaaccagcggttggtcgtactgtttggggtgggaaagcagcgagatgatgcccgccatgccatcaagaaaatcaccaaggatatcttgaaggttctgaaccgcaaagggacagcagaaactgaccagcttgctcctattgtgcctctgaatcctggagacctgacattcttaggtggggaggatgggcagaagcggcgacgcaaccggcctgaagccttccccactgctgaagatatctttgctaagttccagcacctttcacattatgaccaacaccaggtcacggctcaggtctcccggaatgttctggagcagatcacgagctttgcccttggcatgtcataccacttgcctctggtgcagcatgtgcagttcatcttcgacctcatggaatattcactcagcatcagtggcctcatcgactttgccattcagctgctgaatgaactgagtgtagttgaggctgagctgcttctcaaatcctcggatctggtgggcagctacactactagcctgtgcctgtgcatcgtggctgtcctgcggcactatcatgcctgcctcatcctcaaccaggaccagatggcacaggtctttgaggggctgtgtggcgtcgtgaagcatgggatgaaccggtccgatggctcctctgcagagcgctgtatccttgcttatctctatgatctgtacacctcctgtagccatttaaagaacaaatttggggagctcttcagcgacttttgctcaaaggtgaagaacaccatctactgcaacgtggagccatcggaatcaaatatgcgctgggcacctgagttcatgatcgacactctagagaaccctgcagctcacaccttcacctacacggggctaggcaagagtcttagtgagaaccctgctaaccgctacagctttgtctgcaatgcccttatgcacgtctgtgtggggcaccatgatcccgatagggtgaatgacatcgcaatcctgtgtgcagagctgaccggctattgcaagtcactgagtgcagaatggctaggagtgcttaaggccttgtgctgctcctctaacaatggcacttgtggtttcaacgatctcctctgcaatgttgatgtcagtgacctatcttttcatgactcgctggctacttttgttgccatcctcatcgctcggcagtgtttgctcctggaagatctgattcgctgtgctgccatcccttcactccttaatgctgcttgtagtgaacaggactctgagccaggggcccggcttacctgccgcatcctccttcaccttttcaagacaccgcagctcaatccttgccagtctgatggaaacaagcctacagtaggaatccgctcctcctgcgaccgccacctgctggctgcctcccagaaccgcatcgtggatggagccgtgtttgctgttctcaaggctgtgtttgtacttggggatgcggaactgaaaggttcaggcttcactgtgacaggaggaacagaagaacttccagaggaggagggaggaggtggcagtggtggtcggaggcagggtggccgcaacatctctgtggagacagccagtctggatgtctatgccaagtacgtgctgcgcagcatctgccaacaggaatgggtaggagaacgttgccttaagtctctgtgtgaggacagcaatgacctgcaagacccagtgttgagtagtgcccaggcgcagcgcctcatgcagctcatttgctatccacatcgactgctggacaatgaggatggggaaaacccccagcggcagcgcataaagcgcattctccagaacttggaccagtggaccatgcgccagtcttccttggagctgcagctcatgatcaagcagacccctaacaatgagatgaactccctcttggagaacatcgccaaggccacaatcgaggttttccaacagtcagcagagacagggtcatcttctggaagtactgcaagcaacatgcccagcagcagcaagaccaagcctgtgctcagctctctagagcgctctggtgtatggctggtggcccccctcattgctaaactgcccacctcagtccagggacatgtgttaaaggctgctggggaagaattggagaagggtcagcacctgggttcctcttcacgcaaagaacgtgatcgacaaaagcagaagagcatgtccctattgagccagcagcccttcttatcgctggtgctaacatgtctgaaagggcaggatgaacaacgcgagggactccttacctccctctacagccaggtgcaccagattgtgaataattggcgagatgaccagtacttagatgattgcaaaccaaagcagcttatgcatgaggcactcaaactgcggctcaacctggtggggggcatgtttgacacggtgcagcgcagcacccagcagaccacggagtgggccatgctcctcctggagatcatcatcagcggcactgtcgacatgcagtccaacaatgagctcttcactactgtgttggacatgctgagcgtgctcatcaatgggacattggctgcagacatgtctagcatctcgcaaggtagcatggaggaaaacaagcgtgcatacatgaacctggcgaagaagttgcagaaggagttgggggagcgccagtcagacagtctggaaaaggttcgccagctgctgccactgcccaagcagacccgagatgtcatcacgtgtgagccacagggctcccttatcgataccaagggcaacaagattgctggcttcgattccatcttcaagaaggagggtctacaggtttccaccaaacagaagatctcgccctgggatctttttgaggggttgaagccgtcagcaccactctcttggggctggtttggaacagtccgagtggaccggcgagtggctcgaggagaggagcagcagcggttgctgctctaccacacacacctgaggccccggccccgcgcctattacctggagccactgccactgcccccagaagatgaggagccgcctgctcctaccctgctagagcctgagaaaaaggctccagagccccccaaaactgacaaaccgggggctgctccacccagtactgaggaacgcaagaagaagtccaccaagggcaagaaacgcagccagccagctaccaagacagaggactatggaatgggcccgggtcggagcggcccttatggtgtgacagtgcctccggacctcctgcaccacccaaaccctggttctataacacaccttaactacaggcaaggctccataggcctgtacacccagaaccagccactacctgcaggtggccctcgtgtggacccataccgtcctgtgcgcttaccaatgcagaagctgcccacccgaccaacttaccctggagtgctgcccacaaccatgactggcgtcatgggtttagaaccctcctcttataagacctctgtgtaccggcagcagcaacctgcggtgccccaaggacagcgccttcgccaacagctccagcagagtcagggcatgttgggacagtcatctgtccatcagatgactcccagctcttcctacggtttgcagacttcccagggctatactccttatgtttctcatgtgggattgcagcaacacacaggccctgcaggtaccatggtgccccccagctactccagccagccttaccagagcacccacccttctaccaatcctactcttgtagatcctacccgccacctgcaacagcggcccagtggctatgtgcaccagcaggcccccacctatggacatggactgacctccactcaaaggttttcacaccagacactgcagcagacacccatgataagtaccatgactccaatgagtgcccagggcgtccaggcaggcgtccgttcaacagccatcctacctgagcagcagcagcagcagcaacagcagcaacagcaacagcagcagcagcagcaacagcaacagcagcagcagcagcagcagtaccacatccggcagcagcagcagcagcagatcctgcggcagcagcagcaacagcaacagcagcagcagcagcagcagcaacagcaacagcagcagcagcaacagcaacaacagcaacaccagcagcaacagcagcaacaggcggctcctccccaaccccagccccagtcccagccccagttccagcgccaggggcttcagcagacccagcagcagcaacagacagcagctttggtccggcaacttcaacaacagctctctaatacccagccacagcccagtaccaacatatttggacgctactgagccacctggaggaactgcttgtgcactggatgtggccccaccctttcctcttaattcccaatcccattcctgggctagcaccagtagtggttggggccctcccctcaggctccatttttaataagtttttagtatttttgttaatgtgaggcattgagctgttgggttttgtatattatttatatagagaccccagagctgttgcacccaatacacagagcttctttgcaaaggg

SEQ ID NO: 449568 - DNA, 7187 bp, Homo sapiens
ttcagtttctaaaaacaactacattacctgcaatgcacaatgaaacaaagtatgccctctcttcacacaaaaaaaattctattctgttattttcacttaacaaacagctggtgcctccggcgctacgggctgggcaagatggcggccttcgggatcttgagctacgaacaccggcccctgaagcggccgcggctggggcctcccgatgtttaccctcaggaccccaaacagaaggaggatgaactgacggccttgaatgtaaaacaaggtttcaataaccagcctgctgtctctggggatgagcatggcagtgccaagaacgtcagcttcaatcctgccaagatcagttccaacttcagcagcattattgcagagaaattacgttgtaatacccttcctgacactggtcgcaggaagccccaagtgaaccagaaggataacttctggctggtgactgcacgatcccagagtgccattaacacttggttcactgacttggctggcaccaagccactcacgcaactagccaaaaaggtccccattttcagtaagaaggaagaggtgtttgggtacttagccaaatacacagtgcctgtgatgcgggctgcctggctcattaagatgacctgtgcctactatgcagcaatctctgagaccaaggttaagaagagacatgttgaccctttcatggaatggactcagatcatcaccaagtacttatgggagcagttacagaagatggctgaatactaccggccagggcctgcaggaagtgggggctgtggttccacgatagggcccttgccccatgatgtagaggtggcaatccggcagtgggattacaccgagaagctggccatgttcatgtttcaggatggaatgctggacagacatgagttcctgacctgggtgcttgagtgttttgagaagatccgccctggagaggatgaattgcttaaactgctgctgcctctgcttctccgatactctggggaatttgttcagtctgcatacctgtcccgccggcttgcctacttctgtacacggagactggccctgcagctggatggtgtgagcagtcactcatctcatgttatatctgctcagtcaacaagcacgctacccaccacccctgctcctcagcccccaactagcagcacaccctcgactccctttagtgacctgcttatgtgccctcagcaccggcccctggtttttggcctcagctgtatcctacagaccatcctcctgtgctgtcctagtgccttggtttggcactactcactgactgatagcagaattaagaccggctcaccacttgaccacttgcctattgccccgtccaacctgcccatgccagagggtaacagtgccttcactcagcaggtccgtgcaaagttgcgggagatcgagcagcagatcaaggagcggggacaggcagttgaagttcgctggtctttcgataaatgccaggaagctactgcaggcttcaccattggacgggtacttcatactttggaagtgctggacagccatagttttgaacgctctgacttcagcaactctcttgactccctttgtaaccgaatctttggattgggacctagcaaggatgggcatgagatctcctcagatgatgatgctgtggtgtcattgctatgtgaatgggctgtcagctgcaagcgttctggtcggcatcgtgctatggtggtagccaagctcctggagaagagacaggcggagattgaggctgagcgttgtggagaatcagaagccgcagatgagaagggttccatcgcctctggctccctttctgctcccagtgctcccattttccaggatgtcctcctgcagtttctggatacacaggctcccatgctgacggaccctcgaagtgagagtgagcgggtggaattctttaacttagtactgctgttctgtgaactgattcgacatgatgttttctcccacaacatgtatacttgcactctcatctcccgaggggaccttgcctttggagcccctggtccccggcctccctctccctttgatgatcctgccgatgacccagagcacaaggaggctgaaggcagcagcagcagcaagctggaagatccagggctctcagaatctatggacattgaccctagttccagtgttctctttgaggacatggagaagcctgatttctcattgttctcccctactatgccctgtgaggggaagggcagtccatcccctgagaagccagatgtcgagaaggaggtgaagcccccacccaaggagaagattgaagggacccttggggttctttacgaccagccacgacacgtgcagtacgccacccattttcccatcccccaggaggagtcatgcagccatgagtgcaaccagcggttggtcgtactgtttggggtgggaaagcagcgagatgatgcccgccatgccatcaagaaaatcaccaaggatatcttgaaggttctgaaccgcaaagggacagcagaaactgaccagcttgctcctattgtgcctctgaatcctggagacctgacattcttaggtggggaggatgggcagaagcggcgacgcaaccggcctgaagccttccccactgctgaagatatctttgctaagttccagcacctttcacattatgaccaacaccaggtcacggctcaggtctcccggaatgttctggagcagatcacgagctttgcccttggcatgtcataccacttgcctctggtgcagcatgtgcagttcatcttcgacctcatggaatattcactcagcatcagtggcctcatcgactttgccattcagctgctgaatgaactgagtgtagttgaggctgagctgcttctcaaatcctcggatctggtgggcagctacactactagcctgtgcctgtgcatcgtggctgtcctgcggcactatcatgcctgcctcatcctcaaccaggaccagatggcacaggtctttgaggggctgtgtggcgtcgtgaagcatgggatgaaccggtccgatggctcctctgcagagcgctgtatccttgcttatctctatgatctgtacacctcctgtagccatttaaagaacaaatttggggagctcttcaggtaagagaggtggaaggtaaggggtagcgagtgggacctactcccttcttcccatgaccaccctcttcccccttttcctcactgccttcagaggccccagttccttattcccatgtggttcctttcctgcccagtctgttttgtcccatctcccttttcttgtctcaagatccttcatccctcactttctcctttttttcttttctcccctttcctgaccatccctcgacctcagcaggccttcttcaacactactatctcctttcctccatccctgcagcgacttttgctcaaaggtgaagaacaccatctactgcaacgtggagccatcggaatcaaatatgcgctgggcacctgagttcatgatcgacactctagagaaccctgcagctcacaccttcacctacacggggctaggcaagagtcttagtgagaaccctgctaaccgctacagctttgtctgcaatgcccttatgcacgtctgtgtggggcaccatgatcccgatagggtgaatgacatcgcaatcctgtgtgcagagctgaccggctattgcaagtcactgagtgcagaatggctaggagtgcttaaggccttgtgctgctcctctaacaatggcacttgtggtttcaacgatctcctctgcaatgttgatgtcagtgacctatcttttcatgactcgctggctacttttgttgccatcctcatcgctcggcagtgtttgctcctggaagatctgattcgctgtgctgccatcccttcactccttaatgctgcttgtagtgaacaggactctgagccaggggcccggcttacctgccgcatcctccttcaccttttcaagacaccgcagctcaatccttgccagtctgatggaaacaagcctacagtaggaatccgctcctcctgcgaccgccacctgctggctgcctcccagaaccgcatcgtggatggagccgtgtttgctgttctcaaggctgtgtttgtacttggggatgcggaactgaaaggttcaggcttcactgtgacaggaggaacagaagaacttccagaggaggagggaggaggtggcagtggtggtcggaggcagggtggccgcaacatctctgtggagacagccagtctggatgtctatgccaagtacgtgctgcgcagcatctgccaacaggaatgggtaggagaacgttgccttaagtctctgtgtgaggacagcaatgacctgcaagacccagtgttgagtagtgcccaggcgcagcgcctcatgcagctcatttgctatccacatcgactgctggacaatgaggatggggaaaacccccagcggcagcgcataaagcgcattctccagaacttggaccagtggaccatgcgccagtcttccttggagctgcagctcatgatcaagcagacccctaacaatgagatgaactccctcttggagaacatcgccaaggccacaatcgaggttttccaacagtcagcagagacagggtcatcttctggaagtactgcaagcaacatgcccagcagcagcaagaccaagcctgtgctcagctctctagagcgctctggtgtatggctggtggcccccctcattgctaaactgcccacctcagtccagggacatgtgttaaaggctgctggggaagaattggagaagggtcagcacctgggttcctcttcacgcaaagaacgtgatcgacaaaagcagaagagcatgtccctattgagccagcagcccttcttatcgctggtgctaacatgtctgaaagggcaggatgaacaacgcgagggactccttacctccctctacagccaggtgcaccagattgtgaataattggcgagatgaccagtacttagatgattgcaaaccaaagcagcttatgcatgaggcactcaaactgcggctcaacctggtggggggcatgtttgacacggtgcagcgcagcacccagcagaccacggagtgggccatgctcctcctggagatcatcatcagcggcactgtcgacatgcagtccaacaatgagctcttcactactgtgttggacatgctgagcgtgctcatcaatgggacattggctgcagacatgtctagcatctcgcaaggtagcatggaggaaaacaagcgtgcatacatgaacctggcgaagaagttgcagaaggagttgggggagcgccagtcagacagtctggaaaaggttcgccagctgctgccactgcccaagcagacccgagatgtcatcacgtgtgagccacagggctcccttatcgataccaagggcaacaagattgctggcttcgattccatcttcaagaaggagggtctacaggtttccaccaaacagaagatctcgccctgggatctttttgaggggttgaagccgtcagcaccactctcttggggctggtttggaacagtccgagtggaccggcgagtggctcgaggagaggagcagcagcggttgctgctctaccacacacacctgaggccccggccccgcgcctattacctggagccactgccactgcccccagaagatgaggagccgcctgctcctaccctgctagagcctgagaaaaaggctccagagccccccaaaactgacaaaccgggggctgctccacccagtactgaggaacgcaagaagaagtccaccaagggcaagaaacgcagccagccagctaccaagacagaggactatggaatgggcccgggtcggagcggcccttatggtgtgacagtgcctccggacctcctgcaccacccaaaccctggttctataacacaccttaactacaggcaaggctccataggcctgtacacccagaaccagccactacctgcaggtggccctcgtgtggacccataccgtcctgtgcgcttaccaatgcagaagctgcccacccgaccaacttaccctggagtgctgcccacaaccatgactggcgtcatgggtttagaaccctcctcttataagacctctgtgtaccggcagcagcaacctgcggtgccccaaggacagcgccttcgccaacagctccagcagagtcagggcatgttgggacagtcatctgtccatcagatgactcccagctcttcctacggtttgcagacttcccagggctatactccttatgtttctcatgtgggattgcagcaacacacaggccctgcaggtaccatggtgccccccagctactccagccagccttaccagagcacccacccttctaccaatcctactcttgtagatcctacccgccacctgcaacagcggcccagtggctatgtgcaccagcaggcccccacctatggacatggactgacctccactcaaaggttttcacaccagacactgcagcagacacccatgataagtaccatgactccaatgagtgcccagggcgtccaggcaggcgtccgttcaacagccatcctacctgagcagcagcagcagcagcaacagcagcaacagcaacagcagcagcagcagcaacagcaacagcagcagcagcagcagcagtaccacatccggcagcagcagcagcagcagatcctgcggcagcagcagcaacagcaacagcagcagcagcagcagcagcaacagcaacagcagcagcagcaacagcaacaacagcaacaccagcagcaacagcagcaacaggcggctcctccccaaccccagccccagtcccagccccagttccagcgccaggggcttcagcagacccagcagcagcaacagacagcagctttggtccggcaacttcaacaacagctctctaatacccagccacagcccagtaccaacatatttggacgctactgagccacctggaggaactgcttgtgcactggatgtggccccaccctttcctcttaattcccaatcccattcctgggctagcaccagtagtggttggggccctcccctcaggctccatttttaataagtttttagtatttttgttaatgtgaggcattgagctgttgggttttgtatattatttatatagagaccccagagctgttgcacccaatacacagagcttctttgcaaaggg

SEQ ID NO: 449569 - DNA, 7142 bp, Homo sapiens
ttcagtttctaaaaacaactacattacctgcaatgcacaatgaaacaaagtatgccctctcttcacacaaaaaaaattctattctgttattttcacttaacaaacagctggtgcctccggcgctacgggctgggcaagatggcggccttcgggatcttgagctacgaacaccggcccctgaagcggccgcggctggggcctcccgatgtttaccctcaggaccccaaacagaaggaggatgaactgacggccttgaatgtaaaacaaggtttcaataaccagcctgctgtctctggggatgagcatggcagtgccaagaacgtcagcttcaatcctgccaagatcagttccaacttcagcagcattattgcagagaaattacgttgtaatacccttcctgacactggtcgcaggaagccccaagtgaaccagaaggataacttctggctggtgactgcacgatcccagagtgccattaacacttggttcactgacttggctggcaccaagccactcacgcaactagccaaaaaggtccccattttcagtaagaaggaagaggtgtttgggtacttagccaaatacacagtgcctgtgatgcgggctgcctggctcattaagatgacctgtgcctactatgcagcaatctctgagaccaaggttaagaagagacatgttgaccctttcatggaatggactcagatcatcaccaagtacttatgggagcagttacagaagatggctgaatactaccggccagggcctgcaggaagtgggggctgtggttccacgatagggcccttgccccatgatgtagaggtggcaatccggcagtgggattacaccgagaagctggccatgttcatgtttcaggatggaatgctggacagacatgagttcctgacctgggtgcttgagtgttttgagaagatccgccctggagaggatgaattgcttaaactgctgctgcctctgcttctccgatactctggggaatttgttcagtctgcatacctgtcccgccggcttgcctacttctgtacacggagactggccctgcagctggatggtgtgagcagtcactcatctcatgttatatctgctcagtcaacaagcacgctacccaccacccctgctcctcagcccccaactagcagcacaccctcgactccctttagtgacctgcttatgtgccctcagcaccggcccctggtttttggcctcagctgtatcctacagaccatcctcctgtgctgtcctagtgccttggtttggcactactcactgactgatagcagaattaagaccggctcaccacttgaccacttgcctattgccccgtccaacctgcccatgccagagggtaacagtgccttcactcagcaggtccgtgcaaagttgcgggagatcgagcagcagatcaaggagcggggacaggcagttgaagttcgctggtctttcgataaatgccaggaagctactgcaggcttcaccattggacgggtacttcatactttggaagtgctggacagccatagttttgaacgctctgacttcagcaactctcttgactccctttgtaaccgaatctttggattgggacctagcaaggatgggcatgagatctcctcagatgatgatgctgtggtgtcattgctatgtgaatgggctgtcagctgcaagcgttctggtcggcatcgtgctatggtggtagccaagctcctggagaagagacaggcggagattgaggctgagcgttgtggagaatcagaagccgcagatgagaagggttccatcgcctctggctccctttctgctcccagtgctcccattttccaggatgtcctcctgcagtttctggatacacaggctcccatgctgacggaccctcgaagtgagagtgagcgggtggaattctttaacttagtactgctgttctgtgaactgattcgacatgatgttttctcccacaacatgtatacttgcactctcatctcccgaggggaccttgcctttggagcccctggtccccggcctccctctccctttgatgatcctgccgatgacccagagcacaaggaggctgaaggcagcagcagcagcaagctggaagatccagggctctcagaatctatggacattgaccctagttccagtgttctctttgaggacatggagaagcctgatttctcattgttctcccctactatgccctgtgaggggaagggcagtccatcccctgagaagccagatgtcgagaaggaggtgaagcccccacccaaggagaagattgaagggacccttggggttctttacgaccagccacgacacgtgcagtacgccacccattttcccatcccccaggaggagtcatgcagccatgagtgcaaccagcggttggtcgtactgtttggggtgggaaagcagcgagatgatgcccgccatgccatcaagaaaatcaccaaggatatcttgaaggttctgaaccgcaaagggacagcagaaactgaccagcttgctcctattgtgcctctgaatcctggagacctgacattcttaggtggggaggatgggcagaagcggcgacgcaaccggcctgaagccttccccactgctgaagatatctttgctaagttccagcacctttcacattatgaccaacaccaggtcacggctcaggtctcccggaatgttctggagcagatcacgagctttgcccttggcatgtcataccacttgcctctggtgcagcatgtgcagttcatcttcgacctcatggaatattcactcagcatcagtggcctcatcgactttgccattcagctgctgaatgaactgagtgtagttgaggctgagctgcttctcaaatcctcggatctggtgggcagctacactactagcctgtgcctgtgcatcgtggctgtcctgcggcactatcatgcctgcctcatcctcaaccaggaccagatggcacaggtctttgaggggctgtgtggcgtcgtgaagcatgggatgaaccggtccgatggctcctctgcagagcgctgtatccttgcttatctctatgatctgtacacctcctgtagccatttaaagaacaaatttggggagctcttcaggtaagagaggtggaaggtaaggggtagcgagtgggacctactcccttcttcccatgaccacccaactcaggaggagaggatggcccgggaccctgctgcctgtctagggtcatttgtggactgtgtcctccacatactgttgtgttaccaagagtgggccctcttcctcagcaggcttgctccccgcctatatctgtggggcccaccctcttcccccttttcctcactgccttcagaggccccagttccttattcccatgtggttcctttcctgcccagtctgttttgtcccatctcccttttcttgtctcaagatccttcatccctcactttctcctttttttcttttctcccctttcctgaccatccctcgacctcagcaggccttcttcaacactactatctcctttcctccatccctgcagcgacttttgctcaaaggtgaagaacaccatctactgcaacgtggagccatcggaatcaaatatgcgctgggcacctgagttcatgatcgacactctagagaaccctgcagctcacaccttcacctacacggggctaggcaagagtcttagtgagaaccctgctaaccgctacagctttgtctgcaatgcccttatgcacgtctgtgtggggcaccatgatcccgatagggtgaatgacatcgcaatcctgtgtgcagagctgaccggctattgcaagtcactgagtgcagaatggctaggagtgcttaaggccttgtgctgctcctctaacaatggcacttgtggtttcaacgatctcctctgcaatgttgatgtcagtgacctatcttttcatgactcgctggctacttttgttgccatcctcatcgctcggcagtgtttgctcctggaagatctgattcgctgtgctgccatcccttcactccttaatgctgcttgtagtgaacaggactctgagccaggggcccggcttacctgccgcatcctccttcaccttttcaagacaccgcagctcaatccttgccagtctgatggaaacaagcctacagtaggaatccgctcctcctgcgaccgccacctgctggctgcctcccagaaccgcatcgtggatggagccgtgtttgctgttctcaaggctgtgtttgtacttggggatgcggaactgaaaggttcaggcttcactgtgacaggaggaacagaagaacttccagaggaggagggaggaggtggcagtggtggtcggaggcagggtggccgcaacatctctgtggagacagccagtctggatgtctatgccaagtacgtgctgcgcagcatctgccaacaggaatgggtaggagaacgttgccttaagtctctgtgtgaggacagcaatgacctgcaagacccagtgttgagtagtgcccaggcgcagcgcctcatgcagctcatttgctatccacatcgactgctggacaatgaggatggggaaaacccccagcggcagcgcataaagcgcattctccagaacttggaccagtggaccatgcgccagtcttccttggagctgcagctcatgatcaagcagacccctaacaatgagatgaactccctcttggagaacatcgccaaggccacaatcgaggttttccaacagtcagcagagacagggtcatcttctggaagtactgcaagcaacatgcccagcagcagcaagaccaagcctgtgctcagctctctagagcgctctggtgtatggctggtggcccccctcattgctaaactgcccacctcagtccagggacatgtgttaaaggctgctggggaagaattggagaagggtcagcacctgggttcctcttcacgcaaagaacgtgatcgacaaaagcagaagagcatgtccctattgagccagcagcccttcttatcgctggtgctaacatgtctgaaagggcaggatgaacaacgcgagggactccttacctccctctacagccaggtgcaccagattgtgaataattggcgagatgaccagtacttagatgattgcaaaccaaagcagcttatgcatgaggcactcaaactgcggctcaacctggtggggggcatgtttgacacggtgcagcgcagcacccagcagaccacggagtgggccatgctcctcctggagatcatcatcagcggcactgtcgacatgcagtccaacaatgagctcttcactactgtgttggacatgctgagcgtgctcatcaatgggacattggctgcagacatgtctagcatctcgcaaggtagcatggaggaaaacaagcgtgcatacatgaacctggcgaagaagttgcagaaggagttgggggagcgccagtcagacagtctggaaaaggttcgccagctgctgccactgcccaagcagacccgagatgtcatcacgtgtgagccacagggctcccttatcgataccaagggcaacaagattgctggcttcgattccatcttcaagaaggagggtctacaggtttccaccaaacagaagatctcgccctgggatctttttgaggggttgaagccgtcagcaccactctcttggggctggtttggaacagtccgagtggaccggcgagtggctcgaggagaggagcagcagcggttgctgctctaccacacacacctgaggccccggccccgcgcctattacctggagccactgccactgcccccagaagatgaggagccgcctgctcctaccctgctagagcctgagaaaaaggctccagagccccccaaaactgacaaaccgggggctgctccacccagtactgaggaacgcaagaagaagtccaccaagggcaagaaacgcagccagccagctaccaagacagaggactatggaatgggcccgggtcggagcggcccttatggtgtgacagtgcctccggacctcctgcaccacccaaaccctggttctataacacaccttaactacaggcaaggctccataggcctgtacacccagaaccagccactacctgcaggtggccctcgtgtggacccataccgtcctgtgcgcttaccaatgcagaagctgcccacccgaccaacttaccctggagtgctgcccacaaccatgactggcgtcatgggtttagaaccctcctcttataagacctctgtgtaccggcagcagcaacctgcggtgccccaaggacagcgccttcgccaacagctccagcagagtcagggcatgttgggacagtcatctgtccatcagatgactcccagctcttcctacggtttgcagacttcccagggctatactccttatgtttctcatgtgggattgcagcaacacacaggccctgcaggtaccatggtgccccccagctactccagccagccttaccagagcacccacccttctaccaatcctactcttgtagatcctacccgccacctgcaacagcggcccagtggctatgtgcaccagcaggcccccacctatggacatggactgacctccactcaaaggtacccaaagtagtggtgagctaggaagagatgcagaggtataagggagcatttgacttgggaaagcctgtgcctgaaagtggtgggactggtcagaactttcggagacatcaagaatacttatctggccacatagcccataaccacagaagtctcgagctggaagggaccctggagaccaatagtttcatgactacttccttaacagttctttgaggcccagagaggggaaattgtttatctgactcaaggaaaaatctgggctgggtgtggtagctcacactggtagtcccagcacttgggggcccaaggtgggagaatcagttgattccaggaattcgaggccagcctgggcaacatagggagatcccatctctacaaaaaaaatacatatttttttgaaacagagtcgcactccatttgcccaggctggagtgtcgctgcagtgagctgtaatcgcacaatgagccgagattgtgccacagcactccagtggtgacagagtgagaccctgtctcaaaaaaaaaagaagaaa

SEQ ID NO: 449570 - DNA, 2629 bp, Homo sapiens
aagggaattcgtgctggtgcaagggcattcgtgctggtgctagagacagggtcatcttctggaagtactgcaagcaacatgcccagcagcagcaagaccaagcctgtgctcagctctctagagcgctctggtgtatggctggtggcccccctcattgctaaactgcccacctcagtccagggacatgtgttaaaggctgctggggaagaattggagaagggtcagcacctgggttcctcttcacgcaaagaacgtgatcgacaaaagcagaagagcatgtccctattgagccagcagcccttcttatcgctggtgctaacatgtctgaaagggcaggatgaacaacgcgagggactccttacctccctctacagccaggtgcaccagattgtgaataattggcgagatgaccagtacttagatgattgcaaaccaaagcagcttatgcatgaggcactcaaactgcggctcaacctggtggggggcatgtttgacacggtgcagcgcagcacccagcagaccacggagtgggccatgctcctcctggagatcatcatcagcggcactgtcgacatgcagtccaacaatgagctcttcactactgtgttggacatgctgagcgtgctcatcaatgggacattggctgcagacatgtctagcatctcgcaaggtagcatggaggaaaacaagcgtgcatacatgaacctggcgaagaagttgcagaaggagttgggggagcgccagtcagacagtctggaaaaggttcgccagctgctgccactgcccaagcagacccgagatgtcatcacgtgtgagccacagggctcccttatcgataccaagggcaacaagattgctggcttcgattccatcttcaagaaggagggtctacaggtttccaccaaacagaagatctcgccctgggatctttttgaggggttgaagccgtcagcaccactctcttggggctggtttggaacagtccgagtggaccggcgagtggctcgaggagaggagcagcagcggttgctgctctaccacacacacctgaggccccggccccgcgcctattacctggagccactgccactgcccccagaagatgaggagccgcctgctcctaccctgctagagcctgagaaaaaggctccagagccccccaaaactgacaaaccgggggctgctccacccagtactgaggaacgcaagaagaagtccaccaagggcaagaaacgcagccagccagctaccaagacagaggactatggaatgggcccgggtcggagcggcccttatggtgtgacagtgcctccggacctcctgcaccacccaaaccctggttctataacacaccttaactacaggcaaggctccataggcctgtacacccagaaccagccactacctgcaggtggccctcgtgtggacccataccgtcctgtgcgcttaccaatgcagaagctgcccacccgaccaacttaccctggagtgctgcccacaaccatgactggcgtcatgggtttagaaccctcctcttataagacctctgtgtaccggcagcagcaacctgcggtgccccaaggacagcgccttcgccaacagctccagcagagtcagggcatgttgggacagtcatctgtccatcagatgactcccagctcttcctacggtttgcagacttcccagggctatactccttatgtttctcatgtgggattgcagcaacacacaggccctgcaggtaccatggtgccccccagctactccagccagccttaccagagcacccacccttctaccaatcctactcttgtagatcctacccgccacctgcaacagcggcccagtggctatgtgcaccagcaggcccccacctatggacatggactgacctccactcaaaggttttcacaccagacactgcagcagacacccatgataagtaccatgactccaatgagtgcccagggcgtccaggcaggcgtccgttcaacagccatcctacctgagcagcagcagcagcagcaacagcagcaacagcaacagcagcagcagcagcaacagcaacagcagcagcagcagcagcagtaccacatccggcagcagcagcagcagcagatcctgcggcagcagcagcaacagcaacagcagcagcagcagcagcagcaacagcaacagcagcagcagcaacagcaacaacagcaacaccagcagcaacagcagcaacaggcggctcctccccaaccccagccccagtcccagccccagttccagcgccaggggcttcagcagacccagcagcagcaacagacagcagctttggtccggcaacttcaacaacagctctctaatacccagccacagcccagtaccaacatatttggacgctactgagccacctggaggaactgcttgtgcactggatgtggccccaccctttcctcttaattcccaatcccattcctgggctagcaccagtagtggttggggccctcccctcaggctccatttttaataagtttttagtatttttgttaatgtgaggcattgagctgttgggttttgtatattatttatatagagaccccagagctgttgcacccaatacacagagcttctttgcaaaggg

SEQ ID NO: 449571 - DNA, 1452 bp, Homo sapiens
ggcgggggcgcgccagccggcccggcgggcgcgcgacggcggccgccggggccgccgacgcggccgccggcaccaggacagaggactatggaatgggcccgggtcggagcggcccttatggtgtgacagtgcctccggacctcctgcaccacccaaaccctggttctataacacaccttaactacaggcaaggctccataggcctgtacacccagaaccagccactacctgcaggtggccctcgtgtggacccataccgtcctgtgcgcttaccaatgcagaagctgcccacccgaccaacttaccctggagtgctgcccacaaccatgactggcgtcatgggtttagaaccctcctcttataagacctctgtgtaccggcagcagcaacctgcggtgccccaaggacagcgccttcgccaacagctccagcagagtcagggcatgttgggacagtcatctgtccatcagatgactcccagctcttcctacggtttgcagacttcccagggctatactccttatgtttctcatgtgggattgcagcaacacacaggccctgcaggtaccatggtgccccccagctactccagccagccttaccagagcacccacccttctaccaatcctactcttgtagatcctacccgccacctgcaacagcggcccagtggctatgtgcaccagcaggcccccacctatggacatggactgacctccactcaaaggttttcacaccagacactgcagcagacacccatgataagtaccatgactccaatgagtgcccagggcgtccaggcaggcgtccgttcaacagccatcctacctgagcagcagcagcagcagcaacagcagcaacagcaacagcagcagcagcagcaacagcaacagcagcagcagcagcagcagtaccacatccggcagcagcagcagcagcagatcctgcggcagcagcagcaacagcaacagcagcagcagcagcagcagcaacagcaacagcagcagcagcaacagcaacaacagcaacaccagcagcaacagcagcaacaggcggctcctccccaaccccagccccagtcccagccccagttccagcgccaggggcttcagcagacccagcagcagcaacagacagcagctttggtccggcaacttcaacaacagctctctaatacccagccacagcccagtaccaacatatttggacgctactgagccacctggaggaactgcttgtgcactggatgtggccccaccctttcctcttaattcccaatcccattcctgggctagcaccagtagtggttggggccctcccctcaggctccatttttaataagtttttagtatttttgttaatgtgaggcattgagctgttgggttttgtatattatttatatagagaccccagagctgttgcacccaatacacagagcttctttgcaaaggg

SEQ ID NO: 449572 - DNA, 413 bp, Homo sapiens
aaaacgcgtgcttttgtgcgacacctcccgaaccccagagccatatcgtgccttccagcgccaggggcttcagcagacccagcagcagcaacagacagcagctttggtccggcaacttcaacaacagctctctaatacccagccacagcccagtaccaacatatttggacgctactgagccacctggaggaactgcttgtgcactggatgtggccccaccctttcctcttaattcccaatcccattcctgggctagcaccagtagtggttggggccctcccctcaggctccatttttaataagtttttagtatttttgttaatgtgaggcattgagctgttgggttttgtatattatttatatagagaccccagagctgttgcacccaatacacagagcttctttgcaaaggg

SEQ ID NO: 449573 - DNA, 1750 bp, Homo sapiens
agaagcccagtagacaaagaaggtaagggcagtgagaatgatgcatcttgcattccttgtgctgttgtgtctgccagtctgctctgcctatcctctgagtggggcagcaaaagaggaggactccaacaaggatcttgcccagcaatacctagaaaagtactacaacctcgaaaaggatgtgaaacagtttagaagaaaggacagtaatctcattgttaaaaaaatccaaggaatgcagaagttccttgggttggaggtgacagggaagctagacactgacactctggaggtgatgcgcaagcccaggtgtggagttcctgacgttggtcacttcagctcctttcctggcatgccgaagtggaggaaaacccaccttacatacaggattgtgaattatacaccagatttgccaagagatgctgttgattctgccattgagaaagctctgaaagtctgggaagaggtgactccactcacattctccaggctgtatgaaggagaggctgatataatgatctcttttgcagttaaagaacatggagacttttactcttttgatggcccaggacacagtttggctcatgcctacccacctggacctgggctttatggagatattcactttgatgatgatgaaaaatggacagaagatgcatcaggcaccaatttattcctcgttgctgctcatgaacttggccactccctggggctctttcactcagccaacactgaagctttgatgtacccactctacaactcattcacagagctcgcccagttccgcctttcgcaagatgatgtgaatggcattcagtctctctacggacctccccctgcctctactgaggaacccctggtgcccacaaaatctgttccttcgggatctgagatgccagccaagtgtgatcctgctttgtccttcgatgccatcagcactctgaggggagaatatctgttctttaaagacagatatttttggcgaagatcccactggaaccctgaacctgaatttcatttgatttctgcattttggccctctcttccatcatatttggatgctgcatatgaagttaacagcagggacaccgtttttatttttaaaggaaatgagttctgggccatcagaggaaatgaggtacaagcaggttatccaagaggcatccataccctgggttttcctccaaccataaggaaaattgatgcagctgtttctgacaaggaaaagaagaaaacatacttctttgcagcggacaaatactggagatttgatgaaaatagccagtccatggagcaaggcttccctagactaatagctgatgactttccaggagttgagcctaaggttgatgctgtattacaggcatttggatttttctacttcttcagtggatcatcacagtttgagtttgaccccaatgccaggatggtgacacacatattaaagagtaacagctggttacattgctaggcgagatagggggaagacagatatgggtgtttttaataaatctaataattattcatctaatgtattatgagccaaaatggttaatttttcctgcatgttctgtgactgaagaagatgagccttgcagatatctgcatgtgtcatgaagaatgtttctggaattcttcacttgcttttgaattgcactgaacagaattaagaaatactcatgtgcaataggtgagagaatgtattttcatagatgtgttattacttcctcaataaaaagttttattttgggcc

SEQ ID NO: 449574 - DNA, 909 bp, Homo sapiens
tcggctgtatctagaggaccccgatgagtaaatctggcgggatctgagatgccagccaagtgtgatcctgctttgtccttcgatgccatcagcactctgaggggagaatatctgttctttaaagacagatatttttggcgaagatcccactggaaccctgaacctgaatttcatttgatttctgcattttggccctctcttccatcatatttggatgctgcatatgaagttaacagcagggacaccgtttttatttttaaaggaaatgagttctgggccatcagaggaaatgaggtacaagcaggttatccaagaggcatccataccctgggttttcctccaaccataaggaaaattgatgcagctgtttctgacaaggaaaagaagaaaacatacttctttgcagcggacaaatactggagatttgatgaaaatagccagtccatggagcaaggcttccctagactaatagctgatgactttccaggagttgagcctaaggttgatgctgtattacaggcatttggatttttctacttcttcagtggatcatcacagtttgagtttgaccccaatgccaggatggtgacacacatattaaagagtaacagctggttacattgctaggcgagatagggggaagacagatatgggtgtttttaataaatctaataattattcatctaatgtattatgagccaaaatggttaatttttcctgcatgttctgtgactgaagaagatgagccttgcagatatctgcatgtgtcatgaagaatgtttctggaattcttcacttgcttttgaattgcactgaacagaattaagaaatactcatgtgcaataggtgagagaatgtattttcatagatgtgttattacttcctcaataaaaagttttattttgggcc

SEQ ID NO: 449575 - DNA, 258 bp, Homo sapiens
tggctgtgaactggacattattaggttggaattaaaaccaagccttcctctttaccacaacaatgcactataattatttttaaaatcaatggcttcaagtaaaatgtcttggatttattttttcaataggaaatgagttctgggccatcagaggaaatgaggtacaagcaggttatccaagaggcatccataccctgggttttcctccaaccataaggaaaattgatgcagctgtttctgacaaggaaaagaagaaaa

SEQ ID NO: 449576 - DNA, 1570 bp, Homo sapiens
ccggctccgaccccgaggccgaaggccttccaggtcacctgagagtctccgcccaatggggcggccctggccagaagcggaggaggtggcacccgggaccgagctggggtcttggaggaagagaggatggcgtcgtcgagccctgactccccatgttcctgcgactgctttgtctccgtgcccccggcctcagccatcccggctgtgatctttgccaagaactcggaccgaccccgggacgaggtgcaggaggtggtgtttgtccccgcaggcactcacactcctgggagccggctccagtgcacctacattgaagtggaacaggtgtcgaagacgcacgctgtgattctgagccgtccttcttggctatggggggctgagatgggcgccaacgagcatggtgtctgcattggcaacgaggctgtgtggacgaaggagccagttggggagggggaagccctgctgggcatggacctactcaggctggctttggaacggagcagctctgcccaggaggccttgcatgtgatcacagggttactggagcactatgggcaggggggcaactgcctggaggatgctgcgccattctcctaccatagcaccttcctgctggctgaccgcactgaggcgtgggtgctggagacagctgggaggctctgggctgcacagaggatccaggagggggcccgcaacatctccaaccagctgagcattggcacggacatctcggcccaacacccggagctgcggactcatgcccaggccaagggctggtgggatgggcagggtgcctttgactttgctcagatcttctccctgacccagcagcctgtgcgcatggaggctgccaaggcccgcttccaggcagggcgggagctgctgcggcaacggcaagggggcatcacggcagaggtgatgatgggcatcctcagagacaaggagagtggtatctgtatggactcgggaggctttcgcaccacggccagcatggtgtctgtcctgccccaggatcccacgcagccctgcgtgcactttcttaccgccacgccagacccatccaggtctgtgttcaaacctttcatcttcggggtgggggtggcccaggccccccaggtgctgtcccccacttttggagcacaagaccctgttcggaccctgccccgattccagactcaggtagatcgtcggcataccctctaccgtggacaccaggcagccctggggctgatggagagagatcaggatcgggggcagcagctccagcagaaacagcaggatctggagcaggaaggcctcgaggccacacaggggctgctggccggcgagtgggccccacccctctgggagctgggcagcctcttccaggccttcgtgaagagggagagccaggcttatgcgtaagcttcatagcttctgctggcctggggtggacccaggacccctggggcctgggtgccctgagtggtggtaaagtggagcaatcccttcacgctccttggccatgttctgagcggccagcttggcctttgccttaataaatgtgctttattttcaaaaaaaaaaaatt

SEQ ID NO: 449577 - DNA, 1678 bp, Homo sapiens
  misc_feature (1504)..(1504): n is a, c, g, or t
ccggctccgaccccgaggccgaaggccttccaggtcacctgagagtctccgcccaatggggcggccctggccagaagcggaggaggtggcacccgggaccgagctggggtcttggaggaagagaggatggcgtcgtcgagccctgactccccatgttcctgcgactgctttgtctccgtgcccccggcctcagccatcccggctgtgatctttgccaagaactcggaccgaccccgggacgaggtgcaggaggtggtgtttgtccccgcaggcactcacactcctgggagccggctccagtgcacctacattgaagtggaacaggtgtcgaagacgcacgctgtgattctgagccgtccttcttggctatggggggctgagatgggcgccaacgagcatggtgtctgcattggcaacgaggctgtgtggacgaaggagccagttggggagggggaagccctgctgggcatggacctactcaggctggctttggaacggagcagctctgcccaggaggccttgcatgtgatcacagggttactggagcactatgggcaggggggcaactgcctggaggatgctgcgccattctcctaccatagcaccttcctgctggctgaccgcactgaggcgtgggtgctggagacagctgggaggctctgggctgcacagaggatccaggagggggcccgcaacatctccaaccagctgagcattggcacggacatctcggcccaacacccggagctgcggactcatgcccaggccaagggctggtgggatgggcagggtgcctttgactttgctcagatcttctccctgacccagcagcctgtgcgcatggaggctgccaaggcccgcttccaggcagggcgggagctgctgcggcaacggcaagggggcatcacggcagaggtgatgatgggcatcctcagagacaaggagagtggtatctgtatggactcgggaggctttcgcaccacggccagcatggtgtctgtcctgccccaggatcccacgcagccctgcgtgcactttcttaccgccacgccagacccatccaggtctgtgttcaaacctttcatcttcggggtgggggtggcccaggccccccaggtgctgtcccccacttttggagcacaagaccctgttcggaccctgccccgattccagactcaggtagatcgtcggcataccctctaccgtggacaccaggcagccctggggctgatggagagagatcaggtatcccccagggagtaggggctaccttgaggggatgatagacctcccccactcccagtgggactctggaaatatgaaggaactagggagtggaagagatttcagagctggggagaggagttcctcccttcaaagccagcaactgcctttagtgagggttaattcgcgaattaaccctcactaaggtgctggaattacaggtgtgagccaccgtgcccgccaagtatctcttttctacagccttattaaactaactacnaacatttattttccaatttagttttactttcagtgcatatcaaagttgttgtactcttcagaccaacaaattaacttgagggcaaattacatagctttccatgtacccttttttcctcaggtgctaatcaaaggctctaaaagggatcctctagagcgacagcaggcagcaaag

SEQ ID NO: 449578 - DNA, 2117 bp, Homo sapiens
ccggctccgaccccgaggccgaaggccttccaggtcacctgagagtctccgcccaatggggcggccctggccagaagcggaggaggtggcacccgggaccgagctggggtcttggaggaagagaggatggcgtcgtcgagccctgactccccatgttcctgcgactgctttgtctccgtgcccccggcctcagccatcccggctgtgatctttgccaagaactcggaccgaccccgggacgaggtgcaggaggtggtgtttgtccccgcaggcactcacactcctgggagccggctccagtgcacctacattgaagtggaacaggtgtcgaagacgcacgctgtgattctgagccgtccttcttggctatggggggctgagatgggcgccaacgagcatggtgtctgcattggcaacgaggctgtgtggacgaaggagccagttggggagggggaagccctgctgggcatggacctactcaggtgcagaccctgcccttcctcatctgcctgacacaccagaaatctaggggctgagttttgacctgggcccatccatccctcccccagcctggttcacaggggcctcctcctctctgcagactttgcccttgtgccttcgtgaagaaggctgcagcagcagccacctttgggcctctcctggcccagaaatagagcagtggttatttatttattttcagttgaaatcttacatagagtcccaatttataaaaccagtaatagtggatggagcagctctgggtggagagaggttaggggctcaggacacttctctctctgaaactgtgtttcaggccttttcatggaaccctcaaagcatagcacatggaaccagagcattgaaagccactggcataattgcatttgatacgatcagtgccagcagatttgctgtgtgacttgggcctatcaccaaacctctccgggcctcttctgtcccctggagcttctgccaccagccattgatccctctgtcacccttctgtcccttggccctctcttttgccaggctggctttggaacggagcagctctgcccaggaggccttgcatgtgatcacagggttactggagcactatgggcaggggggcaactgcctggaggatgctgcgccattctcctaccatagcaccttcctgctggctgaccgcactgaggcgtgggtgctggagacagctgggaggctctgggctgcacagaggatccaggagggggcccgcaacatctccaaccagctgagcattggcacggacatctcggcccaacacccggagctgcggactcatgcccaggccaagggctggtgggatgggcagggtgcctttgactttgctcagatcttctccctgacccagcagcctgtgcgcatggaggctgccaaggcccgcttccaggcagggcgggagctgctgcggcaacggcaagggggcatcacggcagaggtgatgatgggcatcctcagagacaaggagagtggtatctgtatggactcgggaggctttcgcaccacggccagcatggtgtctgtcctgccccaggatcccacgcagccctgcgtgcactttcttaccgccacgccagacccatccaggtctgtgttcaaacctttcatcttcggggtgggggtggcccaggccccccaggtgctgtcccccacttttggagcacaagaccctgttcggaccctgccccgattccagactcaggtagatcgtcggcataccctctaccgtggacaccaggcagccctggggctgatggagagagatcaggatcgggggcagcagctccagcagaaacagcaggatctggagcaggaaggcctcgaggccacacaggggctgctggccggcgagtgggccccacccctctgggagctgggcagcctcttccaggccttcgtgaagagggagagccaggcttatgcgtaagcttcatagcttctgctggcctggggtggacccaggacccctggggcctgggtgccctgagtggtggtaaagtggagcaatcccttcacgctccttggccatgttctgagcggccagcttggcctttgccttaataaatgtgctttattttcaaaaaaaaaaaatt

SEQ ID NO: 449579 - DNA, 2481 bp, Homo sapiens
ccggctccgaccccgaggccgaaggccttccaggtcacctgagagtctccgcccaatggggcggccctggccagaagcggaggaggtggcacccgggaccgagctggggtcttggaggaagagagggtgaggggaatacagtactgggggtgagagaagggttggacagaagagggtcgggtatctgggcatgcgcagggccgcaggactcttggtggggtagcgagggggacggtcccacgactgctccgaagggccgggactcccagtgggggcgggacccccggagtgcccgcctgcggactcccaagcctggagcctggggagagggtgggcacctccgttcccgcacacccgtccatggtgtgtgcgccgagcgtccaggagccacggcggtgtcttccttgcgcgtcttttacacgtgtgggggtaggctgctcctcggggctgagccgtggccagggttatggagaggcccgcctctccccagatggcgtcgtcgagccctgactccccatgttcctgcgactgctttgtctccgtgcccccggcctcagccatcccggctgtgatctttgccaagaactcggaccgaccccgggacgaggtgcaggaggtggtgtttgtccccgcaggcactcacactcctgggagccggctccagtgcacctacattgaagtggaacaggtgtcgaagacgcacgctgtgattctgagccgtccttcttggctatggggggctgagatgggcgccaacgagcatggtgtctgcattggcaacgaggctgtgtggacgaaggagccagttggggagggggaagccctgctgggcatggacctactcaggtgcagaccctgcccttcctcatctgcctgacacaccagaaatctaggggctgagttttgacctgggcccatccatccctcccccagcctggttcacaggggcctcctcctctctgcagactttgcccttgtgccttcgtgaagaaggctgcagcagcagccacctttgggcctctcctggcccagaaatagagcagtggttatttatttattttcagttgaaatcttacatagagtcccaatttataaaaccagtaatagtggatggagcagctctgggtggagagaggttaggggctcaggacacttctctctctgaaactgtgtttcaggccttttcatggaaccctcaaagcatagcacatggaaccagagcattgaaagccactggcataattgcatttgatacgatcagtgccagcagatttgctgtgtgacttgggcctatcaccaaacctctccgggcctcttctgtcccctggagcttctgccaccagccattgatccctctgtcacccttctgtcccttggccctctcttttgccaggctggctttggaacggagcagctctgcccaggaggccttgcatgtgatcacagggttactggagcactatgggcaggggggcaactgcctggaggatgctgcgccattctcctaccatagcaccttcctgctggctgaccgcactgaggcgtgggtgctggagacagctgggaggctctgggctgcacagaggatccaggagggggcccgcaacatctccaaccagctgagcattggcacggacatctcggcccaacacccggagctgcggactcatgcccaggccaagggctggtgggatgggcagggtgcctttgactttgctcagatcttctccctgacccagcagcctgtgcgcatggaggctgccaaggcccgcttccaggcagggcgggagctgctgcggcaacggcaagggggcatcacggcagaggtgatgatgggcatcctcagagacaaggagagtggtatctgtatggactcgggaggctttcgcaccacggccagcatggtgtctgtcctgccccaggatcccacgcagccctgcgtgcactttcttaccgccacgccagacccatccaggtctgtgttcaaacctttcatcttcggggtgggggtggcccaggccccccaggtgctgtcccccacttttggagcacaagaccctgttcggaccctgccccgattccagactcaggtagatcgtcggcataccctctaccgtggacaccaggcagccctggggctgatggagagagatcaggatcgggggcagcagctccagcagaaacagcaggatctggagcaggaaggcctcgaggccacacaggggctgctggccggcgagtgggccccacccctctgggagctgggcagcctcttccaggccttcgtgaagagggagagccaggcttatgcgtaagcttcatagcttctgctggcctggggtggacccaggacccctggggcctgggtgccctgagtggtggtaaagtggagcaatcccttcacgctccttggccatgttctgagcggccagcttggcctttgccttaataaatgtgctttattttcaaaaaaaaaaaatt

SEQ ID NO: 449580 - DNA, 1894 bp, Homo sapiens
ccggctccgaccccgaggccgaaggccttccaggtcacctgagagtctccgcccaatggggcggccctggccagaagcggaggaggtggcacccgggaccgagctggggtcttggaggaagagagggtgaggggaatacagtactgggggtgagagaagggttggacagaagagggtcgggtatctgggcatgcgcagggccgcaggactcttggtggggtagcgagggggacggtcccacgactgctccgaagggccgggactcccagtgggggcgggacccccggagtgcccgcctgcggactcccaagcctggagcctggggagagggtgggcacctccgttcccgcacacccgtccatggtgtgtgcgccgagcgtccaggagccacggcggtgtcttccttgcgcgtcttttacacgtgtgggggtaggctgctcctcggggctgagccgtggccagggttatggagaggcccgcctctccccagatggcgtcgtcgagccctgactccccatgttcctgcgactgctttgtctccgtgcccccggcctcagccatcccggctgtgatctttgccaagaactcggaccgaccccgggacgaggtgcaggaggtggtgtttgtccccgcaggcactcacactcctgggagccggctccagtgcacctacattgaagtggaacaggtgtcgaagacgcacgctgtgattctgagccgtccttcttggctatggggggctgagatgggcgccaacgagcatggtgtctgcattggcaacgaggctgtgtggacgaaggagccagttggggagggggaagccctgctgggcatggacctactcaggctggctttggaacggagcagctctgcccaggaggccttgcatgtgatcacagggttactggagcactatgggcaggggggcaactgcctggaggatgctgcgccattctcctaccatagcaccttcctgctggctgaccgcactgaggcgtgggtgctggagacagctgggaggctctgggctgcacagaggatccaggggacatctcggcccaacacccggagctgcggactcatgcccaggccaagggctggtgggatgggcagggtgcctttgactttgctcagatcttctccctgacccagcagcctgtgcgcatggaggctgccaaggcccgcttccaggcagggcgggagctgctgcggcaacggcaagggggcatcacggcagaggtgatgatgggcatcctcagagacaaggagagtggtatctgtatggactcgggaggctttcgcaccacggccagcatggtgtctgtcctgccccaggatcccacgcagccctgcgtgcactttcttaccgccacgccagacccatccaggtctgtgttcaaacctttcatcttcggggtgggggtggcccaggccccccaggtgctgtcccccacttttggagcacaagaccctgttcggaccctgccccgattccagactcaggtagatcgtcggcataccctctaccgtggacaccaggcagccctggggctgatggagagagatcaggatcgggggcagcagctccagcagaaacagcaggatctggagcaggaaggcctcgaggccacacaggggctgctggccggcgagtgggccccacccctctgggagctgggcagcctcttccaggccttcgtgaagagggagagccaggcttatgcgtaagcttcatagcttctgctggcctggggtggacccaggacccctggggcctgggtgccctgagtggtggtaaagtggagcaatcccttcacgctccttggccatgttctgagcggccagcttggcctttgccttaataaatgtgctttattttcaaaaaaaaaaaatt

SEQ ID NO: 449581 - DNA, 1062 bp, Homo sapiens
gggtctgggaggaagagaggatggcgtcgtcgagccctgactccccatgttcctgcaactgcctggaggatgctgcgccattctcctaccatagcaccttcctgctggctgaccgcactgaggcgtgggtgctggagacagctgggaggctctgggctgcacagaggatccaggagggggcccgcaacatctccaaccagctgagcattggcacggacatctcggcccaacacccggagctgcggactcatgcccaggccaagggctggtgggatgggcagggtgcctttgactttgctcagatcttctccctgacccagcagcctgtgcgcatggaggctgccaaggcccgcttccaggcagggcgggagctgctgcggcaacggcaagggggcatcacggcagaggtgatgatgggcatcctcagagacaaggagagtggtatctgtatggactcgggaggctttcgcaccacggccagcatggtgtctgtcctgccccaggatcccacgcagccctgcgtgcactttcttaccgccacgccagacccatccaggtctgtgttcaaacctttcatcttcggggtgggggtggcccaggccccccaggtgctgtcccccacttttggagcacaagaccctgttcggaccctgccccgattccagactcaggtagatcgtcggcataccctctaccgtggacaccaggcagccctggggctgatggagagagatcaggatcgggggcagcagctccagcagaaacagcaggatctggagcaggaaggcctcgaggccacacaggggctgctggccggcgagtgggccccacccctctgggagctgggcagcctcttccaggccttcgtgaagagggagagccaggcttatgcgtaagcttcatagcttctgctggcctggggtggacccaggacccctggggcctgggtgccctgagtggtggtaaagtggagcaatcccttcacgctccttggccatgttctgagcggccagcttggcctttgccttaataaatgtgctttattttcaaaaaaaaaaaatt

SEQ ID NO: 449582 - DNA, 506 bp, Homo sapiens
acatctccaaccagctgagcattggcacggacatctcggcccaacacccggagctgcggactcatgcccaggccaagggctggtgggatgggcagggtgcctttgactttgctcagatcttctccctgacccagcagcctgtgcgcatggaggctgccaaggcccgcttccaggcagggcgggagctgctgcggcaacggcaaggttagtgaacggtggagggggctgggggccaggagggccacagcagtgccagccactctcccctcccacagcttccccctctactccttggcagggggcatcacggcagaggtgatgatgggcatcctcagagacaaggagagtggtatctgtatggactcgggaggctttcgcaccacggccagcatggtgtctgtcctgccccaggatcccacgcagccctgcgtgcactttcttaccgccacgccagacccatccaggtgggaagaatgagggtggggaaggctggggagaagagagga

SEQ ID NO: 449583 - DNA, 1837 bp, Homo sapiens
ccggctccgaccccgaggccgaaggccttccaggtcacctgagagtctccgcccaatggggcggccctggccagaagcggaggaggtggcacccgggaccgagctggggtcttggaggaagagaggatggcgtcgtcgagccctgactccccatgttcctgcgactgctttgtctccgtgcccccggcctcagccatcccggctgtgatctttgccaagaactcggaccgaccccgggacgaggtgcaggaggtggtgtttgtccccgcaggcactcacactcctgggagccggctccagtgcacctacattgaagtggaacaggtgtcgaagacgcacgctgtgattctgagccgtccttcttggctatggggggctgagatgggcgccaacgagcatggtgtctgcattggcaacgaggctgtgtggacgaaggagccagttggggagggggaagccctgctgggcatggacctactcaggctggctttggaacggagcagctctgcccaggaggccttgcatgtgatcacagggttactggagcactatgggcaggggggcaactgcctggaggatgctgcgccattctcctaccatagcaccttcctgctggctgaccgcactgaggcgtgggtgctggagacagctgggaggctctgggctgcacagaggatccaggagggggcccgcaacatctccaaccagctgagcattggcacggacatctcggcccaacacccggagctgcggactcatgcccaggccaagggctggtgggatgggcagggtgcctttgactttgctcagatcttctccctgacccagcagcctgtgcgcatggaggctgccaaggcccgcttccaggcagggcgggagctgctgcggcaacggcaagggggcatcacggcagaggtgatgatgggcatcctcagagacaaggagagtggtatctgtatggactcgggaggctttcgcaccacggccagcatggtgtctgtcctgccccaggatcccacgcagccctgcgtgcactttcttaccgccacgccagacccatccaggtctgtgttcaaacctttcatcttcggggtgggggtggcccaggccccccaggtgctgtcccccacttttggagcacaagaccctgttcggaccctgccccgattccagactcaggtagatcgtcggcataccctctaccgtggacaccaggcagccctggggctgatggagagagatcaggtatcccccagggagtaggggctaccttgaggggatgatagacctcccccactcccagtgggactctggaaatatgaaggaactagggagtggaagagatttcagagctggggagaggagttcctcccttcaaagccagcaactgcctttggggaatgtcggggggtatctcctttctcctgcttgtgtgaggtggtacacagtccccccttcacctggcgggaagcctgtcccggacagactcatctcagctttcccttggggcaggatcgggggcagcagctccagcagaaacagcaggatctggagcaggaaggcctcgaggccacacaggggctgctggccggcgagtgggccccacccctctgggagctgggcagcctcttccaggccttcgtgaagagggagagccaggcttatgcgtaagcttcatagcttctgctggcctggggtggacccaggacccctggggcctgggtgccctgagtggtggtaaagtggagcaatcccttcacgctccttggccatgttctgagcggccagcttggcctttgccttaataaatgtgctttattttcaaaaaaaaaaaatt

SEQ ID NO: 449584 - DNA, 1934 bp, Homo sapiens
ccggctccgaccccgaggccgaaggccttccaggtcacctgagagtctccgcccaatggggcggccctggccagaagcggaggaggtggcacccgggaccgagctggggtcttggaggaagagagggtgaggggaatacagtactgggggtgagagaagggttggacagaagagggtcgggtatctgggcatgcgcagggccgcaggactcttggtggggtagcgagggggacggtcccacgactgctccgaagggccgggactcccagtgggggcgggacccccggagtgcccgcctgcggactcccaagcctggagcctggggagagggtgggcacctccgttcccgcacacccgtccatggtgtgtgcgccgagcgtccaggagccacggcggtgtcttccttgcgcgtcttttacacgtgtgggggtaggctgctcctcggggctgagccgtggccagggttatggagaggcccgcctctccccagatggcgtcgtcgagccctgactccccatgttcctgcgactgctttgtctccgtgcccccggcctcagccatcccggctgtgatctttgccaagaactcggaccgaccccgggacgaggtgcaggaggtggtgtttgtccccgcaggcactcacactcctgggagccggctccagtgcacctacattgaagtggaacaggtgtcgaagacgcacgctgtgattctgagccgtccttcttggctatggggggctgagatgggcgccaacgagcatggtgtctgcattggcaacgaggctgtgtggacgaaggagccagttggggagggggaagccctgctgggcatggacctactcaggctggctttggaacggagcagctctgcccaggaggccttgcatgtgatcacagggttactggagcactatgggcaggggggcaactgcctggaggatgctgcgccattctcctaccatagcaccttcctgctggctgaccgcactgaggcgtgggtgctggagacagctgggaggctctgggctgcacagaggatccaggagggggcccgcaacatctccaaccagctgagcattggcacggacatctcggcccaacacccggagctgcggactcatgcccaggccaagggctggtgggatgggcagggtgcctttgactttgctcagatcttctccctgacccagcagcctgtgcgcatggaggctgccaaggcccgcttccaggcagggcgggagctgctgcggcaacggcaagggggcatcacggcagaggtgatgatgggcatcctcagagacaaggagagtggtatctgtatggactcgggaggctttcgcaccacggccagcatggtgtctgtcctgccccaggatcccacgcagccctgcgtgcactttcttaccgccacgccagacccatccaggtctgtgttcaaacctttcatcttcggggtgggggtggcccaggccccccaggtgctgtcccccacttttggagcacaagaccctgttcggaccctgccccgattccagactcaggtagatcgtcggcataccctctaccgtggacaccaggcagccctggggctgatggagagagatcaggatcgggggcagcagctccagcagaaacagcaggatctggagcaggaaggcctcgaggccacacaggggctgctggccggcgagtgggccccacccctctgggagctgggcagcctcttccaggccttcgtgaagagggagagccaggcttatgcgtaagcttcatagcttctgctggcctggggtggacccaggacccctggggcctgggtgccctgagtggtggtaaagtggagcaatcccttcacgctccttggccatgttctgagcggccagcttggcctttgccttaataaatgtgctttattttcaaaaaaaaaaaatt

SEQ ID NO: 449585 - DNA, 1388 bp, Homo sapiens
ccggctccgaccccgaggccgaaggccttccaggtcacctgagagtctccgcccaatggggcggccctggccagaagcggaggaggtggcacccgggaccgagctggggtcttggaggaagagaggatggcgtcgtcgagccctgactccccatgttcctgcgactgctttgtctccgtgcccccggcctcagccatcccggctgtgatctttgccaagaactcggaccgaccccgggacgaggtgcaggaggtggtgtttgtccccgcaggcactcacactcctgggagccggctccaggctggctttggaacggagcagctctgcccaggaggccttgcatgtgatcacagggttactggagcactatgggcaggggggcaactgcctggaggatgctgcgccattctcctaccatagcaccttcctgctggctgaccgcactgaggcgtgggtgctggagacagctgggaggctctgggctgcacagaggatccaggagggggcccgcaacatctccaaccagctgagcattggcacggacatctcggcccaacacccggagctgcggactcatgcccaggccaagggctggtgggatgggcagggtgcctttgactttgctcagatcttctccctgacccagcagcctgtgcgcatggaggctgccaaggcccgcttccaggcagggcgggagctgctgcggcaacggcaagggggcatcacggcagaggtgatgatgggcatcctcagagacaaggagagtggtatctgtatggactcgggaggctttcgcaccacggccagcatggtgtctgtcctgccccaggatcccacgcagccctgcgtgcactttcttaccgccacgccagacccatccaggtctgtgttcaaacctttcatcttcggggtgggggtggcccaggccccccaggtgctgtcccccacttttggagcacaagaccctgttcggaccctgccccgattccagactcaggtagatcgtcggcataccctctaccgtggacaccaggcagccctggggctgatggagagagatcaggatcgggggcagcagctccagcagaaacagcaggatctggagcaggaaggcctcgaggccacacaggggctgctggccggcgagtgggccccacccctctgggagctgggcagcctcttccaggccttcgtgaagagggagagccaggcttatgcgtaagcttcatagcttctgctggcctggggtggacccaggacccctggggcctgggtgccctgagtggtggtaaagtggagcaatcccttcacgctccttggccatgttctgagcggccagcttggcctttgccttaataaatgtgctttattttcaaaaaaaaaaaatt

SEQ ID NO: 449586 - DNA, 2140 bp, Homo sapiens
ccggctccgaccccgaggccgaaggccttccaggtcacctgagagtctccgcccaatggggcggccctggccagaagcggaggaggtggcacccgggaccgagctggggtcttggaggaagagagggtgaggggaatacagtactggggatggcgtcgtcgagccctgactccccatgttcctgcgactgctttgtctccgtgcccccggcctcagccatcccggctgtgatctttgccaagaactcggaccgaccccgggacgaggtgcaggaggtggtgtttgtccccgcaggcactcacactcctgggagccggctccagtgcacctacattgaagtggaacaggtgtcgaagacgcacgctgtgattctgagccgtccttcttggctatggggggctgagatgggcgccaacgagcatggtgtctgcattggcaacgaggctgtgtggacgaaggagccagttggggagggggaagccctgctgggcatggacctactcaggtgcagaccctgcccttcctcatctgcctgacacaccagaaatctaggggctgagttttgacctgggcccatccatccctcccccagcctggttcacaggggcctcctcctctctgcagactttgcccttgtgccttcgtgaagaaggctgcagcagcagccacctttgggcctctcctggcccagaaatagagcagtggttatttatttattttcagttgaaatcttacatagagtcccaatttataaaaccagtaatagtggatggagcagctctgggtggagagaggttaggggctcaggacacttctctctctgaaactgtgtttcaggccttttcatggaaccctcaaagcatagcacatggaaccagagcattgaaagccactggcataattgcatttgatacgatcagtgccagcagatttgctgtgtgacttgggcctatcaccaaacctctccgggcctcttctgtcccctggagcttctgccaccagccattgatccctctgtcacccttctgtcccttggccctctcttttgccaggctggctttggaacggagcagctctgcccaggaggccttgcatgtgatcacagggttactggagcactatgggcaggggggcaactgcctggaggatgctgcgccattctcctaccatagcaccttcctgctggctgaccgcactgaggcgtgggtgctggagacagctgggaggctctgggctgcacagaggatccaggagggggcccgcaacatctccaaccagctgagcattggcacggacatctcggcccaacacccggagctgcggactcatgcccaggccaagggctggtgggatgggcagggtgcctttgactttgctcagatcttctccctgacccagcagcctgtgcgcatggaggctgccaaggcccgcttccaggcagggcgggagctgctgcggcaacggcaagggggcatcacggcagaggtgatgatgggcatcctcagagacaaggagagtggtatctgtatggactcgggaggctttcgcaccacggccagcatggtgtctgtcctgccccaggatcccacgcagccctgcgtgcactttcttaccgccacgccagacccatccaggtctgtgttcaaacctttcatcttcggggtgggggtggcccaggccccccaggtgctgtcccccacttttggagcacaagaccctgttcggaccctgccccgattccagactcaggtagatcgtcggcataccctctaccgtggacaccaggcagccctggggctgatggagagagatcaggatcgggggcagcagctccagcagaaacagcaggatctggagcaggaaggcctcgaggccacacaggggctgctggccggcgagtgggccccacccctctgggagctgggcagcctcttccaggccttcgtgaagagggagagccaggcttatgcgtaagcttcatagcttctgctggcctggggtggacccaggacccctggggcctgggtgccctgagtggtggtaaagtggagcaatcccttcacgctccttggccatgttctgagcggccagcttggcctttgccttaataaatgtgctttattttcaaaaaaaaaaaatt

SEQ ID NO: 449587 - DNA, 1014 bp, Homo sapiens
aataggctagtagagctcgcgttaatcggacgaggcacaggcttatgttagcactatgggcaggggggcaactgcctggaggatgctgcgccattctcctaccatagcaccttcctgctggctgaccgcactgaggcgtgggtgctggagacagctgggaggctctgggctgcacagaggatccaggagggggcccgcaacatctccaaccagctgagcattggcacggacatctcggcccaacacccggagctgcggactcatgcccaggccaagggctggtgggatgggcagggtgcctttgactttgctcagatcttctccctgacccagcagcctgtgcgcatggaggctgccaaggcccgcttccaggcagggcgggagctgctgcggcaacggcaagggggcatcacggcagaggtgatgatgggcatcctcagagacaaggagagtggtatctgtatggactcgggaggctttcgcaccacggccagcatggtgtctgtcctgccccaggatcccacgcagccctgcgtgcactttcttaccgccacgccagacccatccaggtctgtgttcaaacctttcatcttcggggtgggggtggcccaggccccccaggtgctgtcccccacttttggagcacaagaccctgttcggaccctgccccgattccagactcaggtagagatcgggggcagcagctccagcagaaacagcaggatctggagcaggaaggcctcgaggccacacaggggctgctggccggcgagtgggccccacccctctgggagctgggcagcctcttccaggccttcgtgaagagggagagccaggcttatgcgtaagcttcatagcttctgctggcctggggtggacccaggacccctggggcctgggtgccctgagtggtggtaaagtggagcaatcccttcacgctccttggccatgttctgagcggccagcttggcctttgccttaataaatgtgctttattttcaaaaaaaaaaaatt

SEQ ID NO: 449588 - DNA, 951 bp, Homo sapiens
agcgggtctggttcaggggctagaaaagagcgtcgatgccggcggcagtgatgagtcctaggaggcgctggctctttggcggctcggaggagcggctgctgctgctgctgctgctgctggtggcccctttgcagatgtattgctgtccttgaatattagcccatttgaaaacgcctgggaagttcagccatcagtatgtccaagtacaaacttattatgttaagacatggagagggtgcttggaataaggagaaccgtttttgtagctgggtggatcagaaactcaacagcgaaggaatggaggaagctcggaactgtgggaagcaactcaaagcgttaaactttgagtttgatcttgtattcacatctgtccttaatcggtccattcacacagcctggctgatcctggaagagctaggccaggaatgggtgcctgtggaaagctcctggcgtctaaatgagcgtcactatggggccttgatcggtctcaacagggagcagatggctttgaatcatggtgaagaacaagtgaggctctggagaagaagctacaatgtaaccccgcctcccattgaggagtctcatccttactaccaagaaatctacaacgaccggaggtataaagtatgcgatgtgcccttggatcaactgccacggtcggaaagcttaaaggatgttctggagagactccttccctattggaatgaaaggattgctcccgaagtattacgtggcaaaaccattctgatatctgctcatggaaatagcagtagggcactcctaaaacacctggaaggtaccagctttatataccacttattagaggttgccaagtgtgatatctaggccttaatctagaaattaagctaatgaggccctatttacacaatagactcctctatccccctttgtcacttcagatttaagaattgtcttgttctataaatcaga

SEQ ID NO: 449589 - DNA, 1791 bp, Homo sapiens
agcgggtctggttcaggggctagaaaagagcgtcgatgccggcggcagtgatgagtcctaggaggcgctggctctttggcggctcggaggagcggctgctgctgctgctgctgctgctggtggcccctttgcagatgtattgctgtccttgaatattagcccatttgaaaacgcctgggaagttcagccatcagtatgtccaagtacaaacttattatgttaagacatggagagggtgcttggaataaggagaaccgtttttgtagctgggtggatcagaaactcaacagcgaaggaatggaggaagctcggaactgtgggaagcaactcaaagcgttaaactttgagtttgatcttgtattcacatctgtccttaatcggtccattcacacagcctggctgatcctggaagagctaggccaggaatgggtgcctgtggaaagctcctggcgtctaaatgagcgtcactatggggccttgatcggtctcaacagggagcagatggctttgaatcatggtgaagaacaagtgaggctctggagaagaagctacaatgtaaccccgcctcccattgaggagtctcatccttactaccaagaaatctacaacgaccggaggtataaagtatgcgatgtgcccttggatcaactgccacggtcggaaagcttaaaggatgttctggagagactccttccctattggaatgaaaggattgctcccgaagtattacgtggcaaaaccattctgatatctgctcatggaaatagcagtagggcactcctaaaacacctggaaggtatctcagatgaagacatcatcaacattactcttcctactggagtccccattcttctggaattggatgaaaacctgcgtgctgttgggcctcatcagttcctgggtgaccaagaggcgatccaagcagccattaagaaagtagaagatcaaggaaaagtgaaacaagctaaaaaatagtctttctcaactgttggctaagaagaaatgcaaaagaagtggcataggagtgtgttatgggtgctgaactctctctctttttccccgattttccagagctaggctgtggagtagagtttgtataggtaactaggtaacttattgtggcccagataaggctttaggatgcctcagtgcttatgtcatagccttatgagttagctttcttgctagccccctagtcggtcaccaaactagtaactagtggggcttaatgaaggtcataagtttctgagatgggagagcaacaagtagagatgaagttaaaggtatttatcattcaagaaatcattattgagtcaccattgacaggcactattctaatcagtagttcactttaatatttaataagattttctgggataacagtaagggatattagataatataccgtatgtatttattactagtcttttcctctaggaaaagggatactttgataattaaggccagaggcccattagttgagaaagtcacagatatatttctccaagaaagccaacaaccaccaccacaatgacagaaatgacaacaaggccctttaacttgtcttctagtttagagacatccttcatttgacatttagtagaattcctctttggccacaagaataagcagcaaataaacaactatggctgttgaggttctcattttggtttgttttaattttttgaactttgggtacctgtaattagtttaaaaataaagttcctgataataaagtgactgaaaatggcatccccaaattgggcgatagctcaggggatccatagagtc

SEQ ID NO: 449590 - DNA, 1715 bp, Homo sapiens
  misc_feature (2)..(2): n is a, c, g, or t
  misc_feature (88)..(88): n is a, c, g, or t
ancatagaacagttgacaaaaagcggcggtaccgtcggaattcccggatcgaggagcgcgcgcgcgctgcgcgcggtggcccctttgngatgtattgctgtccttgaatattagcccatttgaaaacgcctgggaagttcagccatcagtatgtccaagtacaaacttattatgttaagacatggagagggtgcttggaataaggagaaccgtttttgtagctgggtggatcagaaactcaacagcgaaggaatggaggaagctcggaactgtgggaagcaactcaaagcgttaaactttgagtttgatcttgtattcacatctgtccttaatcggtccattcacacagcctggctgatcctggaagagctaggccaggaatgggtgcctgtggaaagctcctggcgtctaaatgagcgtcactatggggccttgatcggtctcaacagggagcagatggctttgaatcatggtgaagaacaagtgaggctctggagaagaagctacaatgtaaccccgcctcccattgaggagtctcatccttactaccaagaaatctacaacgaccggaggtataaagtatgcgatgtgcccttggatcaactgccacggtcggaaagcttaaaggatgttctggagagactccttccctattggaatgaaaggattgctcccgaagtattacgtggcaaaaccattctgatatctgctcatggaaatagcagtagggcactcctaaaacacctggaaggtatctcagatgaagacatcatcaacattactcttcctactggagtccccattcttctggaattggatgaaaacctgcgtgctgttgggcctcatcagttcctgggtgaccaagaggcgatccaagcagccattaagaaagtagaagatcaaggaaaagtgaaacaagctaaaaaatagtctttctcaactgttggctaagaagaaatgcaaaagaagtggcataggagtgtgttatgggtgctgaactctctctctttttccccgattttccagagctaggctgtggagtagagtttgtataggtaactaggtaacttattgtggcccagataaggctttaggatgcctcagtgcttatgtcatagccttatgagttagctttcttgctagccccctagtcggtcaccaaactagtaactagtggggcttaatgaaggtcataagtttctgagatgggagagcaacaagtagagatgaagttaaaggtatttatcattcaagaaatcattattgagtcaccattgacaggcactattctaatcagtagttcactttaatatttaataagattttctgggataacagtaagggatattagataatataccgtatgtatttattactagtcttttcctctaggaaaagggatactttgataattaaggccagaggcccattagttgagaaagtcacagatatatttctccaagaaagccaacaaccaccaccacaatgacagaaatgacaacaaggccctttaacttgtcttctagtttagagacatccttcatttgacatttagtagaattcctctttggccacaagaataagcagcaaataaacaactatggctgttgaggttctcattttggtttgttttaattttttgaactttgggtacctgtaattagtttaaaaataaagttcctgataataaagtgactgaaaatggcatccccaaa

SEQ ID NO: 449591 - DNA, 1849 bp, Homo sapiens
agcgggtctggttcaggggctagaaaagagcgtcgatgccggcggcagtgatgagtcctaggaggcgctggctctttggcggctcggaggagcggctgctgctgctgctgctgctgctggtggcccctttgcagatgtattgctgtccttgaatattagcccatttgaaaacgcctgggaagttcagccatcagtatgtccaagtacaaacttattatgttaagacatggagagggtgcttggaataaggagaaccgtttttgtagctgggtggatcagaaactcaacagcgaaggaatggaggaagctcggaactgtgggaagcaactcaaagcgttaaactttgagtttgatcttgtattcacatctgtccttaatcggtccattcacacagcctggctgatcctggaagagctaggccaggaatgggtgcctgtggaaagctcctggcgtctaaatgagcgtcactatggggccttgatcggtctcaacagggagcagatggctttgaatcatggtgaagaacaagtgaggctctggagaagaagctacaatgtaaccccgcctcccattgaggagtctcatccttactaccaagaaatctacaacgaccggaggtataaagtatgcgatgtgcccttggatcaactgccacggtcggaaagcttaaaggatgttctggagagactccttccctattggaatgaaaggattgctcccgaagtattacgtggcaaaaccattctgatatctgctcatggaaatagcagtagggcactcctaaaacacctggaaggtatctcagatgaagacatcatcaacattactcttcctactggagtccccattcttctggaattggatgaaaacctgcgtgctgttgggcctcatcagttcctgggtgaccaagaggcgatccaagcagccattaagaaagtagaagatcaaggaaaagtgaaacaagctaaaaaatagtctttctcaactgttggctaagaagaaatgcaaaagaagtggcataggagtgtgttatgggtgctgaactctctctctttttccccgattttccagagctaggctgtggagtagagtttgtataggtaactaggtaacttattgtggcccagataaggctttaggatgcctcagtgcttatgtcatagccttatgagttagctttcttgctagccccctagtcggtcaccaaactagtaactagtggggcttaatgaaggtcataagtttctgagatgggagagcaacaagtagagatgaagttaaaggtatttatcattcaagaaatcattattgagtcaccattgacaggcactattctaatcagtagttcactttaatatttaataagattttctgggataacagtaagggatattagataatataccgtatgtatttattactagtcttttcctctaggaaaagggatactttgataattaaggccagaggcccattagttgagaaagtcacagatatatttctccaagaaagccaacaaccaccaccacaatgacagaaatgacaacaaggccctttaacttgtcttctagtttagagacatccttcatttgacatttagtagaattcctctttggccacaagaataagcagcaaataaacaactatggctgttgaggttctcattggttgtttatttttgactggtacgtattgttaaataagtcgatataagggtgaatggaaaaaaaaggggggctaaagtaccgaggcgttgggcgtttgaaggcgaggggataagaggggggggtaagggggagggcggttgggcctggggggagcccaacgaaattggtgtcgggttataaaa

SEQ ID NO: 449592 - DNA, 1117 bp, Homo sapiens
gcttccaggaattatagctggaatccctcagtacctgcatgtttcaggcacacagttaaatgggattaaagtgcagttatataattaaacagaacttcctcctgagttgtgttttaacacctggtctcttcctgtcctgatcaacaggtatctgtatctcagatgaagacatcatcaacattactcttcctactggagtccccattcttctggaattggatgaaaacctgcgtgctgttgggcctcatcagttcctgggtgaccaagaggcgatccaagcagccattaagaaagtagaagatcaaggaaaagtgaaacaagctaaaaaatagtctttctcaactgttggctaagaagaaatgcaaaagaagtggcataggagtgtgttatgggtgctgaactctctctctttttccccgattttccagagctaggctgtggagtagagtttgtataggtaactaggtaacttattgtggcccagataaggctttaggatgcctcagtgcttatgtcatagccttatgagttagctttcttgctagccccctagtcggtcaccaaactagtaactagtggggcttaatgaaggtcataagtttctgagatgggagagcaacaagtagagatgaagttaaaggtatttatcattcaagaaatcattattgagtcaccattgacaggcactattctaatcagtagttcactttaatatttaataagattttctgggataacagtaagggatattagataatataccgtatgtatttattactagtcttttcctctaggaaaagggatactttgataattaaggccagaggcccattagttgagaaagtcacagatatatttctccaagaaagccaacaaccaccaccacaatgacagaaatgacaacaaggccctttaacttgtcttctagtttagagacatccttcatttgacatttagtagaattcctctttggccacaagaataagcagcaaataaacaactatggctgttgaggttctcattttggtttgttttaattttttgaactttgggtacctgtaattagtttaaaaataaagttcctgataataaagtgactgaaaatggcatccccaaa

SEQ ID NO: 449593 - DNA, 1026 bp, Homo sapiens
aactacccaacacccgcatccagtgttcaccccaccgcgcccgccatccccggtctatataggtatctcagatgaagacatcatcaacattactcttcctactggagtccccattcttctggaattggatgaaaacctgcgtgctgttgggcctcatcagttcctgggtgaccaagaggcgatccaagcagccattaagaaagtagaagatcaaggaaaagtgaaacaagctaaaaaatagtctttctcaactgttggctaagaagaaatgcaaaagaagtggcataggagtgtgttatgggtgctgaactctctctctttttccccgattttccagagctaggctgtggagtagagtttgtataggtaactaggtaacttattgtggcccagataaggctttaggatgcctcagtgcttatgtcatagccttatgagttagctttcttgctagccccctagtcggtcaccaaactagtaactagtggggcttaatgaaggtcataagtttctgagatgggagagcaacaagtagagatgaagttaaaggtatttatcattcaagaaatcattattgagtcaccattgacaggcactattctaatcagtagttcactttaatatttaataagattttctgggataacagtaagggatattagataatataccgtatgtatttattactagtcttttcctctaggaaaagggatactttgataattaaggccagaggcccattagttgagaaagtcacagatatatttctccaagaaagccaacaaccaccaccacaatgacagaaatgacaacaaggccctttaacttgtcttctagtttagagacatccttcatttgacatttagtagaattcctctttggccacaagaataagcagcaaataaacaactatggctgttgaggttctcattttggtttgttttaattttttgaactttgggtacctgtaattagtttaaaaataaagttcctgataataaagtgactgaaaatggcatccccaaa

SEQ ID NO: 449594 - DNA, 1380 bp, Homo sapiens
agcgggtctggttcaggggctagaaaagagcgtcgatgccggcggcagtgatgagtcctaggaggcgctggctctttggcggctcggaggagcggctgctgctgctgctgctgctgctggtggcccctttgcagaaaagttctaagaacagtgctgttggctcagtgagatgaggttatcggaaaactttctgtttacacaagagttgcctccttcaaagaagcatgcatggtccttgcaggtcactgtgcccatcactctgcatagtccagctgcactctgcttcacacagctgcctgcccattgcaggcatttgagtttgcaatccatgccttaaactttaaatcacactggctacagcgttgtgtgtttcttggtaaacactgggtaaatcagctcctgtggatgttgactgaagtttctatgtttgcaagctaatcctcagcagtttctttatgtattgctgtccttgaatattagcccatttgaaaacgcctgggaagttcagccatcagtatgtccaagtacaaacttattatgttaagacatggagagggtgcttggaataaggagaaccgtttttgtagctgggtggatcagaaactcaacagcgaaggaatggaggaagctcggaactgtgggaagcaactcaaagcgttaaactttgagtttgatcttgtattcacatctgtccttaatcggtccattcacacagcctggctgatcctggaagagctaggccaggaatgggtgcctgtggaaagctcctggcgtctaaatgagcgtcactatggggccttgatcggtctcaacagggagcagatggctttgaatcatggtgaagaacaagtgaggctctggagaagaagctacaatgtaaccccgcctcccattgaggagtctcatccttactaccaagaaatcattattgagtcaccattgacaggcactattctaatcagtagttcactttaatatttaataagattttctgggataacagtaagggatattagataatataccgtatgtatttattactagtcttttcctctaggaaaagggatactttgataattaaggccagaggcccattagttgagaaagtcacagatatatttctccaagaaagccaacaaccaccaccacaatgacagaaatgacaacaaggccctttaacttgtcttctagtttagagacatccttcatttgacatttagtagaattcctctttggccacaagaataagcagcaaataaacaactatggctgttgaggttctcattttggtttgttttaattttttgaactttgggtacctgtaattagtttaaaaataaagttcctgataataaagtgactgaaaatggcatccccaaa

SEQ ID NO: 449595 - DNA, 574 bp, Homo sapiens
cacgttttcattttttttttaattggaagatctagaaacctcagttgctcagtatcacagggcatgggctggagctaagtagtaggtactcctttgattttttacatgaatttttaggaggttttgaaatgattgttttagcttttttaaaaaagacatttatttactcaaagtttctctgtggtctgactctaagtcttgcattcatcctagtcttcgatgtcagcaatcccatcttctttttgttttccagaaaagttctaagaacagtgctgttggctcagtgagatgaggttatcggaaaactttctgtttacacaagagttgcctccttcaaagaagcatgcatggtccttgcaggtcactgtgcccatcactctgcatagtccagctgcactctgcttcacacagctgcctgcccattgcaggcatttgagtttgcaatccatgccttaaactttaaatcacactggctacagcgttgtgtgtttcttggtaaacactgggtaaatcagctcctgtggatgttgactgaagtttctatgtttgcaagctaatcctcagcagtttcttt

SEQ ID NO: 449596 - DNA, 1760 bp, Homo sapiens
agcgggtctggttcaggggctagaaaagagcgtcgatgccggcggcagtgatgagtcctaggaggcgctggctctttggcggctcggaggagcggctgctgctgctgctgctgctgctggtggcccctttgcagatgtattgctgtccttgaatattagcccatttgaaaacgcctgggaagttcagccatcagtatgtccaagtacaaacttattatgttaagacatggagagggtgcttggaataaggagaaccgtttttgtagctgggtggatcagaaactcaacagcgaaggaatggaggaagctcggaactgtgggaagcaactcaaagcgttaaactttgagtttgatcttgtattcacatctgtccttaatcggtccattcacacagcctggctgatcctggaagagctaggccaggaatgggtgcctgtggaaagctcctggcgtctaaatgagcgtcactatggggccttgatcggtctcaacagggagcagatggctttgaatcatggtgaagaacaagtgaggctctggagaagaagctacaatgtaaccccgcctcccattgaggagtctcatccttactaccaagaaatctacaacgaccggaggtataaagtatgcgatgtgcccttggatcaactgccacggtcggaaagcttaaaggatgttctggagagactccttccctattggaatgaaaggattgctcccgaagtattacgtggcaaaaccattctgatatctgctcatggaaatagcagtagggcactcctaaaacacctggaaggtatctcagatgaagacatcatcaacattactcttcctactggagtccccattcttctggaattggatgaaaacctgcgtgctgttgggcctcatcagttcctgggtgaccaagaggcgatccaagcagccattaagaaagtagaagatcaaggaaaagtgaaacaagctaaaaaatagtctttctcaactgttggctaagaagaaatgcaaaagaagtggcataggagtgtgttatgggtgctgaactctctctctttttccccgattttccagagctaggctgtggagtagagtttgtataggtaactaggtaacttattgtggcccagataaggctttaggatgcctcagtgcttatgtcatagccttatgagttagctttcttgctagccccctagtcggtcaccaaactagtaactagtggggcttaatgaaggtcataagtttctgagatgggagagcaacaagtagagatgaagttaaaggtatttatcattcaagaaatcattattgagtcaccattgacaggcactattctaatcagtagttcactttaatatttaataagattttctgggataacagtaagggatattagataatataccgtatgtatttattactagtcttttcctctaggaaaagggatactttgataattaaggccagaggcccattagttgagaaagtcacagatatatttctccaagaaagccaacaaccaccaccacaatgacagaaatgacaacaaggccctttaacttgtcttctagtttagagacatccttcatttgacatttagtagaattcctctttggccacaagaataagcagcaaataaacaactatggctgttgaggttctcattttggtttgttttaattttttgaactttgggtacctgtaattagtttaaaaataaagttcctgataataaagtgactgaaaatggcatccccaaa

SEQ ID NO: 449597 - DNA, 1899 bp, Homo sapiens
  misc_feature (1775)..(1775): n is a, c, g, or t
  misc_feature (1782)..(1782): n is a, c, g, or t
  misc_feature (1786)..(1787): n is a, c, g, or t
  misc_feature (1812)..(1812): n is a, c, g, or t
  misc_feature (1870)..(1870): n is a, c, g, or t
  misc_feature (1888)..(1888): n is a, c, g, or t
agcgggtctggttcaggggctagaaaagagcgtcgatgccggcggcagtgatgagtcctaggaggcgctggctctttggcggctcggaggagcggctgctgctgctgctgctgctgctggtggcccctttgcagatgtattgctgtccttgaatattagcccatttgaaaacgcctgggaagttcagccatcagtatgtccaagtacaaacttattatgttaagacatggagagggtgcttggaataaggagaaccgtttttgtagctgggtggatcagaaactcaacagcgaaggaatggaggaagctcggaactgtgggaagcaactcaaagcgttaaactttgagtttgatcttgtattcacatctgtccttaatcggtccattcacacagcctggctgatcctggaagagctaggccaggaatgggtgcctgtggaaagctcctggcgtctaaatgagcgtcactatggggccttgatcggtctcaacagggagcagatggctttgaatcatggtgaagaacaagtgaggctctggagaagaagctacaatgtaaccccgcctcccattgaggagtctcatccttactaccaagaaatctacaacgaccggaggtataaagtatgcgatgtgcccttggatcaactgccacggtcggaaagcttaaaggatgttctggagagactccttccctattggaatgaaaggattgctcccgaagtattacgtggcaaaaccattctgatatctgctcatggaaatagcagtagggcactcctaaaacacctggaaggtatctcagatgaagacatcatcaacattactcttcctactggagtccccattcttctggaattggatgaaaacctgcgtgctgttgggcctcatcagttcctgggtgaccaagaggcgatccaagcagccattaagaaagtagaagatcaaggaaaagtgaaacaagctaaaaaatagtctttctcaactgttggctaagaagaaatgcaaaagaagtggcataggagtgtgttatgggtgctgaactctctctctttttccccgattttccagagctaggctgtggagtagagtttgtataggtaactaggtaacttattgtggcccagataaggctttaggatgcctcagtgcttatgtcatagccttatgagttagctttcttgctagccccctagtcggtcaccaaactagtaactagtggggcttaatgaaggtcataagtttctgagatgggagagcaacaagtagagatgaagttaaaggtatttatcattcaagaaatcattattgagtcaccattgacaggcactattctaatcagtagttcactttaatatttaataagattttctgggataacagtaagggatattagataatataccgtatgtatttattactagtcttttcctctaggaaaagggatactttgataattaaggccagaggcccattagttgagaaagtcacagatatatttctccaagaaagccaacaaccaccaccacaatgacagaaatgacaacaaggccctttaacttgtcttctagtttagagacatccttcatttgacatttagtagaattcctctttggccacaagaataagcagcaaataaacaactatggctgttgaggttctcattttggtttgttttaattttttgaactttgggtacctgtaattagtttaaaaataaagttcctgataataaagtgactgaaaatggcatccccaaaaaaaaaaaaaaaaanaaaaaanaaannaaaaattttttatttataaaatttntttttttaatattattttttattttttatttttaatattttttttttataatttattntttttattaatttttttnttaaatctcgg

SEQ ID NO: 449598 - DNA, 2081 bp, Homo sapiens
agcgggtctggttcaggggctagaaaagagcgtcgatgccggcggcagtgatgagtcctaggaggcgctggctctttggcggctcggaggagcggctgctgctgctgctgctgctgctggtggcccctttgcagaaaagttctaagaacagtgctgttggctcagtgagatgaggttatcggaaaactttctgtttacacaagagttgcctccttcaaagaagcatgcatggtccttgcaggtcactgtgcccatcactctgcatagtccagctgcactctgcttcacacagctgcctgcccattgcaggcatttgagtttgcaatccatgccttaaactttaaatcacactggctacagcgttgtgtgtttcttggtaaacactgggtaaatcagctcctgtggatgttgactgaagtttctatgtttgcaagctaatcctcagcagtttctttatgtattgctgtccttgaatattagcccatttgaaaacgcctgggaagttcagccatcagtatgtccaagtacaaacttattatgttaagacatggagagggtgcttggaataaggagaaccgtttttgtagctgggtggatcagaaactcaacagcgaaggaatggaggaagctcggaactgtgggaagcaactcaaagcgttaaactttgagtttgatcttgtattcacatctgtccttaatcggtccattcacacagcctggctgatcctggaagagctaggccaggaatgggtgcctgtggaaagctcctggcgtctaaatgagcgtcactatggggccttgatcggtctcaacagggagcagatggctttgaatcatggtgaagaacaagtgaggctctggagaagaagctacaatgtaaccccgcctcccattgaggagtctcatccttactaccaagaaatctacaacgaccggaggtataaagtatgcgatgtgcccttggatcaactgccacggtcggaaagcttaaaggatgttctggagagactccttccctattggaatgaaaggattgctcccgaagtattacgtggcaaaaccattctgatatctgctcatggaaatagcagtagggcactcctaaaacacctggaaggtatctcagatgaagacatcatcaacattactcttcctactggagtccccattcttctggaattggatgaaaacctgcgtgctgttgggcctcatcagttcctgggtgaccaagaggcgatccaagcagccattaagaaagtagaagatcaaggaaaagtgaaacaagctaaaaaatagtctttctcaactgttggctaagaagaaatgcaaaagaagtggcataggagtgtgttatgggtgctgaactctctctctttttccccgattttccagagctaggctgtggagtagagtttgtataggtaactaggtaacttattgtggcccagataaggctttaggatgcctcagtgcttatgtcatagccttatgagttagctttcttgctagccccctagtcggtcaccaaactagtaactagtggggcttaatgaaggtcataagtttctgagatgggagagcaacaagtagagatgaagttaaaggtatttatcattcaagaaatcattattgagtcaccattgacaggcactattctaatcagtagttcactttaatatttaataagattttctgggataacagtaagggatattagataatataccgtatgtatttattactagtcttttcctctaggaaaagggatactttgataattaaggccagaggcccattagttgagaaagtcacagatatatttctccaagaaagccaacaaccaccaccacaatgacagaaatgacaacaaggccctttaacttgtcttctagtttagagacatccttcatttgacatttagtagaattcctctttggccacaagaataagcagcaaataaacaactatggctgttgaggttctcattttggtttgttttaattttttgaactttgggtacctgtaattagtttaaaaataaagttcctgataataaagtgactgaaaatggcatccccaaa

SEQ ID NO: 449599 - DNA, 1772 bp, Homo sapiens
  misc_feature (1178)..(1178): n is a, c, g, or t
  misc_feature (1184)..(1184): n is a, c, g, or t
  misc_feature (1229)..(1229): n is a, c, g, or t
  misc_feature (1240)..(1240): n is a, c, g, or t
agcgggtctggttcaggggctagaaaagagcgtcgatgccggcggcagtgatgagtcctaggaggcgctggctctttggcggctcggaggagcggctgctgctgctgctgctgctgctggtggcccctttgcagatgtattgctgtccttgaatattagcccatttgaaaacgcctgggaagttcagccatcagtatgtccaagtacaaacttattatgttaagacatggagagggtgcttggaataaggagaaccgtttttgtagctgggtggatcagaaactcaacagcgaaggaatggaggaagctcggaactgtgggaagcaactcaaagcgttaaactttgagtttgatcttgtattcacatctgtccttaatcggtccattcacacagcctggctgatcctggaagagctaggccaggaatgggtgcctgtggaaagctcctggcgtctaaatgagcgtcactatggggccttgatcggtctcaacagggagcagatggctttgaatcatggtgaagaacaagtgaggctctggagaagaagctacaatgtaaccccgcctcccattgaggagtctcatccttactaccaagaaatctacaacgaccggaggtataaagtatgcgatgtgcccttggatcaactgccacggtcggaaagcttaaaggatgttctggagagactccttccctattggaatgaaaggattgctcccgaagtattacgtggcaaaaccattctgatatctgctcatggaaatagcagtagggcactcctaaaacacctggaaggtatctcagatgaagacatcatcaacattactcttcctactggagtccccattcttctggaattggatgaaaacctgcgtgctgttgggcctcatcagttcctgggtgaccaagaggcgatccaagcagccattaagaaagtagaagatcaaggaaaagtgaaacaagctaaaaaatagtctttctcaactgttggctaagaagaaatgcaaaagaagtggcataggagtgtgttatgggtgctgaactctctctctttttccccgattttccagagctaggctgtggagtagagtttgtataggtaactaggtaacttattgtggcccagataaggctttaggatgcctcagtgcttatgtcatagccttatgagttagcnaaaaanaataaacaaaaaaaaaaaaaaaaaaaaaaaagataaacaaagaanaaaaaaaaaanaaagaaaaataagatttctgagatgggagagcaacaagtagagatgaagttaaaggtatttatcattcaagaaatcattattgagtcaccattgacaggcactattctaatcagtagttcactttaatatttaataagattttctgggataacagtaagggatattagataatataccgtatgtatttattactagtcttttcctctaggaaaagggatactttgataattaaggccagaggcccattagttgagaaagtcacagatatatttctccaagaaagccaacaaccaccaccacaatgacagaaatgacaacaaggccctttaacttgtcttctagtttagagacatccttcatttgacatttagtagaattcctctttggccacaagaataagcagcaaataaacaactatggctgttgaggttctcattttggtttgttttaattttttgaactttgggtacctgtaattagtttaaaaataaagttcctgataataaagtgactgaaaatggcatccccaaa

SEQ ID NO: 449600 - DNA, 1034 bp, Homo sapiens
ctgaactgaagtaaacatataaagtatgcgaacaacaccccccgcttcggtgtctcagtagagatttatcgtatctcagatgaagacatcatcaacattactcttcctactggagtccccattcttctggaattggatgaaaacctgcgtgctgttgggcctcatcagttcctgggtgaccaagaggcgatccaagcagccattaagaaagtagaagatcaaggaaaagtgaaacaagctaaaaaatagtctttctcaactgttggctaagaagaaatgcaaaagaagtggcataggagtgtgttatgggtgctgaactctctctctttttccccgattttccagagctaggctgtggagtagagtttgtataggtaactaggtaacttattgtggcccagataaggctttaggatgcctcagtgcttatgtcatagccttatgagttagctttcttgctagccccctagtcggtcaccaaactagtaactagtggggcttaatgaaggtcataagtttctgagatgggagagcaacaagtagagatgaagttaaaggtatttatcattcaagaaatcattattgagtcaccattgacaggcactattctaatcagtagttcactttaatatttaataagattttctgggataacagtaagggatattagataatataccgtatgtatttattactagtcttttcctctaggaaaagggatactttgataattaaggccagaggcccattagttgagaaagtcacagatatatttctccaagaaagccaacaaccaccaccacaatgacagaaatgacaacaaggccctttaacttgtcttctagtttagagacatccttcatttgacatttagtagaattcctctttggccacaagaataagcagcaaataaacaactatggctgttgaggttctcattttggtttgttttaattttttgaactttgggtacctgtaattagtttaaaaataaagttcctgataataaagtgactgaaaatggcatccccaaa

SEQ ID NO: 449601 - DNA, 177 bp, Homo sapiens
aatctgatcatggagttaattttactgtattgcaagattttaagatgagctggtgttctcttgttatgcccatatgccatcattccctcccccctcacccagaatgtgaatagtattcccattgtgggaactgctgattgacatcaaggcactctgttgtcatggctctagtttaaa

SEQ ID NO: 449602 - DNA, 902 bp, Homo sapiens
gcaacattcactgtctttccctaaaggggtgttaatcaccattttttattccaagtaaggaaaataaagccaaggttaaaaattaaaattgttggtctctgtattaggcctgagttctgttatgtgataggcaagaatctcgcccaggtgaatggctggttagaaagttctttggctccttaccagactcttgggccagtgggcattctgtgcctgtggtgaccgtggttagagcaatgctgaacaatgtggtgagaccaagagacaagcagatggaactgctggagaacaaggccatccatgacctggggaaagcgcatggctctctcaagccatgaccacattggagaaatggtttttattgtcaaccttaacacccatcaccaaatcggtaatttcagggtctaaaaaaagtcagcatgttttaactttgttgttttactatcctcaggcatccattccaatcaagaaatgatggtgctctgcatcagtggttcagagcctggttatacatatagatcactcagggagctttggaaaaataaagatttgtcagccctatctcaaacttgaatcaaatttctggggtgtgggcacaataatctgtaattttctttgtttatacttcccctgatgccactggttccgatgccactggctggggggcctgctttgaaatgcttgtctgcagagtcacagcagccatgaaaaccttatgaccgtgcaaatgagctctgctctaaaattgttgacattcatgtctctgagttacaaaagtgctaattcactacatgtaattgtgtaagtaaacattgtgcctttactacttctttatgtaatagaagttatatacctaagcttatataatacatggggaggattaaataaaggaataaagatga

SEQ ID NO: 449603 - DNA, 1522 bp, Homo sapiens
aggtcccgcccctgtgggcggggcgaggcagcgtcgccgcgaggccacccggaagaccaagccgggtaggcgctgtctccgtcgcctccaacccccccggtccgaccagggaaggtgggatgctctgatggccgggcctgcggcgctgagcgcggcggcggcggctgctctggcggccgccctgctcctgctgcgtcgtgaggacccggggccgggggctggccccagcatggccgaaacagaagccctgtcgaagcttcgggaagacttcaggatgcagaataaatccgtctttattttgggcgccagcggagaaaccggcagagtgctcttaaaggaaatcctggagcagggcctgttttccaaagtcacgctcattggccggaggaagctcaccttcgacgaggaagcttataaaaatgtgaatcaagaagtggtggactttgaaaagttggatgactacgcctctgcctttcaaggtcatgatgttggattctgttgcctgggtaccaccagagggaaagctggggcggagggatttgttcgtgttgaccgagattatgtgctgaagtctgcagagctggcaaaagctggagggtgcaaacatttcaacttgctatcctctaaaggagctgataaatcaagcaattttttatatctacaagttaagggagaagtagaagccaaggttgaagaattaaaatttgatcgttactctgtatttaggcctggagttctgttatgtgataggcaagaatctcgcccaggtgaatggctggttagaaagttctttggctccttaccagactcttgggccagtgggcattctgtgcctgtggtgaccgtggttagagcaatgctgaacaatgtggtgagaccaagagacaagcagatggaactgctggagaacaaggccatccatgacctggggaaagcgcatggctctctcaagccatgaccacattggagaaatggtttttattgtcaaccttaacacccatcaccaaatcggtaatttcagggtctaaaaaaagtcagcatgttttaactttgttgttttactatcctcaggcatccattccaatcaagaaatgatggtgctctgcatcagtggttcagagcctggttatacatatagatcactcagggagctttggaaaaataaagatttgtcagccctatctcaaacttgaatcaaatttctggggtgtgggcacaataatctgtaattttctttgtttatacttcccctgatgccactggttccgatgccactggctggggggcctgctttgaaatgcttgtctgcagagtcacagcagccatgaaaaccttatgaccgtgcaaatgagctctgctctaaaattgttgacattcatgtctctgagttacaaaagtgctaattcactacatgtaattgtgtaagtaaacattgtgcctttactacttctttatgtaatagaagttatatacctaagcttatataatacatggggaggattaaataaaggaataaagatga

SEQ ID NO: 449604 - DNA, 1846 bp, Homo sapiens
aggtcccgcccctgtgggcggggcgaggcagcgtcgccgcgaggccacccggaagaccaagccgggtaggcgctgtctccgtcgcctccaacccccccggtccgaccagggaaggtgggatgctctgatggccgggcctgcggcgctgagcgcggcggcggcggctgctctggcggccgccctgctcctgctgcgtcgtgaggacccggggccgggggctggccccaggtaacccctccgcgtatgggaccgagctgggccaggtctcctggccgggccggggataccgtggggtatgcccagtgatgccagcagcttgtggcacctgggcgcaccctccagctcgggccccttccgatgggtctgctggctcaggtgcgggcgatggccggggagccgcgccccgcacgtgactcagcactttccccagagcccggactgcggagaacaatatcctcctccctaacagataaacagcccttgttcctcgggataaggactggcagtcccctgacaccctaagaccggcatctgtcgatgttatttccccagcatggccgaaacagaagccctgtcgaagcttcgggaagacttcaggatgcagaataaatccgtctttattttgggcgccagcggagaaaccggcagagtgctcttaaaggaaatcctggagcagggcctgttttccaaagtcacgctcattggccggaggaagctcaccttcgacgaggaagcttataaaaatgtgaatcaagaagtggtggactttgaaaagttggatgactacgcctctgcctttcaaggtcatgatgttggattctgttgcctgggtaccaccagagggaaagctggggcggagggatttgttcgtgttgaccgagattatgtgctgaagtctgcagagctggcaaaagctggagggtgcaaacatttcaacttgctatcctctaaaggagctgataaatcaagcaattttttatatctacaagttaagggagaagtagaagccaaggttgaagaattaaaatttgatcgttactctgtatttaggcctggagttctgttatgtgataggcaagaatctcgcccaggtgaatggctggttagaaagttctttggctccttaccagactcttgggccagtgggcattctgtgcctgtggtgaccgtggttagagcaatgctgaacaatgtggtgagaccaagagacaagcagatggaactgctggagaacaaggccatccatgacctggggaaagcgcatggctctctcaagccatgaccacattggagaaatggtttttattgtcaaccttaacacccatcaccaaatcggtaatttcagggtctaaaaaaagtcagcatgttttaactttgttgttttactatcctcaggcatccattccaatcaagaaatgatggtgctctgcatcagtggttcagagcctggttatacatatagatcactcagggagctttggaaaaataaagatttgtcagccctatctcaaacttgaatcaaatttctggggtgtgggcacaataatctgtaattttctttgtttatacttcccctgatgccactggttccgatgccactggctggggggcctgctttgaaatgcttgtctgcagagtcacagcagccatgaaaaccttatgaccgtgcaaatgagctctgctctaaaattgttgacattcatgtctctgagttacaaaagtgctaattcactacatgtaattgtgtaagtaaacattgtgcctttactacttctttatgtaatagaagttatatacctaagcttatataatacatggggaggattaaataaaggaataaagatga

SEQ ID NO: 449605 - DNA, 1145 bp, Homo sapiens
ggggggggggctagctgcaacgactctcttaatctccaccgctacacaatcaagaagtggtggactttgaaaagttggatgactacgcctctgcctttcaaggtcatgatgttggattctgttgcctgggtaccaccagagggaaagctggggcggagggatttgttcgtgttgaccgagattatgtgctgaagtctgcagagctggcaaaagctggagggtgcaaacatttcaacttgctatcctctaaaggagctgataaatcaagcaattttttatatctacaagttaagggagaagtagaagccaaggttgaagaattaaaatttgatcgttactctgtatttaggcctggagttctgttatgtgataggcaagaatctcgcccaggtgaatggctggttagaaagttctttggctccttaccagactcttgggccagtgggcattctgtgcctgtggtgaccgtggttagagcaatgctgaacaatgtggtgagaccaagagacaagcagatggaactgctggagaacaaggccatccatgacctggggaaagcgcatggctctctcaagccatgaccacattggagaaatggtttttattgtcaaccttaacacccatcaccaaatcggtaatttcagggtctaaaaaaagtcagcatgttttaactttgttgttttactatcctcaggcatccattccaatcaagaaatgatggtgctctgcatcagtggttcagagcctggttatacatatagatcactcagggagctttggaaaaataaagatttgtcagccctatctcaaacttgaatcaaatttctggggtgtgggcacaataatctgtaattttctttgtttatacttcccctgatgccactggttccgatgccactggctggggggcctgctttgaaatgcttgtctgcagagtcacagcagccatgaaaaccttatgaccgtgcaaatgagctctgctctaaaattgttgacattcatgtctctgagttacaaaagtgctaattcactacatgtaattgtgtaagtaaacattgtgcctttactacttctttatgtaatagaagttatatacctaagcttatataatacatggggaggattaaataaaggaataaagatga

SEQ ID NO: 449606 - DNA, 1408 bp, Homo sapiens
aggtcccgcccctgtgggcggggcgaggcagcgtcgccgcgaggccacccggaagaccaagccgggtaggcgctgtctccgtcgcctccaacccccccggtccgaccagggaagcatggccgaaacagaagccctgtcgaagcttcgggaagacttcaggatgcagaataaatccgtctttattttgggcgccagcggagaaaccggcagagtgctcttaaaggaaatcctggagcagggcctgttttccaaagtcacgctcattggccggaggaagctcaccttcgacgaggaagcttataaaaatgtgaatcaagaagtggtggactttgaaaagttggatgactacgcctctgcctttcaaggtcatgatgttggattctgttgcctgggtaccaccagagggaaagctggggcggagggatttgttcgtgttgaccgagattatgtgctgaagtctgcagagctggcaaaagctggagggtgcaaacatttcaacttgctatcctctaaaggagctgataaatcaagcaattttttatatctacaagttaagggagaagtagaagccaaggttgaagaattaaaatttgatcgttactctgtatttaggcctggagttctgttatgtgataggcaagaatctcgcccaggtgaatggctggttagaaagttctttggctccttaccagactcttgggccagtgggcattctgtgcctgtggtgaccgtggttagagcaatgctgaacaatgtggtgagaccaagagacaagcagatggaactgctggagaacaaggccatccatgacctggggaaagcgcatggctctctcaagccatgaccacattggagaaatggtttttattgtcaaccttaacacccatcaccaaatcggtaatttcagggtctaaaaaaagtcagcatgttttaactttgttgttttactatcctcaggcatccattccaatcaagaaatgatggtgctctgcatcagtggttcagagcctggttatacatatagatcactcagggagctttggaaaaataaagatttgtcagccctatctcaaacttgaatcaaatttctggggtgtgggcacaataatctgtaattttctttgtttatacttcccctgatgccactggttccgatgccactggctggggggcctgctttgaaatgcttgtctgcagagtcacagcagccatgaaaaccttatgaccgtgcaaatgagctctgctctaaaattgttgacattcatgtctctgagttacaaaagtgctaattcactacatgtaattgtgtaagtaaacattgtgcctttactacttctttatgtaatagaagttatatacctaagcttatataatacatggggaggattaaataaaggaataaagatga

SEQ ID NO: 449607 - DNA, 1187 bp, Homo sapiens
  misc_feature (50)..(50): n is a, c, g, or t
taattgctagagttgcggtacatctgattagtgtaggaaaaagggagggnctagtcgttgactgactctcttaattaccaccgctacagaatcaagaagtggtggactttgaaaagttggatgactacgcctctgcctttcaaggtcatgatgttggattctgttgcctgggtaccaccagagggaaagctggggcggagggatttgttcgtgttgaccgagattatgtgctgaagtctgcagagctggcaaaagctggagggtgcaaacatttcaacttgctatcctctaaaggagctgataaatcaagcaattttttatatctacaagttaagggagaagtagaagccaaggttgaagaattaaaatttgatcgttactctgtatttaggcctggagttctgttatgtgataggcaagaatctcgcccaggtgaatggctggttagaaagttctttggctccttaccagactcttgggccagtgggcattctgtgcctgtggtgaccgtggttagagcaatgctgaacaatgtggtgagaccaagagacaagcagatggaactgctggagaacaaggccatccatgacctggggaaagcgcatggctctctcaagccatgaccacattggagaaatggtttttattgtcaaccttaacacccatcaccaaatcggtaatttcagggtctaaaaaaagtcagcatgttttaactttgttgttttactatcctcaggcatccattccaatcaagaaatgatggtgctctgcatcagtggttcagagcctggttatacatatagatcactcagggagctttggaaaaataaagatttgtcagccctatctcaaacttgaatcaaatttctggggtgtgggcacaataatctgtaattttctttgtttatacttcccctgatgccactggttccgatgccactggctggggggcctgctttgaaatgcttgtctgcagagtcacagcagccatgaaaaccttatgaccgtgcaaatgagctctgctctaaaattgttgacattcatgtctctgagttacaaaagtgctaattcactacatgtaattgtgtaagtaaacattgtgcctttactacttctttatgtaatagaagttatatacctaagcttatataatacatggggaggattaaataaaggaataaagatga

SEQ ID NO: 449608 - DNA, 1177 bp, Homo sapiens
  misc_feature (35)..(35): n is a, c, g, or t
  misc_feature (75)..(76): n is a, c, g, or t
gtacattataagccagacgattagaaaaaaaaagnaaagttttaacggcactgactctcttccttaaccgccgcnncagaatcaagaagtggtggactttgaaaagttggatgactacgcctctgcctttcaaggtcatgatgttggattctgttgcctgggtaccaccagagggaaagctggggcggagggatttgttcgtgttgaccgagattatgtgctgaagtctgcagagctggcaaaagctggagggtgcaaacatttcaacttgctatcctctaaaggagctgataaatcaagcaattttttatatctacaagttaagggagaagtagaagccaaggttgaagaattaaaatttgatcgttactctgtatttaggcctggagttctgttatgtgataggcaagaatctcgcccaggtgaatggctggttagaaagttctttggctccttaccagactcttgggccagtgggcattctgtgcctgtggtgaccgtggttagagcaatgctgaacaatgtggtgagaccaagagacaagcagatggaactgctggagaacaaggccatccatgacctggggaaagcgcatggctctctcaagccatgaccacattggagaaatggtttttattgtcaaccttaacacccatcaccaaatcggtaatttcagggtctaaaaaaagtcagcatgttttaactttgttgttttactatcctcaggcatccattccaatcaagaaatgatggtgctctgcatcagtggttcagagcctggttatacatatagatcactcagggagctttggaaaaataaagatttgtcagccctatctcaaacttgaatcaaatttctggggtgtgggcacaataatctgtaattttctttgtttatacttcccctgatgccactggttccgatgccactggctggggggcctgctttgaaatgcttgtctgcagagtcacagcagccatgaaaaccttatgaccgtgcaaatgagctctgctctaaaattgttgacattcatgtctctgagttacaaaagtgctaattcactacatgtaattgtgtaagtaaacattgtgcctttactacttctttatgtaatagaagttatatacctaagcttatataatacatggggaggattaaataaaggaataaagatga

SEQ ID NO: 449609 - DNA, 1369 bp, Homo sapiens
ggaagcgtggctcatgctcggctagtctgtatgctagtagcggatgcggtgctgtgtgttggtcaggctgttcctgttcgtggaggagctcgtggacggggttggccaatggcgaaaaactgtagtgcaggactcagatgcaataaatcctcttttggggcacgaaaacgaagtgctcttaaaggaaatcctggagcagggcctgttttccaaagtcacgctcattggccggaggaagctcaccttcgacgaggaagcttataaaaatgtgaatcaagaagtggtggactttgaaaagttggatgactacgcctctgcctttcaaggtcatgatgttggattctgttgcctgggtaccaccagagggaaagctggggcggagggatttgttcgtgttgaccgagattatgtgctgaagtctgcagagctggcaaaagctggagggtgcaaacatttcaacttgctatcctctaaaggagctgataaatcaagcaattttttatatctacaagttaagggagaagtagaagccaaggttgaagaattaaaatttgatcgttactctgtatttaggcctggagttctgttatgtgataggcaagaatctcgcccaggtgaatggctggttagaaagttctttggctccttaccagactcttgggccagtgggcattctgtgcctgtggtgaccgtggttagagcaatgctgaacaatgtggtgagaccaagagacaagcagatggaactgctggagaacaaggccatccatgacctggggaaagcgcatggctctctcaagccatgaccacattggagaaatggtttttattgtcaaccttaacacccatcaccaaatcggtaatttcagggtctaaaaaaagtcagcatgttttaactttgttgttttactatcctcaggcatccattccaatcaagaaatgatggtgctctgcatcagtggttcagagcctggttatacatatagatcactcagggagctttggaaaaataaagatttgtcagccctatctcaaacttgaatcaaatttctggggtgtgggcacaataatctgtaattttctttgtttatacttcccctgatgccactggttccgatgccactggctggggggcctgctttgaaatgcttgtctgcagagtcacagcagccatgaaaaccttatgaccgtgcaaatgagctctgctctaaaattgttgacattcatgtctctgagttacaaaagtgctaattcactacatgtaattgtgtaagtaaacattgtgcctttactacttctttatgtaatagaagttatatacctaagcttatataatacatggggaggattaaataaaggaataaagatga

SEQ ID NO: 449610 - DNA, 1890 bp, Homo sapiens
aggtcccgcccctgtgggcggggcgaggcagcgtcgccgcgaggccacccggaagaccaagccgggtaggcgctgtctccgtcgcctccaacccccccggtccgaccagggaaggtgggatgctctgatggccgggcctgcggcgctgagcgcggcggcggcggctgctctggcggccgccctgctcctgctgcgtcgtgaggacccggggccgggggctggccccaggtaacccctccgcgtatgggaccgagctgggccaggtctcctggccgggccggggataccgtggggtatgcccagtgatgccagcagcttgtggcacctgggcgcaccctccagctcgggccccttccgatgggtctgctggctcaggtgcgggcgatggccggggagccgcgccccgcacgtgactcagcactttccccagagcccggactgcggagaacaatatcctcctccctaacagataaacagcccttgttcctcgggataaggactggcagtcccctgacaccctaagaccggcatctgtcgatgttatttccccagcatggccgaaacagaagccctgtcgaagcttcgggaagacttcaggatgcagaataaatccgtctttattttgggcgccagcggagaaaccggcagagtgctcttaaaggaaatcctggagcagggcctgttttccaaagtcacgctcattggccggaggaagctcaccttcgacgaggaagcttataaaaatgtgaatcaagaagtggtggactttgaaaagttggatgactacgcctctgcctttcaaggtcatgatgttggattctgttgcctgggtaccaccagagggaaagctggggcggagggatttgttcgtgttgaccgagattatgtgctgaagtctgcagagctggcaaaagctggagggtgcaaacatttcaacttgctatcctctaaaggagctgataaatcaagcaattttttatatctacaagttaagggagaagtagaagccaaggttgaagaattaaaatttgatcgttactctgtatttaggcctggagttctgttatgtgataggcaagaatctcgcccaggtgaatggctggttagaaagttctttggctccttaccagactcttgggccagtgggcattctgtgcctgtggtgaccgtggttagagcaatgctgaacaatgtggtgagaccaagagacaagcagatggaactgctggagaacaaggccatccatgacctggggaaagcgcatggctctctcaagccatgaccacattggagaaatggtttttattgtcaaccttaacacccatcaccaaatcggtaatttcagggtctaaaaaaagtcagcatgttttaactttgttgttttactatcctcaggcatccattccaatcaagaaatgatggtgctctgcatcagtggttcagagcctggttatacatatagatcactcagggagctttggaaaaataaagatttgtcagccctatctcaaacttgaatcaaatttctggggtgtgggcacaataatctgtaattttctttgtttatacttcccctgatgccactggttccgatgccactggctggggggcctgctttgaaatgcttgtctgcagagtcacagcagccatgaaaaccttatgaccgtgcaaatgagctctgctctaaaattgttgacattcatgtctctgagttacaaaagtgctaattcactacatgtaattgtgtaagtaaacattgtgcctttactacttctttatgtaatagaagttatatacctaagcttatataatacatggggaggattaaataaaggaataaagatgaagatcggccgttctccttctaaatataacaaaatcacacaataa

SEQ ID NO: 449611 - DNA, 2014 bp, Homo sapiens
  misc_feature (2009)..(2010): n is a, c, g, or t
aggtcccgcccctgtgggcggggcgaggcagcgtcgccgcgaggccacccggaagaccaagccgggtaggcgctgtctccgtcgcctccaacccccccggtccgaccagggaaggtgggatgctctgatggccgggcctgcggcgctgagcgcggcggcggcggctgctctggcggccgccctgctcctgctgcgtcgtgaggacccggggccgggggctggccccaggtaacccctccgcgtatgggaccgagctgggccaggtctcctggccgggccggggataccgtggggtatgcccagtgatgccagcagcttgtggcacctgggcgcaccctccagctcgggccccttccgatgggtctgctggctcaggtgcgggcgatggccggggagccgcgccccgcacgtgactcagcactttccccagagcccggactgcggagaacaatatcctcctccctaacagataaacagcccttgttcctcgggataaggactggcagtcccctgacaccctaagaccggcatctgtcgatgttatttccccagcatggccgaaacagaagccctgtcgaagcttcgggaagacttcaggatgcagaataaatccgtctttattttgggcgccagcggagaaaccggcagagtgctcttaaaggaaatcctggagcagggcctgttttccaaagtcacgctcattggccggaggaagctcaccttcgacgaggaagcttataaaaatgtgaatcaagaagtggtggactttgaaaagttggatgactacgcctctgcctttcaaggtcatgatgttggattctgttgcctgggtaccaccagagggaaagctggggcggagggatttgttcgtgttgaccgagattatgtgctgaagtctgcagagctggcaaaagctggagggtgcaaacatttcaacttgctatcctctaaaggagctgataaatcaagcaattttttatatctacaagttaagggagaagtagaagccaaggttgaagaattaaaatttgatcgttactctgtatttaggcctggagttctgttatgtgataggcaagaatctcgcccaggtgaatggctggttagaaagttctttggctccttaccagactcttgggccagtgggcattctgtgcctgtggtgaccgtggttagagcaatgctgaacaatgtggtgagaccaagagacaagcagatggaactgctggagaacaaggccatccatgacctggggaaagcgcatggctctctcaagccatgaccacattggagaaatggtttttattgtcaaccttaacacccatcaccaaatcggtaatttcagggtctaaaaaaagtcagcatgttttaactttgttgttttactatcctcaggcatccattccaatcaagaaatgatggtgctctgcatcagtggttcagagcctggttatacatatagatcactcagggagctttggaaaaataaagatttgtcagccctatctcaaacttgaatcaaatttctggggtgtgggcacaataatctgtaattttctttgtttatacttcccctgatgccactggttccgatgccactggctggggggcctgctttgaaatgcttgtctgcagagtcacagcagccatgaaaaccttatgaccgtgcaaatgagctctgctctaaaattgttgacattcatgtctctgagttacaaaagtgctaattcactacatgtaattgtgtaagtaaacattgtgcctttactacttctttatgtaatagaagttatatacctaagcttatataatacatggggaggattaaataaaggaataaagatgatgaatggacaactcctgggtgcctcttagattgcttgaaaatgcccatgtagtgtgatatgcagcatttcagcctatggggtgatataatagcagctaataggctttattctgcaagcaatcaaataataaatctattctgctaagaggtcaaaaaaaaaagnnaaaa

SEQ ID NO: 449612 - DNA, 1905 bp, Homo sapiens
  misc_feature (1870)..(1870): n is a, c, g, or t
  misc_feature (1874)..(1874): n is a, c, g, or t
  misc_feature (1876)..(1876): n is a, c, g, or t
  misc_feature (1880)..(1880): n is a, c, g, or t
aggtcccgcccctgtgggcggggcgaggcagcgtcgccgcgaggccacccggaagaccaagccgggtaggcgctgtctccgtcgcctccaacccccccggtccgaccagggaaggtgggatgctctgatggccgggcctgcggcgctgagcgcggcggcggcggctgctctggcggccgccctgctcctgctgcgtcgtgaggacccggggccgggggctggccccaggtaacccctccgcgtatgggaccgagctgggccaggtctcctggccgggccggggataccgtggggtatgcccagtgatgccagcagcttgtggcacctgggcgcaccctccagctcgggccccttccgatgggtctgctggctcaggtgcgggcgatggccggggagccgcgccccgcacgtgactcagcactttccccagagcccggactgcggagaacaatatcctcctccctaacagataaacagcccttgttcctcgggataaggactggcagtcccctgacaccctaagaccggcatctgtcgatgttatttccccagcatggccgaaacagaagccctgtcgaagcttcgggaagacttcaggatgcagaataaatccgtctttattttgggcgccagcggagaaaccggcagagtgctcttaaaggaaatcctggagcagggcctgttttccaaagtcacgctcattggccggaggaagctcaccttcgacgaggaagcttataaaaatgtgaatcaagaagtggtggactttgaaaagttggatgactacgcctctgcctttcaaggtcatgatgttggattctgttgcctgggtaccaccagagggaaagctggggcggagggatttgttcgtgttgaccgagattatgtgctgaagtctgcagagctggcaaaagctggagggtgcaaacatttcaacttgctatcctctaaaggagctgataaatcaagcaattttttatatctacaagttaagggagaagtagaagccaaggttgaagaattaaaatttgatcgttactctgtatttaggcctggagttctgttatgtgataggcaagaatctcgcccaggtgaatggctggttagaaagttctttggctccttaccagactcttgggccagtgggcattctgtgcctgtggtgaccgtggttagagcaatgctgaacaatgtggtgagaccaagagacaagcagatggaactgctggagaacaaggccatccatgacctggggaaagcgcatggctctctcaagccatgaccacattggagaaatggtttttattgtcaaccttaacacccatcaccaaatcggtaatttcagggtctaaaaaaagtcagcatgttttaactttgttgttttactatcctcaggcatccattccaatcaagaaatgatggtgctctgcatcagtggttcagagcctggttatacatatagatcactcagggagctttggaaaaataaagatttgtcagccctatctcaaacttgaatcaaatttctggggtgtgggcacaataatctgtaattttctttgtttatacttcccctgatgccactggttccgatgccactggctggggggcctgctttgaaatgcttgtctgcagagtcacagcagccatgaaaaccttatgaccgtgcaaatgagctctgctctaaaattgttgacattcatgtctctgagttacaaaagtgctaattcactacatgtaattgtgtaagtaaacattgtgcctttactacttctttatgtaatagaagttatatacctaagcttatataatacatggggaggattaaataaaggaataaagatgagagtatgcgcgccagctccccccncccntntttnttttatttaattcccaccgttacct

SEQ ID NO: 449613 - DNA, 2113 bp, Homo sapiens
aggtcccgcccctgtgggcggggcgaggcagcgtcgccgcgaggccacccggaagaccaagccgggtaggcgctgtctccgtcgcctccaacccccccggtccgaccagggaaggtgggatgctctgatggccgggcctgcggcgctgagcgcggcggcggcggctgctctggcggccgccctgctcctgctgcgtcgtgaggacccggggccgggggctggccccaggtaacccctccgcgtatgggaccgagctgggccaggtctcctggccgggccggggataccgtggggtatgcccagtgatgccagcagcttgtggcacctgggcgcaccctccagctcgggccccttccgatgggtctgctggctcaggtgcgggcgatggccggggagccgcgccccgcacgtgactcagcactttccccagagcccggactgcggagaacaatatcctcctccctaacagataaacagcccttgttcctcgggataaggactggcagtcccctgacaccctaagaccggcatctgtcgatgttatttccccagcatggccgaaacagaagccctgtcgaagcttcgggaagacttcaggatgcagaataaatccgtctttattttgggcgccagcggagaaaccggcagagtgctcttaaaggaaatcctggagcagggcctgttttccaaagtcacgctcattggccggaggaagctcaccttcgacgaggaagcttataaaaatgtgaatcaagaagtggtggactttgaaaagttggatgactacgcctctgcctttcaaggtcatgatgttggattctgttgcctgggtaccaccagagggaaagctggggcggagggatttgttcgtgttgaccgagattatgtgctgaagtctgcagagctggcaaaagctggagggtgcaaacatttcaacttgctatcctctaaaggagctgataaatcaagcaattttttatatctacaagttaagggagaagtagaagccaaggttgaagaattaaaatttgatcgttactctgtatttaggcctggagttctgttatgtgataggcaagaatctcgcccaggtgaatggctggttagaaagttctttggctccttaccagactcttgggccagtgggcattctgtgcctgtggtgaccgtggttagagcaatgctgaacaatgtggtgagaccaagagacaagcagatggaactgctggagaacaaggccatccatgacctggggaaagcgcatggctctctcaagccatgaccacattggagaaatggtttttattgtcaaccttaacacccatcaccaaatcggtaatttcagggtctaaaaaaagtcagcatgttttaactttgttgttttactatcctcaggcatccattccaatcaagaaatgatggtgctctgcatcagtggttcagagcctggttatacatatagatcactcagggagctttggaaaaataaagatttgtcagccctatctcaaacttgaatcaaatttctggggtgtgggcacaataatctgtaattttctttgtttatacttcccctgatgccactggttccgatgccactggctggggggcctgctttgaaatgcttgtctgcagagtcacagcagccatgaaaaccttatgaccgtgcaaatgagctctgctctaaaattgttgacattcatgtctctgagttacaaaagtgctaattcactacatgtaattgtgtaagtaaacattgtgcctttactacttctttatgtaatagaagttatatacctaagcttatataatacatggggaggattaaataaaggaataaagatgaaaaaaaaaaaaaaaaaaaaaatttgtgggcggccttgggcccttggaaaaagtttttaagacaattggtgtgggggggggggccagtgggtaggtgaaactgggtcatagctgtgccctaagagagaatctggctccatgactagtagcttgggttttctcagccaattaaaaaaggccggggggaacccgaggttttgaacaattccagagggagttcggaggcataaggggatctataacaggattcaagcgagtcgatttcatg

SEQ ID NO: 449614 - DNA, 1910 bp, Homo sapiens
  misc_feature (1878)..(1878): n is a, c, g, or t
  misc_feature (1888)..(1888): n is a, c, g, or t
aggtcccgcccctgtgggcggggcgaggcagcgtcgccgcgaggccacccggaagaccaagccgggtaggcgctgtctccgtcgcctccaacccccccggtccgaccagggaaggtgggatgctctgatggccgggcctgcggcgctgagcgcggcggcggcggctgctctggcggccgccctgctcctgctgcgtcgtgaggacccggggccgggggctggccccaggtaacccctccgcgtatgggaccgagctgggccaggtctcctggccgggccggggataccgtggggtatgcccagtgatgccagcagcttgtggcacctgggcgcaccctccagctcgggccccttccgatgggtctgctggctcaggtgcgggcgatggccggggagccgcgccccgcacgtgactcagcactttccccagagcccggactgcggagaacaatatcctcctccctaacagataaacagcccttgttcctcgggataaggactggcagtcccctgacaccctaagaccggcatctgtcgatgttatttccccagcatggccgaaacagaagccctgtcgaagcttcgggaagacttcaggatgcagaataaatccgtctttattttgggcgccagcggagaaaccggcagagtgctcttaaaggaaatcctggagcagggcctgttttccaaagtcacgctcattggccggaggaagctcaccttcgacgaggaagcttataaaaatgtgaatcaagaagtggtggactttgaaaagttggatgactacgcctctgcctttcaaggtcatgatgttggattctgttgcctgggtaccaccagagggaaagctggggcggagggatttgttcgtgttgaccgagattatgtgctgaagtctgcagagctggcaaaagctggagggtgcaaacatttcaacttgctatcctctaaaggagctgataaatcaagcaattttttatatctacaagttaagggagaagtagaagccaaggttgaagaattaaaatttgatcgttactctgtatttaggcctggagttctgttatgtgataggcaagaatctcgcccaggtgaatggctggttagaaagttctttggctccttaccagactcttgggccagtgggcattctgtgcctgtggtgaccgtggttagagcaatgctgaacaatgtggtgagaccaagagacaagcagatggaactgctggagaacaaggccatccatgacctggggaaagcgcatggctctctcaagccatgaccacattggagaaatggtttttattgtcaaccttaacacccatcaccaaatcggtaatttcagggtctaaaaaaagtcagcatgttttaactttgttgttttactatcctcaggcatccattccaatcaagaaatgatggtgctctgcatcagtggttcagagcctggttatacatatagatcactcagggagctttggaaaaataaagatttgtcagccctatctcaaacttgaatcaaatttctggggtgtgggcacaataatctgtaattttctttgtttatacttcccctgatgccactggttccgatgccactggctggggggcctgctttgaaatgcttgtctgcagagtcacagcagccatgaaaaccttatgaccgtgcaaatgagctctgctctaaaattgttgacattcatgtctctgagttacaaaagtgctaattcactacatgtaattgtgtaagtaaacattgtgcctttactacttctttatgtaatagaagttatatacctaagcttatataatacatggggaggattaaataaaggaataaagatgataggtatgcgtgccagctctccttgttttgtntctgctccgnttgtggcattcctgcctcttct

SEQ ID NO: 449615 - DNA, 1898 bp, Homo sapiens
aggtcccgcccctgtgggcggggcgaggcagcgtcgccgcgaggccacccggaagaccaagccgggtaggcgctgtctccgtcgcctccaacccccccggtccgaccagggaaggtgggatgctctgatggccgggcctgcggcgctgagcgcggcggcggcggctgctctggcggccgccctgctcctgctgcgtcgtgaggacccggggccgggggctggccccaggtaacccctccgcgtatgggaccgagctgggccaggtctcctggccgggccggggataccgtggggtatgcccagtgatgccagcagcttgtggcacctgggcgcaccctccagctcgggccccttccgatgggtctgctggctcaggtgcgggcgatggccggggagccgcgccccgcacgtgactcagcactttccccagagcccggactgcggagaacaatatcctcctccctaacagataaacagcccttgttcctcgggataaggactggcagtcccctgacaccctaagaccggcatctgtcgatgttatttccccagcatggccgaaacagaagccctgtcgaagcttcgggaagacttcaggatgcagaataaatccgtctttattttgggcgccagcggagaaaccggcagagtgctcttaaaggaaatcctggagcagggcctgttttccaaagtcacgctcattggccggaggaagctcaccttcgacgaggaagcttataaaaatgtgaatcaagaagtggtggactttgaaaagttggatgactacgcctctgcctttcaaggtcatgatgttggattctgttgcctgggtaccaccagagggaaagctggggcggagggatttgttcgtgttgaccgagattatgtgctgaagtctgcagagctggcaaaagctggagggtgcaaacatttcaacttgctatcctctaaaggagctgataaatcaagcaattttttatatctacaagttaagggagaagtagaagccaaggttgaagaattaaaatttgatcgttactctgtatttaggcctggagttctgttatgtgataggcaagaatctcgcccaggtgaatggctggttagaaagttctttggctccttaccagactcttgggccagtgggcattctgtgcctgtggtgaccgtggttagagcaatgctgaacaatgtggtgagaccaagagacaagcagatggaactgctggagaacaaggccatccatgacctggggaaagcgcatggctctctcaagccatgaccacattggagaaatggtttttattgtcaaccttaacacccatcaccaaatcggtaatttcagggtctaaaaaaagtcagcatgttttaactttgttgttttactatcctcaggcatccattccaatcaagaaatgatggtgctctgcatcagtggttcagagcctggttatacatatagatcactcagggagctttggaaaaataaagatttgtcagccctatctcaaacttgaatcaaatttctggggtgtgggcacaataatctgtaattttctttgtttatacttcccctgatgccactggttccgatgccactggctggggggcctgctttgaaatgcttgtctgcagagtcacagcagccatgaaaaccttatgaccgtgcaaatgagctctgctctaaaattgttgacattcatgtctctgagttacaaaagtgctaattcactacatgtaattgtgtaagtaaacattgtgcctttactacttctttatgtaatagaagttatatacctaagcttatataatacatggggaggattaaataaaggaataaagatgacagtatgcgaccacttttttccttgtccctctgtacctacaaataatctaca

SEQ ID NO: 449616 - DNA, 1888 bp, Homo sapiens
aggtcccgcccctgtgggcggggcgaggcagcgtcgccgcgaggccacccggaagaccaagccgggtaggcgctgtctccgtcgcctccaacccccccggtccgaccagggaaggtgggatgctctgatggccgggcctgcggcgctgagcgcggcggcggcggctgctctggcggccgccctgctcctgctgcgtcgtgaggacccggggccgggggctggccccaggtaacccctccgcgtatgggaccgagctgggccaggtctcctggccgggccggggataccgtggggtatgcccagtgatgccagcagcttgtggcacctgggcgcaccctccagctcgggccccttccgatgggtctgctggctcaggtgcgggcgatggccggggagccgcgccccgcacgtgactcagcactttccccagagcccggactgcggagaacaatatcctcctccctaacagataaacagcccttgttcctcgggataaggactggcagtcccctgacaccctaagaccggcatctgtcgatgttatttccccagcatggccgaaacagaagccctgtcgaagcttcgggaagacttcaggatgcagaataaatccgtctttattttgggcgccagcggagaaaccggcagagtgctcttaaaggaaatcctggagcagggcctgttttccaaagtcacgctcattggccggaggaagctcaccttcgacgaggaagcttataaaaatgtgaatcaagaagtggtggactttgaaaagttggatgactacgcctctgcctttcaaggtcatgatgttggattctgttgcctgggtaccaccagagggaaagctggggcggagggatttgttcgtgttgaccgagattatgtgctgaagtctgcagagctggcaaaagctggagggtgcaaacatttcaacttgctatcctctaaaggagctgataaatcaagcaattttttatatctacaagttaagggagaagtagaagccaaggttgaagaattaaaatttgatcgttactctgtatttaggcctggagttctgttatgtgataggcaagaatctcgcccaggtgaatggctggttagaaagttctttggctccttaccagactcttgggccagtgggcattctgtgcctgtggtgaccgtggttagagcaatgctgaacaatgtggtgagaccaagagacaagcagatggaactgctggagaacaaggccatccatgacctggggaaagcgcatggctctctcaagccatgaccacattggagaaatggtttttattgtcaaccttaacacccatcaccaaatcggtaatttcagggtctaaaaaaagtcagcatgttttaactttgttgttttactatcctcaggcatccattccaatcaagaaatgatggtgctctgcatcagtggttcagagcctggttatacatatagatcactcagggagctttggaaaaataaagatttgtcagccctatctcaaacttgaatcaaatttctggggtgtgggcacaataatctgtaattttctttgtttatacttcccctgatgccactggttccgatgccactggctggggggcctgctttgaaatgcttgtctgcagagtcacagcagccatgaaaaccttatgaccgtgcaaatgagctctgctctaaaattgttgacattcatgtctctgagttacaaaagtgctaattcactacatgtaattgtgtaagtaaacattgtgcctttactacttctttatgtaatagaagttatatacctaagcttatataatacatggggaggattaaataaaggaataaagatgaaatctcatcttccctaccttcaacaaattccactcatcaact

SEQ ID NO: 449617 - DNA, 1899 bp, Homo sapiens
aggtcccgcccctgtgggcggggcgaggcagcgtcgccgcgaggccacccggaagaccaagccgggtaggcgctgtctccgtcgcctccaacccccccggtccgaccagggaaggtgggatgctctgatggccgggcctgcggcgctgagcgcggcggcggcggctgctctggcggccgccctgctcctgctgcgtcgtgaggacccggggccgggggctggccccaggtaacccctccgcgtatgggaccgagctgggccaggtctcctggccgggccggggataccgtggggtatgcccagtgatgccagcagcttgtggcacctgggcgcaccctccagctcgggccccttccgatgggtctgctggctcaggtgcgggcgatggccggggagccgcgccccgcacgtgactcagcactttccccagagcccggactgcggagaacaatatcctcctccctaacagataaacagcccttgttcctcgggataaggactggcagtcccctgacaccctaagaccggcatctgtcgatgttatttccccagcatggccgaaacagaagccctgtcgaagcttcgggaagacttcaggatgcagaataaatccgtctttattttgggcgccagcggagaaaccggcagagtgctcttaaaggaaatcctggagcagggcctgttttccaaagtcacgctcattggccggaggaagctcaccttcgacgaggaagcttataaaaatgtgaatcaagaagtggtggactttgaaaagttggatgactacgcctctgcctttcaaggtcatgatgttggattctgttgcctgggtaccaccagagggaaagctggggcggagggatttgttcgtgttgaccgagattatgtgctgaagtctgcagagctggcaaaagctggagggtgcaaacatttcaacttgctatcctctaaaggagctgataaatcaagcaattttttatatctacaagttaagggagaagtagaagccaaggttgaagaattaaaatttgatcgttactctgtatttaggcctggagttctgttatgtgataggcaagaatctcgcccaggtgaatggctggttagaaagttctttggctccttaccagactcttgggccagtgggcattctgtgcctgtggtgaccgtggttagagcaatgctgaacaatgtggtgagaccaagagacaagcagatggaactgctggagaacaaggccatccatgacctggggaaagcgcatggctctctcaagccatgaccacattggagaaatggtttttattgtcaaccttaacacccatcaccaaatcggtaatttcagggtctaaaaaaagtcagcatgttttaactttgttgttttactatcctcaggcatccattccaatcaagaaatgatggtgctctgcatcagtggttcagagcctggttatacatatagatcactcagggagctttggaaaaataaagatttgtcagccctatctcaaacttgaatcaaatttctggggtgtgggcacaataatctgtaattttctttgtttatacttcccctgatgccactggttccgatgccactggctggggggcctgctttgaaatgcttgtctgcagagtcacagcagccatgaaaaccttatgaccgtgcaaatgagctctgctctaaaattgttgacattcatgtctctgagttacaaaagtgctaattcactacatgtaattgtgtaagtaaacattgtgcctttactacttctttatgtaatagaagttatatacctaagcttatataatacatggggaggattaaataaaggaataaagatgatagatggcgcccgaaaattttcttctttttttccgtttttgttacaaataaaa

SEQ ID NO: 449618 - DNA, 1902 bp, Homo sapiens
aggtcccgcccctgtgggcggggcgaggcagcgtcgccgcgaggccacccggaagaccaagccgggtaggcgctgtctccgtcgcctccaacccccccggtccgaccagggaaggtgggatgctctgatggccgggcctgcggcgctgagcgcggcggcggcggctgctctggcggccgccctgctcctgctgcgtcgtgaggacccggggccgggggctggccccaggtaacccctccgcgtatgggaccgagctgggccaggtctcctggccgggccggggataccgtggggtatgcccagtgatgccagcagcttgtggcacctgggcgcaccctccagctcgggccccttccgatgggtctgctggctcaggtgcgggcgatggccggggagccgcgccccgcacgtgactcagcactttccccagagcccggactgcggagaacaatatcctcctccctaacagataaacagcccttgttcctcgggataaggactggcagtcccctgacaccctaagaccggcatctgtcgatgttatttccccagcatggccgaaacagaagccctgtcgaagcttcgggaagacttcaggatgcagaataaatccgtctttattttgggcgccagcggagaaaccggcagagtgctcttaaaggaaatcctggagcagggcctgttttccaaagtcacgctcattggccggaggaagctcaccttcgacgaggaagcttataaaaatgtgaatcaagaagtggtggactttgaaaagttggatgactacgcctctgcctttcaaggtcatgatgttggattctgttgcctgggtaccaccagagggaaagctggggcggagggatttgttcgtgttgaccgagattatgtgctgaagtctgcagagctggcaaaagctggagggtgcaaacatttcaacttgctatcctctaaaggagctgataaatcaagcaattttttatatctacaagttaagggagaagtagaagccaaggttgaagaattaaaatttgatcgttactctgtatttaggcctggagttctgttatgtgataggcaagaatctcgcccaggtgaatggctggttagaaagttctttggctccttaccagactcttgggccagtgggcattctgtgcctgtggtgaccgtggttagagcaatgctgaacaatgtggtgagaccaagagacaagcagatggaactgctggagaacaaggccatccatgacctggggaaagcgcatggctctctcaagccatgaccacattggagaaatggtttttattgtcaaccttaacacccatcaccaaatcggtaatttcagggtctaaaaaaagtcagcatgttttaactttgttgttttactatcctcaggcatccattccaatcaagaaatgatggtgctctgcatcagtggttcagagcctggttatacatatagatcactcagggagctttggaaaaataaagatttgtcagccctatctcaaacttgaatcaaatttctggggtgtgggcacaataatctgtaattttctttgtttatacttcccctgatgccactggttccgatgccactggctggggggcctgctttgaaatgcttgtctgcagagtcacagcagccatgaaaaccttatgaccgtgcaaatgagctctgctctaaaattgttgacattcatgtctctgagttacaaaagtgctaattcactacatgtaattgtgtaagtaaacattgtgcctttactacttctttatgtaatagaagttatatacctaagcttatataatacatggggaggattaaataaaggaataaagatgacaggcatcgcgccgttttttttaaatactactctcaccacagaccgtccgctctca

SEQ ID NO: 449619 - DNA, 1893 bp, Homo sapiens
aggtcccgcccctgtgggcggggcgaggcagcgtcgccgcgaggccacccggaagaccaagccgggtaggcgctgtctccgtcgcctccaacccccccggtccgaccagggaaggtgggatgctctgatggccgggcctgcggcgctgagcgcggcggcggcggctgctctggcggccgccctgctcctgctgcgtcgtgaggacccggggccgggggctggccccaggtaacccctccgcgtatgggaccgagctgggccaggtctcctggccgggccggggataccgtggggtatgcccagtgatgccagcagcttgtggcacctgggcgcaccctccagctcgggccccttccgatgggtctgctggctcaggtgcgggcgatggccggggagccgcgccccgcacgtgactcagcactttccccagagcccggactgcggagaacaatatcctcctccctaacagataaacagcccttgttcctcgggataaggactggcagtcccctgacaccctaagaccggcatctgtcgatgttatttccccagcatggccgaaacagaagccctgtcgaagcttcgggaagacttcaggatgcagaataaatccgtctttattttgggcgccagcggagaaaccggcagagtgctcttaaaggaaatcctggagcagggcctgttttccaaagtcacgctcattggccggaggaagctcaccttcgacgaggaagcttataaaaatgtgaatcaagaagtggtggactttgaaaagttggatgactacgcctctgcctttcaaggtcatgatgttggattctgttgcctgggtaccaccagagggaaagctggggcggagggatttgttcgtgttgaccgagattatgtgctgaagtctgcagagctggcaaaagctggagggtgcaaacatttcaacttgctatcctctaaaggagctgataaatcaagcaattttttatatctacaagttaagggagaagtagaagccaaggttgaagaattaaaatttgatcgttactctgtatttaggcctggagttctgttatgtgataggcaagaatctcgcccaggtgaatggctggttagaaagttctttggctccttaccagactcttgggccagtgggcattctgtgcctgtggtgaccgtggttagagcaatgctgaacaatgtggtgagaccaagagacaagcagatggaactgctggagaacaaggccatccatgacctggggaaagcgcatggctctctcaagccatgaccacattggagaaatggtttttattgtcaaccttaacacccatcaccaaatcggtaatttcagggtctaaaaaaagtcagcatgttttaactttgttgttttactatcctcaggcatccattccaatcaagaaatgatggtgctctgcatcagtggttcagagcctggttatacatatagatcactcagggagctttggaaaaataaagatttgtcagccctatctcaaacttgaatcaaatttctggggtgtgggcacaataatctgtaattttctttgtttatacttcccctgatgccactggttccgatgccactggctggggggcctgctttgaaatgcttgtctgcagagtcacagcagccatgaaaaccttatgaccgtgcaaatgagctctgctctaaaattgttgacattcatgtctctgagttacaaaagtgctaattcactacatgtaattgtgtaagtaaacattgtgcctttactacttctttatgtaatagaagttatatacctaagcttatataatacatggggaggattaaataaaggaataaagatgacgtccgctcccctttacgaaaatttatataacatataaacaatgact

SEQ ID NO: 449620 - DNA, 1708 bp, Homo sapiens
aggtcccgcccctgtgggcggggcgaggcagcgtcgccgcgaggccacccggaagaccaagccgggtaggcgctgtctccgtcgcctccaacccccccggtccgaccagggaaggtgggatgctctgatggccgggcctgcggcgctgagcgcggcggcggcggctgctctggcggccgccctgctcctgctgcgtcgtgaggacccggggccgggggctggccccaggtaacccctccgcgtatgggaccgagctgggccaggtctcctggccgggccggggataccgtggggtatgcccagtgatgccagcagcttgtggcacctgggcgcaccctccagctcgggccccttccgatgggtctgctggctcaggtgcgggcgatggccggggagccgcgccccgcacgtgactcagcactttccccagagcccggactgcggagaacaatatcctcctccctaacagataaacagcccttgttcctcgggataaggactggcagtcccctgacaccctaagaccggcatctgtcgatgttatttccccagcatggccgaaacagaagccctgtcgaagcttcgggaagacttcaggatgcagaataaatccgtctttattttgggcgccagcggagaaaccggcagagtgctcttaaaggaaatcctggagcagggcctgttttccaaagtcacgctcattggccggaggaagctcaccttcgacgaggaagcttataaaaatgtgaatcaagaagtggtggactttgaaaagttggatgactacgcctctgcctttcaaggtcatgatgttggattctgttgcctgggtaccaccagagggaaagctggggcgggagaagtagaagccaaggttgaagaattaaaatttgatcgttactctgtatttaggcctggagttctgttatgtgataggcaagaatctcgcccaggtgaatggctggttagaaagttctttggctccttaccagactcttgggccagtgggcattctgtgcctgtggtgaccgtggttagagcaatgctgaacaatgtggtgagaccaagagacaagcagatggaactgctggagaacaaggccatccatgacctggggaaagcgcatggctctctcaagccatgaccacattggagaaatggtttttattgtcaaccttaacacccatcaccaaatcggtaatttcagggtctaaaaaaagtcagcatgttttaactttgttgttttactatcctcaggcatccattccaatcaagaaatgatggtgctctgcatcagtggttcagagcctggttatacatatagatcactcagggagctttggaaaaataaagatttgtcagccctatctcaaacttgaatcaaatttctggggtgtgggcacaataatctgtaattttctttgtttatacttcccctgatgccactggttccgatgccactggctggggggcctgctttgaaatgcttgtctgcagagtcacagcagccatgaaaaccttatgaccgtgcaaatgagctctgctctaaaattgttgacattcatgtctctgagttacaaaagtgctaattcactacatgtaattgtgtaagtaaacattgtgcctttactacttctttatgtaatagaagttatatacctaagcttatataatacatggggaggattaaataaaggaataaagatga

SEQ ID NO: 449621 - DNA, 1520 bp, Homo sapiens
aggtcccgcccctgtgggcggggcgaggcagcgtcgccgcgaggccacccggaagaccaagccgggtaggcgctgtctccgtcgcctccaacccccccggtccgaccagggaaggtgggatgctctgatggccgggcctgcggcgctgagcgcggcggcggcggctgctctggcggccgccctgctcctgctgcgtcgtgaggacccggggccgggggctggccccagcatggccgaaacagaagccctgtcgaagcttcgggaagacttcaggatgcagaataaatccgtctttattttgggcgccagcggagaaaccggcagagtgctcttaaaggaaatcctggagcagggcctgttttccaaagtcacgctcattggccggaggaagctcaccttcgacgaggaagcttataaaaatgtgaatcaagaagtggtggactttgaaaagttggatgactacgcctctgcctttcaaggtcatgatgttggattctgttgcctgggtaccaccagagggaaagctggggcggagggatttgttcgtgttgaccgagattatgtgctgaagtctgcagagctggcaaaagctggagggtgcaaacatttcaacttgctatcctctaaaggagctgataaatcaagcaattttttatatctacaagttaagggagaagtagaagccaaggttgaagaattaaaatttgatcgttactctgtatttaggcctggagttctgttatgtgataggcaagaatctcgcccaggtgaatggctggttagaaagttctttggctccttaccagactcttgggccagtgggcattctgtgcctgtggtgaccgtggttagagcaatgctgaacaatgtggtgagaccaagagacaagcagatggaactgctggagaacaaggccatccatgacctggggaaagcgcatggctctctcaagccatgaccacattggagaaatggtttttattgtcaaccttaacacccatcaccaaatcggtaatttcagggtctaaaaaaagtcagcatgttttaactttgttgttttactatcctcaggcatccattccaatcaagaaatgatggtgctctgcatcagtggttcagagcctggttatacatatagatcagtaaaaaaaaaaagtttttggcccccctttttccaacctataaaaaaaaattttgggggggggggaaaaaaaaaaaagaaattttttgtggtaaaccccccccctaaacaccttggttaaaaaacaacgggggggggggggctttttaaaaaatgtttgtaagaaaggcccccccccccaataaaccttttaggcgcggaaaaagggctttggttttaaaatttgaaccattcatgtctctgagttacaaaagtgctaattcactacatgtaattgtgtaagtaaacattgtgcctttactacttctttatgtaatagaagttatatacctaagcttatataatacatggggaggattaaataaaggaataaagatga

SEQ ID NO: 449622 - DNA, 1811 bp, Homo sapiens
aggtcccgcccctgtgggcggggcgaggcagcgtcgccgcgaggccacccggaagaccaagccgggtaggcgctgtctccgtcgcctccaacccccccggtccgaccagggaaggtgggatgctctgatggccgggcctgcggcgctgagcgcggcggcggcggctgctctggcggccgccctgctcctgctgcgtcgtgaggacccggggccgggggctggccccaggtaacccctccgcgtatgggaccgagctgggccaggtctcctggccgggccggggataccgtggggtatgcccagtgatgccagcagcttgtggcacctgggcgcaccctccagctcgggccccttccgatgggtctgctggctcaggtgcgggcgatggccggggagccgcgccccgcacgtgactcagcactttccccagagcccggactgcggagaacaatatcctcctccctaacagataaacagcccttgttcctcgggataaggactggcagtcccctgacaccctaagaccggcatctgtcgatgttatttccccagcatggccgaaacagaagccctgtcgaagcttcgggaagacttcaggatgcagaataaatccgtctttattttgggcgccagcggagaaaccggcagagtgctcttaaaggaaatcctggagcagggcctgttttccaaagtcacgctcattggccggaggaagctcaccttcgacgaggaagcttataaaaatgtgaatcaagaagtggtggactttgaaaagttggatgactacgcctctgcctttcaaggtcatgatgttggattctgttgcctgggtaccaccagagggaaagctggggcggagggatttgttcgtgttgaccgagattatgtgctgaagtctgcagagctggcaaaagctggagggtgcaaacatttcaacttctgataaatcaagcaattttttatatctacaagttaagggagaagtagaagccaaggttgaagaattaaaatttgatcgttaagttctgttatgtgataggcaagaatctcgcccaggtgaatggctggttagaaagttctttggctccttaccagactcttgggccagtgggcattctgtgcctgtggtgaccgtggttagagcaatgctgaacaatgtggtgagaccaagagacaagcagatggaactgctggagaacaaggccatccatgacctggggaaagcgcatggctctctcaagccatgaccacattggagaaatggtttttattgtcaaccttaacacccatcaccaaatcggtaatttcagggtctaaaaaaagtcagcatgttttaactttgttgttttactatcctcaggcatccattccaatcaagaaatgatggtgctctgcatcagtggttcagagcctggttatacatatagatcactcagggagctttggaaaaataaagatttgtcagccctatctcaaacttgaatcaaatttctggggtgtgggcacaataatctgtaattttctttgtttatacttcccctgatgccactggttccgatgccactggctggggggcctgctttgaaatgcttgtctgcagagtcacagcagccatgaaaaccttatgaccgtgcaaatgagctctgctctaaaattgttgacattcatgtctctgagttacaaaagtgctaattcactacatgtaattgtgtaagtaaacattgtgcctttactacttctttatgtaatagaagttatatacctaagcttatataatacatggggaggattaaataaaggaataaagatga

SEQ ID NO: 449623 - DNA, 1110 bp, Homo sapiens
ggggggggggctagctgcaacgactctcttaatctccaccgctacacaatcaagaagtggtggactttgaaaagttggatgactacgcctctgcctttcaaggtcatgatgttggattctgttgcctgggtaccaccagagggaaagctggggcggagggatttgttcgtgttgaccgagattatgtgctgaagtctgcagagctggcaaaagctggagggtgcaaacatttcaacttctgataaatcaagcaattttttatatctacaagttaagggagaagtagaagccaaggttgaagaattaaaatttgatcgttaagttctgttatgtgataggcaagaatctcgcccaggtgaatggctggttagaaagttctttggctccttaccagactcttgggccagtgggcattctgtgcctgtggtgaccgtggttagagcaatgctgaacaatgtggtgagaccaagagacaagcagatggaactgctggagaacaaggccatccatgacctggggaaagcgcatggctctctcaagccatgaccacattggagaaatggtttttattgtcaaccttaacacccatcaccaaatcggtaatttcagggtctaaaaaaagtcagcatgttttaactttgttgttttactatcctcaggcatccattccaatcaagaaatgatggtgctctgcatcagtggttcagagcctggttatacatatagatcactcagggagctttggaaaaataaagatttgtcagccctatctcaaacttgaatcaaatttctggggtgtgggcacaataatctgtaattttctttgtttatacttcccctgatgccactggttccgatgccactggctggggggcctgctttgaaatgcttgtctgcagagtcacagcagccatgaaaaccttatgaccgtgcaaatgagctctgctctaaaattgttgacattcatgtctctgagttacaaaagtgctaattcactacatgtaattgtgtaagtaaacattgtgcctttactacttctttatgtaatagaagttatatacctaagcttatataatacatggggaggattaaataaaggaataaagatga

SEQ ID NO: 449624 - DNA, 823 bp, Homo sapiens
cgggcccccctcgagccgagggttcgatagcttatccagtagtatgtgatggtaaaaatctcgcccaggtgaatggctggttagaaagttctttggctccttaccagactcttgggccagtgggcattctgtgcctgtggtgaccgtggttagagcaatgctgaacaatgtggtgagaccaagagacaagcagatggaactgctggagaacaaggccatccatgacctggggaaagcgcatggctctctcaagccatgaccacattggagaaatggtttttattgtcaaccttaacacccatcaccaaatcggtaatttcagggtctaaaaaaagtcagcatgttttaactttgttgttttactatcctcaggcatccattccaatcaagaaatgatggtgctctgcatcagtggttcagagcctggttatacatatagatcactcagggagctttggaaaaataaagatttgtcagccctatctcaaacttgaatcaaatttctggggtgtgggcacaataatctgtaattttctttgtttatacttcccctgatgccactggttccgatgccactggctggggggcctgctttgaaatgcttgtctgcagagtcacagcagccatgaaaaccttatgaccgtgcaaatgagctctgctctaaaattgttgacattcatgtctctgagttacaaaagtgctaattcactacatgtaattgtgtaagtaaacattgtgcctttactacttctttatgtaatagaagttatatacctaagcttatataatacatggggaggattaaataaaggaataaagatga

SEQ ID NO: 449625 - DNA, 1399 bp, Homo sapiens
aggtcccgcccctgtgggcggggcgaggcagcgtcgccgcgaggccacccggaagaccaagccgggtaggcgctgtctccgtcgcctccaacccccccggtccgaccagggaaggtgggatgctctgatggccgggcctgcggcgctgagcgcggcggcggcggctgctctggcggccgccctgctcctgctgcgtcgtgaggacccggggccgggggctggccccagcatggccgaaacagaagccctgtcgaagcttcgggaagacttcaggatgcagaataaatccgtctttattttgggcgccagcggagaaaccggcagagtgctcttaaaggaaatcctggagcagggcctgttttccaaagtcacgctcattggccggaggaagctcaccttcgacgaggaagcttataaaaatgtgaatcaagaagtggtggactttgaaaagttggatgactacgcctctgcctttcaaggtcatgatgttggattctgttgcctgggtaccaccagagggaaagctggggcgcggtaaggaaggcatatgctcttttccctttttgctggccagtaatatcaaggattcttttcttgctcactctttttctttgtgcctgttgcaatgcttaaatgtgaataagcctttattgtttaagattctatatgctgcactaacctttggtatccttttaatagtactgataagttcgtctttcaaagtaatccttgagttcaggccccagtgctggagacgtcgtaaatatttacatgattttgcctattgtgattatcgctatcactacatcccctgactaagggaaaccatgatgtctgagtaaaactaattggtttatgctgttaacaatcagctgtttttccccttaataaatgtttgaaatttgaaaaaaaaaaaaaaaaaaaaaaaaaaaaaaaaaaaaaaacaaacaaaaaacagaaaaaaaaaacacgaaaaaaacaaacaaaaaaacaagcaacaagaacgcacaacaaagacaaagaacaacaacaggacaacaaagaaacacaacacaagagagacgacgccccgcacaaacaacagccaggcacaaggggcggcggccccaaccaaacacccacacgcgcggacgccggcccacagtatccaaactccacgatgtgtggtgtagacccacaggcgacaactgcctcgactgtggttctaatcaaaacacggacgagaggggcgctgctagacaactctgcaaccggaggggaacagcaccaagcactgcccgccgtgtgcagtcacgaacgcaccaactcgttggtggcggtagacatgccgaccgaccacaacgacgaccgacgctcacggcgcccagtgagaacacacactagcgggtcgttgtcgagc

SEQ ID NO: 449626 - DNA, 1565 bp, Homo sapiens
aggtcccgcccctgtgggcggggcgaggcagcgtcgccgcgaggccacccggaagaccaagccgggtaggcgctgtctccgtcgcctccaacccccccggtccgaccagggaaggtgggatgctctgatggccgggcctgcggcgctgagcgcggcggcggcggctgctctggcggccgccctgctcctgctgcgtcgtgaggacccggggccgggggctggccccaggtaacccctccgcgtatgggaccgagctgggccaggtctcctggccgggccggggataccgtggggtatgcccagtgatgccagcagcttgtggcacctgggcgcaccctccagctcgggccccttccgatgggtctgctggctcaggtgcgggcgatggccggggagccgcgccccgcacgtgactcagcactttccccagagcccggactgcggagaacaatatcctcctccctaacagataaacagcccttgttcctcgggataaggactggcagtcccctgacaccctaagaccggcatctgtcgatgttatttccccagcatggccgaaacagaagccctgtcgaagcttcgggaagacttcaggatgcagaataaatccgtctttattttgggcgccagcggagaaaccggcagagtgctcttaaaggaaatcctggagcagggcctgttttccaaagtcacgctcattggccggaggaagctcaccttcgacgaggaagcttataaaaatgtgaatcaagaagtggtggactttgaaaagttggatgactacgcctctgcctttcaaggtcatgatgttggattctgttgcctgggtaccaccagagggaaagctggggcgcggtaaggaaggcatatgctcttttccctttttgctggccagtaatatcaaggattcttttcttgctcactctttttctttgtgcctgttgcaatgcttaaatgtgaataagcctttattgtttaagattctatatgctgcactaacctttggtatccttttaatagtactgataagttcgtctttcaaagtaatccttgagttcaggccccagtgctggagacgtcgtaaatatttacatgattttgcctattgtgattatcgctatcactacatcccctgactaagggaaaccatgatgtctgagtaaaactaattggtttatgctgttaacaatcagctgtttttccccttaataaatgtttgaaatttgaaatgttctgtctcacttgagtgatttgcttcaacttattttcatgtcaagctttaaacttctggaatagaacatcagaacacaggcacgattcaaccagcctccagcgatgactcagccttcagcgatgattcaaccccactaatgattcagtctttactgacgcaaaagtcttttaacgcacattttattttctttttaatggtgttctaaattgagtcagctcctgtacagaagtcatagtttactacatagttagaaatcagagtttactacctggattctgggcaaatgttagtgcgggtacatcttatttaatttatactttgactatag

SEQ ID NO: 449627 - DNA, 864 bp, Homo sapiens
aggtcccgcccctgtgggcggggcgaggcagcgtcgccgcgaggccacccggaagaccaagccggcatggccgaaacagaagccctgtcgaagcttcgggaagacttcaggatgcagaataaatccgtctttattttgggcgccagcggagaaaccggcagagtgctcttaaaggaaatcctggagcagggcctgttttccaaagtcacgctcattggccggaggaagctcaccttcgacgaggaagcttataaaaatgtgaatcaagaagtggtggactttgaaaagttggatgactacgcctctgcctttcaaggtcatgatgttggattctgttgcctgggtaccaccagagggaaagctggggcgcggtaaggaaggcatatgctcttttccctttttgctggccagtaatatcaaggattcttttcttgctcactctttttctttgtgcctgttgcaatgcttaaatgtgaataagcctttattgtttaagattctatatgctgcactaacctttggtatccttttaatagtactgataagttcgtctttcaaagtaatccttgagttcaggccccagtgctggagacgtcgtaaatatttacatgattttgcctattgtgattatcgctatcactacatcccctgactaagggaaaccatgatgtctgagtaaaactaattggtttatgctgttaacaatcagctgtttccttataaggttaaaacaaaaaaaaaaaaagttgggggccggcccgaaatttaaccactggggggccggaagaaggcagccggacggaaggggtcccaaacggggcggggaccgggtggtgttacgcccatcccccgcgggaaagaaag

SEQ ID NO: 449628 - DNA, 1359 bp, Homo sapiens
aggtcccgcccctgtgggcggggcgaggcagcgtcgccgcgaggccacccggaagaccaagccggcatggccgaaacagaagccctgtcgaagcttcgggaagacttcaggatgcagaataaatccgtctttattttgggcgccagcggagaaaccggcagagtgctcttaaaggaaatcctggagcagggcctgttttccaaagtcacgctcattggccggaggaagctcaccttcgacgaggaagcttataaaaatgtgaatcaagaagtggtggactttgaaaagttggatgactacgcctctgcctttcaaggtcatgatgttggattctgttgcctgggtaccaccagagggaaagctggggcggagggatttgttcgtgttgaccgagattatgtgctgaagtctgcagagctggcaaaagctggagggtgcaaacatttcaacttgctatcctctaaaggagctgataaatcaagcaattttttatatctacaagttaagggagaagtagaagccaaggttgaagaattaaaatttgatcgttactctgtatttaggcctggagttctgttatgtgataggcaagaatctcgcccaggtgaatggctggttagaaagttctttggctccttaccagactcttgggccagtgggcattctgtgcctgtggtgaccgtggttagagcaatgctgaacaatgtggtgagaccaagagacaagcagatggaactgctggagaacaaggccatccatgacctggggaaagcgcatggctctctcaagccatgaccacattggagaaatggtttttattgtcaaccttaacacccatcaccaaatcggtaatttcagggtctaaaaaaagtcagcatgttttaactttgttgttttactatcctcaggcatccattccaatcaagaaatgatggtgctctgcatcagtggttcagagcctggttatacatatagatcactcagggagctttggaaaaataaagatttgtcagccctatctcaaacttgaatcaaatttctggggtgtgggcacaataatctgtaattttctttgtttatacttcccctgatgccactggttccgatgccactggctggggggcctgctttgaaatgcttgtctgcagagtcacagcagccatgaaaaccttatgaccgtgcaaatgagctctgctctaaaattgttgacattcatgtctctgagttacaaaagtgctaattcactacatgtaattgtgtaagtaaacattgtgcctttactacttctttatgtaatagaagttatatacctaagcttatataatacatggggaggattaaataaaggaataaagatga

SEQ ID NO: 449629 - DNA, 1176 bp, Homo sapiens
atgttatatcatattttatctgtgtgtacggggagggggttttatctgcaacgactctcttaattaccaccgctacagaatcaagaagtggtggactttgaaaagttggatgactacgcctctgcctttcaaggtcatgatgttggattctgttgcctgggtaccaccagagggaaagctggggcggagggatttgttcgtgttgaccgagattatgtgctgaagtctgcagagctggcaaaagctggagggtgcaaacatttcaacttgctatcctctaaaggagctgataaatcaagcaattttttatatctacaagttaagggagaagtagaagccaaggttgaagaattaaaatttgatcgttactctgtatttaggcctggagttctgttatgtgataggcaagaatctcgcccaggtgaatggctggttagaaagttctttggctccttaccagactcttgggccagtgggcattctgtgcctgtggtgaccgtggttagagcaatgctgaacaatgtggtgagaccaagagacaagcagatggaactgctggagaacaaggccatccatgacctggggaaagcgcatggctctctcaagccatgaccacattggagaaatggtttttattgtcaaccttaacacccatcaccaaatcggtaatttcagggtctaaaaaaagtcagcatgttttaactttgttgttttactatcctcaggcatccattccaatcaagaaatgatggtgctctgcatcagtggttcagagcctggttatacatatagatcactcagggagctttggaaaaataaagatttgtcagccctatctcaaacttgaatcaaatttctggggtgtgggcacaataatctgtaattttctttgtttatacttcccctgatgccactggttccgatgccactggctggggggcctgctttgaaatgcttgtctgcagagtcacagcagccatgaaaaccttatgaccgtgcaaatgagctctgctctaaaattgttgacattcatgtctctgagttacaaaagtgctaattcactacatgtaattgtgtaagtaaacattgtgcctttactacttctttatgtaatagaagttatatacctaagcttatataatacatggggaggattaaataaaggaataaagatga

SEQ ID NO: 449630 - DNA, 1176 bp, Homo sapiens
cgatgctaatttataggcgcgaaatatagagggagggggaagctatctgcaagactctcttatcctccaccgctacacaatcaagaagtggtggactttgaaaagttggatgactacgcctctgcctttcaaggtcatgatgttggattctgttgcctgggtaccaccagagggaaagctggggcggagggatttgttcgtgttgaccgagattatgtgctgaagtctgcagagctggcaaaagctggagggtgcaaacatttcaacttgctatcctctaaaggagctgataaatcaagcaattttttatatctacaagttaagggagaagtagaagccaaggttgaagaattaaaatttgatcgttactctgtatttaggcctggagttctgttatgtgataggcaagaatctcgcccaggtgaatggctggttagaaagttctttggctccttaccagactcttgggccagtgggcattctgtgcctgtggtgaccgtggttagagcaatgctgaacaatgtggtgagaccaagagacaagcagatggaactgctggagaacaaggccatccatgacctggggaaagcgcatggctctctcaagccatgaccacattggagaaatggtttttattgtcaaccttaacacccatcaccaaatcggtaatttcagggtctaaaaaaagtcagcatgttttaactttgttgttttactatcctcaggcatccattccaatcaagaaatgatggtgctctgcatcagtggttcagagcctggttatacatatagatcactcagggagctttggaaaaataaagatttgtcagccctatctcaaacttgaatcaaatttctggggtgtgggcacaataatctgtaattttctttgtttatacttcccctgatgccactggttccgatgccactggctggggggcctgctttgaaatgcttgtctgcagagtcacagcagccatgaaaaccttatgaccgtgcaaatgagctctgctctaaaattgttgacattcatgtctctgagttacaaaagtgctaattcactacatgtaattgtgtaagtaaacattgtgcctttactacttctttatgtaatagaagttatatacctaagcttatataatacatggggaggattaaataaaggaataaagatga

SEQ ID NO: 449631 - DNA, 1900 bp, Homo sapiens
aggtcccgcccctgtgggcggggcgaggcagcgtcgccgcgaggccacccggaagaccaagccgggtaggcgctgtctccgtcgcctccaacccccccggtccgaccagggaaggtgggatgctctgatggccgggcctgcggcgctgagcgcggcggcggcggctgctctggcggccgccctgctcctgctgcgtcgtgaggacccggggccgggggctggccccaggtaacccctccgcgtatgggaccgagctgggccaggtctcctggccgggccggggataccgtggggtatgcccagtgatgccagcagcttgtggcacctgggcgcaccctccagctcgggccccttccgatgggtctgctggctcaggtgcgggcgatggccggggagccgcgccccgcacgtgactcagcactttccccagagcccggactgcggagaacaatatcctcctccctaacagataaacagcccttgttcctcgggataaggactggcagtcccctgacaccctaagaccggcatctgtcgatgttatttccccagcatggccgaaacagaagccctgtcgaagcttcgggaagacttcaggatgcagaataaatccgtctttattttgggcgccagcggagaaaccggcagagtgctcttaaaggaaatcctggagcagggcctgttttccaaagtcacgctcattggccggaggaagctcaccttcgacgaggaagcttataaaaatgtgaatcaagaagtggtggactttgaaaagttggatgactacgcctctgcctttcaaggtcatgatgttggattctgttgcctgggtaccaccagagggaaagctggggcggagggatttgttcgtgttgaccgagattatgtgctgaagtctgcagagctggcaaaagctggagggtgcaaacatttcaacttgctatcctctaaaggagctgataaatcaagcaattttttatatctacaagttaagggagaagtagaagccaaggttgaagaattaaaatttgatcgttactctgtatttaggcctggagttctgttatgtgataggcaagaatctcgcccaggtgaatggctggttagaaagttctttggctccttaccagactcttgggccagtgggcattctgtgcctgtggtgaccgtggttagagcaatgctgaacaatgtggtgagaccaagagacaagcagatggaactgctggagaacaaggccatccatgacctggggaaagcgcatggctctctcaagccatgaccacattggagaaatggtttttattgtcaaccttaacacccatcaccaaatcggtaatttcagggtctaaaaaaagtcagcatgttttaactttgttgttttactatcctcaggcatccattccaatcaagaaatgatggtgctctgcatcagtggttcagagcctggttatacatatagatcactcagggagctttggaaaaataaagatttgtcagccctatctcaaacttgaatcaaatttctggggtgtgggcacaataatctgtaattttctttgtttatacttcccctgatgccactggttccgatgccactggctggggggcctgctttgaaatgcttgtctgcagagtcacagcagccatgaaaaccttatgaccgtgcaaatgagctctgctctaaaattgttgacattcatgtctctgagttacaaaagtgctaattcactacatgtaattgtgtaagtaaacattgtgcctttactacttctttatgtaatagaagttatatacctaagcttatataatacatggggaggattaaataaaggaataaagatgaatgatgcgtctcactctttttttttctcacctttacaacacaagtcaatataaa

SEQ ID NO: 449632 - DNA, 1893 bp, Homo sapiens
aggtcccgcccctgtgggcggggcgaggcagcgtcgccgcgaggccacccggaagaccaagccgggtaggcgctgtctccgtcgcctccaacccccccggtccgaccagggaaggtgggatgctctgatggccgggcctgcggcgctgagcgcggcggcggcggctgctctggcggccgccctgctcctgctgcgtcgtgaggacccggggccgggggctggccccaggtaacccctccgcgtatgggaccgagctgggccaggtctcctggccgggccggggataccgtggggtatgcccagtgatgccagcagcttgtggcacctgggcgcaccctccagctcgggccccttccgatgggtctgctggctcaggtgcgggcgatggccggggagccgcgccccgcacgtgactcagcactttccccagagcccggactgcggagaacaatatcctcctccctaacagataaacagcccttgttcctcgggataaggactggcagtcccctgacaccctaagaccggcatctgtcgatgttatttccccagcatggccgaaacagaagccctgtcgaagcttcgggaagacttcaggatgcagaataaatccgtctttattttgggcgccagcggagaaaccggcagagtgctcttaaaggaaatcctggagcagggcctgttttccaaagtcacgctcattggccggaggaagctcaccttcgacgaggaagcttataaaaatgtgaatcaagaagtggtggactttgaaaagttggatgactacgcctctgcctttcaaggtcatgatgttggattctgttgcctgggtaccaccagagggaaagctggggcggagggatttgttcgtgttgaccgagattatgtgctgaagtctgcagagctggcaaaagctggagggtgcaaacatttcaacttgctatcctctaaaggagctgataaatcaagcaattttttatatctacaagttaagggagaagtagaagccaaggttgaagaattaaaatttgatcgttactctgtatttaggcctggagttctgttatgtgataggcaagaatctcgcccaggtgaatggctggttagaaagttctttggctccttaccagactcttgggccagtgggcattctgtgcctgtggtgaccgtggttagagcaatgctgaacaatgtggtgagaccaagagacaagcagatggaactgctggagaacaaggccatccatgacctggggaaagcgcatggctctctcaagccatgaccacattggagaaatggtttttattgtcaaccttaacacccatcaccaaatcggtaatttcagggtctaaaaaaagtcagcatgttttaactttgttgttttactatcctcaggcatccattccaatcaagaaatgatggtgctctgcatcagtggttcagagcctggttatacatatagatcactcagggagctttggaaaaataaagatttgtcagccctatctcaaacttgaatcaaatttctggggtgtgggcacaataatctgtaattttctttgtttatacttcccctgatgccactggttccgatgccactggctggggggcctgctttgaaatgcttgtctgcagagtcacagcagccatgaaaaccttatgaccgtgcaaatgagctctgctctaaaattgttgacattcatgtctctgagttacaaaagtgctaattcactacatgtaattgtgtaagtaaacattgtgcctttactacttctttatgtaatagaagttatatacctaagcttatataatacatggggaggattaaataaaggaataaagatgacggccagctctcttctctcttcgtcataatgtgggtagatatcacaa

SEQ ID NO: 449633 - DNA, 1894 bp, Homo sapiens
aggtcccgcccctgtgggcggggcgaggcagcgtcgccgcgaggccacccggaagaccaagccgggtaggcgctgtctccgtcgcctccaacccccccggtccgaccagggaaggtgggatgctctgatggccgggcctgcggcgctgagcgcggcggcggcggctgctctggcggccgccctgctcctgctgcgtcgtgaggacccggggccgggggctggccccaggtaacccctccgcgtatgggaccgagctgggccaggtctcctggccgggccggggataccgtggggtatgcccagtgatgccagcagcttgtggcacctgggcgcaccctccagctcgggccccttccgatgggtctgctggctcaggtgcgggcgatggccggggagccgcgccccgcacgtgactcagcactttccccagagcccggactgcggagaacaatatcctcctccctaacagataaacagcccttgttcctcgggataaggactggcagtcccctgacaccctaagaccggcatctgtcgatgttatttccccagcatggccgaaacagaagccctgtcgaagcttcgggaagacttcaggatgcagaataaatccgtctttattttgggcgccagcggagaaaccggcagagtgctcttaaaggaaatcctggagcagggcctgttttccaaagtcacgctcattggccggaggaagctcaccttcgacgaggaagcttataaaaatgtgaatcaagaagtggtggactttgaaaagttggatgactacgcctctgcctttcaaggtcatgatgttggattctgttgcctgggtaccaccagagggaaagctggggcggagggatttgttcgtgttgaccgagattatgtgctgaagtctgcagagctggcaaaagctggagggtgcaaacatttcaacttgctatcctctaaaggagctgataaatcaagcaattttttatatctacaagttaagggagaagtagaagccaaggttgaagaattaaaatttgatcgttactctgtatttaggcctggagttctgttatgtgataggcaagaatctcgcccaggtgaatggctggttagaaagttctttggctccttaccagactcttgggccagtgggcattctgtgcctgtggtgaccgtggttagagcaatgctgaacaatgtggtgagaccaagagacaagcagatggaactgctggagaacaaggccatccatgacctggggaaagcgcatggctctctcaagccatgaccacattggagaaatggtttttattgtcaaccttaacacccatcaccaaatcggtaatttcagggtctaaaaaaagtcagcatgttttaactttgttgttttactatcctcaggcatccattccaatcaagaaatgatggtgctctgcatcagtggttcagagcctggttatacatatagatcactcagggagctttggaaaaataaagatttgtcagccctatctcaaacttgaatcaaatttctggggtgtgggcacaataatctgtaattttctttgtttatacttcccctgatgccactggttccgatgccactggctggggggcctgctttgaaatgcttgtctgcagagtcacagcagccatgaaaaccttatgaccgtgcaaatgagctctgctctaaaattgttgacattcatgtctctgagttacaaaagtgctaattcactacatgtaattgtgtaagtaaacattgtgcctttactacttctttatgtaatagaagttatatacctaagcttatataatacatggggaggattaaataaaggaataaagatgatcccgatgcggcagacttatctattgggaacagacacatacaatataa

SEQ ID NO: 449634 - DNA, 1896 bp, Homo sapiens
aggtcccgcccctgtgggcggggcgaggcagcgtcgccgcgaggccacccggaagaccaagccgggtaggcgctgtctccgtcgcctccaacccccccggtccgaccagggaaggtgggatgctctgatggccgggcctgcggcgctgagcgcggcggcggcggctgctctggcggccgccctgctcctgctgcgtcgtgaggacccggggccgggggctggccccaggtaacccctccgcgtatgggaccgagctgggccaggtctcctggccgggccggggataccgtggggtatgcccagtgatgccagcagcttgtggcacctgggcgcaccctccagctcgggccccttccgatgggtctgctggctcaggtgcgggcgatggccggggagccgcgccccgcacgtgactcagcactttccccagagcccggactgcggagaacaatatcctcctccctaacagataaacagcccttgttcctcgggataaggactggcagtcccctgacaccctaagaccggcatctgtcgatgttatttccccagcatggccgaaacagaagccctgtcgaagcttcgggaagacttcaggatgcagaataaatccgtctttattttgggcgccagcggagaaaccggcagagtgctcttaaaggaaatcctggagcagggcctgttttccaaagtcacgctcattggccggaggaagctcaccttcgacgaggaagcttataaaaatgtgaatcaagaagtggtggactttgaaaagttggatgactacgcctctgcctttcaaggtcatgatgttggattctgttgcctgggtaccaccagagggaaagctggggcggagggatttgttcgtgttgaccgagattatgtgctgaagtctgcagagctggcaaaagctggagggtgcaaacatttcaacttgctatcctctaaaggagctgataaatcaagcaattttttatatctacaagttaagggagaagtagaagccaaggttgaagaattaaaatttgatcgttactctgtatttaggcctggagttctgttatgtgataggcaagaatctcgcccaggtgaatggctggttagaaagttctttggctccttaccagactcttgggccagtgggcattctgtgcctgtggtgaccgtggttagagcaatgctgaacaatgtggtgagaccaagagacaagcagatggaactgctggagaacaaggccatccatgacctggggaaagcgcatggctctctcaagccatgaccacattggagaaatggtttttattgtcaaccttaacacccatcaccaaatcggtaatttcagggtctaaaaaaagtcagcatgttttaactttgttgttttactatcctcaggcatccattccaatcaagaaatgatggtgctctgcatcagtggttcagagcctggttatacatatagatcactcagggagctttggaaaaataaagatttgtcagccctatctcaaacttgaatcaaatttctggggtgtgggcacaataatctgtaattttctttgtttatacttcccctgatgccactggttccgatgccactggctggggggcctgctttgaaatgcttgtctgcagagtcacagcagccatgaaaaccttatgaccgtgcaaatgagctctgctctaaaattgttgacattcatgtctctgagttacaaaagtgctaattcactacatgtaattgtgtaagtaaacattgtgcctttactacttctttatgtaatagaagttatatacctaagcttatataatacatggggaggattaaataaaggaataaagatgagcgatgcgcgccgtcccccccctcactctccacccaccgagtgtgcggag

SEQ ID NO: 449635 - DNA, 1910 bp, Homo sapiens
  misc_feature (1859)..(1859): n is a, c, g, or t
  misc_feature (1867)..(1867): n is a, c, g, or t
aggtcccgcccctgtgggcggggcgaggcagcgtcgccgcgaggccacccggaagaccaagccgggtaggcgctgtctccgtcgcctccaacccccccggtccgaccagggaaggtgggatgctctgatggccgggcctgcggcgctgagcgcggcggcggcggctgctctggcggccgccctgctcctgctgcgtcgtgaggacccggggccgggggctggccccaggtaacccctccgcgtatgggaccgagctgggccaggtctcctggccgggccggggataccgtggggtatgcccagtgatgccagcagcttgtggcacctgggcgcaccctccagctcgggccccttccgatgggtctgctggctcaggtgcgggcgatggccggggagccgcgccccgcacgtgactcagcactttccccagagcccggactgcggagaacaatatcctcctccctaacagataaacagcccttgttcctcgggataaggactggcagtcccctgacaccctaagaccggcatctgtcgatgttatttccccagcatggccgaaacagaagccctgtcgaagcttcgggaagacttcaggatgcagaataaatccgtctttattttgggcgccagcggagaaaccggcagagtgctcttaaaggaaatcctggagcagggcctgttttccaaagtcacgctcattggccggaggaagctcaccttcgacgaggaagcttataaaaatgtgaatcaagaagtggtggactttgaaaagttggatgactacgcctctgcctttcaaggtcatgatgttggattctgttgcctgggtaccaccagagggaaagctggggcggagggatttgttcgtgttgaccgagattatgtgctgaagtctgcagagctggcaaaagctggagggtgcaaacatttcaacttgctatcctctaaaggagctgataaatcaagcaattttttatatctacaagttaagggagaagtagaagccaaggttgaagaattaaaatttgatcgttactctgtatttaggcctggagttctgttatgtgataggcaagaatctcgcccaggtgaatggctggttagaaagttctttggctccttaccagactcttgggccagtgggcattctgtgcctgtggtgaccgtggttagagcaatgctgaacaatgtggtgagaccaagagacaagcagatggaactgctggagaacaaggccatccatgacctggggaaagcgcatggctctctcaagccatgaccacattggagaaatggtttttattgtcaaccttaacacccatcaccaaatcggtaatttcagggtctaaaaaaagtcagcatgttttaactttgttgttttactatcctcaggcatccattccaatcaagaaatgatggtgctctgcatcagtggttcagagcctggttatacatatagatcactcagggagctttggaaaaataaagatttgtcagccctatctcaaacttgaatcaaatttctggggtgtgggcacaataatctgtaattttctttgtttatacttcccctgatgccactggttccgatgccactggctggggggcctgctttgaaatgcttgtctgcagagtcacagcagccatgaaaaccttatgaccgtgcaaatgagctctgctctaaaattgttgacattcatgtctctgagttacaaaagtgctaattcactacatgtaattgtgtaagtaaacattgtgcctttactacttctttatgtaatagaagttatatacctaagcttatataatacatggggaggattaaataaaggaataaagatgagcggatgcggccngaatccanccattctgacgaaacacaaatgacttccacgcaccgaccgcgc

SEQ ID NO: 449636 - DNA, 1917 bp, Homo sapiens
aggtcccgcccctgtgggcggggcgaggcagcgtcgccgcgaggccacccggaagaccaagccgggtaggcgctgtctccgtcgcctccaacccccccggtccgaccagggaaggtgggatgctctgatggccgggcctgcggcgctgagcgcggcggcggcggctgctctggcggccgccctgctcctgctgcgtcgtgaggacccggggccgggggctggccccaggtaacccctccgcgtatgggaccgagctgggccaggtctcctggccgggccggggataccgtggggtatgcccagtgatgccagcagcttgtggcacctgggcgcaccctccagctcgggccccttccgatgggtctgctggctcaggtgcgggcgatggccggggagccgcgccccgcacgtgactcagcactttccccagagcccggactgcggagaacaatatcctcctccctaacagataaacagcccttgttcctcgggataaggactggcagtcccctgacaccctaagaccggcatctgtcgatgttatttccccagcatggccgaaacagaagccctgtcgaagcttcgggaagacttcaggatgcagaataaatccgtctttattttgggcgccagcggagaaaccggcagagtgctcttaaaggaaatcctggagcagggcctgttttccaaagtcacgctcattggccggaggaagctcaccttcgacgaggaagcttataaaaatgtgaatcaagaagtggtggactttgaaaagttggatgactacgcctctgcctttcaaggtcatgatgttggattctgttgcctgggtaccaccagagggaaagctggggcggagggatttgttcgtgttgaccgagattatgtgctgaagtctgcagagctggcaaaagctggagggtgcaaacatttcaacttgctatcctctaaaggagctgataaatcaagcaattttttatatctacaagttaagggagaagtagaagccaaggttgaagaattaaaatttgatcgttactctgtatttaggcctggagttctgttatgtgataggcaagaatctcgcccaggtgaatggctggttagaaagttctttggctccttaccagactcttgggccagtgggcattctgtgcctgtggtgaccgtggttagagcaatgctgaacaatgtggtgagaccaagagacaagcagatggaactgctggagaacaaggccatccatgacctggggaaagcgcatggctctctcaagccatgaccacattggagaaatggtttttattgtcaaccttaacacccatcaccaaatcggtaatttcagggtctaaaaaaagtcagcatgttttaactttgttgttttactatcctcaggcatccattccaatcaagaaatgatggtgctctgcatcagtggttcagagcctggttatacatatagatcactcagggagctttggaaaaataaagatttgtcagccctatctcaaacttgaatcaaatttctggggtgtgggcacaataatctgtaattttctttgtttatacttcccctgatgccactggttccgatgccactggctggggggcctgctttgaaatgcttgtctgcagagtcacagcagccatgaaaaccttatgaccgtgcaaatgagctctgctctaaaattgttgacattcatgtctctgagttacaaaagtgctaattcactacatgtaattgtgtaagtaaacattgtgcctttactacttctttatgtaatagaagttatatacctaagcttatataatacatggggaggattaaataaaggaataaagatgacaacgtagatcgcggccggccccccaccgcccgccattcccaaacacccactggcgaatgtgcgggctacc

SEQ ID NO: 449637 - DNA, 1872 bp, Homo sapiens
aggtcccgcccctgtgggcggggcgaggcagcgtcgccgcgaggccacccggaagaccaagccgggtaggcgctgtctccgtcgcctccaacccccccggtccgaccagggaaggtgggatgctctgatggccgggcctgcggcgctgagcgcggcggcggcggctgctctggcggccgccctgctcctgctgcgtcgtgaggacccggggccgggggctggccccaggtaacccctccgcgtatgggaccgagctgggccaggtctcctggccgggccggggataccgtggggtatgcccagtgatgccagcagcttgtggcacctgggcgcaccctccagctcgggccccttccgatgggtctgctggctcaggtgcgggcgatggccggggagccgcgccccgcacgtgactcagcactttccccagagcccggactgcggagaacaatatcctcctccctaacagataaacagcccttgttcctcgggataaggactggcagtcccctgacaccctaagaccggcatctgtcgatgttatttccccagcatggccgaaacagaagccctgtcgaagcttcgggaagacttcaggatgcagaataaatccgtctttattttgggcgccagcggagaaaccggcagagtgctcttaaaggaaatcctggagcagggcctgttttccaaagtcacgctcattggccggaggaagctcaccttcgacgaggaagcttataaaaatgtgaatcaagaagtggtggactttgaaaagttggatgactacgcctctgcctttcaaggtcatgatgttggattctgttgcctgggtaccaccagagggaaagctggggcggagggatttgttcgtgttgaccgagattatgtgctgaagtctgcagagctggcaaaagctggagggtgcaaacatttcaacttgctatcctctaaaggagctgataaatcaagcaattttttatatctacaagttaagggagaagtagaagccaaggttgaagaattaaaatttgatcgttactctgtatttaggcctggagttctgttatgtgataggcaagaatctcgcccaggtgaatggctggttagaaagttctttggctccttaccagactcttgggccagtgggcattctgtgcctgtggtgaccgtggttagagcaatgctgaacaatgtggtgagaccaagagacaagcagatggaactgctggagaacaaggccatccatgacctggggaaagcgcatggctctctcaagccatgaccacattggagaaatggtttttattgtcaaccttaacacccatcaccaaatcggtaatttcagggtctaaaaaaagtcagcatgttttaactttgttgttttactatcctcaggcatccattccaatcaagaaatgatggtgctctgcatcagtggttcagagcctggttatacatatagatcactcagggagctttggaaaaataaagatttgtcagccctatctcaaacttgaatcaaatttctggggtgtgggcacaataatctgtaattttctttgtttatacttcccctgatgccactggttccgatgccactggctggggggcctgctttgaaatgcttgtctgcagagtcacagcagccatgaaaaccttatgaccgtgcaaatgagctctgctctaaaattgttgacattcatgtctctgagttacaaaagtgctaattcactacatgtaattgtgtaagtaaacattgtgcctttactacttctttatgtaatagaagttatatacctaagcttatataatacatggggaggattaaataaaggaataaagatgagcttgttttgtcctgtgacttttttg

SEQ ID NO: 449638 - DNA, 1384 bp, Homo sapiens
aggtcccgcccctgtgggcggggcgaggcagcgtcgccgcgaggccacccggaagaccaagccgggtaggcgctgtctccgtcgcctccaacccccccggtccgaccagggaaggtgggatgctctgatggccgggcctgcggcgctgagcgcggcggcggcggctgctctggcggccgccctgctcctgctgcgtcgtgaggacccggggccgggggctggccccagcatggccgaaacagaagccctgtcgaagcttcgggaagacttcaggatgcagaataaatccgtctttattttgggcgccagcggagaaaccggcagagtgctcttaaaggaaatcctggagcagggcctgttttccaaagtcacgctcattggccggaggaagctcaccttcgacgaggaagcttataaaaatgtgaatcaagaagtggtggactttgaaaagttggatgactacgcctctgcctttcaaggtcatgatgttggattctgttgcctgggtaccaccagagggaaagctggggcgggagaagtagaagccaaggttgaagaattaaaatttgatcgttactctgtatttaggcctggagttctgttatgtgataggcaagaatctcgcccaggtgaatggctggttagaaagttctttggctccttaccagactcttgggccagtgggcattctgtgcctgtggtgaccgtggttagagcaatgctgaacaatgtggtgagaccaagagacaagcagatggaactgctggagaacaaggccatccatgacctggggaaagcgcatggctctctcaagccatgaccacattggagaaatggtttttattgtcaaccttaacacccatcaccaaatcggtaatttcagggtctaaaaaaagtcagcatgttttaactttgttgttttactatcctcaggcatccattccaatcaagaaatgatggtgctctgcatcagtggttcagagcctggttatacatatagatcactcagggagctttggaaaaataaagatttgtcagccctatctcaaacttgaatcaaatttctggggtgtgggcacaataatctgtaattttctttgtttatacttcccctgatgccactggttccgatgccactggctggggggcctgctttgaaatgcttgtctgcagagtcacagcagccatgaaaaccttatgaccgtgcaaatgagctctgctctaaaattgttgacattcatgtctctgagttacaaaagtgctaattcactacatgtaattgtgtaagtaaacattgtgcctttactacttctttatgtaatagaagttatatacctaagcttatataatacatggggaggattaaataaaggaataaagatga

SEQ ID NO: 449639 - DNA, 1504 bp, Homo sapiens
aggtcccgcccctgtgggcggggcgaggcagcgtcgccgcgaggccacccggaagaccaagccgggtaggcgctgtctccgtcgcctccaacccccccggtccgaccagggaaggtgggatgctctgatggccgggcctgcggcgctgagcgcggcggcggcggctgctctggcggccgccctgctcctgctgcgtcgtgaggacccggggccgggggctggccccagcatggccgaaacagaagccctgtcgaagcttcgggaagacttcaggatgcagaataaatccgtctttattttgggcgccagcggagaaaccggcagagtgctcttaaaggaaatcctggagcagggcctgttttccaaagtcacgctcattggccggaggaagctcaccttcgacgaggaagcttataaaaatgtgaatcaagaagtggtggactttgaaaagttggatgactacgcctctgcctttcaaggtcatgatgttggattctgttgcctgggtaccaccagagggaaagctggggcggagggatttgttcgtgttgaccgagattatgtgctgaagtctgcagagctggcaaaagctggagggtgcaaacatttcaacttgctatcctctaaaggagctgataaatcaagcaattttttatatctacaagttaagggagaagtagaagccaaggttgaagaattaaaatttgatcgttaagttctgttatgtgataggcaagaatctcgcccaggtgaatggctggttagaaagttctttggctccttaccagactcttgggccagtgggcattctgtgcctgtggtgaccgtggttagagcaatgctgaacaatgtggtgagaccaagagacaagcagatggaactgctggagaacaaggccatccatgacctggggaaagcgcatggctctctcaagccatgaccacattggagaaatggtttttattgtcaaccttaacacccatcaccaaatcggtaatttcagggtctaaaaaaagtcagcatgttttaactttgttgttttactatcctcaggcatccattccaatcaagaaatgatggtgctctgcatcagtggttcagagcctggttatacatatagatcactcagggagctttggaaaaataaagatttgtcagccctatctcaaacttgaatcaaatttctggggtgtgggcacaataatctgtaattttctttgtttatacttcccctgatgccactggttccgatgccactggctggggggcctgctttgaaatgcttgtctgcagagtcacagcagccatgaaaaccttatgaccgtgcaaatgagctctgctctaaaattgttgacattcatgtctctgagttacaaaagtgctaattcactacatgtaattgtgtaagtaaacattgtgcctttactacttctttatgtaatagaagttatatacctaagcttatataatacatggggaggattaaataaaggaataaagatga

SEQ ID NO: 449640 - DNA, 1241 bp, Homo sapiens
aggtcccgcccctgtgggcggggcgaggcagcgtcgccgcgaggccacccggaagaccaagccgggtaggcgctgtctccgtcgcctccaacccccccggtccgaccagggaaggtgggatgctctgatggccgggcctgcggcgctgagcgcggcggcggcggctgctctggcggccgccctgctcctgctgcgtcgtgaggacccggggccgggggctggccccagcatggccgaaacagaagccctgtcgaagcttcgggaagacttcaggatgcagaataaatccgtctttattttgggcgccagcggagaaaccggcagagtgctcttaaaggaaatcctggagcagggcctgttttccaaagtcacgctcattggccggaggaagctcaccttcgacgaggaagcttataaaaatgtgaatcaagaagtggtggactttgaaaagttggatgactacgcctctgcctttcaaggtcatgatgttggattctgttgcctgggtaccaccagagggaaagctggggcgcggtaaggaaggcatatgctcttttccctttttgctggccagtaatatcaaggattcttttcttgctcactctttttctttgtgcctgttgcaatgcttaaatgtgaataagcctttattgtttaagattctatatgctgcactaacctttggtatccttttaatagtactgataagttcgtctttcaaagtaatccttgagttcaggccccagtgctggagacgtcgtaaatatttacatgattttgcctattgtgattatcgctatcactacatcccctgactaagggaaaccatgatgtctgagtaaaactaattggtttatgctgttaacaatcagctgtttttccccttaataaatgtttgaaatttgaaatgttctgtctcacttgagtgatttgcttcaacttattttcatgtcaagctttaaacttctggaatagaacatcagaacacaggcacgattcaaccagcctccagcgatgactcagccttcagcgatgattcaaccccactaatgattcagtctttactgacgcaaaagtcttttaacgcacattttattttctttttaatggtgttctaaattgagtcagctcctgtacagaagtcatagtttactacatagttagaaatcagagtttactacctggattctgggcaaatgttagtgcgggtacatcttatttaatttatactttgactatag

SEQ ID NO: 449641 - DNA, 825 bp, Homo sapiens
agctcggtaccgtcagacgctgaactatgtggagaaaaaggaacttacactgctggtgggaatgtaaattagggtagtcattgtggaaaacagtatggagatttctcaaaaaactaagaagagaactatcatatccaacagtcctactactatttacccaaagacaaaaaatcagtatatcaaagagacaacctgcactcccatctcccatgtttactgcagcacaattcacaagagcaaagatatggaatgcacttaagtgtccaccaatggatgagtggataaagaaaatgtagtatatatagatgcagtgaaatactatcaggtctaaaaaaagtcagcatgttttaactttgttgttttactatcctcaggcatccattccaatcaagaaatgatggtgctctgcatcagtggttcagagcctggttatacatatagatcactcagggagctttggaaaaataaagatttgtcagccctatctcaaacttgaatcaaatttctggggtgtgggcacaataatctgtaattttctttgtttatacttcccctgatgccactggttccgatgccactggctggggggcctgctttgaaatgcttgtctgcagagtcacagcagccatgaaaaccttatgaccgtgcaaatgagctctgctctaaaattgttgacattcatgtctctgagttacaaaagtgctaattcactacatgtaattgtgtaagtaaacattgtgcctttactacttctttatgtaatagaagttatatacctaagcttatataatacatggggaggattaaataaaggaataaagatga

SEQ ID NO: 449642 - DNA, 906 bp, Homo sapiens
  misc_feature (50)..(50): n is a, c, g, or t
taattgctagagttgcggtacatctgattagtgtaggaaaaagggagggnctagtcgttgactgactctcttaattaccaccgctacagaatcaagaagtggtggactttgaaaagttggatgactacgcctctgcctttcaaggtcatgatgttggattctgttgcctgggtaccaccagagggaaagctggggcgcggtaaggaaggcatatgctcttttccctttttgctggccagtaatatcaaggattcttttcttgctcactctttttctttgtgcctgttgcaatgcttaaatgtgaataagcctttattgtttaagattctatatgctgcactaacctttggtatccttttaatagtactgataagttcgtctttcaaagtaatccttgagttcaggccccagtgctggagacgtcgtaaatatttacatgattttgcctattgtgattatcgctatcactacatcccctgactaagggaaaccatgatgtctgagtaaaactaattggtttatgctgttaacaatcagctgtttttccccttaataaatgtttgaaatttgaaatgttctgtctcacttgagtgatttgcttcaacttattttcatgtcaagctttaaacttctggaatagaacatcagaacacaggcacgattcaaccagcctccagcgatgactcagccttcagcgatgattcaaccccactaatgattcagtctttactgacgcaaaagtcttttaacgcacattttattttctttttaatggtgttctaaattgagtcagctcctgtacagaagtcatagtttactacatagttagaaatcagagtttactacctggattctgggcaaatgttagtgcgggtacatcttatttaatttatactttgactatag

SEQ ID NO: 449643 - DNA, 7117 bp, Homo sapiens
  misc_feature (5786)..(5786): n is a, c, g, or t
tccccgaagctgccaccgcctcctccatctcccggagctggagccgcctcctcggccagtggcgtagccgaatcggtgtcgcggccagccagataggggcggaggtccggaacccagtctggacccgagcggggggccatggagaaagcggcccgaggcgctgtttacaccgactagcgcgggcccgttgcggctgcaggcaccatggaccgagcccccacggagcagaatgtcaagctgtcagctgaggtggagccatttattccccagaagaagagtcctgatacatttatgatccctatggctctcccaaatgataatggaagtgtttctggtgtggaaccaactccaattcccagctacctgattacttgttacccatttgtgcaggaaaaccagtccaatagacagtttcctttatataacaatgatatacgatggcaacaacccaatccaaaccctactggaccatactttgcctatcccattatatctgctcagccgcctgtttctacagagtatacatattatcagctgatgccagcaccatgtgcccaggttatgggtttctatcatccttttcctacaccttactccaacacctttcaggctgcaaatactgtaaatgctatcaccacagaatgcactgagcgtccaagtcagcttggacaggtcttcccattgtccagccatcgaagcagaaacagtaacagaggatcagtggtcccaaaacaacagcttttacaacagcacataaaaagcaaaaggccgctggtgaaaaatgtagctactcagaaagaaacaaatgcagcaggtcctgatagtcgatcaaaaattgtgcttctggtagatgcttcacagcaaactgatttcccatcagatatcgctaacaagtctctctcagagaccactgcaacaatgctctggaagtccaagggcaggagaagaagagcatcccaccctactgctgaatcttctagtgagcagggggctagtgaagccgacattgacagtgatagtggttactgcagtcccaaacacagcaacaaccagcctgcagcaggggctttgagaaatcctgattctgggaccatgaatcatgtggaatcatctatgtgtgcaggtggtgtaaattggtccaatgtaacttgccaggcaactcagaaaaaaccttggatggaaaaaaatcagacattttctagaggtggaaggcaaactgaacaaagaaataattcacaggttggattcagatgccgaggacacagtacttcctcagaaagaagacagaatttgcaaaagagaccagataataagcatttaagctctagtcaatcccatagaagcgatccaaattctgagtctttatattttgaggatgaagatgggtttcaagaactaaatgagaatggaaatgctaaggatgagaatattcaacaaaaactttcttctaaagtattggatgatttacctgaaaactcaccaatcaatatagttcagactccaattcctattaccacctcagttcccaaacgtgcaaaaagtcagaagaagaaagctttagcagcagcccttgccacagctcaagagtattcagaaataagtatggagcaaaaaaaattacaggaagctttatcaaaagcagctggaaaaaagaataaaacacctgtgcagctagatttaggggacatgttagctgctctggaaaaacaacagcaagcaatgaaagcacggcaaattactaacaccagacctctgtcatatacagtggttactgcagcttcttttcacactaaagactctactaatagaaaacctttaaccaaaagtcagccctgtttgacatcctttaattctgtggacattgcttcttctaaagcaaaaaaaggaaaagagaaggaaattgcaaaactaaaacgacccacagcacttaaaaaggttattttaaaagaaagagaggaaaagaaggggcgcttaactgtggaccacaatcttttgggatccgaggaaccaacagaaatgcacttagattttattgatgacttgccacaggagattgtttcccaggaagatactggactaagcatgcccagtgatacttcactctctccagcaagtcagaactctccatactgtatgacacctgtgtcacaaggctctcctgctagttctggaataggcagtccaatggcatcttcaacaataaccaaaatccacagcaaaagatttagagagtattgtaatcaggttctttgtaaagagattgatgaatgtgtgactcttcttctccaagagcttgtcagtttccaggaacgcatctaccaaaaagatcctgtaagagcaaaagcaaggagacgactcgttatgggtctaagagaagttaccaaacatatgaagttaaacaagatcaagtgtgttataatttctccaaactgtgaaaaaatccagtcaaaaggtggtctggatgaggctctctataatgttatagccatggcacgggaacaagaaattccttttgtgtttgcccttggaaggaaagctctaggacgctgtgtgaacaagctggttcctgttagcgtagtgggaatcttcaactactttggtgctgagagcctgtttaataaattagtagaactcactgaggaggccaggaaagcatataaagatatggttgcagcaatggaacaggagcaggctgaggaagccttaaagaatgtgaagaaggtaccacaccacatgggacattctcggaatccctctgcagcaagtgccatttctttctgcagtgttatttctgaaccgatctctgaagtaaatgaaaaggaatatgaaacaaattggagaaacatggtggaaacttcagatggactggaagcatcagaaaatgagaaagaggtatcctgtaagcacagcacttctgaaaaacccagtaaacttccatttgacacacccccaattggtaagcagccatcattagtggctacaggcagtactacctcagctacaagtgctgggaaatccacagcaagtgataaagaggaagtgaagccagatgacctggaatgggcctcacagcagagtacagagactggctctttggatggcagttgccgagatcttttgaattcctccatcaccagcaccaccagcactcttgtacctggcatgcttgaagaagaagaagatgaagatgaggaggaggaggaagattatactcatgaacccatatctgtagaagtgcagctcaatagtagaattgagtcttgggtctcagagacccagagaactatggaaacccttcagcttggaaaaacccttaatggttctgaggaagacaatgtagagcaaagtggagaagaggaagcagaggcgcctgaggtgctggagccagggatggacagtgaggcatggactgctgaccagcaggccagtcctgggcagcagaagtccagcaactgcagctcgctcaacaaagagcactctgattctaattacacaacgcaaactacgtaactcaggaaatgtcggctctctatctccagctgtggaagggttgcagccattaccttttatgcttcatctcaacattttgcactgtccagtatttaatatacgtatttaattcccaacaaatatttttgtagcttttacttgttatgatctgtagcttagcttttaattagtatctaagtgtctttctaagaactgtgtggaaaattcagatctgtttcagcttattttgtaatcaaaaacagtgataaaaagaagaccagatcttaaagaaaataaatttcaaatgcttacttaaaagacattttgaaagttaaagaacaaggttctaaggatagaagcagttatcagtgtttgcttcaggactccacctcctctactctaatttgaccaaaaaattgtttgggcttctttaaaaaagaactgggggtggagtcagaaaattaaatgaaaggctgagggtaactaagtccaccagtgttgtatgttaaaaaatcaatgcaacttttatgtggtccacaaatgtttagtcagaagtcactgattattgtaattaattagtgttgggatgggctaaaacagagccttcaaaacttcggctagcagtggagccaccatcttagattatagctagctagcctcatttgtggaaagtgatagatgctgtctataatagtgaacagtcacccatgataggacctccaggttctgtctcatatttgcttcttacttacctcaggaatgctcttgtacatagacttatttacaaaaagctaggcacatgttgacaggtgaataactgtaaccgattgtatgactgctgcacttacatgtaaactcttcagaaacagagtcttatactggtgtgttctcttgcatgcttctggttcaggactcttgatttgagatatggatttgattgagtatccaaacttgtcctgagtgcaaaactgtttcaccttttaaaaaatacctattttgcacctagccttgagcaccttccacatagcaatgaccatagttactgtcaggaggtcaaggaaaggaactttgcacaacttgtgacatgtatcctgataatcaaggcttagaggaggaagttttagaagataagagaaagttgttctaattgtgctgaaactattagatgatttagagtatacagatatgtaggtattaattctctattcactattatttatctctgcccttctctaggagtttgtatacctgcttaggagacaataaatgagctaaatgttttatttgctagtcagtcaccacctggacttcagtgactttacaagtttatgtaatggtggaagaatgacaaactatgtaatttttttgtcttccatccaactccccaccacccccaactgtcccccccacccccctcacacacatgcacacatccgtacgtgtgtgtgttttccacttacaagcttccataagcaggcacaaaactgagaaggaaggggtattatccctgccctgattatctggggcagggctttgcctcacagaggcaggagagaagaattgggcagattctttactgaactcattgggactactgtgctagttttgatgttttataatgctggcatttaattactggagagattggattcttggttgatgatttagtatttgtgaattgtgaaagttcaggagctgtgtagaaaatgttagtcaatcaactttattattgtgctaaaaggggacattcttatactgtcctgtctaaactgttctccagtatagacttcctaggcactaaatatccaatatttaaaggaacacagcaggtaaggaatgaagcctctgaaatagtactcatggatttatacatggcagatcttactgtctctacacatttggaagtgttcgttggtttaaagaaatgatagaggttttgaactactgacagtcttaaaagtgaatttaaaaactgttcatactttttatggtgtaaatttcctttgctcgatgtcagtgattcagataactcttgaccttgagatgatggcttttcacaggtttcttatattttatatctcttctgaacatgaattgtcattttagatttttgacatttgtatcaaaagagaagttgaggaaatcttcagaacactggtaacttttagttttgctatagacttcagaagtgtttatttatatgttcggtaaatgctctcgcatatgcagtacctcttctgccagcaaatccaagggaccatagcctttttatgagacaggtcacctctagaggacancccaagaattattaaaggaaatgttaccattttgagagcatgcttaaataaatattaataatgtctttataacttgtttcctttaaattttggaatattgaattacaggctttggaggagttgtgaaaattaggaaagtttttatatattttttgaagtgggcatggttggctctttgaagacctataaagagatccagtgggaagagtaagggttggttcatcatcacaagaaataaaaaacatagtgattttttctcttaatgtgtagaggtggttttactggcaataattaataatagatttctatttcagtatgtaagcatattaactaaaatatgaattacacttccaaagttagatttctgcttcagtaggtttgtttgctgtgaagattacttctcaaaagacagatgttcatattagcttaattttcggtttaaatatgtttgtaaatgatgtaatatatttcttttgactaaatgtggaaaagtaatgtgtgttatacattgagaagtttttactggctttgactggaggttgtttttgcagagatggtattttatatgattccagtatttggaaaagaattagtcaaaaggaattcacatagtttaaatactgagaaattaatatccaaatatgtacttgtctgatttctaaataagctgggggaggagggaggggtgggaattgaaatgtgcaaatgagtagtgaatgctacactcattttcaactctttaacatgaaactgttcaatcttaacacattgttactttaatatatgtataaagaagtattactgtttgtaaagctgctgtttgcttaaaaaaaaaaaaacacccttgtcatgtattttctgtatgttgggccaacaggttagaacatcaactcatttaaaaatttttatctttttttgatttaaaaaaattctgtgaaataatttatttacagacatcttcctcctccctcatcccttccaacctttacatacatcacagaatcaaccaaactgtttgcctaatctgaaatctgaatcctaatgagaaaaatttaaattttgttggcacatcacaccttgaaagtatttgtattattttataatttaatttctaaatataccacataagtttataatttaatgtcttaattgtaatgctctaataaaaaactagcaaaattagtgtgagttataacatgaagggattttcatcttttgctgtatgaaggataattgttatatcacatttggggggtaataacagcttttttgcactatgtaaatactagtggggattcttctgtactaataaaatgattattgaaatgaaa

SEQ ID NO: 449644 - DNA, 2592 bp, Homo sapiens
  misc_feature (1250)..(1250): n is a, c, g, or t
tgagattgaacatctaatctcatagttgccaagacagtctctggtgtaaaagaaaataccaagcaatagtccttaactttgaagctgtcatggttagcatatattagtatttctagactcagattttagtttaaatttatgtctgtgctatagttacaggatgatttagcaaaattgcccgcaattaggtcatgtgtaacctagtggttagggtgttacttatgatagtcgtgatagccattctaaccctgcttatactgtctgagtgattagcacttcattggtatagtttattttatggctgtataaaagtactttcagcctttttcaagttatgtcacacagaaaatttcgtttttctaggactgtaaatggatgaggcagctgttaactggctataggctctgtcattcctgagggctgagtcaatcaatatttccacccatctataaaccactgttgcacattagtgtgccagtgcacattctttgagaaattgtggatgtatggtatataaggccattcaactactcaaatattaaatgctcaagttaatattctgaggctcttaatcaagagtcttgagggttagacaaatagtagaaactaaggaatcattttcaattgaagttagcatgatattaaatatctttgcctatattggataatgtgcaaactgattcatgaaactaaatttaataatactatttttctatttgaaaaaaatggccaagtatacagtatgataaacttaattgattttcttggtttaccaaataatctttgtgaatttatgagtaaaccagccaacagattatttaaaaaatatttttaagaatatggccgtgaacattttactattttgctttgtcatgggagtaatgaggaaaagccctatgcttcaactccctagtccttaggaccccatattgatttggtgagggggctgctgggacaggaagaattttgctagtgttttatatgaactgcattagaagaagctccactcctgaagatgtcagtggacagatttgcctcttctcttctttcccttggacccagagcctgcttctattgccaggaggggagccaggaaaagagctggacttggccaagtgattaggggagtatgagaggaggagtaggaggctctgagattgagctgaaaatgaggaattaaatcaccctatgtaaagatcaccttacacaatggtcactttactctgttctttacagaaggctgtcacggntgtgtaccttgaatgggaactttggactgccattgttggtagatacagtagctaggtgtttaacttttaggcagaaatatcttgaggaattggaaggcagagttacagacaatgctggtatgtggaatactgtaaaaccatcaggttgggttcgtttatactgttgtttacattgttactgcatgtacataatgatctctatagcaaagaaatttataagatgatgatagttttgtctcctttcccaaaattatcatgaagccactgttctgttttgtcttttattagtgtaagttaagagattttgctttagtggtatttttagacttgtcaatagatttgttcttctttgatttggttttgcagacagtttcctttatataacaatgatatacgatggcaacaacccaatccaaaccctactggaccatactttgcctatcccattatatctgctcagccgcctgtttctacagagtatacatattatcagctgatgccagcaccatgtgcccaggttatgggtttctatcatccttttcctacaccttactccaacacctttcaggctgcaaatactgtaaatgctatcaccacagaatgcactgagcgtccaagtcagcttggacaggtcttcccattgtccagccatcgaagcagaaacagtaacagaggatcagtggtcccaaaagtaagtgtctggtcttgattggcttttaaatttgatattacttatattagtataagcaatttgctacttgggttgattgaccattaatgctgaatttactataaaacatattgttcactattgtaaaatggtaaagggtatgtaattcttaaaataattttctttgtgttgtttgttcctcattcttaattgtgatatgatttataatcattttcacattcctttagagagttttacataacataaggcagaaatatttacaaataaatttagtgataaaaattgcatggtgacactaacatttgtaagtgattagtgtggatcttgtgctagctgtgttgaatggctaatgcacttcaagatatttcaatgggccaggtgtagtggccacacctataatcccagcactttgggaggccgaggcaggctagtcgcttgagcccaagagtttgagaccagtctgggcaacatgcgaaaccccatctctaccaaaaatacaaaaattagctgggtatgttagtgcatgcctgtagctccagctacttgggggctgaggtgggaagatcgcttgagcccaggaggtcaagactgcagtgaactgagatagcaccactacactccagcgtaggtgacagagtgacaccctgtctc

SEQ ID NO: 449645 - DNA, 706 bp, Homo sapiens
attgtgaagtttcaaaggtagaatggttctgactgaagaccagttgcaaggaattgccatgtttgagggttgtacaggagagtagaactaattatttacccctataatggacttctaaattggttaattgcattggcttagtctctaaaggataggtaaaagctgtatctgagggacactgcctagccatgtatagtgctcctactgttatgatgtcgttttttccatgggaggaggatgttcttgtttttgtagttattggaaattttgaaagtatgtgggattggccctaatggtgaaactaatgttcctctttgtttttagtggttactgcagcttcttttcacactaaagactctactaatagaaaacctttaaccaaaagtcagccctgtttgacatcctttaattctgtggacattgcttcttctaaagcaaaaaaaggaaaagagaaggaaattgcaaaactaaaacgacccacagcacttaaaaaggtaaaccaaaatctggtgggatatttattttataggatgaataaggattttaatctgttttgtaaaagtaggttgtggtgtcttagccaacagattgttgtgagaagtattcatacacatgaatcttgacgataatgtgttaatttgaagctcaggatatcatcagtatcatgactatctttctgtgtagaacggggccctgtgaaaatgaa

SEQ ID NO: 449646 - DNA, 948 bp, Homo sapiens
attgtgaagtttcaaaggtagaatggttctgactgaagaccagttgcaaggaattgccatgtttgagggttgtacaggagagtagaactaattatttacccctataatggacttctaaattggttaattgcattggcttagtctctaaaggataggtaaaagctgtatctgagggacactgcctagccatgtatagtgctcctactgttatgatgtcgttttttccatgggaggaggatgttcttgtttttgtagttattggaaattttgaaagtatgtgggattggccctaatggtgaaactaatgttcctctttgtttttagtggttactgcagcttcttttcacactaaagactctactaatagaaaacctttaaccaaaagtcagccctgtttgacatcctttaattctgtggacattgcttcttctaaagcaaaaaaaggaaaagagaaggaaattgcaaaactaaaacgacccacagcacttaaaaaggttattttaaaagaaagagaggaaaagaaggggcgcttaactgtggaccacaatcttttgggatccgaggaaccaacagaaatgcacttagattttattgatgacttgccacaggagattgtttcccaggaaggtaaggagctccccctttctcctcttctcatggaatggtctgaaatattttaatagatacgtaagctatcactagttaatgctcctgattggaagacgtgctccatattttacataaatctctttattcttcagagtggtttcttttaaagatgcttttgtagggagatggttaaagagaaggggacaggtattatatagtaggcctatgacatttttgaggcttaaatcctgaatttgtagtgaattctcaaaattaagatgtcacgaatgcatgggatctctggaattgtcacaagtattttcattttgttttctttta

SEQ ID NO: 449647 - DNA, 640 bp, Homo sapiens
tccccgaagctgccaccgcctcctccatctcccggagctggagccgcctcctcggccagtggcgtagccgaatcggtgtcgcggccagccagataggggcggaggtccggaacccagtctggacccgagcggggggccatggagaaagcggcccgaggcgctgtttacaccgactagcgcgggcccgttgcggctgcaggcaccatggaccgagcccccacggagcagaatgtcaagctgtcagctgaggtggagccatttattccccagaagaagagtcctgatacatttatgatccctatggctctcccaaatgataatggaagtgtttctggtgtggaaccaactccaattcccagctacctgattacttgttacccatttgtgcaggaaaaccagtccaatagacagtttcctttatataacaatgatatacgacggacacattaattactgggattcagagacgggggagtaacgactccttcgctgggaaaggccacacgaaccaggtgtccagatgaccgtgtatgagtcggggcagctcatcagctgcagcatggacgacaccgtcggtacaccacctcatgctgcgggactacagcggacaaggagtgtgaaactgacgtcagcaagtgcg

SEQ ID NO: 449648 - DNA, 6894 bp, Homo sapiens
  misc_feature (5786)..(5786): n is a, c, g, or t
tccccgaagctgccaccgcctcctccatctcccggagctggagccgcctcctcggccagtggcgtagccgaatcggtgtcgcggccagccagataggggcggaggtccggaacccagtctggacccgagcggggggccatggagaaagcggcccgaggcgctgtttacaccgactagcgcgggcccgttgcggctgcaggcaccatggaccgagcccccacggagcagaatgtcaagctgtcagctgaggtggagccatttattccccagaagaagagtcctgatacatttatgatccctatggctctcccaaatgataatggaagtgtttctggtgtggaaccaactccaattcccagctacctgattacttgttacccatttgtgcaggaaaaccagtccaatagacagtttcctttatataacaatgatatacgatggcaacaacccaatccaaaccctactggaccatactttgcctatcccattatatctgctcagccgcctgtttctacagagtatacatattatcagctgatgccagcaccatgtgcccaggttatgggtttctatcatccttttcctacaccttactccaacacctttcaggctgcaaatactgtaaatgctatcaccacagaatgcactgagcgtccaagtcagcttggacaggtcttcccattgtccagccatcgaagcagaaacagtaacagaggatcagtggtcccaaaacaacagcttttacaacagcacataaaaagcaaaaggccgctggtgaaaaatgtagctactcagaaagaaacaaatgcagcaggtcctgatagtcgatcaaaaattgtgcttctggtagatgcttcacagcaaactgatttcccatcagatatcgctaacaagtctctctcagagaccactgcaacaatgctctggaagtccaagggcaggagaagaagagcatcccaccctactgctgaatcttctagtgagcagggggctagtgaagccgacattgacagtgatagtggttactgcagtcccaaacacagcaacaaccagcctgcagcaggggctttgagaaatcctgattctgggaccatgaatcatgtggaatcatctatgtgtgcaggtggtgtaaattggtccaatgtaacttgccaggcaactcagaaaaaaccttggatggaaaaaaatcagacattttctagaggtggaaggcaaactgaacaaagaaataattcacaggttggattcagatgccgaggacacagtacttcctcagaaagaagacagaatttgcaaaagagaccagataataagcatttaagctctagtcaatcccatagaagcgatccaaattctgagtctttatattttgaggatgaagatgggtttcaagaactaaatgagaatggaaatgctaaggatgagaatattcaacaaaaactttcttctaaagtattggatgatttacctgaaaactcaccaatcaatatagttcagactccaattcctattaccacctcagttcccaaacgtgcaaaaagtcagaagaagaaagctttagcagcagcccttgccacagctcaagagtattcagaaataagtatggagcaaaaaaaattacaggaagctttatcaaaagcagctggaaaaaagaataaaacacctgtgcagctagatttaggggacatgttagctgctctggaaaaacaacagcaagcaatgaaagcacggcaaattactaacaccagacctctgtcatatacagtggttactgcagcttcttttcacactaaagactctactaatagaaaacctttaaccaaaagtcagccctgtttgacatcctttaattctgtggacattgcttcttctaaagcaaaaaaaggaaaagagaaggaaattgcaaaactaaaacgacccacagcacttaaaaaggttattttaaaagaaagagaggaaaagaaggggcgcttaactgtggaccacaatcttttgggatccgaggaaccaacagaaatgcacttagattttattgatgacttgccacaggagattgtttcccaggaagatactggactaagcatgcccagtgatacttcactctctccagcaagtcagaactctccatactgtatgacacctgtgtcacaaggctctcctgctagttctggaataggcagtccaatggcatcttcaacaataaccaaaatccacagcaaaagatttagagagtattgtaatcaggttctttgtaaagagattgatgaatgtgtgactcttcttctccaagagcttgtcagtttccaggaacgcatctaccaaaaagatcctgtaagagcaaaagcaaggagacgactcgttatgggtctaagagaagttaccaaacatatgaagttaaacaagatcaagtgtgttataatttctccaaactgtgaaaaaatccagtcaaaaggtggtctggatgaggctctctataatgttatagccatggcacgggaacaagaaattccttttgtgtttgcccttggaaggaaagctctaggacgctgtgtgaacaagctggttcctgttagcgtagtgggaatcttcaactactttggtgctgagagcctgtttaataaattagtagaactcactgaggaggccaggaaagcatataaagatatggttgcagcaatggaacaggagcaggctgaggaagccttaaagaatgtgaagaaggtaccacaccacatgggacattctcggaatccctctgcagcaagtgccatttctttctgcagtgttatttctgaaccgatctctgaagtaaatgaaaaggaatatgaaacaaattggagaaacatggtggaaacttcagatggactggaagcatcagaaaatgagaaagaggtatcctgtaagcacagcacttctgaaaaacccagtaaacttccatttgacacacccccaattggtaagcagccatcattagtggctacaggcagtactacctcagctacaagtgctgggaaatccacagcaagtgataaagaggaagtgaagccagatgacctggaatgggcctcacagcagagtacagagactggctctttggatggcagttgccgagatcttttgaattcctccatcaccagcaccaccagcactcttgtacctggcatgcttgaagaagaagaagatgaagatgaggaggaggaggaagattatactcatgaacccatatctgtagaagtgcagctcaatagtagaattgagtcttgggtctcagagacccagagaactatggaaacccttcagcttggaaaaacccttaatggttctgaggaagacaatgtagagcaaagtggagaagaggaagcagaggcgcctgaggtgctggagccagggatggacagtgaggcatggactgctgaccagcaggccagtcctgggcagcagaagtccagcaactgcagctcgctcaacaaagagcactctgattctaattacacaacgcaaactacgtaactcaggaaatgtcggctctctatctccagctgtggaagggttgcagccattaccttttatgcttcatctcaacattttgcactgtccagtatttaatatacgtatttaattcccaacaaatatttttgtagcttttacttgttatgatctgtagcttagcttttaattagtatctaagtgtctttctaagaactgtgtggaaaattcagatctgtttcagcttattttgtaatcaaaaacagtgataaaaagaagaccagatcttaaagaaaataaatttcaaatgcttacttaaaagacattttgaaagttaaagaacaaggttctaaggatagaagcagttatcagtgtttgcttcaggactccacctcctctactctaatttgaccaaaaaattgtttgggcttctttaaaaaagaactgggggtggagtcagaaaattaaatgaaaggctgagggtaactaagtccaccagtgttgtatgttaaaaaatcaatgcaacttttatgtggtccacaaatgtttagtcagaagtcactgattattgtaattaattagtgttgggatgggctaaaacagagccttcaaaacttcggctagcagtggagccaccatcttagattatagctagctagcctcatttgtggaaagtgatagatgctgtctataatagtgaacagtcacccatgataggacctccaggttctgtctcatatttgcttcttacttacctcaggaatgctcttgtacatagacttatttacaaaaagctaggcacatgttgacaggtgaataactgtaaccgattgtatgactgctgcacttacatgtaaactcttcagaaacagagtcttatactggtgtgttctcttgcatgcttctggttcaggactcttgatttgagatatggatttgattgagtatccaaacttgtcctgagtgcaaaactgtttcaccttttaaaaaatacctattttgcacctagccttgagcaccttccacatagcaatgaccatagttactgtcaggaggtcaaggaaaggaactttgcacaacttgtgacatgtatcctgataatcaaggcttagaggaggaagttttagaagataagagaaagttgttctaattgtgctgaaactattagatgatttagagtatacagatatgtaggtattaattctctattcactattatttatctctgcccttctctaggagtttgtatacctgcttaggagacaataaatgagctaaatgttttatttgctagtcagtcaccacctggacttcagtgactttacaagtttatgtaatggtggaagaatgacaaactatgtaatttttttgtcttccatccaactccccaccacccccaactgtcccccccacccccctcacacacatgcacacatccgtacgtgtgtgtgttttccacttacaagcttccataagcaggcacaaaactgagaaggaaggggtattatccctgccctgattatctggggcagggctttgcctcacagaggcaggagagaagaattgggcagattctttactgaactcattgggactactgtgctagttttgatgttttataatgctggcatttaattactggagagattggattcttggttgatgatttagtatttgtgaattgtgaaagttcaggagctgtgtagaaaatgttagtcaatcaactttattattgtgctaaaaggggacattcttatactgtcctgtctaaactgttctccagtatagacttcctaggcactaaatatccaatatttaaaggaacacagcaggtaaggaatgaagcctctgaaatagtactcatggatttatacatggcagatcttactgtctctacacatttggaagtgttcgttggtttaaagaaatgatagaggttttgaactactgacagtcttaaaagtgaatttaaaaactgttcatactttttatggtgtaaatttcctttgctcgatgtcagtgattcagataactcttgaccttgagatgatggcttttcacaggtttcttatattttatatctcttctgaacatgaattgtcattttagatttttgacatttgtatcaaaagagaagttgaggaaatcttcagaacactggtaacttttagttttgctatagacttcagaagtgtttatttatatgttcggtaaatgctctcgcatatgcagtacctcttctgccagcaaatccaagggaccatagcctttttatgagacaggtcacctctagaggacancccaagaattattaaaggaaatgttaccattttgagagcatgcttaaataaatattaataatgtctttataacttgtttcctttaaattttggaatattgaattacaggctttggaggagttgtgaaaattaggaaagtttttatatattttttgaagtgggcatggttggctctttgaagacctataaagagatccagtgggaagagtaagggttggttcatcatcacaagaaataaaaaacatagtgattttttctcttaatgtgtagaggtggttttactggcaataattaataatagatttctatttcagtatgtaagcatattaactaaaatatgaattacacttccaaagttagatttctgcttcagtaggtttgtttgctgtgaagattacttctcaaaagacagatgttcatattagcttaattttcggtttaaatatgtttgtaaatgatgtaatatatttcttttgactaaattgagtagtgaatgctacactcattttcaactctttaacatgaaactgttcaatcttaacacattgttactttaatatatgtataaagaagtattactgtttgtaaagctgctgtttgcttaaaaaaaaaaaaacacccttgtcatgtattttctgtatgttgggccaacaggttagaacatcaactcatttaaaaatttttatctttttttgatttaaaaaaattctgtgaaataatttatttacagacatcttcctcctccctcatcccttccaacctttacatacatcacagaatcaaccaaactgtttgcctaatctgaaatctgaatcctaatgagaaaaatttaaattttgttggcacatcacaccttgaaagtatttgtattattttataatttaatttctaaatataccacataagtttataatttaatgtcttaattgtaatgctctaataaaaaactagcaaaattagtgtgagttataacatgaagggattttcatcttttgctgtatgaaggataattgttatatcacatttggggggtaataacagcttttttgcactatgtaaatactagtggggattcttctgtactaataaaatgattattgaaatgaaa

SEQ ID NO: 449649 - DNA, 7493 bp, Homo sapiens
  misc_feature (5786)..(5786): n is a, c, g, or t
tccccgaagctgccaccgcctcctccatctcccggagctggagccgcctcctcggccagtggcgtagccgaatcggtgtcgcggccagccagataggggcggaggtccggaacccagtctggacccgagcggggggccatggagaaagcggcccgaggcgctgtttacaccgactagcgcgggcccgttgcggctgcaggcaccatggaccgagcccccacggagcagaatgtcaagctgtcagctgaggtggagccatttattccccagaagaagagtcctgatacatttatgatccctatggctctcccaaatgataatggaagtgtttctggtgtggaaccaactccaattcccagctacctgattacttgttacccatttgtgcaggaaaaccagtccaatagacagtttcctttatataacaatgatatacgatggcaacaacccaatccaaaccctactggaccatactttgcctatcccattatatctgctcagccgcctgtttctacagagtatacatattatcagctgatgccagcaccatgtgcccaggttatgggtttctatcatccttttcctacaccttactccaacacctttcaggctgcaaatactgtaaatgctatcaccacagaatgcactgagcgtccaagtcagcttggacaggtcttcccattgtccagccatcgaagcagaaacagtaacagaggatcagtggtcccaaaacaacagcttttacaacagcacataaaaagcaaaaggccgctggtgaaaaatgtagctactcagaaagaaacaaatgcagcaggtcctgatagtcgatcaaaaattgtgcttctggtagatgcttcacagcaaactgatttcccatcagatatcgctaacaagtctctctcagagaccactgcaacaatgctctggaagtccaagggcaggagaagaagagcatcccaccctactgctgaatcttctagtgagcagggggctagtgaagccgacattgacagtgatagtggttactgcagtcccaaacacagcaacaaccagcctgcagcaggggctttgagaaatcctgattctgggaccatgaatcatgtggaatcatctatgtgtgcaggtggtgtaaattggtccaatgtaacttgccaggcaactcagaaaaaaccttggatggaaaaaaatcagacattttctagaggtggaaggcaaactgaacaaagaaataattcacaggttggattcagatgccgaggacacagtacttcctcagaaagaagacagaatttgcaaaagagaccagataataagcatttaagctctagtcaatcccatagaagcgatccaaattctgagtctttatattttgaggatgaagatgggtttcaagaactaaatgagaatggaaatgctaaggatgagaatattcaacaaaaactttcttctaaagtattggatgatttacctgaaaactcaccaatcaatatagttcagactccaattcctattaccacctcagttcccaaacgtgcaaaaagtcagaagaagaaagctttagcagcagcccttgccacagctcaagagtattcagaaataagtatggagcaaaaaaaattacaggaagctttatcaaaagcagctggaaaaaagaataaaacacctgtgcagctagatttaggggacatgttagctgctctggaaaaacaacagcaagcaatgaaagcacggcaaattactaacaccagacctctgtcatatacagtggttactgcagcttcttttcacactaaagactctactaatagaaaacctttaaccaaaagtcagccctgtttgacatcctttaattctgtggacattgcttcttctaaagcaaaaaaaggaaaagagaaggaaattgcaaaactaaaacgacccacagcacttaaaaaggttattttaaaagaaagagaggaaaagaaggggcgcttaactgtggaccacaatcttttgggatccgaggaaccaacagaaatgcacttagattttattgatgacttgccacaggagattgtttcccaggaagatactggactaagcatgcccagtgatacttcactctctccagcaagtcagaactctccatactgtatgacacctgtgtcacaaggctctcctgctagttctggaataggcagtccaatggcatcttcaacaataaccaaaatccacagcaaaagatttagagagtattgtaatcaggttctttgtaaagagattgatgaatgtgtgactcttcttctccaagagcttgtcagtttccaggaacgcatctaccaaaaagatcctgtaagagcaaaagcaaggagacgactcgttatgggtctaagagaagttaccaaacatatgaagttaaacaagatcaagtgtgttataatttctccaaactgtgaaaaaatccagtcaaaaggtggtctggatgaggctctctataatgttatagccatggcacgggaacaagaaattccttttgtgtttgcccttggaaggaaagctctaggacgctgtgtgaacaagctggttcctgttagcgtagtgggaatcttcaactactttggtgctgagagcctgtttaataaattagtagaactcactgaggaggccaggaaagcatataaagatatggttgcagcaatggaacaggagcaggctgaggaagccttaaagaatgtgaagaaggtaccacaccacatgggacattctcggaatccctctgcagcaagtgccatttctttctgcagtgttatttctgaaccgatctctgaagtaaatgaaaaggaatatgaaacaaattggagaaacatggtggaaacttcagatggactggaagcatcagaaaatgagaaagaggtatcctgtaagcacagcacttctgaaaaacccagtaaacttccatttgacacacccccaattggtaagcagccatcattagtggctacaggcagtactacctcagctacaagtgctgggaaatccacagcaagtgataaagaggaagtgaagccagatgacctggaatgggcctcacagcagagtacagagactggctctttggatggcagttgccgagatcttttgaattcctccatcaccagcaccaccagcactcttgtacctggcatgcttgaagaagaagaagatgaagatgaggaggaggaggaagattatactcatgaacccatatctgtagaagtgcagctcaatagtagaattgagtcttgggtctcagagacccagagaactatggaaacccttcagcttggaaaaacccttaatggttctgaggaagacaatgtagagcaaagtggagaagaggaagcagaggcgcctgaggtgctggagccagggatggacagtgaggcatggactgctgaccagcaggccagtcctgggcagcagaagtccagcaactgcagctcgctcaacaaagagcactctgattctaattacacaacgcaaactacgtaactcaggaaatgtcggctctctatctccagctgtggaagggttgcagccattaccttttatgcttcatctcaacattttgcactgtccagtatttaatatacgtatttaattcccaacaaatatttttgtagcttttacttgttatgatctgtagcttagcttttaattagtatctaagtgtctttctaagaactgtgtggaaaattcagatctgtttcagcttattttgtaatcaaaaacagtgataaaaagaagaccagatcttaaagaaaataaatttcaaatgcttacttaaaagacattttgaaagttaaagaacaaggttctaaggatagaagcagttatcagtgtttgcttcaggactccacctcctctactctaatttgaccaaaaaattgtttgggcttctttaaaaaagaactgggggtggagtcagaaaattaaatgaaaggctgagggtaactaagtccaccagtgttgtatgttaaaaaatcaatgcaacttttatgtggtccacaaatgtttagtcagaagtcactgattattgtaattaattagtgttgggatgggctaaaacagagccttcaaaacttcggctagcagtggagccaccatcttagattatagctagctagcctcatttgtggaaagtgatagatgctgtctataatagtgaacagtcacccatgataggacctccaggttctgtctcatatttgcttcttacttacctcaggaatgctcttgtacatagacttatttacaaaaagctaggcacatgttgacaggtgaataactgtaaccgattgtatgactgctgcacttacatgtaaactcttcagaaacagagtcttatactggtgtgttctcttgcatgcttctggttcaggactcttgatttgagatatggatttgattgagtatccaaacttgtcctgagtgcaaaactgtttcaccttttaaaaaatacctattttgcacctagccttgagcaccttccacatagcaatgaccatagttactgtcaggaggtcaaggaaaggaactttgcacaacttgtgacatgtatcctgataatcaaggcttagaggaggaagttttagaagataagagaaagttgttctaattgtgctgaaactattagatgatttagagtatacagatatgtaggtattaattctctattcactattatttatctctgcccttctctaggagtttgtatacctgcttaggagacaataaatgagctaaatgttttatttgctagtcagtcaccacctggacttcagtgactttacaagtttatgtaatggtggaagaatgacaaactatgtaatttttttgtcttccatccaactccccaccacccccaactgtcccccccacccccctcacacacatgcacacatccgtacgtgtgtgtgttttccacttacaagcttccataagcaggcacaaaactgagaaggaaggggtattatccctgccctgattatctggggcagggctttgcctcacagaggcaggagagaagaattgggcagattctttactgaactcattgggactactgtgctagttttgatgttttataatgctggcatttaattactggagagattggattcttggttgatgatttagtatttgtgaattgtgaaagttcaggagctgtgtagaaaatgttagtcaatcaactttattattgtgctaaaaggggacattcttatactgtcctgtctaaactgttctccagtatagacttcctaggcactaaatatccaatatttaaaggaacacagcaggtaaggaatgaagcctctgaaatagtactcatggatttatacatggcagatcttactgtctctacacatttggaagtgttcgttggtttaaagaaatgatagaggttttgaactactgacagtcttaaaagtgaatttaaaaactgttcatactttttatggtgtaaatttcctttgctcgatgtcagtgattcagataactcttgaccttgagatgatggcttttcacaggtttcttatattttatatctcttctgaacatgaattgtcattttagatttttgacatttgtatcaaaagagaagttgaggaaatcttcagaacactggtaacttttagttttgctatagacttcagaagtgtttatttatatgttcggtaaatgctctcgcatatgcagtacctcttctgccagcaaatccaagggaccatagcctttttatgagacaggtcacctctagaggacancccaagaattattaaaggaaatgttaccattttgagagcatgcttaaataaatattaataatgtctttataacttgtttcctttaaattttggaatattgaattacaggctttggaggagttgtgaaaattaggaaagtttttatatattttttgaagtgggcatggttggctctttgaagacctataaagagatccagtgggaagagtaagggttggttcatcatcacaagaaataaaaaacatagtgattttttctcttaatgtgtagaggtggttttactggcaataattaataatagatttctatttcagtatgtaagcatattaactaaaatatgaattacacttccaaagttagatttctgcttcagtaggtttgtttgctgtgaagattacttctcaaaagacagatgttcatattagcttaattttcggtttaaatatgtttgtaaatgatgtaatatatttcttttgactaaatgtggaaaagtaatgtgtgttatacattgagaagtttttactggctttgactggaggttgtttttgcagagatggtattttatatgattccagtatttggaaaagaattagtcaaaaggaattcacatagtttaaatactgagaaattaatatccaaatatgtacttgtctgatttctaaataagctgggggaggagggaggggtgggaattgaaatgtgcaaatgagtagtgaatgctacactcattttcaactctttaacatgaaactgttcaatcttaacacattgttactttaatatatgtataaagaagtattactgtttgtaaagctgctgtttgcttaaaaaaaaaaaaacacccttgtcatgtattttctgtatgttgggccaacaggttagaacatcaactcatttaaaaatttttatctttttttgatttaaaaaaattctgtgaaataatttatttacagacatcttcctcctccctcatcccttccaacctttacatacatcacagaatcaaccaaactgtttgcctaatctgaaatctgaatcctaatgagaaaaatttaaattttgttggcacatcacaccttgaaagtatttgtattattttataatttaatttctaaatataccacataagtttataatttaatgtcttaattgtaatgctctaataaaaaactagcaaaattagtgtgagttataacatgaagggattttcatcttttgctgtatgaaggataattgttatatcacatttggggggtaataacagcttttttgcactatgtaaatactagtggggattcttctgtactaataaaatgattattgaaatgaaaaaaaaaaaaaaaaaaaaaaaaaaaaaatttgtggggggttgggccggagaaaggttttaaaacatttttttggggggcggggccccggtgttagtggaatgggccaaagttgtccacgagaaccgggcatgacaggggctcggtttcccacccaaaaaaaacgccggggacgcgtgtttgaacaatccgaaggttcggggccccgggtcccacacgggaccagcatcgataataacgccgcggggaaaagagaaagaaaaagagaaaaacagagagagggagatgaaaacataaaacaagacaggagaaaacagaagcaggagaaaacgacgaaaagaaagagaaaccgaaaggagacagacaagaggaacaaaag

SEQ ID NO: 449650 - DNA, 6982 bp, Homo sapiens
  misc_feature (5651)..(5651): n is a, c, g, or t
tccccgaagctgccaccgcctcctccatctcccggagctggagccgcctcctcggccagtggcgtagccgaatcggtgtcgcggccagccagataggggcggaggtccggaacccagtctggacccgagcggggggccatggagaaagcggcccgaggcgctgtttacaccgactagcgcgggcccgttgcggctgcaggcaccatggaccgagcccccacggagcagaatgtcaagctgtcagctgaggtggagccatttattccccagaagaagagtcctgatacatttatgatccctatggctctcccaaatgataatggaagtgtttctggtgtggaaccaactccaattcccagctacctgattacttgttacccatttgtgcaggaaaaccagtccaatagacagtttcctttatataacaatgatatacgatggcaacaacccaatccaaaccctactggaccatactttgcctatcccattatatctgctcagccgcctgtttctacagagtatacatattatcagctgatgccagcaccatgtgcccaggttatgggtttctatcatccttttcctacaccttactccaacacctttcaggctgcaaatactgtaaatgctatcaccacagaatgcactgagcgtccaagtcagcttggacaggtcttcccattgtccagccatcgaagcagaaacagtaacagaggatcagtggtcccaaaacaacagcttttacaacagcacataaaaagcaaaaggccgctggtgaaaaatgtagctactcagaaagaaacaaatgcagcaggtcctgatagtcgatcaaaaattgtgcttctggtagatgcttcacagcaaactgatttcccatcagatatcgctaacaagtctctctcagagaccactgcaacaatgctctggaagtccaagggcaggagaagaagagcatcccaccctactgctgaatcttctagtgagcagggggctagtgaagccgacattgacagtgatagtggttactgcagtcccaaacacagcaacaaccagcctgcagcaggggctttgagaaatcctgattctgggaccatgaatcatgtggaatcatctatgtgtgcaggtggtgtaaattggtccaatgtaacttgccaggcaactcagaaaaaaccttggatggaaaaaaatcagacattttctagaggtggaaggcaaactgaacaaagaaataattcacaggatgaagatgggtttcaagaactaaatgagaatggaaatgctaaggatgagaatattcaacaaaaactttcttctaaagtattggatgatttacctgaaaactcaccaatcaatatagttcagactccaattcctattaccacctcagttcccaaacgtgcaaaaagtcagaagaagaaagctttagcagcagcccttgccacagctcaagagtattcagaaataagtatggagcaaaaaaaattacaggaagctttatcaaaagcagctggaaaaaagaataaaacacctgtgcagctagatttaggggacatgttagctgctctggaaaaacaacagcaagcaatgaaagcacggcaaattactaacaccagacctctgtcatatacagtggttactgcagcttcttttcacactaaagactctactaatagaaaacctttaaccaaaagtcagccctgtttgacatcctttaattctgtggacattgcttcttctaaagcaaaaaaaggaaaagagaaggaaattgcaaaactaaaacgacccacagcacttaaaaaggttattttaaaagaaagagaggaaaagaaggggcgcttaactgtggaccacaatcttttgggatccgaggaaccaacagaaatgcacttagattttattgatgacttgccacaggagattgtttcccaggaagatactggactaagcatgcccagtgatacttcactctctccagcaagtcagaactctccatactgtatgacacctgtgtcacaaggctctcctgctagttctggaataggcagtccaatggcatcttcaacaataaccaaaatccacagcaaaagatttagagagtattgtaatcaggttctttgtaaagagattgatgaatgtgtgactcttcttctccaagagcttgtcagtttccaggaacgcatctaccaaaaagatcctgtaagagcaaaagcaaggagacgactcgttatgggtctaagagaagttaccaaacatatgaagttaaacaagatcaagtgtgttataatttctccaaactgtgaaaaaatccagtcaaaaggtggtctggatgaggctctctataatgttatagccatggcacgggaacaagaaattccttttgtgtttgcccttggaaggaaagctctaggacgctgtgtgaacaagctggttcctgttagcgtagtgggaatcttcaactactttggtgctgagagcctgtttaataaattagtagaactcactgaggaggccaggaaagcatataaagatatggttgcagcaatggaacaggagcaggctgaggaagccttaaagaatgtgaagaaggtaccacaccacatgggacattctcggaatccctctgcagcaagtgccatttctttctgcagtgttatttctgaaccgatctctgaagtaaatgaaaaggaatatgaaacaaattggagaaacatggtggaaacttcagatggactggaagcatcagaaaatgagaaagaggtatcctgtaagcacagcacttctgaaaaacccagtaaacttccatttgacacacccccaattggtaagcagccatcattagtggctacaggcagtactacctcagctacaagtgctgggaaatccacagcaagtgataaagaggaagtgaagccagatgacctggaatgggcctcacagcagagtacagagactggctctttggatggcagttgccgagatcttttgaattcctccatcaccagcaccaccagcactcttgtacctggcatgcttgaagaagaagaagatgaagatgaggaggaggaggaagattatactcatgaacccatatctgtagaagtgcagctcaatagtagaattgagtcttgggtctcagagacccagagaactatggaaacccttcagcttggaaaaacccttaatggttctgaggaagacaatgtagagcaaagtggagaagaggaagcagaggcgcctgaggtgctggagccagggatggacagtgaggcatggactgctgaccagcaggccagtcctgggcagcagaagtccagcaactgcagctcgctcaacaaagagcactctgattctaattacacaacgcaaactacgtaactcaggaaatgtcggctctctatctccagctgtggaagggttgcagccattaccttttatgcttcatctcaacattttgcactgtccagtatttaatatacgtatttaattcccaacaaatatttttgtagcttttacttgttatgatctgtagcttagcttttaattagtatctaagtgtctttctaagaactgtgtggaaaattcagatctgtttcagcttattttgtaatcaaaaacagtgataaaaagaagaccagatcttaaagaaaataaatttcaaatgcttacttaaaagacattttgaaagttaaagaacaaggttctaaggatagaagcagttatcagtgtttgcttcaggactccacctcctctactctaatttgaccaaaaaattgtttgggcttctttaaaaaagaactgggggtggagtcagaaaattaaatgaaaggctgagggtaactaagtccaccagtgttgtatgttaaaaaatcaatgcaacttttatgtggtccacaaatgtttagtcagaagtcactgattattgtaattaattagtgttgggatgggctaaaacagagccttcaaaacttcggctagcagtggagccaccatcttagattatagctagctagcctcatttgtggaaagtgatagatgctgtctataatagtgaacagtcacccatgataggacctccaggttctgtctcatatttgcttcttacttacctcaggaatgctcttgtacatagacttatttacaaaaagctaggcacatgttgacaggtgaataactgtaaccgattgtatgactgctgcacttacatgtaaactcttcagaaacagagtcttatactggtgtgttctcttgcatgcttctggttcaggactcttgatttgagatatggatttgattgagtatccaaacttgtcctgagtgcaaaactgtttcaccttttaaaaaatacctattttgcacctagccttgagcaccttccacatagcaatgaccatagttactgtcaggaggtcaaggaaaggaactttgcacaacttgtgacatgtatcctgataatcaaggcttagaggaggaagttttagaagataagagaaagttgttctaattgtgctgaaactattagatgatttagagtatacagatatgtaggtattaattctctattcactattatttatctctgcccttctctaggagtttgtatacctgcttaggagacaataaatgagctaaatgttttatttgctagtcagtcaccacctggacttcagtgactttacaagtttatgtaatggtggaagaatgacaaactatgtaatttttttgtcttccatccaactccccaccacccccaactgtcccccccacccccctcacacacatgcacacatccgtacgtgtgtgtgttttccacttacaagcttccataagcaggcacaaaactgagaaggaaggggtattatccctgccctgattatctggggcagggctttgcctcacagaggcaggagagaagaattgggcagattctttactgaactcattgggactactgtgctagttttgatgttttataatgctggcatttaattactggagagattggattcttggttgatgatttagtatttgtgaattgtgaaagttcaggagctgtgtagaaaatgttagtcaatcaactttattattgtgctaaaaggggacattcttatactgtcctgtctaaactgttctccagtatagacttcctaggcactaaatatccaatatttaaaggaacacagcaggtaaggaatgaagcctctgaaatagtactcatggatttatacatggcagatcttactgtctctacacatttggaagtgttcgttggtttaaagaaatgatagaggttttgaactactgacagtcttaaaagtgaatttaaaaactgttcatactttttatggtgtaaatttcctttgctcgatgtcagtgattcagataactcttgaccttgagatgatggcttttcacaggtttcttatattttatatctcttctgaacatgaattgtcattttagatttttgacatttgtatcaaaagagaagttgaggaaatcttcagaacactggtaacttttagttttgctatagacttcagaagtgtttatttatatgttcggtaaatgctctcgcatatgcagtacctcttctgccagcaaatccaagggaccatagcctttttatgagacaggtcacctctagaggacancccaagaattattaaaggaaatgttaccattttgagagcatgcttaaataaatattaataatgtctttataacttgtttcctttaaattttggaatattgaattacaggctttggaggagttgtgaaaattaggaaagtttttatatattttttgaagtgggcatggttggctctttgaagacctataaagagatccagtgggaagagtaagggttggttcatcatcacaagaaataaaaaacatagtgattttttctcttaatgtgtagaggtggttttactggcaataattaataatagatttctatttcagtatgtaagcatattaactaaaatatgaattacacttccaaagttagatttctgcttcagtaggtttgtttgctgtgaagattacttctcaaaagacagatgttcatattagcttaattttcggtttaaatatgtttgtaaatgatgtaatatatttcttttgactaaatgtggaaaagtaatgtgtgttatacattgagaagtttttactggctttgactggaggttgtttttgcagagatggtattttatatgattccagtatttggaaaagaattagtcaaaaggaattcacatagtttaaatactgagaaattaatatccaaatatgtacttgtctgatttctaaataagctgggggaggagggaggggtgggaattgaaatgtgcaaatgagtagtgaatgctacactcattttcaactctttaacatgaaactgttcaatcttaacacattgttactttaatatatgtataaagaagtattactgtttgtaaagctgctgtttgcttaaaaaaaaaaaaacacccttgtcatgtattttctgtatgttgggccaacaggttagaacatcaactcatttaaaaatttttatctttttttgatttaaaaaaattctgtgaaataatttatttacagacatcttcctcctccctcatcccttccaacctttacatacatcacagaatcaaccaaactgtttgcctaatctgaaatctgaatcctaatgagaaaaatttaaattttgttggcacatcacaccttgaaagtatttgtattattttataatttaatttctaaatataccacataagtttataatttaatgtcttaattgtaatgctctaataaaaaactagcaaaattagtgtgagttataacatgaagggattttcatcttttgctgtatgaaggataattgttatatcacatttggggggtaataacagcttttttgcactatgtaaatactagtggggattcttctgtactaataaaatgattattgaaatgaaa

SEQ ID NO: 449651 - DNA, 5961 bp, Homo sapiens
  misc_feature (4630)..(4630): n is a, c, g, or t
ttttctgccagtatgttatatatttgagtgaaacatttatttaaaaataattagattttttttcccctctggggtttacttaggttggattcagatgccgaggacacagtacttcctcagaaagaagacagaatttgcaaaagagaccagataataagcatttaagctctagtcaatcccatagaagcgatccaaattctgagtctttatattttgaggatgaagatgggtttcaagaactaaatgagaatggaaatgctaaggatgagaatattcaacaaaaactttcttctaaagtattggatgatttacctgaaaactcaccaatcaatatagttcagactccaattcctattaccacctcagttcccaaacgtgcaaaaagtcagaagaagaaagctttagcagcagcccttgccacagctcaagagtattcagaaataagtatggagcaaaaaaaattacaggaagctttatcaaaagcagctggaaaaaagaataaaacacctgtgcagctagatttaggggacatgttagctgctctggaaaaacaacagcaagcaatgaaagcacggcaaattactaacaccagacctctgtcatatacagtggttactgcagcttcttttcacactaaagactctactaatagaaaacctttaaccaaaagtcagccctgtttgacatcctttaattctgtggacattgcttcttctaaagcaaaaaaaggaaaagagaaggaaattgcaaaactaaaacgacccacagcacttaaaaaggttattttaaaagaaagagaggaaaagaaggggcgcttaactgtggaccacaatcttttgggatccgaggaaccaacagaaatgcacttagattttattgatgacttgccacaggagattgtttcccaggaagatactggactaagcatgcccagtgatacttcactctctccagcaagtcagaactctccatactgtatgacacctgtgtcacaaggctctcctgctagttctggaataggcagtccaatggcatcttcaacaataaccaaaatccacagcaaaagatttagagagtattgtaatcaggttctttgtaaagagattgatgaatgtgtgactcttcttctccaagagcttgtcagtttccaggaacgcatctaccaaaaagatcctgtaagagcaaaagcaaggagacgactcgttatgggtctaagagaagttaccaaacatatgaagttaaacaagatcaagtgtgttataatttctccaaactgtgaaaaaatccagtcaaaaggtggtctggatgaggctctctataatgttatagccatggcacgggaacaagaaattccttttgtgtttgcccttggaaggaaagctctaggacgctgtgtgaacaagctggttcctgttagcgtagtgggaatcttcaactactttggtgctgagagcctgtttaataaattagtagaactcactgaggaggccaggaaagcatataaagatatggttgcagcaatggaacaggagcaggctgaggaagccttaaagaatgtgaagaaggtaccacaccacatgggacattctcggaatccctctgcagcaagtgccatttctttctgcagtgttatttctgaaccgatctctgaagtaaatgaaaaggaatatgaaacaaattggagaaacatggtggaaacttcagatggactggaagcatcagaaaatgagaaagaggtatcctgtaagcacagcacttctgaaaaacccagtaaacttccatttgacacacccccaattggtaagcagccatcattagtggctacaggcagtactacctcagctacaagtgctgggaaatccacagcaagtgataaagaggaagtgaagccagatgacctggaatgggcctcacagcagagtacagagactggctctttggatggcagttgccgagatcttttgaattcctccatcaccagcaccaccagcactcttgtacctggcatgcttgaagaagaagaagatgaagatgaggaggaggaggaagattatactcatgaacccatatctgtagaagtgcagctcaatagtagaattgagtcttgggtctcagagacccagagaactatggaaacccttcagcttggaaaaacccttaatggttctgaggaagacaatgtagagcaaagtggagaagaggaagcagaggcgcctgaggtgctggagccagggatggacagtgaggcatggactgctgaccagcaggccagtcctgggcagcagaagtccagcaactgcagctcgctcaacaaagagcactctgattctaattacacaacgcaaactacgtaactcaggaaatgtcggctctctatctccagctgtggaagggttgcagccattaccttttatgcttcatctcaacattttgcactgtccagtatttaatatacgtatttaattcccaacaaatatttttgtagcttttacttgttatgatctgtagcttagcttttaattagtatctaagtgtctttctaagaactgtgtggaaaattcagatctgtttcagcttattttgtaatcaaaaacagtgataaaaagaagaccagatcttaaagaaaataaatttcaaatgcttacttaaaagacattttgaaagttaaagaacaaggttctaaggatagaagcagttatcagtgtttgcttcaggactccacctcctctactctaatttgaccaaaaaattgtttgggcttctttaaaaaagaactgggggtggagtcagaaaattaaatgaaaggctgagggtaactaagtccaccagtgttgtatgttaaaaaatcaatgcaacttttatgtggtccacaaatgtttagtcagaagtcactgattattgtaattaattagtgttgggatgggctaaaacagagccttcaaaacttcggctagcagtggagccaccatcttagattatagctagctagcctcatttgtggaaagtgatagatgctgtctataatagtgaacagtcacccatgataggacctccaggttctgtctcatatttgcttcttacttacctcaggaatgctcttgtacatagacttatttacaaaaagctaggcacatgttgacaggtgaataactgtaaccgattgtatgactgctgcacttacatgtaaactcttcagaaacagagtcttatactggtgtgttctcttgcatgcttctggttcaggactcttgatttgagatatggatttgattgagtatccaaacttgtcctgagtgcaaaactgtttcaccttttaaaaaatacctattttgcacctagccttgagcaccttccacatagcaatgaccatagttactgtcaggaggtcaaggaaaggaactttgcacaacttgtgacatgtatcctgataatcaaggcttagaggaggaagttttagaagataagagaaagttgttctaattgtgctgaaactattagatgatttagagtatacagatatgtaggtattaattctctattcactattatttatctctgcccttctctaggagtttgtatacctgcttaggagacaataaatgagctaaatgttttatttgctagtcagtcaccacctggacttcagtgactttacaagtttatgtaatggtggaagaatgacaaactatgtaatttttttgtcttccatccaactccccaccacccccaactgtcccccccacccccctcacacacatgcacacatccgtacgtgtgtgtgttttccacttacaagcttccataagcaggcacaaaactgagaaggaaggggtattatccctgccctgattatctggggcagggctttgcctcacagaggcaggagagaagaattgggcagattctttactgaactcattgggactactgtgctagttttgatgttttataatgctggcatttaattactggagagattggattcttggttgatgatttagtatttgtgaattgtgaaagttcaggagctgtgtagaaaatgttagtcaatcaactttattattgtgctaaaaggggacattcttatactgtcctgtctaaactgttctccagtatagacttcctaggcactaaatatccaatatttaaaggaacacagcaggtaaggaatgaagcctctgaaatagtactcatggatttatacatggcagatcttactgtctctacacatttggaagtgttcgttggtttaaagaaatgatagaggttttgaactactgacagtcttaaaagtgaatttaaaaactgttcatactttttatggtgtaaatttcctttgctcgatgtcagtgattcagataactcttgaccttgagatgatggcttttcacaggtttcttatattttatatctcttctgaacatgaattgtcattttagatttttgacatttgtatcaaaagagaagttgaggaaatcttcagaacactggtaacttttagttttgctatagacttcagaagtgtttatttatatgttcggtaaatgctctcgcatatgcagtacctcttctgccagcaaatccaagggaccatagcctttttatgagacaggtcacctctagaggacancccaagaattattaaaggaaatgttaccattttgagagcatgcttaaataaatattaataatgtctttataacttgtttcctttaaattttggaatattgaattacaggctttggaggagttgtgaaaattaggaaagtttttatatattttttgaagtgggcatggttggctctttgaagacctataaagagatccagtgggaagagtaagggttggttcatcatcacaagaaataaaaaacatagtgattttttctcttaatgtgtagaggtggttttactggcaataattaataatagatttctatttcagtatgtaagcatattaactaaaatatgaattacacttccaaagttagatttctgcttcagtaggtttgtttgctgtgaagattacttctcaaaagacagatgttcatattagcttaattttcggtttaaatatgtttgtaaatgatgtaatatatttcttttgactaaatgtggaaaagtaatgtgtgttatacattgagaagtttttactggctttgactggaggttgtttttgcagagatggtattttatatgattccagtatttggaaaagaattagtcaaaaggaattcacatagtttaaatactgagaaattaatatccaaatatgtacttgtctgatttctaaataagctgggggaggagggaggggtgggaattgaaatgtgcaaatgagtagtgaatgctacactcattttcaactctttaacatgaaactgttcaatcttaacacattgttactttaatatatgtataaagaagtattactgtttgtaaagctgctgtttgcttaaaaaaaaaaaaacacccttgtcatgtattttctgtatgttgggccaacaggttagaacatcaactcatttaaaaatttttatctttttttgatttaaaaaaattctgtgaaataatttatttacagacatcttcctcctccctcatcccttccaacctttacatacatcacagaatcaaccaaactgtttgcctaatctgaaatctgaatcctaatgagaaaaatttaaattttgttggcacatcacaccttgaaagtatttgtattattttataatttaatttctaaatataccacataagtttataatttaatgtcttaattgtaatgctctaataaaaaactagcaaaattagtgtgagttataacatgaagggattttcatcttttgctgtatgaaggataattgttatatcacatttggggggtaataacagcttttttgcactatgtaaatactagtggggattcttctgtactaataaaatgattattgaaatgaaa

SEQ ID NO: 449652 - DNA, 5617 bp, Homo sapiens
  misc_feature (4286)..(4286): n is a, c, g, or t
tctttctcatctataaattggggagcatatttgatttaactcactattgttaaaagggtcaaaatgagataattcgtgtccaaataattgaaaactgtagaatgtcaatcaaatgtaactgtatgacctgggttccaaactttttaatttaccctttttttttttggaaactctagtttgccacctaggatttaaagcatcagatatggtttgatagctgtatattctataacataattgcttttctttattttgtatgcagtacttccttcaacttacagtgtctgaaattacatttgcctttttgccagttagccaaacttctcatgttcatgtttaagtgaactaccatacctgtgttataatgtatattgtcatcatttgtacacagttgaagagtaatctgtaattaaagactagtgtaatgacttttaggttattttaaaagaaagagaggaaaagaaggggcgcttaactgtggaccacaatcttttgggatccgaggaaccaacagaaatgcacttagattttattgatgacttgccacaggagattgtttcccaggaagatactggactaagcatgcccagtgatacttcactctctccagcaagtcagaactctccatactgtatgacacctgtgtcacaaggctctcctgctagttctggaataggcagtccaatggcatcttcaacaataaccaaaatccacagcaaaagatttagagagtattgtaatcaggttctttgtaaagagattgatgaatgtgtgactcttcttctccaagagcttgtcagtttccaggaacgcatctaccaaaaagatcctgtaagagcaaaagcaaggagacgactcgttatgggtctaagagaagttaccaaacatatgaagttaaacaagatcaagtgtgttataatttctccaaactgtgaaaaaatccagtcaaaaggtggtctggatgaggctctctataatgttatagccatggcacgggaacaagaaattccttttgtgtttgcccttggaaggaaagctctaggacgctgtgtgaacaagctggttcctgttagcgtagtgggaatcttcaactactttggtgctgagagcctgtttaataaattagtagaactcactgaggaggccaggaaagcatataaagatatggttgcagcaatggaacaggagcaggctgaggaagccttaaagaatgtgaagaaggtaccacaccacatgggacattctcggaatccctctgcagcaagtgccatttctttctgcagtgttatttctgaaccgatctctgaagtaaatgaaaaggaatatgaaacaaattggagaaacatggtggaaacttcagatggactggaagcatcagaaaatgagaaagaggtatcctgtaagcacagcacttctgaaaaacccagtaaacttccatttgacacacccccaattggtaagcagccatcattagtggctacaggcagtactacctcagctacaagtgctgggaaatccacagcaagtgataaagaggaagtgaagccagatgacctggaatgggcctcacagcagagtacagagactggctctttggatggcagttgccgagatcttttgaattcctccatcaccagcaccaccagcactcttgtacctggcatgcttgaagaagaagaagatgaagatgaggaggaggaggaagattatactcatgaacccatatctgtagaagtgcagctcaatagtagaattgagtcttgggtctcagagacccagagaactatggaaacccttcagcttggaaaaacccttaatggttctgaggaagacaatgtagagcaaagtggagaagaggaagcagaggcgcctgaggtgctggagccagggatggacagtgaggcatggactgctgaccagcaggccagtcctgggcagcagaagtccagcaactgcagctcgctcaacaaagagcactctgattctaattacacaacgcaaactacgtaactcaggaaatgtcggctctctatctccagctgtggaagggttgcagccattaccttttatgcttcatctcaacattttgcactgtccagtatttaatatacgtatttaattcccaacaaatatttttgtagcttttacttgttatgatctgtagcttagcttttaattagtatctaagtgtctttctaagaactgtgtggaaaattcagatctgtttcagcttattttgtaatcaaaaacagtgataaaaagaagaccagatcttaaagaaaataaatttcaaatgcttacttaaaagacattttgaaagttaaagaacaaggttctaaggatagaagcagttatcagtgtttgcttcaggactccacctcctctactctaatttgaccaaaaaattgtttgggcttctttaaaaaagaactgggggtggagtcagaaaattaaatgaaaggctgagggtaactaagtccaccagtgttgtatgttaaaaaatcaatgcaacttttatgtggtccacaaatgtttagtcagaagtcactgattattgtaattaattagtgttgggatgggctaaaacagagccttcaaaacttcggctagcagtggagccaccatcttagattatagctagctagcctcatttgtggaaagtgatagatgctgtctataatagtgaacagtcacccatgataggacctccaggttctgtctcatatttgcttcttacttacctcaggaatgctcttgtacatagacttatttacaaaaagctaggcacatgttgacaggtgaataactgtaaccgattgtatgactgctgcacttacatgtaaactcttcagaaacagagtcttatactggtgtgttctcttgcatgcttctggttcaggactcttgatttgagatatggatttgattgagtatccaaacttgtcctgagtgcaaaactgtttcaccttttaaaaaatacctattttgcacctagccttgagcaccttccacatagcaatgaccatagttactgtcaggaggtcaaggaaaggaactttgcacaacttgtgacatgtatcctgataatcaaggcttagaggaggaagttttagaagataagagaaagttgttctaattgtgctgaaactattagatgatttagagtatacagatatgtaggtattaattctctattcactattatttatctctgcccttctctaggagtttgtatacctgcttaggagacaataaatgagctaaatgttttatttgctagtcagtcaccacctggacttcagtgactttacaagtttatgtaatggtggaagaatgacaaactatgtaatttttttgtcttccatccaactccccaccacccccaactgtcccccccacccccctcacacacatgcacacatccgtacgtgtgtgtgttttccacttacaagcttccataagcaggcacaaaactgagaaggaaggggtattatccctgccctgattatctggggcagggctttgcctcacagaggcaggagagaagaattgggcagattctttactgaactcattgggactactgtgctagttttgatgttttataatgctggcatttaattactggagagattggattcttggttgatgatttagtatttgtgaattgtgaaagttcaggagctgtgtagaaaatgttagtcaatcaactttattattgtgctaaaaggggacattcttatactgtcctgtctaaactgttctccagtatagacttcctaggcactaaatatccaatatttaaaggaacacagcaggtaaggaatgaagcctctgaaatagtactcatggatttatacatggcagatcttactgtctctacacatttggaagtgttcgttggtttaaagaaatgatagaggttttgaactactgacagtcttaaaagtgaatttaaaaactgttcatactttttatggtgtaaatttcctttgctcgatgtcagtgattcagataactcttgaccttgagatgatggcttttcacaggtttcttatattttatatctcttctgaacatgaattgtcattttagatttttgacatttgtatcaaaagagaagttgaggaaatcttcagaacactggtaacttttagttttgctatagacttcagaagtgtttatttatatgttcggtaaatgctctcgcatatgcagtacctcttctgccagcaaatccaagggaccatagcctttttatgagacaggtcacctctagaggacancccaagaattattaaaggaaatgttaccattttgagagcatgcttaaataaatattaataatgtctttataacttgtttcctttaaattttggaatattgaattacaggctttggaggagttgtgaaaattaggaaagtttttatatattttttgaagtgggcatggttggctctttgaagacctataaagagatccagtgggaagagtaagggttggttcatcatcacaagaaataaaaaacatagtgattttttctcttaatgtgtagaggtggttttactggcaataattaataatagatttctatttcagtatgtaagcatattaactaaaatatgaattacacttccaaagttagatttctgcttcagtaggtttgtttgctgtgaagattacttctcaaaagacagatgttcatattagcttaattttcggtttaaatatgtttgtaaatgatgtaatatatttcttttgactaaatgtggaaaagtaatgtgtgttatacattgagaagtttttactggctttgactggaggttgtttttgcagagatggtattttatatgattccagtatttggaaaagaattagtcaaaaggaattcacatagtttaaatactgagaaattaatatccaaatatgtacttgtctgatttctaaataagctgggggaggagggaggggtgggaattgaaatgtgcaaatgagtagtgaatgctacactcattttcaactctttaacatgaaactgttcaatcttaacacattgttactttaatatatgtataaagaagtattactgtttgtaaagctgctgtttgcttaaaaaaaaaaaaacacccttgtcatgtattttctgtatgttgggccaacaggttagaacatcaactcatttaaaaatttttatctttttttgatttaaaaaaattctgtgaaataatttatttacagacatcttcctcctccctcatcccttccaacctttacatacatcacagaatcaaccaaactgtttgcctaatctgaaatctgaatcctaatgagaaaaatttaaattttgttggcacatcacaccttgaaagtatttgtattattttataatttaatttctaaatataccacataagtttataatttaatgtcttaattgtaatgctctaataaaaaactagcaaaattagtgtgagttataacatgaagggattttcatcttttgctgtatgaaggataattgttatatcacatttggggggtaataacagcttttttgcactatgtaaatactagtggggattcttctgtactaataaaatgattattgaaatgaaa

SEQ ID NO: 449653 - DNA, 2389 bp, Homo sapiens
tccccgaagctgccaccgcctcctccatctcccggagctggagccgcctcctcggccagtggcgtagccgaatcggtgtcgcggccagccagataggggcggaggtccggaacccagtctggacccgagcggggggccatggagaaagcggcccgaggcgctgtttacaccgactagcgcgggcccgttgcggctgcaggcaccatggaccgagcccccacggagcagaatgtcaagctgtcagctgaggtggagccatttattccccagaagaagagtcctgatacatttatgatccctatggctctcccaaatgataatggaagtgtttctggtgtggaaccaactccaattcccagctacctgattacttgttacccatttgtgcaggaaaaccagtccaatagacagtttcctttatataacaatgatatacgatggcaacaacccaatccaaaccctactggaccatactttgcctatcccattatatctgctcagccgcctgtttctacagagtatacatattatcagctgatgccagcaccatgtgcccaggttatgggtttctatcatccttttcctacaccttactccaacacctttcaggctgcaaatactgtaaatgctatcaccacagaatgcactgagcgtccaagtcagcttggacaggtcttcccattgtccagccatcgaagcagaaacagtaacagaggatcagtggtcccaaaacaacagcttttacaacagcacataaaaagcaaaaggccgctggtgaaaaatgtagctactcagaaagaaacaaatgcagcaggtcctgatagtcgatcaaaaattgtgcttctggtagatgcttcacagcaaactgatttcccatcagatatcgctaacaagtctctctcagagaccactgcaacaatgctctggaagtccaagggcaggagaagaagagcatcccaccctactgctgaatcttctagtgagcagggggctagtgaagccgacattgacagtgatagtggttactgcagtcccaaacacagcaacaaccagcctgcagcaggggctttgagaaatcctgattctgggaccatgaatcatgtggaatcatctatgtgtgcaggtggtgtaaattggtccaatgtaacttgccaggcaactcagaaaaaaccttggatggaaaaaaatcagacattttctagaggtggaaggcaaactgaacaaagaaataattcacaggttggattcagatgccgaggacacagtacttcctcagaaagaagacagaatttgcaaaagagaccagataataagcatttaagctctagtcaatcccatagaagcgatccaaattctgagtctttatattttgaggatgaagatgggtttcaagaactaaatgagaatggaaatgctaaggatgagaatattcaacaaaaactttcttctaaagtattggatgatttacctgaaaactcaccaatcaatatagttcagactccaattcctattaccacctcagttcccaaacgtgcaaaaagtcagaagaagaaagctttagcagcagcccttgccacagctcaagagtattcagaaataagtatggagcaaaaaaaattacaggaagctttatcaaaagcagctggaaaaaagaataaaacacctgtgcagctagatttaggggacatgttagctgctctggaaaaacaacagcaagcaatgaaagcacggcaaattactaacaccagacctctgtcatatacagtggttactgcagcttcttttcacactaaagactctactaatagaaaacctttaaccaaaagtcagccctgtttgacatcctttaattctgtggacattgcttcttctaaagcaaaaaaaggaaaagagaaggaaattgcaaaactaaaacgacccacagcacttaaaaaggttattttaaaagaaagagaggaaaagaaggggcgcttaactgtggaccacaatcttttgggatccgaggaaccaacagaaatgcacttagattttattgatgacttgccacaggagattgtttcccaggaaggtaaggagctccccctttctcctcttctcatggaatggtctgaaatattttaatagatacgtaagctatcactagttaatgctcctgattggaagacgtgctccatattttacataaatctctttattcttcagagtggtttcttttaaagatgcttttgtagggagatggttaaagagaaggggacaggtattatatagtaggcctatgacatttttgaggcttaaatcctgaatttgtagtgaattctcaaaattaagatgtcacgaatgcatgggatctctggaattgtcacaagtattttcattttgttttctttta

SEQ ID NO: 449654 - DNA, 1671 bp, Homo sapiens
tccccgaagctgccaccgcctcctccatctcccggagctggagccgcctcctcggccagtggcgtagccgaatcggtgtcgcggccagccagataggggcggaggtccggaacccagtctggacccgagcggggggccatggagaaagcggcccgaggcgctgtttacaccgactagcgcgggcccgttgcggctgcaggcaccatggaccgagcccccacggagcagaatgtcaagctgtcagctgaggtggagccatttattccccagaagaagagtcctgatacatttatgatccctatggctctcccaaatgataatggaagtgtttctggtgtggaaccaactccaattcccagctacctgattacttgttacccatttgtgcaggaaaaccagtccaatagacagtttcctttatataacaatgatatacgatggcaacaacccaatccaaaccctactggaccatactttgcctatcccattatatctgctcagccgcctgtttctacagagtatacatattatcagctgatgccagcaccatgtgcccaggttatgggtttctatcatccttttcctacaccttactccaacacctttcaggctgcaaatactgtaaatgctatcaccacagaatgcactgagcgtccaagtcagcttggacaggtcttcccattgtccagccatcgaagcagaaacagtaacagaggatcagtggtcccaaaacaacagcttttacaacagcacataaaaagcaaaaggccgctggtgaaaaatgtagctactcagaaagaaacaaatgcagcaggtcctgatagtcgatcaaaaattgtgcttctggtagatgcttcacagcaaactgatttcccatcagatatcgctaacaagtctctctcagagaccactgcaacaatgctctggaagtccaagggcaggagaagaagagcatcccaccctactgctgaatcttctagtgagcagggggctagtgaagccgacattgacagtgatagtggttactgcagtcccaaacacagcaacaaccagcctgcagcaggggctttgagaaatcctgattctgggaccatgaatcatgtggaatcatctatgtgtgcaggtggtgtaaattggtccaatgtaacttgccaggcaactcagaaaaaaccttggatggaaaaaaatcagacattttctagaggtggaaggcaaactgaacaaagaaataattcacaggttggattcagatgccgaggacacagtacttcctcagaaagaagacagaatttgcaaaagagaccagataataagcatttaagctctagtcaatcccatagaagcgatccaaattctgagtctttatattttgaggtatttttttcaaactctatttgtaagctgttataggaaatgttcccattaagaaattaatttgttacattgtgaacattgtgagtactttttatgtcttaacatgtgattctagtattaaattataaattactcagaagtattaactcatttttgtcttggttatatatatttaatctaacattaattttactgatgtttatttttataaatttttgtcctgtgtgttcatcatttagggggtaatgtatagaggtagaacttgatttcatgtggactttatttagtatggagctt

SEQ ID NO: 449655 - DNA, 345 bp, Homo sapiens
tgatccctccccgaagctgccaccgcctcctccatctcccggagctggagccgcctcctcggccagtggcgtagccgaatcggtgtcgcggccagccagataggggcggaggtccggaacccagtctggacccgagcggggggccatggagaaagcggcccgaggcgctgtttacaccgactagcgcgggcccgttgcggctgcaggcaccatggaccgagcccccacggagcaggtacgcgggtttgggctgggcccgccgagccgggggttggggtcgccgcttcctcacaggccaggcccagttctccgaacgtggggaccgggggccggtcctgcggccgc

SEQ ID NO: 449656 - DNA, 441 bp, Homo sapiens
aagtaccttacttgtcagaaacttgatctttaaaataagtgatgcacttggtgaaaatttattgagttgtacacttgcgtgtacttttctgccagtatgttatatatttgagtgaaacatttatttaaaaataattagattttttttcccctctggggtttacttaggttggattcagatgccgaggacacagtacttcctcagaaagaagacagaatttgcaaaagagaccagataataagcatttaagctctagtcaatcccatagaagcgatccaaattctgagtctttatattttgaggtatttttttcaaactctatttgtaagctgttataggaaatgttcccattaagaaattaatttgttacattgtgaacattgtgagtactttttatgtcttaacatgtgattctagtattaaattataaattactcagaa

SEQ ID NO: 449657 - DNA, 7062 bp, Homo sapiens
  misc_feature (5731)..(5731): n is a, c, g, or t
tccccgaagctgccaccgcctcctccatctcccggagctggagccgcctcctcggccagtggcgtagccgaatcggtgtcgcggccagccagataggggcggaggtccggaacccagtctggacccgagcggggggccatggagaaagcggcccgaggcgctgtttacaccgactagcgcgggcccgttgcggctgcaggcaccatggaccgagcccccacggagcagaatgtcaagctgtcagctgaggtggagccatttattccccagaagaagagtcctgatacatttatgatccctatggctctcccaaatgataatggaagtgtttctggtgtggaaccaactccaattcccagctacctgattacttgttacccatttgtgcaggaaaaccagtccaatagacagtttcctttatataacaatgatatacgatggcaacaacccaatccaaaccctactggaccatactttgcctatcccattatatctgctcagccgcctgtttctacagagtatacatattatcagctgatgccagcaccatgtgcccaggttatgggtttctatcatccttttcctacaccttactccaacacctttcaggctgcaaatactgtaaatgctatcaccacagaatgcactgagcgtccaagtcagcttggacaggtcttcccattgtccagccatcgaagcagaaacagtaacagaggatcagtggtcccaaaacaacagcttttacaacagcacataaaaagcaaaaggccgctggtgaaaaatgtagctactcagaaagaaacaaatgcagcaggtcctgatagtcgatcaaaaattgtgcttctggtagatgcttcacagcaaactgatttcccatcagatatcgctaacaagtctctctcagagaccactgcaacaatgctctggaagtccaagggcaggagaagaagagcatcccaccctactgctgaatcttctagtgagcagggggctagtgaagccgacattgacagtgatagtggttactgcagtcccaaacacagcaacaaccagcctgcagcaggggctttgagaaatcctgattctgggaccatgaatcatgtggaatcatctatgtgtgcaggtggtgtaaattggtccaatgtaacttgccaggcaactcagaaaaaaccttggatggaaaaaaatcagacattttctagaggtggaaggcaaactgaacaaagaaataattcacaggttggattcagatgccgaggacacagtacttcctcagaaagaagacagaatttgcaaaagagaccagataataagcatttaagctctagtcaatcccatagaagcgatccaaattctgagtctttatattttgaggatgaagatgggtttcaagaactaaatgagaatggaaatgctaaggatgagaatattcaacaaaaactttcttctaaagtattggatgatttacctgaaaactcaccaatcaatatagttcagactccaattcctattaccacctcagttcccaaacgtgcaaaaagtcagaagaagaaagctttagcagcagcccttgccacagctcaagagtattcagaaataagtatggagcaaaaaaaattacaggaagctttatcaaaagcagctggaaaaaagaataaaacacctgtgcagctagatttaggggacatgttagctgctctggaaaaacaacagcaagcaatgaaagcacggcaaattactaacaccagacctctgtcatatacagtggttactgcagcttcttttcacactaaagactctactaatagaaaacctttaaccaaaagtcagccctgtttgacatcctttaattctgtggacattgcttcttctaaagcaaaaaaaggaaaagagaaggaaattgcaaaactaaaacgacccacagcacttaaaaaggttattttaaaagaaagagaggaaaagaaggggcgcttaactgtggaccacaatcttttgggatccgaggaaccaacagaaatgcacttagattttattgatgacttgccacaggagattgtttcccaggaagatactggactaagcatgcccagtgatacttcactctctccagcaagtcagaactctccatactgtatgacacctgtgtcacaaggctctcctgctagttctggaataggcagtccaatggcatcttcaacaataaccaaaatccacagcaaaagatttagagagtattgtaatcaggttctttgtaaagagattgatgaatgtgtgactcttcttctccaagagcttgtcagtttccaggaacgcatctaccaaaaagatcctgtaagagcaaaagcaaggagacgactcgttatgggtctaagagaagttaccaaacatatgaagttaaacaagatcaagtgtgttataatttctccaaactgtgaaaaaatccagtcaaaaggtggtctggatgaggctctctataatgttatagccatggcacgggaacaagaaattccttttgtgtttgcccttggaaggaaagctctaggacgctgtgtgaacaagctggttcctgttagcgtagtgggaatcttcaactactttggtgctgagagcctgtttaataaattagtagaactcactgaggaggccaggaaagcatataaagatatggttgcagcaatggaacaggagcaggctgaggaagccttaaagaatgtgaagaaggtaccacaccacatgggacattctcggaatccctctgcagcaagtgccatttctttctgcagtgttatttctgaaccgatctctgaagtaaatgaaaaggaatatgaaacaaattggagaaacatggtggaaacttcagatggactggaagcatcagaaaatgagaaagaggtatcctgtaagcacagcacttctgaaaaacccagtaaacttccatttgacacacccccaattggtaagcagccatcattagtggctacaggcagtactacctcagctacaagtgctgggaaatccacagcaagtgataaagaggaagtgaagccagatgacctggaatgggcctcacagcagagtacagagactggctctttggatggcagttgccgagatcttttgaattcctccatcaccagcaccaccagcactcttgtacctggcatgcttgaagaagaagaagatgaagatgaggaggaggaggaagattatactcatgaacccatatctgtagaagtgcagctcaatagtagaattgagtcttgggtctcagagacccagagaactatggaaacccttcagcttggaaaaacccttaatggttctgaggaagacaatgtagagcaaagtggagaagaggaagcagaggcgcctgaggtgctggagccagggatggacagtgaggcatggactgctgaccagcaggccagtcctgggcagcagaagtccagcaactgcagctcgctcaacaaagagcactctgattctaattacacaacgcaaactacgtaactcaggaaatgtcggctctctatctccagctgtggaagggttgcagccattaccttttatgcttcatctcaacattttgcactgtccagtatttaatatacgtatttaattcccaacaaatatttttgtagcttttacttgttatgatctgtagcttagcttttaattagtatctaagtgtctttctaagaactgtgtggaaaattcagatctgtttcagcttattttgtaatcaaaaacagtgataaaaagaagaccagatcttaaagaaaataaatttcaaatgcttacttaaaagacattttgaaagttaaagaacaaggttctaaggatagaagcagttatcagtgtttgcttcaggactccacctcctctactctaatttgaccaaaaaattgtttgggcttctttaaaaaagaactgggggtggagtcagaaaattaaatgaaaggctgagggtaactaagtccaccagtgttgtatgttaaaaaatcaatgcaacttttatgtggtccacaaatgtttagtcagaagtcactgattattgtaattaattagtgttgggatgggctctagctagcctcatttgtggaaagtgatagatgctgtctataatagtgaacagtcacccatgataggacctccaggttctgtctcatatttgcttcttacttacctcaggaatgctcttgtacatagacttatttacaaaaagctaggcacatgttgacaggtgaataactgtaaccgattgtatgactgctgcacttacatgtaaactcttcagaaacagagtcttatactggtgtgttctcttgcatgcttctggttcaggactcttgatttgagatatggatttgattgagtatccaaacttgtcctgagtgcaaaactgtttcaccttttaaaaaatacctattttgcacctagccttgagcaccttccacatagcaatgaccatagttactgtcaggaggtcaaggaaaggaactttgcacaacttgtgacatgtatcctgataatcaaggcttagaggaggaagttttagaagataagagaaagttgttctaattgtgctgaaactattagatgatttagagtatacagatatgtaggtattaattctctattcactattatttatctctgcccttctctaggagtttgtatacctgcttaggagacaataaatgagctaaatgttttatttgctagtcagtcaccacctggacttcagtgactttacaagtttatgtaatggtggaagaatgacaaactatgtaatttttttgtcttccatccaactccccaccacccccaactgtcccccccacccccctcacacacatgcacacatccgtacgtgtgtgtgttttccacttacaagcttccataagcaggcacaaaactgagaaggaaggggtattatccctgccctgattatctggggcagggctttgcctcacagaggcaggagagaagaattgggcagattctttactgaactcattgggactactgtgctagttttgatgttttataatgctggcatttaattactggagagattggattcttggttgatgatttagtatttgtgaattgtgaaagttcaggagctgtgtagaaaatgttagtcaatcaactttattattgtgctaaaaggggacattcttatactgtcctgtctaaactgttctccagtatagacttcctaggcactaaatatccaatatttaaaggaacacagcaggtaaggaatgaagcctctgaaatagtactcatggatttatacatggcagatcttactgtctctacacatttggaagtgttcgttggtttaaagaaatgatagaggttttgaactactgacagtcttaaaagtgaatttaaaaactgttcatactttttatggtgtaaatttcctttgctcgatgtcagtgattcagataactcttgaccttgagatgatggcttttcacaggtttcttatattttatatctcttctgaacatgaattgtcattttagatttttgacatttgtatcaaaagagaagttgaggaaatcttcagaacactggtaacttttagttttgctatagacttcagaagtgtttatttatatgttcggtaaatgctctcgcatatgcagtacctcttctgccagcaaatccaagggaccatagcctttttatgagacaggtcacctctagaggacancccaagaattattaaaggaaatgttaccattttgagagcatgcttaaataaatattaataatgtctttataacttgtttcctttaaattttggaatattgaattacaggctttggaggagttgtgaaaattaggaaagtttttatatattttttgaagtgggcatggttggctctttgaagacctataaagagatccagtgggaagagtaagggttggttcatcatcacaagaaataaaaaacatagtgattttttctcttaatgtgtagaggtggttttactggcaataattaataatagatttctatttcagtatgtaagcatattaactaaaatatgaattacacttccaaagttagatttctgcttcagtaggtttgtttgctgtgaagattacttctcaaaagacagatgttcatattagcttaattttcggtttaaatatgtttgtaaatgatgtaatatatttcttttgactaaatgtggaaaagtaatgtgtgttatacattgagaagtttttactggctttgactggaggttgtttttgcagagatggtattttatatgattccagtatttggaaaagaattagtcaaaaggaattcacatagtttaaatactgagaaattaatatccaaatatgtacttgtctgatttctaaataagctgggggaggagggaggggtgggaattgaaatgtgcaaatgagtagtgaatgctacactcattttcaactctttaacatgaaactgttcaatcttaacacattgttactttaatatatgtataaagaagtattactgtttgtaaagctgctgtttgcttaaaaaaaaaaaaacacccttgtcatgtattttctgtatgttgggccaacaggttagaacatcaactcatttaaaaatttttatctttttttgatttaaaaaaattctgtgaaataatttatttacagacatcttcctcctccctcatcccttccaacctttacatacatcacagaatcaaccaaactgtttgcctaatctgaaatctgaatcctaatgagaaaaatttaaattttgttggcacatcacaccttgaaagtatttgtattattttataatttaatttctaaatataccacataagtttataatttaatgtcttaattgtaatgctctaataaaaaactagcaaaattagtgtgagttataacatgaagggattttcatcttttgctgtatgaaggataattgttatatcacatttggggggtaataacagcttttttgcactatgtaaatactagtggggattcttctgtactaataaaatgattattgaaatgaaa

SEQ ID NO: 449658 - DNA, 7574 bp, Homo sapiens
  misc_feature (5786)..(5786): n is a, c, g, or t
  misc_feature (7532)..(7532): n is a, c, g, or t
tccccgaagctgccaccgcctcctccatctcccggagctggagccgcctcctcggccagtggcgtagccgaatcggtgtcgcggccagccagataggggcggaggtccggaacccagtctggacccgagcggggggccatggagaaagcggcccgaggcgctgtttacaccgactagcgcgggcccgttgcggctgcaggcaccatggaccgagcccccacggagcagaatgtcaagctgtcagctgaggtggagccatttattccccagaagaagagtcctgatacatttatgatccctatggctctcccaaatgataatggaagtgtttctggtgtggaaccaactccaattcccagctacctgattacttgttacccatttgtgcaggaaaaccagtccaatagacagtttcctttatataacaatgatatacgatggcaacaacccaatccaaaccctactggaccatactttgcctatcccattatatctgctcagccgcctgtttctacagagtatacatattatcagctgatgccagcaccatgtgcccaggttatgggtttctatcatccttttcctacaccttactccaacacctttcaggctgcaaatactgtaaatgctatcaccacagaatgcactgagcgtccaagtcagcttggacaggtcttcccattgtccagccatcgaagcagaaacagtaacagaggatcagtggtcccaaaacaacagcttttacaacagcacataaaaagcaaaaggccgctggtgaaaaatgtagctactcagaaagaaacaaatgcagcaggtcctgatagtcgatcaaaaattgtgcttctggtagatgcttcacagcaaactgatttcccatcagatatcgctaacaagtctctctcagagaccactgcaacaatgctctggaagtccaagggcaggagaagaagagcatcccaccctactgctgaatcttctagtgagcagggggctagtgaagccgacattgacagtgatagtggttactgcagtcccaaacacagcaacaaccagcctgcagcaggggctttgagaaatcctgattctgggaccatgaatcatgtggaatcatctatgtgtgcaggtggtgtaaattggtccaatgtaacttgccaggcaactcagaaaaaaccttggatggaaaaaaatcagacattttctagaggtggaaggcaaactgaacaaagaaataattcacaggttggattcagatgccgaggacacagtacttcctcagaaagaagacagaatttgcaaaagagaccagataataagcatttaagctctagtcaatcccatagaagcgatccaaattctgagtctttatattttgaggatgaagatgggtttcaagaactaaatgagaatggaaatgctaaggatgagaatattcaacaaaaactttcttctaaagtattggatgatttacctgaaaactcaccaatcaatatagttcagactccaattcctattaccacctcagttcccaaacgtgcaaaaagtcagaagaagaaagctttagcagcagcccttgccacagctcaagagtattcagaaataagtatggagcaaaaaaaattacaggaagctttatcaaaagcagctggaaaaaagaataaaacacctgtgcagctagatttaggggacatgttagctgctctggaaaaacaacagcaagcaatgaaagcacggcaaattactaacaccagacctctgtcatatacagtggttactgcagcttcttttcacactaaagactctactaatagaaaacctttaaccaaaagtcagccctgtttgacatcctttaattctgtggacattgcttcttctaaagcaaaaaaaggaaaagagaaggaaattgcaaaactaaaacgacccacagcacttaaaaaggttattttaaaagaaagagaggaaaagaaggggcgcttaactgtggaccacaatcttttgggatccgaggaaccaacagaaatgcacttagattttattgatgacttgccacaggagattgtttcccaggaagatactggactaagcatgcccagtgatacttcactctctccagcaagtcagaactctccatactgtatgacacctgtgtcacaaggctctcctgctagttctggaataggcagtccaatggcatcttcaacaataaccaaaatccacagcaaaagatttagagagtattgtaatcaggttctttgtaaagagattgatgaatgtgtgactcttcttctccaagagcttgtcagtttccaggaacgcatctaccaaaaagatcctgtaagagcaaaagcaaggagacgactcgttatgggtctaagagaagttaccaaacatatgaagttaaacaagatcaagtgtgttataatttctccaaactgtgaaaaaatccagtcaaaaggtggtctggatgaggctctctataatgttatagccatggcacgggaacaagaaattccttttgtgtttgcccttggaaggaaagctctaggacgctgtgtgaacaagctggttcctgttagcgtagtgggaatcttcaactactttggtgctgagagcctgtttaataaattagtagaactcactgaggaggccaggaaagcatataaagatatggttgcagcaatggaacaggagcaggctgaggaagccttaaagaatgtgaagaaggtaccacaccacatgggacattctcggaatccctctgcagcaagtgccatttctttctgcagtgttatttctgaaccgatctctgaagtaaatgaaaaggaatatgaaacaaattggagaaacatggtggaaacttcagatggactggaagcatcagaaaatgagaaagaggtatcctgtaagcacagcacttctgaaaaacccagtaaacttccatttgacacacccccaattggtaagcagccatcattagtggctacaggcagtactacctcagctacaagtgctgggaaatccacagcaagtgataaagaggaagtgaagccagatgacctggaatgggcctcacagcagagtacagagactggctctttggatggcagttgccgagatcttttgaattcctccatcaccagcaccaccagcactcttgtacctggcatgcttgaagaagaagaagatgaagatgaggaggaggaggaagattatactcatgaacccatatctgtagaagtgcagctcaatagtagaattgagtcttgggtctcagagacccagagaactatggaaacccttcagcttggaaaaacccttaatggttctgaggaagacaatgtagagcaaagtggagaagaggaagcagaggcgcctgaggtgctggagccagggatggacagtgaggcatggactgctgaccagcaggccagtcctgggcagcagaagtccagcaactgcagctcgctcaacaaagagcactctgattctaattacacaacgcaaactacgtaactcaggaaatgtcggctctctatctccagctgtggaagggttgcagccattaccttttatgcttcatctcaacattttgcactgtccagtatttaatatacgtatttaattcccaacaaatatttttgtagcttttacttgttatgatctgtagcttagcttttaattagtatctaagtgtctttctaagaactgtgtggaaaattcagatctgtttcagcttattttgtaatcaaaaacagtgataaaaagaagaccagatcttaaagaaaataaatttcaaatgcttacttaaaagacattttgaaagttaaagaacaaggttctaaggatagaagcagttatcagtgtttgcttcaggactccacctcctctactctaatttgaccaaaaaattgtttgggcttctttaaaaaagaactgggggtggagtcagaaaattaaatgaaaggctgagggtaactaagtccaccagtgttgtatgttaaaaaatcaatgcaacttttatgtggtccacaaatgtttagtcagaagtcactgattattgtaattaattagtgttgggatgggctaaaacagagccttcaaaacttcggctagcagtggagccaccatcttagattatagctagctagcctcatttgtggaaagtgatagatgctgtctataatagtgaacagtcacccatgataggacctccaggttctgtctcatatttgcttcttacttacctcaggaatgctcttgtacatagacttatttacaaaaagctaggcacatgttgacaggtgaataactgtaaccgattgtatgactgctgcacttacatgtaaactcttcagaaacagagtcttatactggtgtgttctcttgcatgcttctggttcaggactcttgatttgagatatggatttgattgagtatccaaacttgtcctgagtgcaaaactgtttcaccttttaaaaaatacctattttgcacctagccttgagcaccttccacatagcaatgaccatagttactgtcaggaggtcaaggaaaggaactttgcacaacttgtgacatgtatcctgataatcaaggcttagaggaggaagttttagaagataagagaaagttgttctaattgtgctgaaactattagatgatttagagtatacagatatgtaggtattaattctctattcactattatttatctctgcccttctctaggagtttgtatacctgcttaggagacaataaatgagctaaatgttttatttgctagtcagtcaccacctggacttcagtgactttacaagtttatgtaatggtggaagaatgacaaactatgtaatttttttgtcttccatccaactccccaccacccccaactgtcccccccacccccctcacacacatgcacacatccgtacgtgtgtgtgttttccacttacaagcttccataagcaggcacaaaactgagaaggaaggggtattatccctgccctgattatctggggcagggctttgcctcacagaggcaggagagaagaattgggcagattctttactgaactcattgggactactgtgctagttttgatgttttataatgctggcatttaattactggagagattggattcttggttgatgatttagtatttgtgaattgtgaaagttcaggagctgtgtagaaaatgttagtcaatcaactttattattgtgctaaaaggggacattcttatactgtcctgtctaaactgttctccagtatagacttcctaggcactaaatatccaatatttaaaggaacacagcaggtaaggaatgaagcctctgaaatagtactcatggatttatacatggcagatcttactgtctctacacatttggaagtgttcgttggtttaaagaaatgatagaggttttgaactactgacagtcttaaaagtgaatttaaaaactgttcatactttttatggtgtaaatttcctttgctcgatgtcagtgattcagataactcttgaccttgagatgatggcttttcacaggtttcttatattttatatctcttctgaacatgaattgtcattttagatttttgacatttgtatcaaaagagaagttgaggaaatcttcagaacactggtaacttttagttttgctatagacttcagaagtgtttatttatatgttcggtaaatgctctcgcatatgcagtacctcttctgccagcaaatccaagggaccatagcctttttatgagacaggtcacctctagaggacancccaagaattattaaaggaaatgttaccattttgagagcatgcttaaataaatattaataatgtctttataacttgtttcctttaaattttggaatattgaattacaggctttggaggagttgtgaaaattaggaaagtttttatatattttttgaagtgggcatggttggctctttgaagacctataaagagatccagtgggaagagtaagggttggttcatcatcacaagaaataaaaaacatagtgattttttctcttaatgtgtagaggtggttttactggcaataattaataatagatttctatttcagtatgtaagcatattaactaaaatatgaattacacttccaaagttagatttctgcttcagtaggtttgtttgctgtgaagattacttctcaaaagacagatgttcatattagcttaattttcggtttaaatatgtttgtaaatgatgtaatatatttcttttgactaaatgtggaaaagtaatgtgtgttatacattgagaagtttttactggctttgactggaggttgtttttgcagagatggtattttatatgattccagtatttggaaaagaattagtcaaaaggaattcacatagtttaaatactgagaaattaatatccaaatatgtacttgtctgatttctaaataagctgggggaggagggaggggtgggaattgaaatgtgcaaatgagtagtgaatgctacactcattttcaactctttaacatgaaactgttcaatcttaacacattgttactttaatatatgtataaagaagtattactgtttgtaaagctgctgtttgcttaaaaaaaaaaaaacacccttgtcatgtattttctgtatgttgggccaacaggttagaacatcaactcatttaaaaatttttatctttttttgatttaaaaaaattctgtgaaataatttatttacagacatcttcctcctccctcatcccttccaacctttacatacatcacagaatcaaccaaactgtttgcctaatctgaaatctgaatcctaatgagaaaaatttaaattttgttggcacatcacaccttgaaagtatttgtattattttataatttaatttctaaatataccacataagtttataatttaatgtcttaattgtaatgctctaataaaaaactagcaaaattagtgtgagttataacatgaagggattttcatcttttgctgtatgaaggataattgttatatcacatttggggggtaataacagcttttttgcactatgtaaatactagtggggattcttctgtactaataaaatgattattgaaatgaaaaaaaaaaaaaaaaaaaaaaaaaaaaaaacaaaaaaaaaaaaaaaaaaagaaaagaaacaacaagcaaaaacacaacaaggggcgggcggccgagaccacaatacaacacacggcggggagaaaaaatgggcgcccacacccacgcgtcaaaaacgaggcggcaacacgagagcgcacaccacaccagacacacaacgaccagcgaccaacgcgccaaagcggcgacgccagcggaaaaaaccacaactgccgagcagtgcgggcacaaaagccgacccaccagcgaagaggagaacacaccagcacgcgctaccagaacacgatccaagcacacaaggcagccaacaccaccggcacagccaagctaacaacaagagcaagcgcacgatgcacacagcgcacacacgcgctgacngaaacaccacacgccccgctcaaacaaacccacaacacgcag

SEQ ID NO: 449659 - DNA, 8326 bp, Homo sapiens
  misc_feature (1250)..(1250): n is a, c, g, or t
  misc_feature (6995)..(6995): n is a, c, g, or t
tgagattgaacatctaatctcatagttgccaagacagtctctggtgtaaaagaaaataccaagcaatagtccttaactttgaagctgtcatggttagcatatattagtatttctagactcagattttagtttaaatttatgtctgtgctatagttacaggatgatttagcaaaattgcccgcaattaggtcatgtgtaacctagtggttagggtgttacttatgatagtcgtgatagccattctaaccctgcttatactgtctgagtgattagcacttcattggtatagtttattttatggctgtataaaagtactttcagcctttttcaagttatgtcacacagaaaatttcgtttttctaggactgtaaatggatgaggcagctgttaactggctataggctctgtcattcctgagggctgagtcaatcaatatttccacccatctataaaccactgttgcacattagtgtgccagtgcacattctttgagaaattgtggatgtatggtatataaggccattcaactactcaaatattaaatgctcaagttaatattctgaggctcttaatcaagagtcttgagggttagacaaatagtagaaactaaggaatcattttcaattgaagttagcatgatattaaatatctttgcctatattggataatgtgcaaactgattcatgaaactaaatttaataatactatttttctatttgaaaaaaatggccaagtatacagtatgataaacttaattgattttcttggtttaccaaataatctttgtgaatttatgagtaaaccagccaacagattatttaaaaaatatttttaagaatatggccgtgaacattttactattttgctttgtcatgggagtaatgaggaaaagccctatgcttcaactccctagtccttaggaccccatattgatttggtgagggggctgctgggacaggaagaattttgctagtgttttatatgaactgcattagaagaagctccactcctgaagatgtcagtggacagatttgcctcttctcttctttcccttggacccagagcctgcttctattgccaggaggggagccaggaaaagagctggacttggccaagtgattaggggagtatgagaggaggagtaggaggctctgagattgagctgaaaatgaggaattaaatcaccctatgtaaagatcaccttacacaatggtcactttactctgttctttacagaaggctgtcacggntgtgtaccttgaatgggaactttggactgccattgttggtagatacagtagctaggtgtttaacttttaggcagaaatatcttgaggaattggaaggcagagttacagacaatgctggtatgtggaatactgtaaaaccatcaggttgggttcgtttatactgttgtttacattgttactgcatgtacataatgatctctatagcaaagaaatttataagatgatgatagttttgtctcctttcccaaaattatcatgaagccactgttctgttttgtcttttattagtgtaagttaagagattttgctttagtggtatttttagacttgtcaatagatttgttcttctttgatttggttttgcagacagtttcctttatataacaatgatatacgatggcaacaacccaatccaaaccctactggaccatactttgcctatcccattatatctgctcagccgcctgtttctacagagtatacatattatcagctgatgccagcaccatgtgcccaggttatgggtttctatcatccttttcctacaccttactccaacacctttcaggctgcaaatactgtaaatgctatcaccacagaatgcactgagcgtccaagtcagcttggacaggtcttcccattgtccagccatcgaagcagaaacagtaacagaggatcagtggtcccaaaacaacagcttttacaacagcacataaaaagcaaaaggccgctggtgaaaaatgtagctactcagaaagaaacaaatgcagcaggtcctgatagtcgatcaaaaattgtgcttctggtagatgcttcacagcaaactgatttcccatcagatatcgctaacaagtctctctcagagaccactgcaacaatgctctggaagtccaagggcaggagaagaagagcatcccaccctactgctgaatcttctagtgagcagggggctagtgaagccgacattgacagtgatagtggttactgcagtcccaaacacagcaacaaccagcctgcagcaggggctttgagaaatcctgattctgggaccatgaatcatgtggaatcatctatgtgtgcaggtggtgtaaattggtccaatgtaacttgccaggcaactcagaaaaaaccttggatggaaaaaaatcagacattttctagaggtggaaggcaaactgaacaaagaaataattcacaggttggattcagatgccgaggacacagtacttcctcagaaagaagacagaatttgcaaaagagaccagataataagcatttaagctctagtcaatcccatagaagcgatccaaattctgagtctttatattttgaggatgaagatgggtttcaagaactaaatgagaatggaaatgctaaggatgagaatattcaacaaaaactttcttctaaagtattggatgatttacctgaaaactcaccaatcaatatagttcagactccaattcctattaccacctcagttcccaaacgtgcaaaaagtcagaagaagaaagctttagcagcagcccttgccacagctcaagagtattcagaaataagtatggagcaaaaaaaattacaggaagctttatcaaaagcagctggaaaaaagaataaaacacctgtgcagctagatttaggggacatgttagctgctctggaaaaacaacagcaagcaatgaaagcacggcaaattactaacaccagacctctgtcatatacagtggttactgcagcttcttttcacactaaagactctactaatagaaaacctttaaccaaaagtcagccctgtttgacatcctttaattctgtggacattgcttcttctaaagcaaaaaaaggaaaagagaaggaaattgcaaaactaaaacgacccacagcacttaaaaaggttattttaaaagaaagagaggaaaagaaggggcgcttaactgtggaccacaatcttttgggatccgaggaaccaacagaaatgcacttagattttattgatgacttgccacaggagattgtttcccaggaagatactggactaagcatgcccagtgatacttcactctctccagcaagtcagaactctccatactgtatgacacctgtgtcacaaggctctcctgctagttctggaataggcagtccaatggcatcttcaacaataaccaaaatccacagcaaaagatttagagagtattgtaatcaggttctttgtaaagagattgatgaatgtgtgactcttcttctccaagagcttgtcagtttccaggaacgcatctaccaaaaagatcctgtaagagcaaaagcaaggagacgactcgttatgggtctaagagaagttaccaaacatatgaagttaaacaagatcaagtgtgttataatttctccaaactgtgaaaaaatccagtcaaaaggtggtctggatgaggctctctataatgttatagccatggcacgggaacaagaaattccttttgtgtttgcccttggaaggaaagctctaggacgctgtgtgaacaagctggttcctgttagcgtagtgggaatcttcaactactttggtgctgagagcctgtttaataaattagtagaactcactgaggaggccaggaaagcatataaagatatggttgcagcaatggaacaggagcaggctgaggaagccttaaagaatgtgaagaaggtaccacaccacatgggacattctcggaatccctctgcagcaagtgccatttctttctgcagtgttatttctgaaccgatctctgaagtaaatgaaaaggaatatgaaacaaattggagaaacatggtggaaacttcagatggactggaagcatcagaaaatgagaaagaggtatcctgtaagcacagcacttctgaaaaacccagtaaacttccatttgacacacccccaattggtaagcagccatcattagtggctacaggcagtactacctcagctacaagtgctgggaaatccacagcaagtgataaagaggaagtgaagccagatgacctggaatgggcctcacagcagagtacagagactggctctttggatggcagttgccgagatcttttgaattcctccatcaccagcaccaccagcactcttgtacctggcatgcttgaagaagaagaagatgaagatgaggaggaggaggaagattatactcatgaacccatatctgtagaagtgcagctcaatagtagaattgagtcttgggtctcagagacccagagaactatggaaacccttcagcttggaaaaacccttaatggttctgaggaagacaatgtagagcaaagtggagaagaggaagcagaggcgcctgaggtgctggagccagggatggacagtgaggcatggactgctgaccagcaggccagtcctgggcagcagaagtccagcaactgcagctcgctcaacaaagagcactctgattctaattacacaacgcaaactacgtaactcaggaaatgtcggctctctatctccagctgtggaagggttgcagccattaccttttatgcttcatctcaacattttgcactgtccagtatttaatatacgtatttaattcccaacaaatatttttgtagcttttacttgttatgatctgtagcttagcttttaattagtatctaagtgtctttctaagaactgtgtggaaaattcagatctgtttcagcttattttgtaatcaaaaacagtgataaaaagaagaccagatcttaaagaaaataaatttcaaatgcttacttaaaagacattttgaaagttaaagaacaaggttctaaggatagaagcagttatcagtgtttgcttcaggactccacctcctctactctaatttgaccaaaaaattgtttgggcttctttaaaaaagaactgggggtggagtcagaaaattaaatgaaaggctgagggtaactaagtccaccagtgttgtatgttaaaaaatcaatgcaacttttatgtggtccacaaatgtttagtcagaagtcactgattattgtaattaattagtgttgggatgggctaaaacagagccttcaaaacttcggctagcagtggagccaccatcttagattatagctagctagcctcatttgtggaaagtgatagatgctgtctataatagtgaacagtcacccatgataggacctccaggttctgtctcatatttgcttcttacttacctcaggaatgctcttgtacatagacttatttacaaaaagctaggcacatgttgacaggtgaataactgtaaccgattgtatgactgctgcacttacatgtaaactcttcagaaacagagtcttatactggtgtgttctcttgcatgcttctggttcaggactcttgatttgagatatggatttgattgagtatccaaacttgtcctgagtgcaaaactgtttcaccttttaaaaaatacctattttgcacctagccttgagcaccttccacatagcaatgaccatagttactgtcaggaggtcaaggaaaggaactttgcacaacttgtgacatgtatcctgataatcaaggcttagaggaggaagttttagaagataagagaaagttgttctaattgtgctgaaactattagatgatttagagtatacagatatgtaggtattaattctctattcactattatttatctctgcccttctctaggagtttgtatacctgcttaggagacaataaatgagctaaatgttttatttgctagtcagtcaccacctggacttcagtgactttacaagtttatgtaatggtggaagaatgacaaactatgtaatttttttgtcttccatccaactccccaccacccccaactgtcccccccacccccctcacacacatgcacacatccgtacgtgtgtgtgttttccacttacaagcttccataagcaggcacaaaactgagaaggaaggggtattatccctgccctgattatctggggcagggctttgcctcacagaggcaggagagaagaattgggcagattctttactgaactcattgggactactgtgctagttttgatgttttataatgctggcatttaattactggagagattggattcttggttgatgatttagtatttgtgaattgtgaaagttcaggagctgtgtagaaaatgttagtcaatcaactttattattgtgctaaaaggggacattcttatactgtcctgtctaaactgttctccagtatagacttcctaggcactaaatatccaatatttaaaggaacacagcaggtaaggaatgaagcctctgaaatagtactcatggatttatacatggcagatcttactgtctctacacatttggaagtgttcgttggtttaaagaaatgatagaggttttgaactactgacagtcttaaaagtgaatttaaaaactgttcatactttttatggtgtaaatttcctttgctcgatgtcagtgattcagataactcttgaccttgagatgatggcttttcacaggtttcttatattttatatctcttctgaacatgaattgtcattttagatttttgacatttgtatcaaaagagaagttgaggaaatcttcagaacactggtaacttttagttttgctatagacttcagaagtgtttatttatatgttcggtaaatgctctcgcatatgcagtacctcttctgccagcaaatccaagggaccatagcctttttatgagacaggtcacctctagaggacancccaagaattattaaaggaaatgttaccattttgagagcatgcttaaataaatattaataatgtctttataacttgtttcctttaaattttggaatattgaattacaggctttggaggagttgtgaaaattaggaaagtttttatatattttttgaagtgggcatggttggctctttgaagacctataaagagatccagtgggaagagtaagggttggttcatcatcacaagaaataaaaaacatagtgattttttctcttaatgtgtagaggtggttttactggcaataattaataatagatttctatttcagtatgtaagcatattaactaaaatatgaattacacttccaaagttagatttctgcttcagtaggtttgtttgctgtgaagattacttctcaaaagacagatgttcatattagcttaattttcggtttaaatatgtttgtaaatgatgtaatatatttcttttgactaaatgtggaaaagtaatgtgtgttatacattgagaagtttttactggctttgactggaggttgtttttgcagagatggtattttatatgattccagtatttggaaaagaattagtcaaaaggaattcacatagtttaaatactgagaaattaatatccaaatatgtacttgtctgatttctaaataagctgggggaggagggaggggtgggaattgaaatgtgcaaatgagtagtgaatgctacactcattttcaactctttaacatgaaactgttcaatcttaacacattgttactttaatatatgtataaagaagtattactgtttgtaaagctgctgtttgcttaaaaaaaaaaaaacacccttgtcatgtattttctgtatgttgggccaacaggttagaacatcaactcatttaaaaatttttatctttttttgatttaaaaaaattctgtgaaataatttatttacagacatcttcctcctccctcatcccttccaacctttacatacatcacagaatcaaccaaactgtttgcctaatctgaaatctgaatcctaatgagaaaaatttaaattttgttggcacatcacaccttgaaagtatttgtattattttataatttaatttctaaatataccacataagtttataatttaatgtcttaattgtaatgctctaataaaaaactagcaaaattagtgtgagttataacatgaagggattttcatcttttgctgtatgaaggataattgttatatcacatttggggggtaataacagcttttttgcactatgtaaatactagtggggattcttctgtactaataaaatgattattgaaatgaaa

SEQ ID NO: 449660 - DNA, 5908 bp, Homo sapiens
  misc_feature (4577)..(4577): n is a, c, g, or t
tattttagcatgtgagaaatgacatttcctctttaagaccgactttgaataattcagtaatagaatacaagaaataacttcctcatttttcaatacttctaagcattataaaaagtttaggagtttgccttgaactctttttacttaaaatgtgaaacatttcaggatgaagatgggtttcaagaactaaatgagaatggaaatgctaaggatgagaatattcaacaaaaactttcttctaaagtattggatgatttacctgaaaactcaccaatcaatatagttcagactccaattcctattaccacctcagttcccaaacgtgcaaaaagtcagaagaagaaagctttagcagcagcccttgccacagctcaagagtattcagaaataagtatggagcaaaaaaaattacaggaagctttatcaaaagcagctggaaaaaagaataaaacacctgtgcagctagatttaggggacatgttagctgctctggaaaaacaacagcaagcaatgaaagcacggcaaattactaacaccagacctctgtcatatacagtggttactgcagcttcttttcacactaaagactctactaatagaaaacctttaaccaaaagtcagccctgtttgacatcctttaattctgtggacattgcttcttctaaagcaaaaaaaggaaaagagaaggaaattgcaaaactaaaacgacccacagcacttaaaaaggttattttaaaagaaagagaggaaaagaaggggcgcttaactgtggaccacaatcttttgggatccgaggaaccaacagaaatgcacttagattttattgatgacttgccacaggagattgtttcccaggaagatactggactaagcatgcccagtgatacttcactctctccagcaagtcagaactctccatactgtatgacacctgtgtcacaaggctctcctgctagttctggaataggcagtccaatggcatcttcaacaataaccaaaatccacagcaaaagatttagagagtattgtaatcaggttctttgtaaagagattgatgaatgtgtgactcttcttctccaagagcttgtcagtttccaggaacgcatctaccaaaaagatcctgtaagagcaaaagcaaggagacgactcgttatgggtctaagagaagttaccaaacatatgaagttaaacaagatcaagtgtgttataatttctccaaactgtgaaaaaatccagtcaaaaggtggtctggatgaggctctctataatgttatagccatggcacgggaacaagaaattccttttgtgtttgcccttggaaggaaagctctaggacgctgtgtgaacaagctggttcctgttagcgtagtgggaatcttcaactactttggtgctgagagcctgtttaataaattagtagaactcactgaggaggccaggaaagcatataaagatatggttgcagcaatggaacaggagcaggctgaggaagccttaaagaatgtgaagaaggtaccacaccacatgggacattctcggaatccctctgcagcaagtgccatttctttctgcagtgttatttctgaaccgatctctgaagtaaatgaaaaggaatatgaaacaaattggagaaacatggtggaaacttcagatggactggaagcatcagaaaatgagaaagaggtatcctgtaagcacagcacttctgaaaaacccagtaaacttccatttgacacacccccaattggtaagcagccatcattagtggctacaggcagtactacctcagctacaagtgctgggaaatccacagcaagtgataaagaggaagtgaagccagatgacctggaatgggcctcacagcagagtacagagactggctctttggatggcagttgccgagatcttttgaattcctccatcaccagcaccaccagcactcttgtacctggcatgcttgaagaagaagaagatgaagatgaggaggaggaggaagattatactcatgaacccatatctgtagaagtgcagctcaatagtagaattgagtcttgggtctcagagacccagagaactatggaaacccttcagcttggaaaaacccttaatggttctgaggaagacaatgtagagcaaagtggagaagaggaagcagaggcgcctgaggtgctggagccagggatggacagtgaggcatggactgctgaccagcaggccagtcctgggcagcagaagtccagcaactgcagctcgctcaacaaagagcactctgattctaattacacaacgcaaactacgtaactcaggaaatgtcggctctctatctccagctgtggaagggttgcagccattaccttttatgcttcatctcaacattttgcactgtccagtatttaatatacgtatttaattcccaacaaatatttttgtagcttttacttgttatgatctgtagcttagcttttaattagtatctaagtgtctttctaagaactgtgtggaaaattcagatctgtttcagcttattttgtaatcaaaaacagtgataaaaagaagaccagatcttaaagaaaataaatttcaaatgcttacttaaaagacattttgaaagttaaagaacaaggttctaaggatagaagcagttatcagtgtttgcttcaggactccacctcctctactctaatttgaccaaaaaattgtttgggcttctttaaaaaagaactgggggtggagtcagaaaattaaatgaaaggctgagggtaactaagtccaccagtgttgtatgttaaaaaatcaatgcaacttttatgtggtccacaaatgtttagtcagaagtcactgattattgtaattaattagtgttgggatgggctaaaacagagccttcaaaacttcggctagcagtggagccaccatcttagattatagctagctagcctcatttgtggaaagtgatagatgctgtctataatagtgaacagtcacccatgataggacctccaggttctgtctcatatttgcttcttacttacctcaggaatgctcttgtacatagacttatttacaaaaagctaggcacatgttgacaggtgaataactgtaaccgattgtatgactgctgcacttacatgtaaactcttcagaaacagagtcttatactggtgtgttctcttgcatgcttctggttcaggactcttgatttgagatatggatttgattgagtatccaaacttgtcctgagtgcaaaactgtttcaccttttaaaaaatacctattttgcacctagccttgagcaccttccacatagcaatgaccatagttactgtcaggaggtcaaggaaaggaactttgcacaacttgtgacatgtatcctgataatcaaggcttagaggaggaagttttagaagataagagaaagttgttctaattgtgctgaaactattagatgatttagagtatacagatatgtaggtattaattctctattcactattatttatctctgcccttctctaggagtttgtatacctgcttaggagacaataaatgagctaaatgttttatttgctagtcagtcaccacctggacttcagtgactttacaagtttatgtaatggtggaagaatgacaaactatgtaatttttttgtcttccatccaactccccaccacccccaactgtcccccccacccccctcacacacatgcacacatccgtacgtgtgtgtgttttccacttacaagcttccataagcaggcacaaaactgagaaggaaggggtattatccctgccctgattatctggggcagggctttgcctcacagaggcaggagagaagaattgggcagattctttactgaactcattgggactactgtgctagttttgatgttttataatgctggcatttaattactggagagattggattcttggttgatgatttagtatttgtgaattgtgaaagttcaggagctgtgtagaaaatgttagtcaatcaactttattattgtgctaaaaggggacattcttatactgtcctgtctaaactgttctccagtatagacttcctaggcactaaatatccaatatttaaaggaacacagcaggtaaggaatgaagcctctgaaatagtactcatggatttatacatggcagatcttactgtctctacacatttggaagtgttcgttggtttaaagaaatgatagaggttttgaactactgacagtcttaaaagtgaatttaaaaactgttcatactttttatggtgtaaatttcctttgctcgatgtcagtgattcagataactcttgaccttgagatgatggcttttcacaggtttcttatattttatatctcttctgaacatgaattgtcattttagatttttgacatttgtatcaaaagagaagttgaggaaatcttcagaacactggtaacttttagttttgctatagacttcagaagtgtttatttatatgttcggtaaatgctctcgcatatgcagtacctcttctgccagcaaatccaagggaccatagcctttttatgagacaggtcacctctagaggacancccaagaattattaaaggaaatgttaccattttgagagcatgcttaaataaatattaataatgtctttataacttgtttcctttaaattttggaatattgaattacaggctttggaggagttgtgaaaattaggaaagtttttatatattttttgaagtgggcatggttggctctttgaagacctataaagagatccagtgggaagagtaagggttggttcatcatcacaagaaataaaaaacatagtgattttttctcttaatgtgtagaggtggttttactggcaataattaataatagatttctatttcagtatgtaagcatattaactaaaatatgaattacacttccaaagttagatttctgcttcagtaggtttgtttgctgtgaagattacttctcaaaagacagatgttcatattagcttaattttcggtttaaatatgtttgtaaatgatgtaatatatttcttttgactaaatgtggaaaagtaatgtgtgttatacattgagaagtttttactggctttgactggaggttgtttttgcagagatggtattttatatgattccagtatttggaaaagaattagtcaaaaggaattcacatagtttaaatactgagaaattaatatccaaatatgtacttgtctgatttctaaataagctgggggaggagggaggggtgggaattgaaatgtgcaaatgagtagtgaatgctacactcattttcaactctttaacatgaaactgttcaatcttaacacattgttactttaatatatgtataaagaagtattactgtttgtaaagctgctgtttgcttaaaaaaaaaaaaacacccttgtcatgtattttctgtatgttgggccaacaggttagaacatcaactcatttaaaaatttttatctttttttgatttaaaaaaattctgtgaaataatttatttacagacatcttcctcctccctcatcccttccaacctttacatacatcacagaatcaaccaaactgtttgcctaatctgaaatctgaatcctaatgagaaaaatttaaattttgttggcacatcacaccttgaaagtatttgtattattttataatttaatttctaaatataccacataagtttataatttaatgtcttaattgtaatgctctaataaaaaactagcaaaattagtgtgagttataacatgaagggattttcatcttttgctgtatgaaggataattgttatatcacatttggggggtaataacagcttttttgcactatgtaaatactagtggggattcttctgtactaataaaatgattattgaaatgaaa

SEQ ID NO: 449661 - DNA, 5676 bp, Homo sapiens
  misc_feature (4345)..(4345): n is a, c, g, or t
attgtgaagtttcaaaggtagaatggttctgactgaagaccagttgcaaggaattgccatgtttgagggttgtacaggagagtagaactaattatttacccctataatggacttctaaattggttaattgcattggcttagtctctaaaggataggtaaaagctgtatctgagggacactgcctagccatgtatagtgctcctactgttatgatgtcgttttttccatgggaggaggatgttcttgtttttgtagttattggaaattttgaaagtatgtgggattggccctaatggtgaaactaatgttcctctttgtttttagtggttactgcagcttcttttcacactaaagactctactaatagaaaacctttaaccaaaagtcagccctgtttgacatcctttaattctgtggacattgcttcttctaaagcaaaaaaaggaaaagagaaggaaattgcaaaactaaaacgacccacagcacttaaaaaggttattttaaaagaaagagaggaaaagaaggggcgcttaactgtggaccacaatcttttgggatccgaggaaccaacagaaatgcacttagattttattgatgacttgccacaggagattgtttcccaggaagatactggactaagcatgcccagtgatacttcactctctccagcaagtcagaactctccatactgtatgacacctgtgtcacaaggctctcctgctagttctggaataggcagtccaatggcatcttcaacaataaccaaaatccacagcaaaagatttagagagtattgtaatcaggttctttgtaaagagattgatgaatgtgtgactcttcttctccaagagcttgtcagtttccaggaacgcatctaccaaaaagatcctgtaagagcaaaagcaaggagacgactcgttatgggtctaagagaagttaccaaacatatgaagttaaacaagatcaagtgtgttataatttctccaaactgtgaaaaaatccagtcaaaaggtggtctggatgaggctctctataatgttatagccatggcacgggaacaagaaattccttttgtgtttgcccttggaaggaaagctctaggacgctgtgtgaacaagctggttcctgttagcgtagtgggaatcttcaactactttggtgctgagagcctgtttaataaattagtagaactcactgaggaggccaggaaagcatataaagatatggttgcagcaatggaacaggagcaggctgaggaagccttaaagaatgtgaagaaggtaccacaccacatgggacattctcggaatccctctgcagcaagtgccatttctttctgcagtgttatttctgaaccgatctctgaagtaaatgaaaaggaatatgaaacaaattggagaaacatggtggaaacttcagatggactggaagcatcagaaaatgagaaagaggtatcctgtaagcacagcacttctgaaaaacccagtaaacttccatttgacacacccccaattggtaagcagccatcattagtggctacaggcagtactacctcagctacaagtgctgggaaatccacagcaagtgataaagaggaagtgaagccagatgacctggaatgggcctcacagcagagtacagagactggctctttggatggcagttgccgagatcttttgaattcctccatcaccagcaccaccagcactcttgtacctggcatgcttgaagaagaagaagatgaagatgaggaggaggaggaagattatactcatgaacccatatctgtagaagtgcagctcaatagtagaattgagtcttgggtctcagagacccagagaactatggaaacccttcagcttggaaaaacccttaatggttctgaggaagacaatgtagagcaaagtggagaagaggaagcagaggcgcctgaggtgctggagccagggatggacagtgaggcatggactgctgaccagcaggccagtcctgggcagcagaagtccagcaactgcagctcgctcaacaaagagcactctgattctaattacacaacgcaaactacgtaactcaggaaatgtcggctctctatctccagctgtggaagggttgcagccattaccttttatgcttcatctcaacattttgcactgtccagtatttaatatacgtatttaattcccaacaaatatttttgtagcttttacttgttatgatctgtagcttagcttttaattagtatctaagtgtctttctaagaactgtgtggaaaattcagatctgtttcagcttattttgtaatcaaaaacagtgataaaaagaagaccagatcttaaagaaaataaatttcaaatgcttacttaaaagacattttgaaagttaaagaacaaggttctaaggatagaagcagttatcagtgtttgcttcaggactccacctcctctactctaatttgaccaaaaaattgtttgggcttctttaaaaaagaactgggggtggagtcagaaaattaaatgaaaggctgagggtaactaagtccaccagtgttgtatgttaaaaaatcaatgcaacttttatgtggtccacaaatgtttagtcagaagtcactgattattgtaattaattagtgttgggatgggctaaaacagagccttcaaaacttcggctagcagtggagccaccatcttagattatagctagctagcctcatttgtggaaagtgatagatgctgtctataatagtgaacagtcacccatgataggacctccaggttctgtctcatatttgcttcttacttacctcaggaatgctcttgtacatagacttatttacaaaaagctaggcacatgttgacaggtgaataactgtaaccgattgtatgactgctgcacttacatgtaaactcttcagaaacagagtcttatactggtgtgttctcttgcatgcttctggttcaggactcttgatttgagatatggatttgattgagtatccaaacttgtcctgagtgcaaaactgtttcaccttttaaaaaatacctattttgcacctagccttgagcaccttccacatagcaatgaccatagttactgtcaggaggtcaaggaaaggaactttgcacaacttgtgacatgtatcctgataatcaaggcttagaggaggaagttttagaagataagagaaagttgttctaattgtgctgaaactattagatgatttagagtatacagatatgtaggtattaattctctattcactattatttatctctgcccttctctaggagtttgtatacctgcttaggagacaataaatgagctaaatgttttatttgctagtcagtcaccacctggacttcagtgactttacaagtttatgtaatggtggaagaatgacaaactatgtaatttttttgtcttccatccaactccccaccacccccaactgtcccccccacccccctcacacacatgcacacatccgtacgtgtgtgtgttttccacttacaagcttccataagcaggcacaaaactgagaaggaaggggtattatccctgccctgattatctggggcagggctttgcctcacagaggcaggagagaagaattgggcagattctttactgaactcattgggactactgtgctagttttgatgttttataatgctggcatttaattactggagagattggattcttggttgatgatttagtatttgtgaattgtgaaagttcaggagctgtgtagaaaatgttagtcaatcaactttattattgtgctaaaaggggacattcttatactgtcctgtctaaactgttctccagtatagacttcctaggcactaaatatccaatatttaaaggaacacagcaggtaaggaatgaagcctctgaaatagtactcatggatttatacatggcagatcttactgtctctacacatttggaagtgttcgttggtttaaagaaatgatagaggttttgaactactgacagtcttaaaagtgaatttaaaaactgttcatactttttatggtgtaaatttcctttgctcgatgtcagtgattcagataactcttgaccttgagatgatggcttttcacaggtttcttatattttatatctcttctgaacatgaattgtcattttagatttttgacatttgtatcaaaagagaagttgaggaaatcttcagaacactggtaacttttagttttgctatagacttcagaagtgtttatttatatgttcggtaaatgctctcgcatatgcagtacctcttctgccagcaaatccaagggaccatagcctttttatgagacaggtcacctctagaggacancccaagaattattaaaggaaatgttaccattttgagagcatgcttaaataaatattaataatgtctttataacttgtttcctttaaattttggaatattgaattacaggctttggaggagttgtgaaaattaggaaagtttttatatattttttgaagtgggcatggttggctctttgaagacctataaagagatccagtgggaagagtaagggttggttcatcatcacaagaaataaaaaacatagtgattttttctcttaatgtgtagaggtggttttactggcaataattaataatagatttctatttcagtatgtaagcatattaactaaaatatgaattacacttccaaagttagatttctgcttcagtaggtttgtttgctgtgaagattacttctcaaaagacagatgttcatattagcttaattttcggtttaaatatgtttgtaaatgatgtaatatatttcttttgactaaatgtggaaaagtaatgtgtgttatacattgagaagtttttactggctttgactggaggttgtttttgcagagatggtattttatatgattccagtatttggaaaagaattagtcaaaaggaattcacatagtttaaatactgagaaattaatatccaaatatgtacttgtctgatttctaaataagctgggggaggagggaggggtgggaattgaaatgtgcaaatgagtagtgaatgctacactcattttcaactctttaacatgaaactgttcaatcttaacacattgttactttaatatatgtataaagaagtattactgtttgtaaagctgctgtttgcttaaaaaaaaaaaaacacccttgtcatgtattttctgtatgttgggccaacaggttagaacatcaactcatttaaaaatttttatctttttttgatttaaaaaaattctgtgaaataatttatttacagacatcttcctcctccctcatcccttccaacctttacatacatcacagaatcaaccaaactgtttgcctaatctgaaatctgaatcctaatgagaaaaatttaaattttgttggcacatcacaccttgaaagtatttgtattattttataatttaatttctaaatataccacataagtttataatttaatgtcttaattgtaatgctctaataaaaaactagcaaaattagtgtgagttataacatgaagggattttcatcttttgctgtatgaaggataattgttatatcacatttggggggtaataacagcttttttgcactatgtaaatactagtggggattcttctgtactaataaaatgattattgaaatgaaa

SEQ ID NO: 449662 - DNA, 1889 bp, Homo sapiens
tccccgaagctgccaccgcctcctccatctcccggagctggagccgcctcctcggccagtggcgtagccgaatcggtgtcgcggccagccagataggggcggaggtccggaacccagtctggacccgagcggggggccatggagaaagcggcccgaggcgctgtttacaccgactagcgcgggcccgttgcggctgcaggcaccatggaccgagcccccacggagcagaatgtcaagctgtcagctgaggtggagccatttattccccagaagaagagtcctgatacatttatgatccctatggctctcccaaatgataatggaagtgtttctggtgtggaaccaactccaattcccagctacctgattacttgttacccatttgtgcaggaaaaccagtccaatagacagtttcctttatataacaatgatatacgatggcaacaacccaatccaaaccctactggaccatactttgcctatcccattatatctgctcagccgcctgtttctacagagtatacatattatcagctgatgccagcaccatgtgcccaggttatgggtttctatcatccttttcctacaccttactccaacacctttcaggctgcaaatactgtaaatgctatcaccacagaatgcactgagcgtccaagtcagcttggacaggtcttcccattgtccagccatcgaagcagaaacagtaacagaggatcagtggtcccaaaacaacagcttttacaacagcacataaaaagcaaaaggccgctggtgaaaaatgtagctactcagaaagaaacaaatgcagcaggtcctgatagtcgatcaaaaattgtgcttctggtagatgcttcacagcaaactgatttcccatcagatatcgctaacaagtctctctcagagaccactgcaacaatgctctggaagtccaagggcaggagaagaagagcatcccaccctactgctgaatcttctagtgagcagggggctagtgaagccgacattgacagtgatagtggttactgcagtcccaaacacagcaacaaccagcctgcagcaggggctttgagaaatcctgattctgggaccatgaatcatgtggaatcatctatgtgtgcaggtggtgtaaattggtccaatgtaacttgccaggcaactcagaaaaaaccttggatggaaaaaaatcagacattttctagaggtggaaggcaaactgaacaaagaaataattcacaggttggattcagatgccgaggacacagtacttcctcagaaagaagacagaatttgcaaaagagaccagataataagcatttaagctctagtcaatcccatagaagcgatccaaattctgagtctttatattttgaggatgaagatgggtttcaagaactaaatgagaatggaaatgctaaggatgagaatattcaacaaaaactttcttctaaagtattggatgatttacctgaaaactcaccaatcaatatagttcagactccaattcctattaccacctcagttcccaaacgtgcaaaaagtcagaagaagaaagctttagcagcagcccttgccacagctcaagagtattcagaaataagtatggagcaaaaaaaattacaggaagctttatcaaaagcagctggaaaaaagaataaaacacctgtgcagctagatttaggggacatgttagctgctctggaaaaacaacagcaagcaatgaaagcacggcaaattactaacaccagacctctgtcatatacaggtgatatcattagtctgagcaatttgctgtttgtctctgctaatatatgttagatgttgttaatcgaaatttttaaaattttatatatgtatgtgtatatatatgtgtgtgtgtgtgtatatat

SEQ ID NO: 449663 - DNA, 2400 bp, Homo sapiens
ggcctagaccctggaaggcagggactgcgagctgggctggcggagcagaggtgcagaagcaactgagtccaagttgtctggcggcttcaggtggacccagaagacgtccccaactcagggagattcagcgatcactcactcgctgtacagaatgatattcctcacggcactgcctctgttctggattatgatttcagcctcccgagggggtcactggggtgcctggatgccctcgtccatctcggccttcgaaggcacgtgcgtctccatcccctgccgctttgacttcccggatgagctgcggcccgctgtggtgcatggtgtctggtacttcaatagcccctaccccaagaactaccccccggtggtcttcaagtcgcgcacccaagtagtccacgagagcttccagggccgcagccgcctcctgggggacctgggcctgcgaaactgcaccctcctgctcagcaacgtcagccccgagctgggcgggaagtactacttccgtggggacctgggcggctacaaccagtacaccttctcagagcacagcgtcctggatatcgtcaacacccccaacatcgtggtgcccccagaggtggtggcaggcacggaggtggaggtcagctgcatggtgccggacaactgcccagagctgcgccctgagctgagctggctgggccacgaggggctgggggagcccgctgtgctgggccggctgcgggaggacgagggcacctgggtgcaggtgtcactgctgcacttcgtgcccacgagggaggccaacggccacaggctgggctgccaggcctccttccccaacaccaccctgcagttcgagggctacgccagcatggacgtcaagtaccccccggtgattgtggagatgaactcctcggtggaggccatcgagggctcccacgtgagcctgctctgtggggctgacagcaaccccccgccgctgctgacctggatgcgggacgggacagtcctccgggaggcggtggccgagagcctgctcctggagctggaggaggtgacccccgccgaagacggcgtctatgcctgcctggccgagaatgcctatggccaggacaaccgcaccgtggggctcagtgtcatgtatgcaccctggaagccaacagtgaacgggacaatggtggccgtagagggggagacggtctctatcttgtgctccacacagagcaacccggaccctattctcaccatcttcaaggagaagcagatcctgtccacggtcatctacgagagcgagctgcagctggagctgccggccgtgtcacccgaggatgatggagagtactggtgtgtggctgagaaccagtatggccagagggccaccgccttcaacctgtctgtggagttcgcccctgtgctcctcctggagtcccactgcgcggcagcccgagacacggtgcagtgcctgtgcgtggtgaagtccaacccggagccgtccgtggcctttgagctgccatcgcgcaatgtgaccgtgaacgagagcgagcgggagttcgtgtactcggagcgcagcggcctcgtgctcaccagcatcctcacgctgcgggggcaggcccaggccccgccccgcgtcatctgcaccgcgaggaacctctatggcgccaagagcctggagctgcccttccagggagcccatcgactgatgtgggccaagatcgggcctgtgggcgccgtggtcgcctttgccatcctgattgccatcgtctgctacattacccagacacgcaggaaaaagaacgtgacagagagccccagcttctcggcaggggacaaccctcccgtcctgttcagcagcgacttccgcatctctggggcaccagagaagtacgagagcgagaggcgcctgggatctgagaggaggctgctgggccttcggggtgagcccccagagctggacctgagctattctcactcggacctggggaaacggcccaccaaggacagctacacgctgacggaggagctagctgagtatgctgaaatccgggtcaagtgaaggagctgggggcagcctgcgtggctgacccccctcaggaccctcgctggcccccactggctgtgggctcccttcctcccaaaagtatcgggggctggggcaggaggggagtgaggcaggtgacagtgaggtcctgggggcctgacctccccctccttcccagctgcccctccctgccagcacccccacgccctcattacggctcctctctaacctcctttaccctcatctgtctggaggggagctctgtctgtccgtgttatttattgctacttcctgcctggtctcctgcccccacacctggccctggggcctgtacaaaagggacatgaaataaatgccccaaagccaaatgccagtctagatcc

SEQ ID NO: 449664 - DNA, 1013 bp, Homo sapiens
ggcctagaccctggaaggcagggactgcgagctgggctggcggagcagaggtgcagaagcaactgagtccaagttgtctggcggcttcaggtggacccagaagacgtccccaactcagggagattcagcgatcactcactcgctgtacagaatgatattcctcacggcactgcctctgttctggattatgatttcagcctcccgagggggtcactggggtgcctggatgccctcgtccatctcggccttcgaaggcacgtgcgtctccatcccctgccgctttgacttcccggatgagctgcggcccgctgtggtgcatggtgtctggtacttcaatagcccctaccccaagaactaccccccggtggtcttcaagtcgcgcacccaagtagtccacgagagcttccagggccgcagccgcctcctgggggacctgggcctgcgaaactgcaccctcctgctcagcaacgtcagccccgagctgggcgggaagtactacttccgtggggacctgggcggctacaaccagtacaccttctcagagcacagcgtcctggatatcgtcaacacccccaacatcgtggtgcccccagaggtggtggcaggcacggaggtggaggtcagctgcatggtgccggacaactgcccagagctgcgccctgagctgagctggctgggccacgaggggctgggggagcccgctgtgctgggccggctgcgggaggacgagggcacctgggtgcaggtgtcactgctgcacttcgtgcccacgagggaggccaacggccacaggctgggctgccaggcctccttccccaacaccaccctgcagttcgagggctacgccagcatggacgtcaagtaccccccggaattgtgcaaatgaaacctcgggggagccacacaagggtccccagtgaagccgtcctggggggtgaaaaaaccccgcggtttaacggatcgggaggaaaacccccgaaggaggcaaaaggtctcgaatcagaggtgaaccc

SEQ ID NO: 449665 - DNA, 2445 bp, Homo sapiens
ggcctagaccctggaaggcagggactgcgagctgggctggcggagcagaggtgcagaagcaactgagtccaagttgtctggcggcttcaggtggacccagaagacgtccccaactcagggagattcagcgatcactcactcgctgtacagaatgatattcctcacggcactgcctctgttctggattatgatttcagcctcccgagggggtcactggggtgcctggatgccctcgtccatctcggccttcgaaggcacgtgcgtctccatcccctgccgctttgacttcccggatgagctgcggcccgctgtggtgcatggtgtctggtacttcaatagcccctaccccaagaactaccccccggtggtcttcaagtcgcgcacccaagtagtccacgagagcttccagggccgcagccgcctcctgggggacctgggcctgcgaaactgcaccctcctgctcagcaacgtcagccccgagctgggcgggaagtactacttccgtggggacctgggcggctacaaccagtacaccttctcagagcacagcgtcctggatatcgtcaacacccccaacatcgtggtgcccccagaggtggtggcaggcacggaggtggaggtcagctgcatggtgccggacaactgcccagagctgcgccctgagctgagctggctgggccacgaggggctgggggagcccgctgtgctgggccggctgcgggaggacgagggcacctgggtgcaggtgtcactgctgcacttcgtgcccacgagggaggccaacggccacaggctgggctgccaggcctccttccccaacaccaccctgcagttcgagggctacgccagcatggacgtcaagtaccccccggtgattgtggagatgaactcctcggtggaggccatcgagggctcccacgtgagcctgctctgtggggctgacagcaaccccccgccgctgctgacctggatgcgggacgggacagtcctccgggaggcggtggccgagagcctgctcctggagctggaggaggtgacccccgccgaagacggcgtctatgcctgcctggccgagaatgcctatggccaggacaaccgcaccgtggggctcagtgtcatgtatgcaccctggaagccaacagtgaacgggacaatggtggccgtagagggggagacggtctctatcttgtgctccacacagagcaacccggaccctattctcaccatcttcaaggagaagcagatcctgtccacggtcatctacgagagcgagctgcagctggagctgccggccgtgtcacccgaggatgatggagagtactggtgtgtggctgagaaccagtatggccagagggccaccgccttcaacctgtctgtggagttcgcccctgtgctcctcctggagtcccactgcgcggcagcccgagacacggtgcagtgcctgtgcgtggtgaagtccaacccggagccgtccgtggcctttgagctgccatcgcgcaatgtgaccgtgaacgagagcgagcgggagttcgtgtactcggagcgcagcggcctcgtgctcaccagcatcctcacgctgcgggggcaggcccaggccccgccccgcgtcatctgcaccgcgaggaacctctatggcgccaagagcctggagctgcccttccagggagcccatcgactgatgtgggccaagatcgggcctgtgggcgccgtggtcgcctttgccatcctgattgccatcgtctgctacattacccagacacgcaggaaaaagaacgtgacagagagccccagcttctcggcaggggacaaccctcccgtcctgttcagcagcgacttccgcatctctggggcaccagagaagtacgagtccaaagaggtttctaccctggaatctcactgagtgccccaggagagcgagaggcgcctgggatctgagaggaggctgctgggccttcggggtgagcccccagagctggacctgagctattctcactcggacctggggaaacggcccaccaaggacagctacacgctgacggaggagctagctgagtatgctgaaatccgggtcaagtgaaggagctgggggcagcctgcgtggctgacccccctcaggaccctcgctggcccccactggctgtgggctcccttcctcccaaaagtatcgggggctggggcaggaggggagtgaggcaggtgacagtgaggtcctgggggcctgacctccccctccttcccagctgcccctccctgccagcacccccacgccctcattacggctcctctctaacctcctttaccctcatctgtctggaggggagctctgtctgtccgtgttatttattgctacttcctgcctggtctcctgcccccacacctggccctggggcctgtacaaaagggacatgaaataaatgccccaaagccaaatgccagtctagatcc

SEQ ID NO: 449666 - DNA, 1159 bp, Homo sapiens
ggcctagaccctggaaggcagggactgcgagctgggctggcggagcagaggtgcagaagcaactgagtccaagttgtctggcggcttcaggtggacccagaagacgtccccaactcagggagattcagcgatcactcactcgctgtacagaatgatattcctcacggcactgcctctgttctggattatgatttcagcctcccgagggggtcactggggtgcctggatgccctcgtccatctcggccttcgaaggcacgtgcgtctccatcccctgccgctttgacttcccggatgagctgcggcccgctgtggtgcatggtgtctggtacttcaatagcccctaccccaagaactaccccccgcgtcatctgcaccgcgaggaacctctatggcgccaagagcctggagctgcccttccagggagcccatcgactgatgtgggccaagatcgggcctgtgggcgccgtggtcgcctttgccatcctgattgccatcgtctgctacattacccagacacgcaggaaaaagaacgtgacagagagccccagcttctcggcaggggacaaccctcccgtcctgttcagcagcgacttccgcatctctggggcaccagagaagtacgagagcgagaggcgcctgggatctgagaggaggctgctgggccttcggggtgagcccccagagctggacctgagctattctcactcggacctggggaaacggcccaccaaggacagctacacgctgacggaggagctagctgagtatgctgaaatccgggtcaagtgaaggagctgggggcagcctgcgtggctgacccccctcaggaccctcgctggcccccactggctgtgggctcccttcctcccaaaagtatcgggggctggggcaggaggggagtgaggcaggtgacagtgaggtcctgggggcctgacctccccctccttcccagctgcccctccctgccagcacccccacgccctcattacggctcctctctaacctcctttaccctcatctgtctggaggggagctctgtctgtccgtgttatttattgctacttcctgcctggtctcctgcccccacacctggccctggggcctgtacaaaagggacatgaaataaatgccccaaagccaaatgccagtctagatcc

SEQ ID NO: 449667 - DNA, 1058 bp, Homo sapiens
ggcctagaccctggaaggcagggactgcgagctgggctggcggagcagaggtgcagaagcaactgagtccaagttgtctggcggcttcaggtggacccagaagacgtccccaactcagggagattcagcgatcactcactcgctgtacagaatgatattcctcacggcactgcctctgttctggattatgatttcagcctcccgagggggtcactggggtgcctggatgccctcgtccatctcggccttcgaaggcacgtgcgtctccatcccctgccgctttgacttcccggatgagctgcggcccgctgtggtgcatggtgtctggtacttcaatagcccctaccccaagaactaccccccggtggtcttcaagtcgcgcacccaagtagtccacgagagcttccagggccgcagccgcctcctgggggacctgggcctgcgaaactgcaccctcctgctcagcaacgtcagccccgagcagagacagagaaatactaacaaccagaaaaaccagaagcagacaacaaccaagaacacgcttctcaaaagcacaaggttccgaggataacgtacaacacccccaacaacggaagaacccccataaaaaaaatcaaacgactaattatatgataacagtaacggaatgaccaaaccgaatcgatcggggggagataacggcggcggaatgcgaagttagaatcgaatgggcagctgagaatgtgcatgtggaatcgcagggatagcaatagttctcatgcagactggataattgaaaagcgctcaagtaacgtgtttaagagcaattaatcctcaacgagtctccgggtaaaggaaaggctcgggctggcgcagcaggaggagaatcggaaccagagggcgagccggttctgcaatagtcgagcgcgaattgcgtgttaactgtcgaactgcgcatctaaaaaggctgggattactcccctctcgggaagcatgtgtcttagatgaatgcgcgtgtctggtggaaatcggttctactagtgctccgcgggaaatcgttgccgatagtggggatatcg

SEQ ID NO: 449668 - DNA, 2060 bp, Homo sapiens
ggcctagaccctggaaggcagggactgcgagctgggctggcggagcagaggtgcagaagcaactgagtccaagttgtctggcggcttcaggtggacccagaagacgtccccaactcagggagattcagcgatcactcactcgctgtacagaatgatattcctcacggcactgcctctgttctggattatgatttcagcctcccgagggggtcactggggtgcctggatgccctcgtccatctcggccttcgaaggcacgtgcgtctccatcccctgccgctttgacttcccggatgagctgcggcccgctgtggtgcatggtgtctggtacttcaatagcccctaccccaagaactaccccccggtggtcttcaagtcgcgcacccaagtagtccacgagagcttccagggccgcagccgcctcctgggggacctgggcctgcgaaactgcaccctcctgctcagcaacgtcagccccgagctgggcgggaagtactacttccgtggggacctgggcggctacaaccagtacaccttctcagagcacagcgtcctggatatcgtcaacacccccaacatcgtggtgcccccagaggtggtggcaggcacggaggtggaggtcagctgcatggtgccggacaactgcccagagctgcgccctgagctgagctggctgggccacgaggggctgggggagcccgctgtgctgggccggctgcgggaggacgagggcacctgggtgcaggtgtcactgctgcacttcgtgcccacgagggaggccaacggccacaggctgggctgccaggcctccttccccaacaccaccctgcagttcgagggctacgccagcatggacgtcaagtaccccccggtgattgtggagatgaactcctcggtggaggccatcgagggctcccacgtgagcctgctctgtggggctgacagcaaccccccgccgctgctgacctggatgcgggacgggacagtcctccgggaggcggtggccgagagcctgctcctggagctggaggaggtgacccccgccgaagacggcgtctatgcctgcctggccgagaatgcctatggccaggacaaccgcaccgtggggctcagtgtcatgtatgcaccctggaagccaacagtgaacgggacaatggtggccgtagagggggagacggtctctatcttgtgctccacacagagcaacccggaccctattctcaccatcttcaaggagaagcagatcctgtccacggtcatctacgagagcgagctgcagctggagctgccggccgtgtcacccgaggatgatggagagtactggtgtgtggctgagaaccagtatggccagagggccaccgccttcaacctgtctgtggagttcgcccctgtgctcctcctggagtcccactgcgcggcagcccgagacacggtgcagtgcctgtgcgtggtgaagtccaacccggagccgtccgtggcctttgagctgccatcgcgcaatgtgaccgtgaacgagagcgagcgggagttcgtgtactcggagcgcagcggcctcgtgctcaccagcatcctcacgctgcgggggcaggcccaggccccgccccgcgtcatctgcaccgcgaggaacctctatggcgccaagagcctggagctgcccttccagggagcccatcgactgatgtgggccaagatcgggcctgtgggcgccgtggtcgcctttgccatcctgattgccatcgtctgctacattacccagacacgcaggaaaaagaacgtgacagagagccccagcttctcggcaggggacaaccctcccgtcctgttcagcagcgacttccgcatctctggggcaccagagaagtacgagagcgagaggcgcctgggatctgagaggaggctgctgggccttcggggtgagcccccagagctggacctgagctattctcactcggacctggggaaacggcccaccaaggacagctacacgcaggactacatctgcacaagggatgcgctgcgagtccatcatcaccgacttccaggtgatgtagggccatgta

SEQ ID NO: 449669 - DNA, 1514 bp, Homo sapiens
ccggcggcgcggggaggggccgggtgacctcacgccggcccggccaccgcggccattagacccggtccaattgctggggctgcagcgctgcctccgagaccgcgaggtgggtggagcgggtcttcctggaagggtgcgataaggccgggcgaggtgcctgggatgcttctccccttccgcgaggaagagatctaattgggtagggcgggtgtagactagcctgccgagccgcccgctggcacctgcagcctcctgggcgcccgccgggccccggcgagaaagttgttaaagggagcgaggtggttgttcctggggtccgaggcgcgcctctcacgccctgcccaacagaagccgcagtcccgtggggtctggagacgcagtttcctgttaatgacaataaatccctgctccccctgcctcagacatctacgcagcgaaatcgagcctggccttgagggtccacaccgcgagggaagatgcgtgcgcccattccagagcctaagcctggagacctgattgagatttttcgccctttctacagacactgggccatctatgttggcgatggatatgtggttcatctggcccctccaagtgaggtcgcaggagctggtgcagccagtgtcatgtccgccctgactgacaaggccatcgtgaagaaggaattgctgtatgatgtggccgggagtgacaagtaccaggtcaacaacaaacatgatgacaagtactcgccgctgccctgcagcaaaatcatccagcgggcggaggagctggtggggcaggaggtgctctacaagctgaccagtgagaactgcgagcactttgtgaatgagctgcgctatggagtcgcccgcagtgaccaggtcagagatgtcatcatcgctgcaagcgttgcaggaatgggcttggcagccatgagccttattggagtcatgttctcaagaaacaagcgacaaaagcaataactgaaaaagactgtcctgtcagcgatgactttatacatcaagggggtcttgttttgctagagagtttggggtttggtttgtggatttcattgtgatttataataaggcttattttcacagaataaaataaagcaaaacgagggaggattttattgggggaagtgcagcccaaaaaagcacacaccaacacccaacaaccgacgagaccccccacccacgcgcatcgcgcgccccgacccgccgtcccagccccgcacaaccgcacgccccccaaccaccgggcacaccgacaagtatgaaaaactggcggcggccacagtagaaagaaacgaccgcgagcgagcagactaactaccaaccgacgattaggtcaacgaggagcaggactcagtagaaatacataagagcgccagccaggtaacacacccgcccgaaggcgacagtcctcgtcgatgtgacgaacacaacatatgtcggtgggatcatcgatagcacccaagacgagcgagcgcgggacaaactcatcgctgagcaactcgtgcaagagga

SEQ ID NO: 449670 - DNA, 628 bp, Homo sapiens
cagctggctccagccacgaattctcttttcccgtccagccctctcctcccctcttccctaccaatgtttgttgactccttagtttggccagggaggccaaggggcatgtgaggtatcccgagctgaatgtttctgctgaatgtgcagcctgtactctggatcctgacacagagtgtgacccaccctcttctttgttgcaggtcagagatgtcatcatcgctgcaagcgttgcaggaatgggcttggcagccatgagccttattggagtcatgttctcaagaaacaagcgacaaaagcaataactgaaaaagactgtcctgtcagcgatgactttatacatcaagggggtcttgttttgctagagagtttggggtttggtttgtggatttcattgtgatttataataaggcttattttcacagaataaaataaagcaaaacgagggaggattttattgggggaagtgcagcaagaactgcctggtgtgaagtctgttcagggaacagccgggctgtcttcctggtcagggattgtctttctgtctcccttccgccccgcatgtatcctgacgaccagaaacgccctctacttgagataactggagctggactctgcctgatacaatgca

SEQ ID NO: 449671 - DNA, 2552 bp, Homo sapiens
ccggcggcgcggggaggggccgggtgacctcacgccggcccggccaccgcggccattagacccggtccaattgctggggctgcagcgctgcctccgagaccgcgaggtgggtggagcgggtcttcctggaagggtgcgataaggccgggcgaggtgcctgggatgcttctccccttccgcgaggaagagatctaattgggtagggcgggtgtagactagcctgccgagccgcccgctggcacctgcagcctcctgggcgcccgccgggccccggcgagaaagttgttaaagggagcgaggtggttgttcctggggtccgaggcgcgcctctcacgccctgcccaacagaagccgcagtcccgtggggtctggagacgcagtttcctgttaatgacaataaatccctgctccccctgcctcagacatctacgcagcgaaatcgagcctggccttgagggtccacaccgcgagggaagatgcgtgcgcccattccagagcctaagcctggagacctgattgagatttttcgccctttctacagacactgggccatctatgttggcgatggatatgtggttcatctggcccctccaagtgaggtcgcaggagctggtgcagccagtgtcatgtccgccctgactgacaaggccatcgtgaagaaggaattgctgtatgatgtggccgggagtgacaagtaccaggtcaacaacaaacatgatgacaagtactcgccgctgccctgcagcaaaatcatccagcgggcggaggagctggtggggcaggaggtgctctacaagctgaccagtgagaactgcgagcactttgtgaatgagctgcgctatggagtcgcccgcagtgaccaggtcagagatgtcatcatcgctgcaagcgttgcaggaatgggcttggcagccatgagccttattggagtcatgttctcaagaaacaagcgacaaaagcaataactgaaaaagactgtcctgtcagcgatgactttatacatcaagggggtcttgttttgctagagagtttggggtttggtttgtggatttcattgtgatttataataaggcttattttcacagaataaaataaagcaaaacgagggaggattttattgggggaagtgcagcaagaactgcctggtgtgaagtctgttcagggaacagccgggctgtcttcctggtcagggattgtctttcactttctttttgcgtgctgtgttctttgcattgcaggaggcagagtccagctccagttatctcaagtagagggcgtttctggtcgtcaggatacatgcggggcggaagggagacagaaagacataatacacaagaacagaaagcagcagacagccaggacccttggcccggaactagatctaggatggcctctgagactcagcagctggagtctgtagatgttcagctgagttgaaaaaaaaaaagtcctcggctataaggaaatttagtatagatgcttgccaatcttactaaaatttcccttattttcctttgctctacacgtctttcctttgccttgttgcttccatctccttggcactcctgcttcctcactgcttctgcttgccatgatccccaagtctctgacccaccttcctgcctgctcctctcctcccacattggctcagattctttccccgctgtctgtgggtccacactcccagtggcacctccaggagagaatctgatggctcagttcgccagataactcaactttcccattggctaccttgggtcaggtgatctccactagacctatcgcctatgcctgatggtgggtcacatggtgcaaatgttgcctgagagcttagtggattagggatgtggctgggctcatggttgacgtccctgctgctgagcccttacgggtcaggctgggagaaggtaccatgttgtgtgactggtcatttgaggtcttgcagctgttgcttgctgggcttggcaggtgttcaaagtgaccatttttctgaagggtttttttctgagtattcctcagatgtactcccctggggccgacggtctttccttccacagggcgatgcttccctacttgcttgtgaatgtttccttcatctccaggttgtctggggacaattctgtcttttggaggcctgggcaggatttacagagggctccatgccagctccttcctgccgggtccacttctggtgtagggtaaacacctgcccattcatgtcctagtgttgatagaataatcattttctttcagtacagtttcctttttttttttttttgccccagctttttagatgtagcacttaatgccagttctcgagctccccaaacttaagggacacaggtcaacaagcagtaggtctttggaagctcgctctctcacatggtataaggtgagggggacacatggaatgtaaacctccaaactaattatgggggaaaaaggaatgagaaaaacaaacacaagaaggcaaaacaaaaacacctggttcaattaaaaacaacaacaaagcaaaacaaaaaaaacccaaaaccaaaccacacaataaacga

SEQ ID NO: 449672 - DNA, 2092 bp, Homo sapiens
tgatctacagatccttatttgcggtgcctttccagagcctaagcctggagacctgattgagatttttcgccctttctacagacactgggccatctatgttggcgatggatatgtggttcatctggcccctccaagtgaggtcgcaggagctggtgcagccagtgtcatgtccgccctgactgacaaggccatcgtgaagaaggaattgctgtatgatgtggccgggagtgacaagtaccaggtcaacaacaaacatgatgacaagtactcgccgctgccctgcagcaaaatcatccagcgggcggaggagctggtggggcaggaggtgctctacaagctgaccagtgagaactgcgagcactttgtgaatgagctgcgctatggagtcgcccgcagtgaccaggtcagagatgtcatcatcgctgcaagcgttgcaggaatgggcttggcagccatgagccttattggagtcatgttctcaagaaacaagcgacaaaagcaataactgaaaaagactgtcctgtcagcgatgactttatacatcaagggggtcttgttttgctagagagtttggggtttggtttgtggatttcattgtgatttataataaggcttattttcacagaataaaataaagcaaaacgagggaggattttattgggggaagtgcagcaagaactgcctggtgtgaagtctgttcagggaacagccgggctgtcttcctggtcagggattgtctttcactttctttttgcgtgctgtgttctttgcattgcaggaggcagagtccagctccagttatctcaagtagagggcgtttctggtcgtcaggatacatgcggggcggaagggagacagaaagacataatacacaagaacagaaagcagcagacagccaggacccttggcccggaactagatctaggatggcctctgagactcagcagctggagtctgtagatgttcagctgagttgaaaaaaaaaaagtcctcggctataaggaaatttagtatagatgcttgccaatcttactaaaatttcccttattttcctttgctctacacgtctttcctttgccttgttgcttccatctccttggcactcctgcttcctcactgcttctgcttgccatgatccccaagtctctgacccaccttcctgcctgctcctctcctcccacattggctcagattctttccccgctgtctgtgggtccacactcccagtggcacctccaggagagaatctgatggctcagttcgccagataactcaactttcccattggctaccttgggtcaggtgatctccactagacctatcgcctatgcctgatggtgggtcacatggtgcaaatgttgcctgagagcttagtggattagggatgtggctgggctcatggttgacgtccctgctgctgagcccttacgggtcaggctgggagaaggtaccatgttgtgtgactggtcatttgaggtcttgcagctgttgcttgctgggcttggcaggtgttcaaagtgaccatttttctgaagggtttttttctgagtattcctcagatgtactcccctggggccgacggtctttccttccacagggcgatgcttccctacttgcttgtgaatgtttccttcatctccaggttgtctggggacaattctgtcttttggaggcctgggcaggatttacagagggctccatgccagctccttcctgccgggtccacttctggtgtagggtaaacacctgcccattcatgtcctagtgttgatagaataatcattttctttcagtacagtttcctttttttttttttttgccccagctttttagatgtagcacttaatgccagttctcgagctccccaaacttaagggacacaggtcaacaagcagtaggtctttggaagctcgctctctcacatggtataaggtgagggggacacatggaatgtaaacctccaaactaattatgggggaaaaaggaatgagaaaaacaaacacaagaaggcaaaacaaaaacacctggttcaattaaaaacaacaacaaagcaaaacaaaaaaaacccaaaaccaaaccacacaataaacga

SEQ ID NO: 449673 - DNA, 2773 bp, Homo sapiens
ccggcggcgcggggaggggccgggtgacctcacgccggcccggccaccgcggccattagacccggtccaattgctggggctgcagcgctgcctccgagaccgcgaggtgggtggagcgggtcttcctggaagggtgcgataaggccgggcgaggtgcctgggatgcttctccccttccgcgaggaagagatctaattgggtagggcgggtgtagactagcctgccgagccgcccgctggcacctgcagcctcctgggcgcccgccgggccccggcgagaaagttgttaaagggagcgaggtggttgttcctggggtccgaggcgcgcctctcacgccctgcccaacagaagccgcagtcccgtggggtctggagacgcagtttcctgttaatgacaataaatccctgctccccctgcctcagacatctacgcagcgaaatcgagcctggccttgagggtccacaccgcgagggaagatgcgtgcgcccattccagagcctaagcctggagacctgattgagatttttcgccctttctacagacactgggccatctatgttggcgatggatatgtggttcatctggcccctccaacgtcttctcagtagcatgggaattgcttgagggcaggcctgctgtccagatcacgtcactgacttcagcaccttggacaaggcccggcacccagtagggcctcagtattgattggctgcactgagcagagacggagttttgccatgttgcccaggcttgtctgaaactcctgggcttaagcgatctgcctgccttggcctcccaaagtgctgggattacaggtgaggtcgcaggagctggtgcagccagtgtcatgtccgccctgactgacaaggccatcgtgaagaaggaattgctgtatgatgtggccgggagtgacaagtaccaggtcaacaacaaacatgatgacaagtactcgccgctgccctgcagcaaaatcatccagcgggcggaggagctggtggggcaggaggtgctctacaagctgaccagtgagaactgcgagcactttgtgaatgagctgcgctatggagtcgcccgcagtgaccaggtcagagatgtcatcatcgctgcaagcgttgcaggaatgggcttggcagccatgagccttattggagtcatgttctcaagaaacaagcgacaaaagcaataactgaaaaagactgtcctgtcagcgatgactttatacatcaagggggtcttgttttgctagagagtttggggtttggtttgtggatttcattgtgatttataataaggcttattttcacagaataaaataaagcaaaacgagggaggattttattgggggaagtgcagcaagaactgcctggtgtgaagtctgttcagggaacagccgggctgtcttcctggtcagggattgtctttcactttctttttgcgtgctgtgttctttgcattgcaggaggcagagtccagctccagttatctcaagtagagggcgtttctggtcgtcaggatacatgcggggcggaagggagacagaaagacataatacacaagaacagaaagcagcagacagccaggacccttggcccggaactagatctaggatggcctctgagactcagcagctggagtctgtagatgttcagctgagttgaaaaaaaaaaagtcctcggctataaggaaatttagtatagatgcttgccaatcttactaaaatttcccttattttcctttgctctacacgtctttcctttgccttgttgcttccatctccttggcactcctgcttcctcactgcttctgcttgccatgatccccaagtctctgacccaccttcctgcctgctcctctcctcccacattggctcagattctttccccgctgtctgtgggtccacactcccagtggcacctccaggagagaatctgatggctcagttcgccagataactcaactttcccattggctaccttgggtcaggtgatctccactagacctatcgcctatgcctgatggtgggtcacatggtgcaaatgttgcctgagagcttagtggattagggatgtggctgggctcatggttgacgtccctgctgctgagcccttacgggtcaggctgggagaaggtaccatgttgtgtgactggtcatttgaggtcttgcagctgttgcttgctgggcttggcaggtgttcaaagtgaccatttttctgaagggtttttttctgagtattcctcagatgtactcccctggggccgacggtctttccttccacagggcgatgcttccctacttgcttgtgaatgtttccttcatctccaggttgtctggggacaattctgtcttttggaggcctgggcaggatttacagagggctccatgccagctccttcctgccgggtccacttctggtgtagggtaaacacctgcccattcatgtcctagtgttgatagaataatcattttctttcagtacagtttcctttttttttttttttgccccagctttttagatgtagcacttaatgccagttctcgagctccccaaacttaagggacacaggtcaacaagcagtaggtctttggaagctcgctctctcacatggtataaggtgagggggacacatggaatgtaaacctccaaactaattatgggggaaaaaggaatgagaaaaacaaacacaagaaggcaaaacaaaaacacctggttcaattaaaaacaacaacaaagcaaaacaaaaaaaacccaaaaccaaaccacacaataaacga

SEQ ID NO: 449674 - DNA, 2086 bp, Homo sapiens
cttgggttaaaaagtattctgaaagcatcctcactgtcctccctggtcccgcacagtgccagagccgggggtcttggactgagtcagagttgcatgggtgcatctggagggaccttgattggagagaggtgaggtcgcaggagctggtgcagccagtgtcatgtccgccctgactgacaaggccatcgtgaagaaggaattgctgtatgatgtggccgggagtgacaagtaccaggtcaacaacaaacatgatgacaagtactcgccgctgccctgcagcaaaatcatccagcgggcggaggagctggtggggcaggaggtgctctacaagctgaccagtgagaactgcgagcactttgtgaatgagctgcgctatggagtcgcccgcagtgaccaggtcagagatgtcatcatcgctgcaagcgttgcaggaatgggcttggcagccatgagccttattggagtcatgttctcaagaaacaagcgacaaaagcaataactgaaaaagactgtcctgtcagcgatgactttatacatcaagggggtcttgttttgctagagagtttggggtttggtttgtggatttcattgtgatttataataaggcttattttcacagaataaaataaagcaaaacgagggaggattttattgggggaagtgcagcaagaactgcctggtgtgaagtctgttcagggaacagccgggctgtcttcctggtcagggattgtctttcactttctttttgcgtgctgtgttctttgcattgcaggaggcagagtccagctccagttatctcaagtagagggcgtttctggtcgtcaggatacatgcggggcggaagggagacagaaagacataatacacaagaacagaaagcagcagacagccaggacccttggcccggaactagatctaggatggcctctgagactcagcagctggagtctgtagatgttcagctgagttgaaaaaaaaaaagtcctcggctataaggaaatttagtatagatgcttgccaatcttactaaaatttcccttattttcctttgctctacacgtctttcctttgccttgttgcttccatctccttggcactcctgcttcctcactgcttctgcttgccatgatccccaagtctctgacccaccttcctgcctgctcctctcctcccacattggctcagattctttccccgctgtctgtgggtccacactcccagtggcacctccaggagagaatctgatggctcagttcgccagataactcaactttcccattggctaccttgggtcaggtgatctccactagacctatcgcctatgcctgatggtgggtcacatggtgcaaatgttgcctgagagcttagtggattagggatgtggctgggctcatggttgacgtccctgctgctgagcccttacgggtcaggctgggagaaggtaccatgttgtgtgactggtcatttgaggtcttgcagctgttgcttgctgggcttggcaggtgttcaaagtgaccatttttctgaagggtttttttctgagtattcctcagatgtactcccctggggccgacggtctttccttccacagggcgatgcttccctacttgcttgtgaatgtttccttcatctccaggttgtctggggacaattctgtcttttggaggcctgggcaggatttacagagggctccatgccagctccttcctgccgggtccacttctggtgtagggtaaacacctgcccattcatgtcctagtgttgatagaataatcattttctttcagtacagtttcctttttttttttttttgccccagctttttagatgtagcacttaatgccagttctcgagctccccaaacttaagggacacaggtcaacaagcagtaggtctttggaagctcgctctctcacatggtataaggtgagggggacacatggaatgtaaacctccaaactaattatgggggaaaaaggaatgagaaaaacaaacacaagaaggcaaaacaaaaacacctggttcaattaaaaacaacaacaaagcaaaacaaaaaaaacccaaaaccaaaccacacaataaacga

SEQ ID NO: 449675 - DNA, 2755 bp, Homo sapiens
ccggcggcgcggggaggggccgggtgacctcacgccggcccggccaccgcggccattagacccggtccaattgctggggctgcagcgctgcctccgagaccgcgaggtgggtggagcgggtcttcctggaagggtgcgataaggccgggcgaggtgcctgggatgcttctccccttccgcgaggaagagatctaattgggtagggcgggtgtagactagcctgccgagccgcccgctggcacctgcagcctcctgggcgcccgccgggccccggcgagaaagttgttaaagggagcgaggtggttgttcctggggtccgaggcgcgcctctcacgccctgcccaacagaagccgcagtcccgtggggtctggagacgcagtttcctgttaatgacaataaatccctgctccccctgcctcagacatctacgcagcgaaatcgagcctggccttgagggtccacaccgcgagggaagatgcgtgcgcccattccagagcctaagcctggagacctgattgagatttttcgccctttctacagacactgggccatctatgttggcgatggatatgtggttcatctggcccctccaacgtcttctcagtagcatgggaattgcttgagggcaggcctgctgtccagatcacgtcactgacttcagcaccttggacaaggcccggcacccagtagggcctcagtattgattggctgcactgagcagagacggagttttgccatgttgcccaggcttgtctgaaactcctgggcttaagcgatctgcctgccttggcctcccaaagtgctgggattacaggtgaggtcgcaggagctggtgcagccagtgtcatgtccgccctgactgacaaggccatcgtgaagaaggaattgctgtatgatgtggccgggagtgacaagtaccaggtcaacaacaaacatgatgacaagtactcgccgctgccctgcagcaaaatcatccagcgggcggaggtgctctacaagctgaccagtgagaactgcgagcactttgtgaatgagctgcgctatggagtcgcccgcagtgaccaggtcagagatgtcatcatcgctgcaagcgttgcaggaatgggcttggcagccatgagccttattggagtcatgttctcaagaaacaagcgacaaaagcaataactgaaaaagactgtcctgtcagcgatgactttatacatcaagggggtcttgttttgctagagagtttggggtttggtttgtggatttcattgtgatttataataaggcttattttcacagaataaaataaagcaaaacgagggaggattttattgggggaagtgcagcaagaactgcctggtgtgaagtctgttcagggaacagccgggctgtcttcctggtcagggattgtctttcactttctttttgcgtgctgtgttctttgcattgcaggaggcagagtccagctccagttatctcaagtagagggcgtttctggtcgtcaggatacatgcggggcggaagggagacagaaagacataatacacaagaacagaaagcagcagacagccaggacccttggcccggaactagatctaggatggcctctgagactcagcagctggagtctgtagatgttcagctgagttgaaaaaaaaaaagtcctcggctataaggaaatttagtatagatgcttgccaatcttactaaaatttcccttattttcctttgctctacacgtctttcctttgccttgttgcttccatctccttggcactcctgcttcctcactgcttctgcttgccatgatccccaagtctctgacccaccttcctgcctgctcctctcctcccacattggctcagattctttccccgctgtctgtgggtccacactcccagtggcacctccaggagagaatctgatggctcagttcgccagataactcaactttcccattggctaccttgggtcaggtgatctccactagacctatcgcctatgcctgatggtgggtcacatggtgcaaatgttgcctgagagcttagtggattagggatgtggctgggctcatggttgacgtccctgctgctgagcccttacgggtcaggctgggagaaggtaccatgttgtgtgactggtcatttgaggtcttgcagctgttgcttgctgggcttggcaggtgttcaaagtgaccatttttctgaagggtttttttctgagtattcctcagatgtactcccctggggccgacggtctttccttccacagggcgatgcttccctacttgcttgtgaatgtttccttcatctccaggttgtctggggacaattctgtcttttggaggcctgggcaggatttacagagggctccatgccagctccttcctgccgggtccacttctggtgtagggtaaacacctgcccattcatgtcctagtgttgatagaataatcattttctttcagtacagtttcctttttttttttttttgccccagctttttagatgtagcacttaatgccagttctcgagctccccaaacttaagggacacaggtcaacaagcagtaggtctttggaagctcgctctctcacatggtataaggtgagggggacacatggaatgtaaacctccaaactaattatgggggaaaaaggaatgagaaaaacaaacacaagaaggcaaaacaaaaacacctggttcaattaaaaacaacaacaaagcaaaacaaaaaaaacccaaaaccaaaccacacaataaacga

SEQ ID NO: 449676 - DNA, 2182 bp, Homo sapiens
ccggcggcgcggggaggggccgggtgacctcacgccggcccggccaccgcggccattagacccggtccaattgctggggctgcagcgctgcctccgagaccgcgagacatctacgcagcgaaatcgagcctggccttgagggtccacaccgcgagggaagatgcgtgcgcccattccagagcctaagcctggagacctgattgagatttttcgccctttctacagacactgggccatctatgttggcgatggatatgtggttcatctggcccctccaagtgaggtcgcaggagctggtgcagccagtgtcatgtccgccctgactgacaaggccatcgtgaagaaggaattgctgtatgatgtggccgggagtgacaagtaccaggtcaacaacaaacatgatgacaagtactcgccgctgccctgcagcaaaatcatccagcgggcggaggagctggtggggcaggaggtgctctacaagctgaccagtgagaactgcgagcactttgtgaatgagctgcgctatggagtcgcccgcagtgaccaggtcagagatgtcatcatcgctgcaagcgttgcaggaatgggcttggcagccatgagccttattggagtcatgttctcaagaaacaagcgacaaaagcaataactgaaaagagtttggggtttggtttgtggatttcattgtgatttataataaggcttattttcacagaataaaataaagcaaaacgagggaggattttattgggggaagtgcagcaagaactgcctggtgtgaagtctgttcagggaacagccgggctgtcttcctggtcagggattgtctttcactttctttttgcgtgctgtgttctttgcattgcaggaggcagagtccagctccagttatctcaagtagagggcgtttctggtcgtcaggatacatgcggggcggaagggagacagaaagacataatacacaagaacagaaagcagcagacagccaggacccttggcccggaactagatctaggatggcctctgagactcagcagctggagtctgtagatgttcagctgagttgaaaaaaaaaaagtcctcggctataaggaaatttagtatagatgcttgccaatcttactaaaatttcccttattttcctttgctctacacgtctttcctttgccttgttgcttccatctccttggcactcctgcttcctcactgcttctgcttgccatgatccccaagtctctgacccaccttcctgcctgctcctctcctcccacattggctcagattctttccccgctgtctgtgggtccacactcccagtggcacctccaggagagaatctgatggctcagttcgccagataactcaactttcccattggctaccttgggtcaggtgatctccactagacctatcgcctatgcctgatggtgggtcacatggtgcaaatgttgcctgagagcttagtggattagggatgtggctgggctcatggttgacgtccctgctgctgagcccttacgggtcaggctgggagaaggtaccatgttgtgtgactggtcatttgaggtcttgcagctgttgcttgctgggcttggcaggtgttcaaagtgaccatttttctgaagggtttttttctgagtattcctcagatgtactcccctggggccgacggtctttccttccacagggcgatgcttccctacttgcttgtgaatgtttccttcatctccaggttgtctggggacaattctgtcttttggaggcctgggcaggatttacagagggctccatgccagctccttcctgccgggtccacttctggtgtagggtaaacacctgcccattcatgtcctagtgttgatagaataatcattttctttcagtacagtttcctttttttttttttttgccccagctttttagatgtagcacttaatgccagttctcgagctccccaaacttaagggacacaggtcaacaagcagtaggtctttggaagctcgctctctcacatggtataaggtgagggggacacatggaatgtaaacctccaaactaattatgggggaaaaaggaatgagaaaaacaaacacaagaaggcaaaacaaaaacacctggttcaattaaaaacaacaacaaagcaaaacaaaaaaaacccaaaaccaaaccacacaataaacga

SEQ ID NO: 449677 - DNA, 1889 bp, Homo sapiens
cagctggctccagccacgaattctcttttcccgtccagccctctcctcccctcttccctaccaatgtttgttgactccttagtttggccagggaggccaaggggcatgtgaggtatcccgagctgaatgtttctgctgaatgtgcagcctgtactctggatcctgacacagagtgtgacccaccctcttctttgttgcaggtcagagatgtcatcatcgctgcaagcgttgcaggaatgggcttggcagccatgagccttattggagtcatgttctcaagaaacaagcgacaaaagcaataactgaaaaagactgtcctgtcagcgatgactttatacatcaagggggtcttgttttgctagagagtttggggtttggtttgtggatttcattgtgatttataataaggcttattttcacagaataaaataaagcaaaacgagggaggattttattgggggaagtgcagcaagaactgcctggtgtgaagtctgttcagggaacagccgggctgtcttcctggtcagggattgtctttcactttctttttgcgtgctgtgttctttgcattgcaggaggcagagtccagctccagttatctcaagtagagggcgtttctggtcgtcaggatacatgcggggcggaagggagacagaaagacataatacacaagaacagaaagcagcagacagccaggacccttggcccggaactagatctaggatggcctctgagactcagcagctggagtctgtagatgttcagctgagttgaaaaaaaaaaagtcctcggctataaggaaatttagtatagatgcttgccaatcttactaaaatttcccttattttcctttgctctacacgtctttcctttgccttgttgcttccatctccttggcactcctgcttcctcactgcttctgcttgccatgatccccaagtctctgacccaccttcctgcctgctcctctcctcccacattggctcagattctttccccgctgtctgtgggtccacactcccagtggcacctccaggagagaatctgatggctcagttcgccagataactcaactttcccattggctaccttgggtcaggtgatctccactagacctatcgcctatgcctgatggtgggtcacatggtgcaaatgttgcctgagagcttagtggattagggatgtggctgggctcatggttgacgtccctgctgctgagcccttacgggtcaggctgggagaaggtaccatgttgtgtgactggtcatttgaggtcttgcagctgttgcttgctgggcttggcaggtgttcaaagtgaccatttttctgaagggtttttttctgagtattcctcagatgtactcccctggggccgacggtctttccttccacagggcgatgcttccctacttgcttgtgaatgtttccttcatctccaggttgtctggggacaattctgtcttttggaggcctgggcaggatttacagagggctccatgccagctccttcctgccgggtccacttctggtgtagggtaaacacctgcccattcatgtcctagtgttgatagaataatcattttctttcagtacagtttcctttttttttttttttgccccagctttttagatgtagcacttaatgccagttctcgagctccccaaacttaagggacacaggtcaacaagcagtaggtctttggaagctcgctctctcacatggtataaggtgagggggacacatggaatgtaaacctccaaactaattatgggggaaaaaggaatgagaaaaacaaacacaagaaggcaaaacaaaaacacctggttcaattaaaaacaacaacaaagcaaaacaaaaaaaacccaaaaccaaaccacacaataaacga

SEQ ID NO: 449678 - DNA, 441 bp, Homo sapiens
cagaagggctgggactctggaaaacccagccatgttttctgcagtaagcagctttgtgtggtcaagtaggtgtagccctgatgccatcataaaagtctcccaccttatcttcccaggtggatgagtatgctcttggctcatatttgcataaccaagggggccacttaagtgtcatgaggtatagaagaccaccttctctagagtaagaaaaaaatcacagtaaatcatggaacttcactccctttcattttagataaggaaaccagggcccagagaccacacacaccttccccaaggcccacagccatgcgtctgacccttccacttgttgcttatcctttgtggatgagccaagggcagatgcccggctgggggccagctctgagcctccgtggcccttcccaggaccaatccctctgtttcctctttgtggatctgcag

SEQ ID NO: 449679 - DNA, 520 bp, Homo sapiens
catggtgcctgcaggtctgggtcacaagcttgtgaagttggactggcattggacctggcagagcagggctcaggacatatgttctgctgagctgatagctggggaccactcagctgcaccttcctcactgagccctgtcctggttccacgatctcatgctccctctaacagccctgttcttggttttgcagccagagcctaagcctggagacctgattgagatttttcgccctttctacagacactgggccatctatgttggcgatggatatgtggttcatctggcccctccaagtaagaacacatgggacctccactgtgatgggccccaggggctgggaagagaggggatggggaactgtgggtaacaggtgaccccaacattcttcttgcttcccaactggcagttgtctctgaatgttacaagaagtttgatatggggcagtttggtgtggggcactggttttcaaggtctgctcctgggaacctcagggggttctttagagcaggggtccccaac

SEQ ID NO: 449680 - DNA, 2236 bp, Homo sapiens
ccggcggcgcggggaggggccgggtgacctcacgccggcccggccaccgcggccattagacccggtccaattgctggggctgcagcgctgcctccgagaccgcgagacatctacgcagcgaaatcgagcctggccttgagggtccacaccgcgagggaagatgcgtgcgcccattccagagcctaagcctggagacctgattgagatttttcgccctttctacagacactgggccatctatgttggcgatggatatgtggttcatctggcccctccaagtgaggtcgcaggagctggtgcagccagtgtcatgtccgccctgactgacaaggccatcgtgaagaaggaattgctgtatgatgtggccgggagtgacaagtaccaggtcaacaacaaacatgatgacaagtactcgccgctgccctgcagcaaaatcatccagcgggcggaggagctggtggggcaggaggtgctctacaagctgaccagtgagaactgcgagcactttgtgaatgagctgcgctatggagtcgcccgcagtgaccaggtcagagatgtcatcatcgctgcaagcgttgcaggaatgggcttggcagccatgagccttattggagtcatgttctcaagaaacaagcgacaaaagcaataactgaaaaagactgtcctgtcagcgatgactttatacatcaagggggtcttgttttgctagagagtttggggtttggtttgtggatttcattgtgatttataataaggcttattttcacagaataaaataaagcaaaacgagggaggattttattgggggaagtgcagcaagaactgcctggtgtgaagtctgttcagggaacagccgggctgtcttcctggtcagggattgtctttcactttctttttgcgtgctgtgttctttgcattgcaggaggcagagtccagctccagttatctcaagtagagggcgtttctggtcgtcaggatacatgcggggcggaagggagacagaaagacataatacacaagaacagaaagcagcagacagccaggacccttggcccggaactagatctaggatggcctctgagactcagcagctggagtctgtagatgttcagctgagttgaaaaaaaaaaagtcctcggctataaggaaatttagtatagatgcttgccaatcttactaaaatttcccttattttcctttgctctacacgtctttcctttgccttgttgcttccatctccttggcactcctgcttcctcactgcttctgcttgccatgatccccaagtctctgacccaccttcctgcctgctcctctcctcccacattggctcagattctttccccgctgtctgtgggtccacactcccagtggcacctccaggagagaatctgatggctcagttcgccagataactcaactttcccattggctaccttgggtcaggtgatctccactagacctatcgcctatgcctgatggtgggtcacatggtgcaaatgttgcctgagagcttagtggattagggatgtggctgggctcatggttgacgtccctgctgctgagcccttacgggtcaggctgggagaaggtaccatgttgtgtgactggtcatttgaggtcttgcagctgttgcttgctgggcttggcaggtgttcaaagtgaccatttttctgaagggtttttttctgagtattcctcagatgtactcccctggggccgacggtctttccttccacagggcgatgcttccctacttgcttgtgaatgtttccttcatctccaggttgtctggggacaattctgtcttttggaggcctgggcaggatttacagagggctccatgccagctccttcctgccgggtccacttctggtgtagggtaaacacctgcccattcatgtcctagtgttgatagaataatcattttctttcagtacagtttcctttttttttttttttgccccagctttttagatgtagcacttaatgccagttctcgagctccccaaacttaagggacacaggtcaacaagcagtaggtctttggaagctcgctctctcacatggtataaggtgagggggacacatggaatgtaaacctccaaactaattatgggggaaaaaggaatgagaaaaacaaacacaagaaggcaaaacaaaaacacctggttcaattaaaaacaacaacaaagcaaaacaaaaaaaacccaaaaccaaaccacacaataaacga

SEQ ID NO: 449681 - DNA, 2407 bp, Homo sapiens
ggctcactgcaggctccgccccccggggttcacgccattctcttgcctcagcctcccgagtagctgggactacaggcacccgccacctcgcccggctaattttttgtatttttagtagagacggggtttcactgtgttagccaggatggtctcgatctcctgacctcgtgatccacccgcctcggcctcccaaagtcctgggattacgggcgtgagccaccgcgcccggcctatactggtctctctactcctctgcgtcctgcaacacaggagccctcataaggaaatgaagacccaaagaagtagttggtgtcagttacttctacaccgaattggacaaagaataccagagcctaagcctggagacctgattgagatttttcgccctttctacagacactgggccatctatgttggcgatggatatgtggttcatctggcccctccaagtgaggtcgcaggagctggtgcagccagtgtcatgtccgccctgactgacaaggccatcgtgaagaaggaattgctgtatgatgtggccgggagtgacaagtaccaggtcaacaacaaacatgatgacaagtactcgccgctgccctgcagcaaaatcatccagcgggcggaggagctggtggggcaggaggtgctctacaagctgaccagtgagaactgcgagcactttgtgaatgagctgcgctatggagtcgcccgcagtgaccaggtcagagatgtcatcatcgctgcaagcgttgcaggaatgggcttggcagccatgagccttattggagtcatgttctcaagaaacaagcgacaaaagcaataactgaaaaagactgtcctgtcagcgatgactttatacatcaagggggtcttgttttgctagagagtttggggtttggtttgtggatttcattgtgatttataataaggcttattttcacagaataaaataaagcaaaacgagggaggattttattgggggaagtgcagcaagaactgcctggtgtgaagtctgttcagggaacagccgggctgtcttcctggtcagggattgtctttcactttctttttgcgtgctgtgttctttgcattgcaggaggcagagtccagctccagttatctcaagtagagggcgtttctggtcgtcaggatacatgcggggcggaagggagacagaaagacataatacacaagaacagaaagcagcagacagccaggacccttggcccggaactagatctaggatggcctctgagactcagcagctggagtctgtagatgttcagctgagttgaaaaaaaaaaagtcctcggctataaggaaatttagtatagatgcttgccaatcttactaaaatttcccttattttcctttgctctacacgtctttcctttgccttgttgcttccatctccttggcactcctgcttcctcactgcttctgcttgccatgatccccaagtctctgacccaccttcctgcctgctcctctcctcccacattggctcagattctttccccgctgtctgtgggtccacactcccagtggcacctccaggagagaatctgatggctcagttcgccagataactcaactttcccattggctaccttgggtcaggtgatctccactagacctatcgcctatgcctgatggtgggtcacatggtgcaaatgttgcctgagagcttagtggattagggatgtggctgggctcatggttgacgtccctgctgctgagcccttacgggtcaggctgggagaaggtaccatgttgtgtgactggtcatttgaggtcttgcagctgttgcttgctgggcttggcaggtgttcaaagtgaccatttttctgaagggtttttttctgagtattcctcagatgtactcccctggggccgacggtctttccttccacagggcgatgcttccctacttgcttgtgaatgtttccttcatctccaggttgtctggggacaattctgtcttttggaggcctgggcaggatttacagagggctccatgccagctccttcctgccgggtccacttctggtgtagggtaaacacctgcccattcatgtcctagtgttgatagaataatcattttctttcagtacagtttcctttttttttttttttgccccagctttttagatgtagcacttaatgccagttctcgagctccccaaacttaagggacacaggtcaacaagcagtaggtctttggaagctcgctctctcacatggtataaggtgagggggacacatggaatgtaaacctccaaactaattatgggggaaaaaggaatgagaaaaacaaacacaagaaggcaaaacaaaaacacctggttcaattaaaaacaacaacaaagcaaaacaaaaaaaacccaaaaccaaaccacacaataaacga

SEQ ID NO: 449682 - DNA, 2415 bp, Homo sapiens
ccggcggcgcggggaggggccgggtgacctcacgccggcccggccaccgcggccattagacccggtccaattgctggggctgcagcgctgcctccgagaccgcgaggtgggtggagcgggtcttcctggaagggtgcgataaggccgggcgaggtgcctgggatgcttctccccttccgcgaggaagagataaagttgttaaagggagcgaggtggttgttcctggggtccgaggcgcgcctctcacgccctgcccaacagaagccgcagtcccgtggggtctggagacgcagtttcctgttaatgacaataaatccctgctccccctgcctcagacatctacgcagcgaaatcgagcctggccttgagggtccacaccgcgagggaagatgcgtgcgcccattacactgggccatctatgttggcgatggatatgtggttcatctggcccctccaagtgaggtcgcaggagctggtgcagccagtgtcatgtccgccctgactgacaaggccatcgtgaagaaggaattgctgtatgatgtggccgggagtgacaagtaccaggtcaacaacaaacatgatgacaagtactcgccgctgccctgcagcaaaatcatccagcgggcggaggagctggtggggcaggaggtgctctacaagctgaccagtgagaactgcgagcactttgtgaatgagctgcgctatggagtcgcccgcagtgaccaggtcagagatgtcatcatcgctgcaagcgttgcaggaatgggcttggcagccatgagccttattggagtcatgttctcaagaaacaagcgacaaaagcaataactgaaaaagactgtcctgtcagcgatgactttatacatcaagggggtcttgttttgctagagagtttggggtttggtttgtggatttcattgtgatttataataaggcttattttcacagaataaaataaagcaaaacgagggaggattttattgggggaagtgcagcaagaactgcctggtgtgaagtctgttcagggaacagccgggctgtcttcctggtcagggattgtctttcactttctttttgcgtgctgtgttctttgcattgcaggaggcagagtccagctccagttatctcaagtagagggcgtttctggtcgtcaggatacatgcggggcggaagggagacagaaagacataatacacaagaacagaaagcagcagacagccaggacccttggcccggaactagatctaggatggcctctgagactcagcagctggagtctgtagatgttcagctgagttgaaaaaaaaaaagtcctcggctataaggaaatttagtatagatgcttgccaatcttactaaaatttcccttattttcctttgctctacacgtctttcctttgccttgttgcttccatctccttggcactcctgcttcctcactgcttctgcttgccatgatccccaagtctctgacccaccttcctgcctgctcctctcctcccacattggctcagattctttccccgctgtctgtgggtccacactcccagtggcacctccaggagagaatctgatggctcagttcgccagataactcaactttcccattggctaccttgggtcaggtgatctccactagacctatcgcctatgcctgatggtgggtcacatggtgcaaatgttgcctgagagcttagtggattagggatgtggctgggctcatggttgacgtccctgctgctgagcccttacgggtcaggctgggagaaggtaccatgttgtgtgactggtcatttgaggtcttgcagctgttgcttgctgggcttggcaggtgttcaaagtgaccatttttctgaagggtttttttctgagtattcctcagatgtactcccctggggccgacggtctttccttccacagggcgatgcttccctacttgcttgtgaatgtttccttcatctccaggttgtctggggacaattctgtcttttggaggcctgggcaggatttacagagggctccatgccagctccttcctgccgggtccacttctggtgtagggtaaacacctgcccattcatgtcctagtgttgatagaataatcattttctttcagtacagtttcctttttttttttttttgccccagctttttagatgtagcacttaatgccagttctcgagctccccaaacttaagggacacaggtcaacaagcagtaggtctttggaagctcgctctctcacatggtataaggtgagggggacacatggaatgtaaacctccaaactaattatgggggaaaaaggaatgagaaaaacaaacacaagaaggcaaaacaaaaacacctggttcaattaaaaacaacaacaaagcaaaacaaaaaaaacccaaaaccaaaccacacaataaacga

SEQ ID NO: 449683 - DNA, 2534 bp, Homo sapiens
ccggcggcgcggggaggggccgggtgacctcacgccggcccggccaccgcggccattagacccggtccaattgctggggctgcagcgctgcctccgagaccgcgaggtgggtggagcgggtcttcctggaagggtgcgataaggccgggcgaggtgcctgggatgcttctccccttccgcgaggaagagatctaattgggtagggcgggtgtagactagcctgccgagccgcccgctggcacctgcagcctcctgggcgcccgccgggccccggcgagaaagttgttaaagggagcgaggtggttgttcctggggtccgaggcgcgcctctcacgccctgcccaacagaagccgcagtcccgtggggtctggagacgcagtttcctgttaatgacaataaatccctgctccccctgcctcagacatctacgcagcgaaatcgagcctggccttgagggtccacaccgcgagggaagatgcgtgcgcccattccagagcctaagcctggagacctgattgagatttttcgccctttctacagacactgggccatctatgttggcgatggatatgtggttcatctggcccctccaagtgaggtcgcaggagctggtgcagccagtgtcatgtccgccctgactgacaaggccatcgtgaagaaggaattgctgtatgatgtggccgggagtgacaagtaccaggtcaacaacaaacatgatgacaagtactcgccgctgccctgcagcaaaatcatccagcgggcggaggtgctctacaagctgaccagtgagaactgcgagcactttgtgaatgagctgcgctatggagtcgcccgcagtgaccaggtcagagatgtcatcatcgctgcaagcgttgcaggaatgggcttggcagccatgagccttattggagtcatgttctcaagaaacaagcgacaaaagcaataactgaaaaagactgtcctgtcagcgatgactttatacatcaagggggtcttgttttgctagagagtttggggtttggtttgtggatttcattgtgatttataataaggcttattttcacagaataaaataaagcaaaacgagggaggattttattgggggaagtgcagcaagaactgcctggtgtgaagtctgttcagggaacagccgggctgtcttcctggtcagggattgtctttcactttctttttgcgtgctgtgttctttgcattgcaggaggcagagtccagctccagttatctcaagtagagggcgtttctggtcgtcaggatacatgcggggcggaagggagacagaaagacataatacacaagaacagaaagcagcagacagccaggacccttggcccggaactagatctaggatggcctctgagactcagcagctggagtctgtagatgttcagctgagttgaaaaaaaaaaagtcctcggctataaggaaatttagtatagatgcttgccaatcttactaaaatttcccttattttcctttgctctacacgtctttcctttgccttgttgcttccatctccttggcactcctgcttcctcactgcttctgcttgccatgatccccaagtctctgacccaccttcctgcctgctcctctcctcccacattggctcagattctttccccgctgtctgtgggtccacactcccagtggcacctccaggagagaatctgatggctcagttcgccagataactcaactttcccattggctaccttgggtcaggtgatctccactagacctatcgcctatgcctgatggtgggtcacatggtgcaaatgttgcctgagagcttagtggattagggatgtggctgggctcatggttgacgtccctgctgctgagcccttacgggtcaggctgggagaaggtaccatgttgtgtgactggtcatttgaggtcttgcagctgttgcttgctgggcttggcaggtgttcaaagtgaccatttttctgaagggtttttttctgagtattcctcagatgtactcccctggggccgacggtctttccttccacagggcgatgcttccctacttgcttgtgaatgtttccttcatctccaggttgtctggggacaattctgtcttttggaggcctgggcaggatttacagagggctccatgccagctccttcctgccgggtccacttctggtgtagggtaaacacctgcccattcatgtcctagtgttgatagaataatcattttctttcagtacagtttcctttttttttttttttgccccagctttttagatgtagcacttaatgccagttctcgagctccccaaacttaagggacacaggtcaacaagcagtaggtctttggaagctcgctctctcacatggtataaggtgagggggacacatggaatgtaaacctccaaactaattatgggggaaaaaggaatgagaaaaacaaacacaagaaggcaaaacaaaaacacctggttcaattaaaaacaacaacaaagcaaaacaaaaaaaacccaaaaccaaaccacacaataaacga

SEQ ID NO: 449684 - DNA, 2283 bp, Homo sapiens
ccggcggcgcggggaggggccgggtgacctcacgccggcccggccaccgcggccattagacccggtccaattgctggggctgcagcgctgcctccgagaccgcgaggtgggtggagcgggtcttcctggaagggtgcgataaggccgggcgaggtgcctgggatgcttctccccttccgcgaggaagagatctaattgggtagggcgggtgtagactagcctgccgagccgcccgctggcacctgcagcctcctgggcgcccgccgggccccggcgagaaagttgttaaagggagcgaggtggttgttcctggggtccgaggcgcgcctctcacgccctgcccaacagaagccgcagtcccgtggggtctggagacgcagtttcctgttaatgacaataaatccctgctccccctgcctcagacatctacgcagcgaaatcgagcctggccttgagggtccacaccgcgagggaagatgcgtgcgcccattccagagcctaagcctggagacctgattgagatttttcgccctttctacagacactgggccatctatgttggcgatggatatgtggttcatctggcccctccaagtcagagatgtcatcatcgctgcaagcgttgcaggaatgggcttggcagccatgagccttattggagtcatgttctcaagaaacaagcgacaaaagcaataactgaaaaagactgtcctgtcagcgatgactttatacatcaagggggtcttgttttgctagagagtttggggtttggtttgtggatttcattgtgatttataataaggcttattttcacagaataaaataaagcaaaacgagggaggattttattgggggaagtgcagcaagaactgcctggtgtgaagtctgttcagggaacagccgggctgtcttcctggtcagggattgtctttcactttctttttgcgtgctgtgttctttgcattgcaggaggcagagtccagctccagttatctcaagtagagggcgtttctggtcgtcaggatacatgcggggcggaagggagacagaaagacataatacacaagaacagaaagcagcagacagccaggacccttggcccggaactagatctaggatggcctctgagactcagcagctggagtctgtagatgttcagctgagttgaaaaaaaaaaagtcctcggctataaggaaatttagtatagatgcttgccaatcttactaaaatttcccttattttcctttgctctacacgtctttcctttgccttgttgcttccatctccttggcactcctgcttcctcactgcttctgcttgccatgatccccaagtctctgacccaccttcctgcctgctcctctcctcccacattggctcagattctttccccgctgtctgtgggtccacactcccagtggcacctccaggagagaatctgatggctcagttcgccagataactcaactttcccattggctaccttgggtcaggtgatctccactagacctatcgcctatgcctgatggtgggtcacatggtgcaaatgttgcctgagagcttagtggattagggatgtggctgggctcatggttgacgtccctgctgctgagcccttacgggtcaggctgggagaaggtaccatgttgtgtgactggtcatttgaggtcttgcagctgttgcttgctgggcttggcaggtgttcaaagtgaccatttttctgaagggtttttttctgagtattcctcagatgtactcccctggggccgacggtctttccttccacagggcgatgcttccctacttgcttgtgaatgtttccttcatctccaggttgtctggggacaattctgtcttttggaggcctgggcaggatttacagagggctccatgccagctccttcctgccgggtccacttctggtgtagggtaaacacctgcccattcatgtcctagtgttgatagaataatcattttctttcagtacagtttcctttttttttttttttgccccagctttttagatgtagcacttaatgccagttctcgagctccccaaacttaagggacacaggtcaacaagcagtaggtctttggaagctcgctctctcacatggtataaggtgagggggacacatggaatgtaaacctccaaactaattatgggggaaaaaggaatgagaaaaacaaacacaagaaggcaaaacaaaaacacctggttcaattaaaaacaacaacaaagcaaaacaaaaaaaacccaaaaccaaaccacacaataaacga

SEQ ID NO: 449685 - DNA, 392 bp, Homo sapiens
tactgggctgaccctggaaggccagtcttgtttgtcccctgcctcctgggttccgccagagagaagcagtggagtaaactgcacagacacagagaaaaccagtcatggaggccaagagctagagagccttgagtggacgtggttaatctcacttggttctcccaagagccctgggaggggggcaatatcatcatcatcatctgacaaatgaagtgaccggcctgggagactgtgctctcctgcttagctccaacagacagaagcagagctcaggaaggtggatgaggccatcgccctattccagaagatgctgtgatccaccacccagcttcacccctcacccccagcggctcaccatggggatggcagcaataaaatattttcccacaaaa

SEQ ID NO: 449686 - DNA, 206 bp, Homo sapiens
taccttatataccatactttcatcaacttatcctataagcagaaacagccttgactggcacctccaacagacagaagcagagctcaggaaggtggatgaggccatcgccctattccagaagatgctgtgatccaccacccagcttcacccctcacccccagcggctcaccatggggatggcagcaataaaatattttcccacaaaa

SEQ ID NO: 449687 - DNA, 203 bp, Homo sapiens
  misc_feature (35)..(35): n is a, c, g, or t
aaccaaaacacccctcattaataaaaaatggatgnacccccaccagtccacacaataactccaacagacagaagcagagctcaggaaggtggatgaggccatcgccctattccagaagatgctgtgatccaccacccagcttcacccctcacccccagcggctcaccatggggatggcagcaataaaatattttcccacaaaa

SEQ ID NO: 449688 - DNA, 4135 bp, Homo sapiens
  misc_feature (18)..(18): n is a, c, g, or t
cgctggtactggccgganttttgggagcccggaaacgctccctgtcacaaaggggggaacacgtgggcgccggctgccggggcggcgatcttagggaactagggtcacctggagagccgcccaccgtctctgcccgctcgactcctccgcccgggccgctcggccggtccagccgcggccggcgcctggctgtgaggtggattcccggcccagtctgaccatctccctccagtttttccacttcgttcggaccttctcataactatgtccaccctctacgtctcccctcacccagatgccttccccagcctccgagccctcatagccgctcgctatggggaggctggggagggtcccggatggggaggagcccagccccgcatctgtctccagccacccccgactagcaggactccctttcccccaccccgcctgccggccctggagcaggggcccggtgggctctgggtgtggggggccacggctgtggcccagctgctgtggccagcaggcctggggggcccagggggcagccgggcggctgtccttgtccaacagtgggtcagttacgccgacacggagttaataccagctgcctgtggagcaacgctgccggccctgggactccgaagctcggcccaggacccccaggctgtgctgggggccctgggcagggccctgagccccttggaggagtggcttcggctgcacacctacttggccggggaggcccccactctggctgacctggcggctgtcacagccttgctgctgcctttccgatacgtcctagacccacctgcccgccggatctggaataatgtgactcgctggtttgtcacgtgtgtccggcagccagaattccgagccgtgctaggagaagtggttctatactcaggagccaggcctctctctcatcagccaggccccgaggctcctgccctcccaaagacagctgctcagctcaagaaagaggcaaagaaacgggagaagctagagaaattccaacagaagcagaagatccaacagcagcagccacctccaggggagaagaaaccaaaaccagagaagagggagaaacgggatcctggggtcattacctatgacctcccaaccccacccggggaaaagaaagatgtcagtggccccatgcccgactcctacagccctcggtatgtggaggctgcctggtacccttggtgggagcagcagggcttcttcaagccagagtatgggcgtcctaatgtgtcagcagcaaatccccgaggtgtcttcatgatgtgcatcccaccccccaatgtgacaggctccctgcacctgggccatgcactcaccaacgccatccaggactccctgactcgatggcaccgcatgcgtggggagaccaccctgtggaaccctggctgtgaccatgcaggtattgccacccaggtggtggtggagaagaagctatggcgtgagcagggactgagccggcaccagctgggccgcgaggcctttctacaggaagtctggaagtggaaggaggagaaaggtgaccggatttaccaccagttgaagaagcttggcagctccttggactgggatcgagcctgtttcaccatggaccctaaactctcagcagctgtgacagaggcctttgtccggcttcacgaggaaggcatcatctatcgcagtacccgccttgttaactggtcctgcaccctcaactccgccatctctgacattgaggtggataagaaggagctgacaggtcgcaccctgctctccgtgcctggctacaaggagaaggtggagttcggggtcctcgtgtcctttgcctataaggtccaaggctcagatagcgacgaggaggtggtggtggcaacaactcggatcgagacaatgctgggagatgtggctgtagctgtgcaccccaaagataccagataccagcacctgaaggggaagaacgtgatccacccattcctgtctcggagccttcccattgtcttcgatgaatttgtggacatggactttggcacaggtgctgtgaagatcacccccgcacatgaccaaaatgactatgaagttgggcagcggcacgggctggaggccatcagcatcatggactcccggggggccctcatcaatgtgcctccgcctttcctgggcctgcccaggtttgaggccaggaaagcggtgctggtggcgctgaaggagcggggactgttccgtggcattgaggacaaccccatggtggtgccactttgcaaccggtcgaaggacgtggtagagcctctgctgcggccgcagtggtacgttcgctgcggggagatggcccaggctgccagcgccgctgtgactcggggtgacctccgcatcctgcctgaggcccatcagcgcacatggcatgcctggatggacaacatccgggagtggtgcatttccaggcagctgtggtggggccatcgcatcccagcctactttgtcactgtcagtgacccagcggtgccccctggggaggaccctgatgggcggtactgggtgagtggacgcaatgaggcggaggcccgggagaaggcagccaaggagttcggagtgtcccctgacaagatcagtctccagcaagatgaggatgtattggatacctggttctcctctggcctcttccccttatccattttgggctggcccaaccagtcagaagacctgagtgtgttctaccccgggacactgctggagaccggtcatgacatcctcttcttctgggtggcccggatggtcatgctgggcctgaagctcacgggcaggctgccctttagagaggtctacctccatgccatcgtgcgagatgctcacggccggaagatgagcaagtctctaggcaatgtcatcgatcccctggacgtcatctatggaatctccctgcagggcctccacaaccagctgctgaacagcaacctggatcccagcgaggtggagaaggccaaagaagggcagaaagctgacttcccagcggggattcctgaatgtggcaccgatgctctccggtttggattatgtgcctacatgtcccagggtcgtgacatcaacctggatgtgaaccggatactgggttaccgccacttctgcaacaagctctggaatgccaccaagtttgcccttcgtggccttgggaagggttttgtgccctcacccacctcccagcccggaggccatgagagcctggtggaccgctggatccgcagccgcctgacagaggctgtgaggctcagcaatcaaggcttccaggcctacgacttcccggccgtcaccactgcccagtacagcttctggctctatgagctctgtgatgtctacttggagtgcctgaaacctgtactgaatggggtggaccaggtggcagctgagtgtgcccgccagaccctgtacacttgcctggacgttggcctgcggctgctctcacccttcatgcccttcgtgacggaggagctgttccagaggctgccccggaggatgccgcaagctccccctagcctctgtgttaccccctacccggagccctcagagtgctcctggaaggaccccgaggcagaagccgcccttgagctggcgctaagcatcacgcgagccgtgcgctccctgcgggccgactacaacctcacccggatccggcctgactgtttcctggaagtggcggatgaggccacgggcgccctggcatcggcggtgtcgggctacgtgcaggccctggccagcgcaggtgtggtggctgttctggccctgggggctcccgccccccagggttgcgctgtggctctggcttctgatcgctgctccatccacctgcagcttcaggggctggtggaccctgcacgggagctgggcaagctgcaagccaagcgagttgaggcccagcggcaggcccagcgtctgcgggaacgccgtgctgcctcgggctatcctgtcaaggtgccgctcgaagtccaggaggcagatgaagccaagctccaacagacagaagcagagctcaggaaggtggatgaggccatcgccctattccagaagatgctgtgatccaccacccagcttcacccctcacccccagcggctcaccatggggatggcagcaataaaatattttcccacaaaa

SEQ ID NO: 449689 - DNA, 4430 bp, Homo sapiens
  misc_feature (18)..(18): n is a, c, g, or t
cgctggtactggccgganttttgggagcccggaaacgctccctgtcacaaaggggggaacacgtgggcgccggctgccggggcggcgatcttagggaactagggtcacctggagagccgcccaccgtctctgcccgctcgactcctccgcccgggccgctcggccggtccagccgcggccggcgcctggctgtgaggtggattcccggcccagtctgaccatctccctccagtacgtacacgcggctcgaacccgcatccaaccagacgccgacccgctcctgagagccttccacactccccgaagccccgcgatggtggatagttcctcttccccaggaactccccactgacactgcccctctgagagccaggtcctcggctcctgacagcctgcctggtcagaccctcagtcctatgggactcgggtgtctgcggcgaaggagctcccgtgagggtcccctctctactcaaacataggacccacctcgatcccgcagtcttcccctgtctctctttctccttaggtttttccacttcgttcggaccttctcataactatgtccaccctctacgtctcccctcacccagatgccttccccagcctccgagccctcatagccgctcgctatggggaggctggggagggtcccggatggggaggagcccagccccgcatctgtctccagccacccccgactagcaggactccctttcccccaccccgcctgccggccctggagcaggggcccggtgggctctgggtgtggggggccacggctgtggcccagctgctgtggccagcaggcctggggggcccagggggcagccgggcggctgtccttgtccaacagtgggtcagttacgccgacacggagttaataccagctgcctgtggagcaacgctgccggccctgggactccgaagctcggcccaggacccccaggctgtgctgggggccctgggcagggccctgagccccttggaggagtggcttcggctgcacacctacttggccggggaggcccccactctggctgacctggcggctgtcacagccttgctgctgcctttccgatacgtcctagacccacctgcccgccggatctggaataatgtgactcgctggtttgtcacgtgtgtccggcagccagaattccgagccgtgctaggagaagtggttctatactcaggagccaggcctctctctcatcagccaggccccgaggctcctgccctcccaaagacagctgctcagctcaagaaagaggcaaagaaacgggagaagctagagaaattccaacagaagcagaagatccaacagcagcagccacctccaggggagaagaaaccaaaaccagagaagagggagaaacgggatcctggggtcattacctatgacctcccaaccccacccggggaaaagaaagatgtcagtggccccatgcccgactcctacagccctcggtatgtggaggctgcctggtacccttggtgggagcagcagggcttcttcaagccagagtatgggcgtcctaatgtgtcagcagcaaatccccgaggtgtcttcatgatgtgcatcccaccccccaatgtgacaggctccctgcacctgggccatgcactcaccaacgccatccaggactccctgactcgatggcaccgcatgcgtggggagaccaccctgtggaaccctggctgtgaccatgcaggtattgccacccaggtggtggtggagaagaagctatggcgtgagcagggactgagccggcaccagctgggccgcgaggcctttctacaggaagtctggaagtggaaggaggagaaaggtgaccggatttaccaccagttgaagaagcttggcagctccttggactgggatcgagcctgtttcaccatggaccctaaactctcagcagctgtgacagaggcctttgtccggcttcacgaggaaggcatcatctatcgcagtacccgccttgttaactggtcctgcaccctcaactccgccatctctgacattgaggtggataagaaggagctgacaggtcgcaccctgctctccgtgcctggctacaaggagaaggtggagttcggggtcctcgtgtcctttgcctataaggtccaaggctcagatagcgacgaggaggtggtggtggcaacaactcggatcgagacaatgctgggagatgtggctgtagctgtgcaccccaaagataccagataccagcacctgaaggggaagaacgtgatccacccattcctgtctcggagccttcccattgtcttcgatgaatttgtggacatggactttggcacaggtgctgtgaagatcacccccgcacatgaccaaaatgactatgaagttgggcagcggcacgggctggaggccatcagcatcatggactcccggggggccctcatcaatgtgcctccgcctttcctgggcctgcccaggtttgaggccaggaaagcggtgctggtggcgctgaaggagcggggactgttccgtggcattgaggacaaccccatggtggtgccactttgcaaccggtcgaaggacgtggtagagcctctgctgcggccgcagtggtacgttcgctgcggggagatggcccaggctgccagcgccgctgtgactcggggtgacctccgcatcctgcctgaggcccatcagcgcacatggcatgcctggatggacaacatccgggagtggtgcatttccaggcagctgtggtggggccatcgcatcccagcctactttgtcactgtcagtgacccagcggtgccccctggggaggaccctgatgggcggtactgggtgagtggacgcaatgaggcggaggcccgggagaaggcagccaaggagttcggagtgtcccctgacaagatcagtctccagcaagatgaggatgtattggatacctggttctcctctggcctcttccccttatccattttgggctggcccaaccagtcagaagacctgagtgtgttctaccccgggacactgctggagaccggtcatgacatcctcttcttctgggtggcccggatggtcatgctgggcctgaagctcacgggcaggctgccctttagagaggtctacctccatgccatcgtgcgagatgctcacggccggaagatgagcaagtctctaggcaatgtcatcgatcccctggacgtcatctatggaatctccctgcagggcctccacaaccagctgctgaacagcaacctggatcccagcgaggtggagaaggccaaagaagggcagaaagctgacttcccagcggggattcctgaatgtggcaccgatgctctccggtttggattatgtgcctacatgtcccagggtcgtgacatcaacctggatgtgaaccggatactgggttaccgccacttctgcaacaagctctggaatgccaccaagtttgcccttcgtggccttgggaagggttttgtgccctcacccacctcccagcccggaggccatgagagcctggtggaccgctggatccgcagccgcctgacagaggctgtgaggctcagcaatcaaggcttccaggcctacgacttcccggccgtcaccactgcccagtacagcttctggctctatgagctctgtgatgtctacttggagtgcctgaaacctgtactgaatggggtggaccaggtggcagctgagtgtgcccgccagaccctgtacacttgcctggacgttggcctgcggctgctctcacccttcatgcccttcgtgacggaggagctgttccagaggctgccccggaggatgccgcaagctccccctagcctctgtgttaccccctacccggagccctcagagtgctcctggaaggaccccgaggcagaagccgcccttgagctggcgctaagcatcacgcgagccgtgcgctccctgcgggccgactacaacctcacccggatccggcctgactgtttcctggaagtggcggatgaggccacgggcgccctggcatcggcggtgtcgggctacgtgcaggccctggccagcgcaggtgtggtggctgttctggccctgggggctcccgccccccagggttgcgctgtggctctggcttctgatcgctgctccatccacctgcagcttcaggggctggtggaccctgcacgggagctgggcaagctgcaagccaagcgagttgaggcccagcggcaggcccagcgtctgcgggaacgccgtgctgcctcgggctatcctgtcaaggtgccgctcgaagtccaggaggcagatgaagccaagctccaacagacagaagcagagctcaggaaggtggatgaggccatcgccctattccagaagatgctgtgatccaccacccagcttcacccctcacccccagcggctcaccatggggatggcagcaataaaatattttcccacaaaa

SEQ ID NO: 449690 - DNA, 3414 bp, Homo sapiens
caagactgctctcctcagacctcactgtagggtgactgagaagagtcatttatttcctgttccaggtcctagacccacctgcccgccggatctggaataatgtgactcgctggtttgtcacgtgtgtccggcagccagaattccgagccgtgctaggagaagtggttctatactcaggagccaggcctctctctcatcagccaggccccgaggctcctgccctcccaaagacagctgctcagctcaagaaagaggcaaagaaacgggagaagctagagaaattccaacagaagcagaagatccaacagcagcagccacctccaggggagaagaaaccaaaaccagagaagagggagaaacgggatcctggggtcattacctatgacctcccaaccccacccggggaaaagaaagatgtcagtggccccatgcccgactcctacagccctcggtatgtggaggctgcctggtacccttggtgggagcagcagggcttcttcaagccagagtatgggcgtcctaatgtgtcagcagcaaatccccgaggtgtcttcatgatgtgcatcccaccccccaatgtgacaggctccctgcacctgggccatgcactcaccaacgccatccaggactccctgactcgatggcaccgcatgcgtggggagaccaccctgtggaaccctggctgtgaccatgcaggtattgccacccaggtggtggtggagaagaagctatggcgtgagcagggactgagccggcaccagctgggccgcgaggcctttctacaggaagtctggaagtggaaggaggagaaaggtgaccggatttaccaccagttgaagaagcttggcagctccttggactgggatcgagcctgtttcaccatggaccctaaactctcagcagctgtgacagaggcctttgtccggcttcacgaggaaggcatcatctatcgcagtacccgccttgttaactggtcctgcaccctcaactccgccatctctgacattgaggtggataagaaggagctgacaggtcgcaccctgctctccgtgcctggctacaaggagaaggtggagttcggggtcctcgtgtcctttgcctataaggtccaaggctcagatagcgacgaggaggtggtggtggcaacaactcggatcgagacaatgctgggagatgtggctgtagctgtgcaccccaaagataccagataccagcacctgaaggggaagaacgtgatccacccattcctgtctcggagccttcccattgtcttcgatgaatttgtggacatggactttggcacaggtgctgtgaagatcacccccgcacatgaccaaaatgactatgaagttgggcagcggcacgggctggaggccatcagcatcatggactcccggggggccctcatcaatgtgcctccgcctttcctgggcctgcccaggtttgaggccaggaaagcggtgctggtggcgctgaaggagcggggactgttccgtggcattgaggacaaccccatggtggtgccactttgcaaccggtcgaaggacgtggtagagcctctgctgcggccgcagtggtacgttcgctgcggggagatggcccaggctgccagcgccgctgtgactcggggtgacctccgcatcctgcctgaggcccatcagcgcacatggcatgcctggatggacaacatccgggagtggtgcatttccaggcagctgtggtggggccatcgcatcccagcctactttgtcactgtcagtgacccagcggtgccccctggggaggaccctgatgggcggtactgggtgagtggacgcaatgaggcggaggcccgggagaaggcagccaaggagttcggagtgtcccctgacaagatcagtctccagcaagatgaggatgtattggatacctggttctcctctggcctcttccccttatccattttgggctggcccaaccagtcagaagacctgagtgtgttctaccccgggacactgctggagaccggtcatgacatcctcttcttctgggtggcccggatggtcatgctgggcctgaagctcacgggcaggctgccctttagagaggtctacctccatgccatcgtgcgagatgctcacggccggaagatgagcaagtctctaggcaatgtcatcgatcccctggacgtcatctatggaatctccctgcagggcctccacaaccagctgctgaacagcaacctggatcccagcgaggtggagaaggccaaagaagggcagaaagctgacttcccagcggggattcctgaatgtggcaccgatgctctccggtttggattatgtgcctacatgtcccagggtcgtgacatcaacctggatgtgaaccggatactgggttaccgccacttctgcaacaagctctggaatgccaccaagtttgcccttcgtggccttgggaagggttttgtgccctcacccacctcccagcccggaggccatgagagcctggtggaccgctggatccgcagccgcctgacagaggctgtgaggctcagcaatcaaggcttccaggcctacgacttcccggccgtcaccactgcccagtacagcttctggctctatgagctctgtgatgtctacttggagtgcctgaaacctgtactgaatggggtggaccaggtggcagctgagtgtgcccgccagaccctgtacacttgcctggacgttggcctgcggctgctctcacccttcatgcccttcgtgacggaggagctgttccagaggctgccccggaggatgccgcaagctccccctagcctctgtgttaccccctacccggagccctcagagtgctcctggaaggaccccgaggcagaagccgcccttgagctggcgctaagcatcacgcgagccgtgcgctccctgcgggccgactacaacctcacccggatccggcctgactgtttcctggaagtggcggatgaggccacgggcgccctggcatcggcggtgtcgggctacgtgcaggccctggccagcgcaggtgtggtggctgttctggccctgggggctcccgccccccagggttgcgctgtggctctggcttctgatcgctgctccatccacctgcagcttcaggggctggtggaccctgcacgggagctgggcaagctgcaagccaagcgagttgaggcccagcggcaggcccagcgtctgcgggaacgccgtgctgcctcgggctatcctgtcaaggtgccgctcgaagtccaggaggcagatgaagccaagctccaacagacagaagcagagctcaggaaggtggatgaggccatcgccctattccagaagatgctgtgatccaccacccagcttcacccctcacccccagcggctcaccatggggatggcagcaataaaatattttcccacaaaa

SEQ ID NO: 449691 - DNA, 3604 bp, Homo sapiens
gaccaggcaagtgaacagggtaagcgggcacactcagctagccacctggtccaccccattcagtaacagttgtcaggcaatgccaagtagacatcacagagctcatagagccagaaagctgtactgggcaatggtgacggccgggaagtcgtaggcctggaagccttgaattgctgagccctcacagcctctgtcaggcgtctgcggatccagcggtccaccaggctctcatggcctccgggctgggagagtggctgagggcacaaaacccttcccaaggccacgaagggcaaactcggtggcaattccagagcttgttgcagaactggcggtaacccagtatccggttcacatccaggattatgtgcctacatgtcccaggtcggacatcaacctggatgtgaaccggatactgggttaccgcctgctcagctcaagaaagaggcaaagaaacgggagaagctagagaaattccaacagaagcagaagatccaacagcagcagccacctccaggggagaagaaaccaaaaccagagaagagggagaaacgggatcctggggtcattacctatgacctcccaaccccacccggggaaaagaaagatgtcagtggccccatgcccgactcctacagccctcggtatgtggaggctgcctggtacccttggtgggagcagcagggcttcttcaagccagagtatgggcgtcctaatgtgtcagcagcaaatccccgaggtgtcttcatgatgtgcatcccaccccccaatgtgacaggctccctgcacctgggccatgcactcaccaacgccatccaggactccctgactcgatggcaccgcatgcgtggggagaccaccctgtggaaccctggctgtgaccatgcaggtattgccacccaggtggtggtggagaagaagctatggcgtgagcagggactgagccggcaccagctgggccgcgaggcctttctacaggaagtctggaagtggaaggaggagaaaggtgaccggatttaccaccagttgaagaagcttggcagctccttggactgggatcgagcctgtttcaccatggaccctaaactctcagcagctgtgacagaggcctttgtccggcttcacgaggaaggcatcatctatcgcagtacccgccttgttaactggtcctgcaccctcaactccgccatctctgacattgaggtggataagaaggagctgacaggtcgcaccctgctctccgtgcctggctacaaggagaaggtggagttcggggtcctcgtgtcctttgcctataaggtccaaggctcagatagcgacgaggaggtggtggtggcaacaactcggatcgagacaatgctgggagatgtggctgtagctgtgcaccccaaagataccagataccagcacctgaaggggaagaacgtgatccacccattcctgtctcggagccttcccattgtcttcgatgaatttgtggacatggactttggcacaggtgctgtgaagatcacccccgcacatgaccaaaatgactatgaagttgggcagcggcacgggctggaggccatcagcatcatggactcccggggggccctcatcaatgtgcctccgcctttcctgggcctgcccaggtttgaggccaggaaagcggtgctggtggcgctgaaggagcggggactgttccgtggcattgaggacaaccccatggtggtgccactttgcaaccggtcgaaggacgtggtagagcctctgctgcggccgcagtggtacgttcgctgcggggagatggcccaggctgccagcgccgctgtgactcggggtgacctccgcatcctgcctgaggcccatcagcgcacatggcatgcctggatggacaacatccgggagtggtgcatttccaggcagctgtggtggggccatcgcatcccagcctactttgtcactgtcagtgacccagcggtgccccctggggaggaccctgatgggcggtactgggtgagtggacgcaatgaggcggaggcccgggagaaggcagccaaggagttcggagtgtcccctgacaagatcagtctccagcaagatgaggatgtattggatacctggttctcctctggcctcttccccttatccattttgggctggcccaaccagtcagaagacctgagtgtgttctaccccgggacactgctggagaccggtcatgacatcctcttcttctgggtggcccggatggtcatgctgggcctgaagctcacgggcaggctgccctttagagaggtctacctccatgccatcgtgcgagatgctcacggccggaagatgagcaagtctctaggcaatgtcatcgatcccctggacgtcatctatggaatctccctgcagggcctccacaaccagctgctgaacagcaacctggatcccagcgaggtggagaaggccaaagaagggcagaaagctgacttcccagcggggattcctgaatgtggcaccgatgctctccggtttggattatgtgcctacatgtcccagggtcgtgacatcaacctggatgtgaaccggatactgggttaccgccacttctgcaacaagctctggaatgccaccaagtttgcccttcgtggccttgggaagggttttgtgccctcacccacctcccagcccggaggccatgagagcctggtggaccgctggatccgcagccgcctgacagaggctgtgaggctcagcaatcaaggcttccaggcctacgacttcccggccgtcaccactgcccagtacagcttctggctctatgagctctgtgatgtctacttggagtgcctgaaacctgtactgaatggggtggaccaggtggcagctgagtgtgcccgccagaccctgtacacttgcctggacgttggcctgcggctgctctcacccttcatgcccttcgtgacggaggagctgttccagaggctgccccggaggatgccgcaagctccccctagcctctgtgttaccccctacccggagccctcagagtgctcctggaaggaccccgaggcagaagccgcccttgagctggcgctaagcatcacgcgagccgtgcgctccctgcgggccgactacaacctcacccggatccggcctgactgtttcctggaagtggcggatgaggccacgggcgccctggcatcggcggtgtcgggctacgtgcaggccctggccagcgcaggtgtggtggctgttctggccctgggggctcccgccccccagggttgcgctgtggctctggcttctgatcgctgctccatccacctgcagcttcaggggctggtggaccctgcacgggagctgggcaagctgcaagccaagcgagttgaggcccagcggcaggcccagcgtctgcgggaacgccgtgctgcctcgggctatcctgtcaaggtgccgctcgaagtccaggaggcagatgaagccaagctccaacagacagaagcagagctcaggaaggtggatgaggccatcgccctattccagaagatgctgtgatccaccacccagcttcacccctcacccccagcggctcaccatggggatggcagcaataaaatattttcccacaaaa

SEQ ID NO: 449692 - DNA, 4287 bp, Homo sapiens
cggccgcccccgccaggacccgcaggcccggaaacgctccctgtcacaaaggggggaacacgtgggcgccggctgccggggcggcgatcttagggaactagggtcacctggagagccgcccaccgtctctgcccgctcgactcctccgcccgggccgctcggccggtccagccgcggccggcgcctggctgtgaggtggattcccggcccagtctgaccatctccctccagtttttccacttcgttcggaccttctcataactatgtccaccctctacgtctcccctcacccagatgccttccccagcctccgagccctcatagccgctcgctatggggaggctggggagggtcccggatggggaggagcccagccccgcatctgtctccagccacccccgactagcaggactccctttcccccaccccgcctgccggccctggagcaggggcccggtgggctctgggtgtggggggccacggctgtggcccagctgctgtggccagcaggcctggggggcccagggggcagccgggcggctgtccttgtccaacagtgggtcagttacgccgacacggagttaataccagctgcctgtggagcaacgctgccggccctgggactccgaagctcggcccaggacccccaggctgtgctgggggccctgggcagggccctgagccccttggaggagtggcttcggctgcacacctacttggccggggaggcccccactctggctgacctggcggctgtcacagccttgctgctgcctttccgatacgtcctagacccacctgcccgccggatctggaataatgtgactcgctggtttgtcacgtgtgtccggcagccagaattccgagccgtgctaggagaagtggttctatactcaggagccaggcctctctctcatcagccaggccccgaggctcctgccctcccaaagacagctgctcagctcaagaaagaggcaaagaaacgggagaagctagagaaattccaacagaagcagaagatccaacagcagcagccacctccaggggagaagaaaccaaaaccagagaagagggagaaacgggatcctggggtcattacctatgacctcccaaccccacccggggaaaagaaagatgtcagtggccccatgcccgactcctacagccctcggtatgtggaggctgcctggtacccttggtgggagcagcagggcttcttcaagccagagtatgggcgtcctaatgtgtcagcagcaaatccccgaggtgtcttcatgatgtgcatcccaccccccaatgtgacaggctccctgcacctgggccatgcactcaccaacgccatccaggactccctgactcgatggcaccgcatgcgtggggagaccaccctgtggaaccctggctgtgaccatgcaggtattgccacccaggtggtggtggagaagaagctatggcgtgagcagggactgagccggcaccagctgggccgcgaggcctttctacaggaagtctggaagtggaaggaggagaaaggtgaccggatttaccaccagttgaagaagcttggcagctccttggactgggatcgagcctgtttcaccatggaccctaaactctcagcagctgtgacagaggcctttgtccggcttcacgaggaaggcatcatctatcgcagtacccgccttgttaactggtcctgcaccctcaactccgccatctctgacattgaggtggataagaaggagctgacaggtcgcaccctgctctccgtgcctggctacaaggagaaggtggagttcggggtcctcgtgtcctttgcctataaggtccaaggctcagatagcgacgaggaggtggtggtggcaacaactcggatcgagacaatgctgggagatgtggctgtagctgtgcaccccaaagataccagataccagcacctgaaggggaagaacgtgatccacccattcctgtctcggagccttcccattgtcttcgatgaatttgtggacatggactttggcacaggtgctgtgaagatcacccccgcacatgaccaaaatgactatgaagttgggcagcggcacgggctggaggccatcagcatcatggactcccggggggccctcatcaatgtgcctccgcctttcctgggcctgcccaggtttgaggccaggaaagcggtgctggtggcgctgaaggagcggggactgttccgtggcattgaggacaaccccatggtggtgccactttgcaaccggtcgaaggacgtggtagagcctctgctgcggccgcagtggtacgttcgctgcggggagatggcccaggctgccagcgccgctgtgactcggggtgacctccgcatcctgcctgaggcccatcagcgcacatggcatgcctggatggacaacatccggtgtgtagggtcctcagtgtgggaggggcttgccgagggctgagcagggctcactcgggccaggctccatcaggccctccctgatttctcctccccgacatttgcagggagtggtgcatttccaggcagctgtggtggggccatcgcatcccagcctactttgtcactgtcagtgacccagcggtgccccctggggaggtgagcagagggccagagctagctgctgggacaccctgctggagtggaccctgatgggcggtactgggtgagtggacgcaatgaggcggaggcccgggagaaggcagccaaggagttcggagtgtcccctgacaagatcagtctccagcaagatgaggatgtattggatacctggttctcctctggcctcttccccttatccattttgggctggcccaaccagtcagaagacctgagtgtgttctaccccgggacactgctggagaccggtcatgacatcctcttcttctgggtggcccggatggtcatgctgggcctgaagctcacgggcaggctgccctttagagaggtctacctccatgccatcgtgcgagatgctcacggccggaagatgagcaagtctctaggcaatgtcatcgatcccctggacgtcatctatggaatctccctgcagggcctccacaaccagctgctgaacagcaacctggatcccagcgaggtggagaaggccaaagaagggcagaaagctgacttcccagcggggattcctgaatgtggcaccgatgctctccggtttggattatgtgcctacatgtcccagggtcgtgacatcaacctggatgtgaaccggatactgggttaccgccacttctgcaacaagctctggaatgccaccaagtttgcccttcgtggccttgggaagggttttgtgccctcacccacctcccagcccggaggccatgagagcctggtggaccgctggatccgcagccgcctgacagaggctgtgaggctcagcaatcaaggcttccaggcctacgacttcccggccgtcaccactgcccagtacagcttctggctctatgagctctgtgatgtctacttggagtgcctgaaacctgtactgaatggggtggaccaggtggcagctgagtgtgcccgccagaccctgtacacttgcctggacgttggcctgcggctgctctcacccttcatgcccttcgtgacggaggagctgttccagaggctgccccggaggatgccgcaagctccccctagcctctgtgttaccccctacccggagccctcagagtgctcctggaaggaccccgaggcagaagccgcccttgagctggcgctaagcatcacgcgagccgtgcgctccctgcgggccgactacaacctcacccggatccggcctgactgtttcctggaagtggcggatgaggccacgggcgccctggcatcggcggtgtcgggctacgtgcaggccctggccagcgcaggtgtggtggctgttctggccctgggggctcccgccccccagggttgcgctgtggctctggcttctgatcgctgctccatccacctgcagcttcaggggctggtggaccctgcacgggagctgggcaagctgcaagccaagcgagttgaggcccagcggcaggcccagcgtctgcgggaacgccgtgctgcctcgggctatcctgtcaaggtgccgctcgaagtccaggaggcagatgaagccaagctccaacagacagaagcagagctcaggaaggtggatgaggccatcgccctattccagaagatgctgtgatccaccacccagcttcacccctcacccccagcggctcaccatggggatggcagcaataaaatattttcccacaaaa

SEQ ID NO: 449693 - DNA, 4017 bp, Homo sapiens
cggccgcccccgccaggacccgcaggcccggaaacgctccctgtcacaaaggggggaacacgtgggcgccggctgccggggcggcgatcttagggaactagggtcacctggagagccgcccaccgtctctgcccgctcgactcctccgcccgggccgctcggccggtccagccgcggccggcgcctggctgtgaggtggattcccggcccagtctgaccatctccctccagtttttccacttcgttcggaccttctcataactatgtccaccctctacgtctcccctcacccagatgccttccccagcctccgagccctcatagccgctcgctatggggaggctggggagggtcccggatggggaggagcccagccccgcatctgtctccagccacccccgactagcaggactccctttcccccaccccgcctgccggccctggagcaggggcccggtgggctctgggtgtggggggccacggctgtggcccagctgctgtggccagcaggcctggggggcccagggggcagccgggcggctgtccttgtccaacagtgggtcagttacgccgacacggagttaataccagctgcctgtggagcaacgctgccggccctgggactccgaagctcggcccaggacccccaggctgtgctgggggccctgggcagggccctgagccccttggaggagtggcttcggctgcacacctacttggccggggaggcccccactctggctgacctggcggctgtcacagccttgctgctgcctttccgatacgtcctagacccacctgcccgccggatctggaataatgtgactcgctggtttgtcacgtgtgtccggcagccagaattccgagccgtgctaggagaagtggttctatactcaggagccaggcctctctctcatcagccaggccccgaggctcctgccctcccaaagacagctgctcagctcaagaaagaggcaaagaaacgggagaagctagagaaattccaacagaagcagaagatccaacagcagcagccacctccaggggagaagaaaccaaaaccagagaagagggagaaacgggatcctggggtcattacctatgacctcccaaccccacccggggaaaagaaagatgtcagtggccccatgcccgactcctacagccctcggtatgtggaggctgcctggtacccttggtgggagcagcagggcttcttcaagccagagtatgggcgtcctaatgtgtcagcagcaaatccccgaggtgtcttcatgatgtgcatcccaccccccaatgtgacaggctccctgcacctgggccatgcactcaccaacgccatccaggactccctgactcgatggcaccgcatgcgtggggagaccaccctgtggaaccctggctgtgaccatgcaggtattgccacccaggtggtggtggagaagaagctatggcgtgagcagggactgagccggcaccagctgggccgcgaggcctttctacaggaagtctggaagtggaaggaggagaaaggtgaccggatttaccaccagttgaagaagcttggcagctccttggactgggatcgagcctgtttcaccatggaccctaaactctcagcagctgtgacagaggcctttgtccggcttcacgaggaaggcatcatctatcgcagtacccgccttgttaactggtcctgcaccctcaactccgccatctctgacattgaggtggataagaaggagctgacaggtcgcaccctgctctccgtgcctggctacaaggagaaggtggagttcggggtcctcgtgtcctttgcctataaggtccaaggctcagatagcgacgaggaggtggtggtggcaacaactcggatcgagacaatgctgggagatgtggctgtagctgtgcaccccaaagataccagataccagcacctgaaggggaagaacgtgatccacccattcctgtctcggagccttcccattgtcttcgatgaatttgtggacatggactttggcacaggtgctgtgaagatcacccccgcacatgaccaaaatgactatgaagttgggcagcggcacgggctggaggccatcagcatcatggactcccggggggccctcatcaatgtgcctccgcctttcctgggcctgcccaggtttgaggccaggaaagcggtgctggtggcgctgaaggagcggggactgttccgtggcattgaggacaaccccatggtggtgccactttgcaaccggtcgaaggacgtggtagagcctctgctgcggccgcagtgggagtggtgcatttccaggcagctgtggtggggccatcgcatcccagcctactttgtcactgtcagtgacccagcggtgccccctggggaggaccctgatgggcggtactgggtgagtggacgcaatgaggcggaggcccgggagaaggcagccaaggagttcggagtgtcccctgacaagatcagtctccagcaagatgaggatgtattggatacctggttctcctctggcctcttccccttatccattttgggctggcccaaccagtcagaagacctgagtgtgttctaccccgggacactgctggagaccggtcatgacatcctcttcttctgggtggcccggatggtcatgctgggcctgaagctcacgggcaggctgccctttagagaggtctacctccatgccatcgtgcgagatgctcacggccggaagatgagcaagtctctaggcaatgtcatcgatcccctggacgtcatctatggaatctccctgcagggcctccacaaccagctgctgaacagcaacctggatcccagcgaggtggagaaggccaaagaagggcagaaagctgacttcccagcggggattcctgaatgtggcaccgatgctctccggtttggattatgtgcctacatgtcccagggtcgtgacatcaacctggatgtgaaccggatactgggttaccgccacttctgcaacaagctctggaatgccaccaagtttgcccttcgtggccttgggaagggttttgtgccctcacccacctcccagcccggaggccatgagagcctggtggaccgctggatccgcagccgcctgacagaggctgtgaggctcagcaatcaaggcttccaggcctacgacttcccggccgtcaccactgcccagtacagcttctggctctatgagctctgtgatgtctacttggagtgcctgaaacctgtactgaatggggtggaccaggtggcagctgagtgtgcccgccagaccctgtacacttgcctggacgttggcctgcggctgctctcacccttcatgcccttcgtgacggaggagctgttccagaggctgccccggaggatgccgcaagctccccctagcctctgtgttaccccctacccggagccctcagagtgctcctggaaggaccccgaggcagaagccgcccttgagctggcgctaagcatcacgcgagccgtgcgctccctgcgggccgactacaacctcacccggatccggcctgactgtttcctggaagtggcggatgaggccacgggcgccctggcatcggcggtgtcgggctacgtgcaggccctggccagcgcaggtgtggtggctgttctggccctgggggctcccgccccccagggttgcgctgtggctctggcttctgatcgctgctccatccacctgcagcttcaggggctggtggaccctgcacgggagctgggcaagctgcaagccaagcgagttgaggcccagcggcaggcccagcgtctgcgggaacgccgtgctgcctcgggctatcctgtcaaggtgccgctcgaagtccaggaggcagatgaagccaagctccaacagacagaagcagagctcaggaaggtggatgaggccatcgccctattccagaagatgctgtgatccaccacccagcttcacccctcacccccagcggctcaccatggggatggcagcaataaaatattttcccacaaaa

SEQ ID NO: 449694 - DNA, 4220 bp, Homo sapiens
cggccgcccccgccaggacccgcaggcccggaaacgctccctgtcacaaaggggggaacacgtgggcgccggctgccggggcggcgatcttagggaactagggtcacctggagagccgcccaccgtctctgcccgctcgactcctccgcccgggccgctcggccggtccagccgcggccggcgcctggctgtgaggtggattcccggcccagtctgaccatctccctccagtttttccacttcgttcggaccttctcataactatgtccaccctctacgtctcccctcacccagatgccttccccagcctccgagccctcatagccgctcgctatggggaggctggggagggtcccggatggggaggagcccagccccgcatctgtctccagccacccccgactagcaggactccctttcccccaccccgcctgccggccctggagcaggggcccggtgggctctgggtgtggggggccacggctgtggcccagctgctgtggccagcaggcctggggggcccagggggcagccgggcggctgtccttgtccaacagtgggtcagttacgccgacacggagttaataccagctgcctgtggagcaacgctgccggccctgggactccgaagctcggcccaggacccccaggctgtgctgggggccctgggcagggccctgagccccttggaggagtggcttcggctgcacacctacttggccggggaggcccccactctggctgacctggcggctgtcacagccttgctgctgcctttccgatacgtcctagacccacctgcccgccggatctggaataatgtgactcgctggtttgtcacgtgtgtccggcagccagaattccgagccgtgctaggagaagtggttctatactcaggagccaggcctctctctcatcagccaggccccgaggctcctgccctcccaaagacagctgctcagctcaagaaagaggcaaagaaacgggagaagctagagaaattccaacagaagcagaagatccaacagcagcagccacctccaggggagaagaaaccaaaaccagagaagagggagaaacgggatcctggggtcattacctatgacctcccaaccccacccggggaaaagaaagatgtcagtggccccatgcccgactcctacagccctcggtatgtggaggctgcctggtacccttggtgggagcagcagggcttcttcaagccagagtatgggcgtcctaatgtgtcagcagcaaatccccgaggtgtcttcatgatgtgcatcccaccccccaatgtgacaggctccctgcacctgggccatgcactcaccaacgccatccaggactccctgactcgatggcaccgcatgcgtggggagaccaccctgtggaaccctggctgtgaccatgcaggtattgccacccaggtggtggtggagaagaagctatggcgtgagcagggactgagccggcaccagctgggccgcgaggcctttctacaggaagtctggaagtggaaggaggagaaaggtgaccggatttaccaccagttgaagaagcttggcagctccttggactgggatcgagcctgtttcaccatggaccctaaactctcagcagctgtgacagaggcctttgtccggcttcacgaggaaggcatcatctatcgcagtacccgccttgttaactggtcctgcaccctcaactccgccatctctgacattgaggtggataagaaggagctgacaggtcgcaccctgctctccgtgcctggctacaaggagaaggtggagttcggggtcctcgtgtcctttgcctataaggtccaaggctcagatagcgacgaggaggtggtggtggcaacaactcggatcgagacaatgctgggagatgtggctgtagctgtgcaccccaaagataccagataccagcacctgaaggggaagaacgtgatccacccattcctgtctcggagccttcccattgtcttcgatgaatttgtggacatggactttggcacaggtgctgtgaagatcacccccgcacatgaccaaaatgactatgaagttgggcagcggcacgggctggaggccatcagcatcatggactcccggggggccctcatcaatgtgcctccgcctttcctgggcctgcccaggtttgaggccaggaaagcggtgctggtggcgctgaaggagcggggactgttccgtggcattgaggacaaccccatggtggtgccactttgcaagtgagggtgggggcctgggacgggaggaagatggagggctcctcagggttttaccgcctggccttctcacctacgtgtacccccagccggtcgaaggacgtggtagagcctctgctgcggccgcagtggtacgttcgctgcggggagatggcccaggctgccagcgccgctgtgactcggggtgacctccgcatcctgcctgaggcccatcagcgcacatggcatgcctggatggacaacatccgggagtggtgcatttccaggcagctgtggtggggccatcgcatcccagcctactttgtcactgtcagtgacccagcggtgccccctggggaggaccctgatgggcggtactgggtgagtggacgcaatgaggcggaggcccgggagaaggcagccaaggagttcggagtgtcccctgacaagatcagtctccagcaagatgaggatgtattggatacctggttctcctctggcctcttccccttatccattttgggctggcccaaccagtcagaagacctgagtgtgttctaccccgggacactgctggagaccggtcatgacatcctcttcttctgggtggcccggatggtcatgctgggcctgaagctcacgggcaggctgccctttagagaggtctacctccatgccatcgtgcgagatgctcacggccggaagatgagcaagtctctaggcaatgtcatcgatcccctggacgtcatctatggaatctccctgcagggcctccacaaccagctgctgaacagcaacctggatcccagcgaggtggagaaggccaaagaagggcagaaagctgacttcccagcggggattcctgaatgtggcaccgatgctctccggtttggattatgtgcctacatgtcccagggtcgtgacatcaacctggatgtgaaccggatactgggttaccgccacttctgcaacaagctctggaatgccaccaagtttgcccttcgtggccttgggaagggttttgtgccctcacccacctcccagcccggaggccatgagagcctggtggaccgctggatccgcagccgcctgacagaggctgtgaggctcagcaatcaaggcttccaggcctacgacttcccggccgtcaccactgcccagtacagcttctggctctatgagctctgtgatgtctacttggagtgcctgaaacctgtactgaatggggtggaccaggtggcagctgagtgtgcccgccagaccctgtacacttgcctggacgttggcctgcggctgctctcacccttcatgcccttcgtgacggaggagctgttccagaggctgccccggaggatgccgcaagctccccctagcctctgtgttaccccctacccggagccctcagagtgctcctggaaggaccccgaggcagaagccgcccttgagctggcgctaagcatcacgcgagccgtgcgctccctgcgggccgactacaacctcacccggatccggcctgactgtttcctggaagtggcggatgaggccacgggcgccctggcatcggcggtgtcgggctacgtgcaggccctggccagcgcaggtgtggtggctgttctggccctgggggctcccgccccccagggttgcgctgtggctctggcttctgatcgctgctccatccacctgcagcttcaggggctggtggaccctgcacgggagctgggcaagctgcaagccaagcgagttgaggcccagcggcaggcccagcgtctgcgggaacgccgtgctgcctcgggctatcctgtcaaggtgccgctcgaagtccaggaggcagatgaagccaagctccaacagacagaagcagagctcaggaaggtggatgaggccatcgccctattccagaagatgctgtgatccaccacccagcttcacccctcacccccagcggctcaccatggggatggcagcaataaaatattttcccacaaaa

SEQ ID NO: 449695 - DNA, 4039 bp, Homo sapiens
cggccgcccccgccaggacccgcaggcccggaaacgctccctgtcacaaaggggggaacacgtgggcgccggctgccggggcggcgatcttagggaactagggtcacctggagagccgcccaccgtctctgcccgctcgactcctccgcccgggccgctcggccggtccagccgcggccggcgcctggctgtgaggtggattcccggcccagtctgaccatctccctccagtttttccacttcgttcggaccttctcataactatgtccaccctctacgtctcccctcacccagatgccttccccagcctccgagccctcatagccgctcgctatggggaggctggggagggtcccggatggggaggagcccagccccgcatctgtctccagccacccccgactagcaggactccctttcccccaccccgcctgccggccctggagcaggggcccggtgggctctgggtgtggggggccacggctgtggcccagctgctgtggccagcaggcctggggggcccagggggcagccgggcggctgtccttgtccaacagtgggtcagttacgccgacacggagttaataccagctgcctgtggagcaacgctgccggccctgggactccgaagctcggcccaggacccccaggctgtgctgggggccctgggcagggccctgagccccttggaggagtggcttcggctgcacacctacttggccggggaggcccccactctggctgacctggcggctgtcacagccttgctgctgcctttccgatacgtcctagacccacctgcccgccggatctggaataatgtgactcgctggtttgtcacgtgtgtccggcagccagaattccgagccgtgctaggagaagtggttctatactcaggagccaggcctctctctcatcagccaggccccgaggctcctgccctcccaaagacagctgctcagctcaagaaagaggcaaagaaacgggagaagctagagaaattccaacagaagcagaagatccaacagcagcagccacctccaggggagaagaaaccaaaaccagagaagagggagaaacgggatcctggggtcattacctatgacctcccaaccccacccggggaaaagaaagatgtcagtggccccatgcccgactcctacagccctcggtatgtggaggctgcctggtacccttggtgggagcagcagggcttcttcaagccagagtatgggcgtcctaatgtgtcagcagcaaatccccgaggtgtcttcatgatgtgcatcccaccccccaatgtgacaggctccctgcacctgggccatgcactcaccaacgccatccaggactccctgactcgatggcaccgcatgcgtggggagaccaccctgtggaaccctggctgtgaccatgcaggtattgccacccaggtggtggtggagaagaagctatggcgtgagcagggactgagccggcaccagctgggccgcgaggcctttctacaggaagtctggaagtggaaggaggagaaaggtgaccggatttaccaccagttgaagaagcttggcagctccttggactgggatcgagcctgtttcaccatggaccctaaactctcagcagctgtgacagaggcctttgtccggcttcacgaggaaggcatcatctatcgcagtacccgccttgttaactggtcctgcaccctcaactccgccatctctgacattgaggtggataagaaggagctgacaggtcgcaccctgctctccgtgcctggctacaaggagaaggtggagttcggggtcctcgtgtcctttgcctataaggtccaaggctcagcacctgaaggggaagaacgtgatccacccattcctgtctcggagccttcccattgtcttcgatgaatttgtggacatggactttggcacaggtgctgtgaagatcacccccgcacatgaccaaaatgactatgaagttgggcagcggcacgggctggaggccatcagcatcatggactcccggggggccctcatcaatgtgcctccgcctttcctgggcctgcccaggtttgaggccaggaaagcggtgctggtggcgctgaaggagcggggactgttccgtggcattgaggacaaccccatggtggtgccactttgcaaccggtcgaaggacgtggtagagcctctgctgcggccgcagtggtacgttcgctgcggggagatggcccaggctgccagcgccgctgtgactcggggtgacctccgcatcctgcctgaggcccatcagcgcacatggcatgcctggatggacaacatccgggagtggtgcatttccaggcagctgtggtggggccatcgcatcccagcctactttgtcactgtcagtgacccagcggtgccccctggggaggaccctgatgggcggtactgggtgagtggacgcaatgaggcggaggcccgggagaaggcagccaaggagttcggagtgtcccctgacaagatcagtctccagcaagatgaggatgtattggatacctggttctcctctggcctcttccccttatccattttgggctggcccaaccagtcagaagacctgagtgtgttctaccccgggacactgctggagaccggtcatgacatcctcttcttctgggtggcccggatggtcatgctgggcctgaagctcacgggcaggctgccctttagagaggtctacctccatgccatcgtgcgagatgctcacggccggaagatgagcaagtctctaggcaatgtcatcgatcccctggacgtcatctatggaatctccctgcagggcctccacaaccagctgctgaacagcaacctggatcccagcgaggtggagaaggccaaagaagggcagaaagctgacttcccagcggggattcctgaatgtggcaccgatgctctccggtttggattatgtgcctacatgtcccagggtcgtgacatcaacctggatgtgaaccggatactgggttaccgccacttctgcaacaagctctggaatgccaccaagtttgcccttcgtggccttgggaagggttttgtgccctcacccacctcccagcccggaggccatgagagcctggtggaccgctggatccgcagccgcctgacagaggctgtgaggctcagcaatcaaggcttccaggcctacgacttcccggccgtcaccactgcccagtacagcttctggctctatgagctctgtgatgtctacttggagtgcctgaaacctgtactgaatggggtggaccaggtggcagctgagtgtgcccgccagaccctgtacacttgcctggacgttggcctgcggctgctctcacccttcatgcccttcgtgacggaggagctgttccagaggctgccccggaggatgccgcaagctccccctagcctctgtgttaccccctacccggagccctcagagtgctcctggaaggaccccgaggcagaagccgcccttgagctggcgctaagcatcacgcgagccgtgcgctccctgcgggccgactacaacctcacccggatccggcctgactgtttcctggaagtggcggatgaggccacgggcgccctggcatcggcggtgtcgggctacgtgcaggccctggccagcgcaggtgtggtggctgttctggccctgggggctcccgccccccagggttgcgctgtggctctggcttctgatcgctgctccatccacctgcagcttcaggggctggtggaccctgcacgggagctgggcaagctgcaagccaagcgagttgaggcccagcggcaggcccagcgtctgcgggaacgccgtgctgcctcgggctatcctgtcaaggtgccgctcgaagtccaggaggcagatgaagccaagctccaacagacagaagcagagctcaggaaggtggatgaggccatcgccctattccagaagatgctgtgatccaccacccagcttcacccctcacccccagcggctcaccatggggatggcagcaataaaatattttcccacaaaa

SEQ ID NO: 449696 - DNA, 2512 bp, Homo sapiens
cacacaccaccacccaaccccaaataggctaggtacgaggcgggtgtgaatcggccgaggcttgttaactggtcctgcaccctcaactccgccatctctgacattgaggtggataagaaggagctgacaggtcgcaccctgctctccgtgcctggctacaaggagaaggtggagttcggggtcctcgtgtcctttgcctataaggtccaaggctcagatagcgacgaggaggtggtggtggcaacaactcggatcgagacaatgctgggagatgtggctgtagctgtgcaccccaaagataccagataccagcacctgaaggggaagaacgtgatccacccattcctgtctcggagccttcccattgtcttcgatgaatttgtggacatggactttggcacaggtgctgtgaagatcacccccgcacatgaccaaaatgactatgaagttgggcagcggcacgggctggaggccatcagcatcatggactcccggggggccctcatcaatgtgcctccgcctttcctgggcctgcccaggtttgaggccaggaaagcggtgctggtggcgctgaaggagcggggactgttccgtggcattgaggacaaccccatggtggtgccactttgcaaccggtcgaaggacgtggtagagcctctgctgcggccgcagtggtacgttcgctgcggggagatggcccaggctgccagcgccgctgtgactcggggtgacctccgcatcctgcctgaggcccatcagcgcacatggcatgcctggatggacaacatccgggagtggtgcatttccaggcagctgtggtggggccatcgcatcccagcctactttgtcactgtcagtgacccagcggtgccccctggggaggaccctgatgggcggtactgggtgagtggacgcaatgaggcggaggcccgggagaaggcagccaaggagttcggagtgtcccctgacaagatcagtctccagcaagatgaggatgtattggatacctggttctcctctggcctcttccccttatccattttgggctggcccaaccagtcagaagacctgagtgtgttctaccccgggacactgctggagaccggtcatgacatcctcttcttctgggtggcccggatggtcatgctgggcctgaagctcacgggcaggctgccctttagagaggtctacctccatgccatcgtgcgagatgctcacggccggaagatgagcaagtctctaggcaatgtcatcgatcccctggacgtcatctatggaatctccctgcagggcctccacaaccagctgctgaacagcaacctggatcccagcgaggtggagaaggccaaagaagggcagaaagctgacttcccagcggggattcctgaatgtggcaccgatgctctccggtttggattatgtgcctacatgtcccagggtcgtgacatcaacctggatgtgaaccggatactgggttaccgccacttctgcaacaagctctggaatgccaccaagtttgcccttcgtggccttgggaagggttttgtgccctcacccacctcccagcccggaggccatgagagcctggtggaccgctggatccgcagccgcctgacagaggctgtgaggctcagcaatcaaggcttccaggcctacgacttcccggccgtcaccactgcccagtacagcttctggctctatgagctctgtgatgtctacttggagtgcctgaaacctgtactgaatggggtggaccaggtggcagctgagtgtgcccgccagaccctgtacacttgcctggacgttggcctgcggctgctctcacccttcatgcccttcgtgacggaggagctgttccagaggctgccccggaggatgccgcaagctccccctagcctctgtgttaccccctacccggagccctcagagtgctcctggaaggaccccgaggcagaagccgcccttgagctggcgctaagcatcacgcgagccgtgcgctccctgcgggccgactacaacctcacccggatccggcctgactgtttcctggaagtggcggatgaggccacgggcgccctggcatcggcggtgtcgggctacgtgcaggccctggccagcgcaggtgtggtggctgttctggccctgggggctcccgccccccagggttgcgctgtggctctggcttctgatcgctgctccatccacctgcagcttcaggggctggtggaccctgcacgggagctgggcaagctgcaagccaagcgagttgaggcccagcggcaggcccagcgtctgcgggaacgccgtgctgcctcgggctatcctgtcaaggtgccgctcgaagtccaggaggcagatgaagccaagctccaacagacagaagcagagctcaggaaggtggatgaggccatcgccctattccagaagatgctgtgatccaccacccagcttcacccctcacccccagcggctcaccatggggatggcagcaataaaatattttcccacaaaa

SEQ ID NO: 449697 - DNA, 3512 bp, Homo sapiens
cggccgcccccgccaggacccgcaggcccggaaacgctccctgtcacaaaggggggaacacgtgggcgccggctgccggggcggcgatcttagggaactagggtcacctggagagccgcccaccgtctctgcccgctcgactcctccgcccgggccgctcggccggtccagccgcggccggcgcctggctgtgaggtggattcccggcccagtctgaccatctccctccagtttttccacttcgttcggaccttctcataactatgtccaccctctacgtctcccctcacccagatgccttccccagcctccgagccctcatagccgctcgctatggggaggctggggagggtcccggatggggaggagcccagccccgcatctgtctccagccacccccgactagcaggactccctttcccccaccccgcctgccggccctggagcaggggcccggtgggctctgggtgtggggggccacggctgtggcccagctgctgtggccagcaggcctggggggcccagggggcagccgggcggctgtccttgtccaacagtgggtcagttacgccgacacggagttaataccagctgcctgtggagcaacgctgccggccctgggactccgaagctcggcccaggacccccaggctgtgctgggggccctgggcagggccctgagccccttggaggagtggcttcggctgcacacctacttggccggggaggcccccactctggctgacctggcggctgtcacagccttgctgctgcctttccgatacgtcctagacccacctgcccgccggatctggaataatgtgactcgctggtttgtcacgtgtgtccggcagccagaattccgagccgtgctaggagaagtggttctatactcaggagccaggcctctctctcatcagccaggccccgaggctcctgccctcccaaagacagctgctcagctcaagaaagaggcaaagaaacgggagaagctagagaaattccaacagaagcagaagatccaacagcagcagccacctccaggggagaagaaaccaaaaccagagaagagggagaaacgggatcctggggtcattacctatgacctcccaaccccacccggggaaaagaaagatgtcagtggccccatgcccgactcctacagccctcggtatgtggaggctgcctggtacccttggtgggagcagcagggcttcttcaagccagagtatgggcgtcctaatgtgtcagcagcaaatccccgaggtgtcttcatgatgtgcatcccaccccccaatgtgacaggctccctgcacctgggccatgcactcaccaacgccatccaggactccctgactcgatggcaccgcatgcgtggggagaccaccctgtggaaccctggctgtgaccatgcaggtattgccacccaggtggtggtggagaagaagctatggcgtgagcagggactgagccggcaccagctgggccgcgaggcctttctacaggaagtctggaagtggaaggaggagaaaggtgaccggatttaccaccagttgaagaagcttggcagctccttggactgggatcgagcctgtttcaccatggaccctaaactctcagcagctgtgacagaggcctttgtccggcttcacgaggaaggcatcatctatcgcagtacccgccttgttaactggtcctgcaccctcaactccgccatctctgacattgaggtggataagaaggagctgacaggtcgcaccctgctctccgtgcctggctacaaggagaaggtggagttcggggtcctcgtgtcctttgcctataaggtccaaggctcagatagcgacgaggaggtggtggtggcaacaactcggatcgagacaatgctgggagatgtggctgtagctgtgcaccccaaagataccagataccagcacctgaaggggaagaacgtgatccacccattcctgtctcggagccttcccattgtcttcgatgaatttgtggacatggactttggcacaggtgctgtgaagatcacccccgcacatgaccaaaatgactatgaagttgggcagcggcacgggctggaggccatcagcatcatggactcccggggggccctcatcaatgtgcctccgcctttcctgggcctgcccaggtttgaggccaggaaagcggtgctggtggcgctgaaggagcggggactgttccgtggcattgaggacaaccccatggtggtgccactttgcaaccggtcgaaggacgtggtagagcctctgctgcggccgcagtggtacgttcgctgcggggagatggcccaggctgccagcgccgctgtgactcggggtgacctccgcatcctgcctgaggcccatcagcgcacatggcatgcctggatggacaacatccgggagtggtgcatttccaggcagctgtggtggggccatcgcatcccagcctactttgtcactgtcagtgacccagcggtgccccctggggaggaccctgatgggcggtactgggtgagtggacgcaatgaggcggaggcccgggagaaggcagccaaggagttcggagtgtcccctgacaagatcagtctccagcaagatgaggatgtattggatacctggttctcctctggcctcttccccttatccattttgggctggcccaaccagtcagaagacctgagtgtgttctaccccgggacactgctggagaccggtcatgacatcctcttcttctgggtggcccggatggtcatgctgggcctgaagctcacgggcaggctgccctttagagaggtctacctccatgccatcgtgcgagatgctcacggccggaagatgagcaagtctctaggcaatgtcatcgatcccctggacgtcatctatggaatctccctgcagggcctccacaaccagctgctgaacagcaacctggatcccagcgaggtggagaaggccaaagaagggcagaaagctgacttcccagcggggattcctgaatgtggcaccgatgctctccggtttggattatgtgcctacatgtcccagggtcgtgacatcaacctggatgtgaaccggatactgggttaccgccacttctgcaacaagctctggaatgccaccaagtttgcccttcgtggccttgggaagggttttgtgccctcacccacctcccagcccggaggccatgagagcctggtggaccgctggatccgcagccgcctgacagaggctgtgaggctcagcaatcaaggcttccaggcctacgacttcccggccgtcaccactgcccagtacagcttctggctctatgagctctgtgatgtctacttgggggtgctgaacctgtgctgtgggggtgggccccggttggggttggtggtgcccccgcaacctgttccttgccgggggtggcggggggggggccccctttgccctggagggggggttcccagggcccggggcggccccccttgtttccccccggggcctgtgtgtggg

SEQ ID NO: 449698 - DNA, 2193 bp, Homo sapiens
  misc_feature (26)..(26): n is a, c, g, or t
aaaggctaggtacgaggctgggtgtnctgtctcggagccttcccattgtcttcgatgaatttgtggacatggactttggcacaggtgctgtgaagatcacccccgcacatgaccaaaatgactatgaagttgggcagcggcacgggctggaggccatcagcatcatggactcccggggggccctcatcaatgtgcctccgcctttcctgggcctgcccaggtttgaggccaggaaagcggtgctggtggcgctgaaggagcggggactgttccgtggcattgaggacaaccccatggtggtgccactttgcaaccggtcgaaggacgtggtagagcctctgctgcggccgcagtggtacgttcgctgcggggagatggcccaggctgccagcgccgctgtgactcggggtgacctccgcatcctgcctgaggcccatcagcgcacatggcatgcctggatggacaacatccgggagtggtgcatttccaggcagctgtggtggggccatcgcatcccagcctactttgtcactgtcagtgacccagcggtgccccctggggaggaccctgatgggcggtactgggtgagtggacgcaatgaggcggaggcccgggagaaggcagccaaggagttcggagtgtcccctgacaagatcagtctccagcaagatgaggatgtattggatacctggttctcctctggcctcttccccttatccattttgggctggcccaaccagtcagaagacctgagtgtgttctaccccgggacactgctggagaccggtcatgacatcctcttcttctgggtggcccggatggtcatgctgggcctgaagctcacgggcaggctgccctttagagaggtctacctccatgccatcgtgcgagatgctcacggccggaagatgagcaagtctctaggcaatgtcatcgatcccctggacgtcatctatggaatctccctgcagggcctccacaaccagctgctgaacagcaacctggatcccagcgaggtggagaaggccaaagaagggcagaaagctgacttcccagcggggattcctgaatgtggcaccgatgctctccggtttggattatgtgcctacatgtcccagggtcgtgacatcaacctggatgtgaaccggatactgggttaccgccacttctgcaacaagctctggaatgccaccaagtttgcccttcgtggccttgggaagggttttgtgccctcacccacctcccagcccggaggccatgagagcctggtggaccgctggatccgcagccgcctgacagaggctgtgaggctcagcaatcaaggcttccaggcctacgacttcccggccgtcaccactgcccagtacagcttctggctctatgagctctgtgatgtctacttggagtgcctgaaacctgtactgaatggggtggaccaggtggcagctgagtgtgcccgccagaccctgtacacttgcctggacgttggcctgcggctgctctcacccttcatgcccttcgtgacggaggagctgttccagaggctgccccggaggatgccgcaagctccccctagcctctgtgttaccccctacccggagccctcagagtgctcctggaaggaccccgaggcagaagccgcccttgagctggcgctaagcatcacgcgagccgtgcgctccctgcgggccgactacaacctcacccggatccggcctgactgtttcctggaagtggcggatgaggccacgggcgccctggcatcggcggtgtcgggctacgtgcaggccctggccagcgcaggtgtggtggctgttctggccctgggggctcccgccccccagggttgcgctgtggctctggcttctgatcgctgctccatccacctgcagcttcaggggctggtggaccctgcacgggagctgggcaagctgcaagccaagcgagttgaggcccagcggcaggcccagcgtctgcgggaacgccgtgctgcctcgggctatcctgtcaaggtgccgctcgaagtccaggaggcagatgaagccaagctccaacagacagaagcagagctcaggaaggtggatgaggccatcgccctattccagaagatgctgtgatccaccacccagcttcacccctcacccccagcggctcaccatggggatggcagcaataaaatattttcccacaaaa

SEQ ID NO: 449699 - DNA, 2528 bp, Homo sapiens
cggccgcccccgccaggacccgcaggcccggaaacgctccctgtcacaaaggggggaacacgtgggcgccggctgccggggcggcgatcttagggaactagggtcacctggagagccgcccaccgtctctgcccgctcgactcctccgcccgggccgctcggccggtccagccgcggccggcgcctggctgtgaggtggattcccggcccagtctgaccatctccctccagtttttccacttcgttcggaccttctcataactatgtccaccctctacgtctcccctcacccagatgccttccccagcctccgagccctcatagccgctcgctatggggaggctggggagggtcccggatggggaggagcccagccccgcatctgtctccagccacccccgactagcaggactccctttcccccaccccgcctgccggccctggagcaggggcccggtgggctctgggtgtggggggccacggctgtggcccagctgctgtggccagcaggcctggggggcccagggggcagccgggcggctgtccttgtccaacagtgggtcagttacgccgacacggagttaataccagctgcctgtggagcaacgctgccggccctgggactccgaagctcggcccaggacccccaggctgtgctgggggccctgggcagggccctgagccccttggaggagtggcttcggctgcacacctacttggccggggaggcccccactctggctgacctggcggctgtcacagccttgctgctgcctttccgatacgtcctagacccacctgcccgccggatctggaataatgtgactcgctggtttgtcacgtgtgtccggcagccagaattccgagccgtgctaggagaagtggttctatactcaggagccaggcctctctctcatcagccaggccccgaggctcctgccctcccaaagacagctgctcagctcaagaaagaggcaaagaaacgggagaagctagagaaattccaacagaagcagaagatccaacagcagcagccacctccaggggagaagaaaccaaaaccagagaagagggagaaacgggatcctggggtcattacctatgacctcccaaccccacccggggaaaagaaagatgtcagtggccccatgcccgactcctacagccctcggtatgtggaggctgcctggtacccttggtgggagcagcagggcttcttcaagccagagtatgggcgtcctaatgtgtcagcagcaaatccccgaggtgtcttcatgatgtgcatcccaccccccaatgtgacaggctccctgcacctgggccatgcactcaccaacgccatccaggactccctgactcgatggcaccgcatgcgtggggagaccaccctgtggaaccctggctgtgaccatgcaggtattgccacccaggtggtggtggagaagaagctatggcgtgagcagggactgagccggcaccagctgggccgcgaggcctttctacaggaagtctggaagtggaaggaggagaaaggtgaccggatttaccaccagttgaagaagcttggcagctccttggactgggatcgagcctgtttcaccatggaccctaaactctcagcagctgtgacagaggcctttgtccggcttcacgaggaaggcatcatctatcgcagtacccgccttgttaactggtcctgcaccctcaactccgccatctctgacattgaggtggataagaaggagctgacaggtcgcaccctgctctccgtgcctggctacaaggagaaggtggagttcggggtcctcgtgtcctttgcctataaggtccaaggctcagatagcgacgaggaggtggtggtggcaacaactcggatcgagacaatgctgggagatgtggctgtagctgtgcaccccaaagataccagataccagcacctgaaggggaagaacgtgatccacccattcctgtctcggagccttcccattgtcttcgatgaatttgtggacatggactttggcacaggtgctgtgaagatcacccccgcacatgaccaaaatgactatgaagttgggcagcggcacgggctggaggccatcagcatcatggactcccggggggccctcatcaatgtgcctccgcctttcctgggcctgcccaggtttgaggccaggaaagcggtgctggtggcgctgaaggagcggggactgttccgtggcattgaggacaaccccatggtggtgccactttgcaaccggtcgaaggacgtggtagagcctctgctgcggccgcagtggtacgttcgctgcggggagatggcccaggctgccagcgccgctgtgactcggggtgacctccgcatcctgcctgaggcccatcagcgcacatggcatgcctggatggacaacatccgggagtggtgcatttccaggcagctgtggtggggccatcgcatcccagcctactttgtcactgtcagtgacccgggcctggggggccgtgggttggtttttgctggggcgggagac

SEQ ID NO: 449700 - DNA, 2340 bp, Homo sapiens
aatcacggcgtctggccctgcttcatgcgtttttggtatctttccgcccccagcacctgaaggggaagaacgtgatccacccattcctgtctcggagccttcccattgtcttcgatgaatttgtggacatggactttggcacaggtgctgtgaagatcacccccgcacatgaccaaaatgactatgaagttgggcagcggcacgggctggaggccatcagcatcatggactcccggggggccctcatcaatgtgcctccgcctttcctggtgaggctgcctgaggcaagagtgcccgggtcagggagatggagggatggctgggcatcgccatgatgaggcctcattcctacccagggcctgcccaggtttgaggccaggaaagcggtgctggtggcgctgaaggagcggggactgttccgtggcattgaggacaaccccatggtggtgccactttgcaaccggtcgaaggacgtggtagagcctctgctgcggccgcagtggtacgttcgctgcggggagatggcccaggctgccagcgccgctgtgactcggggtgacctccgcatcctgcctgaggcccatcagcgcacatggcatgcctggatggacaacatccgggagtggtgcatttccaggcagctgtggtggggccatcgcatcccagcctactttgtcactgtcagtgacccagcggtgccccctggggaggaccctgatgggcggtactgggtgagtggacgcaatgaggcggaggcccgggagaaggcagccaaggagttcggagtgtcccctgacaagatcagtctccagcaagatgaggatgtattggatacctggttctcctctggcctcttccccttatccattttgggctggcccaaccagtcagaagacctgagtgtgttctaccccgggacactgctggagaccggtcatgacatcctcttcttctgggtggcccggatggtcatgctgggcctgaagctcacgggcaggctgccctttagagaggtctacctccatgccatcgtgcgagatgctcacggccggaagatgagcaagtctctaggcaatgtcatcgatcccctggacgtcatctatggaatctccctgcagggcctccacaaccagctgctgaacagcaacctggatcccagcgaggtggagaaggccaaagaagggcagaaagctgacttcccagcggggattcctgaatgtggcaccgatgctctccggtttggattatgtgcctacatgtcccagggtcgtgacatcaacctggatgtgaaccggatactgggttaccgccacttctgcaacaagctctggaatgccaccaagtttgcccttcgtggccttgggaagggttttgtgccctcacccacctcccagcccggaggccatgagagcctggtggaccgctggatccgcagccgcctgacagaggctgtgaggctcagcaatcaaggcttccaggcctacgacttcccggccgtcaccactgcccagtacagcttctggctctatgagctctgtgatgtctacttggagtgcctgaaacctgtactgaatggggtggaccaggtggcagctgagtgtgcccgccagaccctgtacacttgcctggacgttggcctgcggctgctctcacccttcatgcccttcgtgacggaggagctgttccagaggctgccccggaggatgccgcaagctccccctagcctctgtgttaccccctacccggagccctcagagtgctcctggaaggaccccgaggcagaagccgcccttgagctggcgctaagcatcacgcgagccgtgcgctccctgcgggccgactacaacctcacccggatccggcctgactgtttcctggaagtggcggatgaggccacgggcgccctggcatcggcggtgtcgggctacgtgcaggccctggccagcgcaggtgtggtggctgttctggccctgggggctcccgccccccagggttgcgctgtggctctggcttctgatcgctgctccatccacctgcagcttcaggggctggtggaccctgcacgggagctgggcaagctgcaagccaagcgagttgaggcccagcggcaggcccagcgtctgcgggaacgccgtgctgcctcgggctatcctgtcaaggtgccgctcgaagtccaggaggcagatgaagccaagctccaacagacagaagcagagctcaggaaggtggatgaggccatcgccctattccagaagatgctgtgatccaccacccagcttcacccctcacccccagcggctcaccatggggatggcagcaataaaatattttcccacaaaa

SEQ ID NO: 449701 - DNA, 1445 bp, Homo sapiens
  misc_feature (18)..(18): n is a, c, g, or t
cgctggtactggccgganttttgggatgctggagaccggtcatgacatcctcttcttctgggtggcccggatggtcatgctgggcctgaagctcacgggcaggctgccctttagagaggtctacctccatgccatcgtgcgagatgctcacggccggaagatgagcaagtctctaggcaatgtcatcgatcccctggacgtcatctatggaatctccctgcagggcctccacaaccagctgctgaacagcaacctggatcccagcgaggtggagaaggccaaagaagggcagaaagctgacttcccagcggggattcctgaatgtggcaccgatgctctccggtttggattatgtgcctacatgtcccagggtcgtgacatcaacctggatgtgaaccggatactgggttaccgccacttctgcaacaagctctggaatgccaccaagtttgcccttcgtggccttgggaagggttttgtgccctcacccacctcccagcccggaggccatgagagcctggtggaccgctggatccgcagccgcctgacagaggctgtgaggctcagcaatcaaggcttccaggcctacgacttcccggccgtcaccactgcccagtacagcttctggctctatgagctctgtgatgtctacttggagtgcctgaaacctgtactgaatggggtggaccaggtggcagctgagtgtgcccgccagaccctgtacacttgcctggacgttggcctgcggctgctctcacccttcatgcccttcgtgacggaggagctgttccagaggctgccccggaggatgccgcaagctccccctagcctctgtgttaccccctacccggagccctcagagtgctcctggaaggaccccgaggcagaagccgcccttgagctggcgctaagcatcacgcgagccgtgcgctccctgcgggccgactacaacctcacccggatccggcctgactgtttcctggaagtggcggatgaggccacgggcgccctggcatcggcggtgtcgggctacgtgcaggccctggccagcgcaggtgtggtggctgttctggccctgggggctcccgccccccagggttgcgctgtggctctggcttctgatcgctgctccatccacctgcagcttcaggggctggtggaccctgcacgggagctgggcaagctgcaagccaagcgagttgaggcccagcggcaggcccagcgtctgcgggaacgccgtgctgcctcgggctatcctgtcaaggtgccgctcgaagtccaggaggcagatgaagccaagctccaacagacagaagcagagctcaggaaggtggatgaggccatcgccctattccagaagatgctgtgatccaccacccagcttcacccctcacccccagcggctcaccatggggatggcagcaataaaatattttcccacaaaa

SEQ ID NO: 449702 - DNA, 668 bp, Homo sapiens
tactgggctgaccctggaaggccagtcttgtttgtcccctgcctcctgggttccgccagagagaagcagtggagtaaactgcacagacacagagaaaaccagtcatggaggccaagagctagagagccttgagtggacgtggttaatctcacttggttctcccaagagccctgggaggggggcaatatcatcatcatcatctgacaaatgaagtgaccggcctgggagactgtgctctcctgcttaggtggggacactgaatggggaacacgtaggctctgaggttcctttgttcttggggactcaccacttggtggaaaaaggcaagacccaagaggtggtggtggaagtgggggtgctggtgggaatgggtggggagccaggccagccaggttcacgcctcctctgagctactgacctcccatggtcctcgctcatctttccaactttgttgtcctgggtgtttgggggtctcttcacttggacctgggtcctcacccaccccctggttccactccagctcctccaacagacagaagcagagctcaggaaggtggatgaggccatcgccctattccagaagatgctgtgatccaccacccagcttcacccctcacccccagcggctcaccatggggatggcagcaataaaatattttcccacaaaa

SEQ ID NO: 449703 - DNA, 450 bp, Homo sapiens
gaactccgtggagtccctcatgacctgggcatcctgatgtacacccaggtgctgtgaagatcacccccgcacatgaccaaaatgactatgaagttgggcagcggcacgggctggaggccatcagcatcatggactcccggggggccctcatcaatgtgcctccgcctttcctggtgaggctgcctgaggcaagagtgcccgggtcagggagatggagggatggctgggcatcgccatgatgaggcctcattcctacccagggcctgcccaggtttgaggccaggaaagcggtgctggtggcgctgaaggagcggggactgttccgtggcattgaggacaaccccatggtggtgccactttgcaagtgagggtgggggcctgggacgggaggaagatggagggctcctcagggttttaccgcctggccttctcacctacgtgtacccccag

SEQ ID NO: 449704 - DNA, 441 bp, Homo sapiens
ccctggccctggcccctgggccacgcctctaaatacccattttacaggtggataagaaggagctgacaggtcgcaccctgctctccgtgcctggctacaaggagaaggtggagttcggggtcctcgtgtcctttgcctataaggtccaaggctcaggtaggagccaggggcaccaggatcctgggctgggagtggcaggaaggggccaaggccaagaccacaaggccttctgtcaccccagatagcgacgaggaggtggtggtggcaacaactcggatcgagacaatgctgggagatgtggctgtagctgtgcaccccaaagataccagataccaggtgggggactgtccacagttagggaaggagttctggccaaaaagggctcccatccttatggggtggaggggttggacttaggcccctggctgaggagaggaaact

SEQ ID NO: 449705 - DNA, 317 bp, Homo sapiens
ggaagaacaagactgctctcctcagacctcactgtagggtgactgagaagagtcatttatttcctgttccaggtcctagacccacctgcccgccggatctggaataatgtgactcgctggtttgtcacgtgtgtccggcagccagaattccgagccgtgctaggagaagtggttctatactcaggagccaggcctctctctcatcagccaggtgaggaagggcgaggagttggaggataggggcttccctggggccttccatgcaactcactttctttttttcctagaaatggcagaatcactggggcagggtcctg

SEQ ID NO: 449706 - DNA, 4134 bp, Homo sapiens
cggccgcccccgccaggacccgcaggcccggaaacgctccctgtcacaaaggggggaacacgtgggcgccggctgccggggcggcgatcttagggaactagggtcacctggagagccgcccaccgtctctgcccgctcgactcctccgcccgggccgctcggccggtccagccgcggccggcgcctggctgtgaggtggattcccggcccagtctgaccatctccctccagtttttccacttcgttcggaccttctcataactatgtccaccctctacgtctcccctcacccagatgccttccccagcctccgagccctcatagccgctcgctatggggaggctggggagggtcccggatggggaggagcccagccccgcatctgtctccagccacccccgactagcaggactccctttcccccaccccgcctgccggccctggagcaggggcccggtgggctctgggtgtggggggccacggctgtggcccagctgctgtggccagcaggcctggggggcccagggggcagccgggcggctgtccttgtccaacagtgggtcagttacgccgacacggagttaataccagctgcctgtggagcaacgctgccggccctgggactccgaagctcggcccaggacccccaggctgtgctgggggccctgggcagggccctgagccccttggaggagtggcttcggctgcacacctacttggccggggaggcccccactctggctgacctggcggctgtcacagccttgctgctgcctttccgatacgtcctagacccacctgcccgccggatctggaataatgtgactcgctggtttgtcacgtgtgtccggcagccagaattccgagccgtgctaggagaagtggttctatactcaggagccaggcctctctctcatcagccaggccccgaggctcctgccctcccaaagacagctgctcagctcaagaaagaggcaaagaaacgggagaagctagagaaattccaacagaagcagaagatccaacagcagcagccacctccaggggagaagaaaccaaaaccagagaagagggagaaacgggatcctggggtcattacctatgacctcccaaccccacccggggaaaagaaagatgtcagtggccccatgcccgactcctacagccctcggtatgtggaggctgcctggtacccttggtgggagcagcagggcttcttcaagccagagtatgggcgtcctaatgtgtcagcagcaaatccccgaggtgtcttcatgatgtgcatcccaccccccaatgtgacaggctccctgcacctgggccatgcactcaccaacgccatccaggactccctgactcgatggcaccgcatgcgtggggagaccaccctgtggaaccctggctgtgaccatgcaggtattgccacccaggtggtggtggagaagaagctatggcgtgagcagggactgagccggcaccagctgggccgcgaggcctttctacaggaagtctggaagtggaaggaggagaaaggtgaccggatttaccaccagttgaagaagcttggcagctccttggactgggatcgagcctgtttcaccatggaccctaaactctcagcagctgtgacagaggcctttgtccggcttcacgaggaaggcatcatctatcgcagtacccgccttgttaactggtcctgcaccctcaactccgccatctctgacattgaggtggataagaaggagctgacaggtcgcaccctgctctccgtgcctggctacaaggagaaggtggagttcggggtcctcgtgtcctttgcctataaggtccaaggctcagatagcgacgaggaggtggtggtggcaacaactcggatcgagacaatgctgggagatgtggctgtagctgtgcaccccaaagataccagataccagcacctgaaggggaagaacgtgatccacccattcctgtctcggagccttcccattgtcttcgatgaatttgtggacatggactttggcacaggtgctgtgaagatcacccccgcacatgaccaaaatgactatgaagttgggcagcggcacgggctggaggccatcagcatcatggactcccggggggccctcatcaatgtgcctccgcctttcctgggcctgcccaggtttgaggccaggaaagcggtgctggtggcgctgaaggagcggggactgttccgtggcattgaggacaaccccatggtggtgccactttgcaaccggtcgaaggacgtggtagagcctctgctgcggccgcagtggtacgttcgctgcggggagatggcccaggctgccagcgccgctgtgactcggggtgacctccgcatcctgcctgaggcccatcagcgcacatggcatgcctggatggacaacatccgggagtggtgcatttccaggcagctgtggtggggccatcgcatcccagcctactttgtcactgtcagtgacccagcggtgccccctggggaggaccctgatgggcggtactgggtgagtggacgcaatgaggcggaggcccgggagaaggcagccaaggagttcggagtgtcccctgacaagatcagtctccagcaagatgaggatgtattggatacctggttctcctctggcctcttccccttatccattttgggctggcccaaccagtcagaagacctgagtgtgttctaccccgggacactgctggagaccggtcatgacatcctcttcttctgggtggcccggatggtcatgctgggcctgaagctcacgggcaggctgccctttagagaggtctacctccatgccatcgtgcgagatgctcacggccggaagatgagcaagtctctaggcaatgtcatcgatcccctggacgtcatctatggaatctccctgcagggcctccacaaccagctgctgaacagcaacctggatcccagcgaggtggagaaggccaaagaagggcagaaagctgacttcccagcggggattcctgaatgtggcaccgatgctctccggtttggattatgtgcctacatgtcccagggtcgtgacatcaacctggatgtgaaccggatactgggttaccgccacttctgcaacaagctctggaatgccaccaagtttgcccttcgtggccttgggaagggttttgtgccctcacccacctcccagcccggaggccatgagagcctggtggaccgctggatccgcagccgcctgacagaggctgtgaggctcagcaatcaaggcttccaggcctacgacttcccggccgtcaccactgcccagtacagcttctggctctatgagctctgtgatgtctacttggagtgcctgaaacctgtactgaatggggtggaccaggtggcagctgagtgtgcccgccagaccctgtacacttgcctggacgttggcctgcggctgctctcacccttcatgcccttcgtgacggaggagctgttccagaggctgccccggaggatgccgcaagctccccctagcctctgtgttaccccctacccggagccctcagagtgctcctggaaggaccccgaggcagaagccgcccttgagctggcgctaagcatcacgcgagccgtgcgctccctgcgggccgactacaacctcacccggatccggcctgactgtttcctggaagtggcggatgaggccacgggcgccctggcatcggcggtgtcgggctacgtgcaggccctggccagcgcaggtgtggtggctgttctggccctgggggctcccgccccccagggttgcgctgtggctctggcttctgatcgctgctccatccacctgcagcttcaggggctggtggaccctgcacgggagctgggcaagctgcaagccaagcgagttgaggcccagcggcaggcccagcgtctgcgggaacgccgtgctgcctcgggctatcctgtcaaggtgccgctcgaagtccaggaggcagatgaagccaagctccaacagacagaagcagagctcaggaaggtggatgaggccatcgccctattccagaagatgctgtgatccaccacccagcttcacccctcacccccagcggctcaccatggggatggcagcaataaaatattttcccacaaaa

SEQ ID NO: 449707 - DNA, 4071 bp, Homo sapiens
  misc_feature (18)..(18): n is a, c, g, or t
cgctggtactggccgganttttgggagcccggaaacgctccctgtcacaaaggggggaacacgtgggcgccggctgccggggcggcgatcttagggaactagggtcacctggagagccgcccaccgtctctgcccgctcgactcctccgcccgggccgctcggccggtccagccgcggccggcgcctggctgtgaggtggattcccggcccagtctgaccatctccctccaatgccttccccagcctccgagccctcatagccgctcgctatggggaggctggggagggtcccggatggggaggagcccagccccgcatctgtctccagccacccccgactagcaggactccctttcccccaccccgcctgccggccctggagcaggggcccggtgggctctgggtgtggggggccacggctgtggcccagctgctgtggccagcaggcctggggggcccagggggcagccgggcggctgtccttgtccaacagtgggtcagttacgccgacacggagttaataccagctgcctgtggagcaacgctgccggccctgggactccgaagctcggcccaggacccccaggctgtgctgggggccctgggcagggccctgagccccttggaggagtggcttcggctgcacacctacttggccggggaggcccccactctggctgacctggcggctgtcacagccttgctgctgcctttccgatacgtcctagacccacctgcccgccggatctggaataatgtgactcgctggtttgtcacgtgtgtccggcagccagaattccgagccgtgctaggagaagtggttctatactcaggagccaggcctctctctcatcagccaggccccgaggctcctgccctcccaaagacagctgctcagctcaagaaagaggcaaagaaacgggagaagctagagaaattccaacagaagcagaagatccaacagcagcagccacctccaggggagaagaaaccaaaaccagagaagagggagaaacgggatcctggggtcattacctatgacctcccaaccccacccggggaaaagaaagatgtcagtggccccatgcccgactcctacagccctcggtatgtggaggctgcctggtacccttggtgggagcagcagggcttcttcaagccagagtatgggcgtcctaatgtgtcagcagcaaatccccgaggtgtcttcatgatgtgcatcccaccccccaatgtgacaggctccctgcacctgggccatgcactcaccaacgccatccaggactccctgactcgatggcaccgcatgcgtggggagaccaccctgtggaaccctggctgtgaccatgcaggtattgccacccaggtggtggtggagaagaagctatggcgtgagcagggactgagccggcaccagctgggccgcgaggcctttctacaggaagtctggaagtggaaggaggagaaaggtgaccggatttaccaccagttgaagaagcttggcagctccttggactgggatcgagcctgtttcaccatggaccctaaactctcagcagctgtgacagaggcctttgtccggcttcacgaggaaggcatcatctatcgcagtacccgccttgttaactggtcctgcaccctcaactccgccatctctgacattgaggtggataagaaggagctgacaggtcgcaccctgctctccgtgcctggctacaaggagaaggtggagttcggggtcctcgtgtcctttgcctataaggtccaaggctcagatagcgacgaggaggtggtggtggcaacaactcggatcgagacaatgctgggagatgtggctgtagctgtgcaccccaaagataccagataccagcacctgaaggggaagaacgtgatccacccattcctgtctcggagccttcccattgtcttcgatgaatttgtggacatggactttggcacaggtgctgtgaagatcacccccgcacatgaccaaaatgactatgaagttgggcagcggcacgggctggaggccatcagcatcatggactcccggggggccctcatcaatgtgcctccgcctttcctgggcctgcccaggtttgaggccaggaaagcggtgctggtggcgctgaaggagcggggactgttccgtggcattgaggacaaccccatggtggtgccactttgcaaccggtcgaaggacgtggtagagcctctgctgcggccgcagtggtacgttcgctgcggggagatggcccaggctgccagcgccgctgtgactcggggtgacctccgcatcctgcctgaggcccatcagcgcacatggcatgcctggatggacaacatccgggagtggtgcatttccaggcagctgtggtggggccatcgcatcccagcctactttgtcactgtcagtgacccagcggtgccccctggggaggaccctgatgggcggtactgggtgagtggacgcaatgaggcggaggcccgggagaaggcagccaaggagttcggagtgtcccctgacaagatcagtctccagcaagatgaggatgtattggatacctggttctcctctggcctcttccccttatccattttgggctggcccaaccagtcagaagacctgagtgtgttctaccccgggacactgctggagaccggtcatgacatcctcttcttctgggtggcccggatggtcatgctgggcctgaagctcacgggcaggctgccctttagagaggtctacctccatgccatcgtgcgagatgctcacggccggaagatgagcaagtctctaggcaatgtcatcgatcccctggacgtcatctatggaatctccctgcagggcctccacaaccagctgctgaacagcaacctggatcccagcgaggtggagaaggccaaagaagggcagaaagctgacttcccagcggggattcctgaatgtggcaccgatgctctccggtttggattatgtgcctacatgtcccagggtcgtgacatcaacctggatgtgaaccggatactgggttaccgccacttctgcaacaagctctggaatgccaccaagtttgcccttcgtggccttgggaagggttttgtgccctcacccacctcccagcccggaggccatgagagcctggtggaccgctggatccgcagccgcctgacagaggctgtgaggctcagcaatcaaggcttccaggcctacgacttcccggccgtcaccactgcccagtacagcttctggctctatgagctctgtgatgtctacttggagtgcctgaaacctgtactgaatggggtggaccaggtggcagctgagtgtgcccgccagaccctgtacacttgcctggacgttggcctgcggctgctctcacccttcatgcccttcgtgacggaggagctgttccagaggctgccccggaggatgccgcaagctccccctagcctctgtgttaccccctacccggagccctcagagtgctcctggaaggaccccgaggcagaagccgcccttgagctggcgctaagcatcacgcgagccgtgcgctccctgcgggccgactacaacctcacccggatccggcctgactgtttcctggaagtggcggatgaggccacgggcgccctggcatcggcggtgtcgggctacgtgcaggccctggccagcgcaggtgtggtggctgttctggccctgggggctcccgccccccagggttgcgctgtggctctggcttctgatcgctgctccatccacctgcagcttcaggggctggtggaccctgcacgggagctgggcaagctgcaagccaagcgagttgaggcccagcggcaggcccagcgtctgcgggaacgccgtgctgcctcgggctatcctgtcaaggtgccgctcgaagtccaggaggcagatgaagccaagctccaacagacagaagcagagctcaggaaggtggatgaggccatcgccctattccagaagatgctgtgatccaccacccagcttcacccctcacccccagcggctcaccatggggatggcagcaataaaatattttcccacaaaa

SEQ ID NO: 449708 - DNA, 4241 bp, Homo sapiens
cggccgcccccgccaggacccgcaggcccggaaacgctccctgtcacaaaggggggaacacgtgggcgccggctgccggggcggcgatcttagggaactagggtcacctggagagccgcccaccgtctctgcccgctcgactcctccgcccgggccgctcggccggtccagccgcggccggcgcctggctgtgaggtggattcccggcccagtctgaccatctccctccagtttttccacttcgttcggaccttctcataactatgtccaccctctacgtctcccctcacccagatgccttccccagcctccgagccctcatagccgctcgctatggggaggctggggagggtcccggatggggaggagcccagccccgcatctgtctccagccacccccgactagcaggactccctttcccccaccccgcctgccggccctggagcaggggcccggtgggctctgggtgtggggggccacggctgtggcccagctgctgtggccagcaggcctggggggcccagggggcagccgggcggctgtccttgtccaacagtgggtcagttacgccgacacggagttaataccagctgcctgtggagcaacgctgccggccctgggactccgaagctcggcccaggacccccaggctgtgctgggggccctgggcagggccctgagccccttggaggagtggcttcggctgcacacctacttggccggggaggcccccactctggctgacctggcggctgtcacagccttgctgctgcctttccgatacgtcctagacccacctgcccgccggatctggaataatgtgactcgctggtttgtcacgtgtgtccggcagccagaattccgagccgtgctaggagaagtggttctatactcaggagccaggcctctctctcatcagccaggccccgaggctcctgccctcccaaagacagctgctcagctcaagaaagaggcaaagaaacgggagaagctagagaaattccaacagaagcagaagatccaacagcagcagccacctccaggggagaagaaaccaaaaccagagaagagggagaaacgggatcctggggtcattacctatgacctcccaaccccacccggggaaaagaaagatgtcagtggccccatgcccgactcctacagccctcggtatgtggaggctgcctggtacccttggtgggagcagcagggcttcttcaagccagagtatgggcgtcctaatgtgtcagcagcaaatccccgaggtgtcttcatgatgtgcatcccaccccccaatgtgacaggctccctgcacctgggccatgcactcaccaacgccatccaggactccctgactcgatggcaccgcatgcgtggggagaccaccctgtggaaccctggctgtgaccatgcaggtattgccacccaggtggtggtggagaagaagctatggcgtgagcagggactgagccggcaccagctgggccgcgaggcctttctacaggaagtctggaagtggaaggaggagaaaggtgaccggatttaccaccagttgaagaagcttggcagctccttggactgggatcgagcctgtttcaccatggaccctaaactctcagcagctgtgacagaggcctttgtccggcttcacgaggaaggcatcatctatcgcagtacccgccttgttaactggtcctgcaccctcaactccgccatctctgacattgaggtggataagaaggagctgacaggtcgcaccctgctctccgtgcctggctacaaggagaaggtggagttcggggtcctcgtgtcctttgcctataaggtccaaggctcagatagcgacgaggaggtggtggtggcaacaactcggatcgagacaatgctgggagatgtggctgtagctgtgcaccccaaagataccagataccagcacctgaaggggaagaacgtgatccacccattcctgtctcggagccttcccattgtcttcgatgaatttgtggacatggactttggcacaggtgctgtgaagatcacccccgcacatgaccaaaatgactatgaagttgggcagcggcacgggctggaggccatcagcatcatggactcccggggggccctcatcaatgtgcctccgcctttcctgggcctgcccaggtttgaggccaggaaagcggtgctggtggcgctgaaggagcggggactgttccgtggcattgaggacaaccccatggtggtgccactttgcaaccggtcgaaggacgtggtagagcctctgctgcggccgcagtggtacgttcgctgcggggagatggcccaggctgccagcgccgctgtgactcggggtgacctccgcatcctgcctgaggcccatcagcgcacatggcatgcctggatggacaacatccggtgtgtagggtcctcagtgtgggaggggcttgccgagggctgagcagggctcactcgggccaggctccatcaggccctccctgatttctcctccccgacatttgcagggagtggtgcatttccaggcagctgtggtggggccatcgcatcccagcctactttgtcactgtcagtgacccagcggtgccccctggggaggaccctgatgggcggtactgggtgagtggacgcaatgaggcggaggcccgggagaaggcagccaaggagttcggagtgtcccctgacaagatcagtctccagcaagatgaggatgtattggatacctggttctcctctggcctcttccccttatccattttgggctggcccaaccagtcagaagacctgagtgtgttctaccccgggacactgctggagaccggtcatgacatcctcttcttctgggtggcccggatggtcatgctgggcctgaagctcacgggcaggctgccctttagagaggtctacctccatgccatcgtgcgagatgctcacggccggaagatgagcaagtctctaggcaatgtcatcgatcccctggacgtcatctatggaatctccctgcagggcctccacaaccagctgctgaacagcaacctggatcccagcgaggtggagaaggccaaagaagggcagaaagctgacttcccagcggggattcctgaatgtggcaccgatgctctccggtttggattatgtgcctacatgtcccagggtcgtgacatcaacctggatgtgaaccggatactgggttaccgccacttctgcaacaagctctggaatgccaccaagtttgcccttcgtggccttgggaagggttttgtgccctcacccacctcccagcccggaggccatgagagcctggtggaccgctggatccgcagccgcctgacagaggctgtgaggctcagcaatcaaggcttccaggcctacgacttcccggccgtcaccactgcccagtacagcttctggctctatgagctctgtgatgtctacttggagtgcctgaaacctgtactgaatggggtggaccaggtggcagctgagtgtgcccgccagaccctgtacacttgcctggacgttggcctgcggctgctctcacccttcatgcccttcgtgacggaggagctgttccagaggctgccccggaggatgccgcaagctccccctagcctctgtgttaccccctacccggagccctcagagtgctcctggaaggaccccgaggcagaagccgcccttgagctggcgctaagcatcacgcgagccgtgcgctccctgcgggccgactacaacctcacccggatccggcctgactgtttcctggaagtggcggatgaggccacgggcgccctggcatcggcggtgtcgggctacgtgcaggccctggccagcgcaggtgtggtggctgttctggccctgggggctcccgccccccagggttgcgctgtggctctggcttctgatcgctgctccatccacctgcagcttcaggggctggtggaccctgcacgggagctgggcaagctgcaagccaagcgagttgaggcccagcggcaggcccagcgtctgcgggaacgccgtgctgcctcgggctatcctgtcaaggtgccgctcgaagtccaggaggcagatgaagccaagctccaacagacagaagcagagctcaggaaggtggatgaggccatcgccctattccagaagatgctgtgatccaccacccagcttcacccctcacccccagcggctcaccatggggatggcagcaataaaatattttcccacaaaa

SEQ ID NO: 449709 - DNA, 3332 bp, Homo sapiens
cggccgcccccgccaggacccgcaggcccggaaacgctccctgtcacaaaggggggaacacgtgggcgccggctgccggggcggcgatcttagggaactagggtcacctggagagccgcccaccgtctctgcccgctcgactcctccgcccgggccgctcggccggtccagccgcggccggcgcctggctgtgaggtggattcccggcccagtctgaccatctccctccagtttttccacttcgttcggaccttctcataactatgtccaccctctacgtctcccctcacccagatgccttccccagcctccgagccctcatagccgctcgctatggggaggctggggagggtcccggatggggaggagcccagccccgcatctgtctccagccacccccgaccagcagggcttcttcaagccagagtatgggcgtcctaatgtgtcagcagcaaatccccgaggtgtcttcatgatgtgcatcccaccccccaatgtgacaggctccctgcacctgggccatgcactcaccaacgccatccaggactccctgactcgatggcaccgcatgcgtggggagaccaccctgtggaaccctggctgtgaccatgcaggtattgccacccaggtggtggtggagaagaagctatggcgtgagcagggactgagccggcaccagctgggccgcgaggcctttctacaggaagtctggaagtggaaggaggagaaaggtgaccggatttaccaccagttgaagaagcttggcagctccttggactgggatcgagcctgtttcaccatggaccctaaactctcagcagctgtgacagaggcctttgtccggcttcacgaggaaggcatcatctatcgcagtacccgccttgttaactggtcctgcaccctcaactccgccatctctgacattgaggtggataagaaggagctgacaggtcgcaccctgctctccgtgcctggctacaaggagaaggtggagttcggggtcctcgtgtcctttgcctataaggtccaaggctcagatagcgacgaggaggtggtggtggcaacaactcggatcgagacaatgctgggagatgtggctgtagctgtgcaccccaaagataccagataccagcacctgaaggggaagaacgtgatccacccattcctgtctcggagccttcccattgtcttcgatgaatttgtggacatggactttggcacaggtgctgtgaagatcacccccgcacatgaccaaaatgactatgaagttgggcagcggcacgggctggaggccatcagcatcatggactcccggggggccctcatcaatgtgcctccgcctttcctgggcctgcccaggtttgaggccaggaaagcggtgctggtggcgctgaaggagcggggactgttccgtggcattgaggacaaccccatggtggtgccactttgcaaccggtcgaaggacgtggtagagcctctgctgcggccgcagtggtacgttcgctgcggggagatggcccaggctgccagcgccgctgtgactcggggtgacctccgcatcctgcctgaggcccatcagcgcacatggcatgcctggatggacaacatccgggagtggtgcatttccaggcagctgtggtggggccatcgcatcccagcctactttgtcactgtcagtgacccagcggtgccccctggggaggaccctgatgggcggtactgggtgagtggacgcaatgaggcggaggcccgggagaaggcagccaaggagttcggagtgtcccctgacaagatcagtctccagcaagatgaggatgtattggatacctggttctcctctggcctcttccccttatccattttgggctggcccaaccagtcagaagacctgagtgtgttctaccccgggacactgctggagaccggtcatgacatcctcttcttctgggtggcccggatggtcatgctgggcctgaagctcacgggcaggctgccctttagagaggtctacctccatgccatcgtgcgagatgctcacggccggaagatgagcaagtctctaggcaatgtcatcgatcccctggacgtcatctatggaatctccctgcagggcctccacaaccagctgctgaacagcaacctggatcccagcgaggtggagaaggccaaagaagggcagaaagctgacttcccagcggggattcctgaatgtggcaccgatgctctccggtttggattatgtgcctacatgtcccagggtcgtgacatcaacctggatgtgaaccggatactgggttaccgccacttctgcaacaagctctggaatgccaccaagtttgcccttcgtggccttgggaagggttttgtgccctcacccacctcccagcccggaggccatgagagcctggtggaccgctggatccgcagccgcctgacagaggctgtgaggctcagcaatcaaggcttccaggcctacgacttcccggccgtcaccactgcccagtacagcttctggctctatgagctctgtgatgtctacttggagtgcctgaaacctgtactgaatggggtggaccaggtggcagctgagtgtgcccgccagaccctgtacacttgcctggacgttggcctgcggctgctctcacccttcatgcccttcgtgacggaggagctgttccagaggctgccccggaggatgccgcaagctccccctagcctctgtgttaccccctacccggagccctcagagtgctcctggaaggaccccgaggcagaagccgcccttgagctggcgctaagcatcacgcgagccgtgcgctccctgcgggccgactacaacctcacccggatccggcctgactgtttcctggaagtggcggatgaggccacgggcgccctggcatcggcggtgtcgggctacgtgcaggccctggccagcgcaggtgtggtggctgttctggccctgggggctcccgccccccagggttgcgctgtggctctggcttctgatcgctgctccatccacctgcagcttcaggggctggtggaccctgcacgggagctgggcaagctgcaagccaagcgagttgaggcccagcggcaggcccagcgtctgcgggaacgccgtgctgcctcgggctatcctgtcaaggtgccgctcgaagtccaggaggcagatgaagccaagctccaacagacagaagcagagctcaggaaggtggatgaggccatcgccctattccagaagatgctgtgatccaccacccagcttcacccctcacccccagcggctcaccatggggatggcagcaataaaatattttcccacaaaa

SEQ ID NO: 449710 - DNA, 4602 bp, Homo sapiens
cggccgcccccgccaggacccgcaggcccggaaacgctccctgtcacaaaggggggaacacgtgggcgccggctgccggggcggcgatcttagggaactagggtcacctggagagccgcccaccgtctctgcccgctcgactcctccgcccgggccgctcggccggtccagccgcggccggcgcctggctgtgaggtggattcccggcccagtctgaccatctccctccagtttttccacttcgttcggaccttctcataactatgtccaccctctacgtctcccctcacccagatgccttccccagcctccgagccctcatagccgctcgctatggggaggctggggagggtcccggatggggaggagcccagccccgcatctgtctccagccacccccgactagcaggactccctttcccccaccccgcctgccggccctggagcaggggcccggtgggctctgggtgtggggggccacggctgtggcccagctgctgtggccagcaggcctggggggcccagggggcagccgggcggctgtccttgtccaacagtgggtcagttacgccgacacggagttaataccagctgcctgtggagcaacgctgccggccctgggactccgaagctcggcccaggacccccaggctgtgctgggggccctgggcagggccctgagccccttggaggagtggcttcggctgcacacctacttggccggggaggcccccactctggctgacctggcggctgtcacagccttgctgctgcctttccgatacgtcctagacccacctgcccgccggatctggaataatgtgactcgctggtttgtcacgtgtgtccggcagccagaattccgagccgtgctaggagaagtggttctatactcaggagccaggcctctctctcatcagccaggccccgaggctcctgccctcccaaagacagctgctcagctcaagaaagaggcaaagaaacgggagaagctagagaaattccaacagaagcagaagatccaacagcagcagccacctccaggggagaagaaaccaaaaccagagaagagggagaaacgggatcctggggtcattacctatgacctcccaaccccacccggggaaaagaaagatgtcagtggccccatgcccgactcctacagccctcggtatgtggaggctgcctggtacccttggtgggagcagcagggcttcttcaagccagagtatgggcgtcctaatgtgtcagcagcaaatccccgaggtgtcttcatgatgtgcatcccaccccccaatgtgacaggctccctgcacctgggccatgcactcaccaacgccatccaggactccctgactcgatggcaccgcatgcgtggggagaccaccctgtggaaccctggctgtgaccatgcaggtattgccacccaggtggtggtggagaagaagctatggcgtgagcagggactgagccggcaccagctgggccgcgaggcctttctacaggaagtctggaagtggaaggaggagaaaggtgaccggatttaccaccagttgaagaagcttggcagctccttggactgggatcgagcctgtttcaccatggaccctaaactctcagcagctgtgacagaggcctttgtccggcttcacgaggaaggcatcatctatcgcagtacccgccttgttaactggtcctgcaccctcaactccgccatctctgacattgaggtggataagaaggagctgacaggtcgcaccctgctctccgtgcctggctacaaggagaaggtggagttcggggtcctcgtgtcctttgcctataaggtccaaggctcagatagcgacgaggaggtggtggtggcaacaactcggatcgagacaatgctgggagatgtggctgtagctgtgcaccccaaagataccagataccagcacctgaaggggaagaacgtgatccacccattcctgtctcggagccttcccattgtcttcgatgaatttgtggacatggactttggcacaggtgctgtgaagatcacccccgcacatgaccaaaatgactatgaagttgggcagcggcacgggctggaggccatcagcatcatggactcccggggggccctcatcaatgtgcctccgcctttcctgggcctgcccaggtttgaggccaggaaagcggtgctggtggcgctgaaggagcggggactgttccgtggcattgaggacaaccccatggtggtgccactttgcaaccggtcgaaggacgtggtagagcctctgctgcggccgcagtggtacgttcgctgcggggagatggcccaggctgccagcgccgctgtgactcggggtgacctccgcatcctgcctgaggcccatcagcgcacatggcatgcctggatggacaacatccgggagtggtgcatttccaggcagctgtggtggggccatcgcatcccagcctactttgtcactgtcagtgacccagcggtgccccctggggaggaccctgatgggcggtactgggtgagtggacgcaatgaggcggaggcccgggagaaggcagccaaggagttcggagtgtcccctgacaagatcagtctccagcaagatgaggatgtattggatacctggttctcctctggcctcttccccttatccattttgggctggcccaaccagtcagaagacctgagtgtgttctaccccgggacactgctggagaccggtcatgacatcctcttcttctgggtggcccggatggtcatgctgggcctgaagctcacgggcaggctgccctttagagaggtctacctccatgccatcgtgcgagatgctcacggccggaagatgagcaagtctctaggcaatgtcatcgatcccctggacgtcatctatggaatctccctgcagggcctccacaaccagctgctgaacagcaacctggatcccagcgaggtggagaaggccaaagaagggcagaaagctgacttcccagcggggattcctgaatgtggcaccgatgctctccggtttggattatgtgcctacatgtcccagggtcgtgacatcaacctggatgtgaaccggatactgggttaccgccacttctgcaacaagctctggaatgccaccaagtttgcccttcgtggccttgggaagggttttgtgccctcacccacctcccagcccggaggccatgagagcctggtggaccgctggatccgcagccgcctgacagaggctgtgaggctcagcaatcaaggcttccaggcctacgacttcccggccgtcaccactgcccagtacagcttctggctctatgagctctgtgatgtctacttggagtgcctgaaacctgtactgaatggggtggaccaggtggcagctgagtgtgcccgccagaccctgtacacttgcctggacgttggcctgcggctgctctcacccttcatgcccttcgtgacggaggagctgttccagaggctgccccggaggatgccgcaagctccccctagcctctgtgttaccccctacccggagccctcagagtgctcctggaaggaccccgaggcagaagccgcccttgagctggcgctaagcatcacgcgagccgtgcgctccctgcgggccgactacaacctcacccggatccggcctgactgtttcctggaagtggcggatgaggccacgggcgccctggcatcggcggtgtcgggctacgtgcaggccctggccagcgcaggtgtggtggctgttctggccctgggggctcccgccccccagggttgcgctgtggctctggcttctgatcgctgctccatccacctgcagcttcaggggctggtggaccctgcacgggagctgggcaagctgcaagccaagcgagttgaggcccagcggcaggcccagcgtctgcgggaacgccgtgctgcctcgggctatcctgtcaaggtgccgctcgaagtccaggaggcagatgaagccaagctccaacagacagaagcagagctcaggaaggtggatgaggccatcgccctattccagaagatgctgtgatccaccacccagcttcacccctcacccccagcggctcaccatggggatggcagcaataaaatattttcccacaaaaaaaaaaaaaaaaaaaaaaaaaacaaaaaaaaacaaaaaaacgagcacaaaaagaacaaaacacgatatcagaactcagcacgacaaagaagacgacacgtagacaagacctaacaccgatatgaagacacaacagaggaggagcggcggctgccgcgccgagtcagcagcgacaccggcgtggcgcggcgcacacccatacaagccggcagcggagcgcaagcagattgcatagatagtgagtgatggagagcgcagccaacataaaaagcgaggagacacagcgaaactacaagacgcaagacgagacggccgtgcgagaggcgagccaatcacaacaacacgcgagcaaaggaaaaagcaaaccaaagacaggacaggcgagaaagagagaagcaagaaggtcaccagcatcgcagagagagcaaggcagagcaaaagaagaagacaaaaaaagaaagacaacaag

SEQ ID NO: 449711 - DNA, 4062 bp, Homo sapiens
cggccgcccccgccaggacccgcaggcccggaaacgctccctgtcacaaaggggggaacacgtgggcgccggctgccggggcggcgatcttagggaactagggtcacctggagagccgcccaccgtctctgcccgctcgactcctccgcccgggccgctcggccggtccagccgcggccggcgcctggctgtgaggtggattcccggcccagtctgaccatctccctccagtttttccacttcgttcggaccttctcataactatgtccaccctctacgtctcccctcacccagatgccttccccagcctccgagccctcatagccgctcgctatggggaggctggggagggtcccggatggggaggagcccagccccgcatctgtctccagccacccccgactagcaggactccctttcccccaccccgcctgccggccctggagcaggggcccggtgggctctgggtgtggggggccacggctgtggcccagctgctgtggccagcaggcctggggggcccagggggcagccgggcggctgtccttgtccaacagtgggtcagttacgccgacacggagttaataccagctgcctgtggagcaacgctgccggccctgggactccgaagctcggcccaggacccccaggctgtgctgggggccctgggcagggccctgagccccttggaggagtggcttcggctgcacacctacttggccggggaggcccccactctggctgacctggcggctgtcacagccttgctgctgcctttccgatacgtcctagacccacctgcccgccggatctggaataatgtgactcgctggtttgtcacgtgtgtccggcagccagaattccgagccgtgctaggagaagtggttctatactcaggagccaggcctctctctcatcagccaggccccgaggctcctgccctcccaaagacagctgctcagctcaagaaagaggcaaagaaacgggagaagctagagaaattccaacagaagcagaagatccaacagcagcagccacctccaggggagaagaaaccaaaaccagagaagagggagaaacgggatcctggggtcattacctatgacctcccaaccccacccggggaaaagaaagatgtcagtggccccatgcccgactcctacagccctcggtatgtggaggctgcctggtacccttggtgggagcagcagggcttcttcaagccagagtatgggcgtcctaatgtgtcagcagcaaatccccgaggtgtcttcatgatgtgcatcccaccccccaatgtgacaggctccctgcacctgggccatgcactcaccaacgccatccaggactccctgactcgatggcaccgcatgcgtggggagaccaccctgtggaaccctggctgtgaccatgcaggtattgccacccaggtggtggtggagaagaagctatggcgtgagcagggactgagccggcaccagctgggccgcgaggcctttctacaggaagtctggaagtggaaggaggagaaaggtgaccggatttaccaccagttgaagaagcttggcagctccttggactgggatcgagcctgtttcaccatggaccctaaactctcagcagctgtgacagaggcctttgtccggcttcacgaggaaggcatcatctatcgcagtacccgccttgttaactggtcctgcaccctcaactccgccatctctgacattgaggtggataagaaggagctgacaggtcgcaccctgctctccgtgcctggctacaaggagaaggtggagttcggggtcctcgtgtcctttgcctataaggtccaaggctcagatagcgacgaggaggtggtggtggcaacaactcggatcgagacaatgctgggagatgtggctgtagctgtgcaccccaaagataccagataccagcacctgaaggggaagaacgtgatccacccattcctgtctcggagccttcccattgtcttcgatgaatttgtggacatggactttggcacaggtgctgtgaagatcacccccgcacatgaccaaaatgactatgaagttgggcagcggcacgggctggaggccatcagcatcatggactcccggggggccctcatcaatgtgcctccgcctttcctgggcctgcccaggtttgaggccaggaaagcggtgctggtggcgctgaaggagcggggactgttccgtggcattgaggacaaccccatggtggtgccactttgcaaccggtcgaaggacgtggtagagcctctgctgcggccgcagtggtacgttcgctgcggggagatggcccaggctgccagcgccgctgtgactcggggtgacctccgcatcctgcctgaggcccatcagcgcacatggcatgcctggatggacaacatccgggagtggtgcatttccaggcagctgtggtggggccatcgcatcccagcctactttgtcactgtcagtgacccagcggtgccccctggggaggaccctgatgggcggtactgggtgagtggacgcaatgaggcggaggcccgggagaaggcagccaaggagttcggagtgtcccctgacaagatcagtctccagcaagatgaggatgtattggatacctggttctcctctggcctcttccccttatccattttgggctggcccaaccagtcagaagacctgagtgtgttctaccccgggacactgctggagaccggtcatgacatcctcttcttctgggtggcccggatggtcatgctgggcctgaagctcacgggcaggctgccctttagagaggtctacctccatgccatcgtgcgagatgctcacggccggaagatgagcaagtctctaggcaatgtcatcgatcccctggacgtcatctatggaatctccctgcagggcctccacaaccagctgctgaacagcaacctggatcccagcgaggtggagaaggccaaagaagggcagaaagctgacttcccagcggggattcctgaatgtggcaccgatgctctccggtttggattatgtgcctacatgtcccagggtcgtgacatcaacctggatgtgaaccggatactgggttaccgccacttctgcaacaagctctggaatgccaccaagtttgcccttcgtggccttgggaagggttttgtgccctcacccacctcccagcccggaggccatgagagcctggtggaccgctggatccgcagccgcctgacagaggctgtgaggctcagcaatcaaggcttccaggcctacgacttcccggccgtcaccactgcccagtacagcttctggctctatgagctctgtgatgtctacttggagtgcctgaaacctgtactgaatggggtggaccaggtggcagctgagtgtgcccgccagaccctgtacacttgcctggacgttggcctgcggctgctctcacccttcatgcccttcgtgacggaggagctgttccagaggctgccccggaggatgccgcaagctccccctagcctctgtgttaccccctacccggagccctcagagtgctcctggaaggaccccgaggcagaagccgcccttgagctggcgctaagcatcacgcgagccgtgcgctccctgcgggccgactacaacctcacccggatccggcctgactgtttcctggaagtggcggatgaggccacgggcgccctggcatcggcggtgtcgggctacgtgcaggccctggccagcgcaggtgtggtggctgttctggccctgggggctcccgccccccagggttgcctgggcaagctgcaagccaagcgagttgaggcccagcggcaggcccagcgtctgcgggaacgccgtgctgcctcgggctatcctgtcaaggtgccgctcgaagtccaggaggcagatgaagccaagctccaacagacagaagcagagctcaggaaggtggatgaggccatcgccctattccagaagatgctgtgatccaccacccagcttcacccctcacccccagcggctcaccatggggatggcagcaataaaatattttcccacaaaa

SEQ ID NO: 449712 - DNA, 4307 bp, Homo sapiens
cggccgcccccgccaggacccgcaggcccggaaacgctccctgtcacaaaggggggaacacgtgggcgccggctgccggggcggcgatcttagggaactagggtcacctggagagccgcccaccgtctctgcccgctcgactcctccgcccgggccgctcggccggtccagccgcggccggcgcctggctgtgaggtggattcccggcccagtctgaccatctccctccagtttttccacttcgttcggaccttctcataactatgtccaccctctacgtctcccctcacccagatgccttccccagcctccgagccctcatagccgctcgctatggggaggctggggagggtcccggatggggaggagcccagccccgcatctgtctccagccacccccgactagcaggactccctttcccccaccccgcctgccggccctggagcaggggcccggtgggctctgggtgtggggggccacggctgtggcccagctgctgtggccagcaggcctggggggcccagggggcagccgggcggctgtccttgtccaacagtgggtcagttacgccgacacggagttaataccagctgcctgtggagcaacgctgccggccctgggactccgaagctcggcccaggacccccaggctgtgctgggggccctgggcagggccctgagccccttggaggagtggcttcggctgcacacctacttggccggggaggcccccactctggctgacctggcggctgtcacagccttgctgctgcctttccgatacgtcctagacccacctgcccgccggatctggaataatgtgactcgctggtttgtcacgtgtgtccggcagccagaattccgagccgtgctaggagaagtggttctatactcaggagccaggcctctctctcatcagccaggccccgaggctcctgccctcccaaagacagctgctcagctcaagaaagaggcaaagaaacgggagaagctagagaaattccaacagaagcagaagatccaacagcagcagccacctccaggggagaagaaaccaaaaccagagaagagggagaaacgggatcctggggtcattacctatgacctcccaaccccacccggggaaaagaaagatgtcagtggccccatgcccgactcctacagccctcggtatgtggaggctgcctggtacccttggtgggagcagcagggcttcttcaagccagagtatgggcgtcctaatgtgtcagcagcaaatccccgaggtgtcttcatgatgtgcatcccaccccccaatgtgacaggctccctgcacctgggccatgcactcaccaacgccatccaggactccctgactcgatggcaccgcatgcgtggggagaccaccctgtggaaccctggctgtgaccatgcaggtattgccacccaggtggtggtggagaagaagctatggcgtgagcagggactgagccggcaccagctgggccgcgaggcctttctacaggaagtctggaagtggaaggaggagaaaggtgaccggatttaccaccagttgaagaagcttggcagctccttggactgggatcgagcctgtttcaccatggaccctaaactctcagcagctgtgacagaggcctttgtccggcttcacgaggaaggcatcatctatcgcagtacccgccttgttaactggtcctgcaccctcaactccgccatctctgacattgaggtggataagaaggagctgacaggtcgcaccctgctctccgtgcctggctacaaggagaaggtggagttcggggtcctcgtgtcctttgcctataaggtccaaggctcagatagcgacgaggaggtggtggtggcaacaactcggatcgagacaatgctgggagatgtggctgtagctgtgcaccccaaagataccagataccagcacctgaaggggaagaacgtgatccacccattcctgtctcggagccttcccattgtcttcgatgaatttgtggacatggactttggcacaggtgctgtgaagatcacccccgcacatgaccaaaatgactatgaagttgggcagcggcacgggctggaggccatcagcatcatggactcccggggggccctcatcaatgtgcctccgcctttcctggtgaggctgcctgaggcaagagtgcccgggtcagggagatggagggatggctgggcatcgccatgatgaggcctcattcctacccagggcctgcccaggtttgaggccaggaaagcggtgctggtggcgctgaaggagcggggactgttccgtggcattgaggacaaccccatggtggtgccactttgcaagtgagggtgggggcctgggacgggaggaagatggagggctcctcagggttttaccgcctggccttctcacctacgtgtacccccagccggtcgaaggacgtggtagagcctctgctgcggccgcagtggtacgttcgctgcggggagatggcccaggctgccagcgccgctgtgactcggggtgacctccgcatcctgcctgaggcccatcagcgcacatggcatgcctggatggacaacatccgggagtggtgcatttccaggcagctgtggtggggccatcgcatcccagcctactttgtcactgtcagtgacccagcggtgccccctggggaggaccctgatgggcggtactgggtgagtggacgcaatgaggcggaggcccgggagaaggcagccaaggagttcggagtgtcccctgacaagatcagtctccagcaagatgaggatgtattggatacctggttctcctctggcctcttccccttatccattttgggctggcccaaccagtcagaagacctgagtgtgttctaccccgggacactgctggagaccggtcatgacatcctcttcttctgggtggcccggatggtcatgctgggcctgaagctcacgggcaggctgccctttagagaggtctacctccatgccatcgtgcgagatgctcacggccggaagatgagcaagtctctaggcaatgtcatcgatcccctggacgtcatctatggaatctccctgcagggcctccacaaccagctgctgaacagcaacctggatcccagcgaggtggagaaggccaaagaagggcagaaagctgacttcccagcggggattcctgaatgtggcaccgatgctctccggtttggattatgtgcctacatgtcccagggtcgtgacatcaacctggatgtgaaccggatactgggttaccgccacttctgcaacaagctctggaatgccaccaagtttgcccttcgtggccttgggaagggttttgtgccctcacccacctcccagcccggaggccatgagagcctggtggaccgctggatccgcagccgcctgacagaggctgtgaggctcagcaatcaaggcttccaggcctacgacttcccggccgtcaccactgcccagtacagcttctggctctatgagctctgtgatgtctacttggagtgcctgaaacctgtactgaatggggtggaccaggtggcagctgagtgtgcccgccagaccctgtacacttgcctggacgttggcctgcggctgctctcacccttcatgcccttcgtgacggaggagctgttccagaggctgccccggaggatgccgcaagctccccctagcctctgtgttaccccctacccggagccctcagagtgctcctggaaggaccccgaggcagaagccgcccttgagctggcgctaagcatcacgcgagccgtgcgctccctgcgggccgactacaacctcacccggatccggcctgactgtttcctggaagtggcggatgaggccacgggcgccctggcatcggcggtgtcgggctacgtgcaggccctggccagcgcaggtgtggtggctgttctggccctgggggctcccgccccccagggttgcgctgtggctctggcttctgatcgctgctccatccacctgcagcttcaggggctggtggaccctgcacgggagctgggcaagctgcaagccaagcgagttgaggcccagcggcaggcccagcgtctgcgggaacgccgtgctgcctcgggctatcctgtcaaggtgccgctcgaagtccaggaggcagatgaagccaagctccaacagacagaagcagagctcaggaaggtggatgaggccatcgccctattccagaagatgctgtgatccaccacccagcttcacccctcacccccagcggctcaccatggggatggcagcaataaaatattttcccacaaaa

SEQ ID NO: 449713 - DNA, 3276 bp, Homo sapiens
  misc_feature (3236)..(3237): n is a, c, g, or t
cggccgcccccgccaggacccgcaggcccggaaacgctccctgtcacaaaggggggaacacgtgggcgccggctgccggggcggcgatcttagggaactagggtcacctggagagccgcccaccgtctctgcccgctcgactcctccgcccgggccgctcggccggtccagccgcggccggcgcctggctgtgaggtggattcccggcccagtctgaccatctccctccagtttttccacttcgttcggaccttctcataactatgtccaccctctacgtctcccctcacccagatgccttccccagcctccgagccctcatagccgctcgctatggggaggctggggagggtcccggatggggaggagcccagccccgcatctgtctccagccacccccgactagcaggactccctttcccccaccccgcctgccggccctggagcaggggcccggtgggctctgggtgtggggggccacggctgtggcccagctgctgtggccagcaggcctggggggcccagggggcagccgggcggctgtccttgtccaacagtgggtcagttacgccgacacggagttaataccagctgcctgtggagcaacgctgccggccctgggactccgaagctcggcccaggacccccaggctgtgctgggggccctgggcagggccctgagccccttggaggagtggcttcggctgcacacctacttggccggggaggcccccactctggctgacctggcggctgtcacagccttgctgctgcctttccgatacgtcctagacccacctgcccgccggatctggaataatgtgactcgctggtttgtcacgtgtgtccggcagccagaattccgagccgtgctaggagaagtggttctatactcaggagccaggcctctctctcatcagccaggccccgaggctcctgccctcccaaagacagctgctcagctcaagaaagaggcaaagaaacgggagaagctagagaaattccaacagaagcagaagatccaacagcagcagccacctccaggggagaagaaaccaaaaccagagaagagggagaaacgggatcctggggtcattacctatgacctcccaaccccacccggggaaaagaaagatgtcagtggccccatgcccgactcctacagccctcggtatgtggaggctgcctggtacccttggtgggagcagcagggcttcttcaagccagagtatgggcgtcctaatgtgtcagcagcaaatccccgaggtgtcttcatgatgtgcatcccaccccccaatgtgacaggctccctgcacctgggccatgcactcaccaacgccatccaggactccctgactcgatggcaccgcatgcgtggggagaccaccctgtggaaccctggctgtgaccatgcaggtattgccacccaggtggtggtggagaagaagctatggcgtgagcagggactgagccggcaccagctgggccgcgaggcctttctacaggaagtctggaagtggaaggaggagaaaggtgaccggatttaccaccagttgaagaagcttggcagctccttggactgggatcgagcctgtttcaccatggaccctaaactctcagcagctgtgacagaggcctttgtccggcttcacgaggaaggcatcatctatcgcagtacccgccttgttaactggtcctgcaccctcaactccgccatctctgacattgaggtggataagaaggagctgacaggtcgcaccctgctctccgtgcctggctacaaggagaaggtggagttcggggtcctcgtgtcctttgcctataaggtccaaggctcagatagcgacgaggaggtggtggtggcaacaactcggatcgagacaatgctgggagatgtggctgtagctgtgcaccccaaagataccagataccagcacctgaaggggaagaacgtgatccacccattcctgtctcggagccttcccattgtcttcgatgaatttgtggacatggactttggcacaggtgctgtgaagatcacccccgcacatgaccaaaatgactatgaagttgggcagcggcacgggctggaggccatcagcatcatggactcccggggggccctcatcaatgtgcctccgcctttcctgggcctgcccaggtttgaggccaggaaagcggtgctggtggcgctgaaggagcggggactgttccgtggcattgaggacaaccccatggtggtgccactttgcaaccggtcgaaggacgtggtagagcctctgctgcggccgcagtggtacgttcgctgcggggagatggcccaggctgccagcgccgctgtgactcggggtgacctccgcatcctgcctgaggcccatcagcgcacatggcatgcctggatggacaacatccgggagtggtgcatttccaggcagctgtggtggggccatcgcatcccagcctactttgtcactgtcagtgacccagcggtgccccctggggaggaccctgatgggcggtactgggtgagtggacgcaatgaggcggaggcccgggagaaggcagccaaggagttcggagtgtcccctgacaagatcagtctccagcaagatgaggatgtattggatacctggttctcctctggcctcttccccttatccattttgggctggcccaaccagtcagaagacctgagtgtgttctaccccgggacactgctggagaccggtcatgacatcctcttcttctgggtggcccggatggtcatgctgggcctgaagctcacgggcaggctgccctttagagaggtctacctccatgccatcgtgcgagatgctcacggccggaagatgagcaagtctctaggcaatgtcatcgatcccctggacgtcatctatggaatctccctgcagggcctccacaaccagctgctgaacagcaacctggatcccagcgaggtggagaaggccaaagaagggcagaaagctgacttcccagcggggattcctgaatgtggcaccgatgctctccggtttggattatgtgcctacatgtcccagggtcgtgacatcaacctggatgtgaaccggatactgggttaccgccacttctgcaacaagctctggaatgccaccaagtttgcccttcgtggccttgggaagggttttgtgccctcacccacctcccagccggaggcctgagagctgtggacgtggatccgcagccgctgacagagnntgggggtcacctcagggtccgcgtacgatccggcggccc

SEQ ID NO: 449714 - DNA, 2619 bp, Homo sapiens
cacacaccaccacccaaccccaaataggctaggtacgaggcgggtgtgaatcggccgaggcttgttaactggtcctgcaccctcaactccgccatctctgacattgaggtggataagaaggagctgacaggtcgcaccctgctctccgtgcctggctacaaggagaaggtggagttcggggtcctcgtgtcctttgcctataaggtccaaggctcagatagcgacgaggaggtggtggtggcaacaactcggatcgagacaatgctgggagatgtggctgtagctgtgcaccccaaagataccagataccagcacctgaaggggaagaacgtgatccacccattcctgtctcggagccttcccattgtcttcgatgaatttgtggacatggactttggcacaggtgctgtgaagatcacccccgcacatgaccaaaatgactatgaagttgggcagcggcacgggctggaggccatcagcatcatggactcccggggggccctcatcaatgtgcctccgcctttcctgggcctgcccaggtttgaggccaggaaagcggtgctggtggcgctgaaggagcggggactgttccgtggcattgaggacaaccccatggtggtgccactttgcaaccggtcgaaggacgtggtagagcctctgctgcggccgcagtggtacgttcgctgcggggagatggcccaggctgccagcgccgctgtgactcggggtgacctccgcatcctgcctgaggcccatcagcgcacatggcatgcctggatggacaacatccggtgtgtagggtcctcagtgtgggaggggcttgccgagggctgagcagggctcactcgggccaggctccatcaggccctccctgatttctcctccccgacatttgcagggagtggtgcatttccaggcagctgtggtggggccatcgcatcccagcctactttgtcactgtcagtgacccagcggtgccccctggggaggaccctgatgggcggtactgggtgagtggacgcaatgaggcggaggcccgggagaaggcagccaaggagttcggagtgtcccctgacaagatcagtctccagcaagatgaggatgtattggatacctggttctcctctggcctcttccccttatccattttgggctggcccaaccagtcagaagacctgagtgtgttctaccccgggacactgctggagaccggtcatgacatcctcttcttctgggtggcccggatggtcatgctgggcctgaagctcacgggcaggctgccctttagagaggtctacctccatgccatcgtgcgagatgctcacggccggaagatgagcaagtctctaggcaatgtcatcgatcccctggacgtcatctatggaatctccctgcagggcctccacaaccagctgctgaacagcaacctggatcccagcgaggtggagaaggccaaagaagggcagaaagctgacttcccagcggggattcctgaatgtggcaccgatgctctccggtttggattatgtgcctacatgtcccagggtcgtgacatcaacctggatgtgaaccggatactgggttaccgccacttctgcaacaagctctggaatgccaccaagtttgcccttcgtggccttgggaagggttttgtgccctcacccacctcccagcccggaggccatgagagcctggtggaccgctggatccgcagccgcctgacagaggctgtgaggctcagcaatcaaggcttccaggcctacgacttcccggccgtcaccactgcccagtacagcttctggctctatgagctctgtgatgtctacttggagtgcctgaaacctgtactgaatggggtggaccaggtggcagctgagtgtgcccgccagaccctgtacacttgcctggacgttggcctgcggctgctctcacccttcatgcccttcgtgacggaggagctgttccagaggctgccccggaggatgccgcaagctccccctagcctctgtgttaccccctacccggagccctcagagtgctcctggaaggaccccgaggcagaagccgcccttgagctggcgctaagcatcacgcgagccgtgcgctccctgcgggccgactacaacctcacccggatccggcctgactgtttcctggaagtggcggatgaggccacgggcgccctggcatcggcggtgtcgggctacgtgcaggccctggccagcgcaggtgtggtggctgttctggccctgggggctcccgccccccagggttgcgctgtggctctggcttctgatcgctgctccatccacctgcagcttcaggggctggtggaccctgcacgggagctgggcaagctgcaagccaagcgagttgaggcccagcggcaggcccagcgtctgcgggaacgccgtgctgcctcgggctatcctgtcaaggtgccgctcgaagtccaggaggcagatgaagccaagctccaacagacagaagcagagctcaggaaggtggatgaggccatcgccctattccagaagatgctgtgatccaccacccagcttcacccctcacccccagcggctcaccatggggatggcagcaataaaatattttcccacaaaa

SEQ ID NO: 449715 - DNA, 2980 bp, Homo sapiens
cacacaccaccacccaaccccaaataggctaggtacgaggcgggtgtgaatcggccgaggcctgtggaaccctggctgtgaccatgcaggtattgccacccaggtggtggtggagaagaagctatggcgtgagcagggactgagccggcaccagctgggccgcgaggcctttctacaggaagtctggaagtggaaggaggagaaaggtgaccggatttaccaccagttgaagaagcttggcagctccttggactgggatcgagcctgtttcaccatggaccctaaactctcagcagctgtgacagaggcctttgtccggcttcacgaggaaggcatcatctatcgcagtacccgccttgttaactggtcctgcaccctcaactccgccatctctgacattgaggtggataagaaggagctgacaggtcgcaccctgctctccgtgcctggctacaaggagaaggtggagttcggggtcctcgtgtcctttgcctataaggtccaaggctcagatagcgacgaggaggtggtggtggcaacaactcggatcgagacaatgctgggagatgtggctgtagctgtgcaccccaaagataccagataccagcacctgaaggggaagaacgtgatccacccattcctgtctcggagccttcccattgtcttcgatgaatttgtggacatggactttggcacaggtgctgtgaagatcacccccgcacatgaccaaaatgactatgaagttgggcagcggcacgggctggaggccatcagcatcatggactcccggggggccctcatcaatgtgcctccgcctttcctggtgaggctgcctgaggcaagagtgcccgggtcagggagatggagggatggctgggcatcgccatgatgaggcctcattcctacccagggcctgcccaggtttgaggccaggaaagcggtgctggtggcgctgaaggagcggggactgttccgtggcattgaggacaaccccatggtggtgccactttgcaagtgagggtgggggcctgggacgggaggaagatggagggctcctcagggttttaccgcctggccttctcacctacgtgtacccccagccggtcgaaggacgtggtagagcctctgctgcggccgcagtggtacgttcgctgcggggagatggcccaggctgccagcgccgctgtgactcggggtgacctccgcatcctgcctgaggcccatcagcgcacatggcatgcctggatggacaacatccgggagtggtgcatttccaggcagctgtggtggggccatcgcatcccagcctactttgtcactgtcagtgacccagcggtgccccctggggaggaccctgatgggcggtactgggtgagtggacgcaatgaggcggaggcccgggagaaggcagccaaggagttcggagtgtcccctgacaagatcagtctccagcaagatgaggatgtattggatacctggttctcctctggcctcttccccttatccattttgggctggcccaaccagtcagaagacctgagtgtgttctaccccgggacactgctggagaccggtcatgacatcctcttcttctgggtggcccggatggtcatgctgggcctgaagctcacgggcaggctgccctttagagaggtctacctccatgccatcgtgcgagatgctcacggccggaagatgagcaagtctctaggcaatgtcatcgatcccctggacgtcatctatggaatctccctgcagggcctccacaaccagctgctgaacagcaacctggatcccagcgaggtggagaaggccaaagaagggcagaaagctgacttcccagcggggattcctgaatgtggcaccgatgctctccggtttggattatgtgcctacatgtcccagggtcgtgacatcaacctggatgtgaaccggatactgggttaccgccacttctgcaacaagctctggaatgccaccaagtttgcccttcgtggccttgggaagggttttgtgccctcacccacctcccagcccggaggccatgagagcctggtggaccgctggatccgcagccgcctgacagaggctgtgaggctcagcaatcaaggcttccaggcctacgacttcccggccgtcaccactgcccagtacagcttctggctctatgagctctgtgatgtctacttggagtgcctgaaacctgtactgaatggggtggaccaggtggcagctgagtgtgcccgccagaccctgtacacttgcctggacgttggcctgcggctgctctcacccttcatgcccttcgtgacggaggagctgttccagaggctgccccggaggatgccgcaagctccccctagcctctgtgttaccccctacccggagccctcagagtgctcctggaaggaccccgaggcagaagccgcccttgagctggcgctaagcatcacgcgagccgtgcgctccctgcgggccgactacaacctcacccggatccggcctgactgtttcctggaagtggcggatgaggccacgggcgccctggcatcggcggtgtcgggctacgtgcaggccctggccagcgcaggtgtggtggctgttctggccctgggggctcccgccccccagggttgcgctgtggctctggcttctgatcgctgctccatccacctgcagcttcaggggctggtggaccctgcacgggagctgggcaagctgcaagccaagcgagttgaggcccagcggcaggcccagcgtctgcgggaacgccgtgctgcctcgggctatcctgtcaaggtgccgctcgaagtccaggaggcagatgaagccaagctccaacagacagaagcagagctcaggaaggtggatgaggccatcgccctattccagaagatgctgtgatccaccacccagcttcacccctcacccccagcggctcaccatggggatggcagcaataaaatattttcccacaaaa

SEQ ID NO: 449716 - DNA, 1737 bp, Homo sapiens
  misc_feature (1)..(1): n is a, c, g, or t
nattggtgtgggctatgtggattccacattactttgtcactggtaatgtgaccagcggtgccccctgggtgaggtctcttgattggggcggataccttggttatgctgacgcaatgagagcggatgtcccgcgagaaaagcagccaaagtatgttccggaagtttccctcgtgacaaggatccagttctctcaagcaaagactgagggatgtacttgggaatacactggtttctcctctgggcctttgttccccgtaatcccattttgggcctgccccaaccagtcagaagacctgagtgtgttctaccccgggacactgctggagaccggtcatgacatcctcttcttctgggtggcccggatggtcatgctgggcctgaagctcacgggcaggctgccctttagagaggtctacctccatgccatcgtgcgagatgctcacggccggaagatgagcaagtctctaggcaatgtcatcgatcccctggacgtcatctatggaatctccctgcagggcctccacaaccagctgctgaacagcaacctggatcccagcgaggtggagaaggccaaagaagggcagaaagctgacttcccagcggggattcctgaatgtggcaccgatgctctccggtttggattatgtgcctacatgtcccagggtcgtgacatcaacctggatgtgaaccggatactgggttaccgccacttctgcaacaagctctggaatgccaccaagtttgcccttcgtggccttgggaagggttttgtgccctcacccacctcccagcccggaggccatgagagcctggtggaccgctggatccgcagccgcctgacagaggctgtgaggctcagcaatcaaggcttccaggcctacgacttcccggccgtcaccactgcccagtacagcttctggctctatgagctctgtgatgtctacttggagtgcctgaaacctgtactgaatggggtggaccaggtggcagctgagtgtgcccgccagaccctgtacacttgcctggacgttggcctgcggctgctctcacccttcatgcccttcgtgacggaggagctgttccagaggctgccccggaggatgccgcaagctccccctagcctctgtgttaccccctacccggagccctcagagtgctcctggaaggaccccgaggcagaagccgcccttgagctggcgctaagcatcacgcgagccgtgcgctccctgcgggccgactacaacctcacccggatccggcctgactgtttcctggaagtggcggatgaggccacgggcgccctggcatcggcggtgtcgggctacgtgcaggccctggccagcgcaggtgtggtggctgttctggccctgggggctcccgccccccagggttgcgctgtggctctggcttctgatcgctgctccatccacctgcagcttcaggggctggtggaccctgcacgggagctgggcaagctgcaagccaagcgagttgaggcccagcggcaggcccagcgtctgcgggaacgccgtgctgcctcgggctatcctgtcaaggtgccgctcgaagtccaggaggcagatgaagccaagctccaacagacagaagcagagctcaggaaggtggatgaggccatcgccctattccagaagatgctgtgatccaccacccagcttcacccctcacccccagcggctcaccatggggatggcagcaataaaatattttcccacaaaa

SEQ ID NO: 449717 - DNA, 1058 bp, Homo sapiens
  misc_feature (18)..(18): n is a, c, g, or t
cgctggtactggccgganttttgggagcccggaaacgctccctgtcacaaaggggggaacacgtgggcgccggctgccggggcggcgatcttagggaactagggtcacctggagagccgcccaccgtctctgcccgctcgactcctccgcccgggccgctcggccggtccagccgcggccggcgcctggctgtgaggtggattcccggcccagtctgaccatctccctccagtttttccacttcgttcggaccttctcataactatgtccaccctctacgtctcccctcacccagatgccttccccagcctccgagccctcatagccgctcgctatggggaggctggggagggtcccggatggggctggcggaaggacgccacaaacccacgacatcgtgatctccacgcccaaacacccagacataagcagagaactccgcattaaccacaacaacacaagaacaagaccagcgaccctgtgaagcaacgaccgacacaggaagacgagcacctagaagacgatagacgagggcacaaggacatagaaagagcccagccagcaagcaagcccagcaaggacaagacgacgagaccccacgagagtacagacaaactgaacggaaaagccacacaatgcaaccaaaacacgaatgccgacaaacaatacaaaccggaaacacacgggagaataaaacaaacaagcacggcaacagcgaagacaagcaaaaacaacgaacggagaccccgacgatcgaacgagcaccaaaccacaccataggaggacgaccaaagaacaccaaccaaggacacagatacacaggacgagcagccccatcgggcggacaaaggagccaccccggcagcacacagcccatgcagacggccaaaaggacacccaagaccctgaacacaacaccagaacagggagaacaccccagaaacggaaccaccacacaaaaatggccaagcaacaccacgacatccatgacacacaacaacccagtgcgcaagagcgagcacacaccccaccaaacccacggacaacccacacacgac

SEQ ID NO: 449718 - DNA, 1087 bp, Homo sapiens
gttgacactcaaatggtaaattatacattctctatcagcataacactactataacaggaattttcaatttcagaaattttagttaaattatttcaggtagatatttttaggagaagtatcattggatagttaagccatgtctatgtgccttaaaaacagtctccagcaatagccataaggaacttaatttgtagattaattaagacaggtatcagaatatggctatgtagaattaaaggtattttgatactgtttggggcagacctttccagttatatgcttgcagcacatgaacgggtcatatagctcttggtgtaagtgggtgggtaagtaaatggcttgagccatttagaactaaagatcggtaacctgtctacctgcaagcagtctcattaatttaataggccccagtgtatagcataagtatcattttctaagaaaaaagatgggaagtattgggttgaagaactttggcttacgtttccatgctgggcataattgatgcagatgtgaaaacacatcgcatggcctcgtttgaatgtgtgctacccttctcaaccgtaggcatttttctggaccataagtcagtatacccttcttccctcccccagatctctaattttgctgtgccttgaggcacaaatgacattgaaaggctaatttgtatttcttggtgagcaccaggggcctaccctcattttcctccccttgagaattttgtctgttacaaaaaatgtagcctccaggtaaaatatctagtattctgagtttatttgaatttaagagtaaagataatgcttatgtctgtacattgtattctgttttgtctttctcttcaatttctaaagatatttataaagattaagccaagttttagcaatagtttaatatctttgagtagaaaaagaaaagcaaaaatgaacccaatctctgatttaatcaccttaaatgtcatgtttcagcagatcatgacataaaacttcaagacttggtccagtaaattaggagtatgtcgacctctaatctgatagtaacacttgagtttttagaggtctcatttagtggaaggatagcatttgtttttatt

SEQ ID NO: 449719 - DNA, 1488 bp, Homo sapiens
gtaacaaatacctactggctgccaggcactcactggcattggtgctcagggcaatgaatccagtccatctctccgggtcattcacacaccaaggccctgctcacctttggaaagctgggggactgagtggggagggcacggtgtggtgtcagcctgagcccactggatgaccctaatcaccaaacatctgcttccttctctgtagctgtgaccctgataccgcgtggtgtgctccgaacacatggtgcccagaacgaaggcggcgtccagaagccctaggtcccagaggtccgctcagcggcaggcgcataaggcggggccggcgcgggcctttccttccatcggaaccgttctcccggggctgagtccctgcccggactccggaacgccgaagaccaggggccggaagcgcgcgccgccactgccacgccgtgtcagtcgggagggagggagcgagcaggcgaagccgcggaggacggggtgaagatggcggccttctccgagatgggtgtaatgcctgagattgcacaagctgtggaagagatggattggctcctcccaactgatatccaggctgaatctatcccattgatcttaggaggaggtgatgtacttatggctgcagaaacaggaagtggcaaaactggtgcttttagtattccagttatccagatagtttatgaaactctgaaagaccaacaggaaggcaaaaaaggaaaaacaacaattaaaactggtgcttcagtgctgaacaaatggcagatgaacccatatgacagaggatctgcttttgcaattgggtcagatggtctttgttgtcaaagcagagaagtaaaggaatggcatgggtgtagagctactaaaggattaatgaaagggaaacactactatgaagtatcctgtcatgaccaagggttatgcagggtcgggtggtctaccatgcaggcctctttggacctaggtactgacaagtttggatttggctttggtggaacaggaaagaaatcccataacaaacaatttgataattatggagaggaattcactatgcatgataccattggatgttacctggatatagataagggacatgtcaagttctccaaaaatggaaaagatcttggtctggcatttgaaataccaccacatatgaaaaaccaagccctctttcctgcctgtgttttgaagaatgctgaactgaaatttaacttcggtgaagaggaatttaagtttccaccaaaagatggctttgttgctctttccaaggcaccggatggttacattgtcaaatcacagcactcaggtatgccaggtgaccaacaagttctcccatgctcgaaagctctcatgtgacttccggagttagctgacaacttgatactcagcgttagaaatctggaacaaaagggcggaaggggtggccggaattcgttgcagacaatagtggcgcaaaacaaggcaggaagacagaacggagggtaaattaaa

SEQ ID NO: 449720 - DNA, 1024 bp, Homo sapiens
gtaacaaatacctactggctgccaggcactcactggcattggtgctcagggcaatgaatccagtccatctctccgggtcattcacacaccaaggccctgctcacctttggaaagctgggggactgagtggggagggcacggtgtggtgtcagcctgagcccactggatgaccctaatcaccaaacatctgcttccttctctgtagctgtgaccctgataccgcgtggtgtgctccgaacacatggtgcccagaacgaaggcggcgtccagaagccctaggtcccagaggtccgctcagcggcaggcgcataaggcggggccggcgcgggcctttccttccatcggaaccgttctcccggggctgagtccctgcccggactccggaacgccgaagaccaggggccggaagcgcgcgccgccactgccacgccgtgtcagtcgggagggagggagcgagcaggcgaagccgcggaggacggggtgaagatggcggccttctccgagatgggtgtaatgcctgagattgcacaagctgtggaagagatggattggctcctcccaactgatatccaggctgaatctatcccattgatcttaggaggaggtgatgtacttatggctgcagaaacaggaagtggcaaaactggtgcttttagtattccagttatccagatagtttatgaaactctgaaagaccaacaggaaggcaaaaaaggaaaaaaaaaaaaaaaattggggggggggttgggcccgaggaaaggtttttaaaaccattgggtggggggggggggccccaaagaggaaaggtacacagtgggccaaaaggggggtcccagggaaactgggggacaggacaaagggcggggattctacccaatataaacaaccgcccggggggggaaacagcagagggtcttggcgaacaaagctcagagggggcactcgagagggcaacaccgggaggaaaatacaacgggcgctccccaggagagccagagatcacattgccccgtccgtgggtgaa

SEQ ID NO: 449721 - DNA, 2842 bp, Homo sapiens
gtaacaaatacctactggctgccaggcactcactggcattggtgctcagggcaatgaatccagtccatctctccgggtcattcacacaccaaggccctgctcacctttggaaagctgggggactgagtggggagggcacggtgtggtgtcagcctgagcccactggatgaccctaatcaccaaacatctgcttccttctctgtagctgtgaccctgataccgcgtggtgtgctccgaacacatggtgcccagaacgaaggcggcgtccagaagccctaggtcccagaggtccgctcagcggcaggcgcataaggcggggccggcgcgggcctttccttccatcggaaccgttctcccggggctgagtccctgcccggactccggaacgccgaagaccaggggccggaagcgcgcgccgccactgccacgccgtgtcagtcgggagggagggagcgagcaggcgaagccgcggaggacggggtgaagatggcggccttctccgagatgggtgtaatgcctgagattgcacaagctgtggaagagatggattggctcctcccaactgatatccaggctgaatctatcccattgatcttaggaggaggtgatgtacttatggctgcagaaacaggaagtggcaaaactggtgcttttagtattccagttatccagatagtttatgaaactctgaaagaccaacaggaaggcaaaaaaggaaaaacaacaattaaaactggtgcttcagtgctgaacaaatggcagatgaacccatatgacagaggatctgcttttgcaattgggtcagatggtctttgttgtcaaagcagagaagtaaaggaatggcatgggtgtagagctactaaaggattaatgaaagggaaacactactatgaagtatcctgtcatgaccaagggttatgcagggtcgggtggtctaccatgcaggcctctttggacctaggtactgacaagtttggatttggctttggtggaacaggaaagaaatcccataacaaacaatttgataattatggagaggaattcactatgcatgataccattggatgttacctggatatagataagggacatgtcaagttctccaaaaatggaaaagatcttggtctggcatttgaaataccaccacatatgaaaaaccaagccctctttcctgcctgtgttttgaagaatgctgaactgaaatttaacttcggtgaagaggaatttaagtttccaccaaaagatggctttgttgctctttccaaggcaccggatggttacattgtcaaatcacagcactcaggtaatgcacaggtgacacaaacaaagtttctccccaatgctccgaaagctctcattgttgaaccttcccgggagttagctgaacaaactttgaataacatcaagcagtttaagaaatacattgataatcctaaattaagggagcttctgataattggaggtgttgcagcccgggatcagctctctgttttggaaaatggagtagatatagttgtaggtactccgggaagactagatgacttggtgtcaactggaaagctgaacttatctcaagttagattcctggtcctggatgaagctgatgggcttctttctcaaggttattctgattttataaataggatgcacaatcagattcctcaggttacctctgatggaaaaagacttcaggtgattgtttgctctgccactttgcattctttcgatgtaaagaaactgtccgagaagataatgcattttcctacatgggttgacttaaaaggagaagactctgttccagatactgtacaccatgttgttgtcccagtaaatcccaaaactgacagactctgggaaaggcttggaaagagccacattagaactgatgatgtacatgcaaaagataacacaagacctggtgctaatagtccagagatgtggtctgaagctattaaaatcctgaaaggggagtatgctgtccgggcaatcaaggaacataagatggatcaagcaattatcttctgtagaaccaaaattgactgtgataacttggagcagtactttatacaacaaggaggaggacctgataaaaaaggacaccagttctcatgtgtttgtcttcatggtgacagaaagcctcatgagagaaagcaaaacttggaaagatttaagaaaggagatgtaagattcttgatttgcacagatgtagctgctagaggaattgatatccacggtgttccttatgttataaatgtcactctgcccgatgaaaagcaaaactacgtacatcgaattggcagagtaggaagagctgaaaggatgggtctggcaatttccctggtggcaacagaaaaagaaaaggtttggtaccatgtatgtagcagccgtggaaaagggtgttataacacaagactcaaggaagatggaggctgtaccatatggtacaacgagatgcagttactatctgagatagaagaacacctgaactgtaccatttctcaggttgagccggatataaaggtaccagtggatgaatttgatgggaaagttacctacggcacctactgttcaagagttggctgcccttgaaaaggaggcgcagacatctttcctgcatcttggctaccttcctaaccagctgttcagaaccttctgatttttacatttactgaataagatttgagtaatgaaagtctgtagtcttaaaactctaaaacagttgtactgcttccaagcagcagtatttatagtaacgtaagctattaatgctaactcttgcatgtcaagaaacattagtcttaggaattcttcaaaaaatggcatcccaatgaaaataaatttg

SEQ ID NO: 449722 - DNA, 2511 bp, Homo sapiens
gtaacaaatacctactggctgccaggcactcactggcattggtgctcagggcaatgaatccagtccatctctccgggtcattcacacaccaaggccctgctcacctttggaaagctgggggactgagtggggagggcacggtgtggtgtcagcctgagcccactggatgaccctaatcaccaaacatctgcttccttctctgtagctgtgaccctgataccgcgtggtgtgctccgaacacatggtgcccagaacgaaggcggcgtccagaagccctaggtcccagaggtccgctcagcggcaggcgcataaggcggggccggcgcgggcctttccttccatcggaaccgttctcccggggctgagtccctgcccggactccggaacgccgaagaccaggggccggaagcgcgcgccgccactgccacgccgtgtcagtcgggagggagggagcgagcaggcgaagccgcggaggacggggtgaagatggcggccttctccgagatgggtgtaatgcctgagattgcacaagctgtggaagagatggattggctcctcccaactgatatccaggctgaatctatcccattgatcttaggaggaggtgatgtacttatggctgcagaaacaggaagtggcaaaactggtgcttttagtattccagttatccagatagtttatgaaactctgaaagaccaacaggaaggcaaaaaaggaaaaacaacaattaaaactggtgcttcagtgctgaacaaatggcagatgaacccatatgacagaggatctgcttttgcaattgggtcagatggtctttgttgtcaaagcagagaagtaaaggaatggcatgggtgtagagctactaaaggattaatgaaagggaaacactactatgaagtatcctgtcatgaccaagggttatgcagggtcgggtggtctaccatgcaggcctctttggacctaggtactgacaagtttggatttggctttggtggaacaggaaagaaatcccataacaaacaatttgataattatggagaggaattcactatgcatgataccattggatgttacctggatatagataagggacatgtcaagttctccaaaaatggaaaagatcttggtctggcatttgaaataccaccacatatgaaaaaccaagccctctttcctgcctgtgttttgaagaatgctgaactgaaatttaacttcggtgaagaggaatttaagtttccaccaaaagatggctttgttgctctttccaaggcaccggatggttacattgtcaaatcacagcactcaggtaatgcacaggtgacacaaacaaagtttctccccaatgctccgaaagctctcattgttgaaccttcccgggagttagctgaacaaactttgaataacatcaagcagtttaagaaatacattgataatcctaaattaagggagcttctgataattggaggtgttgcagcccgggatcagctctctgttttggaaaatggagtagatatagttgtaggtactccgggaagactagatgacttggtgtcaactggaaagctgaacttatctcaagttagattcctggtcctggatgaagctgatgggcttctttctcaaggttattctgattttataaataggatgcacaatcagattcctcaggttacctctgatggaaaaagacttcaggtgattgtttgctctgccactttgcattctttcgatgtaaagaaactgtccgagaagataatgcattttcctacatgggttgacttaaaaggagaagactctgttccagatactgtacaccatgttgttgtcccagtaaatcccaaaactgacagactctgggaaaggcttggaaagagccacattagaactgatgatgtacatgcaaaagataacacaagacctggtgctaatagtccagagatgtggtctgaagctattaaaatcctgaaaggggagtatgctgtccgggcaatcaaggaacataagatggatcaagcaattatcttctgtagaaccaaaattgactgtgataacttggagcagtactttatacaacaaggaggaggacctgataaaaaaggacaccagttctcatgtgtttgtcttcatggtgacagaaagcctcatgagagaaagcaaaacttggaaagatttaagaaaggagatgtaagattcttgatttgcacagatgtagctgctagaggaattgatatccacggtgttccttatgttataaatgtcactctgcccgatgaaaagcaaaactacgtacatcgaattggcagagtaggaagagctgaaaggatgggtctggcaatttccctggtggcaacagaaaaagaaaaggtttggtaccatgtatgtagcagccgtggaaaagggtgttataacacaagactcaaggaagatggaggctgtaccatatggtacaacgagatgcagttactatctgagatagaggtacaccgtactagctacgggtacgagctcggttgt

SEQ ID NO: 449723 - DNA, 2411 bp, Homo sapiens
gtaacaaatacctactggctgccaggcactcactggcattggtgctcagggcaatgaatccagtccatctctccgggtcattcacacaccaaggccctgctcacctttggaaagctgggggactgagtggggagggcacggtgtggtgtcagcctgagcccactggatgaccctaatcaccaaacatctgcttccttctctgtagctgtgaccctgataccgcgtggtgtgctccgaacacatggtgcccagaacgaaggcggcgtccagaagccctaggtcccagaggtccgctcagcggcaggcgcataaggcggggccggcgcgggcctttccttccatcggaaccgttctcccggggctgagtccctgcccggactccggaacgccgaagaccaggggccggaagcgcgcgccgccactgccacgccgtgtcagtcgggagggagggagcgagcaggcgaagccgcggaggacggggtgaagatggcggccttctccgagatgggtgtaatgcctgagattgcacaagctgtggaagagatggattggctcctcccaactgatatccaggctgaatctatcccattgatcttaggaggaggtgatgtacttatggctgcagaaacaggaagtggcaaaactggtgcttttagtattccagttatccagatagtttatgaaactctgaaagaccaacaggaaggcaaaaaaggaaaaacaacaattaaaactggtgcttcagtgctgaacaaatggcagatgaacccatatgacagaggatctgcttttgcaattgggtcagatggtctttgttgtcaaagcagagaagtaaaggaatggcatgggtgtagagctactaaaggattaatgaaagggaaacactactatgaagtatcctgtcatgaccaagggttatgcagggtcgggtggtctaccatgcaggcctctttggacctaggtactgacaagtttggatttggctttggtggaacaggaaagaaatcccataacaaacaatttgataattatggagaggaattcactatgcatgataccattggatgttacctggatatagataagggacatgtcaagttctccaaaaatggaaaagatcttggtctggcatttgaaataccaccacatatgaaaaaccaagccctctttcctgcctgtgttttgaagaatgctgaactgaaatttaacttcggtgaagaggaatttaagtttccaccaaaagatggctttgttgctctttccaaggcaccggatggttacattgtcaaatcacagcactcaggtaatgcacaggtgacacaaacaaagtttctccccaatgctccgaaagctctcattgttgaaccttcccgggagttagctgaacaaactttgaataacatcaagcagtttaagaaatacattgataatcctaaattaagggagcttctgataattggaggtgttgcagcccgggatcagctctctgttttggaaaatggagtagatatagttgtaggtactccgggaagactagatgacttggtgtcaactggaaagctgaacttatctcaagttagattcctggtcctggatgaagctgatgggcttctttctcaaggttattctgattttataaataggatgcacaatcagattcctcaggttacctctgatggaaaaagacttcaggtgattgtttgctctgccactttgcattctttcgatgtaaagaaactgtccgagaagataatgcattttcctacatgggttgacttaaaaggagaagactctgttccagatactgtacaccatgttgttgtcccagtaaatcccaaaactgacagactctgggaaaggcttggaaagagccacattagaactgatgatgtacatgcaaaagataacacaagacctggtgctaatagtccagagatgtggtctgaagctattaaaatcctgaaaggggagtatgctgtccgggcaatcaaggaacataagatggatcaagcaattatcttctgtagaaccaaaattgactgtgataacttggagcagtactttatacaacaaggaggaggacctgataaaaaaggacaccagttctcatgtgtttgtcttcatggtgacagaaagcctcatgagagaaagcaaaacttggaaagatttaagaaaggagatgtaagattcttgatttgcacagatgtagctgctagaggaattgatatccacggtgttccttatgttataaatgtcactctgcccgatgaaaagcaaaactacgtacatcgaattggcagagtaggaagagctgaaaggatggtctggcatttcctggtgcaccgaacagaaagttgccatgtatgtagcacctgaaaggttatacacaactcagagatgagctgtcattg

SEQ ID NO: 449724 - DNA, 2255 bp, Homo sapiens
gtaacaaatacctactggctgccaggcactcactggcattggtgctcagggcaatgaatccagtccatctctccgggtcattcacacaccaaggccctgctcacctttggaaagctgggggactgagtggggagggcacggtgtggtgtcagcctgagcccactggatgaccctaatcaccaaacatctgcttccttctctgtagctgtgaccctgataccgcgtggtgtgctccgaacacatggtgcccagaacgaaggcggcgtccagaagccctaggtcccagaggtccgctcagcggcaggcgcataaggcggggccggcgcgggcctttccttccatcggaaccgttctcccggggctgagtccctgcccggactccggaacgccgaagaccaggggccggaagcgcgcgccgccactgccacgccgtgtcagtcgggagggagggagcgagcaggcgaagccgcggaggacggggtgaagatggcggccttctccgagatgggtgtaatgcctgagattgcacaagctgtggaagagatggattggctcctcccaactgatatccaggctgaatctatcccattgatcttaggaggaggtgatgtacttatggctgcagaaacaggaagtggcaaaactggtgcttttagtattccagttatccagatagtttatgaaactctgaaagaccaacaggaaggcaaaaaaggaaaaacaacaattaaaactggtgcttcagtgctgaacaaatggcagatgaacccatatgacagaggatctgcttttgcaattgggtcagatggtctttgttgtcaaagcagagaagtaaaggaatggcatgggtgtagagctactaaaggattaatgaaagggaaacactactatgaagtatcctgtcatgaccaagggttatgcagggtcgggtggtctaccatgcaggcctctttggacctaggtactgacaagtttggatttggctttggtggaacaggaaagaaatcccataacaaacaatttgataattatggagaggaattcactatgcatgataccattggatgttacctggatatagataagggacatgtcaagttctccaaaaatggaaaagatcttggtctggcatttgaaataccaccacatatgaaaaaccaagccctctttcctgcctgtgttttgaagaatgctgaactgaaatttaacttcggtgaagaggaatttaagtttccaccaaaagatggctttgttgctctttccaaggcaccggatggttacattgtcaaatcacagcactcaggtaatgcacaggtgacacaaacaaagtttctccccaatgctccgaaagctctcattgttgaaccttcccgggagttagctgaacaaactttgaataacatcaagcagtttaagaaatacattgataatcctaaattaagggagcttctgataattggaggtgttgcagcccgggatcagctctctgttttggaaaatggagtagatatagttgtaggtactccgggaagactagatgacttggtgtcaactggaaagctgaacttatctcaagttagattcctggtcctggatgaagctgatgggcttctttctcaaggttattctgattttataaataggatgcacaatcagattcctcaggttacctctgatggaaaaagacttcaggtgattgtttgctctgccactttgcattctttcgatgtaaagaaactgtccgagaagataatgcattttcctacatgggttgacttaaaaggagaagactctgttccagatactgtacaccatgttgttgtcccagtaaatcccaaaactgacagactctgggaaaggcttggaaagagccacattagaactgatgatgtacatgcaaaagataacacaagacctggtgctaatagtccagagatgtggtctgaagctattaaaatcctgaaaggggagtatgctgtccgggcaatcaaggaacataagatggatcaagcaattatcttctgtagaaccaaaattgactgtgataacttggagcagtactttatacaacaaggaggaggacctgataaaaaaggacaccagttctcatgtgtttgtcttcatggtgacagaaagcctcatgagagaaagcacagaccccaaaagagcaaagaccccaaaagagcaaagaccccaaaagagcaaagaccccaaaagagcagagaccacataagagcaaagaccccagaaggggt

SEQ ID NO: 449725 - DNA, 3041 bp, Homo sapiens
gtaacaaatacctactggctgccaggcactcactggcattggtgctcagggcaatgaatccagtccatctctccgggtcattcacacaccaaggccctgctcacctttggaaagctgggggactgagtggggagggcacggtgtggtgtcagcctgagcccactggatgaccctaatcaccaaacatctgcttccttctctgtagctgtgaccctgataccgcgtggtgtgctccgaacacatggtgcccagaacgaaggcggcgtccagaagccctaggtcccagaggtccgctcagcggcaggcgcataaggcggggccggcgcgggcctttccttccatcggaaccgttctcccggggctgagtccctgcccggactccggaacgccgaagaccaggggccggaagcgcgcgccgccactgccacgccgtgtcagtcgggagggagggagcgagcaggcgaagccgcggaggacggggtgaagatggcggccttctccgagatgggtgtaatgcctgagattgcacaagctgtggaagagatggattggctcctcccaactgatatccaggctgaatctatcccattgatcttaggaggaggtgatgtacttatggctgcagaaacaggaagtggcaaaactggtgcttttagtattccagttatccagatagtttatgaaactctgaaagaccaacaggaaggcaaaaaaggaaaaacaacaattaaaactggtgcttcagtgctgaacaaatggcagatgaacccatatgacagaggatctgcttttgcaattgggtcagatggtctttgttgtcaaagcagagaagtaaaggaatggcatgggtgtagagctactaaaggattaatgaaagggaaacactactatgaagtatcctgtcatgaccaagggttatgcagggtcgggtggtctaccatgcaggcctctttggacctaggtactgacaagtttggatttggctttggtggaacaggaaagaaatcccataacaaacaatttgataattatggagaggaattcactatgcatgataccattggatgttacctggatatagataagggacatgtcaagttctccaaaaatggaaaagatcttggtctggcatttgaaataccaccacatatgaaaaaccaagccctctttcctgcctgtgttttgaagaatgctgaactgaaatttaacttcggtgaagaggaatttaagtttccaccaaaagatggctttgttgctctttccaaggcaccggatggttacattgtcaaatcacagcactcaggtaatgcacaggtgacacaaacaaagtttctccccaatgctccgaaagctctcattgttgaaccttcccgggagttagctgaacaaactttgaataacatcaagcagtttaagaaatacattgataatcctaaattaagggagcttctgataattggaggtgttgcagcccgggatcagctctctgttttggaaaatggagtagatatagttgtaggtactccgggaagactagatgacttggtgtcaactggaaagctgaacttatctcaagttagattcctggtcctggatgaagctgatgggcttctttctcaaggttattctgattttataaataggatgcacaatcagattcctcaggttacctctgatggaaaaagacttcaggtgattgtttgctctgccactttgcattctttcgatgtaaagaaactgtccgagaagataatgcattttcctacatgggttgacttaaaaggagaagactctgttccagatactgtacaccatgttgttgtcccagtaaatcccaaaactgacagactctgggaaaggcttggaaagagccacattagaactgatgatgtacatgcaaaagataacacaagacctggtgctaatagtccagagatgtggtctgaagctattaaaatcctgaaaggggagtatgctgtccgggcaatcaaggaacataagatggatcaagcaattatcttctgtagaaccaaaattgactgtgataactggggcgattttcacagggggggccgttaaaggcccgtctccgggttgccttggcaagctcgaaaaaatgcattacacgagtatatccttgaaatggagataccatcttctataggcacaacatgtctgcgtgttgcgtcgctgtgtcgcgtagggctgagcgtaacctcacctaccaccacgccgtacaacaagacaaccacgtacacaaaacacgacaagccacccagacaaaacacacgacgaacacaacacaccaaacaacaacacagctcaaaaaacaggaagcgaccacagaggaacgggcagcggcgagagagagaagggaggcagagcaggaccgacaacaagagaggagaacaacgcacagaaaatgacgagaagaagacggatcacgaggggacaggagagaagagcgtcgcgcaagacgataggaaagaagaacacgaaccgaacaaaaacaacacaagcaaacgcgcgacgacagacagcgcagacacaaaggaaccagaacaagagaagagatgacggacgggaggggaaaggagaagagaagagacgaaggcgagaccagaaagacacgagcagggaagcggacgaggtgcgaggagacagagagcagccagaccgaagagacaggcagagagagcagcagaaagcgacaaaagaagacagcacagagcgagagaggacagcgcgaacaagaaaaccggcacgagagagagaaggaagcgaagcggacaggaacgacagaaggaaaaagcggagaacaagcgaagagaggggagagacgacaacaacaagaacagacaagaagaaggaacgcacggagcaaaggcgagagaaggagcaaacgagagaacaagacgacaggagcacaggagaagcagacacggagagagagcaaaaaacgagaacgaagagcaggaagaggagagaaaggcaagagacaaaggaaggactaagaaacgaccgccaacaccacacgcgaa

SEQ ID NO: 449726 - DNA, 1751 bp, Homo sapiens
gtaacaaatacctactggctgccaggcactcactggcattggtgctcagggcaatgaatccagtccatctctccgggtcattcacacaccaaggccctgctcacctttggaaagctgggggactgagtggggagggcacggtgtggtgtcagcctgagcccactggatgaccctaatcaccaaacatctgcttccttctctgtagctgtgaccctgataccgcgtggtgtgctccgaacacatggtgcccagaacgaaggcggcgtccagaagccctaggtcccagaggtccgctcagcggcaggcgcataaggcggggccggcgcgggcctttccttccatcggaaccgttctcccggggctgagtccctgcccggactccggaacgccgaagaccaggggccggaagcgcgcgccgccactgccacgccgtgtcagtcgggagggagggagcgagcaggcgaagccgcggaggacggggtgaagatggcggccttctccgagatgggtgtaatgcctgagattgcacaagctgtggaagagatggattggctcctcccaactgatatccaggctgaatctatcccattgatcttaggaggaggtgatgtacttatggctgcagaaacaggaagtggcaaaactggtgcttttagtattccagttatccagatagtttatgaaactctgaaagaccaacaggaaggcaaaaaaggaaaaacaacaattaaaactggtgcttcagtgctgaacaaatggcagatgaacccatatgacagaggatctgcttttgcaattgggtcagatggtctttgttgtcaaagcagagaagtaaaggaatggcatgggtgtagagctactaaaggattaatgaaagggaaacactactatgaagtatcctgtcatgaccaagggttatgcagggtcgggtggtctaccatgcaggcctctttggacctaggtactgacaagtttggatttggctttggtggaacaggaaagaaatcccataacaaacaatttgataattatggagaggaattcactatgcatgataccattggatgttacctggatatagataagggacatgtcaagttctccaaaaatggaaaagatcttggtctggcatttgaaataccaccacatatgaaaaaccaagccctctttcctgcctgtgttttgaagaatgctgaactgaaatttaacttcggtgaagaggaatttaagtttccaccaaaagatggctttgttgctctttccaaggcaccggatggttacattgtcaaatcacagcactcaggtaatgcacaggtgacacaaacaaagtttctccccaatgctccgaaagctctcattgttgaaccttcccgggagttagctgaacaaactttgaataacatcaagcagtttaagaaatacattgataatcctaaattaagggagcttctgataattggaggtgttgcagcccgggatcagctctctgttttggaaaatggagtagatatagttgtaggtactccgggaagactagatgacttggtgtcaactggaaagctgaacttatctcaagttagattcctggtcctggatgaagctgatgggcttctttctcaaggttattctgattttataaataggatgcacaatcagattcctcaggttacctctgatggaaaaagacttcaggtgactgctgtttagttgaggacactcttgaattcttttgaggtaaagcaccagcccga

SEQ ID NO: 449727 - DNA, 716 bp, Homo sapiens
gccttctaatatgtttgaaaaatttagaaactactggcaattgttaataatggtttttatttatagttataaatgtcactctgcccgatgaaaagcaaaactacgtacatcgaattggcagagtaggaagagctgaaaggatgggtctggcaatttccctggtggcaacagaaaaagaaaaggtttggtaccatgtatgtagcagccgtggaaaagggtgttataacacaagactcaaggaagatggaggctgtaccatatggtacaacgagatgcagttactatctgagatagaagaacacctgaactgtaccatttctcaggttgagccggatataaaggtaccagtggatgaatttgatgggaaagttacctacggtcagaaaagggctgctggtggtggaagctataaaggccatgtggatattttggcacctactgttcaagagttggctgcccttgaaaaggaggcgcagacatctttcctgcatcttggctaccttcctaaccagctgttcagaaccttctgatttttacatttactgaataagatttgagtaatgaaagtctgtagtcttaaaactctaaaacagttgtactgcttccaagcagcagtatttatagtaacgtaagctattaatgctaactcttgcatgtcaagaaacattagtcttaggaattcttcaaaaaatggcatcccaatgaaaataaatttg

SEQ ID NO: 449728 - DNA, 475 bp, Homo sapiens
tcagctctctgttttggaaaatggagtaagttgtagttttaatttttaaaacataatgtcatgggctgtcgttttagcaatacagctctgttttgtttcaagaaaatttaagtgaggctgaaattagagcaaggtcagaggagtatgtttgttcaaagacatcttgcaagtgcgccttttcttctcctggaagtatacaaagtctctcccagacctctcaagcaaaattccagcatacatgattttttgttgtttaccctctgaacatttgagaatttccttctggccttcatgggtaaagagtcattctttttggggagataagtgaaaaagaagaaactggagttaagaacaaaagtagaggtaaaatagattgcagagaaggatagaagttcctgcagtgactcttgggaaggatgaataatgataagacagtgggtaatagttccagtgaggagagacatgagttcaatta

SEQ ID NO: 449729 - DNA, 423 bp, Homo sapiens
tcctgggctcaagcgattctcctgcctcagcctcccgagtagctgggattacagtcacacgccaccatgcctggctaatttttgtatttttttttttagtagagatgaggtttcaccacgttggccaggctggtcttgaactcctgacctcaagtgaaccacccacgtcagcttcccaaagtgctgagattacagtcgtgagtcaccgcacccggccaagcattttaaattttatatatctgtgggtaacttttcttattttaatttgtttagtgctgaacaaatggcagatgaacccatatgacagaggatctgcttttggtaagtggatagactttccatcagctcatttgtaattcagaaactttaaaaaataatacatgagaacaccaagtaaataagattaagatttaatttaccaga

SEQ ID NO: 449730 - DNA, 423 bp, Homo sapiens
aagtgatataattgagccaaagtattgctgacaagttatttcaagcatgtcatttacattactttgttatttgtgtgtgatgcaggtggaagctataaaggccatgtggatattttggcacctactgttcaagagttggctgcccttgaaaaggaggcgcagacatctttcctgcatcttggctaccttcctaaccagctgttcagaaccttctgatttttacatttactgaataagatttgagtaatgaaagtctgtagtcttaaaactctaaaacagttgtactgcttccaagcagcagtatttatagtaacgtaagctattaatgctaactcttgcatgtcaagaaacattagtcttaggaattcttcaaaaaatggcatcccaatgaaaataaatttgatgactatattttcatgaagg

SEQ ID NO: 449731 - DNA, 296 bp, Homo sapiens
atgtcactctgcccgatgaaaagcaaaactacgtacatcgaattggcagagtaggaagagctgaaaggtacttctgcaattttttttcccccatttttaagcttgtatgctttaggaataaagtctaatagaaggcttttaaccatctttcaggatgggtctggcaatttccctggtggcaacagaaaaagaaaaggtaatctttgtagggctctattatattcattgtgtgtgttgtgattttagatgttggaaataaaagcagtttgattttcccatttaaatttaattcagct

SEQ ID NO: 449732 - DNA, 637 bp, Homo sapiens
cccccagatctctaattttgctgtgccttgaggcacaaatgacattgaaaggctaatttgtatttcttggtgagcaccaggggcctaccctcattttcctccccttgagaattttgtctgttacaaaaaatgtagcctccaggtaaaatatctagtattctgagtttatttgaatttaagagtaaagataatgcttatgtctgtacattgtattctgttttgtctttctcttcaatttctaaagatatttataaagattaagccaagttttagcaatagtttaatatctttgagtagaaaaagaaaagcaaaaatgaacccaatctctgatttaatcaccttaaatgtcatgtttcagcagatcatgacataaaacttcaagacttggtccagtaaattaggagtatgtcgacctctaatctgatagtaacacttgagtttttagaggtctcatttagtggaaggatagcatttgtttttattgtttagtatatgtgctaacaaactcctttctctcttcactgttctctttagaaaggagatgtaagattcttgatttgcacagatgtagctgctagaggaattgatatccacggtgttccttatggtaaaaagcaactttttatgcctgtagtgt

SEQ ID NO: 449733 - DNA, 2895 bp, Homo sapiens
gtaacaaatacctactggctgccaggcactcactggcattggtgctcagggcaatgaatccagtccatctctccgggtcattcacacaccaaggccctgctcacctttggaaagctgggggactgagtggggagggcacggtgtggtgtcagcctgagcccactggatgaccctaatcaccaaacatctgcttccttctctgtagctgtgaccctgataccgcgtggtgtgctccgaacacatggtgcccagaacgaaggcggcgtccagaagccctaggtcccagaggtccgctcagcggcaggcgcataaggcggggccggcgcgggcctttccttccatcggaaccgttctcccggggctgagtccctgcccggactccggaacgccgaagaccaggggccggaagcgcgcgccgccactgccacgccgtgtcagtcgggagggagggagcgagcaggcgaagccgcggaggacggggtgaagatggcggccttctccgagatgggtgtaatgcctgagattgcacaagctgtggaagagatggattggctcctcccaactgatatccaggctgaatctatcccattgatcttaggaggaggtgatgtacttatggctgcagaaacaggaagtggcaaaactggtgcttttagtattccagttatccagatagtttatgaaactctgaaagaccaacaggaaggcaaaaaaggaaaaacaacaattaaaactggtgcttcagtgctgaacaaatggcagatgaacccatatgacagaggatctgcttttgcaattgggtcagatggtctttgttgtcaaagcagagaagtaaaggaatggcatgggtgtagagctactaaaggattaatgaaagggaaacactactatgaagtatcctgtcatgaccaagggttatgcagggtcgggtggtctaccatgcaggcctctttggacctaggtactgacaagtttggatttggctttggtggaacaggaaagaaatcccataacaaacaatttgataattatggagaggaattcactatgcatgataccattggatgttacctggatatagataagggacatgtcaagttctccaaaaatggaaaagatcttggtctggcatttgaaataccaccacatatgaaaaaccaagccctctttcctgcctgtgttttgaagaatgctgaactgaaatttaacttcggtgaagaggaatttaagtttccaccaaaagatggctttgttgctctttccaaggcaccggatggttacattgtcaaatcacagcactcaggtaatgcacaggtgacacaaacaaagtttctccccaatgctccgaaagctctcattgttgaaccttcccgggagttagctgaacaaactttgaataacatcaagcagtttaagaaatacattgataatcctaaattaagggagcttctgataattggaggtgttgcagcccgggatcagctctctgttttggaaaatggagtagatatagttgtaggtactccgggaagactagatgacttggtgtcaactggaaagctgaacttatctcaagttagattcctggtcctggatgaagctgatgggcttctttctcaaggttattctgattttataaataggatgcacaatcagattcctcaggttacctctgatggaaaaagacttcaggtgattgtttgctctgccactttgcattctttcgatgtaaagaaactgtccgagaagataatgcattttcctacatgggttgacttaaaaggagaagactctgttccagatactgtacaccatgttgttgtcccagtaaatcccaaaactgacagactctgggaaaggcttggaaagagccacattagaactgatgatgtacatgcaaaagataacacaagacctggtgctaatagtccagagatgtggtctgaagctattaaaatcctgaaaggggagtatgctgtccgggcaatcaaggaacataagatggatcaagcaattatcttctgtagaaccaaaattgactgtgataacttggagcagtactttatacaacaaggaggaggacctgataaaaaaggacaccagttctcatgtgtttgtcttcatggtgacagaaagcctcatgagagaaagcaaaacttggaaagatttaagaaaggagatgtaagattcttgatttgcacagatgtagctgctagaggaattgatatccacggtgttccttatgttataaatgtcactctgcccgatgaaaagcaaaactacgtacatcgaattggcagagtaggaagagctgaaaggatgggtctggcaatttccctggtggcaacagaaaaagaaaaggtttggtaccatgtatgtagcagccgtggaaaagggtgttataacacaagactcaaggaagatggaggctgtaccatatggtacaacgagatgcagttactatctgagatagaagaacacctgaactgtaccatttctcaggttgagccggatataaaggtaccagtggatgaatttgatgggaaagttacctacggtcagaaaagggctgctggtggtggaagctataaaggccatgtggatattttggcacctactgttcaagagttggctgcccttgaaaaggaggcgcagacatctttcctgcatcttggctaccttcctaaccagctgttcagaaccttctgatttttacatttactgaataagatttgagtaatgaaagtctgtagtcttaaaactctaaaacagttgtactgcttccaagcagcagtatttatagtaacgtaagctattaatgctaactcttgcatgtcaagaaacattagtcttaggaattcttcaaaaaatggcatcccaatgaaaataaatttg

SEQ ID NO: 449734 - DNA, 2706 bp, Homo sapiens
gtaacaaatacctactggctgccaggcactcactggcattggtgctcagggcaatgaatccagtccatctctccgggtcattcacacaccaaggccctgctcacctttggaaagctgggggactgagtggggagggcacggtgtggtgtcagcctgagcccactggatgaccctaatcaccaaacatctgcttccttctctgtagctgtgaccctgataccgcgtggtgtgctccgaacacatggtgcccagaacgaaggcggcgtccagaagccctaggtcccagaggtccgctcagcggcaggcgcataaggcggggccggcgcgggcctttccttccatcggaaccgttctcccggggctgagtccctgcccggactccggaacgccgaagaccaggggccggaagcgcgcgccgccactgccacgccgtgtcagtcgggagggagggagcgagcaggcgaagccgcggaggacggggtgaagatggcggccttctccgagatgggtgtaatgcctgagattgcacaagctgtggaagagatggattggctcctcccaactgatatccaggctgaatctatcccattgatcttaggaggaggtgatgtacttatggctgcagaaacaggaagtggcaaaactggtgcttttagtattccagttatccagatagtttatgaaactctgaaagaccaacaggaaggcaaaaaaggaaaaacaacaattaaaactggtgcttcagtgctgaacaaatggcagatgaacccatatgacagaggatctgcttttgcaattgggtcagatggtctttgttgtcaaagcagagaagtaaaggaatggcatgggtgtagagctactaaaggattaatgaaagggaaacactactatgaagtatcctgtcatgaccaagggttatgcagggtcgggtggtctaccatgcaggcctctttggacctaggtactgacaagtttggatttggctttggtggaacaggaaagaaatcccataacaaacaatttgataattatggagaggaattcactatgcatgataccattggatgttacctggatatagataagggacatgtcaagttctccaaaaatggaaaagatcttggtctggcatttgaaataccaccacatatgaaaaaccaagccctctttcctgcctgtgttttgaagaatgctgaactgaaatttaacttcggtgaagaggaatttaagtttccaccaaaagatggctttgttgctctttccaaggcaccggatggttacattgtcaaatcacagcactcaggtaatgcacaggtgacacaaacaaagtttctccccaatgctccgaaagctctcattgttgaaccttcccgggagttagctgaacaaactttgaataacatcaagcagtttaagaaatacattgataatcctaaattaagggagcttctgataattggaggtgttgcagcccgggatcagctctctgttttggaaaatggagtagatatagttgtaggtactccgggaagactagatgacttggtgtcaactggaaagctgaacttatctcaagttagattcctggtcctggatgaagctgatgggcttctttctcaaggttattctgattttataaataggatgcacaatcagattcctcaggttacctctgatggaaaaagacttcaggtgattgtttgctctgccactttgcattctttcgatgtaaagaaactgtccgagaagataatgcattttcctacatgggttgacttaaaaggagaagactctgttccagatactgtacaccatgttgttgtcccagtaaatcccaaaactgacagactctgggaaaggcttggaaagagccacattagaactgatgatgtacatgcaaaagataacacaagacctggtgctaatagtccagagatgtggtctgaagctattaaaatcctgaaaggggagtatgctgtccgggcaatcaaggaacataagatggatcaagcaattatcttctgtagaaccaaaattgactgtgataacttggagcagtactttatacaacaaggaggaggacctgataaaaaaggacaccagttctcatgtgtttgtcttcatggtgacagaaagcctcatgagagaaagcaaaacttggaaagatttaaggtttggtaccatgtatgtagcagccgtggaaaagggtgttataacacaagactcaaggaagatggaggctgtaccatatggtacaacgagatgcagttactatctgagatagaagaacacctgaactgtaccatttctcaggttgagccggatataaaggtaccagtggatgaatttgatgggaaagttacctacggtcagaaaagggctgctggtggtggaagctataaaggccatgtggatattttggcacctactgttcaagagttggctgcccttgaaaaggaggcgcagacatctttcctgcatcttggctaccttcctaaccagctgttcagaaccttctgatttttacatttactgaataagatttgagtaatgaaagtctgtagtcttaaaactctaaaacagttgtactgcttccaagcagcagtatttatagtaacgtaagctattaatgctaactcttgcatgtcaagaaacattagtcttaggaattcttcaaaaaatggcatcccaatgaaaataaatttg

SEQ ID NO: 449735 - DNA, 2616 bp, Homo sapiens
gtaacaaatacctactggctgccaggcactcactggcattggtgctcagggcaatgaatccagtccatctctccgggtcattcacacaccaaggccctgctcacctttggaaagctgggggactgagtggggagggcacggtgtggtgtcagcctgagcccactggatgaccctaatcaccaaacatctgcttccttctctgtagctgtgaccctgataccgcgtggtgtgctccgaacacatggtgcccagaacgaaggcggcgtccagaagccctaggtcccagaggtccgctcagcggcaggcgcataaggcggggccggcgcgggcctttccttccatcggaaccgttctcccggggctgagtccctgcccggactccggaacgccgaagaccaggggccggaagcgcgcgccgccactgccacgccgtgtcagtcgggagggagggagcgagcaggcgaagccgcggaggacggggtgaagatggcggccttctccgagatgggtgtaatgcctgagattgcacaagctgtggaagagatggattggctcctcccaactgatatccaggctgaatctatcccattgatcttaggaggaggtgatgtacttatggctgcagaaacaggaagtggcaaaactggtgcttttagtattccagttatccagatagtttatgaaactctgaaagaccaacaggaaggcaaaaaaggaaaaacaacaattaaaactggtgcttcagtgctgaacaaatggcagatgaacccatatgacagaggatctgcttttgcaattgggtcagatggtctttgttgtcaaagcagagaagtaaaggaatggcatgggtgtagagctactaaaggattaatgaaagggaaacactactatgaagtatcctgtcatgaccaagggttatgcagggtcgggtggtctaccatgcaggcctctttggacctaggtactgacaagtttggatttggctttggtggaacaggaaagaaatcccataacaaacaatttgataattatggagaggaattcactatgcatgataccattggatgttacctggatatagataagggacatgtcaagttctccaaaaatggaaaagatcttggtctggcatttgaaataccaccacatatgaaaaaccaagccctctttcctgcctgtgttttgaagaatgctgaactgaaatttaacttcggtgaagaggaatttaagtttccaccaaaagatggctttgttgctctttccaaggcaccggatggttacattgtcaaatcacagcactcaggtaatgcacaggtgacacaaacaaagtttctccccaatgctccgaaagctctcattgttgaaccttcccgggagttagctgaacaaactttgaataacatcaagcagtttaagaaatacattgataatcctaaattaagggagcttctgataattggaggtgttgcagcccgggatcagctctctgttttggaaaatggagtagatatagttgtaggtactccgggaagactagatgacttggtgtcaactggaaagctgaacttatctcaagttagattcctggtcctggatgaagctgatgggcttctttctcaaggttattctgattttataaataggatgcacaatcagattcctcaggttacctctgatggaaaaagacttcaggtgattgtttgctctgccactttgcattctttcgatgtaaagaaactgtccgagaagataatgcattttcctacatgggttgacttaaaaggagaagactctgttccagatactgtacaccatgttgttgtcccagtaaatcccaaaactgacagactctgggaaaggcttggaaagagccacattagaactgatgatgtacatgcaaaagataacacaagacctggtgctaatagtccagagatgtggtctgaagctattaaaatcctgaaaggggagtatgctgtccgggcaatcaaggaacataagatggatcaagcaattatcttctgtagaaccaaaattgactgtgataacttggagcagtactttatacaacaaggaggaggacctgataaaaaaggacaccagttctcatgtgtttgtcttcatggtgacagaaagcctcatgagagaaagcaaaacttggaaagatttaagaaaggagatgtaagattcttgatttgcacagatgtagctgctagaggaattgatatccacggtgttccttatgttataaatgtcactctgcccgatgaaaagcaaaactacgtacatcgaattggcagagtaggaagagctgaaaggatgggtctggcaatttccctggtggcaacagaaaaagaaaaggtttggtaccatgtatgtagcagccgtggaaaagggtgttataacacaagactcaaggaagatggaggctgtaccatatggtacaacgagatgcagttactatcatgagaatagcacgggaaagaccagccctcatgattcaattaccttacctgggtccttcccataacacatgaaaattctgggagacacaattcaagttgagatttgggcgggacacagccaatcatatcaccaccaggatcttccagtccg

SEQ ID NO: 449736 - DNA, 2318 bp, Homo sapiens
gtaacaaatacctactggctgccaggcactcactggcattggtgctcagggcaatgaatccagtccatctctccgggtcattcacacaccaaggccctgctcacctttggaaagctgggggactgagtggggagggcacggtgtggtgtcagcctgagcccactggatgaccctaatcaccaaacatctgcttccttctctgtagctgtgaccctgataccgcgtggtgtgctccgaacacatggtgcccagaacgaaggcggcgtccagaagccctaggtcccagaggtccgctcagcggcaggcgcataaggcggggccggcgcgggcctttccttccatcggaaccgttctcccggggctgagtccctgcccggactccggaacgccgaagaccaggggccggaagcgcgcgccgccactgccacgccgtgtcagtcgggagggagggagcgagcaggcgaagccgcggaggacggggtgaagatggcggccttctccgagatgggtgtaatgcctgagattgcacaagctgtggaagagatggattggctcctcccaactgatatccaggctgaatctatcccattgatcttaggaggaggtgatgtacttatggctgcagaaacaggaagtggcaaaactggtgcttttagtattccagttatccagatagtttatgaaactctgaaagaccaacaggaaggcaaaaaaggaaaaacaacaattaaaactggtgcttcagtgctgaacaaatggcagatgaacccatatgacagaggatctgcttttgcaattgggtcagatggtctttgttgtcaaagcagagaagtaaaggaatggcatgggtgtagagctactaaaggattaatgaaagggaaacactactatgaagtatcctgtcatgaccaagggttatgcagggtcgggtggtctaccatgcaggcctctttggacctaggtactgacaagtttggatttggctttggtggaacaggaaagaaatcccataacaaacaatttgataattatggagaggaattcactatgcatgataccattggatgttacctggatatagataagggacatgtcaagttctccaaaaatggaaaagatcttggtctggcatttgaaataccaccacatatgaaaaaccaagccctctttcctgcctgtgttttgaagaatgctgaactgaaatttaacttcggtgaagaggaatttaagtttccaccaaaagatggctttgttgctctttccaaggcaccggatggttacattgtcaaatcacagcactcaggtaatgcacaggtgacacaaacaaagtttctccccaatgctccgaaagctctcattgttgaaccttcccgggagttagctgaacaaactttgaataacatcaagcagtttaagaaatacattgataatcctaaattaagggagcttctgataattggaggtgttgcagcccgggatcagctctctgttttggaaaatggagtagatatagttgtaggtactccgggaagactagatgacttggtgtcaactggaaagctgaacttatctcaagttagattcctggtcctggatgaagctgatgggcttctttctcaaggttattctgattttataaataggatgcacaatcagattcctcaggttacctctgatggaaaaagacttcaggtgattgtttgctctgccactttgcattctttcgatgtaaagaaactgtccgagaagataatgcattttcctacatgggttgacttaaaaggagaagactctgttccagatactgtacaccatgttgttgtcccagtaaatcccaaaactgacagactctgggaaaggcttggaaagagccacattagaactgatgatgtacatgcaaaagataacacaagacctggtgctaatagtccagagatgtggtctgaagctattaaaatcctgaaaggggagtatgctgtccgggcaatcaaggaacataagatggatcaagcaattatcttctgtagaaccaaaattgactgtgataacttggagcagtactttatacaacaaggaggaggacctgataaaaaaggacaccagttctcatgtgtttgtcttcatggtgacagaaagcctcatgagagaaagcaaaacttggaaagatttaagaaaggagatgtaagattcttgatttgcacagatgtagctgctagaggaattgacaaggctcggtcgcttccttatgttattaatgtcacgctcgacgtgataagatgcaatactaccagcttgagctcttggaggattacgcatgc

SEQ ID NO: 449737 - DNA, 834 bp, Homo sapiens
ttaatgtgcttttcactaggacctgataaaaaaggacaccagttctcatgtgtttgtcttcatggtgacagaaagcctcatgagagaaagcaaaacttggaaagatttaagaaaggagatgtaagattcttgatttgcacagatgtagctgctagaggaattgatatccacggtgttccttatgttataaatgtcactctgcccgatgaaaagcaaaactacgtacatcgaattggcagagtaggaagagctgaaaggatgggtctggcaatttccctggtggcaacagaaaaagaaaaggtttggtaccatgtatgtagcagccgtggaaaagggtgttataacacaagactcaaggaagatggaggctgtaccatatggtacaacgagatgcagttactatctgagatagaagaacacctgaactgtaccatttctcaggttgagccggatataaaggtaccagtggatgaatttgatgggaaagttacctacggtcagaaaagggctgctggtggtggaagctataaaggccatgtggatattttggcacctactgttcaagagttggctgcccttgaaaaggaggcgcagacatctttcctgcatcttggctaccttcctaaccagctgttcagaaccttctgatttttacatttactgaataagatttgagtaatgaaagtctgtagtcttaaaactctaaaacagttgtactgcttccaagcagcagtatttatagtaacgtaagctattaatgctaactcttgcatgtcaagaaacattagtcttaggaattcttcaaaaaatggcatcccaatgaaaataaatttg

SEQ ID NO: 449738 - DNA, 1596 bp, Homo sapiens
gtaacaaatacctactggctgccaggcactcactggcattggtgctcagggcaatgaatccagtccatctctccgggtcattcacacaccaaggccctgctcacctttggaaagctgggggactgagtggggagggcacggtgtggtgtcagcctgagcccactggatgaccctaatcaccaaacatctgcttccttctctgtagctgtgaccctgataccgcgtggtgtgctccgaacacatggtgcccagaacgaaggcggcgtccagaagccctaggtcccagaggtccgctcagcggcaggcgcataaggcggggccggcgcgggcctttccttccatcggaaccgttctcccggggctgagtccctgcccggactccggaacgccgaagaccaggggccggaagcgcgcgccgccactgccacgccgtgtcagtcgggagggagggagcgagcaggcgaagccgcggaggacggggtgaagatggcggccttctccgagatgggtgtaatgcctgagattgcacaagctgtggaagagatggattggctcctcccaactgatatccaggctgaatctatcccattgatcttaggaggaggtgatgtacttatggctgcagaaacaggaagtggcaaaactggtgcttttagtattccagttatccagatagtttatgaaactctgaaagaccaacaggaaggcaaaaaaggaaaaacaacaattaaaactggtgcttcagtgctgaacaaatggcagatgaacccatatgacagaggatctgcttttgcaattgggtcagatggtctttgttgtcaaagcagagaagtaaaggaatggcatgggtgtagagctactaaaggattaatgaaagggaaacactactatgaagtatcctgtcatgaccaagggttatgcagggtcgggtggtctaccatgcaggcctctttggacctaggtactgacaagtttggatttggctttggtggaacaggaaagaaatcccataacaaacaatttgataattatggagaggaattcactatgcatgataccattggatgttacctggatatagataagggacatgtcaagttctccaaaaatggaaaagatcttggtctggcatttgaaataccaccacatatgaaaaaccaagccctctttcctgcctgtgttttgaagaatgctgaactgaaatttaacttcggtgaagaggaatttaagtttccaccaaaagatggctttgttgctctttccaaggcaccggatggttacattgtcaaatcacagcactcaggtaatgcacaggtgacacaaacaaagtttctccccaatgctccgaaagctctcattgttgaaccttcccgggagttagctgaacaaactttgaataacatcaagcagtttaagaaatacattgataatcctaaattaagggagcttctgataattggaggtgttgcagcccgggatcagctctctgttttggaaaatggaaagctgacttaatcttaagctagattcctggccctggatgaaactgatgggcctctttcttaaaggtattctgtttattagggagcccctccg

SEQ ID NO: 449739 - DNA, 3587 bp, Homo sapiens
  misc_feature (61)..(61): n is a, c, g, or t
  misc_feature (127)..(127): n is a, c, g, or t
gggacccgttctgctaggaagaaggggagcaggtggtgctgctactcgggaggaagcaganagcctccgtcgctgtcgctgagagcctcacgagtcgaggtcctgcaggtggagctccgcgcagccngccctggttgaaggtttagaacagatgtggaaaaatgtttacttcagagaaaggggttgtggaggaatggttgtcagagtttaagacattaccagaaacatctttaccaaattatgccacaaatttgaaagacaagagttctttagtttcatctctctataaagttatccaggagccacaaagtgagttgctagaacctgtctgtcaccagctctttgaattctatcgcagtggagaggagcagttgcttcaatttacgctgcaatttctcccagaactaatttggtgctaccttgcagtctcagccagcagaaatgtgcatagcagtggatgcattgaagctcttcttctaggggtttacaatttggaaatagttgacaaacagggacataccaaagtattgagttttacgattccatctttatccaaaccatctgtataccatgaaccttccagcattgggtccatggctctgactgagagtgcactatcccagcatggtttgtcaaaagcggtatacagtggacctcatcctcaaagggagatgctgacagcacagaatcggtttgaagtgttgacattccttttgttgtgttacaatgctgccttaacttgcatgcccagtgtttctcttcagtcactgtgtcaaatttgttcaagaatctgtgtttgtggatatcctcgacaacatgtaagaaaatataaaggtataagtagcaggataccagtttcttcaggattcatggtgcaaatgttaacagggatttattttgccttttataatggagaatgggatctagctcaaaaagcactggatgatattatatacagagcccagctagaattatatccagagccattgctggttgctaatgcaataaaggcttcattgcctcatggtcccatgaaatctaataaggaaggtacaaggtgtattcaagttgaaatcacaccaacttcctctcgaatatcaagaaatgcagtaaccagcatgtcaataaggggtcataggtggaaaagacatggaaatacagaattaacaggtcaagaagaactgatggagatatctgaagttgacgagggattttattccagggctgcgtctagtaccagccagtcgggtttatcaaacagtagtcacaattgtagtaacaagccaagtataggaaagaaccacagacggtcaggaggaagcaaaactggaggaaaagaaaaagaaactacaggggaatcttgcaaagatcactttgctcgaaaacaaactcagagagcccaaagtgagaatcttgagcttctctctttgaagagacttactttaacaaccagccaatccctacctaagcctagtagccatggtttggctaagaccgcagcgactgtatttagtaaatcctttgaacaagtcagtggtgtcacagtcccacataacccgtcatctgctgttggttgtggggctgggacagatgccaataggttttccgcttgtagtctccaagaagaaaagcttatttacgtttcagaaagaactgaacttccaatgaagcatcaatcaggtcagcagagacctcctagtattagcattactctgtccacagattaattagtaacatatttttctcccataacctagtgaacctggaaatacaactttgcttctttatgaaagtaccctgggtctttcatccgtattcctgacaggagccctgatgtcttaaattctgaaggctcccctgactttatgaagggaagattgtctaggttgcagtaagttgaaatatggttttgttatttcttgattaagattttttccccttggtttgagtcttttttttccctcctcttatttgttattgttgccctaagattgtcagtgacaataaattttgacaggttgtctaatcaagttggttatgtctcatgtgaggttgtaaggtggtttttcttgttttggtttggtttggttttttaatagctcctattttgatggctgtgtgtttggccttcagagtcaaagggagtctgcatgtatgggaactggttttatagagaatggggcagaggcacaactccaggaattctctagctcctggtcaggaagccaatctgaaaacaggcatgtggaaacacaaaaatgatgtgtatgaaaagcacctgatgaaaatatttgtaagcagatcatctttatgattagaacaatttgctcaaagccctggaaaatgcctggtaacccagtgcctagaatattatatgattccaggggatggctagaggcatttctgttgttatctctgaaacatttttatatcaaaaatcagattgctggtaggtgtgttgttttgaagtgttttatctggatttagcatgtgaagatccctttcaattattaaggtataataggctgtaaagctgatttaccctactgctggactttggaaatcctagttagtttggactcctataattcagagcatacgtcattggaagacttcctggaaatcagtgtaaatcttgcaacatagctctcaagataccactgtataatatgtaattgtttgtctgcaaatgcatttttcatctataaaatgtcatgaaagaaaataaaggtagtgaaatatggacaaaggacatttatatattaactaaagttgtttatgtttgtgttcttaaatttaaaacacgaagaaaaagaaatgtctttcttgttagtgaacaggcctgttttaaatatcttagtatgatatcaaaagaataatcaatttagttacctcccaactaaaaagtaaaaatgaaaaagacgacatggcagaagttgaaacaaacttgtatgtatctgtatgtgacctctagatggaaataaaagtttgatgtttgctagccgtggtccttttggctatggttgcggttcccctgtaaagcaagtgtacttaagtcatcattcagagtgagagagagaaagcacggctgaggctgagtcagttgaccgttgaggaagacctaaggagctgtccagttcttggctctttttcactgtgactgcacagcggtttccttcttcatagtcccttgctgtagtcaccaagagagcatgctagtgttttcctcttgttcctgcttatgcagagctcagatatatgaaaaatttgtatgctttgaaggctgccaaagcatttatactctggacatagttttaactgcaactgctttggctaccagtttaaaccgagttcttcaaaaagcatgaactcgttttcattcattagccctgtttacaatgtggattttgacataaatgaatttgattttcttttagctccagtaacagaatggaataagatctattgccataaattgtagttaagaactgtaaggcaatcgggcagtgaaacttgatattgtattaacttaataggaaccctgtgtacaatttaaaatatttgtaaaatatcactgtgaatttaca

SEQ ID NO: 449740 - DNA, 2948 bp, Homo sapiens
ggcgactctagaggaccccatacagagccagttagaattatatccagagcattgctggttgctaatgcaataaaggcttcattgcctcatggtcccatgaaatctaataaggaaggtacaaggtgtattcaagttgaaatcacaccaacttcctctcgaatatcaagaaatgcagtaaccagcatgtcaataaggggtcataggtggaaaagacatgagcaacctgacaacaataatgatgctactgaattgggcatccttgtcattcctgagattagtgtcacaaatgtggccggagagagaaccgggaatggggaaaaaggcagaacactaggagagattgatgctcagcatatacagggtgtgcaggaaacagccacagatcctagaactgagagcaaaggcttgccagagatcaggaggcaaaaatctgtaagaaaaatgatggaggatggaataaactcacctggcagagtgcagttttagcagagcactttataactgcactccaaggaaatacagaattaacaggtcaagaagaactgatggagatatctgaagttgacgagggattttattccagggctgcgtctagtaccagccagtcgggtttatcaaacagtagtcacaattgtagtaacaagccaagtataggaaagaaccacagacggtcaggaggaagcaaaactggaggaaaagaaaaagaaactacaggggaatcttgcaaagatcactttgctcgaaaacaaactcagagagcccaaagtgagaatcttgagcttctctctttgaagagacttactttaacaaccagccaatccctacctaagcctagtagccatggtttggctaagaccgcagcgactgtatttagtaaatcctttgaacaagtcagtggtgtcacagtcccacataacccgtcatctgctgttggttgtggggctgggacagatgccaataggttttccgcttgtagtctccaagaagaaaagcttatttacgtttcagaaagaactgaacttccaatgaagcatcaatcaggtcagcagagacctcctagtattagcattactctgtccacagattaattagtaacatatttttctcccataacctagtgaacctggaaatacaactttgcttctttatgaaagtaccctgggtctttcatccgtattcctgacaggagccctgatgtcttaaattctgaaggctcccctgactttatgaagggaagattgtctaggttgcagtaagttgaaatatggttttgttatttcttgattaagattttttccccttggtttgagtcttttttttccctcctcttatttgttattgttgccctaagattgtcagtgacaataaattttgacaggttgtctaatcaagttggttatgtctcatgtgaggttgtaaggtggtttttcttgttttggtttggtttggttttttaatagctcctattttgatggctgtgtgtttggccttcagagtcaaagggagtctgcatgtatgggaactggttttatagagaatggggcagaggcacaactccaggaattctctagctcctggtcaggaagccaatctgaaaacaggcatgtggaaacacaaaaatgatgtgtatgaaaagcacctgatgaaaatatttgtaagcagatcatctttatgattagaacaatttgctcaaagccctggaaaatgcctggtaacccagtgcctagaatattatatgattccaggggatggctagaggcatttctgttgttatctctgaaacatttttatatcaaaaatcagattgctggtaggtgtgttgttttgaagtgttttatctggatttagcatgtgaagatccctttcaattattaaggtataataggctgtaaagctgatttaccctactgctggactttggaaatcctagttagtttggactcctataattcagagcatacgtcattggaagacttcctggaaatcagtgtaaatcttgcaacatagctctcaagataccactgtataatatgtaattgtttgtctgcaaatgcatttttcatctataaaatgtcatgaaagaaaataaaggtagtgaaatatggacaaaggacatttatatattaactaaagttgtttatgtttgtgttcttaaatttaaaacacgaagaaaaagaaatgtctttcttgttagtgaacaggcctgttttaaatatcttagtatgatatcaaaagaataatcaatttagttacctcccaactaaaaagtaaaaatgaaaaagacgacatggcagaagttgaaacaaacttgtatgtatctgtatgtgacctctagatggaaataaaagtttgatgtttgctagccgtggtccttttggctatggttgcggttcccctgtaaagcaagtgtacttaagtcatcattcagagtgagagagagaaagcacggctgaggctgagtcagttgaccgttgaggaagacctaaggagctgtccagttcttggctctttttcactgtgactgcacagcggtttccttcttcatagtcccttgctgtagtcaccaagagagcatgctagtgttttcctcttgttcctgcttatgcagagctcagatatatgaaaaatttgtatgctttgaaggctgccaaagcatttatactctggacatagttttaactgcaactgctttggctaccagtttaaaccgagttcttcaaaaagcatgaactcgttttcattcattagccctgtttacaatgtggattttgacataaatgaatttgattttcttttagctccagtaacagaatggaataagatctattgccataaattgtagttaagaactgtaaggcaatcgggcagtgaaacttgatattgtattaacttaataggaaccctgtgtacaatttaaaatatttgtaaaatatcactgtgaatttaca

SEQ ID NO: 449741 - DNA, 3802 bp, Homo sapiens
  misc_feature (61)..(61): n is a, c, g, or t
  misc_feature (127)..(127): n is a, c, g, or t
gggacccgttctgctaggaagaaggggagcaggtggtgctgctactcgggaggaagcaganagcctccgtcgctgtcgctgagagcctcacgagtcgaggtcctgcaggtggagctccgcgcagccngccctggttgaaggtttagaacagatgtggaaaaatgtttacttcagagaaaggggttgtggaggaatggttgtcagagtttaagacattaccagaaacatctttaccaaattatgccacaaatttgaaagacaagagttctttagtttcatctctctataaagttatccaggagccacaaagtgagttgctagaacctgtctgtcaccagctctttgaattctatcgcagtggagaggagcagttgcttcaatttacgctgcaatttctcccagaactaatttggtgctaccttgcagtctcagccagcagaaatgtgcatagcagtggatgcattgaagctcttcttctaggggtttacaatttggaaatagttgacaaacagggacataccaaagtattgagttttacgattccatctttatccaaaccatctgtataccatgaaccttccagcattgggtccatggctctgactgagagtgcactatcccagcatggtttgtcaaaagcggtatacagtggacctcatcctcaaagggagatgctgacagcacagaatcggtttgaagtgttgacattccttttgttgtgttacaatgctgccttaacttgcatgcccagtgtttctcttcagtcactgtgtcaaatttgttcaagaatctgtgtttgtggatatcctcgacaacatgtaagaaaatataaaggtataagtagcaggataccagtttcttcaggattcatggtgcaaatgttaacagggatttattttgccttttataatggagaatgggatctagctcaaaaagcactggatgatattatatacagagcccagctagaattatatccagagccattgctggttgctaatgcaataaaggcttcattgcctcatggtcccatgaaatctaataaggaaggtacaaggtgtattcaagttgaaatcacaccaacttcctctcgaatatcaagaaatgcagtaaccagcatgtcaataaggggtcataggtggaaaagacatgagcaacctgacaacaataatgatgctactgaattgggcatccttgtcattcctgagattagtgtcacaaatgtggccggagagagaaccgggaatggggaaaaaggcagaacactaggagagattgatgctcagcatatacagggtgtgcaggaaacagccacagatcctagaactgagagcaaaggcttgccagagatcaggaggcaaaaatctgaaatacagaattaacaggtcaagaagaactgatggagatatctgaagttgacgagggattttattccagggctgcgtctagtaccagccagtcgggtttatcaaacagtagtcacaattgtagtaacaagccaagtataggaaagaaccacagacggtcaggaggaagcaaaactggaggaaaagaaaaagaaactacaggggaatcttgcaaagatcactttgctcgaaaacaaactcagagagcccaaagtgagaatcttgagcttctctctttgaagagacttactttaacaaccagccaatccctacctaagcctagtagccatggtttggctaagaccgcagcgactgtatttagtaaatcctttgaacaagtcagtggtgtcacagtcccacataacccgtcatctgctgttggttgtggggctgggacagatgccaataggttttccgcttgtagtctccaagaagaaaagcttatttacgtttcagaaagaactgaacttccaatgaagcatcaatcaggtcagcagagacctcctagtattagcattactctgtccacagattaattagtaacatatttttctcccataacctagtgaacctggaaatacaactttgcttctttatgaaagtaccctgggtctttcatccgtattcctgacaggagccctgatgtcttaaattctgaaggctcccctgactttatgaagggaagattgtctaggttgcagtaagttgaaatatggttttgttatttcttgattaagattttttccccttggtttgagtcttttttttccctcctcttatttgttattgttgccctaagattgtcagtgacaataaattttgacaggttgtctaatcaagttggttatgtctcatgtgaggttgtaaggtggtttttcttgttttggtttggtttggttttttaatagctcctattttgatggctgtgtgtttggccttcagagtcaaagggagtctgcatgtatgggaactggttttatagagaatggggcagaggcacaactccaggaattctctagctcctggtcaggaagccaatctgaaaacaggcatgtggaaacacaaaaatgatgtgtatgaaaagcacctgatgaaaatatttgtaagcagatcatctttatgattagaacaatttgctcaaagccctggaaaatgcctggtaacccagtgcctagaatattatatgattccaggggatggctagaggcatttctgttgttatctctgaaacatttttatatcaaaaatcagattgctggtaggtgtgttgttttgaagtgttttatctggatttagcatgtgaagatccctttcaattattaaggtataataggctgtaaagctgatttaccctactgctggactttggaaatcctagttagtttggactcctataattcagagcatacgtcattggaagacttcctggaaatcagtgtaaatcttgcaacatagctctcaagataccactgtataatatgtaattgtttgtctgcaaatgcatttttcatctataaaatgtcatgaaagaaaataaaggtagtgaaatatggacaaaggacatttatatattaactaaagttgtttatgtttgtgttcttaaatttaaaacacgaagaaaaagaaatgtctttcttgttagtgaacaggcctgttttaaatatcttagtatgatatcaaaagaataatcaatttagttacctcccaactaaaaagtaaaaatgaaaaagacgacatggcagaagttgaaacaaacttgtatgtatctgtatgtgacctctagatggaaataaaagtttgatgtttgctagccgtggtccttttggctatggttgcggttcccctgtaaagcaagtgtacttaagtcatcattcagagtgagagagagaaagcacggctgaggctgagtcagttgaccgttgaggaagacctaaggagctgtccagttcttggctctttttcactgtgactgcacagcggtttccttcttcatagtcccttgctgtagtcaccaagagagcatgctagtgttttcctcttgttcctgcttatgcagagctcagatatatgaaaaatttgtatgctttgaaggctgccaaagcatttatactctggacatagttttaactgcaactgctttggctaccagtttaaaccgagttcttcaaaaagcatgaactcgttttcattcattagccctgtttacaatgtggattttgacataaatgaatttgattttcttttagctccagtaacagaatggaataagatctattgccataaattgtagttaagaactgtaaggcaatcgggcagtgaaacttgatattgtattaacttaataggaaccctgtgtacaatttaaaatatttgtaaaatatcactgtgaatttaca

SEQ ID NO: 449742 - DNA, 2886 bp, Homo sapiens
aaaataatctacaatatagagtacaaccttctaaaaaagtctttaaagtattctaataccaattttttaaaagttccttggtaagagctttgattttatactgctttgctactgaaggagagttcacccctagttttactgcgtgatatttctaattgtttcttatcttttgcatgaataggagaattctttctaaaaacttaatggggtatggtttatggcatgctttttgtttaatacactataaattactgtcatttaattacagtgaagtatttttgacattttataataaatgttttgatttatcctttgattttctataatctgttgctttataaattatgctaaagcttaatttatgtaaagcataactgatttggtgttaatcatttaaaaagattgcttaaaatacttaatgttaattaatctttgtcatttctttgtttaggaaatacagaattaacaggtcaagaagaactgatggagatatctgaagttgacgagggattttattccagggctgcgtctagtaccagccagtcgggtttatcaaacagtagtcacaattgtagtaacaagccaagtataggaaagaaccacagacggtcaggaggaagcaaaactggaggaaaagaaaaagaaactacaggggaatcttgcaaagatcactttgctcgaaaacaaactcagagagcccaaagtgagaatcttgagcttctctctttgaagagacttactttaacaaccagccaatccctacctaagcctagtagccatggtttggctaagaccgcagcgactgtatttagtaaatcctttgaacaagtcagtggtgtcacagtcccacataacccgtcatctgctgttggttgtggggctgggacagatgccaataggttttccgcttgtagtctccaagaagaaaagcttatttacgtttcagaaagaactgaacttccaatgaagcatcaatcaggtcagcagagacctcctagtattagcattactctgtccacagattaattagtaacatatttttctcccataacctagtgaacctggaaatacaactttgcttctttatgaaagtaccctgggtctttcatccgtattcctgacaggagccctgatgtcttaaattctgaaggctcccctgactttatgaagggaagattgtctaggttgcagtaagttgaaatatggttttgttatttcttgattaagattttttccccttggtttgagtcttttttttccctcctcttatttgttattgttgccctaagattgtcagtgacaataaattttgacaggttgtctaatcaagttggttatgtctcatgtgaggttgtaaggtggtttttcttgttttggtttggtttggttttttaatagctcctattttgatggctgtgtgtttggccttcagagtcaaagggagtctgcatgtatgggaactggttttatagagaatggggcagaggcacaactccaggaattctctagctcctggtcaggaagccaatctgaaaacaggcatgtggaaacacaaaaatgatgtgtatgaaaagcacctgatgaaaatatttgtaagcagatcatctttatgattagaacaatttgctcaaagccctggaaaatgcctggtaacccagtgcctagaatattatatgattccaggggatggctagaggcatttctgttgttatctctgaaacatttttatatcaaaaatcagattgctggtaggtgtgttgttttgaagtgttttatctggatttagcatgtgaagatccctttcaattattaaggtataataggctgtaaagctgatttaccctactgctggactttggaaatcctagttagtttggactcctataattcagagcatacgtcattggaagacttcctggaaatcagtgtaaatcttgcaacatagctctcaagataccactgtataatatgtaattgtttgtctgcaaatgcatttttcatctataaaatgtcatgaaagaaaataaaggtagtgaaatatggacaaaggacatttatatattaactaaagttgtttatgtttgtgttcttaaatttaaaacacgaagaaaaagaaatgtctttcttgttagtgaacaggcctgttttaaatatcttagtatgatatcaaaagaataatcaatttagttacctcccaactaaaaagtaaaaatgaaaaagacgacatggcagaagttgaaacaaacttgtatgtatctgtatgtgacctctagatggaaataaaagtttgatgtttgctagccgtggtccttttggctatggttgcggttcccctgtaaagcaagtgtacttaagtcatcattcagagtgagagagagaaagcacggctgaggctgagtcagttgaccgttgaggaagacctaaggagctgtccagttcttggctctttttcactgtgactgcacagcggtttccttcttcatagtcccttgctgtagtcaccaagagagcatgctagtgttttcctcttgttcctgcttatgcagagctcagatatatgaaaaatttgtatgctttgaaggctgccaaagcatttatactctggacatagttttaactgcaactgctttggctaccagtttaaaccgagttcttcaaaaagcatgaactcgttttcattcattagccctgtttacaatgtggattttgacataaatgaatttgattttcttttagctccagtaacagaatggaataagatctattgccataaattgtagttaagaactgtaaggcaatcgggcagtgaaacttgatattgtattaacttaataggaaccctgtgtacaatttaaaatatttgtaaaatatcactgtgaatttaca

SEQ ID NO: 449743 - DNA, 3883 bp, Homo sapiens
  misc_feature (61)..(61): n is a, c, g, or t
  misc_feature (127)..(127): n is a, c, g, or t
gggacccgttctgctaggaagaaggggagcaggtggtgctgctactcgggaggaagcaganagcctccgtcgctgtcgctgagagcctcacgagtcgaggtcctgcaggtggagctccgcgcagccngccctggttgaaggtttagaacagatgtggaaaaatgtttacttcagagaaaggggttgtggaggaatggttgtcagagtttaagacattaccagaaacatctttaccaaattatgccacaaatttgaaagacaagagttctttagtttcatctctctataaagttatccaggagccacaaagtgagttgctagaacctgtctgtcaccagctctttgaattctatcgcagtggagaggagcagttgcttcaatttacgctgcaatttctcccagaactaatttggtgctaccttgcagtctcagccagcagaaatgtgcatagcagtggatgcattgaagctcttcttctaggggtttacaatttggaaatagttgacaaacagggacataccaaagtattgagttttacgattccatctttatccaaaccatctgtataccatgaaccttccagcattgggtccatggctctgactgagagtgcactatcccagcatggtttgtcaaaagcggtatacagtggacctcatcctcaaagggagatgctgacagcacagaatcggtttgaagtgttgacattccttttgttgtgttacaatgctgccttaacttgcatgcccagtgtttctcttcagtcactgtgtcaaatttgttcaagaatctgtgtttgtggatatcctcgacaacatgtaagaaaatataaaggtataagtagcaggataccagtttcttcaggattcatggtgcaaatgttaacagggatttattttgccttttataatggagaatgggatctagctcaaaaagcactggatgatattatatacagagcccagctagaattatatccagagccattgctggttgctaatgcaataaaggcttcattgcctcatggtcccatgaaatctaataaggaaggtacaaggtgtattcaagttgaaatcacaccaacttcctctcgaatatcaagaaatgcagtaaccagcatgtcaataaggggtcataggtggaaaagacatgagcaacctgacaacaataatgatgctactgaattgggcatccttgtcattcctgagattagtgtcacaaatgtggccggagagagaaccgggaatggggaaaaaggcagaacactaggagagattgatgctcagcatatacagggtgtgcaggaaacagccacagatcctagaactgagagcaaaggcttgccagagatcaggaggcaaaaatctgtaagaaaaatgatggaggatggaataaactcacctggcagagtgcagttttagcagagcactttataactgcactccaaggaaatacagaattaacaggtcaagaagaactgatggagatatctgaagttgacgagggattttattccagggctgcgtctagtaccagccagtcgggtttatcaaacagtagtcacaattgtagtaacaagccaagtataggaaagaaccacagacggtcaggaggaagcaaaactggaggaaaagaaaaagaaactacaggggaatcttgcaaagatcactttgctcgaaaacaaactcagagagcccaaagtgagaatcttgagcttctctctttgaagagacttactttaacaaccagccaatccctacctaagcctagtagccatggtttggctaagaccgcagcgactgtatttagtaaatcctttgaacaagtcagtggtgtcacagtcccacataacccgtcatctgctgttggttgtggggctgggacagatgccaataggttttccgcttgtagtctccaagaagaaaagcttatttacgtttcagaaagaactgaacttccaatgaagcatcaatcaggtcagcagagacctcctagtattagcattactctgtccacagattaattagtaacatatttttctcccataacctagtgaacctggaaatacaactttgcttctttatgaaagtaccctgggtctttcatccgtattcctgacaggagccctgatgtcttaaattctgaaggctcccctgactttatgaagggaagattgtctaggttgcagtaagttgaaatatggttttgttatttcttgattaagattttttccccttggtttgagtcttttttttccctcctcttatttgttattgttgccctaagattgtcagtgacaataaattttgacaggttgtctaatcaagttggttatgtctcatgtgaggttgtaaggtggtttttcttgttttggtttggtttggttttttaatagctcctattttgatggctgtgtgtttggccttcagagtcaaagggagtctgcatgtatgggaactggttttatagagaatggggcagaggcacaactccaggaattctctagctcctggtcaggaagccaatctgaaaacaggcatgtggaaacacaaaaatgatgtgtatgaaaagcacctgatgaaaatatttgtaagcagatcatctttatgattagaacaatttgctcaaagccctggaaaatgcctggtaacccagtgcctagaatattatatgattccaggggatggctagaggcatttctgttgttatctctgaaacatttttatatcaaaaatcagattgctggtaggtgtgttgttttgaagtgttttatctggatttagcatgtgaagatccctttcaattattaaggtataataggctgtaaagctgatttaccctactgctggactttggaaatcctagttagtttggactcctataattcagagcatacgtcattggaagacttcctggaaatcagtgtaaatcttgcaacatagctctcaagataccactgtataatatgtaattgtttgtctgcaaatgcatttttcatctataaaatgtcatgaaagaaaataaaggtagtgaaatatggacaaaggacatttatatattaactaaagttgtttatgtttgtgttcttaaatttaaaacacgaagaaaaagaaatgtctttcttgttagtgaacaggcctgttttaaatatcttagtatgatatcaaaagaataatcaatttagttacctcccaactaaaaagtaaaaatgaaaaagacgacatggcagaagttgaaacaaacttgtatgtatctgtatgtgacctctagatggaaataaaagtttgatgtttgctagccgtggtccttttggctatggttgcggttcccctgtaaagcaagtgtacttaagtcatcattcagagtgagagagagaaagcacggctgaggctgagtcagttgaccgttgaggaagacctaaggagctgtccagttcttggctctttttcactgtgactgcacagcggtttccttcttcatagtcccttgctgtagtcaccaagagagcatgctagtgttttcctcttgttcctgcttatgcagagctcagatatatgaaaaatttgtatgctttgaaggctgccaaagcatttatactctggacatagttttaactgcaactgctttggctaccagtttaaaccgagttcttcaaaaagcatgaactcgttttcattcattagccctgtttacaatgtggattttgacataaatgaatttgattttcttttagctccagtaacagaatggaataagatctattgccataaattgtagttaagaactgtaaggcaatcgggcagtgaaacttgatattgtattaacttaataggaaccctgtgtacaatttaaaatatttgtaaaatatcactgtgaatttaca

SEQ ID NO: 449744 - DNA, 2501 bp, Homo sapiens
attcggcaccagggagaacagcaggaagactactcaatgttgaatttcctgccaccaaactcagaggaaatacagaattaacaggtcaagaagaactgatggagatatctgaagttgacgagggattttattccagggctgcgtctagtaccagccagtcgggtttatcaaacagtagtcacaattgtagtaacaagccaagtataggaaagaaccacagacggtcaggaggaagcaaaactggaggaaaagaaaaagaaactacaggggaatcttgcaaagatcactttgctcgaaaacaaactcagagagcccaaagtgagaatcttgagcttctctctttgaagagacttactttaacaaccagccaatccctacctaagcctagtagccatggtttggctaagaccgcagcgactgtatttagtaaatcctttgaacaagtcagtggtgtcacagtcccacataacccgtcatctgctgttggttgtggggctgggacagatgccaataggttttccgcttgtagtctccaagaagaaaagcttatttacgtttcagaaagaactgaacttccaatgaagcatcaatcaggtcagcagagacctcctagtattagcattactctgtccacagattaattagtaacatatttttctcccataacctagtgaacctggaaatacaactttgcttctttatgaaagtaccctgggtctttcatccgtattcctgacaggagccctgatgtcttaaattctgaaggctcccctgactttatgaagggaagattgtctaggttgcagtaagttgaaatatggttttgttatttcttgattaagattttttccccttggtttgagtcttttttttccctcctcttatttgttattgttgccctaagattgtcagtgacaataaattttgacaggttgtctaatcaagttggttatgtctcatgtgaggttgtaaggtggtttttcttgttttggtttggtttggttttttaatagctcctattttgatggctgtgtgtttggccttcagagtcaaagggagtctgcatgtatgggaactggttttatagagaatggggcagaggcacaactccaggaattctctagctcctggtcaggaagccaatctgaaaacaggcatgtggaaacacaaaaatgatgtgtatgaaaagcacctgatgaaaatatttgtaagcagatcatctttatgattagaacaatttgctcaaagccctggaaaatgcctggtaacccagtgcctagaatattatatgattccaggggatggctagaggcatttctgttgttatctctgaaacatttttatatcaaaaatcagattgctggtaggtgtgttgttttgaagtgttttatctggatttagcatgtgaagatccctttcaattattaaggtataataggctgtaaagctgatttaccctactgctggactttggaaatcctagttagtttggactcctataattcagagcatacgtcattggaagacttcctggaaatcagtgtaaatcttgcaacatagctctcaagataccactgtataatatgtaattgtttgtctgcaaatgcatttttcatctataaaatgtcatgaaagaaaataaaggtagtgaaatatggacaaaggacatttatatattaactaaagttgtttatgtttgtgttcttaaatttaaaacacgaagaaaaagaaatgtctttcttgttagtgaacaggcctgttttaaatatcttagtatgatatcaaaagaataatcaatttagttacctcccaactaaaaagtaaaaatgaaaaagacgacatggcagaagttgaaacaaacttgtatgtatctgtatgtgacctctagatggaaataaaagtttgatgtttgctagccgtggtccttttggctatggttgcggttcccctgtaaagcaagtgtacttaagtcatcattcagagtgagagagagaaagcacggctgaggctgagtcagttgaccgttgaggaagacctaaggagctgtccagttcttggctctttttcactgtgactgcacagcggtttccttcttcatagtcccttgctgtagtcaccaagagagcatgctagtgttttcctcttgttcctgcttatgcagagctcagatatatgaaaaatttgtatgctttgaaggctgccaaagcatttatactctggacatagttttaactgcaactgctttggctaccagtttaaaccgagttcttcaaaaagcatgaactcgttttcattcattagccctgtttacaatgtggattttgacataaatgaatttgattttcttttagctccagtaacagaatggaataagatctattgccataaattgtagttaagaactgtaaggcaatcgggcagtgaaacttgatattgtattaacttaataggaaccctgtgtacaatttaaaatatttgtaaaatatcactgtgaatttaca

SEQ ID NO: 449745 - DNA, 2071 bp, Homo sapiens
cccccgggtgcgcctgcgcggagctcgtggccgcgcctgctcccgccgggggctccttgctcggccgggccgcggccatgggagaggccgaggtgggcggcgggggcgccgcaggcgacaagggcccgggggaggcggccaccagcccggcggaggagacagtggtgtggagccccgaggtggaggtgtgcctcttccacgccatgctgggccacaagcccgtcggtgtgaaccgacacttccacatgatttgtattcgggacaagttcagccagaacatcgggcggcaggtcccatccaaggtcatctgggaccatctgagcaccatgtacgacatgcaggcgctgcatgagtctgagattcttccattcccgaatccagagaggaacttcgtccttccagaagagatcattcaggaggtccgagaaggaaaagtgatgatagaagaggagatgaaagaggagatgaaggaagacgtggacccccacaatggggctgacgatgttttttcatcttcagggagtttggggaaagcatcagaaaaatccagcaaagacaaagagaagaactcctcagacttggggtgcaaagaaggcgcagacaagcggaagcgcagccgggtcaccgacaaagtcctgaccgcaaacagcaacccttccagtcccagtgctgccaagcggcgccgcacgtagaccctcagccctggtggcggcagagaagcgggcgaggcactgtggtcgctgagggggttggctgggtctgagtgccaccccccaggccacagtgataccatcccagtgccatgagcccacactgcccgccctcaggctctcaggtgaacgtggccgtcagcggggaaacgtgtgtgtcagttggaccatgtgggaccctgatggacctgaaagaccaggatcggtccagctcagatattgagggctctgaagcctagttctgtcttctctggagcagctgtggcttccccgtggctgcttggtgacatggattagcgctacgtgggctgcagcatttgggatccaggctacctagaggggcatcgggccagggaaaacctcggattagcaagcaataaaaacatgacctcactcttcctcaaaggagcccctggtcttccctgtgtgactcagttctttccatctgtttgtcccgctgcaagcctctttctgcgctgactgtgacatcggaacgtggccttcctgtcaccccctccgtgccacgcactgaaggccacccccacccacctgggaaactaagaactggatattttgcctcattcacttgtactgtaacaatgtatataatttggttggtatttcactatttaatttttaagaagcctattttactagtgttttatatgaacaaagtactgcagaagttaaacctgtgttgtattttttctgagatgttttgctttaagagatactttttgctcagtttttatatgccagatacagagaatttgtagcggttatttttgtatgatctagtaacttgcaaacagaccaaatggatgagaggcggggaccgtgcagctgtcggctgatgaggaggcggccgccccagtgctgatggagatgccactttcgtgtgactgcgaacattaaagcacaaaaaaatccaacctggagttgtgtgattttgataccaaagtaagttcacttttcctccaaaaggaagtttttatttttccaagatttataactaaagcatacacttagatgacttattaacattcacttgatacaacatataaacaaaatagtaacagattctgagtggttattttgtggactgtgacaagcacttcaaatacaaaatgttaggagggcaaaacggtgcgggccctcgtaggtcaggcaggcaccagtgggctccttcctgctgaaagctgcggctgtgagatgagaccgctggctgggtcacagagtgaaatccagcgttccgtgtgcggacgaggagacaagctgtcctggccagccatcgcaccccaatgtcttcagcttgacgttgcttctctgccagtggagcctcctccaccacctgggaacat

SEQ ID NO: 449746 - DNA, 2376 bp, Homo sapiens
cccccgggtgcgcctgcgcggagctcgtggccgcgcctgctcccgccgggggctccttgctcggccgggccgcggccatgggagaggccgaggtgggcggcgggggcgccgcaggcgacaagggcccgggggaggcggccaccagcccggcggaggagacagtggtgtggagccccgaggtggaggtgtgcctcttccacgccatgctgggccacaagcccgtcggtgtgaaccgacacttccacatgatttgtattcgggacaagttcagccagaacatcgggcggcaggtcccatccaaggtcatctgggaccatctgagcaccatgtacgacatgcaggcgctgcatgagtctgagattcttccattcccgaatccagagaggaacttcgtccttccagaagagatcattcaggaggtccgagaaggtgaggctcgggaaaggttgggcttgggattcagaaaaggccagaccctggccaagggcagggaggtgagggtgaggaccccgggcctccagggaggtgtgagggtccagcgcagaccccgccctacctgtgcttgggtggtcttggaacctccgggattggagaggactttgtttgagagcagtggctggacggaagctgaggcctgtgtgggcagcaagcgtcggagcagtccctggcctgaccatcccccagcgtcggccaccaccgtgggttttcggtgagcgtcagctgtctcctccacagaaaagtgatgatagaagaggagatgaaagaggagatgaaggaagacgtggacccccacaatggggctgacgatgttttttcatcttcagggagtttggggaaagcatcagaaaaatccagcaaagacaaagagaagaactcctcagacttggggtgcaaagaaggcgcagacaagcggaagcgcagccgggtcaccgacaaagtcctgaccgcaaacagcaacccttccagtcccagtgctgccaagcggcgccgcacgtagaccctcagccctggtggcggcagagaagcgggcgaggcactgtggtcgctgagggggttggctgggtctgagtgccaccccccaggccacagtgataccatcccagtgccatgagcccacactgcccgccctcaggctctcaggtgaacgtggccgtcagcggggaaacgtgtgtgtcagttggaccatgtgggaccctgatggacctgaaagaccaggatcggtccagctcagatattgagggctctgaagcctagttctgtcttctctggagcagctgtggcttccccgtggctgcttggtgacatggattagcgctacgtgggctgcagcatttgggatccaggctacctagaggggcatcgggccagggaaaacctcggattagcaagcaataaaaacatgacctcactcttcctcaaaggagcccctggtcttccctgtgtgactcagttctttccatctgtttgtcccgctgcaagcctctttctgcgctgactgtgacatcggaacgtggccttcctgtcaccccctccgtgccacgcactgaaggccacccccacccacctgggaaactaagaactggatattttgcctcattcacttgtactgtaacaatgtatataatttggttggtatttcactatttaatttttaagaagcctattttactagtgttttatatgaacaaagtactgcagaagttaaacctgtgttgtattttttctgagatgttttgctttaagagatactttttgctcagtttttatatgccagatacagagaatttgtagcggttatttttgtatgatctagtaacttgcaaacagaccaaatggatgagaggcggggaccgtgcagctgtcggctgatgaggaggcggccgccccagtgctgatggagatgccactttcgtgtgactgcgaacattaaagcacaaaaaaatccaacctggagttgtgtgattttgataccaaagtaagttcacttttcctccaaaaggaagtttttatttttccaagatttataactaaagcatacacttagatgacttattaacattcacttgatacaacatataaacaaaatagtaacagattctgagtggttattttgtggactgtgacaagcacttcaaatacaaaatgttaggagggcaaaacggtgcgggccctcgtaggtcaggcaggcaccagtgggctccttcctgctgaaagctgcggctgtgagatgagaccgctggctgggtcacagagtgaaatccagcgttccgtgtgcggacgaggagacaagctgtcctggccagccatcgcaccccaatgtcttcagcttgacgttgcttctctgccagtggagcctcctccaccacctgggaacat

SEQ ID NO: 449747 - DNA, 2192 bp, Homo sapiens
cccccgggtgcgcctgcgcggagctcgtggccgcgcctgctcccgccgggggctccttgctcggccgggccgcggccatgggagaggccgaggtgggcggcgggggcgccgcaggcgacaagggcccgggggaggcggccaccagcccggcggaggagacagtggtgtggagccccgaggtggaggtgtgcctcttccacgccatgctgggccacaagcccgtcggtgtgaaccgacacttccacatgatttgtattcgggacaagttcagccagaacatcgggcggcaggtcccatccaaggtcatctgggaccatctgagcaccatgtacgacatgcaggcgctgcatgagtctgagattcttccattcccgaatccagagaggaacttcgtccttccagaagagatcattcaggaggtccgagaagtggctggacggaagctgaggcctgtgtgggcagcaagcgtcggagcagtccctggcctgaccatcccccagcgtcggccaccaccgtgggttttcggtgagcgtcagctgtctcctccacagaaaagtgatgatagaagaggagatgaaagaggagatgaaggaagacgtggacccccacaatggggctgacgatgttttttcatcttcagggagtttggggaaagcatcagaaaaatccagcaaagacaaagagaagaactcctcagacttggggtgcaaagaaggcgcagacaagcggaagcgcagccgggtcaccgacaaagtcctgaccgcaaacagcaacccttccagtcccagtgctgccaagcggcgccgcacgtagaccctcagccctggtggcggcagagaagcgggcgaggcactgtggtcgctgagggggttggctgggtctgagtgccaccccccaggccacagtgataccatcccagtgccatgagcccacactgcccgccctcaggctctcaggtgaacgtggccgtcagcggggaaacgtgtgtgtcagttggaccatgtgggaccctgatggacctgaaagaccaggatcggtccagctcagatattgagggctctgaagcctagttctgtcttctctggagcagctgtggcttccccgtggctgcttggtgacatggattagcgctacgtgggctgcagcatttgggatccaggctacctagaggggcatcgggccagggaaaacctcggattagcaagcaataaaaacatgacctcactcttcctcaaaggagcccctggtcttccctgtgtgactcagttctttccatctgtttgtcccgctgcaagcctctttctgcgctgactgtgacatcggaacgtggccttcctgtcaccccctccgtgccacgcactgaaggccacccccacccacctgggaaactaagaactggatattttgcctcattcacttgtactgtaacaatgtatataatttggttggtatttcactatttaatttttaagaagcctattttactagtgttttatatgaacaaagtactgcagaagttaaacctgtgttgtattttttctgagatgttttgctttaagagatactttttgctcagtttttatatgccagatacagagaatttgtagcggttatttttgtatgatctagtaacttgcaaacagaccaaatggatgagaggcggggaccgtgcagctgtcggctgatgaggaggcggccgccccagtgctgatggagatgccactttcgtgtgactgcgaacattaaagcacaaaaaaatccaacctggagttgtgtgattttgataccaaagtaagttcacttttcctccaaaaggaagtttttatttttccaagatttataactaaagcatacacttagatgacttattaacattcacttgatacaacatataaacaaaatagtaacagattctgagtggttattttgtggactgtgacaagcacttcaaatacaaaatgttaggagggcaaaacggtgcgggccctcgtaggtcaggcaggcaccagtgggctccttcctgctgaaagctgcggctgtgagatgagaccgctggctgggtcacagagtgaaatccagcgttccgtgtgcggacgaggagacaagctgtcctggccagccatcgcaccccaatgtcttcagcttgacgttgcttctctgccagtggagcctcctccaccacctgggaacat

SEQ ID NO: 449748 - DNA, 2058 bp, Homo sapiens
cttaaacaaaactctctatttgatatcagcatgagtctgagattcttccattcccgaatccagagaggaacttcgtccttccagaagagatcattcaggaggtccgagaaggtgaggctcgggaaaggttgggcttgggattcagaaaaggccagaccctggccaagggcagggaggtgagggtgaggaccccgggcctccagggaggtgtgagggtccagcgcagaccccgccctacctgtgcttgggtggtcttggaacctccgggattggagaggactttgtttgagagcagtggctggacggaagctgaggcctgtgtgggcagcaagcgtcggagcagtccctggcctgaccatcccccagcgtcggccaccaccgtgggttttcggtgagcgtcagctgtctcctccacagaaaagtgatgatagaagaggagatgaaagaggagatgaaggaagacgtggacccccacaatggggctgacgatgttttttcatcttcagggagtttggggaaagcatcagaaaaatccagcaaagacaaagagaagaactcctcagacttggggtgcaaagaaggcgcagacaagcggaagcgcagccgggtcaccgacaaagtcctgaccgcaaacagcaacccttccagtcccagtgctgccaagcggcgccgcacgtagaccctcagccctggtggcggcagagaagcgggcgaggcactgtggtcgctgagggggttggctgggtctgagtgccaccccccaggccacagtgataccatcccagtgccatgagcccacactgcccgccctcaggctctcaggtgaacgtggccgtcagcggggaaacgtgtgtgtcagttggaccatgtgggaccctgatggacctgaaagaccaggatcggtccagctcagatattgagggctctgaagcctagttctgtcttctctggagcagctgtggcttccccgtggctgcttggtgacatggattagcgctacgtgggctgcagcatttgggatccaggctacctagaggggcatcgggccagggaaaacctcggattagcaagcaataaaaacatgacctcactcttcctcaaaggagcccctggtcttccctgtgtgactcagttctttccatctgtttgtcccgctgcaagcctctttctgcgctgactgtgacatcggaacgtggccttcctgtcaccccctccgtgccacgcactgaaggccacccccacccacctgggaaactaagaactggatattttgcctcattcacttgtactgtaacaatgtatataatttggttggtatttcactatttaatttttaagaagcctattttactagtgttttatatgaacaaagtactgcagaagttaaacctgtgttgtattttttctgagatgttttgctttaagagatactttttgctcagtttttatatgccagatacagagaatttgtagcggttatttttgtatgatctagtaacttgcaaacagaccaaatggatgagaggcggggaccgtgcagctgtcggctgatgaggaggcggccgccccagtgctgatggagatgccactttcgtgtgactgcgaacattaaagcacaaaaaaatccaacctggagttgtgtgattttgataccaaagtaagttcacttttcctccaaaaggaagtttttatttttccaagatttataactaaagcatacacttagatgacttattaacattcacttgatacaacatataaacaaaatagtaacagattctgagtggttattttgtggactgtgacaagcacttcaaatacaaaatgttaggagggcaaaacggtgcgggccctcgtaggtcaggcaggcaccagtgggctccttcctgctgaaagctgcggctgtgagatgagaccgctggctgggtcacagagtgaaatccagcgttccgtgtgcggacgaggagacaagctgtcctggccagccatcgcaccccaatgtcttcagcttgacgttgcttctctgccagtggagcctcctccaccacctgggaacat

SEQ ID NO: 449749 - DNA, 2017 bp, Homo sapiens
cccccgggtgcgcctgcgcggagctcgtggccgcgcctgctcccgccgggggctccttgctcggccgggccgcggccatgggagaggccgaggtgggcggcgggggcgccgcaggcgacaagggcccgggggaggcggccaccagcccggcggaggagacagtggtgtggagccccgaggtggaggtgtgcctcttccacgccatgctgggccacaagcccgtcggtgtgaaccgacacttccacatgatttgtattcgggacaagttcagccagaacatcgggcggcaggtcccatccaaggtcatctgggaccatctgagcaccatgtacgacatgcaggcgctgcatgagtctgagattcttccattcccgaatccagagaggaacttcgtccttccagaagagatcattcaggaggtccgagaaggaaaagtgatgatagaagaggagatgaaagaggagatgaaggaagacgtggacccccacaatggggctgacgatgttttttcatcttcagggagtttggggaaagcatcagaaaaatccagcaaagacaaagagaagaactcctcagacttggggtgcaaagaaggcgcagacaagcggaagcgcagccgggtcaccgacaaagtcctgaccgcaaacagcaacccttccagtcccagtgctgccaagcggcgccgcacgtagaccctcagccctggtggcggcagagaagcgggcgaggcactgtggtcgctgagggggttggctgggtctgagtgccaccccccaggccacagtgataccatcccagtgccatgagcccacactgcccgccctcaggctctcaggtgaacgtggccgtcagcggggaaacgtgtgtgtcagttggaccatgtgggaccctgatggacctgaaagaccaggatcggtccagctcagatattgagggctctgaagcctagttctgtcttctctggagcagctgtggcttccccgtggctgcttggtgacatggattagcgctacgtgggctgcagcatttgggatccaggctacctagaggggcatcgggccagggaaaacctcggattagcaagcaataaattctttccatctgtttgtcccgctgcaagcctctttctgcgctgactgtgacatcggaacgtggccttcctgtcaccccctccgtgccacgcactgaaggccacccccacccacctgggaaactaagaactggatattttgcctcattcacttgtactgtaacaatgtatataatttggttggtatttcactatttaatttttaagaagcctattttactagtgttttatatgaacaaagtactgcagaagttaaacctgtgttgtattttttctgagatgttttgctttaagagatactttttgctcagtttttatatgccagatacagagaatttgtagcggttatttttgtatgatctagtaacttgcaaacagaccaaatggatgagaggcggggaccgtgcagctgtcggctgatgaggaggcggccgccccagtgctgatggagatgccactttcgtgtgactgcgaacattaaagcacaaaaaaatccaacctggagttgtgtgattttgataccaaagtaagttcacttttcctccaaaaggaagtttttatttttccaagatttataactaaagcatacacttagatgacttattaacattcacttgatacaacatataaacaaaatagtaacagattctgagtggttattttgtggactgtgacaagcacttcaaatacaaaatgttaggagggcaaaacggtgcgggccctcgtaggtcaggcaggcaccagtgggctccttcctgctgaaagctgcggctgtgagatgagaccgctggctgggtcacagagtgaaatccagcgttccgtgtgcggacgaggagacaagctgtcctggccagccatcgcaccccaatgtcttcagcttgacgttgcttctctgccagtggagcctcctccaccacctgggaacat

SEQ ID NO: 449750 - DNA, 1640 bp, Homo sapiens
cccccgggtgcgcctgcgcggagctcgtggccgcgcctgctcccgccgggggctccttgctcggccgggccgcggccatgggagaggccgaggtgggcggcgggggcgccgcaggcgacaagggcccgggggaggcggccaccagcccggcggaggagacagtggtgtggagccccgaggtggaggtgtgcctcttccacgccatgctgggccacaagcccgtcggtgtgaaccgacacttccacatgatttgtattcgggacaagttcagccagaacatcgggcggcaggtcccatccaaggtcatctgggaccatctgagcaccatgtacgacatgcaggcgctgcatgagtctgagattcttccattcccgaatccagagaggaacttcgtccttccagaagagatcattcaggaggtccgagaaggaaaagtgatgatagaagaggagatgaaagaggagatgaaggaagacgtggacccccacaatggggctgacgatgttttttcatcttcagggagtttggggaaagcatcagaaaaatccagcaaagacaaagagaagaactcctcagacttggggtgcaaagaaggcgcagacaagcggaagcgcagccgggtcaccgacaaagtcctgaccgcaaacagcaacccttccagtcccagtgctgccaagcggcgccgcacgtagaccctcagccctggtggcggcagagaagcgggcgaggcactgtggtcgctgagggggttggctgggtctgagtgccaccccccaggccacagtgataccatcccagtgccatgagcccacactgcccgccctcaggctctcaggtgaacgtggccgtcagcggggaaacgtgtgtgtcagttggaccatgtgggaccctgatggacctgaaagaccaggatcggtccagctcagatattgagggctctgaagcctagttctgtcttctctggagcagctgtggcttccccgtggctgcttggtgacatggattagcgctacgtgggctgcagcatttgggatccaggctacctagaggggcatcgggccagggaaaacctcggattagcaagcaataaaaacatgacctcactcttcctcaaaggagcccctggtcttccctgtgtgactcagttctttccatctgtttgtcccgctgcaagcctctttctgcgctgactgtgacatcggaacgtggccttcctgtcaccccctccgtgccacgcactgaaggccacccccacccacctgggaaactaagaactggatattttgcctcattcacttgtactgtaacaatgtatataatttggttggtatttcactatttaatttttaagaagcctattttactagtgttttatatgaacaaagtactgcagaagttaaacctgtgttgtattttttctgagatgttttgctttaagagatactttttgctcagtttttatatgccagatacagagaatttgtagcggttatttttgtatgatctagtaacttgcaaacagaccaaatggatgagaggcggggaccgtgcagctgtcggctgatgaggaggcggccgccccagtgctgatggagatgccactttcgtgtgactgcgaacattaaagcacaaaaaaatcc

SEQ ID NO: 449751 - DNA, 2031 bp, Homo sapiens
cccccgggtgcgcctgcgcggagctcgtggccgcgcctgctcccgccgggggctccttgctcggccgggccgcggccatgggagaggccgaggtgggcggcgggggcgccgcaggcgacaagggcccgggggaggcggccaccagcccggcggaggagacagtggtgtggagccccgaggtggaggtgtgaaccgacacttccacatgatttgtattcgggacaagttcagccagaacatcgggcggcaggtcccatccaaggtcatctgggaccatctgagcaccatgtacgacatgcaggcgctgcatgagtctgagattcttccattcccgaatccagagaggaacttcgtccttccagaagagatcattcaggaggtccgagaaggaaaagtgatgatagaagaggagatgaaagaggagatgaaggaagacgtggacccccacaatggggctgacgatgttttttcatcttcagggagtttggggaaagcatcagaaaaatccagcaaagacaaagagaagaactcctcagacttggggtgcaaagaaggcgcagacaagcggaagcgcagccgggtcaccgacaaagtcctgaccgcaaacagcaacccttccagtcccagtgctgccaagcggcgccgcacgtagaccctcagccctggtggcggcagagaagcgggcgaggcactgtggtcgctgagggggttggctgggtctgagtgccaccccccaggccacagtgataccatcccagtgccatgagcccacactgcccgccctcaggctctcaggtgaacgtggccgtcagcggggaaacgtgtgtgtcagttggaccatgtgggaccctgatggacctgaaagaccaggatcggtccagctcagatattgagggctctgaagcctagttctgtcttctctggagcagctgtggcttccccgtggctgcttggtgacatggattagcgctacgtgggctgcagcatttgggatccaggctacctagaggggcatcgggccagggaaaacctcggattagcaagcaataaaaacatgacctcactcttcctcaaaggagcccctggtcttccctgtgtgactcagttctttccatctgtttgtcccgctgcaagcctctttctgcgctgactgtgacatcggaacgtggccttcctgtcaccccctccgtgccacgcactgaaggccacccccacccacctgggaaactaagaactggatattttgcctcattcacttgtactgtaacaatgtatataatttggttggtatttcactatttaatttttaagaagcctattttactagtgttttatatgaacaaagtactgcagaagttaaacctgtgttgtattttttctgagatgttttgctttaagagatactttttgctcagtttttatatgccagatacagagaatttgtagcggttatttttgtatgatctagtaacttgcaaacagaccaaatggatgagaggcggggaccgtgcagctgtcggctgatgaggaggcggccgccccagtgctgatggagatgccactttcgtgtgactgcgaacattaaagcacaaaaaaatccaacctggagttgtgtgattttgataccaaagtaagttcacttttcctccaaaaggaagtttttatttttccaagatttataactaaagcatacacttagatgacttattaacattcacttgatacaacatataaacaaaatagtaacagattctgagtggttattttgtggactgtgacaagcacttcaaatacaaaatgttaggagggcaaaacggtgcgggccctcgtaggtcaggcaggcaccagtgggctccttcctgctgaaagctgcggctgtgagatgagaccgctggctgggtcacagagtgaaatccagcgttccgtgtgcggacgaggagacaagctgtcctggccagccatcgcaccccaatgtcttcagcttgacgttgcttctctgccagtggagcctcctccaccacctgggaacat

SEQ ID NO: 449752 - DNA, 2158 bp, Homo sapiens
cccccgggtgcgcctgcgcggagctcgtggccgcgcctgctcccgccgggggctccttgctcggccgggccgcggccatgggagaggccgaggtgggcggcgggggcgccgcaggcgacaagggcccgggggaggcggccaccagcccggcggaggagacagtggtgtggagccccgaggtggaggtgtgcctcttccacgccatgctgggccacaagcccgtcggtgtgaaccgacacttccacatgatttgtattcgggacaagttcagccagaacatcgggcggcaggtcccatccaaggtcatctgggaccatctgagcaccatgtacgacatgcaggcgctgagaggaacttcgtccttccagaagagatcattcaggaggtccgagaagtggctggacggaagctgaggcctgtgtgggcagcaagcgtcggagcagtccctggcctgaccatcccccagcgtcggccaccaccgtgggttttcggtgagcgtcagctgtctcctccacagaaaagtgatgatagaagaggagatgaaagaggagatgaaggaagacgtggacccccacaatggggctgacgatgttttttcatcttcagggagtttggggaaagcatcagaaaaatccagcaaagacaaagagaagaactcctcagacttggggtgcaaagaaggcgcagacaagcggaagcgcagccgggtcaccgacaaagtcctgaccgcaaacagcaacccttccagtcccagtgctgccaagcggcgccgcacgtagaccctcagccctggtggcggcagagaagcgggcgaggcactgtggtcgctgagggggttggctgggtctgagtgccaccccccaggccacagtgataccatcccagtgccatgagcccacactgcccgccctcaggctctcaggtgaacgtggccgtcagcggggaaacgtgtgtgtcagttggaccatgtgggaccctgatggacctgaaagaccaggatcggtccagctcagatattgagggctctgaagcctagttctgtcttctctggagcagctgtggcttccccgtggctgcttggtgacatggattagcgctacgtgggctgcagcatttgggatccaggctacctagaggggcatcgggccagggaaaacctcggattagcaagcaataaaaacatgacctcactcttcctcaaaggagcccctggtcttccctgtgtgactcagttctttccatctgtttgtcccgctgcaagcctctttctgcgctgactgtgacatcggaacgtggccttcctgtcaccccctccgtgccacgcactgaaggccacccccacccacctgggaaactaagaactggatattttgcctcattcacttgtactgtaacaatgtatataatttggttggtatttcactatttaatttttaagaagcctattttactagtgttttatatgaacaaagtactgcagaagttaaacctgtgttgtattttttctgagatgttttgctttaagagatactttttgctcagtttttatatgccagatacagagaatttgtagcggttatttttgtatgatctagtaacttgcaaacagaccaaatggatgagaggcggggaccgtgcagctgtcggctgatgaggaggcggccgccccagtgctgatggagatgccactttcgtgtgactgcgaacattaaagcacaaaaaaatccaacctggagttgtgtgattttgataccaaagtaagttcacttttcctccaaaaggaagtttttatttttccaagatttataactaaagcatacacttagatgacttattaacattcacttgatacaacatataaacaaaatagtaacagattctgagtggttattttgtggactgtgacaagcacttcaaatacaaaatgttaggagggcaaaacggtgcgggccctcgtaggtcaggcaggcaccagtgggctccttcctgctgaaagctgcggctgtgagatgagaccgctggctgggtcacagagtgaaatccagcgttccgtgtgcggacgaggagacaagctgtcctggccagccatcgcaccccaatgtcttcagcttgacgttgcttctctgccagtggagcctcctccaccacctgggaacat

SEQ ID NO: 449753 - DNA, 1945 bp, Homo sapiens
cccccgggtgcgcctgcgcggagctcgtggccgcgcctgctcccgccgggggctccttgctcggccgggccgcggccatgggagaggccgaggtgggcggcgggggcgccgcaggcgacaagggcccgggggaggcggccaccagcccggcggaggagacagtggtgtggagccccgaggtggaggtgtgcctcttccacgccatgctgggccacaagcccgtcggtgtgaaccgacacttccacatgatttgtattcgggacaagttcagccagaacatcgggcggcaggtcccatccaaggtcatctgggaccatctgagcaccatgtacgacatgcaggcgctgcatgagtctgagattcttccattcccgaatccagagaggaacttcgtccttccagaagagatcattcaggaggtccgagaaggaaaagtgatgatagaagaggagatgaaagaggagatgaaggaagacgtggacccccacaatggggctgacgatgttttttcatcttcagggagtttggggaaagcatcagaaaaatccagcaaagacaaagagaagaactcctcagacttggggtgcaaagaaggcgcagacaagcggaagcgcagccgggtcaccgacaaagtcctgaccgcaaacagcaacccttccagtcccagtgctgccaagcggcgccgcacgtagacccctcaggctctcaggtgaacgtggccgtcagcggggaaacgtgtgtgtcagttggaccatgtgggaccctgatggacctgaaagaccaggatcggtccagctcagatattgagggctctgaagcctagttctgtcttctctggagcagctgtggcttccccgtggctgcttggtgacatggattagcgctacgtgggctgcagcatttgggatccaggctacctagaggggcatcgggccagggaaaacctcggattagcaagcaataaaaacatgacctcactcttcctcaaaggagcccctggtcttccctgtgtgactcagttctttccatctgtttgtcccgctgcaagcctctttctgcgctgactgtgacatcggaacgtggccttcctgtcaccccctccgtgccacgcactgaaggccacccccacccacctgggaaactaagaactggatattttgcctcattcacttgtactgtaacaatgtatataatttggttggtatttcactatttaatttttaagaagcctattttactagtgttttatatgaacaaagtactgcagaagttaaacctgtgttgtattttttctgagatgttttgctttaagagatactttttgctcagtttttatatgccagatacagagaatttgtagcggttatttttgtatgatctagtaacttgcaaacagaccaaatggatgagaggcggggaccgtgcagctgtcggctgatgaggaggcggccgccccagtgctgatggagatgccactttcgtgtgactgcgaacattaaagcacaaaaaaatccaacctggagttgtgtgattttgataccaaagtaagttcacttttcctccaaaaggaagtttttatttttccaagatttataactaaagcatacacttagatgacttattaacattcacttgatacaacatataaacaaaatagtaacagattctgagtggttattttgtggactgtgacaagcacttcaaatacaaaatgttaggagggcaaaacggtgcgggccctcgtaggtcaggcaggcaccagtgggctccttcctgctgaaagctgcggctgtgagatgagaccgctggctgggtcacagagtgaaatccagcgttccgtgtgcggacgaggagacaagctgtcctggccagccatcgcaccccaatgtcttcagcttgacgttgcttctctgccagtggagcctcctccaccacctgggaacat

SEQ ID NO: 449754 - DNA, 547 bp, Homo sapiens
gctcggtacctcccttcacagccaaccttggcagttatagcaggagaacactgtcttaatatttctttacattctttcaaaaggcaaaataggattgccctgtattgatgtagaaatgtctgtaaacagagcttgtatggtttgctgggtcaaacaatgtttccaacttaaaatcaatctcattgccactttaactacttttagtcatatttattaagtaatgcagtttgtactttttttattttgtaacattttgtgatttttttgtacaaaactgtatttgtacaatagagcaattcccagctgatggaatgaatgaataaaatgcaaaattatacttttacaatgcctttttggatagagtggtttttaaattgtgatgtttgtaggaaactttcttgcatgtatgcatgtacacaattttttttttccataaagatgccacagcaatagagaggtttcctaaattatcacatgaagaggataggctaatcatgagtaatttcaaaggataagtctgaataaaatataatttaaaagtggagta

SEQ ID NO: 449755 - DNA, 2497 bp, Homo sapiens
gcggccgctgcctcctgctcgccccggcgcccgcagccccggtcccgccgcggcggggctcctcggcctggctcctggaggagctgctgcggcccgactgccccgagcccgcgggcttggacgcgacacgggaggggcccgatcggaacttccgactgagcgagcaccgccaggccctggccgccgccaagcaccgaggccccgcggcgaccccggggagccccgatcccggccccggtccgtggggcgaagagcacttggcggagaggggccccaggggctgggagaggggcggcgatcgctgcgacgcgcccggtggggacgcggcgcggaggcccgacccagaggccgaggcaccccccgccgggagcatcgaggccgccccgagtagtgcggcggagccggtgatcgtctccaggtcggatcccagagacgagaagctggccctatacctggccgaggtggagaagcaggacaagtatctgcggcagaggaataagtaccgattccacatcattccagacggcaactgcctctaccgagctgtcagcaagacggtgtatggggaccagagcctgcaccgggagttgagggagcagacggtgcactacatcgccgaccatttcaaccacttcagccccctgattgagggcgacgtgggggagtttatcatcgctgctgcccaagacggggcatgggccgggtacccggagttgctggccatggggcagatgctgaatgtgaatatccatttaactactggagggaggctggagagtcccacggtgtctaccatgattcattatttgggcccagaggattccctgaggcctagtatttggctcagttggctcagtaacggacactatgatgctgtatttgatcactcctatcctaacccagagtacgacaactggtgcaaacaaactcaagtgcaaaggaaacgcgacgaagaacttgccaaatctatggccatatccttgtctaaaatgtatattgaacaaaatgcatgctcttgaaatgtctcaaaaccttacaccctgggaataattgcatatataacttgtgtttggagaatcacatgaactttaatcagggtaatagcactttcaaacttgctagtagattttactgtaggtgtaatgccttaatcatctttttgaatgttttctcagagctggaggttgctgggcacctaaatgatgtttcatgatagctttgggtgattttactgctatttataatttgctgtataaagtgagcattacttaatttgcaagctgatttctcacagtgtaaatttgttcattcctggtagtctattttctataaaaatgtatttttgcacaacatttttaaaaactggtgtaccttcatctatgacgtgttccattttgacaaacagctttcaggcgtaaatccagagaagtgctttatatgaaatgtattattttgaacagagtttgtgatttggtagttattttatgttgttgaaatttgaatttcacaattcttagataattatttcaaatggatattgatgcattcttgttaccagatgtttggcccattccattttgatgaaacagagctgttgttttggaagtcattatttttctagaaatggcgaatcttttaaagaaaattacttaatggaaggttgtgggaaggtgtttttttgtgtttttttttttggtttttgttttgtttttcctcttttaagggatagtagcaggtcttacttgaatgaaagtctgatatttgctgatggcagaatgattattctgtaccctggttgatgtgtagagtagattgtctggtgctctcagttgtttttatttacatttgtcacgttgttgtaagagaatgttaacatggtataaaactctgtgacaagataagcctcctgctttatataacttcttgaatccagctaagagatttataaactaatggcataaatgtctggagccaaccttggcagttatagcaggagaacactgtcttaatatttctttacattctttcaaaaggcaaaataggattgccctgtattgatgtagaaatgtctgtaaacagagcttgtatggtttgctgggtcaaacaatgtttccaacttaaaatcaatctcattgccactttaactacttttagtcatatttattaagtaatgcagtttgtactttttttattttgtaacattttgtgatttttttgtacaaaactgtatttgtacaatagagcaattcccagctgatggaatgaatgaataaaatgcaaaattatacttttacaatgcctttttggatagagtggtttttaaattgtgatgtttgtaggaaactttcttgcatgtatgcatgtacacaattttttttttccataaagatgccacagcaatagagaggtttcctaaattatcacatgaagaggataggctaatcatgagtaatttcaaaggataagtctgaataaaatataatttaaaagtggagta

SEQ ID NO: 449756 - DNA, 1143 bp, Homo sapiens
  misc_feature (14)..(14): n is a, c, g, or t
ctccagaggacccncaggaaacagctatacgtgttccattttgacaaacagctttcaggcgtaaatccagagaagtgctttatatgaaatgtattattttgaacagagtttgtgatttggtagttattttatgttgttgaaatttgaatttcacaattcttagataattatttcaaatggatattgatgcattcttgttaccagatgtttggcccattccattttgatgaaacagagctgttgttttggaagtcattatttttctagaaatggcgaatcttttaaagaaaattacttaatggaaggttgtgggaaggtgtttttttgtgtttttttttttggtttttgttttgtttttcctcttttaagggatagtagcaggtcttacttgaatgaaagtctgatatttgctgatggcagaatgattattctgtaccctggttgatgtgtagagtagattgtctggtgctctcagttgtttttatttacatttgtcacgttgttgtaagagaatgttaacatggtataaaactctgtgacaagataagcctcctgctttatataacttcttgaatccagctaagagatttataaactaatggcataaatgtctggagccaaccttggcagttatagcaggagaacactgtcttaatatttctttacattctttcaaaaggcaaaataggattgccctgtattgatgtagaaatgtctgtaaacagagcttgtatggtttgctgggtcaaacaatgtttccaacttaaaatcaatctcattgccactttaactacttttagtcatatttattaagtaatgcagtttgtactttttttattttgtaacattttgtgatttttttgtacaaaactgtatttgtacaatagagcaattcccagctgatggaatgaatgaataaaatgcaaaattatacttttacaatgcctttttggatagagtggtttttaaattgtgatgtttgtaggaaactttcttgcatgtatgcatgtacacaattttttttttccataaagatgccacagcaatagagaggtttcctaaattatcacatgaagaggataggctaatcatgagtaatttcaaaggataagtctgaataaaatataatttaaaagtggagta

SEQ ID NO: 449757 - DNA, 1885 bp, Homo sapiens
gcggccgctgcctcctgctcgccccggcgcccgcagccccggtcccgccgcggcggggctcctcggcctggctcctggaggagctgctgcggcccgactgccccgagcccgcgggcttggacgcgacacgggaggggcccgatcggaacttccgactgagcgagcaccgccaggccctggccgccgccaagcaccgaggccccgcggcgaccccggggagccccgatcccggccccggtccgtggggcgaagagcacttggcggagaggggccccaggggctgggagaggggcggcgatcgctgcgacgcgcccggtggggacgcggcgcggaggcccgacccagaggccgaggcaccccccgccgggagcatcgaggccgccccgagtagtgcggcggagccggtgatcgtctccaggtcggatcccagagacgagaagctggccctatacctggccgaggtggagaagcaggacaagtatctgcggcagaggaataagtaccgattccacatcattccagacggcaactgcctctaccgagctgtcagcaagacggtgtatggggaccagagcctgcaccgggagttgagggagcagacggtgcactacatcgccgaccatttcaaccacttcagccccctgattgagggcgacgtgggggagtttatcatcgctgctgcccaagacggggcatgggccgggtacccggagttgctggccatggggcagatgctgaatgtgaatatccatttaactactggagggaggctggagagtcccacggtgtctaccatgattcattatttgggcccagaggattccctgaggcctagtatttggctcagttggctcagtaacggacactatgatgctgtatttgatcactcctatcctaacccagagtacgacaactggtgcaaacaaactcaagtgcaaaggaaacgcgacgaagaacttgccaaatctatggccatatccttgtctaaaatgtatattgaacaaaatgcatgctcttgaaatgtctcaaaaccttacaccctgggaataattgcatatataacttgtgtttggagaatcacatgaactttaatcagggtaatagcactttcaaacttgctagtagattttactgtaggtgtaatgccttaatcatctttttgaatgttttctcagagctggaggttgctgggcacctaaatgatgtttcatgatagctttgggtgattttactgctatttataatttgctgtataaagtgagcattacttaatttgcaagctgatttctcacagtgtaaatttgttcattcctggtagtctattttctataaaaatgtatttttgcacaacatttttaaaaactggtgtaccttcatctatgacgtgttccattttgacaaacagctttcaggcgtaaatccagagaagtgctttatatgaaatgtattattttgaacagagtttgtgatttggtagttattttatgttgttgaaatttgaatttcacaattcttagataattatttcaaatggatattgatgcattcttgttaccagatgtttggcccattccattttgatgaaacagagctgttgttttggaagtcattatttttctagaaatggcgaatcttttaaagaaaattacttaatggaaggttgtgggaaggtgtttttttgtgtttttttttttggtttttgttttgtttttcctcttttaagggatagtagcaggtcttacttgaatgaaagtctgatatttgctgatggcagaatgattattctgtaccctggttgatgtgtagagtagattgtctggtgctctcagttgtttttatttacatttgtcacgttgtatcagagatgccgcggtaccgagctgat

SEQ ID NO: 449758 - DNA, 2471 bp, Homo sapiens
agcgaggagaccaatgaaagtgggagggaggcggagattcttgggaggtttagagcgccgttcctatcaggtgcttttagggaggccagcagcgccagaaatccgacctatcaaattggattttattttaaggcggcggggtcgacggaaagactggcagaaagcgaccacctataaggagtgtctcagacaaacaagggcgggccctcctgcagaacggcgtgggcaatgtccaataagcgcgcaaggcgtgtggcggcctaccctccccccgcggcgggaccagtggctccccctatcgggtgggggcggcgggtgacgggcgtgtccctcccccaatgagaggcggggggaggcgggttctgcgccgccatgtcgcggaggctgctgccccgggcggagaagcggcgtcggcggctggagcagaggcagcagccggacgagcagcggaggcggtcgggagcgatggtgaagatggcggcggcgggcggcggaggcggcggtggccgctactacggcggcggcagtgagggcggccgggcccctaagcggctcaagactgacaacgccggcgaccagcacggaggcggcggcggtggcggtggaggagccggggcggcgggcggcggcggcggtggggagaactacgatgacccgcacaaaacccctgcctccccagttgtccacatcaggggcctgattgacggtgtggtggaagcagaccttgtggaggccttgcaggagtttggacccatcagctatgtggtggtaatgcctaaaaagagacaagcactggtggagtttgaagatgtgttgggggcttgcaacgcagtgaactacgcagccgacaaccaaatatacattgctggtcacccagcttttgtcaactactctaccagccagaagatctcccgccctggggactcggatgactcccggagcgtgaacagtgtgcttctctttaccatcctgaaccccatttattcgatcaccacggatgttctttacactatctgtaatccttgtggccctgtccagagaattgtcattttcaggaagaatggagttcaggcgatggtggaatttgactcagttcaaagtgcccagcgggccaaggcctctctcaatggggctgatatctattctggctgttgcactctgaagatcgaatacgcaaagcctacacgcttgaatgtgttcaagaatgatcaggatacttgggactacacaaaccccaatctcagtggacaaggtgaccctggcagcaaccccaacaaacgccagaggcagccccctctcctgggagatcaccccgcagaatatggagggccccacggtgggtaccacagccattaccatgatgagggctacgggccccccccacctcactacgaagggagaaggatgggtccaccagtggggggtcaccgtcggggcccaagtcgctacggcccccagtatgggcaccccccaccccctcccccaccacccgagtatggccctcacgccgacagccctgtgctcatggtctatggcttggatcaatctaagatgaactgtgaccgagtcttcaatgtcttctgcttatatggcaatgtggagaaggtgaaattcatgaaaagcaagccgggggccgccatggtggagatggctgatggctacgctgtagaccgggccattacccacctcaacaacaacttcatgtttgggcagaagctgaatgtctgtgtctccaagcagccagccatcatgcctggtcagtcatacgggttggaagacgggtcttgcagttacaaagacttcagtgaatcccggaacaatcggttctccaccccagagcaggcagccaagaaccgcatccagcaccccagcaacgtgctgcacttcttcaacgccccgctggaggtgaccgaggagaacttctttgagatctgcgatgagctgggagtgaagcggccatcttctgtgaaagtattctcaggcaaaagtgagcgcagctcctctggactgctggagtgggaatccaagagcgatgccctggagactctgggcttcctgaaccattaccagatgaaaaacccaaatggtccatacccttacactctgaagttgtgtttctccactgctcagcacgcctcctaattaggtgcctaggaagagtcccatctgagcaggaagacatttctctttcctttatgccattttttgtttttgttatttgcaaaagatcttgtattccttttttttttttttttttttttttaaatgctaggtttgtagaggcttacttaaccttaatggaaacgctggaaatctgcagggggagggagaggggaactgttatctcccaagattaaccttcacttttaaaaaattattgtacatgtgatttttttttttcctgttcatacatttgtgctgcccatgtactcttggcacatttcaataaaattgtttggaaaataaacaca

SEQ ID NO: 449759 - DNA, 587 bp, Homo sapiens
atgccggtcgacactagaggccccccgctattacagatgttctttacactatctgtaatccttgtggccctgtccagagaattgtcattttcaggaagaatggagttcaggcgatggtggaatttgactcagttcaaagtgcccagcgggccaaggcctctctcaatggggctgatatctattctggctgttgcactctgaagatcgaatacgcaaagcctacacgcttgaatgtgttcaagaatgatcaggatacttgggactacacaaaccccaatctcagtggacaaggtgaccctggcagcaaccccaacaaacgccagaggcagccccctctcctgggagatcaccccgcagaatatggagggccccacggtgggtaccacagccattaccatgatgagggctacgggccccccccacctcactacgaagggagaaggatgggtccaccagtggggggtcaccgtcggggcccaagtcgctacggcccccagtatgggcaccccccaccccctcccctccctccccctgcagaatcccagcggtcccataggggtaagtaagcctctaccaccctagcagta

SEQ ID NO: 449760 - DNA, 4767 bp, Homo sapiens
  misc_feature (4737)..(4737): n is a, c, g, or t
  misc_feature (4740)..(4740): n is a, c, g, or t
  misc_feature (4747)..(4747): n is a, c, g, or t
  misc_feature (4749)..(4749): n is a, c, g, or t
  misc_feature (4753)..(4753): n is a, c, g, or t
  misc_feature (4757)..(4757): n is a, c, g, or t
  misc_feature (4761)..(4761): n is a, c, g, or t
  misc_feature (4764)..(4764): n is a, c, g, or t
agcgaggagaccaatgaaagtgggagggaggcggagattcttgggaggtttagagcgccgttcctatcaggtgcttttagggaggccagcagcgccagaaatccgacctatcaaattggattttattttaaggcggcggggtcgacggaaagactggcagaaagcgaccacctataaggagtgtctcagacaaacaagggcgggccctcctgcagaacggcgtgggcaatgtccaataagcgcgcaaggcgtgtggcggcctaccctccccccgcggcgggaccagtggctccccctatcgggtgggggcggcgggtgacgggcgtgtccctcccccaatgagaggcggggggaggcgggttctgcgccgccatgtcgcggaggctgctgccccgggcggagaagcggcgtcggcggctggagcagaggcagcagccggacgagcagcggaggcggtcgggagcgatggtgaagatggcggcggcgggcggcggaggcggcggtggccgctactacggcggcggcagtgagggcggccgggcccctaagcggctcaagactgacaacgccggcgaccagcacggaggcggcggcggtggcggtggaggagccggggcggcgggcggcggcggcggtggggagaactacgatgacccgcacaaaacccctgcctccccagttgtccacatcaggggcctgattgacggtgtggtggaagcagaccttgtggaggccttgcaggagtttggacccatcagctatgtggtggtaatgcctaaaaagagacaagcactggtggagtttgaagatgtgttgggggcttgcaacgcagtgaactacgcagccgacaaccaaatatacattgctggtcacccagcttttgtcaactactctaccagccagaagatctcccgccctggggactcggatgactcccggagcgtgaacagtgtgcttctctttaccatcctgaaccccatttattcgatcaccacggatgttctttacactatctgtaatccttgtggccctgtccagagaattgtcattttcaggaagaatggagttcaggcgatggtggaatttgactcagttcaaagtgcccagcgggccaaggcctctctcaatggggctgatatctattctggctgttgcactctgaagatcgaatacgcaaagcctacacgcttgaatgtgttcaagaatgatcaggatacttgggactacacaaaccccaatctcagtggacaaggtaatcttgacgaccactttgttctaaacatacccgccttgctttcactcgactagtgcacttaataggcctgggctcagggttatgtaatgccattgggccccccatggacatgggagggccttggggtcagcacttggacaccctagtgggatgggggagtgagaggcctccatgggtcttcactgctgcttggggccctccgatgctgctcaggatacagaggcaaggcagaagcctggatgggcggggagcagggcctcactgaggatgaggcgtgggggcggccttagaaaccagcagtggctcctttgagagtctggtgagggtcactcactccattcttgctggaccaggaattgtcctcttgttctgcgctgttgagagggtctgatttgggggagtgacagtgttggggggcgatgaggtctcctgggctcttgcagtgagccttgtgagcaagctgaccctgtggaggtgagacactctggattggaccagggcggacatgcctcacatcatttgtagaggggacgcaacatctctgcaggtggcccaaatggacaactcccttcctagtgtctgtcaagaatggtttgcctttggtagcagggagaggtggaggattgcctatgagaaacagcggcagcccccaacaagaccatccatctcggtgtctgtcttggtctgatacgtcggaccaggccatgggctgagggaggaggctcgatgctgacatcgcacaggccctgagaggccagagccccccattcctaggcaggcctgtcttgctcgcccttgcatctgggaagcagtgggcagggtgggctagactcttccccaggatcctcacagtgggccctgtgggcctggctgctccctccaaaggtcagaggcaaattggtgaccaagtgaatgtaccagagcgggcaatggcattacatgactgctaacagaaacatggcaacaaccatttcttctccaaggaacataaatagaagatgtgcagaccggcaggggctagtggcagggggctggctgtgcattggttttgatgcctctcagctttggcagccccaaggctggggcccaaaaaaaaacgagggctgatgaggtgacctggagtgagggcggtgcttcgccacccctcaggaaccatacttcagcggctctgcctctgcacattgctcaccaacacacagggtagaaaaccactagctcttcctggagagaacagaacatgcagcctccaccacgtccccagaaacagccgcagacttgagctcactacatcaagaacaccacaccgcgctccaaggaacagctacaagcacagagacagaggcatacagagacaaagagagaaagagacgcaacatggcagcagacactgctttttttattaaacattaaaaaaaaggtcaaaatccaagcaaacttgaacccgagaatgtacacagaagtaggaaacacagagaacagagctgtcccagccagccagcgagcgatgctcttttcggagaacgtttcatagacggaagtagattccatgggcctccaagacaataggatcctctctccattcctcgccatatgggttttgttttttaagtcatttggtttggggagggccttgttttttttctgttttgatatttttattttttctgcagtcaccggctgccaacataatctgcaccaactggagatcagaaaccaaaaaaaaaaaaaaaaattttaaccacaacaaaaaaaaaatcaaaaaaaccaaaacagacctaaaaccagacagccaaacagctcagaggcacacagttacctgctgccgggtaaccaggcgcgctcccaaggccaaaagcgcgagcgtagtggggccactggcacacctcataccaggagacacgcacacggagcgctacacagccagaagcaccgcaccaccgcactgcagcacatatgtgaggaggtgacaacatggagggacactacccacttcatacacctttatttccacttttctgatatcttctgaggacagaacatctgtgagccatttttgatttaatcaaaatattgacttttaaaacaattctttaaaaaaattgtagcggatgtgtaccgtgacttgtatttatgactgtaaaaccatgtgatgcagggtcgcagtgtatgtttgatgggacgccatctttcagaactgtgctaactcactgttgaagcgtccaatggtaagagagtgaccctggcagcaaccccaacaaacgccagaggcagccccctctcctgggagatcaccccgcagaatatggagggccccacggtgggtaccacagccattaccatgatgagggctacgggccccccccacctcactacgaagggagaaggatgggtccaccagtggggggtcaccgtcggggcccaagtcgctacggcccccagtatgggcaccccccaccccctcccccaccacccgagtatggccctcacgccgacagccctgtgctcatggtctatggcttggatcaatctaagatgaactgtgaccgagtcttcaatgtcttctgcttatatggcaatgtggagaaggtgaaattcatgaaaagcaagccgggggccgccatggtggagatggctgatggctacgctgtagaccgggccattacccacctcaacaacaacttcatgtttgggcagaagctgaatgtctgtgtctccaagcagccagccatcatgcctggtcagtcatacgggttggaagacgggtcttgcagttacaaagacttcagtgaatcccggaacaatcggttctccaccccagagcaggcagccaagaaccgcatccagcaccccagcaacgtgctgcacttcttcaacgccccgctggaggtgaccgaggagaacttctttgagatctgcgatgagctgggagtgaagcggccatcttctgtgaaagtattctcaggcaaaagtgagcgcagctcctctggactgctggagtgggaatccaagagcgatgccctggagactctgggcttcctgaaccattaccagatgaaaaacccaaatggtccatacccttacactctgaagttgtgtttctccactgctcagcacgcctcctaattaggtgcctaggaagagtcccatctgagcaggaagacatttctctttcctttatgccattttttgtttttgttatttgcaaaagatcttgtattccttttttttttttttttttttttttaaatgctaggtttgtagaggcttacttaaccttaatggaaacgctggaaatctgcagggggagggagaggggaactgttatctcccaagattaaccttcacttttaaaaaattattgtacatgtgatttttttttttcctgttcatacatttgtgctgcccatgtactcttggcacatttcaataaaattgtttggaaaataaacacaaaaaaaaaaaacaaaacaaaacaaaacacnaanaacacananaaanaaancaanaanaca

SEQ ID NO: 449761 - DNA, 4838 bp, Homo sapiens
  misc_feature (4808)..(4808): n is a, c, g, or t
  misc_feature (4811)..(4811): n is a, c, g, or t
  misc_feature (4818)..(4818): n is a, c, g, or t
  misc_feature (4820)..(4820): n is a, c, g, or t
  misc_feature (4824)..(4824): n is a, c, g, or t
  misc_feature (4828)..(4828): n is a, c, g, or t
  misc_feature (4832)..(4832): n is a, c, g, or t
  misc_feature (4835)..(4835): n is a, c, g, or t
agcgaggagaccaatgaaagtgggagggaggcggagattcttgggaggtttagagcgccgttcctatcaggtgcttttagggaggccagcagcgccagaaatccgacctatcaaattggattttattttaaggcggcggggtcgacggaaagactggcagaaagcgaccacctataaggagtgtctcagacaaacaagggcgggccctcctgcagaacggcgtgggcaatgtccaataagcgcgcaaggcgtgtggcggcctaccctccccccgcggcgggaccagtggctccccctatcgggtgggggcggcgggtgacgggcgtgtccctcccccaatgagaggcggggggaggcgggttctgcgccgccatgtcgcggaggctgctgccccgggcggagaagcggcgtcggcggctggagcagaggcagcagccggacgagcagcggaggcggtcgggagcgatggtgaagatggcggcggcgggcggcggaggcggcggtggccgctactacggcggcggcagtgagggcggccgggcccctaagcggctcaagactgacaacgccggcgaccagcacggaggcggcggcggtggcggtggaggagccggggcggcgggcggcggcggcggtggggagaactacgatgacccgcacaaaacccctgcctccccagttgtccacatcaggggcctgattgacggtgtggtggaagcagaccttgtggaggccttgcaggagtttggacccatcagctatgtggtggtaatgcctaaaaagagacaagcactggtggagtttgaagatgtgttgggggcttgcaacgcagtgaactacgcagccgacaaccaaatatacattgctggtcacccagcttttgtcaactactctaccagccagaagatctcccgccctggggactcggatgactcccggagcgtgaacagtgtgcttctctttaccatcctgaaccccatttattcgatcaccacggatgttctttacactatctgtaatccttgtggccctgtccagagaattgtcattttcaggaagaatggagttcaggcgatggtggaatttgactcagttcaaagtgcccagcgggccaaggcctctctcaatggggctgatatctattctggctgttgcactctgaagatcgaatacgcaaagcctacacgcttgaatgtgttcaagaatgatcaggatacttgggactacacaaaccccaatctcagtggacaaggtaatcttgacgaccactttgttctaaacatacccgccttgctttcactcgactagtgcacttaataggcctgggctcagggttatgtaatgccattgggccccccatggacatgggagggccttggggtcagcacttggacaccctagtgggatgggggagtgagaggcctccatgggtcttcactgctgcttggggccctccgatgctgctcaggatacagaggcaaggcagaagcctggatgggcggggagcagggcctcactgaggatgaggcgtgggggcggccttagaaaccagcagtggctcctttgagagtctggtgagggtcactcactccattcttgctggaccaggaattgtcctcttgttctgcgctgttgagagggtctgatttgggggagtgacagtgttggggggcgatgaggtctcctgggctcttgcagtgagccttgtgagcaagctgaccctgtggaggtgagacactctggattggaccagggcggacatgcctcacatcatttgtagaggggacgcaacatctctgcaggtggcccaaatggacaactcccttcctagtgtctgtcaagaatggtttgcctttggtagcagggagaggtggaggattgcctatgagaaacagcggcagcccccaacaagaccatccatctcggtgtctgtcttggtctgatacgtcggaccaggccatgggctgagggaggaggctcgatgctgacatcgcacaggccctgagaggccagagccccccattcctaggcaggcctgtcttgctcgcccttgcatctgggaagcagtgggcagggtgggctagactcttccccaggatcctcacagtgggccctgtgggcctggctgctccctccaaaggtcagaggcaaattggtgaccaagtgaatgtaccagagcgggcaatggcattacatgactgctaacagaaacatggcaacaaccatttcttctccaaggaacataaatagaagatgtgcagaccggcaggggctagtggcagggggctggctgtgcattggttttgatgcctctcagctttggcagccccaaggctggggcccaaaaaaaaacgagggctgatgaggtgacctggagtgagggcggtgcttcgccacccctcaggaaccatacttcagcggctctgcctctgcacattgctcaccaacacacagggtagaaaaccactagctcttcctggagagaacagaacatgcagcctccaccacgtccccagaaacagccgcagacttgagctcactacatcaagaacaccacaccgcgctccaaggaacagctacaagcacagagacagaggcatacagagacaaagagagaaagagacgcaacatggcagcagacactgctttttttattaaacattaaaaaaaaggtcaaaatccaagcaaacttgaacccgagaatgtacacagaagtaggaaacacagagaacagagctgtcccagccagccagcgagcgatgctcttttcggagaacgtttcatagacggaagtagattccatgggcctccaagacaataggatcctctctccattcctcgccatatgggttttgttttttaagtcatttggtttggggagggccttgttttttttctgttttgatatttttattttttctgcagtcaccggctgccaacataatctgcaccaactggagatcagaaaccaaaaaaaaaaaaaaaaattttaaccacaacaaaaaaaaaatcaaaaaaaccaaaacagacctaaaaccagacagccaaacagctcagaggcacacagttacctgctgccgggtaaccaggcgcgctcccaaggccaaaagcgcgagcgtagtggggccactggcacacctcataccaggagacacgcacacggagcgctacacagccagaagcaccgcaccaccgcactgcagcacatatgtgaggaggtgacaacatggagggacactacccacttcatacacctttatttccacttttctgatatcttctgaggacagaacatctgtgagccatttttgatttaatcaaaatattgacttttaaaacaattctttaaaaaaattgtagcggatgtgtaccgtgacttgtatttatgactgtaaaaccatgtgatgcagggtcgcagtgtatgtttgatgggacgccatctttcagaactgtgctaactcactgttgaagcgtccaatggtaagagagtgaccctggcagcaaccccaacaaacgccagaggcagccccctctcctgggagatcaccccgcagaatatggagggccccacggtgggtaccacagccattaccatgatgagggctacgggccccccccacctcactacgaagggagaaggatgggtccaccagtggggggtcaccgtcggggcccaagtcgctacggcccccagtatgggcaccccccaccccctcccccaccacccgagtatggccctcacgccgacagccctgtgctcatggtctatggcttggatcaatctaagatgaactgtgaccgagtcttcaatgtcttctgcttatatggcaatgtggagaaggtgaaattcatgaaaagcaagccgggggccgccatggtggagatggctgatggctacgctgtagaccgggccattacccacctcaacaacaacttcatgtttgggcagaagctgaatgtctgtgtctccaagcagccagccatcatgcctggtcagtcatacgggttggaagacgggtcttgcagttacaaagacttcagtgaatcccggaacaatcggttctccaccccagagcaggcagccaagaaccgcatccagcaccccagcaacgtgctgcacttcttcaacgccccgctggaggtgaccgaggagaacttctttgagatctgcgatgagctgggagtgaagcggccatcttctgtgaaagtattctcaggcaaaagtgagcgcagctcctctggactgctggagtgggaatccaagagcgatgccctggagactctgggcttcctgaaccattaccagatgaaaaacccaaatggtccatacccttacactctgaagttgtgtttctccactgctcagcacgcctcctaattaggtgcctaggaagagtcccatctgagcaggaagacatttctctttcctttatgccattttttgtttttgttatttgcaaaagatcttgtattccttttttttttttttttttttttttaaatgctaggtttgtagaggcttacttaaccttaatggaaacgctggaaatctgcagggggagggagaggggaactgttatctcccaagattaaccttcacttttaaaaaattattgtacatgtgatttttttttttcctgttcatacatttgtgctgcccatgtactcttggcacatttcaataaaattgtttggaaaataaacacaaaaaaaaaacaaaaacaagataaaaaaaaaaaaaaaaaaaaaaaaaaaaaaaaaaaaaaaacgaaaaacagaaaaaaaaaaacaaaacaaaacaaaacacnaanaacacananaaanaaancaanaanaca

SEQ ID NO: 449762 - DNA, 5209 bp, Homo sapiens
agcgaggagaccaatgaaagtgggagggaggcggagattcttgggaggtttagagcgccgttcctatcaggtgcttttagggaggccagcagcgccagaaatccgacctatcaaattggattttattttaaggcggcggggtcgacggaaagactggcagaaagcgaccacctataaggagtgtctcagacaaacaagggcgggccctcctgcagaacggcgtgggcaatgtccaataagcgcgcaaggcgtgtggcggcctaccctccccccgcggcgggaccagtggctccccctatcgggtgggggcggcgggtgacgggcgtgtccctcccccaatgagaggcggggggaggcgggttctgcgccgccatgtcgcggaggctgctgccccgggcggagaagcggcgtcggcggctggagcagaggcagcagccggacgagcagcggaggcggtcgggagcgatggtgaagatggcggcggcgggcggcggaggcggcggtggccgctactacggcggcggcagtgagggcggccgggcccctaagcggctcaagactgacaacgccggcgaccagcacggaggcggcggcggtggcggtggaggagccggggcggcgggcggcggcggcggtggggagaactacgatgacccgcacaaaacccctgcctccccagttgtccacatcaggggcctgattgacggtgtggtggaagcagaccttgtggaggccttgcaggagtttggacccatcagctatgtggtggtaatgcctaaaaagagacaagcactggtggagtttgaagatgtgttgggggcttgcaacgcagtgaactacgcagccgacaaccaaatatacattgctggtcacccagcttttgtcaactactctaccagccagaagatctcccgccctggggactcggatgactcccggagcgtgaacagtgtgcttctctttaccatcctgaaccccatttattcgatcaccacggatgttctttacactatctgtaatccttgtggccctgtccagagaattgtcattttcaggaagaatggagttcaggcgatggtggaatttgactcagttcaaagtgcccagcgggccaaggcctctctcaatggggctgatatctattctggctgttgcactctgaagatcgaatacgcaaagcctacacgcttgaatgtgttcaagaatgatcaggatacttgggactacacaaaccccaatctcagtggacaaggtaatcttgacgaccactttgttctaaacatacccgccttgctttcactcgactagtgcacttaataggcctgggctcagggttatgtaatgccattgggccccccatggacatgggagggccttggggtcagcacttggacaccctagtgggatgggggagtgagaggcctccatgggtcttcactgctgcttggggccctccgatgctgctcaggatacagaggcaaggcagaagcctggatgggcggggagcagggcctcactgaggatgaggcgtgggggcggccttagaaaccagcagtggctcctttgagagtctggtgagggtcactcactccattcttgctggaccaggaattgtcctcttgttctgcgctgttgagagggtctgatttgggggagtgacagtgttggggggcgatgaggtctcctgggctcttgcagtgagccttgtgagcaagctgaccctgtggaggtgagacactctggattggaccagggcggacatgcctcacatcatttgtagaggggacgcaacatctctgcaggtggcccaaatggacaactcccttcctagtgtctgtcaagaatggtttgcctttggtagcagggagaggtggaggattgcctatgagaaacagcggcagcccccaacaagaccatccatctcggtgtctgtcttggtctgatacgtcggaccaggccatgggctgagggaggaggctcgatgctgacatcgcacaggccctgagaggccagagccccccattcctaggcaggcctgtcttgctcgcccttgcatctgggaagcagtgggcagggtgggctagactcttccccaggatcctcacagtgggccctgtgggcctggctgctccctccaaaggtcagaggcaaattggtgaccaagtgaatgtaccagagcgggcaatggcattacatgactgctaacagaaacatggcaacaaccatttcttctccaaggaacataaatagaagatgtgcagaccggcaggggctagtggcagggggctggctgtgcattggttttgatgcctctcagctttggcagccccaaggctggggcccaaaaaaaaacgagggctgatgaggtgacctggagtgagggcggtgcttcgccacccctcaggaaccatacttcagcggctctgcctctgcacattgctcaccaacacacagggtagaaaaccactagctcttcctggagagaacagaacatgcagcctccaccacgtccccagaaacagccgcagacttgagctcactacatcaagaacaccacaccgcgctccaaggaacagctacaagcacagagacagaggcatacagagacaaagagagaaagagacgcaacatggcagcagacactgctttttttattaaacattaaaaaaaaggtcaaaatccaagcaaacttgaacccgagaatgtacacagaagtaggaaacacagagaacagagctgtcccagccagccagcgagcgatgctcttttcggagaacgtttcatagacggaagtagattccatgggcctccaagacaataggatcctctctccattcctcgccatatgggttttgttttttaagtcatttggtttggggagggccttgttttttttctgttttgatatttttattttttctgcagtcaccggctgccaacataatctgcaccaactggagatcagaaaccaaaaaaaaaaaaaaaaattttaaccacaacaaaaaaaaaatcaaaaaaaccaaaacagacctaaaaccagacagccaaacagctcagaggcacacagttacctgctgccgggtaaccaggcgcgctcccaaggccaaaagcgcgagcgtagtggggccactggcacacctcataccaggagacacgcacacggagcgctacacagccagaagcaccgcaccaccgcactgcagcacatatgtgaggaggtgacaacatggagggacactacccacttcatacacctttatttccacttttctgatatcttctgaggacagaacatctgtgagccatttttgatttaatcaaaatattgacttttaaaacaattctttaaaaaaattgtagcggatgtgtaccgtgacttgtatttatgactgtaaaaccatgtgatgcagggtcgcagtgtatgtttgatgggacgccatctttcagaactgtgctaactcactgttgaagcgtccaatggtaagagagtgaccctggcagcaaccccaacaaacgccagaggcagccccctctcctgggagatcaccccgcagaatatggagggccccacggtgggtaccacagccattaccatgatgagggctacgggccccccccacctcactacgaagggagaaggatgggtccaccagtggggggtcaccgtcggggcccaagtcgctacggcccccagtatgggcaccccccaccccctcccccaccacccgagtatggccctcacgccgacagccctgtgctcatggtctatggcttggatcaatctaagatgaactgtgaccgagtcttcaatgtcttctgcttatatggcaatgtggagaaggtgaaattcatgaaaagcaagccgggggccgccatggtggagatggctgatggctacgctgtagaccgggccattacccacctcaacaacaacttcatgtttgggcagaagctgaatgtctgtgtctccaagcagccagccatcatgcctggtcagtcatacgggttggaagacgggtcttgcagttacaaagacttcagtgaatcccggaacaatcggttctccaccccagagcaggcagccaagaaccgcatccagcaccccagcaacgtgctgcacttcttcaacgccccgctggaggtgaccgaggagaacttctttgagatctgcgatgagctgggagtgaagcggccatcttctgtgaaagtattctcaggcaaaagtgagcgcagctcctctggactgctggagtgggaatccaagagcgatgccctggagactctgggcttcctgaaccattaccagatgaaaaacccaaatggtccatacccttacactctgaagttgtgtttctccactgctcagcacgcctcctaattaggtgcctaggaagagtcccatctgagcaggaagacatttctctttcctttatgccattttttgtttttgttatttgcaaaagatcttgtattccttttttttttttttttttttttttaaaaaagggcggagggtgtgggaaaaggtttatttacccttaggggaaacgcggcgggaaatcgtggggggggggggagagaggggaacgggtttattctcccccgagtattcacctcttccatctattgaacaacaatatttatgcgtgtcccctgtgcgtgaactttattcttttggcgctggtacccataaacttgtgggtgggctgccccagtgattctcgggggggccactttctgcatcaaaatgtcgggtgggcggacacccaccaaaaaaagaaaacatcgaaaaaatagatacgaagaacagaaaaatctgttgtggcggggcccgcactcgccggcgcaccccggagaaagaaacgttttttctacaaaaaccaaccagtgtgtggtgggggcgacgagcgagcgacccccatgaaggaaatgagagcgacacacagtgggccaaccacgaggtgggtccccgcgagagagagacaccggctgggcacgaagcaacaaggaggggcggggggatggttctctccccccaagataaaaacaagcgccgccgggcgggaacacaagacgagagtcgtttctgtggcaacacaaacccatcgagagaggtggcatccgctggagggagccacaccagcggggggactcatcaacacgcaggaggggaccgccaaagcgaaccgctggttaaaaaaatagcgca

SEQ ID NO: 449763 - DNA, 4825 bp, Homo sapiens
agcgaggagaccaatgaaagtgggagggaggcggagattcttgggaggtttagagcgccgttcctatcaggtgcttttagggaggccagcagcgccagaaatccgacctatcaaattggattttattttaaggcggcggggtcgacggaaagactggcagaaagcgaccacctataaggagtgtctcagacaaacaagggcgggccctcctgcagaacggcgtgggcaatgtccaataagcgcgcaaggcgtgtggcggcctaccctccccccgcggcgggaccagtggctccccctatcgggtgggggcggcgggtgacgggcgtgtccctcccccaatgagaggcggggggaggcgggttctgcgccgccatgtcgcggaggctgctgccccgggcggagaagcggcgtcggcggctggagcagaggcagcagccggacgagcagcggaggcggtcgggagcgatggtgaagatggcggcggcgggcggcggaggcggcggtggccgctactacggcggcggcagtgagggcggccgggcccctaagcggctcaagactgacaacgccggcgaccagcacggaggcggcggcggtggcggtggaggagccggggcggcgggcggcggcggcggtggggagaactacgatgacccgcacaaaacccctgcctccccagttgtccacatcaggggcctgattgacggtgtggtggaagcagaccttgtggaggccttgcaggagtttggacccatcagctatgtggtggtaatgcctaaaaagagacaagcactggtggagtttgaagatgtgttgggggcttgcaacgcagtgaactacgcagccgacaaccaaatatacattgctggtcacccagcttttgtcaactactctaccagccagaagatctcccgccctggggactcggatgactcccggagcgtgaacagtgtgcttctctttaccatcctgaaccccatttattcgatcaccacggtacgtgccagcaggcatttcttgtgaggtctcccttccttttctccccttattccctcccccaagccagactgatctgccagtgccccttcatcttgcctgtgtttgcttttgcagggatgttctttacactatctgtaatccttgtggccctgtccagagaattgtcattttcaggaagaatggagttcaggcgatggtggaatttgactcagttcaaagtgcccagcgggccaaggcctctctcaatggggctgatatctattctggctgttgcactctgaagatcgaatacgcaaagcctacacgcttgaatgtgttcaagaatgatcaggatacttgggactacacaaaccccaatctcagtggacaaggtaatcttgacgaccactttgttctaaacatacccgccttgctttcactcgactagtgcacttaataggcctgggctcagggttatgtaatgccattgggccccccatggacatgggagggccttggggtcagcacttggacaccctagtgggatgggggagtgagaggcctccatgggtcttcactgctgcttggggccctccgatgctgctcaggatacagaggcaaggcagaagcctggatgggcggggagcagggcctcactgaggatgaggcgtgggggcggccttagaaaccagcagtggctcctttgagagtctggtgagggtcactcactccattcttgctggaccaggaattgtcctcttgttctgcgctgttgagagggtctgatttgggggagtgacagtgttggggggcgatgaggtctcctgggctcttgcagtgagccttgtgagcaagctgaccctgtggaggtgagacactctggattggaccagggcggacatgcctcacatcatttgtagaggggacgcaacatctctgcaggtggcccaaatggacaactcccttcctagtgtctgtcaagaatggtttgcctttggtagcagggagaggtggaggattgcctatgagaaacagcggcagcccccaacaagaccatccatctcggtgtctgtcttggtctgatacgtcggaccaggccatgggctgagggaggaggctcgatgctgacatcgcacaggccctgagaggccagagccccccattcctaggcaggcctgtcttgctcgcccttgcatctgggaagcagtgggcagggtgggctagactcttccccaggatcctcacagtgggccctgtgggcctggctgctccctccaaaggtcagaggcaaattggtgaccaagtgaatgtaccagagcgggcaatggcattacatgactgctaacagaaacatggcaacaaccatttcttctccaaggaacataaatagaagatgtgcagaccggcaggggctagtggcagggggctggctgtgcattggttttgatgcctctcagctttggcagccccaaggctggggcccaaaaaaaaacgagggctgatgaggtgacctggagtgagggcggtgcttcgccacccctcaggaaccatacttcagcggctctgcctctgcacattgctcaccaacacacagggtagaaaaccactagctcttcctggagagaacagaacatgcagcctccaccacgtccccagaaacagccgcagacttgagctcactacatcaagaacaccacaccgcgctccaaggaacagctacaagcacagagacagaggcatacagagacaaagagagaaagagacgcaacatggcagcagacactgctttttttattaaacattaaaaaaaaggtcaaaatccaagcaaacttgaacccgagaatgtacacagaagtaggaaacacagagaacagagctgtcccagccagccagcgagcgatgctcttttcggagaacgtttcatagacggaagtagattccatgggcctccaagacaataggatcctctctccattcctcgccatatgggttttgttttttaagtcatttggtttggggagggccttgttttttttctgttttgatatttttattttttctgcagtcaccggctgccaacataatctgcaccaactggagatcagaaaccaaaaaaaaaaaaaaaaattttaaccacaacaaaaaaaaaatcaaaaaaaccaaaacagacctaaaaccagacagccaaacagctcagaggcacacagttacctgctgccgggtaaccaggcgcgctcccaaggccaaaagcgcgagcgtagtggggccactggcacacctcataccaggagacacgcacacggagcgctacacagccagaagcaccgcaccaccgcactgcagcacatatgtgaggaggtgacaacatggagggacactacccacttcatacacctttatttccacttttctgatatcttctgaggacagaacatctgtgagccatttttgatttaatcaaaatattgacttttaaaacaattctttaaaaaaattgtagcggatgtgtaccgtgacttgtatttatgactgtaaaaccatgtgatgcagggtcgcagtgtatgtttgatgggacgccatctttcagaactgtgctaactcactgttgaagcgtccaatggtaagagagtgaccctggcagcaaccccaacaaacgccagaggcagccccctctcctgggagatcaccccgcagaatatggagggccccacggtgggtaccacagccattaccatgatgagggctacgggccccccccacctcactacgaagggagaaggatgggtccaccagtggggggtcaccgtcggggcccaagtcgctacggcccccagtatgggcaccccccaccccctcccccaccacccgagtatggccctcacgccgacagccctgtgctcatggtctatggcttggatcaatctaagatgaactgtgaccgagtcttcaatgtcttctgcttatatggcaatgtggagaaggtgaaattcatgaaaagcaagccgggggccgccatggtggagatggctgatggctacgctgtagaccgggccattacccacctcaacaacaacttcatgtttgggcagaagctgaatgtctgtgtctccaagcagccagccatcatgcctggtcagtcatacgggttggaagacgggtcttgcagttacaaagacttcagtgaatcccggaacaatcggttctccaccccagagcaggcagccaagaaccgcatccagcaccccagcaacgtgctgcacttcttcaacgccccgctggaggtgaccgaggagaacttctttgagatctgcgatgagctgggagtgaagcggccatcttctgtgaaagtattctcaggcaaaagtgagcgcagctcctctggactgctggagtgggaatccaagagcgatgccctggagactctgggcttcctgaaccattaccagatgaaaaacccaaatggtccatacccttacactctgaagttgtgtttctccactgctcagcacgcctcctaattaggtgcctaggaagagtcccatctgagcaggaagacatttctctttcctttatgccattttttgtttttgttatttgcaaaagatcttgtattccttttttttttttttttttttttttaaatgctaggtttgtagaggcttacttaaccttaatggaaacgctggaaatctgcagggggagggagaggggaactgttatctcccaagattaaccttcacttttaaaaaattattgtacatgtgatttttttttttcctgttcatacatttgtgctgcccatgtactcttggcacatttcaataaaattgtttggaaaataaacaca

SEQ ID NO: 449764 - DNA, 4196 bp, Homo sapiens
tgtgggtggcatctgacagtctggtgaggagaggtcaggaaggcttcccagagggacatgatggctcagctagacctctttggcttttggtactacttgtggcacagggtgttcaggtcggggaaccatgatagggttgcagaggagttcagaggccatggaggagtcagttctcaaaaaatcaaatgataccctcctcctgtctacattttcctgagaggattgaaacctgtgttctctctgccagctatgtggtggtaatgcctaaaaagagacaagcactggtggagtttgaagatgtgttgggggcttgcaacgcagtgaactacgcagccgacaaccaaatatacattgctggtcacccagcttttgtcaactactctaccagccagaagatctcccgccctggggactcggatgactcccggagcgtgaacagtgtgcttctctttaccatcctgaaccccatttattcgatcaccacggatgttctttacactatctgtaatccttgtggccctgtccagagaattgtcattttcaggaagaatggagttcaggcgatggtggaatttgactcagttcaaagtgcccagcgggccaaggcctctctcaatggggctgatatctattctggctgttgcactctgaagatcgaatacgcaaagcctacacgcttgaatgtgttcaagaatgatcaggatacttgggactacacaaaccccaatctcagtggacaaggtaatcttgacgaccactttgttctaaacatacccgccttgctttcactcgactagtgcacttaataggcctgggctcagggttatgtaatgccattgggccccccatggacatgggagggccttggggtcagcacttggacaccctagtgggatgggggagtgagaggcctccatgggtcttcactgctgcttggggccctccgatgctgctcaggatacagaggcaaggcagaagcctggatgggcggggagcagggcctcactgaggatgaggcgtgggggcggccttagaaaccagcagtggctcctttgagagtctggtgagggtcactcactccattcttgctggaccaggaattgtcctcttgttctgcgctgttgagagggtctgatttgggggagtgacagtgttggggggcgatgaggtctcctgggctcttgcagtgagccttgtgagcaagctgaccctgtggaggtgagacactctggattggaccagggcggacatgcctcacatcatttgtagaggggacgcaacatctctgcaggtggcccaaatggacaactcccttcctagtgtctgtcaagaatggtttgcctttggtagcagggagaggtggaggattgcctatgagaaacagcggcagcccccaacaagaccatccatctcggtgtctgtcttggtctgatacgtcggaccaggccatgggctgagggaggaggctcgatgctgacatcgcacaggccctgagaggccagagccccccattcctaggcaggcctgtcttgctcgcccttgcatctgggaagcagtgggcagggtgggctagactcttccccaggatcctcacagtgggccctgtgggcctggctgctccctccaaaggtcagaggcaaattggtgaccaagtgaatgtaccagagcgggcaatggcattacatgactgctaacagaaacatggcaacaaccatttcttctccaaggaacataaatagaagatgtgcagaccggcaggggctagtggcagggggctggctgtgcattggttttgatgcctctcagctttggcagccccaaggctggggcccaaaaaaaaacgagggctgatgaggtgacctggagtgagggcggtgcttcgccacccctcaggaaccatacttcagcggctctgcctctgcacattgctcaccaacacacagggtagaaaaccactagctcttcctggagagaacagaacatgcagcctccaccacgtccccagaaacagccgcagacttgagctcactacatcaagaacaccacaccgcgctccaaggaacagctacaagcacagagacagaggcatacagagacaaagagagaaagagacgcaacatggcagcagacactgctttttttattaaacattaaaaaaaaggtcaaaatccaagcaaacttgaacccgagaatgtacacagaagtaggaaacacagagaacagagctgtcccagccagccagcgagcgatgctcttttcggagaacgtttcatagacggaagtagattccatgggcctccaagacaataggatcctctctccattcctcgccatatgggttttgttttttaagtcatttggtttggggagggccttgttttttttctgttttgatatttttattttttctgcagtcaccggctgccaacataatctgcaccaactggagatcagaaaccaaaaaaaaaaaaaaaaattttaaccacaacaaaaaaaaaatcaaaaaaaccaaaacagacctaaaaccagacagccaaacagctcagaggcacacagttacctgctgccgggtaaccaggcgcgctcccaaggccaaaagcgcgagcgtagtggggccactggcacacctcataccaggagacacgcacacggagcgctacacagccagaagcaccgcaccaccgcactgcagcacatatgtgaggaggtgacaacatggagggacactacccacttcatacacctttatttccacttttctgatatcttctgaggacagaacatctgtgagccatttttgatttaatcaaaatattgacttttaaaacaattctttaaaaaaattgtagcggatgtgtaccgtgacttgtatttatgactgtaaaaccatgtgatgcagggtcgcagtgtatgtttgatgggacgccatctttcagaactgtgctaactcactgttgaagcgtccaatggtaagagagtgaccctggcagcaaccccaacaaacgccagaggcagccccctctcctgggagatcaccccgcagaatatggagggccccacggtgggtaccacagccattaccatgatgagggctacgggccccccccacctcactacgaagggagaaggatgggtccaccagtggggggtcaccgtcggggcccaagtcgctacggcccccagtatgggcaccccccaccccctcccccaccacccgagtatggccctcacgccgacagccctgtgctcatggtctatggcttggatcaatctaagatgaactgtgaccgagtcttcaatgtcttctgcttatatggcaatgtggagaaggtgaaattcatgaaaagcaagccgggggccgccatggtggagatggctgatggctacgctgtagaccgggccattacccacctcaacaacaacttcatgtttgggcagaagctgaatgtctgtgtctccaagcagccagccatcatgcctggtcagtcatacgggttggaagacgggtcttgcagttacaaagacttcagtgaatcccggaacaatcggttctccaccccagagcaggcagccaagaaccgcatccagcaccccagcaacgtgctgcacttcttcaacgccccgctggaggtgaccgaggagaacttctttgagatctgcgatgagctgggagtgaagcggccatcttctgtgaaagtattctcaggcaaaagtgagcgcagctcctctggactgctggagtgggaatccaagagcgatgccctggagactctgggcttcctgaaccattaccagatgaaaaacccaaatggtccatacccttacactctgaagttgtgtttctccactgctcagcacgcctcctaattaggtgcctaggaagagtcccatctgagcaggaagacatttctctttcctttatgccattttttgtttttgttatttgcaaaagatcttgtattccttttttttttttttttttttttttaaatgctaggtttgtagaggcttacttaaccttaatggaaacgctggaaatctgcagggggagggagaggggaactgttatctcccaagattaaccttcacttttaaaaaattattgtacatgtgatttttttttttcctgttcatacatttgtgctgcccatgtactcttggcacatttcaataaaattgtttggaaaataaacaca

SEQ ID NO: 449765 - DNA, 4373 bp, Homo sapiens
taatttaattccatttcagctcaaaaggcaggagaatcgcttgggcctgggaggcggagattgcagtgagccgagactgtgccactgtattccatcctgggcaacacagcgagactccatatccaaaaaaaaaaaaaaaaggtggggcatgtgtgaaggttgctgaggaggtgatgtcctatgagcaaataggagcttatactcaaggtggaggaaacagcctctgcaaaggttgtaaagtcagaaggagcttgtgttggatggagaaattgaaagacctgaggattgcaaagtggctggcaagcagacgggtttggaatagacattggaagaagcttttagggcatcctagacagcgttgcgatgcttggggcaggggcaggaaaaagccactgatggactttcagggcagagctgtaatcgagttgatgtttcagatttagtcgaagggtgtgagagggctgagacggagaaagtggtgtggcagaagaggttgctggtggccatgggtcggggtgcagattatgagagaactctggccagtgactgctcacccggggcagcgttgagtccatcaacaccgttttggtctcttaacctgaggctagtggctgggcagtgagctaatcccaaagcttccgtctgtaccacagtcttggggtgctaccttgtccttatcacactctggggtaacttgaagcccttctcaaagatctcctgtgatgggactttccttaacttgactcacatttgactcagttcaaagtgcccagcgggccaaggcctctctcaatggggctgatatctattctggctgttgcactctgaagatcgaatacgcaaagcctacacgcttgaatgtgttcaagaatgatcaggatacttgggactacacaaaccccaatctcagtggacaaggtaatcttgacgaccactttgttctaaacatacccgccttgctttcactcgactagtgcacttaataggcctgggctcagggttatgtaatgccattgggccccccatggacatgggagggccttggggtcagcacttggacaccctagtgggatgggggagtgagaggcctccatgggtcttcactgctgcttggggccctccgatgctgctcaggatacagaggcaaggcagaagcctggatgggcggggagcagggcctcactgaggatgaggcgtgggggcggccttagaaaccagcagtggctcctttgagagtctggtgagggtcactcactccattcttgctggaccaggaattgtcctcttgttctgcgctgttgagagggtctgatttgggggagtgacagtgttggggggcgatgaggtctcctgggctcttgcagtgagccttgtgagcaagctgaccctgtggaggtgagacactctggattggaccagggcggacatgcctcacatcatttgtagaggggacgcaacatctctgcaggtggcccaaatggacaactcccttcctagtgtctgtcaagaatggtttgcctttggtagcagggagaggtggaggattgcctatgagaaacagcggcagcccccaacaagaccatccatctcggtgtctgtcttggtctgatacgtcggaccaggccatgggctgagggaggaggctcgatgctgacatcgcacaggccctgagaggccagagccccccattcctaggcaggcctgtcttgctcgcccttgcatctgggaagcagtgggcagggtgggctagactcttccccaggatcctcacagtgggccctgtgggcctggctgctccctccaaaggtcagaggcaaattggtgaccaagtgaatgtaccagagcgggcaatggcattacatgactgctaacagaaacatggcaacaaccatttcttctccaaggaacataaatagaagatgtgcagaccggcaggggctagtggcagggggctggctgtgcattggttttgatgcctctcagctttggcagccccaaggctggggcccaaaaaaaaacgagggctgatgaggtgacctggagtgagggcggtgcttcgccacccctcaggaaccatacttcagcggctctgcctctgcacattgctcaccaacacacagggtagaaaaccactagctcttcctggagagaacagaacatgcagcctccaccacgtccccagaaacagccgcagacttgagctcactacatcaagaacaccacaccgcgctccaaggaacagctacaagcacagagacagaggcatacagagacaaagagagaaagagacgcaacatggcagcagacactgctttttttattaaacattaaaaaaaaggtcaaaatccaagcaaacttgaacccgagaatgtacacagaagtaggaaacacagagaacagagctgtcccagccagccagcgagcgatgctcttttcggagaacgtttcatagacggaagtagattccatgggcctccaagacaataggatcctctctccattcctcgccatatgggttttgttttttaagtcatttggtttggggagggccttgttttttttctgttttgatatttttattttttctgcagtcaccggctgccaacataatctgcaccaactggagatcagaaaccaaaaaaaaaaaaaaaaattttaaccacaacaaaaaaaaaatcaaaaaaaccaaaacagacctaaaaccagacagccaaacagctcagaggcacacagttacctgctgccgggtaaccaggcgcgctcccaaggccaaaagcgcgagcgtagtggggccactggcacacctcataccaggagacacgcacacggagcgctacacagccagaagcaccgcaccaccgcactgcagcacatatgtgaggaggtgacaacatggagggacactacccacttcatacacctttatttccacttttctgatatcttctgaggacagaacatctgtgagccatttttgatttaatcaaaatattgacttttaaaacaattctttaaaaaaattgtagcggatgtgtaccgtgacttgtatttatgactgtaaaaccatgtgatgcagggtcgcagtgtatgtttgatgggacgccatctttcagaactgtgctaactcactgttgaagcgtccaatggtaagagagtgaccctggcagcaaccccaacaaacgccagaggcagccccctctcctgggagatcaccccgcagaatatggagggccccacggtgggtaccacagccattaccatgatgagggctacgggccccccccacctcactacgaagggagaaggatgggtccaccagtggggggtcaccgtcggggcccaagtcgctacggcccccagtatgggcaccccccaccccctcccccaccacccgagtatggccctcacgccgacagccctgtgctcatggtctatggcttggatcaatctaagatgaactgtgaccgagtcttcaatgtcttctgcttatatggcaatgtggagaaggtgaaattcatgaaaagcaagccgggggccgccatggtggagatggctgatggctacgctgtagaccgggccattacccacctcaacaacaacttcatgtttgggcagaagctgaatgtctgtgtctccaagcagccagccatcatgcctggtcagtcatacgggttggaagacgggtcttgcagttacaaagacttcagtgaatcccggaacaatcggttctccaccccagagcaggcagccaagaaccgcatccagcaccccagcaacgtgctgcacttcttcaacgccccgctggaggtgaccgaggagaacttctttgagatctgcgatgagctgggagtgaagcggccatcttctgtgaaagtattctcaggcaaaagtgagcgcagctcctctggactgctggagtgggaatccaagagcgatgccctggagactctgggcttcctgaaccattaccagatgaaaaacccaaatggtccatacccttacactctgaagttgtgtttctccactgctcagcacgcctcctaattaggtgcctaggaagagtcccatctgagcaggaagacatttctctttcctttatgccattttttgtttttgttatttgcaaaagatcttgtattccttttttttttttttttttttttttaaatgctaggtttgtagaggcttacttaaccttaatggaaacgctggaaatctgcagggggagggagaggggaactgttatctcccaagattaaccttcacttttaaaaaattattgtacatgtgatttttttttttcctgttcatacatttgtgctgcccatgtactcttggcacatttcaataaaattgtttggaaaataaacaca

SEQ ID NO: 449766 - DNA, 3746 bp, Homo sapiens
atgccggtcgacactagaggccccccgctattacagatgttctttacactatctgtaatccttgtggccctgtccagagaattgtcattttcaggaagaatggagttcaggcgatggtggaatttgactcagttcaaagtgcccagcgggccaaggcctctctcaatggggctgatatctattctggctgttgcactctgaagatcgaatacgcaaagcctacacgcttgaatgtgttcaagaatgatcaggatacttgggactacacaaaccccaatctcagtggacaaggtaatcttgacgaccactttgttctaaacatacccgccttgctttcactcgactagtgcacttaataggcctgggctcagggttatgtaatgccattgggccccccatggacatgggagggccttggggtcagcacttggacaccctagtgggatgggggagtgagaggcctccatgggtcttcactgctgcttggggccctccgatgctgctcaggatacagaggcaaggcagaagcctggatgggcggggagcagggcctcactgaggatgaggcgtgggggcggccttagaaaccagcagtggctcctttgagagtctggtgagggtcactcactccattcttgctggaccaggaattgtcctcttgttctgcgctgttgagagggtctgatttgggggagtgacagtgttggggggcgatgaggtctcctgggctcttgcagtgagccttgtgagcaagctgaccctgtggaggtgagacactctggattggaccagggcggacatgcctcacatcatttgtagaggggacgcaacatctctgcaggtggcccaaatggacaactcccttcctagtgtctgtcaagaatggtttgcctttggtagcagggagaggtggaggattgcctatgagaaacagcggcagcccccaacaagaccatccatctcggtgtctgtcttggtctgatacgtcggaccaggccatgggctgagggaggaggctcgatgctgacatcgcacaggccctgagaggccagagccccccattcctaggcaggcctgtcttgctcgcccttgcatctgggaagcagtgggcagggtgggctagactcttccccaggatcctcacagtgggccctgtgggcctggctgctccctccaaaggtcagaggcaaattggtgaccaagtgaatgtaccagagcgggcaatggcattacatgactgctaacagaaacatggcaacaaccatttcttctccaaggaacataaatagaagatgtgcagaccggcaggggctagtggcagggggctggctgtgcattggttttgatgcctctcagctttggcagccccaaggctggggcccaaaaaaaaacgagggctgatgaggtgacctggagtgagggcggtgcttcgccacccctcaggaaccatacttcagcggctctgcctctgcacattgctcaccaacacacagggtagaaaaccactagctcttcctggagagaacagaacatgcagcctccaccacgtccccagaaacagccgcagacttgagctcactacatcaagaacaccacaccgcgctccaaggaacagctacaagcacagagacagaggcatacagagacaaagagagaaagagacgcaacatggcagcagacactgctttttttattaaacattaaaaaaaaggtcaaaatccaagcaaacttgaacccgagaatgtacacagaagtaggaaacacagagaacagagctgtcccagccagccagcgagcgatgctcttttcggagaacgtttcatagacggaagtagattccatgggcctccaagacaataggatcctctctccattcctcgccatatgggttttgttttttaagtcatttggtttggggagggccttgttttttttctgttttgatatttttattttttctgcagtcaccggctgccaacataatctgcaccaactggagatcagaaaccaaaaaaaaaaaaaaaaattttaaccacaacaaaaaaaaaatcaaaaaaaccaaaacagacctaaaaccagacagccaaacagctcagaggcacacagttacctgctgccgggtaaccaggcgcgctcccaaggccaaaagcgcgagcgtagtggggccactggcacacctcataccaggagacacgcacacggagcgctacacagccagaagcaccgcaccaccgcactgcagcacatatgtgaggaggtgacaacatggagggacactacccacttcatacacctttatttccacttttctgatatcttctgaggacagaacatctgtgagccatttttgatttaatcaaaatattgacttttaaaacaattctttaaaaaaattgtagcggatgtgtaccgtgacttgtatttatgactgtaaaaccatgtgatgcagggtcgcagtgtatgtttgatgggacgccatctttcagaactgtgctaactcactgttgaagcgtccaatggtaagagagtgaccctggcagcaaccccaacaaacgccagaggcagccccctctcctgggagatcaccccgcagaatatggagggccccacggtgggtaccacagccattaccatgatgagggctacgggccccccccacctcactacgaagggagaaggatgggtccaccagtggggggtcaccgtcggggcccaagtcgctacggcccccagtatgggcaccccccaccccctcccccaccacccgagtatggccctcacgccgacagccctgtgctcatggtctatggcttggatcaatctaagatgaactgtgaccgagtcttcaatgtcttctgcttatatggcaatgtggagaaggtgaaattcatgaaaagcaagccgggggccgccatggtggagatggctgatggctacgctgtagaccgggccattacccacctcaacaacaacttcatgtttgggcagaagctgaatgtctgtgtctccaagcagccagccatcatgcctggtcagtcatacgggttggaagacgggtcttgcagttacaaagacttcagtgaatcccggaacaatcggttctccaccccagagcaggcagccaagaaccgcatccagcaccccagcaacgtgctgcacttcttcaacgccccgctggaggtgaccgaggagaacttctttgagatctgcgatgagctgggagtgaagcggccatcttctgtgaaagtattctcaggcaaaagtgagcgcagctcctctggactgctggagtgggaatccaagagcgatgccctggagactctgggcttcctgaaccattaccagatgaaaaacccaaatggtccatacccttacactctgaagttgtgtttctccactgctcagcacgcctcctaattaggtgcctaggaagagtcccatctgagcaggaagacatttctctttcctttatgccattttttgtttttgttatttgcaaaagatcttgtattccttttttttttttttttttttttttaaatgctaggtttgtagaggcttacttaaccttaatggaaacgctggaaatctgcagggggagggagaggggaactgttatctcccaagattaaccttcacttttaaaaaattattgtacatgtgatttttttttttcctgttcatacatttgtgctgcccatgtactcttggcacatttcaataaaattgtttggaaaataaacaca

SEQ ID NO: 449767 - DNA, 4469 bp, Homo sapiens
agcgaggagaccaatgaaagtgggagggaggcggagattcttgggaggtttagagcgccgttcctatcaggtgcttttagggaggccagcagcgccagaaatccgacctatcaaattggattttattttaaggcggcggggtcgacggaaagactggcagaaagcgaccacctataaggagtgtctcagacaaacaagggcgggccctcctgcagaacggcgtgggcaatgtccaataagcgcgcaaggcgtgtggcggcctaccctccccccgcggcgggaccagtggctccccctatcgggtgggggcggcgggtgacgggcgtgtccctcccccaatgagaggcggggggaggcgggttctgcgccgccatgtcgcggaggctgctgccccgggcggagaagcggcgtcggcggctggagcagaggcagcagccggacgagcagcggaggcggtcgggagcgatggtgaagatggcggcggcgggcggcggaggcggcggtggccgctactacggcggcggcagtgagggcggccgggcccctaagcggctcaagactgacaacgccggcgaccagcacggaggcggcggcggtggcggtggaggagccggggcggcgggcggcggcggcggtggggagaactacgatgacccgcacaaaacccctgcctccccagttgtccacatcaggggcctgattgacggtgtggtggaagcagaccttgtggaggccttgcaggagtttggacccatcagctatgtggtggtaatgcctaaaaagagacaagcactggtggagtttgaagatgtgttgggggcttgcaacgcagtgaactacgcagccgacaaccaaatatacattgctggtcacccagcttttgtcaactactctaccagccagaagatctcccgccctggggactcggatgactcccggagcgtgaacagtgtgcttctctttaccatcctgaaccccatttattcgatcaccacggatgttctttacactatctgtaatccttgtggccctgtccagagaattgtcattttcaggaagaatggagttcaggcgatggtggaatttgactcagttcaaagtgcccagcgggccaaggcctctctcaatggggctgatatctattctggctgttgcactctgaagatcgaatacgcaaagcctacacgcttgaatgtgttcaagaatgatcaggatacttgggactacacaaaccccaatctcagtggacaaggtaatcttgacgaccactttgttctaaacatacccgccttgctttcactcgactagtgcacttaataggcctgggctcagggttatgtaatgccattgggccccccatggacatgggagggccttggggtcagcacttggacaccctagtgggatgggggagtgagaggcctccatgggtcttcactgctgcttggggccctccgatgctgctcaggatacagaggcaaggcagaagcctggatgggcggggagcagggcctcactgaggatgaggcgtgggggcggccttagaaaccagcagtggctcctttgagagtctggtgagggtcactcactccattcttgctggaccaggaattgtcctcttgttctgcgctgttgagagggtctgatttgggggagtgacagtgttggggggcgatgaggtctcctgggctcttgcagtgagccttgtgagcaagctgaccctgtggaggtgagacactctggattggaccagggcggacatgcctcacatcatttgtagaggggacgcaacatctctgcaggtggcccaaatggacaactcccttcctagtgtctgtcaagaatggtttgcctttggtagcagggagaggtggaggattgcctatgagaaacagcggcagcccccaacaagaccatccatctcggtgtctgtcttggtctgatacgtcggaccaggccatgggctgagggaggaggctcgatgctgacatcgcacaggccctgagaggccagagccccccattcctaggcaggcctgtcttgctcgcccttgcatctgggaagcagtgggcagggtgggctagactcttccccaggatcctcacagtgggccctgtgggcctggctgctccctccaaaggtcagaggcaaattggtgaccaagtgaatgtaccagagcgggcaatggcattacatgactgctaacagaaacatggcaacaaccatttcttctccaaggaacataaatagaagatgtgcagaccggcaggggctagtggcagggggctggctgtgcattggttttgatgcctctcagctttggcagccccaaggctggggcccaaaaaaaaacgagggctgatgaggtgacctggagtgagggcggtgcttcgccacccctcaggaaccatacttcagcggctctgcctctgcacattgctcaccaacacacagggtagaaaaccactagctcttcctggagagaacagaacatgcagcctccaccacgtccccagaaacagccgcagacttgagctcactacatcaagaacaccacaccgcgctccaaggaacagctacaagcacagagacagaggcatacagagacaaagagagaaagagacgcaacatggcagcagacactgctttttttattaaacattaaaaaaaaggtcaaaatccaagcaaacttgaacccgagaatgtacacagaagtaggaaacacagagaacagagctgtcccagccagccagcgagcgatgctcttttcggagaacgtttcatagacggaagtagattccatgggcctccaagacaataggatcctctctccattcctcgccatatgggttttgttttttaagtcatttggtttggggagggccttgttttttttctgttttgatatttttattttttctgcagtcaccggctgccaacataatctgcaccaactggagatcagaaaccaaaaaaaaaaaaaaaaattttaaccacaacaaaaaaaaaatcaaaaaaaccaaaacagacctaaaaccagacagccaaacagctcagaggcacacagttacctgctgccgggtaaccaggcgcgctcccaaggccaaaagcgcgagcgtagtggggccactggcacacctcataccaggagacacgcacacggagcgctacacagccagaagcaccgcaccaccgcactgcagcacatatgtgaggaggtgacaacatggagggacactacccacttcatacacctttatttccacttttctgatatcttctgaggacagaacatctgtgagccatttttgatttaatcaaaatattgacttttaaaacaattctttaaaaaaattgtagcggatgtgtaccgtgacttgtatttatgactgtaaaaccatgtgatgcagggtcgcagtgtatgtttgatgggacgccatctttcagaactgtgctaactcactgttgaagcgtccaatggtaagagagtgaccctggcagcaaccccaacaaacgccagaggcagccccctctcctgggagatcaccccgcagaatatggagggccccacggtgggtaccacagccattaccatgatgagggctacgggccccccccacctcactacgaagggagaaggatgggtccaccagtggggggtcaccgtcggggcccaagtcgctacggcccccagtatgggcaccccccaccccctcccccaccacccgagtatggccctcacgccgacagccctgtgctcatggtctatggcttggatcaatctaagatgaactgtgaccgagtcttcaatgtcttctgcttatatggcaatgtggagaaggtgaaattcatgaaaagcaagccgggggccgccatggtggagatggctgatggctacgctgtagaccgggccattacccacctcaacaacaacttcatgtttgggcagaagctgaatgtctgtgtctccaagcagccagccatcatgcctggtcagtcatacgggttggaagacgggtcttgcagttacaaagacttcagtgaatcccggaacaatcggttctccaccccagagcaggcagccaagaaccgcatccagcaccccagcaacgtgctgcacttcttcaacgccccgctggaggtgaccgaggagaacttctttgagatctgcgatgagctgggagtgaagcggccatcttctgtgaaagtattctcaggcaaaagtgagcgcagctcctctggactgctggtggaaggtcccttccaccagctactgaatcgtcgccttggtaggcttttaccctacacaagtagctaatcagctatcggccattccaatagcacaaggtccgaagatcccctgctttcatccacagatcgtatgcggaaatagctatccttacggatagttatcccccaatactgggtatgtgccgatatattataaccgtacgcaatgacacagaacg

SEQ ID NO: 449768 - DNA, 2549 bp, Homo sapiens
agcgaggagaccaatgaaagtgggagggaggcggagattcttgggaggtttagagcgccgttcctatcaggtgcttttagggaggccagcagcgccagaaatccgacctatcaaattggattttattttaaggcggcggggtcgacggaaagactggcagaaagcgaccacctataaggagtgtctcagacaaacaagggcgggccctcctgcagaacggcgtgggcaatgtccaataagcgcgcaaggcgtgtggcggcctaccctccccccgcggcgggaccagtggctccccctatcgggtgggggcggcgggtgacgggcgtgtccctcccccaatgagaggcggggggaggcgggttctgcgccgccatgtcgcggaggctgctgccccgggcggagaagcggcgtcggcggctggagcagaggcagcagccggacgagcagcggaggcggtcgggagcgatggtgaagatggcggcggcgggcggcggaggcggcggtggccgctactacggcggcggcagtgagggcggccgggcccctaagcggctcaagactgacaacgccggcgaccagcacggaggcggcggcggtggcggtggaggagccggggcggcgggcggcggcggcggtggggagaactacgatgacccgcacaaaacccctgcctccccagttgtccacatcaggggcctgattgacggtgtggtggaagcagaccttgtggaggccttgcaggagtttggacccatcagctatgtggtggtaatgcctaaaaagagacaagcactggtggagtttgaagatgtgttgggggcttgcaacgcagtgaactacgcagccgacaaccaaatatacattgctggtcacccagcttttgtcaactactctaccagccagaagatctcccgccctggggactcggatgactcccggagcgtgaacagtgtgcttctctttaccatcctgaaccccatttattcgatcaccacggatgttctttacactatctgtaatccttgtggccctgtccagagaattgtcattttcaggaagaatggagttcaggcgatggtggaatttgactcagttcaaagtgcccagcgggccaaggcctctctcaatggggctgatatctattctggctgttgcactctgaagatcgaatacgcaaagcctacacgcttgaatgtgttcaagaatgatcaggatacttgggactacacaaaccccaatctcagtggacaagggtcgcagtgtatgtttgatgggacgccatctttcagaactgtgctaactcactgttgaagcgtccaatggtaagagagtgaccctggcagcaaccccaacaaacgccagaggcagccccctctcctgggagatcaccccgcagaatatggagggccccacggtgggtaccacagccattaccatgatgagggctacgggccccccccacctcactacgaagggagaaggatgggtccaccagtggggggtcaccgtcggggcccaagtcgctacggcccccagtatgggcaccccccaccccctcccccaccacccgagtatggccctcacgccgacagccctgtgctcatggtctatggcttggatcaatctaagatgaactgtgaccgagtcttcaatgtcttctgcttatatggcaatgtggagaaggtgaaattcatgaaaagcaagccgggggccgccatggtggagatggctgatggctacgctgtagaccgggccattacccacctcaacaacaacttcatgtttgggcagaagctgaatgtctgtgtctccaagcagccagccatcatgcctggtcagtcatacgggttggaagacgggtcttgcagttacaaagacttcagtgaatcccggaacaatcggttctccaccccagagcaggcagccaagaaccgcatccagcaccccagcaacgtgctgcacttcttcaacgccccgctggaggtgaccgaggagaacttctttgagatctgcgatgagctgggagtgaagcggccatcttctgtgaaagtattctcaggcaaaagtgagcgcagctcctctggactgctggagtgggaatccaagagcgatgccctggagactctgggcttcctgaaccattaccagatgaaaaacccaaatggtccatacccttacactctgaagttgtgtttctccactgctcagcacgcctcctaattaggtgcctaggaagagtcccatctgagcaggaagacatttctctttcctttatgccattttttgtttttgttatttgcaaaagatcttgtattccttttttttttttttttttttttttaaatgctaggtttgtagaggcttacttaaccttaatggaaacgctggaaatctgcagggggagggagaggggaactgttatctcccaagattaaccttcacttttaaaaaattattgtacatgtgatttttttttttcctgttcatacatttgtgctgcccatgtactcttggcacatttcaataaaattgtttggaaaataaacaca

SEQ ID NO: 449769 - DNA, 4017 bp, Homo sapiens
agcgaggagaccaatgaaagtgggagggaggcggagattcttgggaggtttagagcgccgttcctatcaggtgcttttagggaggccagcagcgccagaaatccgacctatcaaattggattttattttaaggcggcggggtcgacggaaagactggcagaaagcgaccacctataaggagtgtctcagacaaacaagggcgggccctcctgcagaacggcgtgggcaatgtccaataagcgcgcaaggcgtgtggcggcctaccctccccccgcggcgggaccagtggctccccctatcgggtgggggcggcgggtgacgggcgtgtccctcccccaatgagaggcggggggaggcgggttctgcgccgccatgtcgcggaggctgctgccccgggcggagaagcggcgtcggcggctggagcagaggcagcagccggacgagcagcggaggcggtcgggagcgatggtgaagatggcggcggcgggcggcggaggcggcggtggccgctactacggcggcggcagtgagggcggccgggcccctaagcggctcaagactgacaacgccggcgaccagcacggaggcggcggcggtggcggtggaggagccggggcggcgggcggcggcggcggtggggagaactacgatgacccgcacaaaacccctgcctccccagttgtccacatcaggggcctgattgacggtgtggtggaagcagaccttgtggaggccttgcaggagtttggacccatcagctatgtggtggtaatgcctaaaaagagacaagcactggtggagtttgaagatgtgttgggggcttgcaacgcagtgaactacgcagccgacaaccaaatatacattgctggtcacccagcttttgtcaactactctaccagccagaagatctcccgccctggggactcggatgactcccggagcgtgaacagtgtgcttctctttaccatcctgaaccccatttattcgatcaccacggatgttctttacactatctgtaatccttgtggccctgtccagagaattgtcattttcaggaagaatggagttcaggcgatggtggaatttgactcagttcaaagtgcccagcgggccaaggcctctctcaatggggctgatatctattctggctgttgcactctgaagatcgaatacgcaaagcctacacgcttgaatgtgttcaagaatgatcaggatacttgggactacacaaaccccaatctcagtggacaaggtaatcttgacgaccactttgttctaaacatacccgccttgctttcactcgactagtgcacttaataggcctgggctcagggttatgtaatgccattgggccccccatggacatgggagggccttggggtcagcacttggacaccctagtgggatgggggagtgagaggcctccatgggtcttcactgctgcttggggccctccgatgctgctcaggatacagaggcaaggcagaagcctggatgggcggggagcagggcctcactgaggatgaggcgtgggggcggccttagaaaccagcagtggctcctttgagagtctggtgagggtcactcactccattcttgctggaccaggaattgtcctcttgttctgcgctgttgagagggtctgatttgggggagtgacagtgttggggggcgatgaggtctcctgggctcttgcagtgagccttgtgagcaagctgaccctgtggaggtgagacactctggattggaccagggcggacatgcctcacatcatttgtagaggggacgcaacatctctgcaggtggcccaaatggacaactcccttcctagtgtctgtcaagaatggtttgcctttggtagcagggagaggtggaggattgcctatgagaaacagcggcagcccccaacaagaccatccatctcggtgtctgtcttggtctgatacgtcggaccaggccatgggctgagggaggaggctcgatgctgacatcgcacaggccctgagaggccagagccccccattcctaggcaggcctgtcttgctcgcccttgcatctgggaagcagtgggcagggtgggctagactcttccccaggatcctcacagtgggccctgtgggcctggctgctccctccaaaggtcagaggcaaattggtgaccaagtgaatgtaccagagcgggcaatggcattacatgactgctaacagaaacatggcaacaaccatttcttctccaaggaacataaatagaagatgtgcagaccggcaggggctagtggcagggggctggctgtgcattggttttgatgcctctcagctttggcagccccaaggctggggcccaaaaaaaaacgagggctgatgaggtgacctggagtgagggcggtgcttcgccacccctcaggaaccatacttcagcggctctgcctctgcacattgctcaccaacacacagggtagaaaaccactagctcttcctggagagaacagaacatgcagcctccaccacgtccccagaaacagccgcagacttgagctcactacatcaagaacaccacaccgcgctccaaggaacagctacaagcacagagacagaggcatacagagacaaagagagaaagagacgcaacatggcagcagacactgctttttttattaaacattaaaaaaaaggtcaaaatccaagcaaacttgaacccgagaatgtacacagaagtaggaaacacagagaacagagctgtcccagccagccagcgagcgatgctcttttcggagaacgtttcatagacggaagtagattccatgggcctccaagacaataggatcctctctccattcctcgccatatgggttttgttttttaagtcatttggtttggggagggccttgttttttttctgttttgatatttttattttttctgcagtcaccggctgccaacataatctgcaccaactggagatcagaaaccaaaaaaaaaaaaaaaaattttaaccacaacaaaaaaaaaatcaaaaaaaccaaaacagacctaaaaccagacagccaaacagctcagaggcacacagttacctgctgccgggtaaccaggcgcgctcccaaggccaaaagcgcgagcgtagtggggccactggcacacctcataccaggagacacgcacacggagcgctacacagccagaagcaccgcaccaccgcactgcagcacatatgtgaggaggtgacaacatggagggacactacccacttcatacacctttatttccacttttctgatatcttctgaggacagaacatctgtgagccatttttgatttaatcaaaatattgacttttaaaacaattctttaaaaaaattgtagcggatgtgtaccgtgacttgtatttatgactgtaaaaccatgtgatgcagggtcgcagtgtatgtttgatgggacgccatctttcagaactgtgctaactcactgttgaagcgtccaatggtaagagaaaatacagatttgttttttgtgacaaatggacattgtactctgtacttctgctgtaagtagtccttttccattttgtaatgactggtaacaaaacccaggccgggtggcaggaaagggcagtggtttcgagccctgggttttggagtcagccagacctgggttcaaatatggctcagccactgtcttgctttgtgactttgggccaaagtgtcttttaactgctcagttaaaagttaacaactcagtcttcttatctgtaaaatggggctgaaatatcagaacctacctcatagggttgttgtgaggaatttcagaagctgtgatgtctgtaaagcgcttagcccagtgcctgccacttaagcgctaagttaaaggcagtgattacgaactgctggggtcggggtggatctgcgccattgctgggtgtgggaatgtcgatgccttgttttttttctgttttgatatttttattttttctgcagtcaccggctgccaacataatctgcaccaactggagatcagaaacca

SEQ ID NO: 449770 - DNA, 3782 bp, Homo sapiens
agcgaggagaccaatgaaagtgggagggaggcggagattcttgggaggtttagagcgccgttcctatcaggtgcttttagggaggccagcagcgccagaaatccgacctatcaaattggattttattttaaggcggcggggtcgacggaaagactggcagaaagcgaccacctataaggagtgtctcagacaaacaagggcgggccctcctgcagaacggcgtgggcaatgtccaataagcgcgcaaggcgtgtggcggcctaccctccccccgcggcgggaccagtggctccccctatcgggtgggggcggcgggtgacgggcgtgtccctcccccaatgagaggcggggggaggcgggttctgcgccgccatgtcgcggaggctgctgccccgggcggagaagcggcgtcggcggctggagcagaggcagcagccggacgagcagcggaggcggtcgggagcgatggtgaagatggcggcggcgggcggcggaggcggcggtggccgctactacggcggcggcagtgagggcggccgggcccctaagcggctcaagactgacaacgccggcgaccagcacggaggcggcggcggtggcggtggaggagccggggcggcgggcggcggcggcggtggggagaactacgatgacccgcacaaaacccctgcctccccagttgtccacatcaggggcctgattgacggtgtggtggaagcagaccttgtggaggccttgcaggagtttggacccatcagctatgtggtggtaatgcctaaaaagagacaagcactggtggagtttgaagatgtgttgggggcttgcaacgcagtgaactacgcagccgacaaccaaatatacattgctggtcacccagcttttgtcaactactctaccagccagaagatctcccgccctggggactcggatgactcccggagcgtgaacagtgtgcttctctttaccatcctgaaccccatttattcgatcaccacggatgttctttacactatctgtaatccttgtggccctgtccagagaattgtcattttcaggaagaatggagttcaggcgatggtggaatttgactcagttcaaagtgcccagcgggccaaggcctctctcaatggggctgatatctattctggctgttgcactctgaagatcgaatacgcaaagcctacacgcttgaatgtgttcaagaatgatcaggatacttgggactacacaaaccccaatctcagtggacaaggtaatcttgacgaccactttgttctaaacatacccgccttgctttcactcgactagtgcacttaataggcctgggctcagggttatgtaatgccattgggccccccatggacatgggagggccttggggtcagcacttggacaccctagtgggatgggggagtgagaggcctccatgggtcttcactgctgcttggggccctccgatgctgctcaggatacagaggcaaggcagaagcctggatgggcggggagcagggcctcactgaggatgaggcgtgggggcggccttagaaaccagcagtggctcctttgagagtctggtgagggtcactcactccattcttgctggaccaggaattgtcctcttgttctgcgctgttgagagggtctgatttgggggagtgacagtgttggggggcgatgaggtctcctgggctcttgcagtgagccttgtgagcaagctgaccctgtggaggtgagacactctggattggaccagggcggacatgcctcacatcatttgtagaggggacgcaacatctctgcaggtggcccaaatggacaactcccttcctagtgtctgtcaagaatggtttgcctttggtagcagggagaggtggaggattgcctatgagaaacagcggcagcccccaacaagaccatccatctcggtgtctgtcttggtctgatacgtcggaccaggccatgggctgagggaggaggctcgatgctgacatcgcacaggccctgagaggccagagccccccattcctaggcaggcctgtcttgctcgcccttgcatctgggaagcagtgggcagggtgggctagactcttccccaggatcctcacagtgggccctgtgggcctggctgctccctccaaaggtcagaggcaaattggtgaccaagtgaatgtaccagagcgggcaatggcattacatgactgctaacagaaacatggcaacaaccatttcttctccaaggaacataaatagaagatgtgcagaccggcaggggctagtggcagggggctggctgtgcattggttttgatgcctctcagctttggcagccccaaggctggggcccaaaaaaaaacgagggctgatgaggtgacctggagtgagggcggtgcttcgccacccctcaggaaccatacttcagcggctctgcctctgcacattgctcaccaacacacagggtagaaaaccactagctcttcctggagagaacagaacatgcagcctccaccacgtccccagaaacagccgcagacttgagctcactacatcaagaacaccacaccgcgctccaaggaacagctacaagcacagagacagaggcatacagagacaaagagagaaagagacgcaacatggcagcagacactgctttttttattaaacattaaaaaaaaggtcaaaatccaagcaaacttgaacccgagaatgtacacagaagtaggaaacacagagaacagagctgtcccagccagccagcgagcgatgctcttttcggagaacgtttcatagacggaagtagattccatgggcctccaagacaataggatcctctctccattcctcgccatatgggttttgttttttaagtcatttggtttggggagggccttgttttttttctgttttgatatttttattttttctgcagtcaccggctgccaacataatctgcaccaactggagatcagaaaccaaaaaaaaaaaaaaaaattttaaccacaacaaaaaaaaaatcaaaaaaaccaaaacagacctaaaaccagacagccaaacagctcagaggcacacagttacctgctgccgggtaaccaggcgcgctcccaaggccaaaagcgcgagcgtagtggggccactggcacacctcataccaggagacacgcacacggagcgctacacagccagaagcaccgcaccaccgcactgcagcacatatgtgaggaggtgacaacatggagggacactacccacttcatacacctttatttccacttttctgatatcttctgaggacagaacatctgtgagccatttttgatttaatcaaaatattgacttttaaaacaattctttaaaaaaattgtagcggatgtgtaccgtgacttgtatttatgactgtaaaaccatgtgatgcagggtcgcagtgtatgtttgatgggacgccatctttcagaactgtgctaactcactgttgaagcgtccaatggtaagagagtgaccctggcagcaaccccaacaaacgccagaggcagccccctctcctgggagatcaccccgcagaatatggagggccccacggtgggtaccacagccattaccatgatgagggctacgggccccccccacctcactacgaagggagaaggatgggtccaccagtggggggtcaccgtcggggcccaagtcgctacggcccccagtatgggcaccccccaccccctcccctgcagatttccagcgtttccattaaggttaagtaagccttttcaaaccttggcttttaaaaaa

SEQ ID NO: 449771 - DNA, 1508 bp, Homo sapiens
ctggccggccctccattagtgtaggccaccacggatgttctttacactatctgtaatccttgtggccctgtccagagaattgtcattttcaggaagaatggagttcaggcgatggtggaatttgactcagttcaaagtgcccagcgggccaaggcctctctcaatggggctgatatctattctggctgttgcactctgaagatcgaatacgcaaagcctacacgcttgaatgtgttcaagaatgatcaggatacttgggactacacaaaccccaatctcagtggacaaggtgaccctggcagcaaccccaacaaacgccagaggcagccccctctcctgggagatcaccccgcagaatatggagggccccacggtgggtaccacagccattaccatgatgagggctacgggccccccccacctcactacgaagggagaaggatgggtccaccagtggggggtcaccgtcggggcccaagtcgctacggcccccagtatgggcaccccccaccccctcccccaccacccgagtatggccctcacgccgacagccctgtgctcatggtctatggcttggatcaatctaagatgaactgtgaccgagtcttcaatgtcttctgcttatatggcaatgtggagaaggtgaaattcatgaaaagcaagccgggggccgccatggtggagatggctgatggctacgctgtagaccgggccattacccacctcaacaacaacttcatgtttgggcagaagctgaatgtctgtgtctccaagcagccagccatcatgcctggtcagtcatacgggttggaagacgggtcttgcagttacaaagacttcagtgaatcccggaacaatcggttctccaccccagagcaggcagccaagaaccgcatccagcaccccagcaacgtgctgcacttcttcaacgccccgctggaggtgaccgaggagaacttctttgagatctgcgatgagctgggagtgaagcggccatcttctgtgaaagtattctcaggcaaaagtgagcgcagctcctctggactgctggagtgggaatccaagagcgatgccctggagactctgggcttcctgaaccattaccagatgaaaaacccaaatggtccatacccttacactctgaagttgtgtttctccactgctcagcacgcctcctaattaggtgcctaggaagagtcccatctgagcaggaagacatttctctttcctttatgccattttttgtttttgttatttgcaaaagatcttgtattccttttttttttttttttttttttttaaatgctaggtttgtagaggcttacttaaccttaatggaaacgctggaaatctgcagggggagggagaggggaactgttatctcccaagattaaccttcacttttaaaaaattattgtacatgtgatttttttttttcctgttcatacatttgtgctgcccatgtactcttggcacatttcaataaaattgtttggaaaataaacaca

SEQ ID NO: 449772 - DNA, 1569 bp, Homo sapiens
ggctggtactggcccggaatttaaggatgcagctgcacattccccagagggcctgggagctgggctttctcccagggccagggtaggtgagagcacagaatctggccttgtccttcacagaacaaggccagccctttggtatgagcaggggaaggagagtgggcaccagctttgaggctcgggcttcatgcccgccgtaggtcagatcacaaaaggaggccccacagccctcgaggaagggagggcttgcagtttgcaggagctgggggctcagatcagcctgtgcagtcaggagggagggagagaccccaatttctgagtgagactcctaactgttttctctctccacagtgaccctggcagcaaccccaacaaacgccagaggcagccccctctcctgggagatcaccccgcagaatatggagggccccacggtgggtaccacagccattaccatgatgagggctacgggccccccccacctcactacgaagggagaaggatgggtccaccagtggggggtcaccgtcggggcccaagtcgctacggcccccagtatgggcaccccccaccccctcccccaccacccgagtatggccctcacgccgacagccctgtgctcatggtctatggcttggatcaatctaagatgaactgtgaccgagtcttcaatgtcttctgcttatatggcaatgtggagaaggtgaaattcatgaaaagcaagccgggggccgccatggtggagatggctgatggctacgctgtagaccgggccattacccacctcaacaacaacttcatgtttgggcagaagctgaatgtctgtgtctccaagcagccagccatcatgcctggtcagtcatacgggttggaagacgggtcttgcagttacaaagacttcagtgaatcccggaacaatcggttctccaccccagagcaggcagccaagaaccgcatccagcaccccagcaacgtgctgcacttcttcaacgccccgctggaggtgaccgaggagaacttctttgagatctgcgatgagctgggagtgaagcggccatcttctgtgaaagtattctcaggcaaaagtgagcgcagctcctctggactgctggagtgggaatccaagagcgatgccctggagactctgggcttcctgaaccattaccagatgaaaaacccaaatggtccatacccttacactctgaagttgtgtttctccactgctcagcacgcctcctaattaggtgcctaggaagagtcccatctgagcaggaagacatttctctttcctttatgccattttttgtttttgttatttgcaaaagatcttgtattccttttttttttttttttttttttttaaatgctaggtttgtagaggcttacttaaccttaatggaaacgctggaaatctgcagggggagggagaggggaactgttatctcccaagattaaccttcacttttaaaaaattattgtacatgtgatttttttttttcctgttcatacatttgtgctgcccatgtactcttggcacatttcaataaaattgtttggaaaataaacaca

SEQ ID NO: 449773 - DNA, 1266 bp, Homo sapiens
attcattactaataatgcatttttggagacttttgtgagagtggacagtgaccctggcagcaaccccaacaaacgccagaggcagccccctctcctgggagatcaccccgcagaatatggagggccccacggtgggtaccacagccattaccatgatgagggctacgggccccccccacctcactacgaagggagaaggatgggtccaccagtggggggtcaccgtcggggcccaagtcgctacggcccccagtatgggcaccccccaccccctcccccaccacccgagtatggccctcacgccgacagccctgtgctcatggtctatggcttggatcaatctaagatgaactgtgaccgagtcttcaatgtcttctgcttatatggcaatgtggagaaggtgaaattcatgaaaagcaagccgggggccgccatggtggagatggctgatggctacgctgtagaccgggccattacccacctcaacaacaacttcatgtttgggcagaagctgaatgtctgtgtctccaagcagccagccatcatgcctggtcagtcatacgggttggaagacgggtcttgcagttacaaagacttcagtgaatcccggaacaatcggttctccaccccagagcaggcagccaagaaccgcatccagcaccccagcaacgtgctgcacttcttcaacgccccgctggaggtgaccgaggagaacttctttgagatctgcgatgagctgggagtgaagcggccatcttctgtgaaagtattctcaggcaaaagtgagcgcagctcctctggactgctggagtgggaatccaagagcgatgccctggagactctgggcttcctgaaccattaccagatgaaaaacccaaatggtccatacccttacactctgaagttgtgtttctccactgctcagcacgcctcctaattaggtgcctaggaagagtcccatctgagcaggaagacatttctctttcctttatgccattttttgtttttgttatttgcaaaagatcttgtattccttttttttttttttttttttttttaaatgctaggtttgtagaggcttacttaaccttaatggaaacgctggaaatctgcagggggagggagaggggaactgttatctcccaagattaaccttcacttttaaaaaattattgtacatgtgatttttttttttcctgttcatacatttgtgctgcccatgtactcttggcacatttcaataaaattgtttggaaaataaacaca

SEQ ID NO: 449774 - DNA, 897 bp, Homo sapiens
agaggtgctgactgcagctactctccccaaggtgaaattcatgaaaagcaagccgggggccgccatggtggagatggctgatggctacgctgtagaccgggccattacccacctcaacaacaacttcatgtttgggcagaagctgaatgtctgtgtctccaagcagccagccatcatgcctggtcagtcatacgggttggaagacgggtcttgcagttacaaagacttcagtgaatcccggaacaatcggttctccaccccagagcaggcagccaagaaccgcatccagcaccccagcaacgtgctgcacttcttcaacgccccgctggaggtgaccgaggagaacttctttgagatctgcgatgagctgggagtgaagcggccatcttctgtgaaagtattctcaggcaaaagtgagcgcagctcctctggactgctggagtgggaatccaagagcgatgccctggagactctgggcttcctgaaccattaccagatgaaaaacccaaatggtccatacccttacactctgaagttgtgtttctccactgctcagcacgcctcctaattaggtgcctaggaagagtcccatctgagcaggaagacatttctctttcctttatgccattttttgtttttgttatttgcaaaagatcttgtattccttttttttttttttttttttttttaaatgctaggtttgtagaggcttacttaaccttaatggaaacgctggaaatctgcagggggagggagaggggaactgttatctcccaagattaaccttcacttttaaaaaattattgtacatgtgatttttttttttcctgttcatacatttgtgctgcccatgtactcttggcacatttcaataaaattgtttggaaaataaacaca

SEQ ID NO: 449775 - DNA, 1425 bp, Homo sapiens
agcgaggagaccaatgaaagtgggagggaggcggagattcttgggaggtttagagcgccgttcctatcaggtgcttttagggaggccagcagcgccagaaatccgacctatcaaattggattttattttaaggcggcggggtcgacggaaagactggcagaaagcgaccacctataaggagtgtctcagacaaacaagggcgggccctcctgcagaacggcgtgggcaatgtccaataagcgcgcaaggcgtgtggcggcctaccctccccccgcggcgggaccagtggctccccctatcgggtgggggcggcgggtgacgggcgtgtccctcccccaatgagaggcggggggaggcgggttctgcgccgccatgtcgcggaggctgctgccccgggcggagaagcggcgtcggcggctggagcagaggcagcagccggacgagcagcggaggcggtcgggagcgatggtgaagatggcggcggcgggcggcggaggcggcggtggccgctactacggcggcggcagtgagggcggccgggcccctaagcggctcaagactgacaacgccggcgaccagcacggaggcggcggcggtggcggtggaggagccggggcggcgggcggcggcggcggtggggagaactacgatgacccgcacaaaacccctgcctccccagttgtccacatcaggggcctgattgacggtgtggtggaagcagaccttgtggaggccttgcaggagtttggacccatcagctatgtggtggtaatgcctaaaaagagacaagcactggtggagtttgaagatgtgttgggggcttgcaacgcagtgaactacgcagccgacaaccaaatatacattgctggtcacccagcttttgtcaactactctaccagccagaagatctcccgccctggggactcggatgactcccggagcgtgaacagtgtgcttctctttaccatcctgaaccccatttattcgatcaccacggatgttctttacactatctgtaatccttgtggccctgtccagagaattgtcattttcaggaagaatggagttcaggcgatggtggaatttgactcagttcaaagtgcccagcgggccaaggcctctctcaatggggctgatatctattctggctgttgcactctgaagatcgaatacgcaaagcctacacgcttgaatgtgttcaagaatgatcaggatacttgggactacacaaaccccaatctcagtggacaaggtgaccctggcagcaaccccaacaaacgccagaggggaactgttatctcccaagattaaccttcacttttaaaaaattattgtacatgtgatttttttttttcctgttcatacatttgtgctgcccatgtactcttggcacatttcaataaaattgtttggaaaataaacaca

SEQ ID NO: 449776 - DNA, 1414 bp, Homo sapiens
agcgaggagaccaatgaaagtgggagggaggcggagattcttgggaggtttagagcgccgttcctatcaggtgcttttagggaggccagcagcgccagaaatccgacctatcaaattggattttattttaaggcggcggggtcgacggaaagactggcagaaagcgaccacctataaggagtgtctcagacaaacaagggcgggccctcctgcagaacggcgtgggcaatgtccaataagcgcgcaaggcgtgtggcggcctaccctccccccgcggcgggaccagtggctccccctatcgggtgggggcggcgggtgacgggcgtgtccctcccccaatgagaggcggggggaggcgggttctgcgccgccatgtcgcggaggctgctgccccgggcggagaagcggcgtcggcggctggagcagaggcagcagccggacgagcagcggaggcggtcgggagcgatggtgaagatggcggcggcgggcggcggaggcggcggtggccgctactacggcggcggcagtgagggcggccgggcccctaagcggctcaagactgacaacgccggcgaccagcacggaggcggcggcggtggcggtggaggagccggggcggcgggcggcggcggcggtggggagaactacgatgacccgcacaaaacccctgcctccccagttgtccacatcaggggcctgattgacggtgtggtggaagcagaccttgtggaggccttgcaggagtttggacccatcagctatgtggtggtaatgcctaaaaagagacaagcactggtggagtttgaagatgtgttgggggcttgcaacgcagtgaactacgcagccgacaaccaaatatacattgctggtcacccagcttttgtcaactactctaccagccagaagatctcccgccctggggactcggatgactcccggagcgtgaacagtgtgcttctctttaccatcctgaaccccatttattcgatcaccacggatgttctttacactatctgtaatccttgtggccctgtccagagaattgtcattttcaggaagaatggagttcaggcgatggtggaatttgactcagttcaaagtgcccagcgggccaaggcctctctcaatggggctgatatctattctggctgttgcactctgaagatcgaatacgcaaagcctacacgcttgaatgtgttcaagaatgatcaggatacttgggactacacaaaccccaatctcagtggacaaggtgaccctggcagcaaccccaacaaacgccagaggcagccccctctcctgggagatcaccccgcagaatatggtgagggcagggggttcccctccgtggactcccgtggctcatgtgcccctgcccgccgcccgccgtgcaaattctcacccgtcctccctc

SEQ ID NO: 449777 - DNA, 1276 bp, Homo sapiens
agcgaggagaccaatgaaagtgggagggaggcggagattcttgggaggtttagagcgccgttcctatcaggtgcttttagggaggccagcagcgccagaaatccgacctatcaaattggattttattttaaggcggcggggtcgacggaaagactggcagaaagcgaccacctataaggagtgtctcagacaaacaagggcgggccctcctgcagaacggcgtgggcaatgtccaataagcgcgcaaggcgtgtggcggcctaccctccccccgcggcgggaccagtggctccccctatcgggtgggggcggcgggtgacgggcgtgtccctcccccaatgagaggcggggggaggcgggttctgcgccgccatgtcgcggaggctgctgccccgggcggagaagcggcgtcggcggctggagcagaggcagcagccggacgagcagcggaggcggtcgggagcgatggtgaagatggcggcggcgggcggcggaggcggcggtggccgctactacggcggcggcagtgagggcggccgggcccctaagcggctcaagactgacaacgccggcgaccagcacggaggcggcggcggtggcggtggaggagccggggcggcgggcggcggcggcggtggggagaactacgatgacccgcacaaaacccctgcctccccagttgtccacatcaggggcctgattgacggtgtggtggaagcagaccttgtggaggccttgcaggagtttggacccatcagctatgtggtggtaatgcctaaaaagagacaagcactggtggagtttgaagatgtgttgggggcttgcaacgcagtgaactacgcagccgacaaccaaatatacattgctggtcacccagcttttgtcaactactctaccagccagaagatctcccgccctggggactcggatgactcccggagcgtgaacagtgtgcttctctttaccatcctgaaccccatttattcgatcaccacggatgttctttacactatctgtaatccttgtggccctgtccagagaattgtcattttcaggaagaatggagttcaggcgatggtggaatatcctttgctggaaaacaggtgttccttagggtagggactcttgcagggcttgacagtggccattctttgagccagcatgtgtctgctgaccacgggagtggctgccatgtgccagatgccttcacagagcccagtgactgagtagggaggcagttaaaggaccaggcatatcgtgtggacgtgcagatctt

SEQ ID NO: 449778 - DNA, 1187 bp, Homo sapiens
agcgaggagaccaatgaaagtgggagggaggcggagattcttgggaggtttagagcgccgttcctatcaggtgcttttagggaggccagcagcgccagaaatccgacctatcaaattggattttattttaaggcggcggggtcgacggaaagactggcagaaagcgaccacctataaggagtgtctcagacaaacaagggcgggccctcctgcagaacggcgtgggcaatgtccaataagcgcgcaaggcgtgtggcggcctaccctccccccgcggcgggaccagtggctccccctatcgggtgggggcggcgggtgacgggcgtgtccctcccccaatgagaggcggggggaggcgggttctgcgccgccatgtcgcggaggctgctgccccgggcggagaagcggcgtcggcggctggagcagaggcagcagccggacgagcagcggaggcggtcgggagcgatggtgaagatggcggcggcgggcggcggaggcggcggtggccgctactacggcggcggcagtgagggcggccgggcccctaagcggctcaagactgacaacgccggcgaccagcacggaggcggcggcggtggcggtggaggagccggggcggcgggcggcggcggcggtggggagaactacgatgacccgcacaaaacccctgcctccccagttgtccacatcaggggcctgattgacggtgtggtggaagcagaccttgtggaggccttgcaggagtttggacccatcaggtactgggctcagaggccaggtgttgggcttccaaagttgactcctgggtgtccttgtgtgtccacgatttctggttggaaatagtgattttgttgccatcctggtctagattctgtggccgctctgcttttgggttggccattgtactttgtgtcagattacagcaagttccatgaccctttttccttccttcgtttttcctctgccttgtagtttctagtcagtgttctctttttcagacagagcaaggtctcgctttgtggcccaggctggagtgtagtggtgcagtctcacccaggctcaggcagtccttctgcctcggcctgctgagtagctgggactataggcatgcgccaccatgcccggctaatttttacatatatatattttttgtttgtttgtttgttttgagactccctctcgctctg

SEQ ID NO: 449779 - DNA, 586 bp, Homo sapiens
cccggcagcaggtaactgtgtgcctctgagctgtttggctgtctggttttaggtctgaaatacagatttgttttttgtgacaaatggacattgtactctgtacttctgctgtaagtagtccttttccattttgtaatgactggtaacaaaacccaggccgggtggcaggaaagggcagtggtttcgagccctgggttttggagtcagccagacctgggttcaaatatggctcagccactgtcttgctttgtgactttgggccaaagtgtcttttaactgctcagttaaaagttaacaactcagtcttcttatctgtaaaatggggctgaaatatcagaacctacctcatagggttgttgtgaggaatttcagaagctgtgatgtctgtaaagcgcttagcccagtgcctgccacttaagcgctaagttaaaggcagtgattacgaactgctggggtcggggtggatctgcgccattgctgggtgtgggaatgtcgatgccttgttttttttctgttttgatatttttattttttctgcagtcaccggctgccaacataatctgcaccaactggagatcagaaacca

SEQ ID NO: 449780 - DNA, 326 bp, Homo sapiens
ggattctctatgggaatgaaggaagagaaggagaaacgccgtgcataattggtaattggctcatcttgaagcctcacgttgggcagtcactccttagacccctgccgttgacctgcagaaaatgggagatgggtacaaacttgaggggacctgggtttggggagcctccaaagacgggaaccaaccaaacttgtctctcctttgcagatggtccatacccttacactctgaagttgtgtttctccactgctcagcacgcctcctaattaggtgcctaggaagagtcccatctgagcaggaagacatttctctttcctttatgccat

SEQ ID NO: 449781 - DNA, 326 bp, Homo sapiens
ggttcaaatatggctcagccactgtcttgctttgtgactttgggccaaagtgtcttttaactgctcagttaaaagttaacaactcagtcttcttatctgtaaaatggggctgaaatatcagaacctacctcatagggttgttgtgaggaatttcagaagctgtgatgtctgtaaagcgcttagcccagtgcctgccacttaagcgctaagttaaaggcagtgattacgaactgctggggtcggggtggatctgcgccattgctgggtgtgggaatgtcgatgccttgtacatgattgcttatttgaactgattctgctgttgccct

SEQ ID NO: 449782 - DNA, 4707 bp, Homo sapiens
agcgaggagaccaatgaaagtgggagggaggcggagattcttgggaggtttagagcgccgttcctatcaggtgcttttagggaggccagcagcgccagaaatccgacctatcaaattggattttattttaaggcggcggggtcgacggaaagactggcagaaagcgaccacctataaggagtgtctcagacaaacaagggcgggccctcctgcagaacggcgtgggcaatgtccaataagcgcgcaaggcgtgtggcggcctaccctccccccgcggcgggaccagtggctccccctatcgggtgggggcggcgggtgacgggcgtgtccctcccccaatgagaggcggggggaggcgggttctgcgccgccatgtcgcggaggctgctgccccgggcggagaagcggcgtcggcggctggagcagaggcagcagccggacgagcagcggaggcggtcgggagcgatggtgaagatggcggcggcgggcggcggaggcggcggtggccgctactacggcggcggcagtgagggcggccgggcccctaagcggctcaagactgacaacgccggcgaccagcacggaggcggcggcggtggcggtggaggagccggggcggcgggcggcggcggcggtggggagaactacgatgacccgcacaaaacccctgcctccccagttgtccacatcaggggcctgattgacggtgtggtggaagcagaccttgtggaggccttgcaggagtttggacccatcagctatgtggtggtaatgcctaaaaagagacaagcactggtggagtttgaagatgtgttgggggcttgcaacgcagtgaactacgcagccgacaaccaaatatacattgctggtcacccagcttttgtcaactactctaccagccagaagatctcccgccctggggactcggatgactcccggagcgtgaacagtgtgcttctctttaccatcctgaaccccatttattcgatcaccacggatgttctttacactatctgtaatccttgtggccctgtccagagaattgtcattttcaggaagaatggagttcaggcgatggtggaatttgactcagttcaaagtgcccagcgggccaaggcctctctcaatggggctgatatctattctggctgttgcactctgaagatcgaatacgcaaagcctacacgcttgaatgtgttcaagaatgatcaggatacttgggactacacaaaccccaatctcagtggacaaggtaatcttgacgaccactttgttctaaacatacccgccttgctttcactcgactagtgcacttaataggcctgggctcagggttatgtaatgccattgggccccccatggacatgggagggccttggggtcagcacttggacaccctagtgggatgggggagtgagaggcctccatgggtcttcactgctgcttggggccctccgatgctgctcaggatacagaggcaaggcagaagcctggatgggcggggagcagggcctcactgaggatgaggcgtgggggcggccttagaaaccagcagtggctcctttgagagtctggtgagggtcactcactccattcttgctggaccaggaattgtcctcttgttctgcgctgttgagagggtctgatttgggggagtgacagtgttggggggcgatgaggtctcctgggctcttgcagtgagccttgtgagcaagctgaccctgtggaggtgagacactctggattggaccagggcggacatgcctcacatcatttgtagaggggacgcaacatctctgcaggtggcccaaatggacaactcccttcctagtgtctgtcaagaatggtttgcctttggtagcagggagaggtggaggattgcctatgagaaacagcggcagcccccaacaagaccatccatctcggtgtctgtcttggtctgatacgtcggaccaggccatgggctgagggaggaggctcgatgctgacatcgcacaggccctgagaggccagagccccccattcctaggcaggcctgtcttgctcgcccttgcatctgggaagcagtgggcagggtgggctagactcttccccaggatcctcacagtgggccctgtgggcctggctgctccctccaaaggtcagaggcaaattggtgaccaagtgaatgtaccagagcgggcaatggcattacatgactgctaacagaaacatggcaacaaccatttcttctccaaggaacataaatagaagatgtgcagaccggcaggggctagtggcagggggctggctgtgcattggttttgatgcctctcagctttggcagccccaaggctggggcccaaaaaaaaacgagggctgatgaggtgacctggagtgagggcggtgcttcgccacccctcaggaaccatacttcagcggctctgcctctgcacattgctcaccaacacacagggtagaaaaccactagctcttcctggagagaacagaacatgcagcctccaccacgtccccagaaacagccgcagacttgagctcactacatcaagaacaccacaccgcgctccaaggaacagctacaagcacagagacagaggcatacagagacaaagagagaaagagacgcaacatggcagcagacactgctttttttattaaacattaaaaaaaaggtcaaaatccaagcaaacttgaacccgagaatgtacacagaagtaggaaacacagagaacagagctgtcccagccagccagcgagcgatgctcttttcggagaacgtttcatagacggaagtagattccatgggcctccaagacaataggatcctctctccattcctcgccatatgggttttgttttttaagtcatttggtttggggagggccttgttttttttctgttttgatatttttattttttctgcagtcaccggctgccaacataatctgcaccaactggagatcagaaaccaaaaaaaaaaaaaaaaattttaaccacaacaaaaaaaaaatcaaaaaaaccaaaacagacctaaaaccagacagccaaacagctcagaggcacacagttacctgctgccgggtaaccaggcgcgctcccaaggccaaaagcgcgagcgtagtggggccactggcacacctcataccaggagacacgcacacggagcgctacacagccagaagcaccgcaccaccgcactgcagcacatatgtgaggaggtgacaacatggagggacactacccacttcatacacctttatttccacttttctgatatcttctgaggacagaacatctgtgagccatttttgatttaatcaaaatattgacttttaaaacaattctttaaaaaaattgtagcggatgtgtaccgtgacttgtatttatgactgtaaaaccatgtgatgcagggtcgcagtgtatgtttgatgggacgccatctttcagaactgtgctaactcactgttgaagcgtccaatggtaagagagtgaccctggcagcaaccccaacaaacgccagaggcagccccctctcctgggagatcaccccgcagaatatggagggccccacggtgggtaccacagccattaccatgatgagggctacgggccccccccacctcactacgaagggagaaggatgggtccaccagtggggggtcaccgtcggggcccaagtcgctacggcccccagtatgggcaccccccaccccctcccccaccacccgagtatggccctcacgccgacagccctgtgctcatggtctatggcttggatcaatctaagatgaactgtgaccgagtcttcaatgtcttctgcttatatggcaatgtggagaaggtgaaattcatgaaaagcaagccgggggccgccatggtggagatggctgatggctacgctgtagaccgggccattacccacctcaacaacaacttcatgtttgggcagaagctgaatgtctgtgtctccaagcagccagccatcatgcctggtcagtcatacgggttggaagacgggtcttgcagttacaaagacttcagtgaatcccggaacaatcggttctccaccccagagcaggcagccaagaaccgcatccagcaccccagcaacgtgctgcacttcttcaacgccccgctggaggtgaccgaggagaacttctttgagatctgcgatgagctgggagtgaagcggccatcttctgtgaaagtattctcaggcaaaagtgagcgcagctcctctggactgctggagtgggaatccaagagcgatgccctggagactctgggcttcctgaaccattaccagatgaaaaacccaaatggtccatacccttacactctgaagttgtgtttctccactgctcagcacgcctcctaattaggtgcctaggaagagtcccatctgagcaggaagacatttctctttcctttatgccattttttgtttttgttatttgcaaaagatcttgtattccttttttttttttttttttttttttaaatgctaggtttgtagaggcttacttaaccttaatggaaacgctggaaatctgcagggggagggagaggggaactgttatctcccaagattaaccttcacttttaaaaaattattgtacatgtgatttttttttttcctgttcatacatttgtgctgcccatgtactcttggcacatttcaataaaattgtttggaaaataaacaca

SEQ ID NO: 449783 - DNA, 4122 bp, Homo sapiens
ccagtgtctgctcttttcgatccgggacggccggtcaggctcgccgccgagctggagaactacgatgacccgcacaaaacccctgcctccccagttgtccacatcaggggcctgattgacggtgtggtggaagcagaccttgtggaggccttgcaggagtttggacccatcagctatgtggtggtaatgcctaaaaagagacaagcactggtggagtttgaagatgtgttgggggcttgcaacgcagtgaactacgcagccgacaaccaaatatacattgctggtcacccagcttttgtcaactactctaccagccagaagatctcccgccctggggactcggatgactcccggagcgtgaacagtgtgcttctctttaccatcctgaaccccatttattcgatcaccacggatgttctttacactatctgtaatccttgtggccctgtccagagaattgtcattttcaggaagaatggagttcaggcgatggtggaatttgactcagttcaaagtgcccagcgggccaaggcctctctcaatggggctgatatctattctggctgttgcactctgaagatcgaatacgcaaagcctacacgcttgaatgtgttcaagaatgatcaggatacttgggactacacaaaccccaatctcagtggacaaggtaatcttgacgaccactttgttctaaacatacccgccttgctttcactcgactagtgcacttaataggcctgggctcagggttatgtaatgccattgggccccccatggacatgggagggccttggggtcagcacttggacaccctagtgggatgggggagtgagaggcctccatgggtcttcactgctgcttggggccctccgatgctgctcaggatacagaggcaaggcagaagcctggatgggcggggagcagggcctcactgaggatgaggcgtgggggcggccttagaaaccagcagtggctcctttgagagtctggtgagggtcactcactccattcttgctggaccaggaattgtcctcttgttctgcgctgttgagagggtctgatttgggggagtgacagtgttggggggcgatgaggtctcctgggctcttgcagtgagccttgtgagcaagctgaccctgtggaggtgagacactctggattggaccagggcggacatgcctcacatcatttgtagaggggacgcaacatctctgcaggtggcccaaatggacaactcccttcctagtgtctgtcaagaatggtttgcctttggtagcagggagaggtggaggattgcctatgagaaacagcggcagcccccaacaagaccatccatctcggtgtctgtcttggtctgatacgtcggaccaggccatgggctgagggaggaggctcgatgctgacatcgcacaggccctgagaggccagagccccccattcctaggcaggcctgtcttgctcgcccttgcatctgggaagcagtgggcagggtgggctagactcttccccaggatcctcacagtgggccctgtgggcctggctgctccctccaaaggtcagaggcaaattggtgaccaagtgaatgtaccagagcgggcaatggcattacatgactgctaacagaaacatggcaacaaccatttcttctccaaggaacataaatagaagatgtgcagaccggcaggggctagtggcagggggctggctgtgcattggttttgatgcctctcagctttggcagccccaaggctggggcccaaaaaaaaacgagggctgatgaggtgacctggagtgagggcggtgcttcgccacccctcaggaaccatacttcagcggctctgcctctgcacattgctcaccaacacacagggtagaaaaccactagctcttcctggagagaacagaacatgcagcctccaccacgtccccagaaacagccgcagacttgagctcactacatcaagaacaccacaccgcgctccaaggaacagctacaagcacagagacagaggcatacagagacaaagagagaaagagacgcaacatggcagcagacactgctttttttattaaacattaaaaaaaaggtcaaaatccaagcaaacttgaacccgagaatgtacacagaagtaggaaacacagagaacagagctgtcccagccagccagcgagcgatgctcttttcggagaacgtttcatagacggaagtagattccatgggcctccaagacaataggatcctctctccattcctcgccatatgggttttgttttttaagtcatttggtttggggagggccttgttttttttctgttttgatatttttattttttctgcagtcaccggctgccaacataatctgcaccaactggagatcagaaaccaaaaaaaaaaaaaaaaattttaaccacaacaaaaaaaaaatcaaaaaaaccaaaacagacctaaaaccagacagccaaacagctcagaggcacacagttacctgctgccgggtaaccaggcgcgctcccaaggccaaaagcgcgagcgtagtggggccactggcacacctcataccaggagacacgcacacggagcgctacacagccagaagcaccgcaccaccgcactgcagcacatatgtgaggaggtgacaacatggagggacactacccacttcatacacctttatttccacttttctgatatcttctgaggacagaacatctgtgagccatttttgatttaatcaaaatattgacttttaaaacaattctttaaaaaaattgtagcggatgtgtaccgtgacttgtatttatgactgtaaaaccatgtgatgcagggtcgcagtgtatgtttgatgggacgccatctttcagaactgtgctaactcactgttgaagcgtccaatggtaagagagtgaccctggcagcaaccccaacaaacgccagaggcagccccctctcctgggagatcaccccgcagaatatggagggccccacggtgggtaccacagccattaccatgatgagggctacgggccccccccacctcactacgaagggagaaggatgggtccaccagtggggggtcaccgtcggggcccaagtcgctacggcccccagtatgggcaccccccaccccctcccccaccacccgagtatggccctcacgccgacagccctgtgctcatggtctatggcttggatcaatctaagatgaactgtgaccgagtcttcaatgtcttctgcttatatggcaatgtggagaaggtgaaattcatgaaaagcaagccgggggccgccatggtggagatggctgatggctacgctgtagaccgggccattacccacctcaacaacaacttcatgtttgggcagaagctgaatgtctgtgtctccaagcagccagccatcatgcctggtcagtcatacgggttggaagacgggtcttgcagttacaaagacttcagtgaatcccggaacaatcggttctccaccccagagcaggcagccaagaaccgcatccagcaccccagcaacgtgctgcacttcttcaacgccccgctggaggtgaccgaggagaacttctttgagatctgcgatgagctgggagtgaagcggccatcttctgtgaaagtattctcaggcaaaagtgagcgcagctcctctggactgctggagtgggaatccaagagcgatgccctggagactctgggcttcctgaaccattaccagatgaaaaacccaaatggtccatacccttacactctgaagttgtgtttctccactgctcagcacgcctcctaattaggtgcctaggaagagtcccatctgagcaggaagacatttctctttcctttatgccattttttgtttttgttatttgcaaaagatcttgtattccttttttttttttttttttttttttaaatgctaggtttgtagaggcttacttaaccttaatggaaacgctggaaatctgcagggggagggagaggggaactgttatctcccaagattaaccttcacttttaaaaaattattgtacatgtgatttttttttttcctgttcatacatttgtgctgcccatgtactcttggcacatttcaataaaattgtttggaaaataaacaca

SEQ ID NO: 449784 - DNA, 4677 bp, Homo sapiens
agcgaggagaccaatgaaagtgggagggaggcggagattcttgggaggtttagagcgccgttcctatcaggtgcttttagggaggccagcagcgccagaaatccgacctatcaaattggattttattttaaggcggcggggtcgacggaaagactggcagaaagcgaccacctataaggagtgtctcagacaaacaagggcgggccctcctgcagaacggcgtgggcaatgtccaataagcgcgcaaggcgtgtggcggcctaccctccccccgcggcgggaccagtggctccccctatcgggtgggggcggcgggtgacgggcgtgtccctcccccaatgagaggcggggggaggcgggttctgcgccgccatgtcgcggaggctgctgccccgggcggagaagcggcgtcggcggctggagcagaggcagcagccggacgagcagcggaggcggtcgggagcgatggtgaagatggcggcggcgggcggcggaggcggcggtggccgctactacggcggcggcagtgagggcggccgggcccctaagcggctcaagactgacaacgccggcgaccagcacggaggcggcggcggtggcggtggaggagccggggcggcgggcggcggcggcggtggggagaactacgatgacccgcacaaaacccctgcctccccagttgtccacatcaggggcctgattgacggtgtggtggaagcagaccttgtggaggccttgcaggagtttggacccatcagctatgtggtggtaatgcctaaaaagagacaagcactggtggagtttgaagatgtgttgggggcttgcaacgcagtgaactacgcagccgacaaccaaatatacattgctggtcacccagcttttgtcaactactctaccagccagaagatctcccgccctggggactcggatgactcccggagcgtgaacagtgtgcttctctttaccatcctgaaccccatttattcgatcaccacggatgttctttacactatctgtaatccttgtggccctgtccagagaattgtcattttcaggaagaatggagttcaggcgatggtggaatttgactcagttcaaagtgcccagcgggccaaggcctctctcaatggggctgatatctattctggctgttgcactctgaagatcgaatacgcaaagcctacacgcttgaatgtgttcaagaatgatcaggatacttgggactacacaaaccccaatctcagtggacaaggtaatcttgacgaccactttgttctaaacatacccgccttgctttcactcgactagtgcacttaataggcctgggctcagggttatgtaatgccattgggccccccatggacatgggagggccttggggtcagcacttggacaccctagtgggatgggggagtgagaggcctccatgggtcttcactgctgcttggggccctccgatgctgctcaggatacagaggcaaggcagaagcctggatgggcggggagcagggcctcactgaggatgaggcgtgggggcggccttagaaaccagcagtggctcctttgagagtctggtgagggtcactcactccattcttgctggaccaggaattgtcctcttgttctgcgctgttgagagggtctgatttgggggagtgacagtgttggggggcgatgaggtctcctgggctcttgcagtgagccttgtgagcaagctgaccctgtggaggtgagacactctggattggaccagggcggacatgcctcacatcatttgtagaggggacgcaacatctctgcaggtggcccaaatggacaactcccttcctagtgtctgtcaagaatggtttgcctttggtagcagggagaggtggaggattgcctatgagaaacagcggcagcccccaacaagaccatccatctcggtgtctgtcttggtctgatacgtcggaccaggccatgggctgagggaggaggctcgatgctgacatcgcacaggccctgagaggccagagccccccattcctaggcaggcctgtcttgctcgcccttgcatctgggaagcagtgggcagggtgggctagactcttccccaggatcctcacagtgggccctgtgggcctggctgctccctccaaaggtcagaggcaaattggtgaccaagtgaatgtaccagagcgggcaatggcattacatgactgctaacagaaacatggcaacaaccatttcttctccaaggaacataaatagaagatgtgcagaccggcaggggctagtggcagggggctggctgtgcattggttttgatgcctctcagctttggcagccccaaggctggggcccaaaaaaaaacgagggctgatgaggtgacctggagtgagggcggtgcttcgccacccctcaggaaccatacttcagcggctctgcctctgcacattgctcaccaacacacagggtagaaaaccactagctcttcctggagagaacagaacatgcagcctccaccacgtccccagaaacagccgcagacttgagctcactacatcaagaacaccacaccgcgctccaaggaacagctacaagcacagagacagaggcatacagagacaaagagagaaagagacgcaacatggcagcagacactgctttttttattaaacattaaaaaaaaggtcaaaatccaagcaaacttgaacccgagaatgtacacagaagtaggaaacacagagaacagagctgtcccagccagccagcgagcgatgctcttttcggagaacgtttcatagacggaagtagattccatgggcctccaagacaataggatcctctctccattcctcgccatatgggttttgttttttaagtcatttggtttggggagggccttgttttttttctgttttgatatttttattttttctgcagtcaccggctgccaacataatctgcaccaactggagatcagaaaccaaaaaaaaaaaaaaaaattttaaccacaacaaaaaaaaaatcaaaaaaaccaaaacagacctaaaaccagacagccaaacagctcagaggcacacagttacctgctgccgggtaaccaggcgcgctcccaaggccaaaagcgcgagcgtagtggggccactggcacacctcataccaggagacacgcacacggagcgctacacagccagaagcaccgcaccaccgcactgcagcacatatgtgaggaggtgacaacatggagggacactacccacttcatacacctttatttccacttttctgatatcttctgaggacagaacatctgtgagccatttttgatttaatcaaaatattgacttttaaaacaattctttaaaaaaattgtagcggatgtgtaccgtgacttgtatttatgactgtaaaaccatgtgatgcagggtcgcagtgtatgtttgatgggacgccatctttcagaactgtgctaactcactgttgaagcgtccaatggtaagagagtgaccctggcagcaaccccaacaaacgccagaggcagccccctctcctgggagatcaccccgcagaatatggagggccccacggtgggtaccacagccattaccatgatgagggctacgggccccccccacctcactacgaagggagaaggatgggtccaccagtggggggtcaccgtcggggcccaagtcgctacggcccccagtatgggcaccccccaccccctcccccaccacccgagtatggccctcacgccgacagccctgtgctcatggtctatggcttggatcaatctaagatgaactgtgaccgagtcttcaatgtcttctgcttatatggcaatgtggagaaggtgaaattcatgaaaagcaagccgggggccgccatggtggagatggctgatggctacgctgtagaccgggccattacccacctcaacaacaacttcatgtttgggcagaagctgaatgtctgtgtctccaagcagccagccatcatgcctggtcagtcatacgggttggaagacgggtcttgcagttacaaagacttcagtgaatcccggaacaatcggttctccaccccagagcaggcagccaagaaccgcatccagcaccccagcaacgtgctgcacttcttcaacgccccgctggaggtgaccgaggagaacttctttgagatctgcgatgagctgggagtgaagcggccatcttctgtgaaagtattctcaggcaaaagtgagcgcagctcctctggactgctggagtgggaatccaagagcgatgccctggagactctgggcttcctgaaccattaccagatgaaaaacccaaatggtccatacccttacactctgaagttgtgtttctccactgctcagcacgcctcctaattaggtgcctaggaagagtcccatctgagcaggaagacatttctctttcctttatgccattttttgtttttgttatttgcaaaagatcttgtattccttttttttttttttttttttttttaaatgctaggtttgtagaggcttacttaaccttaatggaaacgctggaaatctgcagggggagggagaggggaactgttatctcccaagattaaccttcacttttaaaaaattattgtacatgtccccgtacatcgttagaagcttgaattcgagcagtagtagtagtaggcggccgc

SEQ ID NO: 449785 - DNA, 4038 bp, Homo sapiens
ggtcgtgccggaattcgtcgtggtcgtgccggaattggtgtggtggaagcagaccttgtggaggccttgcaggagtttggacccatcagctatgtggtggtaatgcctaaaaagagacaagcactggtggagtttgaagatgtgttgggggcttgcaacgcagtgaactacgcagccgacaaccaaatatacattgctggtcacccagcttttgtcaactactctaccagccagaagatctcccgccctggggactcggatgactcccggagcgtgaacagtgtgcttctctttaccatcctgaaccccatttattcgatcaccacggatgttctttacactatctgtaatccttgtggccctgtccagagaattgtcattttcaggaagaatggagttcaggcgatggtggaatttgactcagttcaaagtgcccagcgggccaaggcctctctcaatggggctgatatctattctggctgttgcactctgaagatcgaatacgcaaagcctacacgcttgaatgtgttcaagaatgatcaggatacttgggactacacaaaccccaatctcagtggacaaggtaatcttgacgaccactttgttctaaacatacccgccttgctttcactcgactagtgcacttaataggcctgggctcagggttatgtaatgccattgggccccccatggacatgggagggccttggggtcagcacttggacaccctagtgggatgggggagtgagaggcctccatgggtcttcactgctgcttggggccctccgatgctgctcaggatacagaggcaaggcagaagcctggatgggcggggagcagggcctcactgaggatgaggcgtgggggcggccttagaaaccagcagtggctcctttgagagtctggtgagggtcactcactccattcttgctggaccaggaattgtcctcttgttctgcgctgttgagagggtctgatttgggggagtgacagtgttggggggcgatgaggtctcctgggctcttgcagtgagccttgtgagcaagctgaccctgtggaggtgagacactctggattggaccagggcggacatgcctcacatcatttgtagaggggacgcaacatctctgcaggtggcccaaatggacaactcccttcctagtgtctgtcaagaatggtttgcctttggtagcagggagaggtggaggattgcctatgagaaacagcggcagcccccaacaagaccatccatctcggtgtctgtcttggtctgatacgtcggaccaggccatgggctgagggaggaggctcgatgctgacatcgcacaggccctgagaggccagagccccccattcctaggcaggcctgtcttgctcgcccttgcatctgggaagcagtgggcagggtgggctagactcttccccaggatcctcacagtgggccctgtgggcctggctgctccctccaaaggtcagaggcaaattggtgaccaagtgaatgtaccagagcgggcaatggcattacatgactgctaacagaaacatggcaacaaccatttcttctccaaggaacataaatagaagatgtgcagaccggcaggggctagtggcagggggctggctgtgcattggttttgatgcctctcagctttggcagccccaaggctggggcccaaaaaaaaacgagggctgatgaggtgacctggagtgagggcggtgcttcgccacccctcaggaaccatacttcagcggctctgcctctgcacattgctcaccaacacacagggtagaaaaccactagctcttcctggagagaacagaacatgcagcctccaccacgtccccagaaacagccgcagacttgagctcactacatcaagaacaccacaccgcgctccaaggaacagctacaagcacagagacagaggcatacagagacaaagagagaaagagacgcaacatggcagcagacactgctttttttattaaacattaaaaaaaaggtcaaaatccaagcaaacttgaacccgagaatgtacacagaagtaggaaacacagagaacagagctgtcccagccagccagcgagcgatgctcttttcggagaacgtttcatagacggaagtagattccatgggcctccaagacaataggatcctctctccattcctcgccatatgggttttgttttttaagtcatttggtttggggagggccttgttttttttctgttttgatatttttattttttctgcagtcaccggctgccaacataatctgcaccaactggagatcagaaaccaaaaaaaaaaaaaaaaattttaaccacaacaaaaaaaaaatcaaaaaaaccaaaacagacctaaaaccagacagccaaacagctcagaggcacacagttacctgctgccgggtaaccaggcgcgctcccaaggccaaaagcgcgagcgtagtggggccactggcacacctcataccaggagacacgcacacggagcgctacacagccagaagcaccgcaccaccgcactgcagcacatatgtgaggaggtgacaacatggagggacactacccacttcatacacctttatttccacttttctgatatcttctgaggacagaacatctgtgagccatttttgatttaatcaaaatattgacttttaaaacaattctttaaaaaaattgtagcggatgtgtaccgtgacttgtatttatgactgtaaaaccatgtgatgcagggtcgcagtgtatgtttgatgggacgccatctttcagaactgtgctaactcactgttgaagcgtccaatggtaagagagtgaccctggcagcaaccccaacaaacgccagaggcagccccctctcctgggagatcaccccgcagaatatggagggccccacggtgggtaccacagccattaccatgatgagggctacgggccccccccacctcactacgaagggagaaggatgggtccaccagtggggggtcaccgtcggggcccaagtcgctacggcccccagtatgggcaccccccaccccctcccccaccacccgagtatggccctcacgccgacagccctgtgctcatggtctatggcttggatcaatctaagatgaactgtgaccgagtcttcaatgtcttctgcttatatggcaatgtggagaaggtgaaattcatgaaaagcaagccgggggccgccatggtggagatggctgatggctacgctgtagaccgggccattacccacctcaacaacaacttcatgtttgggcagaagctgaatgtctgtgtctccaagcagccagccatcatgcctggtcagtcatacgggttggaagacgggtcttgcagttacaaagacttcagtgaatcccggaacaatcggttctccaccccagagcaggcagccaagaaccgcatccagcaccccagcaacgtgctgcacttcttcaacgccccgctggaggtgaccgaggagaacttctttgagatctgcgatgagctgggagtgaagcggccatcttctgtgaaagtattctcaggcaaaagtgagcgcagctcctctggactgctggagtgggaatccaagagcgatgccctggagactctgggcttcctgaaccattaccagatgaaaaacccaaatggtccatacccttacactctgaagttgtgtttctccactgctcagcacgcctcctaattaggtgcctaggaagagtcccatctgagcaggaagacatttctctttcctttatgccattttttgtttttgttatttgcaaaagatcttgtattccttttttttttttttttttttttttaaatgctaggtttgtagaggcttacttaaccttaatggaaacgctggaaatctgcagggggagggagaggggaactgttatctcccaagattaaccttcacttttaaaaaattattgtacatgtgatttttttttttcctgttcatacatttgtgctgcccatgtactcttggcacatttcaataaaattgtttggaaaataaacaca

SEQ ID NO: 449786 - DNA, 4204 bp, Homo sapiens
ttccgtgttcggggttgggagaactacgatgacccgcacaaaacccctgcctccccagttgtccacatcaggggcctgattgacggtgtggtggaagcagaccttgtggaggccttgcaggagtttggacccatcagctatgtggtggtaatgcctaaaaagagacaagcactggtggagtttgaagatgtgttgggggcttgcaacgcagtgaactacgcagccgacaaccaaatatacattgctggtcacccagcttttgtcaactactctaccagccagaagatctcccgccctggggactcggatgactcccggagcgtgaacagtgtgcttctctttaccatcctgaaccccatttattcgatcaccacggtacgtgccagcaggcatttcttgtgaggtctcccttccttttctccccttattccctcccccaagccagactgatctgccagtgccccttcatcttgcctgtgtttgcttttgcagggatgttctttacactatctgtaatccttgtggccctgtccagagaattgtcattttcaggaagaatggagttcaggcgatggtggaatttgactcagttcaaagtgcccagcgggccaaggcctctctcaatggggctgatatctattctggctgttgcactctgaagatcgaatacgcaaagcctacacgcttgaatgtgttcaagaatgatcaggatacttgggactacacaaaccccaatctcagtggacaaggtaatcttgacgaccactttgttctaaacatacccgccttgctttcactcgactagtgcacttaataggcctgggctcagggttatgtaatgccattgggccccccatggacatgggagggccttggggtcagcacttggacaccctagtgggatgggggagtgagaggcctccatgggtcttcactgctgcttggggccctccgatgctgctcaggatacagaggcaaggcagaagcctggatgggcggggagcagggcctcactgaggatgaggcgtgggggcggccttagaaaccagcagtggctcctttgagagtctggtgagggtcactcactccattcttgctggaccaggaattgtcctcttgttctgcgctgttgagagggtctgatttgggggagtgacagtgttggggggcgatgaggtctcctgggctcttgcagtgagccttgtgagcaagctgaccctgtggaggtgagacactctggattggaccagggcggacatgcctcacatcatttgtagaggggacgcaacatctctgcaggtggcccaaatggacaactcccttcctagtgtctgtcaagaatggtttgcctttggtagcagggagaggtggaggattgcctatgagaaacagcggcagcccccaacaagaccatccatctcggtgtctgtcttggtctgatacgtcggaccaggccatgggctgagggaggaggctcgatgctgacatcgcacaggccctgagaggccagagccccccattcctaggcaggcctgtcttgctcgcccttgcatctgggaagcagtgggcagggtgggctagactcttccccaggatcctcacagtgggccctgtgggcctggctgctccctccaaaggtcagaggcaaattggtgaccaagtgaatgtaccagagcgggcaatggcattacatgactgctaacagaaacatggcaacaaccatttcttctccaaggaacataaatagaagatgtgcagaccggcaggggctagtggcagggggctggctgtgcattggttttgatgcctctcagctttggcagccccaaggctggggcccaaaaaaaaacgagggctgatgaggtgacctggagtgagggcggtgcttcgccacccctcaggaaccatacttcagcggctctgcctctgcacattgctcaccaacacacagggtagaaaaccactagctcttcctggagagaacagaacatgcagcctccaccacgtccccagaaacagccgcagacttgagctcactacatcaagaacaccacaccgcgctccaaggaacagctacaagcacagagacagaggcatacagagacaaagagagaaagagacgcaacatggcagcagacactgctttttttattaaacattaaaaaaaaggtcaaaatccaagcaaacttgaacccgagaatgtacacagaagtaggaaacacagagaacagagctgtcccagccagccagcgagcgatgctcttttcggagaacgtttcatagacggaagtagattccatgggcctccaagacaataggatcctctctccattcctcgccatatgggttttgttttttaagtcatttggtttggggagggccttgttttttttctgttttgatatttttattttttctgcagtcaccggctgccaacataatctgcaccaactggagatcagaaaccaaaaaaaaaaaaaaaaattttaaccacaacaaaaaaaaaatcaaaaaaaccaaaacagacctaaaaccagacagccaaacagctcagaggcacacagttacctgctgccgggtaaccaggcgcgctcccaaggccaaaagcgcgagcgtagtggggccactggcacacctcataccaggagacacgcacacggagcgctacacagccagaagcaccgcaccaccgcactgcagcacatatgtgaggaggtgacaacatggagggacactacccacttcatacacctttatttccacttttctgatatcttctgaggacagaacatctgtgagccatttttgatttaatcaaaatattgacttttaaaacaattctttaaaaaaattgtagcggatgtgtaccgtgacttgtatttatgactgtaaaaccatgtgatgcagggtcgcagtgtatgtttgatgggacgccatctttcagaactgtgctaactcactgttgaagcgtccaatggtaagagagtgaccctggcagcaaccccaacaaacgccagaggcagccccctctcctgggagatcaccccgcagaatatggagggccccacggtgggtaccacagccattaccatgatgagggctacgggccccccccacctcactacgaagggagaaggatgggtccaccagtggggggtcaccgtcggggcccaagtcgctacggcccccagtatgggcaccccccaccccctcccccaccacccgagtatggccctcacgccgacagccctgtgctcatggtctatggcttggatcaatctaagatgaactgtgaccgagtcttcaatgtcttctgcttatatggcaatgtggagaaggtgaaattcatgaaaagcaagccgggggccgccatggtggagatggctgatggctacgctgtagaccgggccattacccacctcaacaacaacttcatgtttgggcagaagctgaatgtctgtgtctccaagcagccagccatcatgcctggtcagtcatacgggttggaagacgggtcttgcagttacaaagacttcagtgaatcccggaacaatcggttctccaccccagagcaggcagccaagaaccgcatccagcaccccagcaacgtgctgcacttcttcaacgccccgctggaggtgaccgaggagaacttctttgagatctgcgatgagctgggagtgaagcggccatcttctgtgaaagtattctcaggcaaaagtgagcgcagctcctctggactgctggagtgggaatccaagagcgatgccctggagactctgggcttcctgaaccattaccagatgaaaaacccaaatggtccatacccttacactctgaagttgtgtttctccactgctcagcacgcctcctaattaggtgcctaggaagagtcccatctgagcaggaagacatttctctttcctttatgccattttttgtttttgttatttgcaaaagatcttgtattccttttttttttttttttttttttttaaatgctaggtttgtagaggcttacttaaccttaatggaaacgctggaaatctgcagggggagggagaggggaactgttatctcccaagattaaccttcacttttaaaaaattattgtacatgtgatttttttttttcctgttcatacatttgtgctgcccatgtactcttggcacatttcaataaaattgtttggaaaataaacaca

SEQ ID NO: 449787 - DNA, 3744 bp, Homo sapiens
ctggccggccctccattagtgtaggccaccacggatgttctttacactatctgtaatccttgtggccctgtccagagaattgtcattttcaggaagaatggagttcaggcgatggtggaatttgactcagttcaaagtgcccagcgggccaaggcctctctcaatggggctgatatctattctggctgttgcactctgaagatcgaatacgcaaagcctacacgcttgaatgtgttcaagaatgatcaggatacttgggactacacaaaccccaatctcagtggacaaggtaatcttgacgaccactttgttctaaacatacccgccttgctttcactcgactagtgcacttaataggcctgggctcagggttatgtaatgccattgggccccccatggacatgggagggccttggggtcagcacttggacaccctagtgggatgggggagtgagaggcctccatgggtcttcactgctgcttggggccctccgatgctgctcaggatacagaggcaaggcagaagcctggatgggcggggagcagggcctcactgaggatgaggcgtgggggcggccttagaaaccagcagtggctcctttgagagtctggtgagggtcactcactccattcttgctggaccaggaattgtcctcttgttctgcgctgttgagagggtctgatttgggggagtgacagtgttggggggcgatgaggtctcctgggctcttgcagtgagccttgtgagcaagctgaccctgtggaggtgagacactctggattggaccagggcggacatgcctcacatcatttgtagaggggacgcaacatctctgcaggtggcccaaatggacaactcccttcctagtgtctgtcaagaatggtttgcctttggtagcagggagaggtggaggattgcctatgagaaacagcggcagcccccaacaagaccatccatctcggtgtctgtcttggtctgatacgtcggaccaggccatgggctgagggaggaggctcgatgctgacatcgcacaggccctgagaggccagagccccccattcctaggcaggcctgtcttgctcgcccttgcatctgggaagcagtgggcagggtgggctagactcttccccaggatcctcacagtgggccctgtgggcctggctgctccctccaaaggtcagaggcaaattggtgaccaagtgaatgtaccagagcgggcaatggcattacatgactgctaacagaaacatggcaacaaccatttcttctccaaggaacataaatagaagatgtgcagaccggcaggggctagtggcagggggctggctgtgcattggttttgatgcctctcagctttggcagccccaaggctggggcccaaaaaaaaacgagggctgatgaggtgacctggagtgagggcggtgcttcgccacccctcaggaaccatacttcagcggctctgcctctgcacattgctcaccaacacacagggtagaaaaccactagctcttcctggagagaacagaacatgcagcctccaccacgtccccagaaacagccgcagacttgagctcactacatcaagaacaccacaccgcgctccaaggaacagctacaagcacagagacagaggcatacagagacaaagagagaaagagacgcaacatggcagcagacactgctttttttattaaacattaaaaaaaaggtcaaaatccaagcaaacttgaacccgagaatgtacacagaagtaggaaacacagagaacagagctgtcccagccagccagcgagcgatgctcttttcggagaacgtttcatagacggaagtagattccatgggcctccaagacaataggatcctctctccattcctcgccatatgggttttgttttttaagtcatttggtttggggagggccttgttttttttctgttttgatatttttattttttctgcagtcaccggctgccaacataatctgcaccaactggagatcagaaaccaaaaaaaaaaaaaaaaattttaaccacaacaaaaaaaaaatcaaaaaaaccaaaacagacctaaaaccagacagccaaacagctcagaggcacacagttacctgctgccgggtaaccaggcgcgctcccaaggccaaaagcgcgagcgtagtggggccactggcacacctcataccaggagacacgcacacggagcgctacacagccagaagcaccgcaccaccgcactgcagcacatatgtgaggaggtgacaacatggagggacactacccacttcatacacctttatttccacttttctgatatcttctgaggacagaacatctgtgagccatttttgatttaatcaaaatattgacttttaaaacaattctttaaaaaaattgtagcggatgtgtaccgtgacttgtatttatgactgtaaaaccatgtgatgcagggtcgcagtgtatgtttgatgggacgccatctttcagaactgtgctaactcactgttgaagcgtccaatggtaagagagtgaccctggcagcaaccccaacaaacgccagaggcagccccctctcctgggagatcaccccgcagaatatggagggccccacggtgggtaccacagccattaccatgatgagggctacgggccccccccacctcactacgaagggagaaggatgggtccaccagtggggggtcaccgtcggggcccaagtcgctacggcccccagtatgggcaccccccaccccctcccccaccacccgagtatggccctcacgccgacagccctgtgctcatggtctatggcttggatcaatctaagatgaactgtgaccgagtcttcaatgtcttctgcttatatggcaatgtggagaaggtgaaattcatgaaaagcaagccgggggccgccatggtggagatggctgatggctacgctgtagaccgggccattacccacctcaacaacaacttcatgtttgggcagaagctgaatgtctgtgtctccaagcagccagccatcatgcctggtcagtcatacgggttggaagacgggtcttgcagttacaaagacttcagtgaatcccggaacaatcggttctccaccccagagcaggcagccaagaaccgcatccagcaccccagcaacgtgctgcacttcttcaacgccccgctggaggtgaccgaggagaacttctttgagatctgcgatgagctgggagtgaagcggccatcttctgtgaaagtattctcaggcaaaagtgagcgcagctcctctggactgctggagtgggaatccaagagcgatgccctggagactctgggcttcctgaaccattaccagatgaaaaacccaaatggtccatacccttacactctgaagttgtgtttctccactgctcagcacgcctcctaattaggtgcctaggaagagtcccatctgagcaggaagacatttctctttcctttatgccattttttgtttttgttatttgcaaaagatcttgtattccttttttttttttttttttttttttaaatgctaggtttgtagaggcttacttaaccttaatggaaacgctggaaatctgcagggggagggagaggggaactgttatctcccaagattaaccttcacttttaaaaaattattgtacatgtgatttttttttttcctgttcatacatttgtgctgcccatgtactcttggcacatttcaataaaattgtttggaaaataaacaca

SEQ ID NO: 449788 - DNA, 1886 bp, Homo sapiens
ccagtgtctgctcttttcgatccgggacggccggtcaggctcgccgccgagctggagaactacgatgacccgcacaaaacccctgcctccccagttgtccacatcaggggcctgattgacggtgtggtggaagcagaccttgtggaggccttgcaggagtttggacccatcagctatgtggtggtaatgcctaaaaagagacaagcactggtggagtttgaagatgtgttgggggcttgcaacgcagtgaactacgcagccgacaaccaaatatacattgctggtcacccagcttttgtcaactactctaccagccagaagatctcccgccctggggactcggatgactcccggagcgtgaacagtgtgcttctctttaccatcctgaaccccatttattcgatcaccacggatgttctttacactatctgtaatccttgtggccctgtccagagaattgtcattttcaggaagaatggagttcaggcgatggtggaatttgactcagttcaaagtgcccagcgggccaaggcctctctcaatggggctgatatctattctggctgttgcactctgaagatcgaatacgcaaagcctacacgcttgaatgtgttcaagaatgatcaggatacttgggactacacaaaccccaatctcagtggacaaggtgaccctggcagcaaccccaacaaacgccagaggcagccccctctcctgggagatcaccccgcagaatatggagggccccacggtgggtaccacagccattaccatgatgagggctacgggccccccccacctcactacgaagggagaaggatgggtccaccagtggggggtcaccgtcggggcccaagtcgctacggcccccagtatgggcaccccccaccccctcccccaccacccgagtatggccctcacgccgacagccctgtgctcatggtctatggcttggatcaatctaagatgaactgtgaccgagtcttcaatgtcttctgcttatatggcaatgtggagaaggtgaaattcatgaaaagcaagccgggggccgccatggtggagatggctgatggctacgctgtagaccgggccattacccacctcaacaacaacttcatgtttgggcagaagctgaatgtctgtgtctccaagcagccagccatcatgcctggtcagtcatacgggttggaagacgggtcttgcagttacaaagacttcagtgaatcccggaacaatcggttctccaccccagagcaggcagccaagaaccgcatccagcaccccagcaacgtgctgcacttcttcaacgccccgctggaggtgaccgaggagaacttctttgagatctgcgatgagctgggagtgaagcggccatcttctgtgaaagtattctcaggcaaaagtgagcgcagctcctctggactgctggagtgggaatccaagagcgatgccctggagactctgggcttcctgaaccattaccagatgaaaaacccaaatggtccatacccttacactctgaagttgtgtttctccactgctcagcacgcctcctaattaggtgcctaggaagagtcccatctgagcaggaagacatttctctttcctttatgccattttttgtttttgttatttgcaaaagatcttgtattccttttttttttttttttttttttttaaatgctaggtttgtagaggcttacttaaccttaatggaaacgctggaaatctgcagggggagggagaggggaactgttatctcccaagattaaccttcacttttaaaaaattattgtacatgtgatttttttttttcctgttcatacatttgtgctgcccatgtactcttggcacatttcaataaaattgtttggaaaataaacaca

SEQ ID NO: 449789 - DNA, 3790 bp, Homo sapiens
  misc_feature (3728)..(3728): n is a, c, g, or t
  misc_feature (3737)..(3737): n is a, c, g, or t
  misc_feature (3749)..(3749): n is a, c, g, or t
agcgaggagaccaatgaaagtgggagggaggcggagattcttgggaggtttagagcgccgttcctatcaggtgcttttagggaggccagcagcgccagaaatccgacctatcaaattggattttattttaaggcggcggggtcgacggaaagactggcagaaagcgaccacctataaggagtgtctcagacaaacaagggcgggccctcctgcagaacggcgtgggcaatgtccaataagcgcgcaaggcgtgtggcggcctaccctccccccgcggcgggaccagtggctccccctatcgggtgggggcggcgggtgacgggcgtgtccctcccccaatgagaggcggggggaggcgggttctgcgccgccatgtcgcggaggctgctgccccgggcggagaagcggcgtcggcggctggagcagaggcagcagccggacgagcagcggaggcggtcgggagcgatggtgaagatggcggcggcgggcggcggaggcggcggtggccgctactacggcggcggcagtgagggcggccgggcccctaagcggctcaagactgacaacgccggcgaccagcacggaggcggcggcggtggcggtggaggagccggggcggcgggcggcggcggcggtggggagaactacgatgacccgcacaaaacccctgcctccccagttgtccacatcaggggcctgattgacggtgtggtggaagcagaccttgtggaggccttgcaggagtttggacccatcagctatgtggtggtaatgcctaaaaagagacaagcactggtggagtttgaagatgtgttgggggcttgcaacgcagtgaactacgcagccgacaaccaaatatacattgctggtcacccagcttttgtcaactactctaccagccagaagatctcccgccctggggactcggatgactcccggagcgtgaacagtgtgcttctctttaccatcctgaaccccatttattcgatcaccacggatgttctttacactatctgtaatccttgtggccctgtccagagaattgtcattttcaggaagaatggagttcaggcgatggtggaatttgactcagttcaaagtgcccagcgggccaaggcctctctcaatggggctgatatctattctggctgttgcactctgaagatcgaatacgcaaagcctacacgcttgaatgtgttcaagaatgatcaggatacttgggactacacaaaccccaatctcagtggacaaggtaatcttgacgaccactttgttctaaacatacccgccttgctttcactcgactagtgcacttaataggcctgggctcagggttatgtaatgccattgggccccccatggacatgggagggccttggggtcagcacttggacaccctagtgggatgggggagtgagaggcctccatgggtcttcactgctgcttggggccctccgatgctgctcaggatacagaggcaaggcagaagcctggatgggcggggagcagggcctcactgaggatgaggcgtgggggcggccttagaaaccagcagtggctcctttgagagtctggtgagggtcactcactccattcttgctggaccaggaattgtcctcttgttctgcgctgttgagagggtctgatttgggggagtgacagtgttggggggcgatgaggtctcctgggctcttgcagtgagccttgtgagcaagctgaccctgtggaggtgagacactctggattggaccagggcggacatgcctcacatcatttgtagaggggacgcaacatctctgcaggtggcccaaatggacaactcccttcctagtgtctgtcaagaatggtttgcctttggtagcagggagaggtggaggattgcctatgagaaacagcggcagcccccaacaagaccatccatctcggtgtctgtcttggtctgatacgtcggaccaggccatgggctgagggaggaggctcgatgctgacatcgcacaggccctgagaggccagagccccccattcctaggcaggcctgtcttgctcgcccttgcatctgggaagcagtgggcagggtgggctagactcttccccaggatcctcacagtgggccctgtgggcctggctgctccctccaaaggtcagaggcaaattggtgaccaagtgaatgtaccagagcgggcaatggcattacatgactgctaacagaaacatggcaacaaccatttcttctccaaggaacataaatagaagatgtgcagaccggcaggggctagtggcagggggctggctgtgcattggttttgatgcctctcagctttggcagccccaaggctggggcccaaaaaaaaacgagggctgatgaggtgacctggagtgagggcggtgcttcgccacccctcaggaaccatacttcagcggctctgcctctgcacattgctcaccaacacacagggtagaaaaccactagctcttcctggagagaacagaacatgcagcctccaccacgtccccagaaacagccgcagacttgagctcactacatcaagaacaccacaccgcgctccaaggaacagctacaagcacagagacagaggcatacagagacaaagagagaaagagacgcaacatggcagcagacactgctttttttattaaacattaaaaaaaaggtcaaaatccaagcaaacttgaacccgagaatgtacacagaagtaggaaacacagagaacagagctgtcccagccagccagcgagcgatgctcttttcggagaacgtttcatagacggaagtagattccatgggcctccaagacaataggatcctctctccattcctcgccatatgggttttgttttttaagtcatttggtttggggagggccttgttttttttctgttttgatatttttattttttctgcagtcaccggctgccaacataatctgcaccaactggagatcagaaaccaaaaaaaaaaaaaaaaattttaaccacaacaaaaaaaaaatcaaaaaaaccaaaacagacctaaaaccagacagccaaacagctcagaggcacacagttacctgctgccgggtaaccaggcgcgctcccaaggccaaaagcgcgagcgtagtggggccactggcacacctcataccaggagacacgcacacggagcgctacacagccagaagcaccgcaccaccgcactgcagcacatatgtgaggaggtgacaacatggagggacactacccacttcatacacctttatttccacttttctgatatcttctgaggacagaacatctgtgagccatttttgatttaatcaaaatattgacttttaaaacaattctttaaaaaaattgtagcggatgtgtaccgtgacttgtatttatgactgtaaaaccatgtgatgcagggtcgcagtgtatgtttgatgggacgccatctttcagaactgtgctaactcactgttgaagcgtccaatggtaagagagtgaccctggcagcaaccccaacaaacgccagaggcagccccctctcctgggagatcaccccgcagaatatggagggccccacggtgggtaccacagccattaccatgatgagggctacgggccccccccacctcactacgaagggagaaggatgggtccaccagtggggggtcaccgtcggggcccaagtcgctacggcccccagtatgggcaccccccaccccctccccgtcttgcgngggctgccngccccccccaanacgcagcaattcactgtaaatatggaaagggacgaactggc

SEQ ID NO: 449790 - DNA, 1866 bp, Homo sapiens
agcggtattgagctggggcggcgttggtcggagggagaactacgatgacccgcacaaaacccctgcctccccagttgtccacatcaggggcctgattgacggtgtggtggaagcagaccttgtggaggccttgcaggagtttggacccatcagctatgtggtggtaatgcctaaaaagagacaagcactggtggagtttgaagatgtgttgggggcttgcaacgcagtgaactacgcagccgacaaccaaatatacattgctggtcacccagcttttgtcaactactctaccagccagaagatctcccgccctggggactcggatgactcccggagcgtgaacagtgtgcttctctttaccatcctgaaccccatttattcgatcaccacggatgttctttacactatctgtaatccttgtggccctgtccagagaattgtcattttcaggaagaatggagttcaggcgatggtggaatttgactcagttcaaagtgcccagcgggccaaggcctctctcaatggggctgatatctattctggctgttgcactctgaagatcgaatacgcaaagcctacacgcttgaatgtgttcaagaatgatcaggatacttgggactacacaaaccccaatctcagtggacaaggtgaccctggcagcaaccccaacaaacgccagaggcagccccctctcctgggagatcaccccgcagaatatggagggccccacggtgggtaccacagccattaccatgatgagggctacgggccccccccacctcactacgaagggagaaggatgggtccaccagtggggggtcaccgtcggggcccaagtcgctacggcccccagtatgggcaccccccaccccctcccccaccacccgagtatggccctcacgccgacagccctgtgctcatggtctatggcttggatcaatctaagatgaactgtgaccgagtcttcaatgtcttctgcttatatggcaatgtggagaaggtgaaattcatgaaaagcaagccgggggccgccatggtggagatggctgatggctacgctgtagaccgggccattacccacctcaacaacaacttcatgtttgggcagaagctgaatgtctgtgtctccaagcagccagccatcatgcctggtcagtcatacgggttggaagacgggtcttgcagttacaaagacttcagtgaatcccggaacaatcggttctccaccccagagcaggcagccaagaaccgcatccagcaccccagcaacgtgctgcacttcttcaacgccccgctggaggtgaccgaggagaacttctttgagatctgcgatgagctgggagtgaagcggccatcttctgtgaaagtattctcaggcaaaagtgagcgcagctcctctggactgctggagtgggaatccaagagcgatgccctggagactctgggcttcctgaaccattaccagatgaaaaacccaaatggtccatacccttacactctgaagttgtgtttctccactgctcagcacgcctcctaattaggtgcctaggaagagtcccatctgagcaggaagacatttctctttcctttatgccattttttgtttttgttatttgcaaaagatcttgtattccttttttttttttttttttttttttaaatgctaggtttgtagaggcttacttaaccttaatggaaacgctggaaatctgcagggggagggagaggggaactgttatctcccaagattaaccttcacttttaaaaaattattgtacatgtgatttttttttttcctgttcatacatttgtgctgcccatgtactcttggcacatttcaataaaattgtttggaaaataaacaca

SEQ ID NO: 449791 - DNA, 1842 bp, Homo sapiens
ccgcgatgccgagagctgtggtgtgggttgcagatgtggctcggatcctttgttgctgcggctatggtgtaggtcagcggctgcagctccaatttgacccctggcctgggaccctctatgtgctgtgggtgcagagctaaaaagacaaaaaaaaccaaaacagacctaaaaccagacagccaaacagctcagaggcacacagttacctgctgccgggtaaccaggcgcgctcccaaggccaaaagcgcgagcgtagtggggccactggcacacctcataccaggagacacgcacacggagcgctacacagccagaagcaccgcaccaccgcactgcagcacatatgtgaggaggtgacaacatggagggacactacccacttcatacacctttatttccacttttctgatatcttctgaggacagaacatctgtgagccatttttgatttaatcaaaatattgacttttaaaacaattctttaaaaaaattgtagcggatgtgtaccgtgacttgtatttatgactgtaaaaccatgtgatgcagggtcgcagtgtatgtttgatgggacgccatctttcagaactgtgctaactcactgttgaagcgtccaatggtaagagagtgaccctggcagcaaccccaacaaacgccagaggcagccccctctcctgggagatcaccccgcagaatatggagggccccacggtgggtaccacagccattaccatgatgagggctacgggccccccccacctcactacgaagggagaaggatgggtccaccagtggggggtcaccgtcggggcccaagtcgctacggcccccagtatgggcaccccccaccccctcccccaccacccgagtatggccctcacgccgacagccctgtgctcatggtctatggcttggatcaatctaagatgaactgtgaccgagtcttcaatgtcttctgcttatatggcaatgtggagaaggtgaaattcatgaaaagcaagccgggggccgccatggtggagatggctgatggctacgctgtagaccgggccattacccacctcaacaacaacttcatgtttgggcagaagctgaatgtctgtgtctccaagcagccagccatcatgcctggtcagtcatacgggttggaagacgggtcttgcagttacaaagacttcagtgaatcccggaacaatcggttctccaccccagagcaggcagccaagaaccgcatccagcaccccagcaacgtgctgcacttcttcaacgccccgctggaggtgaccgaggagaacttctttgagatctgcgatgagctgggagtgaagcggccatcttctgtgaaagtattctcaggcaaaagtgagcgcagctcctctggactgctggagtgggaatccaagagcgatgccctggagactctgggcttcctgaaccattaccagatgaaaaacccaaatggtccatacccttacactctgaagttgtgtttctccactgctcagcacgcctcctaattaggtgcctaggaagagtcccatctgagcaggaagacatttctctttcctttatgccattttttgtttttgttatttgcaaaagatcttgtattccttttttttttttttttttttttttaaatgctaggtttgtagaggcttacttaaccttaatggaaacgctggaaatctgcagggggagggagaggggaactgttatctcccaagattaaccttcacttttaaaaaattattgtacatgtgatttttttttttcctgttcatacatttgtgctgcccatgtactcttggcacatttcaataaaattgtttggaaaataaacaca

SEQ ID NO: 449792 - DNA, 1182 bp, Homo sapiens
gctttctcgtgttacatcgcgagacaagcactggtggagtttgaagatgtgttgggggcttgcaacgcagtgaactacgcagccgacaaccaaatatacattgctggtcacccagcttttgtcaactactctaccagccagaagatctcccgccctggggactcggatgactcccggagcgtgaacagtgtgcttctctttaccatcctgaaccccatttattcgatcaccacgcatggtctatggcttggatcaatctaagatgaactgtgaccgagtcttcaatgtcttctgcttatatggcaatgtggagaaggtgaaattcatgaaaagcaagccgggggccgccatggtggagatggctgatggctacgctgtagaccgggccattacccacctcaacaacaacttcatgtttgggcagaagctgaatgtctgtgtctccaagcagccagccatcatgcctggtcagtcatacgggttggaagacgggtcttgcagttacaaagacttcagtgaatcccggaacaatcggttctccaccccagagcaggcagccaagaaccgcatccagcaccccagcaacgtgctgcacttcttcaacgccccgctggaggtgaccgaggagaacttctttgagatctgcgatgagctgggagtgaagcggccatcttctgtgaaagtattctcaggcaaaagtgagcgcagctcctctggactgctggagtgggaatccaagagcgatgccctggagactctgggcttcctgaaccattaccagatgaaaaacccaaatggtccatacccttacactctgaagttgtgtttctccactgctcagcacgcctcctaattaggtgcctaggaagagtcccatctgagcaggaagacatttctctttcctttatgccattttttgtttttgttatttgcaaaagatcttgtattccttttttttttttttttttttttttaaatgctaggtttgtagaggcttacttaaccttaatggaaacgctggaaatctgcagggggagggagaggggaactgttatctcccaagattaaccttcacttttaaaaaattattgtacatgtgatttttttttttcctgttcatacatttgtgctgcccatgtactcttggcacatttcaataaaattgtttggaaaataaacaca

SEQ ID NO: 449793 - DNA, 1192 bp, Homo sapiens
agaggtgctgactgcagctactctccccaaggtgaaattcatgaaaagcaagccgggggccgccatggtggagatggctgatggctacgctgtagaccgggccattacccacctcaacaacaacttcatgtttgggcagaagctgaatgtctggtaggtgctcaggctcgggagggcagcagaggtacaggggagagaaaaggaggggaatggggcccagcagaggagcacagtgaggccgaggtgttgactcacacagaaatgggatgtggcaggtgtgttcccagacgtgtctctgacaccacaggagaaagtgagtcagccttgcctcaggtgtagagcaatgccccaaggcacacagggcaagctaagcctctggaggccacaggggaaagcttcagggacaactttgggtatgacaaaggctcccctttcttccttgctgcagtgtctccaagcagccagccatcatgcctggtcagtcatacgggttggaagacgggtcttgcagttacaaagacttcagtgaatcccggaacaatcggttctccaccccagagcaggcagccaagaaccgcatccagcaccccagcaacgtgctgcacttcttcaacgccccgctggaggtgaccgaggagaacttctttgagatctgcgatgagctgggagtgaagcggccatcttctgtgaaagtattctcaggcaaaagtgagcgcagctcctctggactgctggagtgggaatccaagagcgatgccctggagactctgggcttcctgaaccattaccagatgaaaaacccaaatggtccatacccttacactctgaagttgtgtttctccactgctcagcacgcctcctaattaggtgcctaggaagagtcccatctgagcaggaagacatttctctttcctttatgccattttttgtttttgttatttgcaaaagatcttgtattccttttttttttttttttttttttttaaatgctaggtttgtagaggcttacttaaccttaatggaaacgctggaaatctgcagggggagggagaggggaactgttatctcccaagattaaccttcacttttaaaaaattattgtacatgtgatttttttttttcctgttcatacatttgtgctgcccatgtactcttggcacatttcaataaaattgtttggaaaataaacaca

SEQ ID NO: 449794 - DNA, 703 bp, Homo sapiens
aaaggtgataactcttctatgataggggaagtagcgtcgttgtaacctacttgcgctgatatgccagttcttgctgagcaagaatggcatatcagcaccccagcaacgtgctgcacttcttcaacgccccgctggaggtgaccgaggagaacttctttgagatctgcgatgagctgggagtgaagcggccatcttctgtgaaagtattctcaggcaaaagtgagcgcagctcctctggactgctggagtgggaatccaagagcgatgccctggagactctgggcttcctgaaccattaccagatgaaaaacccaaatggtccatacccttacactctgaagttgtgtttctccactgctcagcacgcctcctaattaggtgcctaggaagagtcccatctgagcaggaagacatttctctttcctttatgccattttttgtttttgttatttgcaaaagatcttgtattccttttttttttttttttttttttttaaatgctaggtttgtagaggcttacttaaccttaatggaaacgctggaaatctgcagggggagggagaggggaactgttatctcccaagattaaccttcacttttaaaaaattattgtacatgtgatttttttttttcctgttcatacatttgtgctgcccatgtactcttggcacatttcaataaaattgtttggaaaataaacaca

SEQ ID NO: 449795 - DNA, 1394 bp, Homo sapiens
agcgaggagaccaatgaaagtgggagggaggcggagattcttgggaggtttagagcgccgttcctatcaggtgcttttagggaggccagcagcgccagaaatccgacctatcaaattggattttattttaaggcggcggggtcgacggaaagactggcagaaagcgaccacctataaggagtgtctcagacaaacaagggcgggccctcctgcagaacggcgtgggcaatgtccaataagcgcgcaaggcgtgtggcggcctaccctccccccgcggcgggaccagtggctccccctatcgggtgggggcggcgggtgacgggcgtgtccctcccccaatgagaggcggggggaggcgggttctgcgccgccatgtcgcggaggctgctgccccgggcggagaagcggcgtcggcggctggagcagaggcagcagccggacgagcagcggaggcggtcgggagcgatggtgaagatggcggcggcgggcggcggaggcggcggtggccgctactacggcggcggcagtgagggcggccgggcccctaagcggctcaagactgacaacgccggcgaccagcacggaggcggcggcggtggcggtggaggagccggggcggcgggcggcggcggcggtggggagaactacgatgacccgcacaaaacccctgcctccccagttgtccacatcaggggcctgattgacggtgtggtggaagcagaccttgtggaggccttgcaggagtttggacccatcagctatgtggtggtaatgcctaaaaagagacaagcactggtggagtttgaagatgtgttgggggcttgcaacgcagtgaactacgcagccgacaaccaaatatacattgctggtcacccagcttttgtcaactactctaccagccagaagatctcccgccctggggactcggatgactcccggagcgtgaacagtgtgcttctctttaccatcctgaaccccatttattcgatcaccacggtacgtgccagcaggcatttcttgtgaggtctcccttccttttctccccttattccctcccccaagccagactgatctgccagtgccccttcatcttgcctgtgtttgcttttgcagggatgttctttacactatctgtaatccttgtggccctgtccagagaattgtcattttcaggaagaatggagttcaggcgatggtggaatatcctttgctggaaaacaggtgttccttagggtagggactcttgcagggcttgacagtggccattctttgagccagcatgtgtctgctgaccacgggagtggctgccatgtgccagatgccttcacagagcccagtgactgagtagggaggcagttaaaggaccaggcatatcgtgtggacgtgcagatctt

SEQ ID NO: 449796 - DNA, 765 bp, Homo sapiens
caccccagcaacgtgctgcacttcttcaacgccccgctggaggtgaccgaggagaacttctttgaggtgtgtgccgtggagctgcgcaggcagtcgggtccttgccacggccgtctgagtaggccattcatttcagtcttttctgcaaatagctgttgaactcctgtcctgcctggccctgggttgagtgctagggacacagcagaggccaggacagataggaatctgtgctctcaaactggacagggtgagaatggcaccaagtttctagcaacaccatttgccgcgttccttccttttacatttttggcaagcagggcaactgctcgtttgctgggaaagctgcttcacaggcccagtgatgagggcccaatttcacaagaaccgcattggcgtaggcttcgggtgccatcaccctgataccatcagaaggtggggccctgtaaagctcagtcagggggaactgaggcagcggaagggaggaggaactcaagtggatctggctgtggtctgaaatgttgaccttgcattcagcaaacagtgttcagcaaacagccgggtgcagatatccacatagctgttgaagttgggaacgaaaaagcagcttcccagtctcaggcaacttaataattaaagagcattgttgctggcctttttatgacacagggatgccttagggtatgtgataaaatctacaagccttttctcctgaaaacttcaagtactgagtcatgcagggcctggtctgcttgaatcctgtgtggc

SEQ ID NO: 449797 - DNA, 2753 bp, Homo sapiens
aggttactatagtgtctgctcctacccctgggacaagatcccctaatgagctggcaggtgggcgtggggggcacaggtacagcttggcttctcagctttgctcccctatcctctgctttgccatgaatctctcatccagccccgcagggatctgcctggccagcagtgagcctgagcccctttcatcctgggacctgccgaccacggctcacatcctcctgggtgaagaatgtcaccttgcttcctatctgcctctttcgtggttggctggggagggggaccggggggtggggtgaggttaacctcattgttgtcttatatggtcatttaaatctcccagggcttcctccaagggccaaaaataatccggagacacagcagctgtgtccagcacacagaggacccggccatctgctttggttcagagccctgtgtctgtcagtcagtctctccctggctctccctccatcctcattcctgcctgaagccatgacccgcttctcctatgcagagtacttttccctctttcactcctgctctgcaccctccaggtccactgcacctcctgagagttcgccggcccgggccccaatgggcttgttccaaggggtcatgcagaaatacagcagcagcttgttcaagacctcccagctggcgcctgcggaccccttgataaaggccatcaaggatggcgatgaagaggccttgaagaccatgatcaaggaagggaagaatctcgcagagcccaacaaggagggctggctgccgctgcacgaggccgcatactatggccaggtgggctgcctgaaagtcctgcagcgagcgtacccagggaccatcgaccagcgcaccctgcaggaggaaacagccgtttacttggcaacgtgcaggggccacctggactgtctcctgtcactgctccaagcaggggcagagccggacatctccaacaaatcccgagagacaccgctctacaaagcctgtgagcgcaagaacgcggaggccgtgaagattctggtgcagcacaacgcagacaccaaccaccgctgcaaccgcggctggaccgctctgcacgagtctgtgtctcgcaatgacctggaggtcatgcagatcctggtgagcggaggagccaaggtggaatccaagaatgcctacggcatcacccccttgttcgtggccgcccagagtggacagttggaggccttgaggttcttagccaagtacggtgctgacatcaacacgcaggccagcgacaacgcgtctgccctctacgaggcctgcaagaatgagcatgaggaggtggtggagtttctgctgtcacagggtgccgacgccaacaagaccaacaaggacggcttgctcccgctgcacatcgcctccaagaagggcaactacaggatcgtgcagatgctgctgccggtgaccagccgcacgcgcatacgccgtagcggcgtcagtccgctgcacctggcggccgagcgcaaccacgacgaggtgctggaggcgctgctgagcgcgcgcttcgacgtgaacacgccgctggcgcccgagcgcgcgcgcctctacgaagaccggcgcagctccgcgctgtacttcgcggtggtcaacaacaacgtgtacgccaccgagctgctgctgcaacacggcgccgaccccaaccgcgacgtcatcagccccttgctcgtggccatccgccacggctgcctgcgcacaatgcagctgctgctggaccacggcgcgaacatcgacgcctatatcgccacgcaccccaccgccttccccgccaccatcatgttcgccatgaagtgcctgtcgctgctcaagttcctcatggacctgggctgcgacggcgagccctgcttctcatgcctctacggcaacggcccgcacccgccggccccgcagccctccagcaggttcaacgacgcgcccgcggccgacaaggagcccagcgtggtgcagttctgtgagttcgtatctgccccagaggtgagccgctgggcggggcccatcatcgatgtcctcctggactacgtgggcaacgtgcagctctgctcgcggctgaaggaacacatcgacagctttgaggactgggccgtcatcaaggagaaggcagaacctccaagacctctggctcacctttgccgactgcgggttcgaaaggccattgggaaataccgtataaaactcctagacaccttgccgctcccaggcaggctgattagatacctgaaatacgagaacacccagtaactggggccacggggagagaggagtagcccctcagactcttcttactaagtctcaggacgtcggtgttcccaactccaaggggacctggtgacagacgaggctgcaggctgcctccctctcagcctggacagctaccaggatctcactgggtctcagggcccagagctttggccagagcagagaacagaatgtgtcaaggagaagaatcatttgtttacaaactgatgagcagatcccagaccttctctaccttcaggaatggcagaaacctctattcctggggccagggcagagcttgaggtgttctggggaaggtggtgctcagagccttccctgtgcccctccacttgttctggaaaactcaccacttgacttcagagctttctctccaaagactaagatgaagacgtggcccaaggtagggggtagggggagcctgggtcttggagggctttgttaagtattaatataataaatgttacacatgtgaaaaaaaaaag

SEQ ID NO: 449798 - DNA, 1000 bp, Homo sapiens
aggttactatagtgtctgctcctacccctgggacaagatcccctaatgagctggcaggtgggcgtggggggcacaggtacagcttggcttctcagctttgctcccctatcctctgctttgccatgaatctctcatccagccccgcagggatctgcctggccagcagtgagcctgagcccctttcatcctgggacctgccgaccacggctcacatcctcctgggtgaagaatgtcaccttgcttcctatctgcctctttcgtggttggctggggagggggaccggggggtggggtgaggttaacctcattgttgtcttatatggtcatttaaatctcccagggcttcctccaagggccaaaaataatccggagacacagcagctgtgtccagcacacagaggacccggccatctgctttggttcagagccctgtgtctgtcagtcagtctctccctggctctccctccatcctcattcctgcctgaagccatgacccgcttctcctatgcagagtacttttccctctttcactcctgctctgcaccctccaggtccactgcacctcctgagagttcgccggcccgggccccaatgggcttgttccaaggggtcatgcagaaatacagcagcactaccaggatctcactgggtctcagggcccagagctttggccagagcagagaacagaatgtgtcaaggagaagaatcatttgtttacaaactgatgagcagatcccagaccttctctaccttcaggaatggcagaaacctctattcctggggccagggcagagcttgaggtgttctggggaaggtggtgctcagagccttccctgtgcccctccacttgttctggaaaactcaccacttgacttcagagctttctctccaaagactaagatgaagacgtggcccaaggtagggggtagggggagcctgggtcttggagggctttgttaagtattaatataataaatgttacacatgtgaaaaaaaaaag

SEQ ID NO: 449799 - DNA, 2569 bp, Homo sapiens
agctggggtccctttggagacactccaggaaaaggggggcacatacccccactgggcttttcctgatgctgacaggggctgctctggctgttcctaagtggaactcgtcaaggtggcagtgacggtgctgatggggacctcaggacttatctgatcagtttcccatcgtccttgctgggtctgttgcttcaccggcatctgtgctctgacaccattaataaccacagagtctgagagtcaggaggaagtgctgctcacactggaggaagtggctgggagagtgcaggggctggtggcagagaccgcccagagcccatcctagcccaacatggcgtgggtgtcctgggaatgaggcctgcctccagcctcaccttctccatctgggaaatgggactattgatgcagaagcctccccaaaagtggatctgagaggcatagacatcgtggttctcacggactctccaaggatgaggcctgcggaccccttgataaaggccatcaaggatggcgatgaagaggccttgaagaccatgatcaaggaagggaagaatctcgcagagcccaacaaggagggctggctgccgctgcacgaggccgcatactatggccaggtgggctgcctgaaagtcctgcagcgagcgtacccagggaccatcgaccagcgcaccctgcaggaggaaacagccgtttacttggcaacgtgcaggggccacctggactgtctcctgtcactgctccaagcaggggcagagccggacatctccaacaaatcccgagagacaccgctctacaaagcctgtgagcgcaagaacgcggaggccgtgaagattctggtgcagcacaacgcagacaccaaccaccgctgcaaccgcggctggaccgctctgcacgagtctgtgtctcgcaatgacctggaggtcatgcagatcctggtgagcggaggagccaaggtggaatccaagaatgcctacggcatcacccccttgttcgtggccgcccagagtggacagttggaggccttgaggttcttagccaagtacggtgctgacatcaacacgcaggccagcgacaacgcgtctgccctctacgaggcctgcaagaatgagcatgaggaggtggtggagtttctgctgtcacagggtgccgacgccaacaagaccaacaaggacggcttgctcccgctgcacatcgcctccaagaagggcaactacaggatcgtgcagatgctgctgccggtgaccagccgcacgcgcatacgccgtagcggcgtcagtccgctgcacctggcggccgagcgcaaccacgacgaggtgctggaggcgctgctgagcgcgcgcttcgacgtgaacacgccgctggcgcccgagcgcgcgcgcctctacgaagaccggcgcagctccgcgctgtacttcgcggtggtcaacaacaacgtgtacgccaccgagctgctgctgcaacacggcgccgaccccaaccgcgacgtcatcagccccttgctcgtggccatccgccacggctgcctgcgcacaatgcagctgctgctggaccacggcgcgaacatcgacgcctatatcgccacgcaccccaccgccttccccgccaccatcatgttcgccatgaagtgcctgtcgctgctcaagttcctcatggacctgggctgcgacggcgagccctgcttctcatgcctctacggcaacggcccgcacccgccggccccgcagccctccagcaggttcaacgacgcgcccgcggccgacaaggagcccagcgtggtgcagttctgtgagttcgtatctgccccagaggtgagccgctgggcggggcccatcatcgatgtcctcctggactacgtgggcaacgtgcagctctgctcgcggctgaaggaacacatcgacagctttgaggactgggccgtcatcaaggagaaggcagaacctccaagacctctggctcacctttgccgactgcgggttcgaaaggccattgggaaataccgtataaaactcctagacaccttgccgctcccaggcaggctgattagatacctgaaatacgagaacacccagtaactggggccacggggagagaggagtagcccctcagactcttcttactaagtctcaggacgtcggtgttcccaactccaaggggacctggtgacagacgaggctgcaggctgcctccctctcagcctggacagctaccaggatctcactgggtctcagggcccagagctttggccagagcagagaacagaatgtgtcaaggagaagaatcatttgtttacaaactgatgagcagatcccagaccttctctaccttcaggaatggcagaaacctctattcctggggccagggcagagcttgaggtgttctggggaaggtggtgctcagagccttccctgtgcccctccacttgttctggaaaactcaccacttgacttcagagctttctctccaaagactaagatgaagacgtggcccaaggtagggggtagggggagcctgggtcttggagggctttgttaagtattaatataataaatgttacacatgtgaaaaaaaaaag

SEQ ID NO: 449800 - DNA, 2275 bp, Homo sapiens
aggttactatagtgtctgctcctacccctgggacaagatcccctaatgagctggcaggtgggcgtggggggcacaggtacagcttggcttctcagctttgctcccctatcctctgctttgccatgaatctctcatccagccccgcagggatctgcctggccagcagtgagcctgagcccctttcatcctgggacctgccgaccacggctcacatcctcctgggtgaagaatgtcaccttgcttcctatctgcctctttcgtggttggctggggagggggaccggggggtggggtgaggttaacctcattgttgtcttatatggtcatttaaatctcccagggcttcctccaagggccaaaaataatccggagacacagcagctgtgtccagcacacagaggacccggccatctgctttggttcagagccctgtgtctgtcagtcagtctctccctggctctccctccatcctcattcctgcctgaagccatgacccgcttctcctatgcagagtacttttccctctttcactcctgctctgcaccctccaggtccactgcacctcctgagagttcgccggcccgggccccaatgggcttgttccaaggggtcatgcagaaatacagcagcagcttgttcaagacctcccagctggcgcctgcggaccccttgataaaggccatcaaggatggcgatgaagaggccttgaagaccatgatcaaggaagggaagaatctcgcagagcccaacaaggagggctggctgccgctgcacgaggccgcatactatggccaggtgggctgcctgaaagtcctgcagcgagcgtacccagggaccatcgaccagcgcaccctgcaggaggaaacagccgtttacttggcaacgtgcaggggccacctggactgtctcctgtcactgctccaagcaggggcagagccggacatctccaacaaatcccgagagacaccgctctacaaagcctgtgagcgcaagaacgcggaggccgtgaagattctggtgcagcacaacgcagacaccaaccaccgctgcaaccgcggctggaccgctctgcacgagtctgtgtctcgcaatgacctggaggtcatgcagatcctggtgagcggaggagccaaggtggaatccaagaatgcctacggcatcacccccttgttcgtggccgcccagagtggacagttggaggccttgaggttcttagccaagtacggtgctgacatcaacacgcaggccagcgacaacgcgtctgccctctacgaggcctgcaagaatgagcatgaggaggtggtggagtttctgctgtcacagggtgccgacgccaacaagaccaacaaggacggcttgctcccgctgcacatcgcctccaagaagggcaactacaggatcgtgcagatgctgctgccggtgaccagccgcacgcgcatacgccgtagcggcgtcagtccgctgcacctggcggccgagcgcaaccacgacgaggtgctggaggcgctgctgagcgcgcgcttcgacgtgaacacgccgctggcgcccgagcgcgcgcgcctctacgaagaccggcgcagctccgcgctgtacttcgcggtggtcaacaacaacgtgtacgccaccgagctgctgctgcaacacggcgccgaccccaaccgcgacgtcatcagccccttgctcgtggccatccgccacggctgcctgcgcacaatgcagctgctgctggaccacggcgcgaacatcgacgcctatatcgccacgcaccccaccgccttccccgccaccatcatgttcgccatgaagtgcctgtcgctgctcaagttcctcatggacctgggctgcgacggcgagccctgcttctcatgcctctacggcaacggcccgcacccgccggccccgcagccctccagcaggttcaacgacgcgcccgcggccgacaaggagcccagcgtggtgcagttctgtgagttcgtatctgccccagaggtgagccgctgggcggggcccatcatcgatgtcctcctggactacgtgggcaacgtgcagctctgctcgcggctgaaggaacacatcgacagctttgaggactgggccgtcatcaaggagaaggcagctccacttgttctggaaaactcaccacttgacttcagagctttctctccaaagactaagatgaagacgtggcccaaggtagggggtagggggagcctgggtcttggagggctttgttaagtattaatataataaatgttacacatgtgaaaaaaaaaag

SEQ ID NO: 449801 - DNA, 615 bp, Homo sapiens
agccgagcctggcgcccgagctctcctgctggcggggccggccctacccgtccacaccccgaccctcccctcacccgcgcccgcccctcgacccggcaggatcgtgcagatgctgctgccggtgaccagccgcacgcgcatacgccgtagcggcgtcagtccgctgcacctggcggccgagcgcaaccacgacgaggtgctggaggcgctgctgagcgcgcgcttcgacgtgaacacgccgctggcgcccgagcgcgcgcgcctctacgaagaccggcgcagctccgcgctgtacttcgcggtggtcaacaacaacgtgtacgccaccgagctgctgctgcaacacggcgccgaccccaaccgcgacgtcatcagccccttgctcgtggccatccgccacggctgcctgcgcacaatgcagctgctgctggaccacggcgcgaacatcgacgcctatatcgccacgcaccccaccgccttccccgccaccatcatgttcgccatgaagtgcctgtcgctgctcaagttcctcatggacctgggctgcgacggcgagccctgcttctcatgcctctacggcaacggcccgcacccgccggccccgcagccctccag

SEQ ID NO: 449802 - DNA, 1970 bp, Homo sapiens
agctggggtccctttggagacactccaggaaaaggggggcacatacccccactgggcttttcctgatgctgacaggggctgctctggctgttcctaagtggaactcgtcaaggtggcagtgacggtgctgatggggacctcaggacttatctgatcagtttcccatcgtccttgctgggtctgttgcttcaccggcatctgtgctctgacaccattaataaccacagagtctgagagtcaggaggaagtgctgctcacactggaggaagtggctgggagagtgcaggggctggtggcagagaccgcccagagcccatcctagcccaacatggcgtgggtgtcctgggaatgaggcctgcctccagcctcaccttctccatctgggaaatgggactattgatgcagaagcctccccaaaagtggatctgagaggcatagacatcgtggttctcacggactctccaaggatgaggcctgcggaccccttgataaaggccatcaaggatggcgatgaagaggccttgaagaccatgatcaaggaagggaagaatctcgcagagcccaacaaggagggctggctgccgctgcacgaggccgcatactatggccaggtgggctgcctgaaagtcctgcagcgagcgtacccagggaccatcgaccagcgcaccctgcaggaggaaacagccgtttacttggcaacgtgcaggggccacctggactgtctcctgtcactgctccaagcaggggcagagccggacatctccaacaaatcccgagagacaccgctctacaaagcctgtgagcgcaagaacgcggaggccgtgaagattctggtgcagcacaacgcagacaccaaccaccgctgcaaccgcggctggaccgctctgcacgagtctgtgtctcgcaatgacctggaggtcatgcagatcctggtgagcggaggagccaaggtggaatccaagaatgcctacggcatcacccccttgttcgtggccgcccagagtggacagttggaggccttgaggttcttagccaagtacggtgctgacatcaacacgcaggccagcgacaacgcgtctgccctctacgaggcctgcaagaatgagcatgaggaggtggtggagtttctgctgtcacagggtgccgacgccaacaagaccaacaaggacggcttgctcccgctgcacatcgcctccaagaagggcaactacaggatcgtgcagatgctgctgccggtgaccagccgcacgcgcatacgccgtagcggcgtcagtccgctgcacctggcggccgagcgcaaccacgacgaggtgctggaggcgctgctgagcgcgcgcttcgacgtgaacacgccgctggcgcccgagcgcgcgcgcctctacgaagaccggcgcagctccgcgctgtacttcgcggtggtcaacaacaacgtgtacgccaccgagctgctgctgcaacacggcgccgaccccaaccgcgacgtcatcagccccttgctcgtggccatccgccacggctgcctgcgcacaatgcagctgctgctggaccacggcgcgaacatcgacgcctatatcgccacgcaccccaccgccttccccgccaccatcatgttcgccatgaagtgcctgtcgctgctcaagttcctcatggacctgggctgcgacggcgagccctgcttctcatgcctctacggcaacggcccgcacccgccggccccgcagccctccagcaggttcaacgacgcgcccgcggccgacaaggagcccagcgtggtgcagttctgtgagttcgtatctgccccagaggtgagccgctgggcggggcccatcatcgatgtcctcctggactacgtgggcaacgtgcagctctgctcgcggctgaaggaacacatcgacagctttgaggactgggtcttggagggctttgttaagtattaatataataaatgttacacatgtgaaaaaaaaaag

SEQ ID NO: 449803 - DNA, 2333 bp, Homo sapiens
aggttactatagtgtctgctcctacccctgggacaagatcccctaatgagctggcaggtgggcgtggggggcacaggtacagcttggcttctcagctttgctcccctatcctctgctttgccatgaatctctcatccagccccgcagggatctgcctggccagcagtgagcctgagcccctttcatcctgggacctgccgaccacggctcacatcctcctgggtgaagaatgtcaccttgcttcctatctgcctctttcgtggttggctggggagggggaccggggggtggggtgaggttaacctcattgttgtcttatatggtcatttaaatctcccagggcttcctccaagggccaaaaataatccggagacacagcagctgtgtccagcacacagaggacccggccatctgctttggttcagagccctgtgtctgtcagtcagtctctccctggctctccctccatcctcattcctgcctgaagccatgacccgcttctcctatgcagagtacttttccctctttcactcctgctctgcaccctccaggtccactgcacctcctgagagttcgccggcccgggccccaatgggcttgttccaaggggtcatgcagaaatacagcagcagcttgttcaagacctcccagctggcgcctgcggaccccttgataaaggccatcaaggatggcgatgaagaggccttgaagaccatgatcaaggaagggaagaatctcgcagagcccaacaaggagggctggctgccgctgcacgaggccgcatactatggccaggtgggctgcctgaaagtcctgcagcgagcgtacccagggaccatcgaccagcgcaccctgcaggaggaaacagccgtttacttggcaacgtgcaggggccacctggactgtctcctgtcactgctccaagcaggggcagagccggacatctccaacaaatcccgagagacaccgctctacaaagcctgtgagcgcaagaacgcggaggccgtgaagattctggtgcagcacaacgcagacaccaaccaccgctgcaaccgcggctggaccgctctgcacgagtctgtgtctcgcaatgacctggaggtcatgcagatcctggtgagcggaggagccaaggtggaatccaagaatgcctacggcatcacccccttgttcgtggccgcccagagtggacagttggaggccttgaggttcttagccaagtacggtgctgacatcaacacgcaggccagcgacaacgcgtctgccctctacgaggcctgcaagaatgagcatgaggaggtggtggagtttctgctgtcacagggtgccgacgccaacaagaccaacaaggacggcttgctcccgctgcacatcgcctccaagaagggcaactacaggatcgtgcagatgctgctgccggtgaccagccgcacgcgcatacgccgtagcggcgtcagtccgctgcacctggcggccgagcgcaaccacgacgaggtgctggaggcgctgctgagcgcgcgcttcgacgtgaacacgccgctggcgcccgagcgcgcgcgcctctacgaagaccggcgcagctccgcgctgtacttcgcggtggtcaacaacaacgtgtacgccaccgagctgctgctgcaacacggcgccgaccccaaccgcgacgtcatcagccccttgctcgtggccatccgccacggctgcctgcgcacaatgcagctgctgctggaccacggcgcgaacatcgacgcctatatcgccacgcaccccaccgccttccccgccaccatcatgttcgccatgaagtgcctgtcgctgctcaagttcctcatggacctgggctgcgacggcgagccctgcttctcatgcctctacggcaacggcccgcacccgccggccccgcagccctccagcaggttcaacgacgcgcccgcggccgacaaggagcccagcgtggtgcagttctgtgagttcgtatctgccccagaggtgagccgctgggcggggcccatcatcgatgtcctcctggactacgtgggcaacgtgcagctctgctcgcggctgaaggaacacatcgacagctttgaggactgggccgtcatcaaggagaaggcagaacctccaagacctctggctcacctttgccgactgcgggttcgaaaggccattgggaaataccgtataaaactcctagacaccttgccgctcccaggcaggctgattagatacctgaaatacgagaacacccaaggtagggggtagggggagcctgggtcttggagggctttgttaagtattaatataataaatgttacacatgtgaaaaaaaaaag

SEQ ID NO: 449804 - DNA, 1526 bp, Homo sapiens
aggttactatagtgtctgctcctacccctgggacaagatcccctaatgagctggcaggtgggcgtggggggcacaggtacagcttggcttctcagctttgctcccctatcctctgctttgccatgaatctctcatccagccccgcagggatctgcctggccagcagtgagcctgagcccctttcatcctgggacctgccgaccacggctcacatcctcctgggtgaagaatgtcaccttgcttcctatctgcctctttcgtggttggctggggagggggaccggggggtggggtgaggttaacctcattgttgtcttatatggtcatttaaatctcccagggcttcctccaagggccaaaaataatccggagacacagcagctgtgtccagcacacagaggacccggccatctgctttggttcagagccctgtgtctgtcagtcagtctctccctggctctccctccatcctcattcctgcctgaagccatgacccgcttctcctatgcagagtacttttccctctttcactcctgctctgcaccctccaggtccactgcacctcctgagagttcgccggcccgggccccaatgggcttgttccaaggggtcatgcagaaatacagcagcagcttgttcaagacctcccagctggcgcctgcggaccccttgataaaggccatcaaggatggcgatgaagaggccttgaagaccatgatcaaggaagggaagaatctcgcagagcccaacaaggagggctggctgccgctgcacgaggccgcatactatggccaggtgggctgcctgaaagtcctgcagcgagcgtacccagggaccatcgaccagcgcaccctgcaggaggaaacagccgtttacttggcaacgtgcaggggccacctggactgtctcctgtcactgctccaagcaggggcagagccggacatctccaacaaatcccgagagacaccgctctacaaagcctgtgagcgcaagaacgcggaggccgtgaagattctggtgcagcacaacgcagacaccaaccaccgctgcaaccgcggctggaccgctctgcacgagtctgtgtctcgcaatgacctggaggtcatgcagatcctggtgagcggaggagccaaggtggaatccaagaatgcctacggcatcacccccttgttcgtggccgcccagagtggacagttggaggccttgaggttcttagccaagtacggtgagtggctaagggtccctaggtcatggagtccccaaagggcacacgggaaggatgtcagaggtcagctctaagggaaggcgagttaggggtcatcttgtgcgcacactgatggagtgagagtttcctcctagagtgctgtgttgagaaagatgctgaggctgtgtccaggctcagtgggaagagcgtcgggatccactagtgacatctgccattagaacaaatatgggggggtctggcccacggaccacctatttgccatttataatctagtccaacattttcattttacaaacgagga

SEQ ID NO: 449805 - DNA, 161 bp, Homo sapiens
gtgagctcaggctgtcatttgcagacaaaacaagaaaaagaaatactgactgctcttgttcgtgatgccacaaagagaagtaatactgattactgaataaatagactgaaagtcagaatagctgttgaactaaataggaatcatggcgttagtgtcctgac

SEQ ID NO: 449806 - DNA, 15729 bp, Homo sapiens
ttctggtggtgatggggcttggcagggtcacctagcttggtagagacctccgcaagctgcttctctaagctgtatctctaacagtcattttcaatgtcatttcagcacttcccggagactggaccccaaggaacccctgggtaaccagagagcagcttccccaactccgaagcaggcttctgctaccactcctggccatgagagcccccgagagacaagggcacagggaccagcaggccaggaggctgatggtccccgcaggacgctgcaggtagacagcaggacacagagatcagggcggtccccctcagtgtcaccggacagaggcagcacccccacatcaccctactccgtccctcagatcgccccccttcccagcagcacgctgtgtcccatatgcaagacttcggacctcacgtcgacccccagccagccaaacttcaacacctgcacccagtgtcacaacaaggtctgcaaccagtgtgggttcaaccccaaccctcatctcacccaggtgaaggagtggctctgtctgaactgtcagatgcagagggctctgggaatggacatgaccactgcacctcgctccaagagccagcagcagctgcactccccagccctgtctcctgcccactccccggccaaacagcccctggggaagccagaccaagagagatctcggggcccaggaggaccacagcctgggtcccgccaggctgagacagccagggccacctcagtgccggggcctgcccaagcagctgcccctccagaggtggggagggtgtctcctcagccccctcaacccaccaagccttccacagctgagcccaggccacctgcaggagaggccccggccaaaagtgccaccgcagtgcccgctgggcttggtgccactgagcagacccaggagggcctcactggtaagctcttcggccttggcgcgtcactgctaacccaggcgagcaccctcatgtctgtgcagcccgaggctgacacccagggccagcctgcccccagcaaggggacacctaagatcgtcttcaatgatgccagcaaggaggctggcccaaaacccttgggctcagggcccgggcctgggccagcacctggagccaaaactgagcctggggctagaatgggtcctggatctggacctggagccctgccgaaaactgggggaacaaccagtccaaagcatggcagagcagaacatcaggcagcatcgaaggctgctgccaagccaaagaccatgccgaaggaaagggccatctgcccactgtgccaagccgagctcaacgtgggcagcaagagcccagccaactataacacatgcaccacctgcaggctccaggtgtgcaacctgtgtggcttcaacccaacaccccacctggtggagaaaacagagtggctctgtctgaactgccaaaccaagcggctactggagggcagcctaggagagccgacccccctgccgccgcccacctcacagcagccccctgtaggggcccctcaccgtgcatctggaacatcccctctgaagcagaaagggccacaggggctgggccagccttcaggccccctgcctgccaaggccagccctctatccaccaaggccagccctctgcccagcaaggccagcccccaggccaagcccctcagggcttctgaacccagcaagaccccaagcagtgtccaggaaaagaagacccgagtccccactaaagctgagcccatgccgaagccacctccagagactaccccaacccctgcgactcctaaagtaaagagtggggtgaggagggctgaacctgccacccctgtcgtcaaggctgttccagaagcccccaagggtggggaggcggaggacctggtgggcaagccttactctcaggatgcgtctcggagcccacagagcctcagtgacacaggctattcctctgacggcatctctagctcccagagtgagatcacaggagtcgtgcagcaggaggtggaacagctggacagtgcaggggtgacagggccacatccacccagcccctccgagatccacaaggtggggagcagcatgcggcctttgctgcaggcccagggcctggccccaagtgagcggagcaagccactctccagcggtactggcgaggagcagaagcagcggccccactccttgtccatcacgcctgaggcctttgactctgatgaggagctggaggatatcctggaggaagacgaagactctgctgagtggaggcgccggagagagcagcaggacactgccgagtcctcagacgactttggcagccaattgaggcacgactatgtggaggacagcagtgagggtggcctgtcccctcttccaccccagcccccagcccgggcagcagaactgactgatgaggatttcatgcgacggcagattctcgagatgagcgccgaggaagacaacctggaggaggatgacactgccacctccgggcgtggcctggccaaacatggcacccagaaaggtggccccagacccaggcctgagcctagccaagaaccagcagcactgcccaagaggcgcctgccccacaatgccaccacgggctatgaggagctgctccctgagggaggctcagcagaggctaccgatggcagtgggaccctgcagggtgggctccgtcgcttcaagaccattgagctcaacagcacgggaagttatggtcatgagttggacctgggccaaggcccagaccccagtctggaccgggagcctgagctggagatggagagcctaacgggctcccctgaggaccgctcccgtggtgagcactcctctacattgcctgcctccacacccagctacacctcgggcacctctcccacctctctgtcctccctagaggaggacagtgacagcagccccagccgcaggcagcgtctagaagaagcaaagcagcagcgcaaggcccggcaccgctcccacgggcccctgctacccaccatcgaggactcctcagaggaggaggagctgcgggaggaagaggagctgcttcgtgagcaagagaagatgcgggaggtggagcagcagcgcatccgcagcacagcccgcaagacccggcgggacaaggaagaactgcgggcccagcggaggcgagagcgctccaagacaccacccagtaacttgtcacccatcgaggatgcctccccgacggaggagctgaggcaggcggccgagatggaggagctacaccgctcctcctgctctgagtactcaccctcaccctcccttgactctgaggctgaggccttggatggtggccctagccggctttacaagtcaggcagtgagtacaacctgcccaccttcatgtccctctactcaccaaccgagacaccctccggcagctccaccactcccagttccggacggccgctcaagagcgctgaggaggcttatgaggagatgatgcgcaaagctgagctgctccagaggcagcaaggccaggcagcaggggcccggggaccccatggcggcccctctcagcccacaggcccccggggcctgggctccttcgaatatcaagacactacagaccgtgagtatggccaggctgctcagcctgccgcagagggcacgccagccagcctgggagcagccgtgtacgaagaaatccttcagacatcacagagcatagtccgcatgcggcaggcctcctcacgagacctggcttttgctgaggacaaaaagaaggagaagcagtttctaaatgctgagagtgcatacatggacccaatgaagcaaaatggtggcccccttacccctggtaccagtcccacccagctcgctgcccctgtgtccttctctacccccacctcctcagacagcagcgggggccgagttattcccgatgtccgtgtcactcagcattttgcaaaggagactcaggaccccctcaagctgcacagctctcctgcctcccccagctcagcctccaaggagataggcatgcccttttcccagggccctgggaccccagccaccacagctgtggctccttgtccagctgggctgccacgaggatatatgactccagcctccccagcaggctccgagcgtagtccttcaccatcttccacagcccacagctatggacacagcccaaccactgcaaactatgggtcccaaactgaggatctaccccaggcccccagtggccttgctgcagctggacgagctgctagagagaagcccttgagtgcgagtgacggtgagggtggcactcctcagccttcccgggcatattcctactttgcaagctccagcccacctctctccccgtcttccccctcagagagtcccacattctcccctggcaagatgggcccaagggccacagcagagttctctacacagacgccaagtccagcccctgcctcagacatgccacggagccctggtgcccccactccatcacctatggtagcccagggtacacaaacaccacatcgacccagcacgcctcgcctggtgtggcaggagtcctctcaagaggctccctttatggtcatcacgctggcatctgacgcctccagccagaccaggatggtacatgccagtgcctccacctccccgctctgctcacctactgaaacccagcccaccacccatggctacagccagacaacacctccgagtgtgtctcagctgcccccagagccacctgggccacctggctttccacgggtgcccagtgctggtgcagatgggcccctggcactatatggctggggtgccctccctgctgagaacatctccctgtgccggatctcctctgtccctgggacgtctagggttgagccaggccccaggacccctggcactgcagtggtagacctccgtacagctgtcaagcccactcccatcatcctcactgaccagggcatggacctcacctctcttgctgtggaagcgaggaagtatggtcttgccctggatccaatcccaggacggcagtcgaccgccgtgcagcccttggttatcaacctcaatgcccaggagcataccttccttgctactgccaccaccgtgagcatcaccatggcctcgtctgtgttcatggctcaacaaaagcagcctgtggtctatggagacccctaccagagccgccttgactttggccagggtgggggtagccctgtgtgcctggcccaggtcaaacaagtagagcaggctgtccagacagccccataccgaagtgggccccggggaagacccagggaggccaagtttgccagatataacctacccaaccaagtagctcctctggccagaagagacgttttgatcactcagatgggcaccgcccagagcattggcctcaagccaggcccagtgccagagccaggtgccgagccccaccgggccacccctgcagagctgcggtcacatgctctgccaggtgccaggaagccacacacagtggtggtgcagatgggagagggcacagcaggcactgtgaccacactgctcccagaggagcctgcgggtgccctggaccttaccgggatgaggcctgagagccagctggcatgctgtgacatggtctacaagctcccctttggcagcagctgcactggcaccttccacccggcccccagtgtgcctgagaagagcatggcagatgctgccccacctggccaaagcagcagccccttctatggtccccgggaccctgagcctcctgagcccccaacctaccgggcacagggggtggtggggcctgggccccatgaggagcagaggccctacccacaaggcctgcctggtaggctgtactcctccatgtctgacaccaatttggctgaggctggcctcaactaccatgcccagaggatcgggcagctcttccagggtcctggacgagactcggctatggacctcagctcactgaagcactcctacagcctgggctttgcggatggacgctacctagggcagggcttgcagtatggctcagtcacggacctgcgtcatcctacagaccttttggctcacccgcttcccatgcggcgctatagctcagtgtcgaacatctactcagaccacaggtacggcccacggggagatgcagttggcttccaggaggccagcctggcccagtacagtgccaccacagcccgtgaaatcagtcgcatgtgcgctgccctcaactccatggaccagtatggtgggcggcatggcagtggtggtggtggccctgaccttgtgcagtaccagccccagcacgggcccgggctcagtgctccacagagtctggttcccctcagacctggactccttggtaaccccacctttccagagggccacccaagtcctgggaacttggcccagtatgggcctgcagcaggccaaggaacagcagtcagacagctgctgccgtccacagccactgtacgtgcagctgatggcatgatctactcgactatcaataccccaattgctgcaacactgcccatcaccacccagcctgcctcagtcctgcggcccatggtgcgtggtggcatgtacaggccttacgcatctggtggaatcacagccgtgccactcaccagtctgacacgtgtgcccatgattgccccccgggtacctcttggacccacagggctgtaccgctatcctgcaccaagtagatttcccattgcttccagtgttccacctgcagaagggcctgtctatctggggaaacctgctgctgccaaggcccctggggctgggggcccttcaaggccagagatgccagtaggggctgcacgggaagagcctcttcccacaaccacccctgctgccatcaaggaggctgcaggagccccagctcctgccccactagctggccagaagccaccagcagatgctgctcctgggggtggcagtggggccctcagccggccagggttcgagaaagaggaagcatcacaggaggagaggcagcggaagcaacaggagcagctgctccagctagagcgggagcgggtggagttggagaagctgcgacaacttcggctgcaagaggagctagagcgggaacgtgtggagctgcagaggcaccgtgaggaggagcagctgctggtgcagcgggagttgcaggagctgcagaccatcaagcaccatgtgctgcagcagcagcaagaggaacgccaggctcaatttgcactgcagcgggaacagctagcgcagcagcgtctgcagctggagcagatccagcagctgcagcagcagctgcagcagcagctagaggagcagaagcagcggcagaaggctccctttcctgcagcctgtgaggcacctggccgagggcctcccctagcggctgctgagttggcccagaatggccagtattggcccccccttacacatgcagccttcattgccatggcagggcctgaaggacttgggcagcctcgtgagcctgtgctgcaccggggtctccccagctctgcctcagacatgtcactgcaaacggaggagcagtgggaggccagccgtagtggcatcaagaagcggcactccatgccacgcctgcgggatgcctgtgagctagagtctgggactgagccctgtgtggtcaggaggattgccgacagcagcgtgcagacagacgatgaggatggggagagccgctacctcttgagtcggcgacgccgggcacggcggagtgctgactgcagtgtgcagacggacgacgaagacagtgctgagtgggagcagccagtgcgccgccgcaggtctcgtcttccccgccactcagactcaggctctgacagcaagcacgatgccactgcctcatcatccagtgctgctgccactgtgagggccatgagcagcgtgggcatccagaccatcagtgactgctccgtgcagacggagcctgaccagctgcccagggtctctccagccatccacatcacagctgccaccgatcccaaggtggagatcgtcaggtacatatcggcgccagagaagactgggcgtggggagagcctggcctgccagacggagccagatgggcaggcccagggtgtagccgggccgcagcttgtagggccaactgccatcagcccctacctgcctggcatccagatcgtcaccccagggcctctgggcagatttgaaaaaaagaagccagatcccctggagattgggtaccaggcccacctgcctccggagtctctctcacagcttgtgagccgccagcctcccaagtcccctcaggtcctctactcaccagtctcacccctgtcccctcaccggctcctggacacctcctttgcttccagtgagaggctgaacaaagctcacgtgagtccccagaagcacttcacggctgacagcgctctccgccagcagacgctgcctcgccccatgaagaccctgcagcggtccctgtctgaccctaagcccctcagccccaccgccgaagagtctgccaaagagagattctccctctaccagcaccaggggggactgggtagccaggtgtcggcgttgccacccaacagcctggtccgcaaggtgaagcggacactgcccagcccccctccagaggaggctcaccttcccctggctggccaggcctccccacagctgtatgcagccagcctgctgcagcgagggctgacggggcccaccactgtccctgctaccaaggccagcctgctccgggagctggaccgggacctgcggctggtggagcatgagtccaccaaactgcgcaagaagcaggcagagctggatgaggaggagaaggagattgacgccaagctcaagtacctggagttgggtatcacacaacgcaaagagtctttggccaaagaccggggtggccgtgactacccacccttgcgtggtcttggcgagcatcgtgactacctatcggacagtgagctcaaccagctgcggctccagggctgcaccactcccgctggccagtttgtggacttccctgccactgccgctgctcctgccaccccctctggtcccactgccttccagcagccccgcttccagcctccagccccacagtattctgcaggcagtggtgggccaactcagaacggattcccagcccaccaggcccccacctaccctggccccagcacgtacccagctcctgcctttcctcctggtgccagttacccagctgagcctggcctgccaaaccagcaggctttccgccccacaggccactatgcaggccaaacacccatgccaaccacacagagcaccctttttccagtccccgctgatagccgtgccccactgcagaagccacgccagacatcgctagccgacttggagcagaaggtgcccaccaactatgaggtgatcgccagccccgttgtgcccatgtcttcagccccatctgaaaccagctacagtggcccagcagtgagcagcggctatgagcagggcaaggtccctgaggtgccccgggctggtgaccgtggcagtgtgagccagagcccagcccccacctacccctctgactcacactataccagtctggagcagaacgttcctcgaaactacgtaatgattgatgacatcagtgaactgaccaaggacagcacctctactgctcctgatagccaacggctggagcccctggggccaggcagcagtgggcgtccagggaaggagcctggagaaccaggtgtccttgacgggcccacactgccctgctgctatgccagaggagaagaggaatctgaggaggactcatacgatccccgcgggaagggtggccacctccggagcatggagagcaatggtcgaccagccagtacccactactatggtgacagtgactacaggcatggggctcgagtagagaagtatggtccagggcccatggggcccaagcatccctccaagagcctggctccagctgccatctcctcaaagcgcagcaagcaccggaagcagggcatggagcaaaagatatccaagttctcgcctattgaagaggccaaagacgtagagtcagacctggcgtcctaccccccacctgcagtcagcagcagcctggtctctcggggcaggaagttccaggatgaaatcacctatgggctcaagaagaacgtgtatgagcagcaaaaatactatgggatgtccagccgggacgcagtggaggacgaccgcatttatggcgggagcagccggtcccgggcaccttctgcatacagtggggagaagctgtccagccacgacttcagtggctggggcaaggggtacgaaagggaacgggaggctgtggagcgacttcaaaaagcgggccccaagccctcatccctaagtatggcccacagccgggtacgaccccccatgcggagccaggcctctgaagaggagagccccgtcagtcctttggggaggccccgccctgccggagggcccctccctcccggcggggatacctgcccacagttctgctccagccactccatgcctgatgtccaggaacatgtcaaggacggacctcgggcccacgcatataagcgtgaggagggctacatcctggatgattcccattgcgtggtttccgacagcgaagcgtatcacctgggccaggaggagacggactggtttgataagccccgggatgcccgctctgaccggttcaggcaccacgggggccatgcagtttcctcctcctcccagaagcgaggccctgccaggcacagctaccatgactacgatgaaccccctgaggagggcctgtggcctcatgatgagggtggcccaggccgccatgcctcagccaaggaacaccggcacggtgaccacgggcggcactcaggccgccacactggtgaggagccgggacggcgtgctgccaaaccacacgctcgggacctgggtcgccatgaggcccggccccactctcagcccagctctgctccagctatgccgaagaagggtcagcctgggtatcccagctctgctgagtactcacagccatcccgtgcttcatccgcataccatcatgcctctgacagcaagaagggctcccggcaagcccactccgggcccgctgcactgcagtcaaaggcagaaccccaggcgcagccgcagctgcaaggtcggcaggcagctccaggaccacagcagtcacagtcaccatcatccaggcaaataccctctggggcagcatcacgccagccacagacacagcagcagcagcaaggtcttgggctgcagcccccacagcaggctctgacacaggctcggctgcagcaacagagccagccaaccacccggggctcagcccctgctgccagccagcctgcagggaagcctcagccaggccccagcacagccacaggtcctcaaccagcaggaccgccacgggcagaacagacaaatggctctaaagggacagccaaagcaccgcaacaggggagggctcctcaggcccagccaacaccaggacctggacctgcaggtgtgaaggctggagccaggcctggaggaaccccaggggctcccgccggccagccaggtgccgatggggagagcgtgttctccaagatcctccctggcggggcagccgagcaagctggcaaactgacggaagctgtctctgcttttggcaaaaaattttcctcattctggtgaccatgcccagcatggctcttgaagaaatgaagagaggtatcattgctgtggaaaaatctctggagtcagaggcctgggcgcagctctggactctgcgtataacacatctacaatctggcaaacccttggcccaaagactcaccaggtgggacgtggcaggcaggcctcagttgaggacgtgatgttttctcacagcagctgcctgggtgaagcatctgctggacaagtcggaccactggccaggggacctttgattgtctttccagagatgctgctctctgcagggcaccaccttcaaggcacagcccttgttgggagggagaaccctctccagaaaccctgccaccatggtgtcttgccgtacttcccacagccgcctttttgcggcctggccggccaggcttcccgtgcgttatacacagagtttgggcacacactgccctccctccgagatgccagaagtttttccacagccttggagaggggctttgactgagggctgggggccctgggctccgtttccttcacattccagctggcccggatccctctgtggcacagggccctgcccgtcacatgccctctgggtgacatcggagcagacctccatgtggccaggggttgggagaactttacaaacattaggacctaacactgtctcatcgctgaaataagaggccatagcaccgaaaagcagcgtgggcgccggctgaggcttctcccagcccgtgggtggcagcgtgctagcacactgccaccatctcaaagccatccccctagccatcgtgagcatcccagcggcaccgccattgtctcaaccagccggctcctcgtctgtacacctggggatttcttttgatttcaagaacagccttaatcattccagtttgatttacgtgtatacctcataaacatttttcttttgtttctctctccccctttctctcttctcttggctcactcccttgcctctccccctccaccaccaccttgtgactgatggtttggtttcctctctgctctgcccctgctcagcacagggagaatgttgacttagaagcaatagggggcagcaggccaccaagagcacaaccccagggcgaggtctggggaggcctcccagcccgcctctgtttactgtgcaattccagtcgttcttaagccatcaccagtgggtgtactcagagcagaggggccaggacttctgccagccaagggaaaggcccagagccctgtgcgggggaatgtggcactgtctatccatccggtggactgggcagcattcctccccagggctcttcccttgggggcctcctttcatctggggcacagccacaagtctcatctctaacgttctatgcaatgaaatataaaccctcaatgacaactgttaatatttaataaattccatgttatgtataaggagttaattgcaaacatgcaattgagaaactggatagatacactcataaaacccccacccctccccaccccacccctgctcccattgtgtgtgtgaaattctcagtctgtggcatgtttgacctgtggcaggactcgctgctgccaggtgagtcaccgcctgtcctgcagtggagcatgcacagctcgcagcctctttgcacgatttcatccattttaaatgcttgaccctcttgcttggagttctttttgcctcagaacctctccttcaggagcacttctagctgacttctgcacaagctagtgaggacctgccagaattgttgcctgagcgtgccaggctgcagggcaggcagtaaaaggcccccacataccctgcagttttctctgtccaggatagcaggtaaaaaggaatccccagagcagacgcaatggtaggagcctgcacaggatgtgtgtgtatggacattctgaaggtttgctgtaggatatctgtctgtctgtcattttcccttcctaccccaaccctgagccagaggcatctgacagccctttcccagagggcaccacgcaagggcagagctgggcggcatccacagccagagaggcagaggcaagagcagagccaggctgtgcccgagggaccccagctcttgactgcacctgtttcatgcctctcctctgtggctaggaggctcaaaggactgtgagccgggagatctgggctggagctagggggtcaatggatgctcaggaagagctgggcctttggcacttgtggtgagaacagttgacagtggtcatctggaactgttcatataaacagtggcttcaagctaagtttcttgtgaagtttctcaatagcaaatcttacagaaggtcctgtgtgaccctctctgcatctgtccccaggacctatgctccctgctcacccccttctccaaagcccaagcgtcccgctgctcatcagcttttttaccattgagccaggagtgcggcaggcagtacctgcctgacccttcaaggcctgaccttcgtccagagtgctctggtttgcaccatgcatttctcaggggtccgcatttctcatgcttttctataagatctacacaccccttcagagagggctcctcgctcacctctggtagctatggatgggacaggaagctgccaacctttgtgttggacttaacacccttgcctttctgggacttggcctcaccccacccatggaatacctgcctcatcccaaagatcaggtatgggctgaatgcagccatctgagcaagggctgagggaagccatcatctaacacctctggccacccaggaccaggtctgtgtggggatgtgccttggagaccaaggcaatagtcctttccactacaggccaggggatgggacaagaagtagggaacaggcagggaaatgttaggaggtcagcctccagcaggcctagtctcaggctctaaagtactgacttttcagcaaatttcctttctggccaagccctctgagtttgaaattctgacatctgccactcctcatcccccactgtacccacaggatacatcatcgcccctctgtgaaggtggctggagcaggcctctggtccatggactgtccttcctggcccttgcatggatgcagttgtgactctggggacaatgcagccagaagctgagggaccagcacttggtgccttggaaagtagagagcaacagacacatctccaaatgggcaaggagtctctagcatgcagcccaggccttctccatacccctctccccagcatcatgagcaagggcattgcctcctctctctgctcacttcagggcccagtgcactcacttcacagtgacagccctcccctacaatccttgggcagagcatgtggtctgagggcccacagtgaaagaacagcagtggtggcaactatgccttgccttctggagcctgtagggagttttccaggcaggtcctttgccaggacagcatggtcctgccctgttgtcccgtctgctctcctcttacccacccccatgctgtaaatacttgtcatcatggactccaacagggttagagggacaggcctaatcaactgaaactcctcggagatgccatctctgtctccctgggtgccagcagccctgctgccatgtgcactggggtggcactggagagccatggcagtcgtgagatattgtatgtgtatgcacatgatcatgtgtgtatgtgcgtgcgtgcgtgtgtgtgtgtgtgtgtgtgtttctgcctcattcagtttctggggtcaaatcagctccttctctccaagtgcactaccctggagagtggtggccactcaataccttttcctctagctttcatgtcttgtttttgctttccccttcctcctccctctctccctttctttccttctctccttctttatttgaggggggaagagtgctgtacaaagtcaaacaaacaagtttacagttgtaagtgcaatgacccgagtcctccacatgaccttgtgaattgtgtgctgtccttctgtgctctgtgagaactcgtggtacttcagtgtccctccccctgtattgtgacaaggtaattctgtggtatcagaataaaaggacttgatataaacaacctaaagac

SEQ ID NO: 449807 - DNA, 14967 bp, Homo sapiens
ttctggtggtgatggggcttggcagggtcacctagcttggtagagacctccgcaagctgcttctctaagctgtatctctaacagtcattttcaatgtcatttcagcacttcccggagactggaccccaaggaacccctgggtaaccagagagcagcttccccaactccgaagcaggcttctgctaccactcctggccatgagagcccccgagagacaagggcacagggaccagcaggccaggaggctgatggtccccgcaggacgctgcaggtagacagcaggacacagagatcagggcggtccccctcagtgtcaccggacagaggcagcacccccacatcaccctactccgtccctcagatcgccccccttcccagcagcacgctgtgtcccatatgcaagacttcggacctcacgtcgacccccagccagccaaacttcaacacctgcacccagtgtcacaacaaggtctgcaaccagtgtgggttcaaccccaaccctcatctcacccaggtgaaggagtggctctgtctgaactgtcagatgcagagggctctgggaatggacatgaccactgcacctcgctccaagagccagcagcagctgcactccccagccctgtctcctgcccactccccggccaaacagcccctggggaagccagaccaagagagatctcggggcccaggaggaccacagcctgggtcccgccaggctgagacagccagggccacctcagtgccggggcctgcccaagcagctgcccctccagaggtggggagggtgtctcctcagccccctcaacccaccaagccttccacagctgagcccaggccacctgcaggagaggccccggccaaaagtgccaccgcagtgcccgctgggcttggtgccactgagcagacccaggagggcctcactggtaagctcttcggccttggcgcgtcactgctaacccaggcgagcaccctcatgtctgtgcagcccgaggctgacacccagggccagcctgcccccagcaaggggacacctaagatcgtcttcaatgatgccagcaaggaggctggcccaaaacccttgggctcagggcccgggcctgggccagcacctggagccaaaactgagcctggggctagaatgggtcctggatctggacctggagccctgccgaaaactgggggaacaaccagtccaaagcatggcagagcagaacatcaggcagcatcgaaggctgctgccaagccaaagaccatgccgaaggaaagggccatctgcccactgtgccaagccgagctcaacgtgggcagcaagagcccagccaactataacacatgcaccacctgcaggctccaggtgtgcaacctgtgtggcttcaacccaacaccccacctggtggagaaaacagagtggctctgtctgaactgccaaaccaagcggctactggagggcagcctaggagagccgacccccctgccgccgcccacctcacagcagccccctgtaggggcccctcaccgtgcatctggaacatcccctctgaagcagaaagggccacaggggctgggccagccttcaggccccctgcctgccaaggccagccctctatccaccaaggccagccctctgcccagcaaggccagcccccaggccaagcccctcagggcttctgaacccagcaagaccccaagcagtgtccaggaaaagaagacccgagtccccactaaagctgagcccatgccgaagccacctccagagactaccccaacccctgcgactcctaaagtaaagagtggggtgaggagggctgaacctgccacccctgtcgtcaaggctgttccagaagcccccaagggtggggaggcggaggacctggtgggcaagccttactctcaggatgcgtctcggagcccacagagcctcagtgacacaggctattcctctgacggcatctctagctcccagagtgagatcacaggagtcgtgcagcaggaggtggaacagctggacagtgcaggggtgacagggccacatccacccagcccctccgagatccacaaggtggggagcagcatgcggcctttgctgcaggcccagggcctggccccaagtgagcggagcaagccactctccagcggtactggcgaggagcagaagcagcggccccactccttgtccatcacgcctgaggcctttgactctgatgaggagctggaggatatcctggaggaagacgaagactctgctgagtggaggcgccggagagagcagcaggacactgccgagtcctcagacgactttggcagccaattgaggcacgactatgtggaggacagcagtgagggtggcctgtcccctcttccaccccagcccccagcccgggcagcagaactgactgatgaggatttcatgcgacggcagattctcgagatgagcgccgaggaagacaacctggaggaggatgacactgccacctccgggcgtggcctggccaaacatggcacccagaaaggtggccccagacccaggcctgagcctagccaagaaccagcagcactgcccaagaggcgcctgccccacaatgccaccacgggctatgaggagctgctccctgagggaggctcagcagaggctaccgatggcagtgggaccctgcagggtgggctccgtcgcttcaagaccattgagctcaacagcacgggaagttatggtcatgagttggacctgggccaaggcccagaccccagtctggaccgggagcctgagctggagatggagagcctaacgggctcccctgaggaccgctcccgtggtgagcactcctctacattgcctgcctccacacccagctacacctcgggcacctctcccacctctctgtcctccctagaggaggacagtgacagcagccccagccgcaggcagcgtctagaagaagcaaagcagcagcgcaaggcccggcaccgctcccacgggcccctgctacccaccatcgaggactcctcagaggaggaggagctgcgggaggaagaggagctgcttcgtgagcaagagaagatgcgggaggtggagcagcagcgcatccgcagcacagcccgcaagacccggcgggacaaggaagaactgcgggcccagcggaggcgagagcgctccaagacaccacccagtaacttgtcacccatcgaggatgcctccccgacggaggagctgaggcaggcggccgagatggaggagctacaccgctcctcctgctctgagtactcaccctcaccctcccttgactctgaggctgaggccttggatggtggccctagccggctttacaagtcaggcagtgagtacaacctgcccaccttcatgtccctctactcaccaaccgagacaccctccggcagctccaccactcccagttccggacggccgctcaagagcgctgaggaggcttatgaggagatgatgcgcaaagctgagctgctccagaggcagcaaggccaggcagcaggggcccggggaccccatggcggcccctctcagcccacaggcccccggggcctgggctccttcgaatatcaagacactacagaccgtgagtatggccaggctgctcagcctgccgcagagggcacgccagccagcctgggagcagccgtgtacgaagaaatccttcagacatcacagagcatagtccgcatgcggcaggcctcctcacgagacctggcttttgctgaggacaaaaagaaggagaagcagtttctaaatgctgagagtgcatacatggacccaatgaagcaaaatggtggcccccttacccctggtaccagtcccacccagctcgctgcccctgtgtccttctctacccccacctcctcagacagcagcgggggccgagttattcccgatgtccgtgtcactcagcattttgcaaaggagactcaggaccccctcaagctgcacagctctcctgcctcccccagctcagcctccaaggagataggcatgcccttttcccagggccctgggaccccagccaccacagctgtggctccttgtccagctgggctgccacgaggatatatgactccagcctccccagcaggctccgagcgtagtccttcaccatcttccacagcccacagctatggacacagcccaaccactgcaaactatgggtcccaaactgaggatctaccccaggcccccagtggccttgctgcagctggacgagctgctagagagaagcccttgagtgcgagtgacggtgagggtggcactcctcagccttcccgggcatattcctactttgcaagctccagcccacctctctccccgtcttccccctcagagagtcccacattctcccctggcaagatgggcccaagggccacagcagagttctctacacagacgccaagtccagcccctgcctcagacatgccacggagccctggtgcccccactccatcacctatggtagcccagggtacacaaacaccacatcgacccagcacgcctcgcctggtgtggcaggagtcctctcaagaggctccctttatggtcatcacgctggcatctgacgcctccagccagaccaggatggtacatgccagtgcctccacctccccgctctgctcacctactgaaacccagcccaccacccatggctacagccagacaacacctccgagtgtgtctcagctgcccccagagccacctgggccacctggctttccacgggtgcccagtgctggtgcagatgggcccctggcactatatggctggggtgccctccctgctgagaacatctccctgtgccggatctcctctgtccctgggacgtctagggttgagccaggccccaggacccctggcactgcagtggtagacctccgtacagctgtcaagcccactcccatcatcctcactgaccagggcatggacctcacctctcttgctgtggaagcgaggaagtatggtcttgccctggatccaatcccaggacggcagtcgaccgccgtgcagcccttggttatcaacctcaatgcccaggagcataccttccttgctactgccaccaccgtgagcatcaccatggcctcgtctgtgttcatggctcaacaaaagcagcctgtggtctatggagacccctaccagagccgccttgactttggccagggtgggggtagccctgtgtgcctggcccaggtcaaacaagtagagcaggctgtccagacagccccataccgaagtgggccccggggaagacccagggaggccaagtttgccagatataacctacccaaccaagtagctcctctggccagaagagacgttttgatcactcagatgggcaccgcccagagcattggcctcaagccaggcccagtgccagagccaggtgccgagccccaccgggccacccctgcagagctgcggtcacatgctctgccaggtgccaggaagccacacacagtggtggtgcagatgggagagggcacagcaggcactgtgaccacactgctcccagaggagcctgcgggtgccctggaccttaccgggatgaggcctgagagccagctggcatgctgtgacatggtctacaagctcccctttggcagcagctgcactggcaccttccacccggcccccagtgtgcctgagaagagcatggcagatgctgccccacctggccaaagcagcagccccttctatggtccccgggaccctgagcctcctgagcccccaacctaccgggcacagggggtggtggggcctgggccccatgaggagcagaggccctacccacaaggcctgcctggtaggctgtactcctccatgtctgacaccaatttggctgaggctggcctcaactaccatgcccagaggatcgggcagctcttccagggtcctggacgagactcggctatggacctcagctcactgaagcactcctacagcctgggctttgcggatggacgctacctagggcagggcttgcagtatggctcagtcacggacctgcgtcatcctacagaccttttggctcacccgcttcccatgcggcgctatagctcagtgtcgaacatctactcagaccacaggtacggcccacggggagatgcagttggcttccaggaggccagcctggcccagtacagtgccaccacagcccgtgaaatcagtcgcatgtgcgctgccctcaactccatggaccagtatggtgggcggcatggcagtggtggtggtggccctgaccttgtgcagtaccagccccagcacgggcccgggctcagtgctccacagagtctggttcccctcagacctggactccttggtaaccccacctttccagagggccacccaagtcctgggaacttggcccagtatgggcctgcagcaggccaaggaacagcagtcagacagctgctgccgtccacagccactgtacgtgcagctgatggcatgatctactcgactatcaataccccaattgctgcaacactgcccatcaccacccagcctgcctcagtcctgcggcccatggtgcgtggtggcatgtacaggccttacgcatctggtggaatcacagccgtgccactcaccagtctgacacgtgtgcccatgattgccccccgggtacctcttggacccacagggctgtaccgctatcctgcaccaagtagatttcccattgcttccagtgttccacctgcagaagggcctgtctatctggggaaacctgctgctgccaaggcccctggggctgggggcccttcaaggccagagatgccagtaggggctgcacgggaagagcctcttcccacaaccacccctgctgccatcaaggaggctgcaggagccccagctcctgccccactagctggccagaagccaccagcagatgctgctcctgggggtggcagtggggccctcagccggccagggttcgagaaagaggaagcatcacaggaggagaggcagcggaagcaacaggagcagctgctccagctagagcgggagcgggtggagttggagaagctgcgacaacttcggctgcaagaggagctagagcgggaacgtgtggagctgcagaggcaccgtgaggaggagcagctgctggtgcagcgggagttgcaggagctgcagaccatcaagcaccatgtgctgcagcagcagcaagaggaacgccaggctcaatttgcactgcagcgggaacagctagcgcagcagcgtctgcagctggagcagatccagcagctgcagcagcagctgcagcagcagctagaggagcagaagcagcggcagaaggctccctttcctgcagcctgtgaggcacctggccgagggcctcccctagcggctgctgagttggcccagaatggccagtattggcccccccttacacatgcagccttcattgccatggcagggcctgaaggacttgggcagcctcgtgagcctgtgctgcaccggggtctccccagctctgcctcagacatgtcactgcaaacggaggagcagtgggaggccagccgtagtggcatcaagaagcggcactccatgccacgcctgcgggatgcctgtgagctagagtctgggactgagccctgtgtggtcaggaggattgccgacagcagcgtgcagacagacgatgaggatggggagagccgctacctcttgagtcggcgacgccgggcacggcggagtgctgactgcagtgtgcagacggacgacgaagacagtgctgagtgggagcagccagtgcgccgccgcaggtctcgtcttccccgccactcagactcaggctctgacagcaagcacgatgccactgcctcatcatccagtgctgctgccactgtgagggccatgagcagcgtgggcatccagaccatcagtgactgctccgtgcagacggagcctgaccagctgcccagggtctctccagccatccacatcacagctgccaccgatcccaaggtggagatcgtcaggtacatatcggcgccagagaagactgggcgtggggagagcctggcctgccagacggagccagatgggcaggcccagggtgtagccgggccgcagcttgtagggccaactgccatcagcccctacctgcctggcatccagatcgtcaccccagggcctctgggcagatttgaaaaaaagaagccagatcccctggagattgggtaccaggcccacctgcctccggagtctctctcacagcttgtgagccgccagcctcccaagtcccctcaggtcctctactcaccagtctcacccctgtcccctcaccggctcctggacacctcctttgcttccagtgagaggctgaacaaagctcacgtgagtccccagaagcacttcacggctgacagcgctctccgccagcagacgctgcctcgccccatgaagaccctgcagcggtccctgtctgaccctaagcccctcagccccaccgccgaagagtctgccaaagagagattctccctctaccagcaccaggggggactgggtagccaggtgtcggcgttgccacccaacagcctggtccgcaaggtgaagcggacactgcccagcccccctccagaggaggctcaccttcccctggctggccaggcctccccacagctgtatgcagccagcctgctgcagcgagggctgacggggcccaccactgtccctgctaccaaggccagcctgctccgggagctggaccgggacctgcggctggtggagcatgagtccaccaaactgcgcaagaagcaggcagagctggatgaggaggagaaggagattgacgccaagctcaagtacctggagttgggtatcacacaacgcaaagagtctttggccaaagaccggggtggccgtgactacccacccttgcgtggtcttggcgagcatcgtgactacctatcggacagtgagctcaaccagctgcggctccagggctgcaccactcccgctggccagtttgtggacttccctgccactgccgctgctcctgccaccccctctggtcccactgccttccagcagccccgcttccagcctccagccccacagtattctgcaggcagtggtgggccaactcagaacggattcccagcccaccaggcccccacctaccctggccccagcacgtacccagctcctgcctttcctcctggtgccagttacccagctgagcctggcctgccaaaccagcaggctttccgccccacaggccactatgcaggccaaacacccatgccaaccacacagagcaccctttttccagtccccgctgatagccgtgccccactgcagaagccacgccagacatcgctagccgacttggagcagaaggtgcccaccaactatgaggtgatcgccagccccgttgtgcccatgtcttcagccccatctgaaaccagctacagtggcccagcagtgagcagcggctatgagcagggcaaggtccctgaggtgccccgggctggtgaccgtggcagtgtgagccagagcccagcccccacctacccctctgactcacactataccagtctggagcagaacgttcctcgaaactacgtaatgattgatgacatcagtgaactgaccaaggacagcacctctactgctcctgatagccaacggctggagcccctggggccaggcagcagtgggcgtccagggaaggagcctggagaaccaggtgtccttgacgggcccacactgccctgctgctatgccagaggagaagaggaatctgaggaggactcatacgatccccgcgggaagggtggccacctccggagcatggagagcaatggtcgaccagccagtacccactactatggtgacagtgactacaggcatggggctcgagtagagaagtatggtccagggcccatggggcccaagcatccctccaagagcctggctccagctgccatctcctcaaagcgcagcaagcaccggaagcagggcatggagcaaaagatatccaagttctcgcctattgaagaggccaaagacgtagagtcagacctggcgtcctaccccccacctgcagtcagcagcagcctggtctctcggggcaggaagttccaggatgaaatcacctatgggctcaagaagaacgtgtatgagcagcaaaaatactatgggatgtccagccgggacgcagtggaggacgaccgcatttatggcgggagcagccggtcccgggcaccttctgcatacagtggggagaagctgtccagccacgacttcagtggctggggcaaggggtacgaaagggaacgggaggctgtggagcgacttcaaaaagcgggccccaagccctcatccctaagtatggcccacagccgggtacgaccccccatgcggagccaggcctctgaagaggagagccccgtcagtcctttggggaggccccgccctgccggagggcccctccctcccggcggggatacctgcccacagttctgctccagccactccatgcctgatgtccaggaacatgtcaaggacggacctcgggcccacgcatataagcgtgaggagggctacatcctggatgattcccattgcgtggtttccgacagcgaagcgtatcacctgggccaggaggagacggactggtttgataagccccgggatgcccgctctgaccggttcaggcaccacgggggccatgcagtttcctcctcctcccagaagcgaggccctgccaggcacagctaccatgactacgatgaaccccctgaggagggcctgtggcctcatgatgagggtggcccaggccgccatgcctcagccaaggaacaccggcacggtgaccacgggcggcactcaggccgccacactggtgaggagccgggacggcgtgctgccaaaccacacgctcgggacctgggtcgccatgaggcccggccccactctcagcccagctctgctccagctatgccgaagaagggtcagcctgggtatcccagctctgctgagtactcacagccatcccgtgcttcatccgcataccatcatgcctctgacagcaagaagggctcccggcaagcccactccgggcccgctgcactgcagtcaaaggcagaaccccaggcgcagccgcagctgcaaggtcggcaggcagctccaggaccacagcagtcacagtcaccatcatccaggcaaataccctctggggcagcatcacgccagccacagacacagcagcagcagcaaggtcttgggctgcagcccccacagcaggctctgacacaggctcggctgcagcaacagagccagccaaccacccggggctcagcccctgctgccagccagcctgcagggaagcctcagccaggccccagcacagccacaggtcctcaaccagcaggaccgccacgggcagaacagacaaatggctctaaagggacagccaaagcaccgcaacaggggagggctcctcaggcccagccaacaccaggacctggacctgcaggtgtgaaggctggagccaggcctggaggaaccccaggggctcccgccggccagccaggtgccgatggggagagcgtgttctccaagatcctccctggcggggcagccgagcaagctggcaaactgacggaagctgtctctgcttttggcaaaaaattttcctcattctggtgaccatgcccagcatggctcttgaagaaatgaagagaggtatcattgctgtggaaaaatctctggagtcagaggcctgggcgcagctctggactctgcgtataacacatctacaatctggcaaacccttggcccaaagactcaccaggtgggacgtggcaggcaggcctcagttgaggacgtgatgttttctcacagcagctgcctgggtgaagcatctgctggacaagtcggaccactggccaggggacctttgattgtctttccagagatgctgctctctgcagggcaccaccttcaaggcacagcccttgttgggagggagaaccctctccagaaaccctgccaccatggtgtcttgccgtacttcccacagccgcctttttgcggcctggccggccaggcttcccgtgcgttatacacagagtttgggcacacactgccctccctccgagatgccagaagtttttccacagccttggagaggggctttgactgagggctgggggccctgggctccgtttccttcacattccagctggcccggatccctctgtggcacagggccctgcccgtcacatgccctctgggtgacatcggagcagacctccatgtggccaggggttgggagaactttacaaacattaggacctaacactgtctcatcgctgaaataagaggccatagcaccgaaaagcagcgtgggcgccggctgaggcttctcccagcccgtgggtggcagcgtgctagcacactgccaccatctcaaagccatccccctagccatcgtgagcatcccagcggcaccgccattgtctcaaccagccggctcctcgtctgtacacctggggatttcttttgatttcaagaacagccttaatcattccagtttgatttacgtgtatacctcataaacatttttcttttgtttctctctccccctttctctcttctcttggctcactcccttgcctctccccctccaccaccaccttgtgactgatggtttggtttcctctctgctctgcccctgctcagcacagggagaatgttgacttagaagcaatagggggcagcaggccaccaagagcacaaccccagggcgaggtctggggaggcctcccagcccgcctctgtttactgtgcaattccagtcgttcttaagccatcaccagtgggtgtactcagagcagaggggccaggacttctgccagccaagggaaaggcccagagccctgtgcgggggaatgtggcactgtctatccatccggtggactgggcagcattcctccccagggctcttcccttgggggcctcctttcatctggggcacagccacaagtctcatctctaacgttctatgcaatgaaatataaaccctcaatgacaactgttaatatttaataaattccatgttatgtataaggagttaattgcaaacatgcaattgagaaactggatagatacactcataaaacccccacccctccccaccccacccctgctcccattgtgtgtgtgaaattctcagtctgtggcatgtttgacctgtggcaggactcgctgctgccaggtgagtcaccgcctgtcctgcagtggagcatgcacagctcgcagcctctttgcacgatttcatccattttaaatgcttgaccctcttgcttggagttctttttgcctcagaacctctccttcaggagcacttctagctgacttctgcacaagctagtgaggacctgccagaattgttgcctgagcgtgccaggctgcagggcaggcagtaaaaggcccccacataccctgcagttttctctgtccaggatagcaggtaaaaaggaatccccagagcagacgcaatggtaggagcctgcacaggatgtgtgtgtatggacattctgaaggtttgctgtaggatatctgtctgtctgtcattttcccttcctaccccaaccctgagccagaggcatctgacagccctttcccagagggcaccacgcaagggcagagctgggcggcatccacagccagagaggcagaggcaagagcagagccaggctgtgcccgagggaccccagctcttgactgcacctgtttcatgcctctcctctgtggctaggagggtctcaggctctaaagtactgacttttcagcaaatttcctttctggccaagccctctgagtttgaaattctgacatctgccactcctcatcccccactgtacccacaggatacatcatcgcccctctgtgaaggtggctggagcaggcctctggtccatggactgtccttcctggcccttgcatggatgcagttgtgactctggggacaatgcagccagaagctgagggaccagcacttggtgccttggaaagtagagagcaacagacacatctccaaatgggcaaggagtctctagcatgcagcccaggccttctccatacccctctccccagcatcatgagcaagggcattgcctcctctctctgctcacttcagggcccagtgcactcacttcacagtgacagccctcccctacaatccttgggcagagcatgtggtctgagggcccacagtgaaagaacagcagtggtggcaactatgccttgccttctggagcctgtagggagttttccaggcaggtcctttgccaggacagcatggtcctgccctgttgtcccgtctgctctcctcttacccacccccatgctgtaaatacttgtcatcatggactccaacagggttagagggacaggcctaatcaactgaaactcctcggagatgccatctctgtctccctgggtgccagcagccctgctgccatgtgcactggggtggcactggagagccatggcagtcgtgagatattgtatgtgtatgcacatgatcatgtgtgtatgtgcgtgcgtgcgtgtgtgtgtgtgtgtgtgtgtttctgcctcattcagtttctggggtcaaatcagctccttctctccaagtgcactaccctggagagtggtggccactcaataccttttcctctagctttcatgtcttgtttttgctttccccttcctcctccctctctccctttctttccttctctccttctttatttgaggggggaagagtgctgtacaaagtcaaacaaacaagtttacagttgtaagtgcaatgacccgagtcctccacatgaccttgtgaattgtgtgctgtccttctgtgctctgtgagaactcgtggtacttcagtgtccctccccctgtattgtgacaaggtaattctgtggtatcagaataaaaggacttgatataaacaacctaaagac

SEQ ID NO: 449808 - DNA, 16042 bp, Homo sapiens
ttctggtggtgatggggcttggcagggtcacctagcttggtagagacctccgcaagctgcttctctaagctgtatctctaacagtcattttcaatgtcatttcagcacttcccggagactggaccccaaggaacccctgggtaaccagagagcagcttccccaactccgaagcaggcttctgctaccactcctggccatgagagcccccgagagacaagggcacagggaccagcaggccaggaggctgatggtccccgcaggacgctgcaggtagacagcaggacacagagatcagggcggtccccctcagtgtcaccggacagaggcagcacccccacatcaccctactccgtccctcagatcgccccccttcccagcagcacgctgtgtcccatatgcaagacttcggacctcacgtcgacccccagccagccaaacttcaacacctgcacccagtgtcacaacaaggtctgcaaccagtgtgggttcaaccccaaccctcatctcacccaggtgaaggagtggctctgtctgaactgtcagatgcagagggctctgggaatggacatgaccactgcacctcgctccaagagccagcagcagctgcactccccagccctgtctcctgcccactccccggccaaacagcccctggggaagccagaccaagagagatctcggggcccaggaggaccacagcctgggtcccgccaggctgagacagccagggccacctcagtgccggggcctgcccaagcagctgcccctccagaggtggggagggtgtctcctcagccccctcaacccaccaagccttccacagctgagcccaggccacctgcaggagaggccccggccaaaagtgccaccgcagtgcccgctgggcttggtgccactgagcagacccaggagggcctcactggtaagctcttcggccttggcgcgtcactgctaacccaggcgagcaccctcatgtctgtgcagcccgaggctgacacccagggccagcctgcccccagcaaggggacacctaagatcgtcttcaatgatgccagcaaggaggctggcccaaaacccttgggctcagggcccgggcctgggccagcacctggagccaaaactgagcctggggctagaatgggtcctggatctggacctggagccctgccgaaaactgggggaacaaccagtccaaagcatggcagagcagaacatcaggcagcatcgaaggctgctgccaagccaaagaccatgccgaaggaaagggccatctgcccactgtgccaagccgagctcaacgtgggcagcaagagcccagccaactataacacatgcaccacctgcaggctccaggtgtgcaacctgtgtggcttcaacccaacaccccacctggtggagaaaacagagtggctctgtctgaactgccaaaccaagcggctactggagggcagcctaggagagccgacccccctgccgccgcccacctcacagcagccccctgtaggggcccctcaccgtgcatctggaacatcccctctgaagcagaaagggccacaggggctgggccagccttcaggccccctgcctgccaaggccagccctctatccaccaaggccagccctctgcccagcaaggccagcccccaggccaagcccctcagggcttctgaacccagcaagaccccaagcagtgtccaggaaaagaagacccgagtccccactaaagctgagcccatgccgaagccacctccagagactaccccaacccctgcgactcctaaagtaaagagtggggtgaggagggctgaacctgccacccctgtcgtcaaggctgttccagaagcccccaagggtggggaggcggaggacctggtgggcaagccttactctcaggatgcgtctcggagcccacagagcctcagtgacacaggctattcctctgacggcatctctagctcccagagtgagatcacaggagtcgtgcagcaggaggtggaacagctggacagtgcaggggtgacagggccacatccacccagcccctccgagatccacaaggtggggagcagcatgcggcctttgctgcaggcccagggcctggccccaagtgagcggagcaagccactctccagcggtactggcgaggagcagaagcagcggccccactccttgtccatcacgcctgaggcctttgactctgatgaggagctggaggatatcctggaggaagacgaagactctgctgagtggaggcgccggagagagcagcaggacactgccgagtcctcagacgactttggcagccaattgaggcacgactatgtggaggacagcagtgagggtggcctgtcccctcttccaccccagcccccagcccgggcagcagaactgactgatgaggatttcatgcgacggcagattctcgagatgagcgccgaggaagacaacctggaggaggatgacactgccacctccgggcgtggcctggccaaacatggcacccagaaaggtggccccagacccaggcctgagcctagccaagaaccagcagcactgcccaagaggcgcctgccccacaatgccaccacgggctatgaggagctgctccctgagggaggctcagcagaggctaccgatggcagtgggaccctgcagggtgggctccgtcgcttcaagaccattgagctcaacagcacgggaagttatggtcatgagttggacctgggccaaggcccagaccccagtctggaccgggagcctgagctggagatggagagcctaacgggctcccctgaggaccgctcccgtggtgagcactcctctacattgcctgcctccacacccagctacacctcgggcacctctcccacctctctgtcctccctagaggaggacagtgacagcagccccagccgcaggcagcgtctagaagaagcaaagcagcagcgcaaggcccggcaccgctcccacgggcccctgctacccaccatcgaggactcctcagaggaggaggagctgcgggaggaagaggagctgcttcgtgagcaagagaagatgcgggaggtggagcagcagcgcatccgcagcacagcccgcaagacccggcgggacaaggaagaactgcgggcccagcggaggcgagagcgctccaagacaccacccagtaacttgtcacccatcgaggatgcctccccgacggaggagctgaggcaggcggccgagatggaggagctacaccgctcctcctgctctgagtactcaccctcaccctcccttgactctgaggctgaggccttggatggtggccctagccggctttacaagtcaggcagtgagtacaacctgcccaccttcatgtccctctactcaccaaccgagacaccctccggcagctccaccactcccagttccggacggccgctcaagagcgctgaggaggcttatgaggagatgatgcgcaaagctgagctgctccagaggcagcaaggccaggcagcaggggcccggggaccccatggcggcccctctcagcccacaggcccccggggcctgggctccttcgaatatcaagacactacagaccgtgagtatggccaggctgctcagcctgccgcagagggcacgccagccagcctgggagcagccgtgtacgaagaaatccttcagacatcacagagcatagtccgcatgcggcaggcctcctcacgagacctggcttttgctgaggacaaaaagaaggagaagcagtttctaaatgctgagagtgcatacatggacccaatgaagcaaaatggtggcccccttacccctggtaccagtcccacccagctcgctgcccctgtgtccttctctacccccacctcctcagacagcagcgggggccgagttattcccgatgtccgtgtcactcagcattttgcaaaggagactcaggaccccctcaagctgcacagctctcctgcctcccccagctcagcctccaaggagataggcatgcccttttcccagggccctgggaccccagccaccacagctgtggctccttgtccagctgggctgccacgaggatatatgactccagcctccccagcaggctccgagcgtagtccttcaccatcttccacagcccacagctatggacacagcccaaccactgcaaactatgggtcccaaactgaggatctaccccaggcccccagtggccttgctgcagctggacgagctgctagagagaagcccttgagtgcgagtgacggtgagggtggcactcctcagccttcccgggcatattcctactttgcaagctccagcccacctctctccccgtcttccccctcagagagtcccacattctcccctggcaagatgggcccaagggccacagcagagttctctacacagacgccaagtccagcccctgcctcagacatgccacggagccctggtgcccccactccatcacctatggtagcccagggtacacaaacaccacatcgacccagcacgcctcgcctggtgtggcaggagtcctctcaagaggctccctttatggtcatcacgctggcatctgacgcctccagccagaccaggatggtacatgccagtgcctccacctccccgctctgctcacctactgaaacccagcccaccacccatggctacagccagacaacacctccgagtgtgtctcagctgcccccagagccacctgggccacctggctttccacgggtgcccagtgctggtgcagatgggcccctggcactatatggctggggtgccctccctgctgagaacatctccctgtgccggatctcctctgtccctgggacgtctagggttgagccaggccccaggacccctggcactgcagtggtagacctccgtacagctgtcaagcccactcccatcatcctcactgaccagggcatggacctcacctctcttgctgtggaagcgaggaagtatggtcttgccctggatccaatcccaggacggcagtcgaccgccgtgcagcccttggttatcaacctcaatgcccaggagcataccttccttgctactgccaccaccgtgagcatcaccatggcctcgtctgtgttcatggctcaacaaaagcagcctgtggtctatggagacccctaccagagccgccttgactttggccagggtgggggtagccctgtgtgcctggcccaggtcaaacaagtagagcaggctgtccagacagccccataccgaagtgggccccggggaagacccagggaggccaagtttgccagatataacctacccaaccaagtagctcctctggccagaagagacgttttgatcactcagatgggcaccgcccagagcattggcctcaagccaggcccagtgccagagccaggtgccgagccccaccgggccacccctgcagagctgcggtcacatgctctgccaggtgccaggaagccacacacagtggtggtgcagatgggagagggcacagcaggcactgtgaccacactgctcccagaggagcctgcgggtgccctggaccttaccgggatgaggcctgagagccagctggcatgctgtgacatggtctacaagctcccctttggcagcagctgcactggcaccttccacccggcccccagtgtgcctgagaagagcatggcagatgctgccccacctggccaaagcagcagccccttctatggtccccgggaccctgagcctcctgagcccccaacctaccgggcacagggggtggtggggcctgggccccatgaggagcagaggccctacccacaaggcctgcctggtaggctgtactcctccatgtctgacaccaatttggctgaggctggcctcaactaccatgcccagaggatcgggcagctcttccagggtcctggacgagactcggctatggacctcagctcactgaagcactcctacagcctgggctttgcggatggacgctacctagggcagggcttgcagtatggctcagtcacggacctgcgtcatcctacagaccttttggctcacccgcttcccatgcggcgctatagctcagtgtcgaacatctactcagaccacaggtacggcccacggggagatgcagttggcttccaggaggccagcctggcccagtacagtgccaccacagcccgtgaaatcagtcgcatgtgcgctgccctcaactccatggaccagtatggtgggcggcatggcagtggtggtggtggccctgaccttgtgcagtaccagccccagcacgggcccgggctcagtgctccacagagtctggttcccctcagacctggactccttggtaaccccacctttccagagggccacccaagtcctgggaacttggcccagtatgggcctgcagcaggccaaggaacagcagtcagacagctgctgccgtccacagccactgtacgtgcagctgatggcatgatctactcgactatcaataccccaattgctgcaacactgcccatcaccacccagcctgcctcagtcctgcggcccatggtgcgtggtggcatgtacaggccttacgcatctggtggaatcacagccgtgccactcaccagtctgacacgtgtgcccatgattgccccccgggtacctcttggacccacagggctgtaccgctatcctgcaccaagtagatttcccattgcttccagtgttccacctgcagaagggcctgtctatctggggaaacctgctgctgccaaggcccctggggctgggggcccttcaaggccagagatgccagtaggggctgcacgggaagagcctcttcccacaaccacccctgctgccatcaaggaggctgcaggagccccagctcctgccccactagctggccagaagccaccagcagatgctgctcctgggggtggcagtggggccctcagccggccagggttcgagaaagaggaagcatcacaggaggagaggcagcggaagcaacaggagcagctgctccagctagagcgggagcgggtggagttggagaagctgcgacaacttcggctgcaagaggagctagagcgggaacgtgtggagctgcagaggcaccgtgaggaggagcagctgctggtgcagcgggagttgcaggagctgcagaccatcaagcaccatgtgctgcagcagcagcaagaggaacgccaggctcaatttgcactgcagcgggaacagctagcgcagcagcgtctgcagctggagcagatccagcagctgcagcagcagctgcagcagcagctagaggagcagaagcagcggcagaaggctccctttcctgcagcctgtgaggcacctggccgagggcctcccctagcggctgctgagttggcccagaatggccagtattggcccccccttacacatgcagccttcattgccatggcagggcctgaaggacttgggcagcctcgtgagcctgtgctgcaccggggtctccccagctctgcctcagacatgtcactgcaaacggaggagcagtgggaggccagccgtagtggcatcaagaagcggcactccatgccacgcctgcgggatgcctgtgagctagagtctgggactgagccctgtgtggtcaggaggattgccgacagcagcgtgcagacagacgatgaggatggggagagccgctacctcttgagtcggcgacgccgggcacggcggagtgctgactgcagtgtgcagacggacgacgaagacagtgctgagtgggagcagccagtgcgccgccgcaggtctcgtcttccccgccactcagactcaggctctgacagcaagcacgatgccactgcctcatcatccagtgctgctgccactgtgagggccatgagcagcgtgggcatccagaccatcagtgactgctccgtgcagacggagcctgaccagctgcccagggtctctccagccatccacatcacagctgccaccgatcccaaggtggagatcgtcaggtacatatcggcgccagagaagactgggcgtggggagagcctggcctgccagacggagccagatgggcaggcccagggtgtagccgggccgcagcttgtagggccaactgccatcagcccctacctgcctggcatccagatcgtcaccccagggcctctgggcagatttgaaaaaaagaagccagatcccctggagattgggtaccaggcccacctgcctccggagtctctctcacagcttgtgagccgccagcctcccaagtcccctcaggtcctctactcaccagtctcacccctgtcccctcaccggctcctggacacctcctttgcttccagtgagaggctgaacaaagctcacgtgagtccccagaagcacttcacggctgacagcgctctccgccagcagacgctgcctcgccccatgaagaccctgcagcggtccctgtctgaccctaagcccctcagccccaccgccgaagagtctgccaaagagagattctccctctaccagcaccaggggggactgggtagccaggtgtcggcgttgccacccaacagcctggtccgcaaggtgaagcggacactgcccagcccccctccagaggaggctcaccttcccctggctggccaggcctccccacagctgtatgcagccagcctgctgcagcgagggctgacggggcccaccactgtccctgctaccaaggccagcctgctccgggagctggaccgggacctgcggctggtggagcatgagtccaccaaactgcgcaagaagcaggcagagctggatgaggaggagaaggagattgacgccaagctcaagtacctggagttgggtatcacacaacgcaaagagtctttggccaaagaccggggtggccgtgactacccacccttgcgtggtcttggcgagcatcgtgactacctatcggacagtgagctcaaccagctgcggctccagggctgcaccactcccgctggccagtttgtggacttccctgccactgccgctgctcctgccaccccctctggtcccactgccttccagcagccccgcttccagcctccagccccacagtattctgcaggcagtggtgggccaactcagaacggattcccagcccaccaggcccccacctaccctggccccagcacgtacccagctcctgcctttcctcctggtgccagttacccagctgagcctggcctgccaaaccagcaggctttccgccccacaggccactatgcaggccaaacacccatgccaaccacacagagcaccctttttccagtccccgctgatagccgtgccccactgcagaagccacgccagacatcgctagccgacttggagcagaaggtgcccaccaactatgaggtgatcgccagccccgttgtgcccatgtcttcagccccatctgaaaccagctacagtggcccagcagtgagcagcggctatgagcagggcaaggtccctgaggtgccccgggctggtgaccgtggcagtgtgagccagagcccagcccccacctacccctctgactcacactataccagtctggagcagaacgttcctcgaaactacgtaatgattgatgacatcagtgaactgaccaaggacagcacctctactgctcctgatagccaacggctggagcccctggggccaggcagcagtgggcgtccagggaaggagcctggagaaccaggtgtccttgacgggcccacactgccctgctgctatgccagaggagaagaggaatctgaggaggactcatacgatccccgcgggaagggtggccacctccggagcatggagagcaatggtcgaccagccagtacccactactatggtgacagtgactacaggcatggggctcgagtagagaagtatggtccagggcccatggggcccaagcatccctccaagagcctggctccagctgccatctcctcaaagcgcagcaagcaccggaagcagggcatggagcaaaagatatccaagttctcgcctattgaagaggccaaagacgtagagtcagacctggcgtcctaccccccacctgcagtcagcagcagcctggtctctcggggcaggaagttccaggatgaaatcacctatgggctcaagaagaacgtgtatgagcagcaaaaatactatgggatgtccagccgggacgcagtggaggacgaccgcatttatggcgggagcagccggtcccgggcaccttctgcatacagtggggagaagctgtccagccacgacttcagtggctggggcaaggggtacgaaagggaacgggaggctgtggagcgacttcaaaaagcgggccccaagccctcatccctaagtatggcccacagccgggtacgaccccccatgcggagccaggcctctgaagaggagagccccgtcagtcctttggggaggccccgccctgccggagggcccctccctcccggcggggatacctgcccacagttctgctccagccactccatgcctgatgtccaggaacatgtcaaggacggacctcgggcccacgcatataagcgtgaggagggctacatcctggatgattcccattgcgtggtttccgacagcgaaggtaatggcagccaggggtgatttctgcggatactcagcagctggggggcctgcctacctgtggggccctgggccctaagatgtcccagcagggtctggtctggcgcctcatctggtgggccctgctgcaggcaggctgcccttgcctgctccatctgtgccctggtccgtggttgcgggagggtgggctgggggcctgctgatctgcttgtggctgtggcacccactctcttggtttctttgcatggcttcagctaggcctccccctgcggctagcccgggggttgatggtattctgtttttggtctctgaagcgtatcacctgggccaggaggagacggactggtttgataagccccgggatgcccgctctgaccggttcaggcaccacgggggccatgcagtttcctcctcctcccagaagcgaggccctgccaggcacagctaccatgactacgatgaaccccctgaggagggcctgtggcctcatgatgagggtggcccaggccgccatgcctcagccaaggaacaccggcacggtgaccacgggcggcactcaggccgccacactggtgaggagccgggacggcgtgctgccaaaccacacgctcgggacctgggtcgccatgaggcccggccccactctcagcccagctctgctccagctatgccgaagaagggtcagcctgggtatcccagctctgctgagtactcacagccatcccgtgcttcatccgcataccatcatgcctctgacagcaagaagggctcccggcaagcccactccgggcccgctgcactgcagtcaaaggcagaaccccaggcgcagccgcagctgcaaggtcggcaggcagctccaggaccacagcagtcacagtcaccatcatccaggcaaataccctctggggcagcatcacgccagccacagacacagcagcagcagcaaggtcttgggctgcagcccccacagcaggctctgacacaggctcggctgcagcaacagagccagccaaccacccggggctcagcccctgctgccagccagcctgcagggaagcctcagccaggccccagcacagccacaggtcctcaaccagcaggaccgccacgggcagaacagacaaatggctctaaagggacagccaaagcaccgcaacaggggagggctcctcaggcccagccaacaccaggacctggacctgcaggtgtgaaggctggagccaggcctggaggaaccccaggggctcccgccggccagccaggtgccgatggggagagcgtgttctccaagatcctccctggcggggcagccgagcaagctggcaaactgacggaagctgtctctgcttttggcaaaaaattttcctcattctggtgaccatgcccagcatggctcttgaagaaatgaagagaggtatcattgctgtggaaaaatctctggagtcagaggcctgggcgcagctctggactctgcgtataacacatctacaatctggcaaacccttggcccaaagactcaccaggtgggacgtggcaggcaggcctcagttgaggacgtgatgttttctcacagcagctgcctgggtgaagcatctgctggacaagtcggaccactggccaggggacctttgattgtctttccagagatgctgctctctgcagggcaccaccttcaaggcacagcccttgttgggagggagaaccctctccagaaaccctgccaccatggtgtcttgccgtacttcccacagccgcctttttgcggcctggccggccaggcttcccgtgcgttatacacagagtttgggcacacactgccctccctccgagatgccagaagtttttccacagccttggagaggggctttgactgagggctgggggccctgggctccgtttccttcacattccagctggcccggatccctctgtggcacagggccctgcccgtcacatgccctctgggtgacatcggagcagacctccatgtggccaggggttgggagaactttacaaacattaggacctaacactgtctcatcgctgaaataagaggccatagcaccgaaaagcagcgtgggcgccggctgaggcttctcccagcccgtgggtggcagcgtgctagcacactgccaccatctcaaagccatccccctagccatcgtgagcatcccagcggcaccgccattgtctcaaccagccggctcctcgtctgtacacctggggatttcttttgatttcaagaacagccttaatcattccagtttgatttacgtgtatacctcataaacatttttcttttgtttctctctccccctttctctcttctcttggctcactcccttgcctctccccctccaccaccaccttgtgactgatggtttggtttcctctctgctctgcccctgctcagcacagggagaatgttgacttagaagcaatagggggcagcaggccaccaagagcacaaccccagggcgaggtctggggaggcctcccagcccgcctctgtttactgtgcaattccagtcgttcttaagccatcaccagtgggtgtactcagagcagaggggccaggacttctgccagccaagggaaaggcccagagccctgtgcgggggaatgtggcactgtctatccatccggtggactgggcagcattcctccccagggctcttcccttgggggcctcctttcatctggggcacagccacaagtctcatctctaacgttctatgcaatgaaatataaaccctcaatgacaactgttaatatttaataaattccatgttatgtataaggagttaattgcaaacatgcaattgagaaactggatagatacactcataaaacccccacccctccccaccccacccctgctcccattgtgtgtgtgaaattctcagtctgtggcatgtttgacctgtggcaggactcgctgctgccaggtgagtcaccgcctgtcctgcagtggagcatgcacagctcgcagcctctttgcacgatttcatccattttaaatgcttgaccctcttgcttggagttctttttgcctcagaacctctccttcaggagcacttctagctgacttctgcacaagctagtgaggacctgccagaattgttgcctgagcgtgccaggctgcagggcaggcagtaaaaggcccccacataccctgcagttttctctgtccaggatagcaggtaaaaaggaatccccagagcagacgcaatggtaggagcctgcacaggatgtgtgtgtatggacattctgaaggtttgctgtaggatatctgtctgtctgtcattttcccttcctaccccaaccctgagccagaggcatctgacagccctttcccagagggcaccacgcaagggcagagctgggcggcatccacagccagagaggcagaggcaagagcagagccaggctgtgcccgagggaccccagctcttgactgcacctgtttcatgcctctcctctgtggctaggaggctcaaaggactgtgagccgggagatctgggctggagctagggggtcaatggatgctcaggaagagctgggcctttggcacttgtggtgagaacagttgacagtggtcatctggaactgttcatataaacagtggcttcaagctaagtttcttgtgaagtttctcaatagcaaatcttacagaaggtcctgtgtgaccctctctgcatctgtccccaggacctatgctccctgctcacccccttctccaaagcccaagcgtcccgctgctcatcagcttttttaccattgagccaggagtgcggcaggcagtacctgcctgacccttcaaggcctgaccttcgtccagagtgctctggtttgcaccatgcatttctcaggggtccgcatttctcatgcttttctataagatctacacaccccttcagagagggctcctcgctcacctctggtagctatggatgggacaggaagctgccaacctttgtgttggacttaacacccttgcctttctgggacttggcctcaccccacccatggaatacctgcctcatcccaaagatcaggtatgggctgaatgcagccatctgagcaagggctgagggaagccatcatctaacacctctggccacccaggaccaggtctgtgtggggatgtgccttggagaccaaggcaatagtcctttccactacaggccaggggatgggacaagaagtagggaacaggcagggaaatgttaggaggtcagcctccagcaggcctagtctcaggctctaaagtactgacttttcagcaaatttcctttctggccaagccctctgagtttgaaattctgacatctgccactcctcatcccccactgtacccacaggatacatcatcgcccctctgtgaaggtggctggagcaggcctctggtccatggactgtccttcctggcccttgcatggatgcagttgtgactctggggacaatgcagccagaagctgagggaccagcacttggtgccttggaaagtagagagcaacagacacatctccaaatgggcaaggagtctctagcatgcagcccaggccttctccatacccctctccccagcatcatgagcaagggcattgcctcctctctctgctcacttcagggcccagtgcactcacttcacagtgacagccctcccctacaatccttgggcagagcatgtggtctgagggcccacagtgaaagaacagcagtggtggcaactatgccttgccttctggagcctgtagggagttttccaggcaggtcctttgccaggacagcatggtcctgccctgttgtcccgtctgctctcctcttacccacccccatgctgtaaatacttgtcatcatggactccaacagggttagagggacaggcctaatcaactgaaactcctcggagatgccatctctgtctccctgggtgccagcagccctgctgccatgtgcactggggtggcactggagagccatggcagtcgtgagatattgtatgtgtatgcacatgatcatgtgtgtatgtgcgtgcgtgcgtgtgtgtgtgtgtgtgtgtgtttctgcctcattcagtttctggggtcaaatcagctccttctctccaagtgcactaccctggagagtggtggccactcaataccttttcctctagctttcatgtcttgtttttgctttccccttcctcctccctctctccctttctttccttctctccttctttatttgaggggggaagagtgctgtacaaagtcaaacaaacaagtttacagttgtaagtgcaatgacccgagtcctccacatgaccttgtgaattgtgtgctgtccttctgtgctctgtgagaactcgtggtacttcagtgtccctccccctgtattgtgacaaggtaattctgtggtatcagaataaaaggacttgatataaacaacctaaagac

SEQ ID NO: 449809 - DNA, 2975 bp, Homo sapiens
  misc_feature (70)..(70): n is a, c, g, or t
cagtttctcaattgcatgtttgcaattaactccttatacataacatggaatttattaaatattaacagtngtcattgagggtttatatttcattgcagaggggccaggacttctgccagccaagggaaaggcccagagccctgtgcgggggaatgtggcactgtctatccatccggtggactgggcagcattcctccccagggctcttcccttgggggcctcctttcatctggggcacagccacaagtctcatctctaacgttctatgcaatgaaatataaaccctcaatgacaactgttaatatttaataaattccatgttatgtataaggagttaattgcaaacatgcaattgagaaactggatagatacactcataaaacccccacccctccccaccccacccctgctcccattgtgtgtgtgaaattctcagtctgtggcatgtttgacctgtggcaggactcgctgctgccaggtgagtcaccgcctgtcctgcagtggagcatgcacagctcgcagcctctttgcacgatttcatccattttaaatgcttgaccctcttgcttggagttctttttgcctcagaacctctccttcaggagcacttctagctgacttctgcacaagctagtgaggacctgccagaattgttgcctgagcgtgccaggctgcagggcaggcagtaaaaggcccccacataccctgcagttttctctgtccaggatagcaggtaaaaaggaatccccagagcagacgcaatggtaggagcctgcacaggatgtgtgtgtatggacattctgaaggtttgctgtaggatatctgtctgtctgtcattttcccttcctaccccaaccctgagccagaggcatctgacagccctttcccagagggcaccacgcaagggcagagctgggcggcatccacagccagagaggcagaggcaagagcagagccaggctgtgcccgagggaccccagctcttgactgcacctgtttcatgcctctcctctgtggctaggaggctcaaaggactgtgagccgggagatctgggctggagctagggggtcaatggatgctcaggaagagctgggcctttggcacttgtggtgagaacagttgacagtggtcatctggaactgttcatataaacagtggcttcaagctaagtttcttgtgaagtttctcaatagcaaatcttacagaaggtcctgtgtgaccctctctgcatctgtccccaggacctatgctccctgctcacccccttctccaaagcccaagcgtcccgctgctcatcagcttttttaccattgagccaggagtgcggcaggcagtacctgcctgacccttcaaggcctgaccttcgtccagagtgctctggtttgcaccatgcatttctcaggggtccgcatttctcatgcttttctataagatctacacaccccttcagagagggctcctcgctcacctctggtagctatggatgggacaggaagctgccaacctttgtgttggacttaacacccttgcctttctgggacttggcctcaccccacccatggaatacctgcctcatcccaaagatcaggtatgggctgaatgcagccatctgagcaagggctgagggaagccatcatctaacacctctggccacccaggaccaggtctgtgtggggatgtgccttggagaccaaggcaatagtcctttccactacaggccaggggatgggacaagaagtagggaacaggcagggaaatgttaggaggtcagcctccagcaggcctagtctcaggctctaaagtactgacttttcagcaaatttcctttctggccaagccctctgagtttgaaattctgacatctgccactcctcatcccccactgtacccacaggatacatcatcgcccctctgtgaaggtggctggagcaggcctctggtccatggactgtccttcctggcccttgcatggatgcagttgtgactctggggacaatgcagccagaagctgagggaccagcacttggtgccttggaaagtagagagcaacagacacatctccaaatgggcaaggagtctctagcatgcagcccaggccttctccatacccctctccccagcatcatgagcaagggcattgcctcctctctctgctcacttcagggcccagtgcactcacttcacagtgacagccctcccctacaatccttgggcagagcatgtggtctgagggcccacagtgaaagaacagcagtggtggcaactatgccttgccttctggagcctgtagggagttttccaggcaggtcctttgccaggacagcatggtcctgccctgttgtcccgtctgctctcctcttacccacccccatgctgtaaatacttgtcatcatggactccaacagggttagagggacaggcctaatcaactgaaactcctcggagatgccatctctgtctccctgggtgccagcagccctgctgccatgtgcactggggtggcactggagagccatggcagtcgtgagatattgtatgtgtatgcacatgatcatgtgtgtatgtgcgtgcgtgcgtgtgtgtgtgtgtgtgtgtgtttctgcctcattcagtttctggggtcaaatcagctccttctctccaagtgcactaccctggagagtggtggccactcaataccttttcctctagctttcatgtcttgtttttgctttccccttcctcctccctctctccctttctttccttctctccttctttatttgaggggggaagagtgctgtacaaagtcaaacaaacaagtttacagttgtaagtgcaatgacccgagtcctccacatgaccttgtgaattgtgtgctgtccttctgtgctctgtgagaactcgtggtacttcagtgtccctccccctgtattgtgacaaggtaattctgtggtatcagaataaaaggacttgatataaacaacctaaagac

SEQ ID NO: 449810 - DNA, 484 bp, Homo sapiens
cctctagagagttgtgtcacgcttgtagagattgtgcacgcgcgcgtgtgtgtgtgtgtgtgtgtgtgtgtatgtgcgtgcgtgcgtgtgtgtgtgtgtgtgtgtgtttctgcctcattcagtttctggggtcaaatcagctccttctctccaagtgcactaccctggagagtggtggccactcaataccttttcctctagctttcatgtcttgtttttgctttccccttcctcctccctctctccctttctttccttctctccttctttatttgaggggggaagagtgctgtacaaagtcaaacaaacaagtttacagttgtaagtgcaatgacccgagtcctccacatgaccttgtgaattgtgtgctgtccttctgtgctctgtgagaactcgtggtacttcagtgtccctccccctgtattgtgacaaggtaattctgtggtatcagaataaaaggacttgatataaacaacctaaagac

SEQ ID NO: 449811 - DNA, 325 bp, Homo sapiens
aaatattatttgaggacttcagtgtctttttaattttcatcaaccccctctcccatttccttgcagaaaacagagtggctctgtctgaactgccaaaccaagcggctactggagggcagcctaggagagccgacccccctgccgccgcccacctcacagcagccccctgtaggggcccctcaccgtgcatctggaacatcccctctgaagcagaaagggccacaggggctgggccagccttcaggccccctgcctgccaaggccagccctctatccaccaaggccagccctctgcccagcaaggccagcccccaggccaagcccc

SEQ ID NO: 449812 - DNA, 15963 bp, Homo sapiens
agagccgagctgggagatggcggcggcagcggcggcgccgagagtgtgagcaccgcccgggagccgccggcccgggcgcagcgcgaccccgaccccgcccgcccgcctgcccgccatgggcaacgaggtcagcctggagggcggcgctggcgacgggccgctgccgcccggcggcgccggccccggcccgggccccggccccggccccggcgcaggaaagccgccttcagcaccggccggtggcggacagctccccgcggcgggagcagcgcggtcgaccgcggtaccaccggtccctggccccggccccggccccggtcccggccctggcccgggcagcacttcccggagactggaccccaaggaacccctgggtaaccagagagcagcttccccaactccgaagcaggcttctgctaccactcctggccatgagagcccccgagagacaagggcacagggaccagcaggccaggaggctgatggtccccgcaggacgctgcaggtagacagcaggacacagagatcagggcggtccccctcagtgtcaccggacagaggcagcacccccacatcaccctactccgtccctcagatcgccccccttcccagcagcacgctgtgtcccatatgcaagacttcggacctcacgtcgacccccagccagccaaacttcaacacctgcacccagtgtcacaacaaggtctgcaaccagtgtgggttcaaccccaaccctcatctcacccaggtgaaggagtggctctgtctgaactgtcagatgcagagggctctgggaatggacatgaccactgcacctcgctccaagagccagcagcagctgcactccccagccctgtctcctgcccactccccggccaaacagcccctggggaagccagaccaagagagatctcggggcccaggaggaccacagcctgggtcccgccaggctgagacagccagggccacctcagtgccggggcctgcccaagcagctgcccctccagaggtggggagggtgtctcctcagccccctcaacccaccaagccttccacagctgagcccaggccacctgcaggagaggccccggccaaaagtgccaccgcagtgcccgctgggcttggtgccactgagcagacccaggagggcctcactggtaagctcttcggccttggcgcgtcactgctaacccaggcgagcaccctcatgtctgtgcagcccgaggctgacacccagggccagcctgcccccagcaaggggacacctaagatcgtcttcaatgatgccagcaaggaggctggcccaaaacccttgggctcagggcccgggcctgggccagcacctggagccaaaactgagcctggggctagaatgggtcctggatctggacctggagccctgccgaaaactgggggaacaaccagtccaaagcatggcagagcagaacatcaggcagcatcgaaggctgctgccaagccaaagaccatgccgaaggaaagggccatctgcccactgtgccaagccgagctcaacgtgggcagcaagagcccagccaactataacacatgcaccacctgcaggctccaggtgtgcaacctgtgtggcttcaacccaacaccccacctggtggagaaaacagagtggctctgtctgaactgccaaaccaagcggctactggagggcagcctaggagagccgacccccctgccgccgcccacctcacagcagccccctgtaggggcccctcaccgtgcatctggaacatcccctctgaagcagaaagggccacaggggctgggccagccttcaggccccctgcctgccaaggccagccctctatccaccaaggccagccctctgcccagcaaggccagcccccaggccaagcccctcagggcttctgaacccagcaagaccccaagcagtgtccaggaaaagaagacccgagtccccactaaagctgagcccatgccgaagccacctccagagactaccccaacccctgcgactcctaaagtaaagagtggggtgaggagggctgaacctgccacccctgtcgtcaaggctgttccagaagcccccaagggtggggaggcggaggacctggtgggcaagccttactctcaggatgcgtctcggagcccacagagcctcagtgacacaggctattcctctgacggcatctctagctcccagagtgagatcacaggagtcgtgcagcaggaggtggaacagctggacagtgcaggggtgacagggccacatccacccagcccctccgagatccacaaggtggggagcagcatgcggcctttgctgcaggcccagggcctggccccaagtgagcggagcaagccactctccagcggtactggcgaggagcagaagcagcggccccactccttgtccatcacgcctgaggcctttgactctgatgaggagctggaggatatcctggaggaagacgaagactctgctgagtggaggcgccggagagagcagcaggacactgccgagtcctcagacgactttggcagccaattgaggcacgactatgtggaggacagcagtgagggtggcctgtcccctcttccaccccagcccccagcccgggcagcagaactgactgatgaggatttcatgcgacggcagattctcgagatgagcgccgaggaagacaacctggaggaggatgacactgccacctccgggcgtggcctggccaaacatggcacccagaaaggtggccccagacccaggcctgagcctagccaagaaccagcagcactgcccaagaggcgcctgccccacaatgccaccacgggctatgaggagctgctccctgagggaggctcagcagaggctaccgatggcagtgggaccctgcagggtgggctccgtcgcttcaagaccattgagctcaacagcacgggaagttatggtcatgagttggacctgggccaaggcccagaccccagtctggaccgggagcctgagctggagatggagagcctaacgggctcccctgaggaccgctcccgtggtgagcactcctctacattgcctgcctccacacccagctacacctcgggcacctctcccacctctctgtcctccctagaggaggacagtgacagcagccccagccgcaggcagcgtctagaagaagcaaagcagcagcgcaaggcccggcaccgctcccacgggcccctgctacccaccatcgaggactcctcagaggaggaggagctgcgggaggaagaggagctgcttcgtgagcaagagaagatgcgggaggtggagcagcagcgcatccgcagcacagcccgcaagacccggcgggacaaggaagaactgcgggcccagcggaggcgagagcgctccaagacaccacccagtaacttgtcacccatcgaggatgcctccccgacggaggagctgaggcaggcggccgagatggaggagctacaccgctcctcctgctctgagtactcaccctcaccctcccttgactctgaggctgaggccttggatggtggccctagccggctttacaagtcaggcagtgagtacaacctgcccaccttcatgtccctctactcaccaaccgagacaccctccggcagctccaccactcccagttccggacggccgctcaagagcgctgaggaggcttatgaggagatgatgcgcaaagctgagctgctccagaggcagcaaggccaggcagcaggggcccggggaccccatggcggcccctctcagcccacaggcccccggggcctgggctccttcgaatatcaagacactacagaccgtgagtatggccaggctgctcagcctgccgcagagggcacgccagccagcctgggagcagccgtgtacgaagaaatccttcagacatcacagagcatagtccgcatgcggcaggcctcctcacgagacctggcttttgctgaggacaaaaagaaggagaagcagtttctaaatgctgagagtgcatacatggacccaatgaagcaaaatggtggcccccttacccctggtaccagtcccacccagctcgctgcccctgtgtccttctctacccccacctcctcagacagcagcgggggccgagttattcccgatgtccgtgtcactcagcattttgcaaaggagactcaggaccccctcaagctgcacagctctcctgcctcccccagctcagcctccaaggagataggcatgcccttttcccagggccctgggaccccagccaccacagctgtggctccttgtccagctgggctgccacgaggatatatgactccagcctccccagcaggctccgagcgtagtccttcaccatcttccacagcccacagctatggacacagcccaaccactgcaaactatgggtcccaaactgaggatctaccccaggcccccagtggccttgctgcagctggacgagctgctagagagaagcccttgagtgcgagtgacggtgagggtggcactcctcagccttcccgggcatattcctactttgcaagctccagcccacctctctccccgtcttccccctcagagagtcccacattctcccctggcaagatgggcccaagggccacagcagagttctctacacagacgccaagtccagcccctgcctcagacatgccacggagccctggtgcccccactccatcacctatggtagcccagggtacacaaacaccacatcgacccagcacgcctcgcctggtgtggcaggagtcctctcaagaggctccctttatggtcatcacgctggcatctgacgcctccagccagaccaggatggtacatgccagtgcctccacctccccgctctgctcacctactgaaacccagcccaccacccatggctacagccagacaacacctccgagtgtgtctcagctgcccccagagccacctgggccacctggctttccacgggtgcccagtgctggtgcagatgggcccctggcactatatggctggggtgccctccctgctgagaacatctccctgtgccggatctcctctgtccctgggacgtctagggttgagccaggccccaggacccctggcactgcagtggtagacctccgtacagctgtcaagcccactcccatcatcctcactgaccagggcatggacctcacctctcttgctgtggaagcgaggaagtatggtcttgccctggatccaatcccaggacggcagtcgaccgccgtgcagcccttggttatcaacctcaatgcccaggagcataccttccttgctactgccaccaccgtgagcatcaccatggcctcgtctgtgttcatggctcaacaaaagcagcctgtggtctatggagacccctaccagagccgccttgactttggccagggtgggggtagccctgtgtgcctggcccaggtcaaacaagtagagcaggctgtccagacagccccataccgaagtgggccccggggaagacccagggaggccaagtttgccagatataacctacccaaccaagtagctcctctggccagaagagacgttttgatcactcagatgggcaccgcccagagcattggcctcaagccaggcccagtgccagagccaggtgccgagccccaccgggccacccctgcagagctgcggtcacatgctctgccaggtgccaggaagccacacacagtggtggtgcagatgggagagggcacagcaggcactgtgaccacactgctcccagaggagcctgcgggtgccctggaccttaccgggatgaggcctgagagccagctggcatgctgtgacatggtctacaagctcccctttggcagcagctgcactggcaccttccacccggcccccagtgtgcctgagaagagcatggcagatgctgccccacctggccaaagcagcagccccttctatggtccccgggaccctgagcctcctgagcccccaacctaccgggcacagggggtggtggggcctgggccccatgaggagcagaggccctacccacaaggcctgcctggtaggctgtactcctccatgtctgacaccaatttggctgaggctggcctcaactaccatgcccagaggatcgggcagctcttccagggtcctggacgagactcggctatggacctcagctcactgaagcactcctacagcctgggctttgcggatggacgctacctagggcagggcttgcagtatggctcagtcacggacctgcgtcatcctacagaccttttggctcacccgcttcccatgcggcgctatagctcagtgtcgaacatctactcagaccacaggtacggcccacggggagatgcagttggcttccaggaggccagcctggcccagtacagtgccaccacagcccgtgaaatcagtcgcatgtgcgctgccctcaactccatggaccagtatggtgggcggcatggcagtggtggtggtggccctgaccttgtgcagtaccagccccagcacgggcccgggctcagtgctccacagagtctggttcccctcagacctggactccttggtaaccccacctttccagagggccacccaagtcctgggaacttggcccagtatgggcctgcagcaggccaaggaacagcagtcagacagctgctgccgtccacagccactgtacgtgcagctgatggcatgatctactcgactatcaataccccaattgctgcaacactgcccatcaccacccagcctgcctcagtcctgcggcccatggtgcgtggtggcatgtacaggccttacgcatctggtggaatcacagccgtgccactcaccagtctgacacgtgtgcccatgattgccccccgggtacctcttggacccacagggctgtaccgctatcctgcaccaagtagatttcccattgcttccagtgttccacctgcagaagggcctgtctatctggggaaacctgctgctgccaaggcccctggggctgggggcccttcaaggccagagatgccagtaggggctgcacgggaagagcctcttcccacaaccacccctgctgccatcaaggaggctgcaggagccccagctcctgccccactagctggccagaagccaccagcagatgctgctcctgggggtggcagtggggccctcagccggccagggttcgagaaagaggaagcatcacaggaggagaggcagcggaagcaacaggagcagctgctccagctagagcgggagcgggtggagttggagaagctgcgacaacttcggctgcaagaggagctagagcgggaacgtgtggagctgcagaggcaccgtgaggaggagcagctgctggtgcagcgggagttgcaggagctgcagaccatcaagcaccatgtgctgcagcagcagcaagaggaacgccaggctcaatttgcactgcagcgggaacagctagcgcagcagcgtctgcagctggagcagatccagcagctgcagcagcagctgcagcagcagctagaggagcagaagcagcggcagaaggctccctttcctgcagcctgtgaggcacctggccgagggcctcccctagcggctgctgagttggcccagaatggccagtattggcccccccttacacatgcagccttcattgccatggcagggcctgaaggacttgggcagcctcgtgagcctgtgctgcaccggggtctccccagctctgcctcagacatgtcactgcaaacggaggagcagtgggaggccagccgtagtggcatcaagaagcggcactccatgccacgcctgcgggatgcctgtgagctagagtctgggactgagccctgtgtggtcaggaggattgccgacagcagcgtgcagacagacgatgaggatggggagagccgctacctcttgagtcggcgacgccgggcacggcggagtgctgactgcagtgtgcagacggacgacgaagacagtgctgagtgggagcagccagtgcgccgccgcaggtctcgtcttccccgccactcagactcaggctctgacagcaagcacgatgccactgcctcatcatccagtgctgctgccactgtgagggccatgagcagcgtgggcatccagaccatcagtgactgctccgtgcagacggagcctgaccagctgcccagggtctctccagccatccacatcacagctgccaccgatcccaaggtggagatcgtcaggtacatatcggcgccagagaagactgggcgtggggagagcctggcctgccagacggagccagatgggcaggcccagggtgtagccgggccgcagcttgtagggccaactgccatcagcccctacctgcctggcatccagatcgtcaccccagggcctctgggcagatttgaaaaaaagaagccagatcccctggagattgggtaccaggcccacctgcctccggagtctctctcacagcttgtgagccgccagcctcccaagtcccctcaggtcctctactcaccagtctcacccctgtcccctcaccggctcctggacacctcctttgcttccagtgagaggctgaacaaagctcacgtgagtccccagaagcacttcacggctgacagcgctctccgccagcagacgctgcctcgccccatgaagaccctgcagcggtccctgtctgaccctaagcccctcagccccaccgccgaagagtctgccaaagagagattctccctctaccagcaccaggggggactgggtagccaggtgtcggcgttgccacccaacagcctggtccgcaaggtgaagcggacactgcccagcccccctccagaggaggctcaccttcccctggctggccaggcctccccacagctgtatgcagccagcctgctgcagcgagggctgacggggcccaccactgtccctgctaccaaggccagcctgctccgggagctggaccgggacctgcggctggtggagcatgagtccaccaaactgcgcaagaagcaggcagagctggatgaggaggagaaggagattgacgccaagctcaagtacctggagttgggtatcacacaacgcaaagagtctttggccaaagaccggggtggccgtgactacccacccttgcgtggtcttggcgagcatcgtgactacctatcggacagtgagctcaaccagctgcggctccagggctgcaccactcccgctggccagtttgtggacttccctgccactgccgctgctcctgccaccccctctggtcccactgccttccagcagccccgcttccagcctccagccccacagtattctgcaggcagtggtgggccaactcagaacggattcccagcccaccaggcccccacctaccctggccccagcacgtacccagctcctgcctttcctcctggtgccagttacccagctgagcctggcctgccaaaccagcaggctttccgccccacaggccactatgcaggccaaacacccatgccaaccacacagagcaccctttttccagtccccgctgatagccgtgccccactgcagaagccacgccagacatcgctagccgacttggagcagaaggtgcccaccaactatgaggtgatcgccagccccgttgtgcccatgtcttcagccccatctgaaaccagctacagtggcccagcagtgagcagcggctatgagcagggcaaggtccctgaggtgccccgggctggtgaccgtggcagtgtgagccagagcccagcccccacctacccctctgactcacactataccagtctggagcagaacgttcctcgaaactacgtaatgattgatgacatcagtgaactgaccaaggacagcacctctactgctcctgatagccaacggctggagcccctggggccaggcagcagtgggcgtccagggaaggagcctggagaaccaggtgtccttgacgggcccacactgccctgctgctatgccagaggagaagaggaatctgaggaggactcatacgatccccgcgggaagggtggccacctccggagcatggagagcaatggtcgaccagccagtacccactactatggtgacagtgactacaggcatggggctcgagtagagaagtatggtccagggcccatggggcccaagcatccctccaagagcctggctccagctgccatctcctcaaagcgcagcaagcaccggaagcagggcatggagcaaaagatatccaagttctcgcctattgaagaggccaaagacgtagagtcagacctggcgtcctaccccccacctgcagtcagcagcagcctggtctctcggggcaggaagttccaggatgaaatcacctatgggctcaagaagaacgtgtatgagcagcaaaaatactatgggatgtccagccgggacgcagtggaggacgaccgcatttatggcgggagcagccggtcccgggcaccttctgcatacagtggggagaagctgtccagccacgacttcagtggctggggcaaggggtacgaaagggaacgggaggctgtggagcgacttcaaaaagcgggccccaagccctcatccctaagtatggcccacagccgggtacgaccccccatgcggagccaggcctctgaagaggagagccccgtcagtcctttggggaggccccgccctgccggagggcccctccctcccggcggggatacctgcccacagttctgctccagccactccatgcctgatgtccaggaacatgtcaaggacggacctcgggcccacgcatataagcgtgaggagggctacatcctggatgattcccattgcgtggtttccgacagcgaagcgtatcacctgggccaggaggagacggactggtttgataagccccgggatgcccgctctgaccggttcaggcaccacgggggccatgcagtttcctcctcctcccagaagcgaggccctgccaggcacagctaccatgactacgatgaaccccctgaggagggcctgtggcctcatgatgagggtggcccaggccgccatgcctcagccaaggaacaccggcacggtgaccacgggcggcactcaggccgccacactggtgaggagccgggacggcgtgctgccaaaccacacgctcgggacctgggtcgccatgaggcccggccccactctcagcccagctctgctccagctatgccgaagaagggtcagcctgggtatcccagctctgctgagtactcacagccatcccgtgcttcatccgcataccatcatgcctctgacagcaagaagggctcccggcaagcccactccgggcccgctgcactgcagtcaaaggcagaaccccaggcgcagccgcagctgcaaggtcggcaggcagctccaggaccacagcagtcacagtcaccatcatccaggcaaataccctctggggcagcatcacgccagccacagacacagcagcagcagcaaggtcttgggctgcagcccccacagcaggctctgacacaggctcggctgcagcaacagagccagccaaccacccggggctcagcccctgctgccagccagcctgcagggaagcctcagccaggccccagcacagccacaggtcctcaaccagcaggaccgccacgggcagaacagacaaatggctctaaagggacagccaaagcaccgcaacaggggagggctcctcaggcccagccaacaccaggacctggacctgcaggtgtgaaggctggagccaggcctggaggaaccccaggggctcccgccggccagccaggtgccgatggggagagcgtgttctccaagatcctccctggcggggcagccgagcaagctggcaaactgacggaagctgtctctgcttttggcaaaaaattttcctcattctggtgaccatgcccagcatggctcttgaagaaatgaagagaggtatcattgctgtggaaaaatctctggagtcagaggcctgggcgcagctctggactctgcgtataacacatctacaatctggcaaacccttggcccaaagactcaccaggtgggacgtggcaggcaggcctcagttgaggacgtgatgttttctcacagcagctgcctgggtgaagcatctgctggacaagtcggaccactggccaggggacctttgattgtctttccagagatgctgctctctgcagggcaccaccttcaaggcacagcccttgttgggagggagaaccctctccagaaaccctgccaccatggtgtcttgccgtacttcccacagccgcctttttgcggcctggccggccaggcttcccgtgcgttatacacagagtttgggcacacactgccctccctccgagatgccagaagtttttccacagccttggagaggggctttgactgagggctgggggccctgggctccgtttccttcacattccagctggcccggatccctctgtggcacagggccctgcccgtcacatgccctctgggtgacatcggagcagacctccatgtggccaggggttgggagaactttacaaacattaggacctaacactgtctcatcgctgaaataagaggccatagcaccgaaaagcagcgtgggcgccggctgaggcttctcccagcccgtgggtggcagcgtgctagcacactgccaccatctcaaagccatccccctagccatcgtgagcatcccagcggcaccgccattgtctcaaccagccggctcctcgtctgtacacctggggatttcttttgatttcaagaacagccttaatcattccagtttgatttacgtgtatacctcataaacatttttcttttgtttctctctccccctttctctcttctcttggctcactcccttgcctctccccctccaccaccaccttgtgactgatggtttggtttcctctctgctctgcccctgctcagcacagggagaatgttgacttagaagcaatagggggcagcaggccaccaagagcacaaccccagggcgaggtctggggaggcctcccagcccgcctctgtttactgtgcaattccagtcgttcttaagccatcaccagtgggtgtactcagagcagaggggccaggacttctgccagccaagggaaaggcccagagccctgtgcgggggaatgtggcactgtctatccatccggtggactgggcagcattcctccccagggctcttcccttgggggcctcctttcatctggggcacagccacaagtctcatctctaacgttctatgcaatgaaatataaaccctcaatgacaactgttaatatttaataaattccatgttatgtataaggagttaattgcaaacatgcaattgagaaactggatagatacactcataaaacccccacccctccccaccccacccctgctcccattgtgtgtgtgaaattctcagtctgtggcatgtttgacctgtggcaggactcgctgctgccaggtgagtcaccgcctgtcctgcagtggagcatgcacagctcgcagcctctttgcacgatttcatccattttaaatgcttgaccctcttgcttggagttctttttgcctcagaacctctccttcaggagcacttctagctgacttctgcacaagctagtgaggacctgccagaattgttgcctgagcgtgccaggctgcagggcaggcagtaaaaggcccccacataccctgcagttttctctgtccaggatagcaggtaaaaaggaatccccagagcagacgcaatggtaggagcctgcacaggatgtgtgtgtatggacattctgaaggtttgctgtaggatatctgtctgtctgtcattttcccttcctaccccaaccctgagccagaggcatctgacagccctttcccagagggcaccacgcaagggcagagctgggcggcatccacagccagagaggcagaggcaagagcagagccaggctgtgcccgagggaccccagctcttgactgcacctgtttcatgcctctcctctgtggctaggaggctcaaaggactgtgagccgggagatctgggctggagctagggggtcaatggatgctcaggaagagctgggcctttggcacttgtggtgagaacagttgacagtggtcatctggaactgttcatataaacagtggcttcaagctaagtttcttgtgaagtttctcaatagcaaatcttacagaaggtcctgtgtgaccctctctgcatctgtccccaggacctatgctccctgctcacccccttctccaaagcccaagcgtcccgctgctcatcagcttttttaccattgagccaggagtgcggcaggcagtacctgcctgacccttcaaggcctgaccttcgtccagagtgctctggtttgcaccatgcatttctcaggggtccgcatttctcatgcttttctataagatctacacaccccttcagagagggctcctcgctcacctctggtagctatggatgggacaggaagctgccaacctttgtgttggacttaacacccttgcctttctgggacttggcctcaccccacccatggaatacctgcctcatcccaaagatcaggtatgggctgaatgcagccatctgagcaagggctgagggaagccatcatctaacacctctggccacccaggaccaggtctgtgtggggatgtgccttggagaccaaggcaatagtcctttccactacaggccaggggatgggacaagaagtagggaacaggcagggaaatgttaggaggtcagcctccagcaggcctagtctcaggctctaaagtactgacttttcagcaaatttcctttctggccaagccctctgagtttgaaattctgacatctgccactcctcatcccccactgtacccacaggatacatcatcgcccctctgtgaaggtggctggagcaggcctctggtccatggactgtccttcctggcccttgcatggatgcagttgtgactctggggacaatgcagccagaagctgagggaccagcacttggtgccttggaaagtagagagcaacagacacatctccaaatgggcaaggagtctctagcatgcagcccaggccttctccatacccctctccccagcatcatgagcaagggcattgcctcctctctctgctcacttcagggcccagtgcactcacttcacagtgacagccctcccctacaatccttgggcagagcatgtggtctgagggcccacagtgaaagaacagcagtggtggcaactatgccttgccttctggagcctgtagggagttttccaggcaggtcctttgccaggacagcatggtcctgccctgttgtcccgtctgctctcctcttacccacccccatgctgtaaatacttgtcatcatggactccaacagggttagagggacaggcctaatcaactgaaactcctcggagatgccatctctgtctccctgggtgccagcagccctgctgccatgtgcactggggtggcactggagagccatggcagtcgtgagatattgtatgtgtatgcacatgatcatgtgtgtatgtgcgtgcgtgcgtgtgtgtgtgtgtgtgtgtgtttctgcctcattcagtttctggggtcaaatcagctccttctctccaagtgcactaccctggagagtggtggccactcaataccttttcctctagctttcatgtcttgtttttgctttccccttcctcctccctctctccctttctttccttctctccttctttatttgaggggggaagagtgctgtacaaagtcaaacaaacaagtttacagttgtaagtgcaatgacccgagtcctccacatgaccttgtgaattgtgtgctgtccttctgtgctctgtgagaactcgtggtacttcagtgtccctccccctgtattgtgacaaggtaattctgtggtatcagaataaaaggacttgatataaacaacctaaagac

SEQ ID NO: 449813 - DNA, 13081 bp, Homo sapiens
ttctggtggtgatggggcttggcagggtcacctagcttggtagagacctccgcaagctgcttctctaagctgtatctctaacagtcattttcaatgtcatttcagcacttcccggagactggaccccaaggaacccctgggtaaccagagagcagcttccccaactccgaagcaggcttctgctaccactcctggccatgagagcccccgagagacaagggcacagggaccagcaggccaggaggctgatggtccccgcaggacgctgcaggtagacagcaggacacagagatcagggcggtccccctcagtgtcaccggacagaggcagcacccccacatcaccctactccgtccctcagatcgccccccttcccagcagcacgctgtgtcccatatgcaagacttcggacctcacgtcgacccccagccagccaaacttcaacacctgcacccagtgtcacaacaaggtctgcaaccagtgtgggttcaaccccaaccctcatctcacccaggtgaaggagtggctctgtctgaactgtcagatgcagagggctctgggaatggacatgaccactgcacctcgctccaagagccagcagcagctgcactccccagccctgtctcctgcccactccccggccaaacagcccctggggaagccagaccaagagagatctcggggcccaggaggaccacagcctgggtcccgccaggctgagacagccagggccacctcagtgccggggcctgcccaagcagctgcccctccagaggtggggagggtgtctcctcagccccctcaacccaccaagccttccacagctgagcccaggccacctgcaggagaggccccggccaaaagtgccaccgcagtgcccgctgggcttggtgccactgagcagacccaggagggcctcactggtaagctcttcggccttggcgcgtcactgctaacccaggcgagcaccctcatgtctgtgcagcccgaggctgacacccagggccagcctgcccccagcaaggggacacctaagatcgtcttcaatgatgccagcaaggaggctggcccaaaacccttgggctcagggcccgggcctgggccagcacctggagccaaaactgagcctggggctagaatgggtcctggatctggacctggagccctgccgaaaactgggggaacaaccagtccaaagcatggcagagcagaacatcaggcagcatcgaaggctgctgccaagccaaagaccatgccgaaggaaagggccatctgcccactgtgccaagccgagctcaacgtgggcagcaagagcccagccaactataacacatgcaccacctgcaggctccaggtgtgcaacctgtgtggcttcaacccaacaccccacctggtggagaaaacagagtggctctgtctgaactgccaaaccaagcggctactggagggcagcctaggagagccgacccccctgccgccgcccacctcacagcagccccctgtaggggcccctcaccgtgcatctggaacatcccctctgaagcagaaagggccacaggggctgggccagccttcaggccccctgcctgccaaggccagccctctatccaccaaggccagccctctgcccagcaaggccagcccccaggccaagcccctcagggcttctgaacccagcaagaccccaagcagtgtccaggaaaagaagacccgagtccccactaaagctgagcccatgccgaagccacctccagagactaccccaacccctgcgactcctaaagtaaagagtggggtgaggagggctgaacctgccacccctgtcgtcaaggctgttccagaagcccccaagggtggggaggcggaggacctggtgggcaagccttactctcaggatgcgtctcggagcccacagagcctcagtgacacaggctattcctctgacggcatctctagctcccagagtgagatcacaggagtcgtgcagcaggaggtggaacagctggacagtgcaggggtgacagggccacatccacccagcccctccgagatccacaaggtggggagcagcatgcggcctttgctgcaggcccagggcctggccccaagtgagcggagcaagccactctccagcggtactggcgaggagcagaagcagcggccccactccttgtccatcacgcctgaggcctttgactctgatgaggagctggaggatatcctggaggaagacgaagactctgctgagtggaggcgccggagagagcagcaggacactgccgagtcctcagacgactttggcagccaattgaggcacgactatgtggaggacagcagtgagggtggcctgtcccctcttccaccccagcccccagcccgggcagcagaactgactgatgaggatttcatgcgacggcagattctcgagatgagcgccgaggaagacaacctggaggaggatgacactgccacctccgggcgtggcctggccaaacatggcacccagaaaggtggccccagacccaggcctgagcctagccaagaaccagcagcactgcccaagaggcgcctgccccacaatgccaccacgggctatgaggagctgctccctgagggaggctcagcagaggctaccgatggcagtgggaccctgcagggtgggctccgtcgcttcaagaccattgagctcaacagcacgggaagttatggtcatgagttggacctgggccaaggcccagaccccagtctggaccgggagcctgagctggagatggagagcctaacgggctcccctgaggaccgctcccgtggtgagcactcctctacattgcctgcctccacacccagctacacctcgggcacctctcccacctctctgtcctccctagaggaggacagtgacagcagccccagccgcaggcagcgtctagaagaagcaaagcagcagcgcaaggcccggcaccgctcccacgggcccctgctacccaccatcgaggactcctcagaggaggaggagctgcgggaggaagaggagctgcttcgtgagcaagagaagatgcgggaggtggagcagcagcgcatccgcagcacagcccgcaagacccggcgggacaaggaagaactgcgggcccagcggaggcgagagcgctccaagacaccacccagtaacttgtcacccatcgaggatgcctccccgacggaggagctgaggcaggcggccgagatggaggagctacaccgctcctcctgctctgagtactcaccctcaccctcccttgactctgaggctgaggccttggatggtggccctagccggctttacaagtcaggcagtgagtacaacctgcccaccttcatgtccctctactcaccaaccgagacaccctccggcagctccaccactcccagttccggacggccgctcaagagcgctgaggaggcttatgaggagatgatgcgcaaagctgagctgctccagaggcagcaaggccaggcagcaggggcccggggaccccatggcggcccctctcagcccacaggcccccggggcctgggctccttcgaatatcaagacactacagaccgtgagtatggccaggctgctcagcctgccgcagagggcacgccagccagcctgggagcagccgtgtacgaagaaatccttcagacatcacagagcatagtccgcatgcggcaggcctcctcacgagacctggcttttgctgaggacaaaaagaaggagaagcagtttctaaatgctgagagtgcatacatggacccaatgaagcaaaatggtggcccccttacccctggtaccagtcccacccagctcgctgcccctgtgtccttctctacccccacctcctcagacagcagcgggggccgagttattcccgatgtccgtgtcactcagcattttgcaaaggagactcaggaccccctcaagctgcacagctctcctgcctcccccagctcagcctccaaggagataggcatgcccttttcccagggccctgggaccccagccaccacagctgtggctccttgtccagctgggctgccacgaggatatatgactccagcctccccagcaggctccgagcgtagtccttcaccatcttccacagcccacagctatggacacagcccaaccactgcaaactatgggtcccaaactgaggatctaccccaggcccccagtggccttgctgcagctggacgagctgctagagagaagcccttgagtgcgagtgacggtgagggtggcactcctcagccttcccgggcatattcctactttgcaagctccagcccacctctctccccgtcttccccctcagagagtcccacattctcccctggcaagatgggcccaagggccacagcagagttctctacacagacgccaagtccagcccctgcctcagacatgccacggagccctggtgcccccactccatcacctatggtagcccagggtacacaaacaccacatcgacccagcacgcctcgcctggtgtggcaggagtcctctcaagaggctccctttatggtcatcacgctggcatctgacgcctccagccagaccaggatggtacatgccagtgcctccacctccccgctctgctcacctactgaaacccagcccaccacccatggctacagccagacaacacctccgagtgtgtctcagctgcccccagagccacctgggccacctggctttccacgggtgcccagtgctggtgcagatgggcccctggcactatatggctggggtgccctccctgctgagaacatctccctgtgccggatctcctctgtccctgggacgtctagggttgagccaggccccaggacccctggcactgcagtggtagacctccgtacagctgtcaagcccactcccatcatcctcactgaccagggcatggacctcacctctcttgctgtggaagcgaggaagtatggtcttgccctggatccaatcccaggacggcagtcgaccgccgtgcagcccttggttatcaacctcaatgcccaggagcataccttccttgctactgccaccaccgtgagcatcaccatggcctcgtctgtgttcatggctcaacaaaagcagcctgtggtctatggagacccctaccagagccgccttgactttggccagggtgggggtagccctgtgtgcctggcccaggtcaaacaagtagagcaggctgtccagacagccccataccgaagtgggccccggggaagacccagggaggccaagtttgccagatataacctacccaaccaagtagctcctctggccagaagagacgttttgatcactcagatgggcaccgcccagagcattggcctcaagccaggcccagtgccagagccaggtgccgagccccaccgggccacccctgcagagctgcggtcacatgctctgccaggtgccaggaagccacacacagtggtggtgcagatgggagagggcacagcaggcactgtgaccacactgctcccagaggagcctgcgggtgccctggaccttaccgggatgaggcctgagagccagctggcatgctgtgacatggtctacaagctcccctttggcagcagctgcactggcaccttccacccggcccccagtgtgcctgagaagagcatggcagatgctgccccacctggccaaagcagcagccccttctatggtccccgggaccctgagcctcctgagcccccaacctaccgggcacagggggtggtggggcctgggccccatgaggagcagaggccctacccacaaggcctgcctggtaggctgtactcctccatgtctgacaccaatttggctgaggctggcctcaactaccatgcccagaggatcgggcagctcttccagggtcctggacgagactcggctatggacctcagctcactgaagcactcctacagcctgggctttgcggatggacgctacctagggcagggcttgcagtatggctcagtcacggacctgcgtcatcctacagaccttttggctcacccgcttcccatgcggcgctatagctcagtgtcgaacatctactcagaccacaggtacggcccacggggagatgcagttggcttccaggaggccagcctggcccagtacagtgccaccacagcccgtgaaatcagtcgcatgtgcgctgccctcaactccatggaccagtatggtgggcggcatggcagtggtggtggtggccctgaccttgtgcagtaccagccccagcacgggcccgggctcagtgctccacagagtctggttcccctcagacctggactccttggtaaccccacctttccagagggccacccaagtcctgggaacttggcccagtatgggcctgcagcaggccaaggaacagcagtcagacagctgctgccgtccacagccactgtacgtgcagctgatggcatgatctactcgactatcaataccccaattgctgcaacactgcccatcaccacccagcctgcctcagtcctgcggcccatggtgcgtggtggcatgtacaggccttacgcatctggtggaatcacagccgtgccactcaccagtctgacacgtgtgcccatgattgccccccgggtacctcttggacccacagggctgtaccgctatcctgcaccaagtagatttcccattgcttccagtgttccacctgcagaagggcctgtctatctggggaaacctgctgctgccaaggcccctggggctgggggcccttcaaggccagagatgccagtaggggctgcacgggaagagcctcttcccacaaccacccctgctgccatcaaggaggctgcaggagccccagctcctgccccactagctggccagaagccaccagcagatgctgctcctgggggtggcagtggggccctcagccggccagggttcgagaaagaggaagcatcacaggaggagaggcagcggaagcaacaggagcagctgctccagctagagcgggagcgggtggagttggagaagctgcgacaacttcggctgcaagaggagctagagcgggaacgtgtggagctgcagaggcaccgtgaggaggagcagctgctggtgcagcgggagttgcaggagctgcagaccatcaagcaccatgtgctgcagcagcagcaagaggaacgccaggctcaatttgcactgcagcgggaacagctagcgcagcagcgtctgcagctggagcagatccagcagctgcagcagcagctgcagcagcagctagaggagcagaagcagcggcagaaggctccctttcctgcagcctgtgaggcacctggccgagggcctcccctagcggctgctgagttggcccagaatggccagtattggcccccccttacacatgcagccttcattgccatggcagggcctgaaggacttgggcagcctcgtgagcctgtgctgcaccggggtctccccagctctgcctcagacatgtcactgcaaacggaggagcagtgggaggccagccgtagtggcatcaagaagcggcactccatgccacgcctgcgggatgcctgtgagctagagtctgggactgagccctgtgtggtcaggaggattgccgacagcagcgtgcagacagacgatgaggatggggagagccgctacctcttgagtcggcgacgccgggcacggcggagtgctgactgcagtgtgcagacggacgacgaagacagtgctgagtgggagcagccagtgcgccgccgcaggtctcgtcttccccgccactcagactcaggctctgacagcaagcacgatgccactgcctcatcatccagtgctgctgccactgtgagggccatgagcagcgtgggcatccagaccatcagtgactgctccgtgcagacggagcctgaccagctgcccagggtctctccagccatccacatcacagctgccaccgatcccaaggtggagatcgtcaggtacatatcggcgccagagaagactgggcgtggggagagcctggcctgccagacggagccagatgggcaggcccagggtgtagccgggccgcagcttgtagggccaactgccatcagcccctacctgcctggcatccagatcgtcaccccagggcctctgggcagatttgaaaaaaagaagccagatcccctggagattgggtaccaggcccacctgcctccggagtctctctcacagcttgtgagccgccagcctcccaagtcccctcaggtcctctactcaccagtctcacccctgtcccctcaccggctcctggacacctcctttgcttccagtgagaggctgaacaaagctcacgtgagtccccagaagcacttcacggctgacagcgctctccgccagcagacgctgcctcgccccatgaagaccctgcagcggtccctgtctgaccctaagcccctcagccccaccgccgaagagtctgccaaagagagattctccctctaccagcaccaggggggactgggtagccaggtgtcggcgttgccacccaacagcctggtccgcaaggtgaagcggacactgcccagcccccctccagaggaggctcaccttcccctggctggccaggcctccccacagctgtatgcagccagcctgctgcagcgagggctgacggggcccaccactgtccctgctaccaaggccagcctgctccgggagctggaccgggacctgcggctggtggagcatgagtccaccaaactgcgcaagaagcaggcagagctggatgaggaggagaaggagattgacgccaagctcaagtacctggagttgggtatcacacaacgcaaagagtctttggccaaagaccggggtggccgtgactacccacccttgcgtggtcttggcgagcatcgtgactacctatcggacagtgagctcaaccagctgcggctccagggctgcaccactcccgctggccagtttgtggacttccctgccactgccgctgctcctgccaccccctctggtcccactgccttccagcagccccgcttccagcctccagccccacagtattctgcaggcagtggtgggccaactcagaacggattcccagcccaccaggcccccacctaccctggccccagcacgtacccagctcctgcctttcctcctggtgccagttacccagctgagcctggcctgccaaaccagcaggctttccgccccacaggccactatgcaggccaaacacccatgccaaccacacagagcaccctttttccagtccccgctgatagccgtgccccactgcagaagccacgccagacatcgctagccgacttggagcagaaggtgcccaccaactatgaggtgatcgccagccccgttgtgcccatgtcttcagccccatctgaaaccagctacagtggcccagcagtgagcagcggctatgagcagggcaaggtccctgaggtgccccgggctggtgaccgtggcagtgtgagccagagcccagcccccacctacccctctgactcacactataccagtctggagcagaacgttcctcgaaactacgtaatgattgatgacatcagtgaactgaccaaggacagcacctctactgctcctgatagccaacggctggagcccctggggccaggcagcagtgggcgtccagggaaggagcctggagaaccaggtgtccttgacgggcccacactgccctgctgctatgccagaggagaagaggaatctgaggaggactcatacgatccccgcgggaagggtggccacctccggagcatggagagcaatggtcgaccagccagtacccactactatggtgacagtgactacaggcatggggctcgagtagagaagtatggtccagggcccatggggcccaagcatccctccaagagcctggctccagctgccatctcctcaaagcgcagcaagcaccggaagcagggcatggagcaaaagatatccaagttctcgcctattgaagaggccaaagacgtagagtcagacctggcgtcctaccccccacctgcagtcagcagcagcctggtctctcggggcaggaagttccaggatgaaatcacctatgggctcaagaagaacgtgtatgagcagcaaaaatactatgggatgtccagccgggacgcagtggaggacgaccgcatttatggcgggagcagccggtcccgggcaccttctgcatacagtggggagaagctgtccagccacgacttcagtggctggggcaaggggtacgaaagggaacgggaggctgtggagcgacttcaaaaagcgggccccaagccctcatccctaagtatggcccacagccgggtacgaccccccatgcggagccaggcctctgaagaggagagccccgtcagtcctttggggaggccccgccctgccggagggcccctccctcccggcggggatacctgcccacagttctgctccagccactccatgcctgatgtccaggaacatgtcaaggacggacctcgggcccacgcatataagcgtgaggagggctacatcctggatgattcccattgcgtggtttccgacagcgaagcgtatcacctgggccaggaggagacggactggtttgataagccccgggatgcccgctctgaccggttcaggcaccacgggggccatgcagtttcctcctcctcccagaagcgaggccctgccaggcacagctaccatgactacgatgaaccccctgaggagggcctgtggcctcatgatgagggtggcccaggccgccatgcctcagccaaggaacaccggcacggtgaccacgggcggcactcaggccgccacactggtgaggagccgggacggcgtgctgccaaaccacacgctcgggacctgggtcgccatgaggcccggccccactctcagcccagctctgctccagctatgccgaagaagggtcagcctgggtatcccagctctgctgagtactcacagccatcccgtgcttcatccgcataccatcatgcctctgacagcaagaagggctcccggcaagcccactccgggcccgctgcactgcagtcaaaggcagaaccccaggcgcagccgcagctgcaaggtcggcaggcagctccaggaccacagcagtcacagtcaccatcatccaggcaaataccctctggggcagcatcacgccagccacagacacagcagcagcagcaaggtcttgggctgcagcccccacagcaggctctgacacaggctcggctgcagcaacagagccagccaaccacccggggctcagcccctgctgccagccagcctgcagggaagcctcagccaggccccagcacagccacaggtcctcaaccagcaggaccgccacgggcagaacagacaaatggctctaaagggacagccaaagcaccgcaacaggggagggctcctcaggcccagccaacaccaggacctggacctgcaggtgtgaaggctggagccaggcctggaggaaccccaggggctcccgccggccagccaggtgccgatggggagagcgtgttctccaagatcctccctggcggggcagccgagcaagctggcaaactgacggaagctgtctctgcttttggcaaaaaattttcctcattctggtgaccatgcccagcatggctcttgaagaaatgaagagaggtatcattgctgtggaaaaatctctggagtcagaggcctgggcgcagctctggactctgcgtataacacatctacaatctggcaaacccttggcccaaagactcaccaggtgggacgtggcaggcaggcctcagttgaggacgtgatgttttctcacagcagctgcctgggtgaagcatctgctggacaagtcggaccactggccaggggacctttgattgtctttccagagatgctgctctctgcagggcaccaccttcaaggcacagcccttgttgggagggagaaccctctccagaaaccctgccaccatggtgtcttgccgtacttcccacagccgcctttttgcggcctggccggccaggcttcccgtgcgttatacacagagtttgggcacacactgccctccctccgagatgccagaagtttttccacagccttggagaggggctttgactgagggctgggggccctgggctccgtttccttcacattccagctggcccggatccctctgtggcacagggccctgcccgtcacatgccctctgggtgacatcggagcagacctccatgtggccaggggttgggagaactttacaaacattaggacctaacactgtctcatcgctgaaataagaggccatagcaccgaaaagcagcgtgggcgccggctgaggcttctcccagcccgtgggtggcagcgtgctagcacactgccaccatctcaaagccatccccctagccatcgtgagcatcccagcggcaccgccattgtctcaaccagccggctcctcgtctgtacacctggggatttcttttgatttcaagaacagccttaatcattccagtttgatttacgtgtatacctcataaacatttttcttttgtttctctctccccctttctctcttctcttggctcactcccttgcctctccccctccaccaccaccttgtgactgatggtttggtttcctctctgctctgcccctgctcagcacagggagaatgttgacttagaagcaatagggggcagcaggccaccaagagcacaaccccagggcgaggtctggggaggcctcccagcccgcctctgtttactgtgcaattccagtcgttcttaagccatcaccagtgggtgtactcagagcagaggggccaggacttctgccagccaagggaaaggcccagagccctgtgcgggggaatgtggcactgtctatccatccggtggactgggcagcattcctccccagggctcttcccttgggggcctcctttcatctggggcacagccacaagtctcatctctaacgttctatgcaatgaaatataaaccctcaatgacaactgttaatatttaataaattccatgttatgta

SEQ ID NO: 449814 - DNA, 8298 bp, Homo sapiens
ttctggtggtgatggggcttggcagggtcacctagcttggtagagacctccgcaagctgcttctctaagctgtatctctaacagtcattttcaatgtcatttcagcacttcccggagactggaccccaaggaacccctgggtaaccagagagcagcttccccaactccgaagcaggcttctgctaccactcctggccatgagagcccccgagagacaagggcacagggaccagcaggccaggaggctgatggtccccgcaggacgctgcaggtagacagcaggacacagagatcagggcggtccccctcagtgtcaccggacagaggcagcacccccacatcaccctactccgtccctcagatcgccccccttcccagcagcacgctgtgtcccatatgcaagacttcggacctcacgtcgacccccagccagccaaacttcaacacctgcacccagtgtcacaacaaggtctgcaaccagtgtgggttcaaccccaaccctcatctcacccaggtgaaggagtggctctgtctgaactgtcagatgcagagggctctgggaatggacatgaccactgcacctcgctccaagagccagcagcagctgcactccccagccctgtctcctgcccactccccggccaaacagcccctggggaagccagaccaagagagatctcggggcccaggaggaccacagcctgggtcccgccaggctgagacagccagggccacctcagtgccggggcctgcccaagcagctgcccctccagaggtggggagggtgtctcctcagccccctcaacccaccaagccttccacagctgagcccaggccacctgcaggagaggccccggccaaaagtgccaccgcagtgcccgctgggcttggtgccactgagcagacccaggagggcctcactggtaagctcttcggccttggcgcgtcactgctaacccaggcgagcaccctcatgtctgtgcagcccgaggctgacacccagggccagcctgcccccagcaaggggacacctaagatcgtcttcaatgatgccagcaaggaggctggcccaaaacccttgggctcagggcccgggcctgggccagcacctggagccaaaactgagcctggggctagaatgggtcctggatctggacctggagccctgccgaaaactgggggaacaaccagtccaaagcatggcagagcagaacatcaggcagcatcgaaggctgctgccaagccaaagaccatgccgaaggaaagggccatctgcccactgtgccaagccgagctcaacgtgggcagcaagagcccagccaactataacacatgcaccacctgcaggctccaggtgtgcaacctgtgtggcttcaacccaacaccccacctggtggagaaaacagagtggctctgtctgaactgccaaaccaagcggctactggagggcagcctaggagagccgacccccctgccgccgcccacctcacagcagccccctgtaggggcccctcaccgtgcatctggaacatcccctctgaagcagaaagggccacaggggctgggccagccttcaggccccctgcctgccaaggccagccctctatccaccaaggccagccctctgcccagcaaggccagcccccaggccaagcccctcagggcttctgaacccagcaagaccccaagcagtgtccaggaaaagaagacccgagtccccactaaagctgagcccatgccgaagccacctccagagactaccccaacccctgcgactcctaaagtaaagagtggggtgaggagggctgaacctgccacccctgtcgtcaaggctgttccagaagcccccaagggtggggaggcggaggacctggtgggcaagccttactctcaggatgcgtctcggagcccacagagcctcagtgacacaggctattcctctgacggcatctctagctcccagagtgagatcacaggagtcgtgcagcaggaggtggaacagctggacagtgcaggggtgacagggccacatccacccagcccctccgagatccacaaggtggggagcagcatgcggcctttgctgcaggcccagggcctggccccaagtgagcggagcaagccactctccagcggtactggcgaggagcagaagcagcggccccactccttgtccatcacgcctgaggcctttgactctgatgaggagctggaggatatcctggaggaagacgaagactctgctgagtggaggcgccggagagagcagcaggacactgccgagtcctcagacgactttggcagccaattgaggcacgactatgtggaggacagcagtgagggtggcctgtcccctcttccaccccagcccccagcccgggcagcagaactgactgatgaggatttcatgcgacggcagattctcgagatgagcgccgaggaagacaacctggaggaggatgacactgccacctccgggcgtggcctggccaaacatggcacccagaaaggtggccccagacccaggcctgagcctagccaagaaccagcagcactgcccaagaggcgcctgccccacaatgccaccacgggctatgaggagctgctccctgagggaggctcagcagaggctaccgatggcagtgggaccctgcagggtgggctccgtcgcttcaagaccattgagctcaacagcacgggaagttatggtcatgagttggacctgggccaaggcccagaccccagtctggaccgggagcctgagctggagatggagagcctaacgggctcccctgaggaccgctcccgtggtgagcactcctctacattgcctgcctccacacccagctacacctcgggcacctctcccacctctctgtcctccctagaggaggacagtgacagcagccccagccgcaggcagcgtctagaagaagcaaagcagcagcgcaaggcccggcaccgctcccacgggcccctgctacccaccatcgaggactcctcagaggaggaggagctgcgggaggaagaggagctgcttcgtgagcaagagaagatgcgggaggtggagcagcagcgcatccgcagcacagcccgcaagacccggcgggacaaggaagaactgcgggcccagcggaggcgagagcgctccaagacaccacccagtaacttgtcacccatcgaggatgcctccccgacggaggagctgaggcaggcggccgagatggaggagctacaccgctcctcctgctctgagtactcaccctcaccctcccttgactctgaggctgaggccttggatggtggccctagccggctttacaagtcaggcagtgagtacaacctgcccaccttcatgtccctctactcaccaaccgagacaccctccggcagctccaccactcccagttccggacggccgctcaagagcgctgaggaggcttatgaggagatgatgcgcaaagctgagctgctccagaggcagcaaggccaggcagcaggggcccggggaccccatggcggcccctctcagcccacaggcccccggggcctgggctccttcgaatatcaagacactacagaccgtgagtatggccaggctgctcagcctgccgcagagggcacgccagccagcctgggagcagccgtgtacgaagaaatccttcagacatcacagagcatagtccgcatgcggcaggcctcctcacgagacctggcttttgctgaggacaaaaagaaggagaagcagtttctaaatgctgagagtgcatacatggacccaatgaagcaaaatggtggcccccttacccctggtaccagtcccacccagctcgctgcccctgtgtccttctctacccccacctcctcagacagcagcgggggccgagttattcccgatgtccgtgtcactcagcattttgcaaaggagactcaggaccccctcaagctgcacagctctcctgcctcccccagctcagcctccaaggagataggcatgcccttttcccagggccctgggaccccagccaccacagctgtggctccttgtccagctgggctgccacgaggatatatgactccagcctccccagcaggctccgagcgtagtccttcaccatcttccacagcccacagctatggacacagcccaaccactgcaaactatgggtcccaaactgaggatctaccccaggcccccagtggccttgctgcagctggacgagctgctagagagaagcccttgagtgcgagtgacggtgagggtggcactcctcagccttcccgggcatattcctactttgcaagctccagcccacctctctccccgtcttccccctcagagagtcccacattctcccctggcaagatgggcccaagggccacagcagagttctctacacagacgccaagtccagcccctgcctcagacatgccacggagccctggtgcccccactccatcacctatggtagcccagggtacacaaacaccacatcgacccagcacgcctcgcctggtgtggcaggagtcctctcaagaggctccctttatggtcatcacgctggcatctgacgcctccagccagaccaggatggtacatgccagtgcctccacctccccgctctgctcacctactgaaacccagcccaccacccatggctacagccagacaacacctccgagtgtgtctcagctgcccccagagccacctgggccacctggctttccacgggtgcccagtgctggtgcagatgggcccctggcactatatggctggggtgccctccctgctgagaacatctccctgtgccggatctcctctgtccctgggacgtctagggttgagccaggccccaggacccctggcactgcagtggtagacctccgtacagctgtcaagcccactcccatcatcctcactgaccagggcatggacctcacctctcttgctgtggaagcgaggaagtatggtcttgccctggatccaatcccaggacggcagtcgaccgccgtgcagcccttggttatcaacctcaatgcccaggagcataccttccttgctactgccaccaccgtgagcatcaccatggcctcgtctgtgttcatggctcaacaaaagcagcctgtggtctatggagacccctaccagagccgccttgactttggccagggtgggggtagccctgtgtgcctggcccaggtcaaacaagtagagcaggctgtccagacagccccataccgaagtgggccccggggaagacccagggaggccaagtttgccagatataacctacccaaccaagtagctcctctggccagaagagacgttttgatcactcagatgggcaccgcccagagcattggcctcaagccaggcccagtgccagagccaggtgccgagccccaccgggccacccctgcagagctgcggtcacatgctctgccaggtgccaggaagccacacacagtggtggtgcagatgggagagggcacagcaggcactgtgaccacactgctcccagaggagcctgcgggtgccctggaccttaccgggatgaggcctgagagccagctggcatgctgtgacatggtctacaagctcccctttggcagcagctgcactggcaccttccacccggcccccagtgtgcctgagaagagcatggcagatgctgccccacctggccaaagcagcagccccttctatggtccccgggaccctgagcctcctgagcccccaacctaccgggcacagggggtggtggggcctgggccccatgaggagcagaggccctacccacaaggcctgcctggtaggctgtactcctccatgtctgacaccaatttggctgaggctggcctcaactaccatgcccagaggatcgggcagctcttccagggtcctggacgagactcggctatggacctcagctcactgaagcactcctacagcctgggctttgcggatggacgctacctagggcagggcttgcagtatggctcagtcacggacctgcgtcatcctacagaccttttggctcacccgcttcccatgcggcgctatagctcagtgtcgaacatctactcagaccacaggtacggcccacggggagatgcagttggcttccaggaggccagcctggcccagtacagtgccaccacagcccgtgaaatcagtcgcatgtgcgctgccctcaactccatggaccagtatggtgggcggcatggcagtggtggtggtggccctgaccttgtgcagtaccagccccagcacgggcccgggctcagtgctccacagagtctggttcccctcagacctggactccttggtaaccccacctttccagagggccacccaagtcctgggaacttggcccagtatgggcctgcagcaggccaaggaacagcagtcagacagctgctgccgtccacagccactgtacgtgcagctgatggcatgatctactcgactatcaataccccaattgctgcaacactgcccatcaccacccagcctgcctcagtcctgcggcccatggtgcgtggtggcatgtacaggccttacgcatctggtggaatcacagccgtgccactcaccagtctgacacgtgtgcccatgattgccccccgggtacctcttggacccacagggctgtaccgctatcctgcaccaagtagatttcccattgcttccagtgttccacctgcagaagggcctgtctatctggggaaacctgctgctgccaaggcccctggggctgggggcccttcaaggccagagatgccagtaggggctgcacgggaagagcctcttcccacaaccacccctgctgccatcaaggaggctgcaggagccccagctcctgccccactagctggccagaagccaccagcagatgctgctcctgggggtggcagtggggccctcagccggccagggttcgagaaagaggaagcatcacaggaggagaggcagcggaagcaacaggagcagctgctccagctagagcgggagcgggtggagttggagaagctgcgacaacttcggctgcaagaggagctagagcgggaacgtgtggagctgcagaggcaccgtgaggaggagcagctgctggtgcagcgggagttgcaggagctgcagaccatcaagcaccatgtgctgcagcagcagcaagaggaacgccaggctcaatttgcactgcagcgggaacagctagcgcagcagcgtctgcagctggagcagatccagcagctgcagcagcagctgcagcagcagctagaggagcagaagcagcggcagaaggctccctttcctgcagcctgtgaggcacctggccgagggcctcccctagcggctgctgagttggcccagaatggccagtattggcccccccttacacatgcagccttcattgccatggcagggcctgaaggacttgggcagcctcgtgagcctgtgctgcaccggggtctccccagctctgcctcagacatgtcactgcaaacggaggagcagtgggaggccagccgtagtggcatcaagaagcggcactccatgccacgcctgcgggatgcctgtgagctagagtctgggactgagccctgtgtggtcaggaggattgccgacagcagcgtgcagacagacgatgaggatggggagagccgctacctcttgagtcggcgacgccgggcacggcggagtgctgactgcagtgtgcagacggacgacgaagacagtgctgagtgggagcagccagtgcgccgccgcaggtctcgtcttccccgccactcagactcaggctctgacagcaagcacgatgccactgcctcatcatccagtgctgctgccactgtgagggccatgagcagcgtgggcatccagaccatcagtgactgctccgtgcagacggagcctgaccagctgcccagggtctctccagccatccacatcacagctgccaccgatcccaaggtggagatcgtcaggtacatatcggcgccagagaagactgggcgtggggagagcctggcctgccagacggagccagatgggcaggcccagggtgtagccgggccgcagcttgtagggccaactgccatcagcccctacctgcctggcatccagatcgtcaccccagggcctctgggcagattgccagttccactgaaataatccagcttgaaccaagagcacacttgaagcattccttatcaaatctgtagactggagacaggatctcaaagaatttcagaatactttcttctctattaaggttggcaaattgtctaaatgtttgt

SEQ ID NO: 449815 - DNA, 879 bp, Homo sapiens
tggggtgaggagggctgaacctgccacccctgtcgtcaaggctgttccagaagcccccaagggtggggaggcggaggtcagtcccattcacttcccagagaccctagctttcagacaggacagtctatggaaaggcttgcctccctgggtggctgaggctgtaggctcaggacaggtgccttggggccacacaggagggaagggacacagtagaaggaaagtctagatgaggttctggcacgcttggagactgtgggttttacactggtgctgtgtctggcaccttgtcagatgctttgctgggttttgataccctttgatctagtaaagtttctctttgaagaccaagggctggtttgggcttgccatggaaccttcaggttattcaaggccagaaggagatagggtgggtggcgggccctaaacccttgggaaatggacagactcttccccagggtcctgggattgacagggaggattgggttcccaccacgagctttgccatggggagtcagtgtctgcttttcaccctgctgcaggacctggtgggcaagccttactctcaggatgcgtctcggagcccacagagcctcagtgacacaggctattcctctgacggcatctctagctcccagagtgagatcacaggagtcgtgcagcaggaggtggaacagctggacagtgcaggggtgacagggccacatccacccagcccctccgagatccacaaggtggggagcagcatgcggcctttgctgcaggcccagggcctggccccaagtgagcggagcaagccactctccagcggtactggcgaggagcagaagcagcggccccactccttgtccatcacgcctgaggcctttgactctgatgagg

SEQ ID NO: 449816 - DNA, 572 bp, Homo sapiens
gaaaagaatagattatgaaattagactattaatgaagacttaatttttgctcactgaatgtgtagatgtcaattccattaactaagatgggaaatatcaggtgggagggaaataagttgggaaaagtaggaaataaagggtctttgcttggaaaatgttaagtttggcatgcccattggatatccaagtggagagtttaagaagataattaaaaataaatgtttggtgctcagggcgaggtgaggactaaatcaataaatttggcatcatcaggatatggataaaatttaggcccggcgcggtggctcacgcctgtaatcccagtacttttggaggccaaggcgggcggatcatgatttcagaagattgagaccatcctggctagcacggtgaaaccctgtctgtactaaaaaaatacaaaaaattagccaggctttggtgacgggctgtagtcccagctgctccggaggctgaggtaggagaatggcgtgaacctgggaggcggcgcttgcagtgagccgagattgcgccgctgcactccagcctgggctacacagagagacttcgtctca

SEQ ID NO: 449817 - DNA, 1497 bp, Homo sapiens
gattaatgacctacaaaaagacatcgaaggcagtaggaaaagagaatctgagctgctgctgtttacagaaaggctcactagtaagaatgcacagcttcagtctgaatccaattctttgcagtcacaatttgataaagtttcctgtagtgaaagtcagttacaaagccagtgtggacaaatgaaacagacaaatattaatttggaaagtaggttgttgaaagaggaagaactgcgaaaagaggaagtccaaactctgcaagctgaactcgcttgtagacaaacagaagttaaagcattgagtacccaggtagaagaattaaaagatgagttagtaactcagagacgtaaacatgcctctagtatcaaggatctcaccaaacaacttcagcaagcacgaagaaaattagatcaggttgagagtggaagctatgacaaagaagtcagcagcatgggaagtcgttctagttcatcagggtccctgaatgctcgaagcagtgcagaagatcgatctccagaaaatactgggtcctcagtagctgtggataactttccacaagtagataaggccatgttgattgagagaatagttaggctgcaaaaagcacatgcccggaaaaatgaaaagatagaatttatggaggaccacatcaaacaactggtggaagaaattaggaaaaaaacaaaaataattcaaagttatattttacgagaagaatcaggcacactttcttcagaggcatctgattttaacaaagttcatttaagtagacggggtggcatcatggcatctttatatacatcccatccagctgacaatggattaacattggagctctctttggaaatcaaccgaaaattacaggctgttttggaggatacgttactaaaaaatattactttgaaggaaaatctacaaacacttggaacagaaatagaacgtcttattaaacaccagcatgaactagaacagaggacaaagaaaacctaaaacaagcctcttgctcagtaaagagacaaaagccacacaggagtaggtgccactgacctctattgttggagactttgttccactttttgtttcagccagtaaaaatattgttttgcttcatctgtacacaaaaaaatacccttttacaatatgaatgcattgctgtatatactgtaagactgaaagctttgatgaaatttgtttttgtatggtgcaatatgacagcctgtcattgaatctaaacaacttaatttgcttgtattcataagaagtgttgaacattacaagggcttttataaaaaaccctttgttcatatttcttccctttaaaatatgtaatgtcaaaaatgactcaccttttaaaaattatgcatgaaaacaggtggtaaacattcagtaatacgctatttctccaacatcaagacaactaaaacaaatgataaaaatgtttatttttacactccagcatatcgggtgagttttagggatgtgtatgaatatttaaatct

SEQ ID NO: 449818 - DNA, 513 bp, Homo sapiens
gattaatgacctacaaaaagacatcgaaggcagtaggaaaagagaatctgagctgctgctgtttacagaaaggctcactagtaagaatgcacagcttcagtctgaatccaattctttgcagtcacaatttgataaagtttcctgtagtgaaagtcagttacaaagccagtgtggacaaatgaaacagacaaatattaatttggaaagtaggttgttgaaagaggaagaactgcgaaaagaggaagtccaaactctgcaagctgaactcgcttgtagacaaacagaagttaaagcattgagtacccaggtagaagaattaaaagatgagttagtaactcagagacgtaaacatgcctctagtatcaaggatctcaccaaacaacttcagcaaggtataaaattcttccacacttagaccatgaatgtgtttgtttcttttaatcattaggattttattttttgtgattctgccacattgattgaagctgtatgttttctttgttaatattagta

SEQ ID NO: 449819 - DNA, 695 bp, Homo sapiens
tgttagtcttttatatatattagaacatatgaaaaatagaaatttaaaataatctatttttaaatatcagtataaatagcagttctgatatcttcttttacattcctgtgatttcttttgtgctgcatctaggctaccggcatctagggtgcagatacccgagatgcgtcctctgacttggaaatcgttgcgacttaactcttcacctgggtttcaagaaacagaccccagaaagttataaattacccagacataacaattgactgctgaactggattccagatttctttcttttaaaaagtcatacagtcattgggtgtctgtgctatatgcttgggatacaaaaataaataagacacgtatttcaacctcctattctctactatttctcacggctttatttgtgttaaaatagggtgaaatatagtaataagctaaaagggacttagcatttacttaatacaaatatattcagatatttgccatagagtttagtttgtttttatagatgtaattgaagggaaatttggaagaaatttctggtactgtaaggaacttctaaatctttcaatactttaaaaagttaactccactgtaattaagtgatgccagtgtcagttataatgttgtttctgtatattttgtacttgacttttacatttccaaatgacattttatatgaatgacatagccct

SEQ ID NO: 449820 - DNA, 346 bp, Homo sapiens
taattaagtgatgccagtgtcagttataatgttgtttctgtatattttgtacttgacttttacatttccaaatgacattttatatgaatgacatagccctctgcctaaagtatgtattcaagaactttctcttgtctatgccatttttgcctcagtgattttagcaattaaagtcagagatggtaggagcaaatggtcctgataattgtgacgaataatcttctttttcctatagcacgaagaaaattagatcaggttgagagtggaagctatgacaaagaagtcagcagcatgggaagtcgttctagttcatcaggtaaaaaactagtggctctagttgttattt

SEQ ID NO: 449821 - DNA, 955 bp, Homo sapiens
gattaatgacctacaaaaagacatcgaaggcagtaggaaaagagaatctgagctgctgctgtttacagaaaggctcactagtaagaatgcacagcttcagtctgaatccaattctttgcagtcacaatttgataaagtttcctgtagtgaaagtcagttacaaagccagtgtggacaaatgaaacagacaaatattaatttggaaagtaggttgttgaaagaggaagaactgcgaaaagaggaagtccaaactctgcaagctgaactcgcttgtagacaaacagaagttaaagcattgagtacccaggtagaagaattaaaagatgagttagtaactcagagacgtaaacatgcctctagtatcaaggatctcaccaaacaacttcagcaaggctaccggcatctagggtgcagatacccgagatgcgtcctctgacttggaaatcgttgcgacttaactcttcacctgggtttcaagaaacagaccccagaaagttataaattacccagacataacaattgactgctgaactggattccagatttctttcttttaaaaagtcatacagtcattgggtgtctgtgctatatgcttgggatacaaaaataaataagacacgtatttcaacctcctattctctactatttctcacggctttatttgtgttaaaatagggtgaaatatagtaataagctaaaagggacttagcatttacttaatacaaatatattcagatatttgccatagagtttagtttgtttttatagatgtaattgaagggaaatttggaagaaatttctggtactgtaaggaacttctaaatctttcaatactttaaaaagttaactccactgtaattaagtgatgccagtgtcagttataatgttgtttctgtatattttgtacttgacttttacatttccaaatgacattttatatgaatgacatagccct

SEQ ID NO: 449822 - DNA, 860 bp, Homo sapiens
gctttttcgcaacgggtttgccgccagaacacaggtgtcgtgaaaactacccctaaaagccaaaatgggaaaggaaaagactcatatcaacattgtcgtcattggacacgtagattcgggcaagtccaccactactggccatctgatctataaatgcggtggcatcgacaaaagaaccattgaaaaatttgagaaggaggctgctgagatgggaaagggctccttcaagtatgcctgggtcttggataaactgaaagcgcctgcctctccaggatgtctacaaaattggtggtattggtactgttcctgttggccgagtggagactggtgttctcaaacccggtatggtggtcacctttgctccagtcaacgttacaacgcggacatgttaacacacaacaaacatcgccccctggtcgaaaatgcaccatgaagctttgagtgaagctctttccttgggcgggaacccacaaacaattttggggttttgggggggggggggcccccctttttttttttccccccacaacacaaacaaaacgttttttgtggggggggcgcccatttcttttcccgcccgccagaatacaaaacacacaaccgtgcgggcggtgcgtcccaacacaacaccacacccacaaccaccccgtctatcttgttgttggtgggggaggggccaccacattatcattggcgggggaccggcgccacgactattattactccccccccccgctcctcttacttccttgctcgcggggggggggcaccatatcctacgtctctcccccccacccctgtcacgaacaaatccctgcactcacgatacccgcgtgtcgcttatgtgacgtttagtatag

SEQ ID NO: 449823 - DNA, 1760 bp, Homo sapiens
gctttttcgcaacgggtttgccgccagaacacaggtgtcgtgaaaactacccctaaaagccaaaatgggaaaggaaaagactcatatcaacattgtcgtcattggacacgtagattcgggcaagtccaccactactggccatctgatctataaatgcggtggcatcgacaaaagaaccattgaaaaatttgagaaggaggctgctgagatgggaaagggctccttcaagtatgcctgggtcttggataaactgaaagctgagcgtgaacgtggtatcaccattgatatctccttgtggaaatttgagaccagcaagtactatgtgactatcattgatgccccaggacacagagactttatcaaaaacatgattacagggacatctcaggctgactgtgctgtcctgattgttgctgctggtgttggtgaatttgaagctggtatctccaagaatgggcagacccgagagcatgcccttctggcttacacactgggtgtgaaacaactaattgtcggtgttaacaaaatggattccactgagccaccctacagccagaagagatatgaggaaattgttaaggaagtcagcacttacattaagaaaattggctacaaccccgacacagtagcatttgtgccaatttctggttggaatggtgacaacatgctggagccaagtgctaacatgccttggttcaagggatggaaagtcacccgtaaggatggcaatgccagtggaaccacgctgcttgaggctctggactgcatcctaccaccaactcgtccaactgacaagcccttgcgcctgcctctccaggatgtctacaaaattggtggtattggtactgttcctgttggccgagtggagactggtgttctcaaacccggtatggtggtcacctttgctccagtcaacgttacaacggaagtaaaatctgtcgaaatgcaccatgaagctttgagtgaagctcttcctggggacaatgtgggcttcaatgtcaagaatgtgtctgtcaaggatgttcgtcgtggcaacgttgctggtgacagcaaaaatgacccaccaatggaagcagctggcttcactgctcaggtgattatcctgaaccatccaggccaaataagcgccggctatgcccctgtattggattgccacacggctcacattgcatgcaagtttgctgagctgaaggaaaagattgatcgccgttctggtaaaaagctggaagatggccctaaattcttgaagtctggtgatgctgccattgttgatatggttcctggcaagcccatgtgtgttgagagcttctcagactatccacctttgggtcgctttgctgttcgtgatatgagacagacagttgcggtgggtgtcatcaaagcagtggacaagaaggctgctggagctggcaaggtcaccaagtctgcccagaaagctcagaaggctaaatgaatattatccctaatacctgccaccccactcttaatcagtggtggaagaacggtctcagaactgtttgtttcaattggccatttaagtttagtagtaaaagactggttaatgataacaatgcatcgtaaaaccttcagaaggaaaggagaatgttttgtggaccactttggttttcttttttgcgtgtggcagttttaagttattagtttttaaaatcagtactttttaatggaaacaacttgaccaaaaatttgtcacagaattttgagacccattaaaaaagttaaatgagaaaaaaaataataat

SEQ ID NO: 449824 - DNA, 1688 bp, Homo sapiens
ctgccggtgcgactgtgagaggatcccctccaagacccaggcatacttgaaggagccctttcctggccatctgatctataaatgcggtggcatcgacaaaagaaccattgaaaaatttgagaaggaggctgctgagatgggaaagggctccttcaagtatgcctgggtcttggataaactgaaagctgagcgtgaacgtggtatcaccattgatatctccttgtggaaatttgagaccagcaagtactatgtgactatcattgatgccccaggacacagagactttatcaaaaacatgattacagggacatctcaggctgactgtgctgtcctgattgttgctgctggtgttggtgaatttgaagctggtatctccaagaatgggcagacccgagagcatgcccttctggcttacacactgggtgtgaaacaactaattgtcggtgttaacaaaatggattccactgagccaccctacagccagaagagatatgaggaaattgttaaggaagtcagcacttacattaagaaaattggctacaaccccgacacagtagcatttgtgccaatttctggttggaatggtgacaacatgctggagccaagtgctaacatgccttggttcaagggatggaaagtcacccgtaaggatggcaatgccagtggaaccacgctgcttgaggctctggactgcatcctaccaccaactcgtccaactgacaagcccttgcgcctgcctctccaggatgtctacaaaattggtggtattggtactgttcctgttggccgagtggagactggtgttctcaaacccggtatggtggtcacctttgctccagtcaacgttacaacggaagtaaaatctgtcgaaatgcaccatgaagctttgagtgaagctcttcctggggacaatgtgggcttcaatgtcaagaatgtgtctgtcaaggatgttcgtcgtggcaacgttgctggtgacagcaaaaatgacccaccaatggaagcagctggcttcactgctcaggtgattatcctgaaccatccaggccaaataagcgccggctatgcccctgtattggattgccacacggctcacattgcatgcaagtttgctgagctgaaggaaaagattgatcgccgttctggtaaaaagctggaagatggccctaaattcttgaagtctggtgatgctgccattgttgatatggttcctggcaagcccatgtgtgttgagagcttctcagactatccacctttgggtcgctttgctgttcgtgatatgagacagacagttgcggtgggtgtcatcaaagcagtggacaagaaggctgctggagctggcaaggtcaccaagtctgcccagaaagctcagaaggctaaatgaatattatccctaatacctgccaccccactcttaatcagtggtggaagaacggtctcagaactgtttgtttcaattggccatttaagtttagtagtaaaagactggttaatgataacaatgcatcgtaaaaccttcagaaggaaaggagaatgttttgtggaccactttggttttcttttttgcgtgtggcagttttaagttattagtttttaaaatcagtactttttaatggaaacaacttgaccaaaaatttgtcacagaattttgagacccattaaaaaagttaaatgagaaaaaaaataataat

SEQ ID NO: 449825 - DNA, 1722 bp, Homo sapiens
gctttttcgcaacgggtttgccgccagaacacaggtgtcgtgaaaactacccctaaaagccaaaatgggaaaggaaaagactcatatcaacattgtcgtcattggacacgtagattcgggcaagtccaccactactggccatctgatctataaatgcggtggcatcgacaaaagaaccattgaaaaatttgagaaggaggctgctgagatgggaaagggctccttcaagtatgcctgggtcttggataaactgaaagctgagcgtgaacgtggtatcaccattgatatctccttgtggaaatttgagaccagcaagtactatgtgactatcattgatgccccaggacacagagactttatcaaaaacatgattacagggacatctcaggctgactgtgctgtcctgattgttgctgctggtgttggtgaatttgaagctggtatctccaagaatgggcagacccgagagcatgcccttctggcttacacactgggtgtgaaacaactaattgtcggtgttaacaaaatggattccactgagccaccctacagccagaagagatatgaggaaattgttaaggaagtcagcacttacattaagaaaattggctacaaccccgacacagtagcatttgtgccaatttctggttggaatggtgacaacatgctggagccaagtgctaacatgccttggttcaagggatggaaagtcacccgtaaggatggcaatgccagtggaaccacgctgcttgaggctctggactgcatcctaccaccaactcgtccaactgacaagcccttgcgcctgcctctccaggatgtctacaaaattggtggtattggtactgttcctgttggccgagtggagactggtgttctcaaacccggtatggtggtcacctttgctccagtcaacgttacaacggaagtaaaatctgtcgaaatgcaccatgaagctttgagtgaagctcttcctggggacaatgtgggcttcaatgtcaagaatgtgtctgtcaaggatgttcgtcgtggcaacgttgctggtgacagcaaaaatgacccaccaatggaagcagctggcttcactgctcaggtgattatcctgaaccatccaggccaaataagcgccggctatgcccctgtattggattgccacacggctcacattgcatgcaagtttgctgagctgaaggaaaagattgatcgccgttctggtaaaaagctggaagatggccctaaattcttgaagtctggtgatgctgccattgttgatatggttcctggcaagcccatgtgtgttgagagcttctcagactatccacctttgggtcgctttgctgttcgtgatatgagacagacagttgcggtgggtgtcatcaaagcagtggacaagaaggctgctggagctggcaaggtcaccaagtctgcccagaaagctcagaaggctaaatgaatattatccctaatacctgccaccccactcttaatcagtggtggaagaacggtctcagaactgtttgtttcaattggccatttaagtttagtagtaaaagactggttaatgataacaatgcatcgtaatagataggtataatggatgaatagtatcttgttggacctatcgtttgagtttgtctgttgattgtcgtagtgagacagattgttaaaggttgagttatgttttatatataattctaagtacattttcttaacgtggaaacc

SEQ ID NO: 449826 - DNA, 1523 bp, Homo sapiens
gctttttcgcaacgggtttgccgccagaacacaggtgtcgtgaaaactacccctaaaagccaaaatgggaaaggaaaagactcatatcaacattgtcgtcattggacacgtagattcgggcaagtccaccactactggccatctgatctataaatgcggtggcatcgacaaaagaaccattgaaaaatttgagaaggaggctgctgagatgggaaagggctccttcaagtatgcctgggtcttggataaactgaaagctgagcgtgaacgtggtatcaccattgatatctccttgtggaaatttgagaccagcaagtactatgtgactatcattgatgccccaggacacagagactttatcaaaaacatgattacagggacatctcaggctgactgtgctgtcctgattgttgctgctggtgttggtgaatttgaagctggtatctccaagaatgggcagacccgagagcatgcccttctggcttacacactgggtgtgaaacaactaattgtcggtgttaacaaaatggattccactgagccaccctacagccagaagagatatgaggaaattgttaaggaagtcagcacttacattaagaaaattggctacaaccccgacacagtagcatttgtgccaatttctggttggaatggtgacaacatgctggagccaagtgctaacatgccttggttcaagggatggaaagtcacccgtaaggatggcaatgccagtggaaccacgctgcttgaggctctggactgcatcctaccaccaactcgtccaactgacaagcccttgcgcctgcctctccaggatgtctacaaaattggtggtattggtactgttcctgttggccgagtggagactggtgttctcaaacccggtatggtggtcacctttgctccagtcaacgttacaacggaagtaaaatctgtcgaaatgcaccatgaagctttgagtgaagctcttcctggggacaatgtgggcttcaatgtcaagaatgtgtctgtcaaggatgttcgtcgtggcaacgttgctggtgacagcaaaaatgacccaccaatggaagcagctggcttcactgctcaggtgattatcctgaaccatccaggccaaataagcgccggctatgcccctgtattggattgccacacggctcacattgcatgcaagtttgctgagctgaaggaaaagattgatcgccgttctggtaaaaagctggaagatggccctaaattcttgaagtctggtgatgctgccattgttgatatggttcctggcaagcccatgtgtgttgagagcttctcagactatccacctttgggtcgctttgctgttcgtgatatgagacagacagttgcggttatcagactataccaccgaaaaatctaaaaatttcttgttaagaaattaaattaggccaggcgtagtggctcacacctgtaatccgagcactttgggaggccgaggtgggcggatcatctgaggtctggagttcgagatcagcctggccaacatg

SEQ ID NO: 449827 - DNA, 1423 bp, Homo sapiens
gctttttcgcaacgggtttgccgccagaacacaggtgtcgtgaaaactacccctaaaagccaaaatgggaaaggaaaagactcatatcaacattgtcgtcattggacacgtagattcgggcaagtccaccactactggccatctgatctataaatgcggtggcatcgacaaaagaaccattgaaaaatttgagaaggaggctgctgagatgggaaagggctccttcaagtatgcctgggtcttggataaactgaaagctgagcgtgaacgtggtatcaccattgatatctccttgtggaaatttgagaccagcaagtactatgtgactatcattgatgccccaggacacagagactttatcaaaaacatgattacagggacatctcaggctgactgtgctgtcctgattgttgctgctggtgttggtgaatttgaagctggtatctccaagaatgggcagacccgagagcatgcccttctggcttacacactgggtgtgaaacaactaattgtcggtgttaacaaaatggattccactgagccaccctacagccagaagagatatgaggaaattgttaaggaagtcagcacttacattaagaaaattggctacaaccccgacacagtagcatttgtgccaatttctggttggaatggtgacaacatgctggagccaagtgctaacatgccttggttcaagggatggaaagtcacccgtaaggatggcaatgccagtggaaccacgctgcttgaggctctggactgcatcctaccaccaactcgtccaactgacaagcccttgcgcctgcctctccaggatgtctacaaaattggtggtattggtactgttcctgttggccgagtggagactggtgttctcaaacccggtatggtggtcacctttgctccagtcaacgttacaacggaagtaaaatctgtcgaaatgcaccatgaagctttgagtgaagctcttcctggggacaatgtgggcttcaatgtcaagaatgtgtctgtcaaggatgttcgtcgtggcaacgttgctggtgacagcaaaaatgacccaccaatggaagcagctggcttcactgctcaggtgattatcctgaaccatccaggccaaataagcgccggctatgcccctgtattggattgccacacggctcacattgcatgcaagtttgctgagctgaaggaaaagattgatcgccgttctggtaaaaagctggaagatggccctaaattcttgaagtctggtgatgctgccattgttgatatggttcctggcaagcccatgtgtgttgagagcttctcagactatccacctttgggtcgctttgctgttcgtgatatgagacagacagttgcggtacccaaaggtggatagtctggcaagcccatgtgtgttgagagcttctcctcgtgc

SEQ ID NO: 449828 - DNA, 1706 bp, Homo sapiens
gctttttcgcaacgggtttgccgccagaacacaggtgtcgtgaaaactacccctaaaagccaaaatgggaaaggaaaagactcatatcaacattgtcgtcattggacacgtagattcgggcaagtccaccactactggccatctgatctataaatgcggtggcatcgacaaaagaaccattgaaaaatttgagaaggaggctgctgagatgggaaagggctccttcaagtatgcctgggtcttggataaactgaaagctgagcgtgaacgtggtatcaccattgatatctccttgtggaaatttgagaccagcaagtactatgtgactatcattgatgccccaggacacagagactttatcaaaaacatgattacagggacatctcaggctgactgtgctgtcctgattgttgctgctggtgttggtgaatttgaagctggtatctccaagaatgggcagacccgagagcatgcccttctggcttacacactgggtgtgaaacaactaattgtcggtgttaacaaaatggattccactgagccaccctacagccagaagagatatgaggaaattgttaaggaagtcagcacttacattaagggtgacaacatgctggagccaagtgctaacatgccttggttcaagggatggaaagtcacccgtaaggatggcaatgccagtggaaccacgctgcttgaggctctggactgcatcctaccaccaactcgtccaactgacaagcccttgcgcctgcctctccaggatgtctacaaaattggtggtattggtactgttcctgttggccgagtggagactggtgttctcaaacccggtatggtggtcacctttgctccagtcaacgttacaacggaagtaaaatctgtcgaaatgcaccatgaagctttgagtgaagctcttcctggggacaatgtgggcttcaatgtcaagaatgtgtctgtcaaggatgttcgtcgtggcaacgttgctggtgacagcaaaaatgacccaccaatggaagcagctggcttcactgctcaggtgattatcctgaaccatccaggccaaataagcgccggctatgcccctgtattggattgccacacggctcacattgcatgcaagtttgctgagctgaaggaaaagattgatcgccgttctggtaaaaagctggaagatggccctaaattcttgaagtctggtgatgctgccattgttgatatggttcctggcaagcccatgtgtgttgagagcttctcagactatccacctttgggtcgctttgctgttcgtgatatgagacagacagttgcggtgggtgtcatcaaagcagtggacaagaaggctgctggagctggcaaggtcaccaagtctgcccagaaagctcagaaggctaaatgaatattatccctaatacctgccaccccactcttaatcagtggtggaagaacggtctcagaactgtttgtttcaattggccatttaagtttagtagtaaaagactggttaatgataacaatgcatcgtaaaaccttcagaaggaaaggagaatgttttgtggaccactttggttttcttttttgcgtgtggcagttttaagttattagtttttaaaatcagtactttttaatggaaacaacttgaccaaaaatttgtcacagaattttgagacccattaaaaaagttaaatgagaaaaaaaataataat

SEQ ID NO: 449829 - DNA, 1700 bp, Homo sapiens
gctttttcgcaacgggtttgccgccagaacacaggtgtcgtgaaaactacccctaaaagccaaaatgggaaaggaaaagactcatatcaacattgtcgtcattggacacgtagattcgggcaagtccaccactactggccatctgatctataaatgcggtggcatcgacaaaagaaccattgaaaaatttgagaaggaggctgctgagatgggaaagggctccttcaagtatgcctgggtcttggataaactgaaagctgagcgtgaacgtggtatcaccattgatatctccttgtggaaatttgagaccagcaagtactatgtgactatcattgatgccccaggacacagagactttatcaaaaacatgattacagggacatctcaggctgactgtgctgtcctgattgttgctgctggtgttggtgaatttgaagctggtatctccaagaatgggcagacccgagagcatgcccttctggcttacacactgggtgtgaaacaactaattgtcggtgttaacaaaatggattccactgagccaccctacagccagaagagatatgaggaaattgttaaggaagtcagcacttacattaagaaaattggctacaaccccgacacagtagcatttgtgccaatttctggttggaatggtgacaacatgctggagccaagtgctaacatgccttggttcaagggatggaaagtcacccgtaaggatggcaatgccagtggaaccacgctgcttgaggctctggactgcatcctaccaccaactcgtccaactgacaagcccttgcgcctgcctctccaggatgtctacaaaattggtggtattggtactgttcctgttggccgagtggagactggtgttctcaaacccggtatggtggtcacctttgctccagtcaacgttacaacggaagtaaaatctgtcgaaatgcaccatgaagctttgagtgaagctcttcctggggacaatgtgggcttcaatgtcaagaatgtgtaagcagctggcttcactgctcaggtgattatcctgaaccatccaggccaaataagcgccggctatgcccctgtattggattgccacacggctcacattgcatgcaagtttgctgagctgaaggaaaagattgatcgccgttctggtaaaaagctggaagatggccctaaattcttgaagtctggtgatgctgccattgttgatatggttcctggcaagcccatgtgtgttgagagcttctcagactatccacctttgggtcgctttgctgttcgtgatatgagacagacagttgcggtgggtgtcatcaaagcagtggacaagaaggctgctggagctggcaaggtcaccaagtctgcccagaaagctcagaaggctaaatgaatattatccctaatacctgccaccccactcttaatcagtggtggaagaacggtctcagaactgtttgtttcaattggccatttaagtttagtagtaaaagactggttaatgataacaatgcatcgtaaaaccttcagaaggaaaggagaatgttttgtggaccactttggttttcttttttgcgtgtggcagttttaagttattagtttttaaaatcagtactttttaatggaaacaacttgaccaaaaatttgtcacagaattttgagacccattaaaaaagttaaatgagaaaaaaaataataat

SEQ ID NO: 449830 - DNA, 1727 bp, Homo sapiens
gctttttcgcaacgggtttgccgccagaacacaggtgtcgtgaaaactacccctaaaagccaaaatgggaaaggaaaagactcatatcaacattgtcgtcattggacacgtagattcgggcaagtccaccactactggccatctgatctataaatgcggtggcatcgacaaaagaaccattgaaaaatttgagaaggaggctgctgagatgggaaagggctccttcaagtatgcctgggtcttggataaactgaaagctgagcgtgaacgtggtatcaccattgatatctccttgtggaaatttgagaccagcaagtactatgtgactatcattgatgccccaggacacagagactttatcaaaaacatgattacagggacatctcaggctgactgtgctgtcctgattgttgctgctggtgttggtgaatttgaagctggtatctccaagaatgggcagacccgagagcatgcccttctggcttacacactgggtgtgaaacaactaattgtcggtgttaacaaaatggattccactgagccaccctacagccagaagagatatgaggaaattgttaaggaagtcagcacttacattaagaaaattggctacaaccccgacacagtagcatttgtgccaatttctggttggaatggtgacaacatgctggagccaagtgctaacatgccttggttcaagggatggaaagtcacccgtaaggatggcaatgccagtggaaccacgctgcttgaggctctggactgcatcctaccaccaactcgtccaactgacaagcccttgggtattggtactgttcctgttggccgagtggagactggtgttctcaaacccggtatggtggtcacctttgctccagtcaacgttacaacggaagtaaaatctgtcgaaatgcaccatgaagctttgagtgaagctcttcctggggacaatgtgggcttcaatgtcaagaatgtgtctgtcaaggatgttcgtcgtggcaacgttgctggtgacagcaaaaatgacccaccaatggaagcagctggcttcactgctcaggtgattatcctgaaccatccaggccaaataagcgccggctatgcccctgtattggattgccacacggctcacattgcatgcaagtttgctgagctgaaggaaaagattgatcgccgttctggtaaaaagctggaagatggccctaaattcttgaagtctggtgatgctgccattgttgatatggttcctggcaagcccatgtgtgttgagagcttctcagactatccacctttgggtcgctttgctgttcgtgatatgagacagacagttgcggtgggtgtcatcaaagcagtggacaagaaggctgctggagctggcaaggtcaccaagtctgcccagaaagctcagaaggctaaatgaatattatccctaatacctgccaccccactcttaatcagtggtggaagaacggtctcagaactgtttgtttcaattggccatttaagtttagtagtaaaagactggttaatgataacaatgcatcgtaaaaccttcagaaggaaaggagaatgttttgtggaccactttggttttcttttttgcgtgtggcagttttaagttattagtttttaaaatcagtactttttaatggaaacaacttgaccaaaaatttgtcacagaattttgagacccattaaaaaagttaaatgagaaaaaaaataataat

SEQ ID NO: 449831 - DNA, 1258 bp, Homo sapiens
gctttttcgcaacgggtttgccgccagaacacaggtgtcgtgaaaactacccctaaaagccaaaatgggaaaggaaaagactcatatcaacattgtcgtcattggacacgtagattcgggcaagtccaccactactggccatctgatctataaatgcggtggcatcgacaaaagaaccattgaaaaatttgagaaggaggctgctgagatgggaaagggctccttcaagtatgcctgggtcttggataaactgaaagctgagcgtgaacgtggtatcaccattgatatctccttgtggaaatttgagaccagcaagtactatgtgactatcattgatgccccaggacacagagactttatcaaaaacatgattacagggacatctcaggctgactgtgctgtcctgattgttgctgctggtgttggtgaatttgaagctggtatctccaagaatgggcagacccgagagcatgcccttctggcttacacactgggtgtgaaacaactaattgtcggtgttaacaaaatggattccactgagccaccctacagccagaagagatatgaggaaattgttaaggaagtcagcacttacattaagaaaattggctacaaccccgacacagtagcatttgtgccaatttctggttggaatggtgacaacatgctggagccaagtgctaacatgccttggttcaagggatggaaagtcacccgtaaggatggcaatgccagtggaaccacgctgcttgaggctctggactgcatcctaccaccaactcgtccaactgacaagcccttgcgcctgcctctccaggatgtctacaaaattggtggtattggtactgttcctgttggccgagtggagactggtgttctcaaacccggtatggtggtcacctttgctccagtcaacgttacaacggaagtaaaatctgtcgaaatgcaccatgaagctttgagtgaagctcttcctggggacaatgtgggcttcaatgtcaagaatgtgtctgtcaaggatgttcgtcgtggcaacgttgctggtgacagcaaaaatgacccaccaatggaagcagctggcttcactgctcaggtgattatcctgaaccatccaggccaaataagcgccggctatgcccctgtattggagcaagggtcaatgcatgaagttgtgagtgaagaaagatgtggcggttgtaaagtgaatggcttatttgaattgggagtgcatgtgagatgtcgggagccagttgttgga

SEQ ID NO: 449832 - DNA, 1619 bp, Homo sapiens
attctagacagtatcatttattgggaacaacatacattatcagcatgttgttgatatttggataatgaacaaaatcttggcttgtccattgctgacaacgaactgtatttagtgatcattttagatagtgatattatagcattcatctgtgtgtaaatatatttcatatagggaaggtagattctcgatctgtaatccttatggttcttagttggaagaacaaaattgggagtgtgctagtttgctgtgatgttatgaatacgagtttctactttattgggaaacatttgcaaaattaaatactgtatcactgtatgacatttaaaaatgttaatagaactggttagtattagaaagcagatcagtttcccaaaaattctaaagagcaagagtcttatgtagttgcttgtataatacgcctaggctgattattttaagatctgagacttccatggtggccctagttaggcatttaagcgactaccattgtgaccgcgtgctggtgtaataaagaagcttacgacatggtatcaactgtttgataccaaatgtatagtccctaaccactttttattatatgttgccaaatggtcgacattcgatgtgtgagccttccgattatagcataacatataaacactagagtgtatctagcaaaagacgcctgcctctccaggatgtctacaaaattggtggtattggtactgttcctgttggccgagtggagactggtgttctcaaacccggtatggtggtcacctttgctccagtcaacgttacaacggaagtaaaatctgtcgaaatgcaccatgaagctttgagtgaagctcttcctggggacaatgtgggcttcaatgtcaagaatgtgtctgtcaaggatgttcgtcgtggcaacgttgctggtgacagcaaaaatgacccaccaatggaagcagctggcttcactgctcaggtgattatcctgaaccatccaggccaaataagcgccggctatgcccctgtattggattgccacacggctcacattgcatgcaagtttgctgagctgaaggaaaagattgatcgccgttctggtaaaaagctggaagatggccctaaattcttgaagtctggtgatgctgccattgttgatatggttcctggcaagcccatgtgtgttgagagcttctcagactatccacctttgggtcgctttgctgttcgtgatatgagacagacagttgcggtgggtgtcatcaaagcagtggacaagaaggctgctggagctggcaaggtcaccaagtctgcccagaaagctcagaaggctaaatgaatattatccctaatacctgccaccccactcttaatcagtggtggaagaacggtctcagaactgtttgtttcaattggccatttaagtttagtagtaaaagactggttaatgataacaatgcatcgtaaaaccttcagaaggaaaggagaatgttttgtggaccactttggttttcttttttgcgtgtggcagttttaagttattagtttttaaaatcagtactttttaatggaaacaacttgaccaaaaatttgtcacagaattttgagacccattaaaaaagttaaatgagaaaaaaaataataat

SEQ ID NO: 449833 - DNA, 1060 bp, Homo sapiens
gctttttcgcaacgggtttgccgccagaacacaggtgtcgtgaaaactacccctaaaagccaaaatgggaaaggaaaagactcatatcaacattgtcgtcattggacacgtagattcgggcaagtccaccactacggtattggtactgttcctgttggccgagtggagactggtgttctcaaacccggtatggtggtcacctttgctccagtcaacgttacaacggaagtaaaatctgtcgaaatgcaccatgaagctttgagtgaagctcttcctggggacaatgtgggcttcaatgtcaagaatgtgtctgtcaaggatgttcgtcgtggcaacgttgctggtgacagcaaaaatgacccaccaatggaagcagctggcttcactgctcaggtgattatcctgaaccatccaggccaaataagcgccggctatgcccctgtattggattgccacacggctcacattgcatgcaagtttgctgagctgaaggaaaagattgatcgccgttctggtaaaaagctggaagatggccctaaattcttgaagtctggtgatgctgccattgttgatatggttcctggcaagcccatgtgtgttgagagcttctcagactatccacctttgggtcgctttgctgttcgtgatatgagacagacagttgcggtgggtgtcatcaaagcagtggacaagaaggctgctggagctggcaaggtcaccaagtctgcccagaaagctcagaaggctaaatgaatattatccctaatacctgccaccccactcttaatcagtggtggaagaacggtctcagaactgtttgtttcaattggccatttaagtttagtagtaaaagactggttaatgataacaatgcatcgtaaaaccttcagaaggaaaggagaatgttttgtggaccactttggttttcttttttgcgtgtggcagttttaagttattagtttttaaaatcagtactttttaatggaaacaacttgaccaaaaatttgtcacagaattttgagacccattaaaaaagttaaatgagaaaaaaaataataat

SEQ ID NO: 449834 - DNA, 1512 bp, Homo sapiens
  misc_feature (837)..(837): n is a, c, g, or t
  misc_feature (839)..(839): n is a, c, g, or t
gctttttcgcaacgggtttgccgccagaacacaggtgtcgtgaaaactacccctaaaagccaaaatgggaaaggaaaagactcatatcaacattgtcgtcattggacacgtagattcgggcaagtccaccactactggccatctgatctataaatgcggtggcatcgacaaaagaaccattgaaaaatttgagaaggaggctgctgagatgggaaagggctccttcaagtatgcctgggtcttggataaactgaaagctgagcgtgaacgtggtatcaccattgatatctccttgtggaaatttgagaccagcaagtactatgtgactatcattgatgccccaggacacagagactttatcaaaaacatgattacagggacatctcaggctgactgtgctgtcctgattgttgctgctggtgttggtgaatttgaagctggtatctccaagaatgggcagacccgagagcatgcccttctggcttacacactgggtgtgaaacaactaattgtcggtgttaacaaaatggattccactgagccaccctacagccagaagagatatgaggaaattgttaaggaagtcagcacttacattaagaaaattggctacaaccccgacacagtagcatttgtgccaatttctggttggaatggtgacaacatgctggagccaagtgctaacatgccttggttcaagggatggaaagtcacccgtaaggatggcaatgccagtggaaccacgctgcttgaggctctggactgcatcctaccaccaactcgtccaactgacaagcccttgcgcctgcctctccaggatgtctacaaaattggtcncngactgcatcctaccaccaactcgtccaactcaaataagcgccggctatgcccctgtattggattgccacacggctcacattgcatgcaagtttgctgagctgaaggaaaagattgatcgccgttctggtaaaaagctggaagatggccctaaattcttgaagtctggtgatgctgccattgttgatatggttcctggcaagcccatgtgtgttgagagcttctcagactatccacctttgggtcgctttgctgttcgtgatatgagacagacagttgcggtgggtgtcatcaaagcagtggacaagaaggctgctggagctggcaaggtcaccaagtctgcccagaaagctcagaaggctaaatgaatattatccctaatacctgccaccccactcttaatcagtggtggaagaacggtctcagaactgtttgtttcaattggccatttaagtttagtagtaaaagactggttaatgataacaatgcatcgtaaaaccttcagaaggaaaggagaatgttttgtggaccactttggttttcttttttgcgtgtggcagttttaagttattagtttttaaaatcagtactttttaatggaaacaacttgaccaaaaatttgtcacagaattttgagacccattaaaaaagttaaatgagaaaaaaaataataat

SEQ ID NO: 449835 - DNA, 1482 bp, Homo sapiens
gctttttcgcaacgggtttgccgccagaacacaggtgtcgtgaaaactacccctaaaagccaaaatgggaaaggaaaagactcatatcaacattgtcgtcattggacacgtagattcgggcaagtccaccactactggccatctgatctataaatgcggtggcatcgacaaaagaaccattgaaaaatttgagaaggaggctgctgagatgggaaagggctccttcaagtatgcctgggtcttggataaactgaaagctgagcgtgaacgtggtatcaccattgatatctccttgtggaaatttgagaccagcaagtactatgtgactatcattgatgccccaggacacagagactttatcaaaaacatgattacagggacatctcaggctgactgtgctgtcctgattgttgctgctggtgttggtgaatttgaagctggtatctccaagaatgggcagacccgagagcatgcccttctggcttacacactgggtgtgaaacaactaattgtcggtgttaacaaaatggattccactgagccaccctacagccagaagagatatgaggaaattgttaaggaagtcagcacttacattaagaaaattggctacaaccccgacacagtagcatttgtgccaatttctggttggaatggtgacaacatgctggagccaagtgctaacatgccttggttcaagggatggaaagtcacccgtaaggatggcaatgccagtggaaccacgctgcttgaggctctggactgcatcctaccaccaactcgtccaactgacaagcccttgcgcctgcctctccaggatgtctacaaaattggtggtattggtactgttcctgttggccgagtggagactggtgttctcaaacccggtatggtggtcacctttgctccagtcaacgttacaacggaagtaaaatctgtcgaaatgcaccatgaagctttgagtgaagctcttcctggggacaatgtgggcttcaatgtcaagaatgtgtctgtcaaggatgttcgtcgtggcaacgttgctggtgacagcaaaaatgacccaccaatggaagcagctggcttcactgctcaggtgattatcctgaaccatccaggccgctgctggagctggcaaggtcaccaagtctgcccagaaagctcagaaggctaaatgaatattatccctaatacctgccaccccactcttaatcagtggtggaagaacggtctcagaactgtttgtttcaattggccatttaagtttagtagtaaaagactggttaatgataacaatgcatcgtaaaaccttcagaaggaaaggagaatgttttgtggaccactttggttttcttttttgcgtgtggcagttttaagttattagtttttaaaatcagtactttttaatggaaacaacttgaccaaaaatttgtcacagaattttgagacccattaaaaaagttaaatgagaaaaaaaataataat

SEQ ID NO: 449836 - DNA, 1214 bp, Homo sapiens
gctttttcgcaacgggtttgccgccagaacacaggtgtcgtgaaaactacccctaaaagccaaaatgggaaaggaaaagactcatatcaacattgtcgtcattggacacgtagattcgggcaagtccaccactactggccatctgatctataaatgcggtggcatcgacaaaagaaccattgaaaaatttgagaaggaggctgctgagatgggaaagggctccttcaagtatgcctgggtcttggataaactgaaagctgagcgtgaacgtggtatcaccattgatatctccttgtggaaatttgagaccagcaagtactatgtgactatcattgatgccccaggacacagagactttatcaaaaacatgattacagggacatctcaggctgactgtgctgtcctgattgttgctgctggtgttggtgaatttgaagctggtatctccaagaatgggcagacccgagagcatgcccttcaatgtcaagaatgtgtctgtcaaggatgttcgtcgtggcaacgttgctggtgacagcaaaaatgacccaccaatggaagcagctggcttcactgctcaggtgattatcctgaaccatccaggccttgccacacggctcacattgcatgcaagtttgctgagctgaaggaaaagattgatcgccgttctggtaaaaagctggaagatggccctaaattcttgaagtctggtgatgctgccattgttgatatggttcctggcaagcccatgtgtgttgagagcttctcagactatccacctttgggtcgctttgctgttcgtgatatgagacagacagttgcggtgggtgtcatcaaagcagtggacaagaaggctgctggagctggcaaggtcaccaagtctgcccagaaagctcagaaggctaaatgaatattatccctaatacctgccaccccactcttaatcagtggtggaagaacggtctcagaactgtttgtttcaattggccatttaagtttagtagtaaaagactggttaatgataacaatgcatcgtaaaaccttcagaaggaaaggagaatgttttgtggaccactttggttttcttttttgcgtgtggcagttttaagttattagtttttaaaatcagtactttttaatggaaacaacttgaccaaaaatttgtcacagaattttgagacccattaaaaaagttaaatgagaaaaaaaataataat

SEQ ID NO: 449837 - DNA, 577 bp, Homo sapiens
cgatctagaggatccctatgtgattgtcatgatgtgattgtcatgatgtgattgttcatgatgtgattgtcatgatgtgccattgttgatatggttcctggcaagcccatgtgtgttgagagcttctcagactatccacctttgggtcgctttgctgttcgtgatatgagacagacagttgcggtgggtgtcatcaaagcagtggacaagaaggctgctggagctggcaaggtcaccaagtctgcccagaaagctcagaaggctaaatgaatattatccctaatacctgccaccccactcttaatcagtggtggaagaacggtctcagaactgtttgtttcaattggccatttaagtttagtagtaaaagactggttaatgataacaatgcatcgtaaaaccttcagaaggaaaggagaatgttttgtggaccactttggttttcttttttgcgtgtggcagttttaagttattagtttttaaaatcagtactttttaatggaaacaacttgaccaaaaatttgtcacagaattttgagacccattaaaaaagttaaatgagaaaaaaaataataat

SEQ ID NO: 449838 - DNA, 578 bp, Homo sapiens
gctttttcgcaacgggtttgccgccagaacacaggtgtcgtgaaaactacccctaaaagccaaaatgggaaaggaaaagactcatatcaacattgtcgtcattggacacgtagattcgggcaagtccaccactactccacctttgggtcgctttgctgttcgtgatatgagacagacagttgcggtgggtgtcatcaaagcagtggacaagaaggctgctggagctggcaaggtcaccaagtctgcccagaaagctcagaaggctaaatgaatattatccctaatacctgccaccccactcttaatcagtggtggaagaacggtctcagaactgtttgtttcaattggccatttaagtttagtagtaaaagactggttaatgataacaatgcatcgtaaaaccttcagaaggaaaggagaatgttttgtggaccactttggttttcttttttgcgtgtggcagttttaagttattagtttttaaaatcagtactttttaatggaaacaacttgaccaaaaatttgtcacagaattttgagacccattaaaaaagttaaatgagaaaaaaaataataat

SEQ ID NO: 449839 - DNA, 531 bp, Homo sapiens
gctttttcgcaacgggtttgccgccagaacacaggtgtcgtgaaaactacccctaaaagccaaaatgggaaaggaaaagactcatatcaacattgtcgtcattggacacgtagattcgggcaagtccaccactactggccatctgatctataaatgcggtggcatcgacaaaagaaccattgaaaaatttgagaaggaggctgctgagatgggaaagggctccttcaagtatgcctgggtcttggataaactgaaagctgagcgtgaacgtggtatcaccattgatatctccttgtggaaatttgagaccagcaagtactatgtgactatcattgatgccccaggacacagagactttatcaaaaacatgattacagggacatctcaggctgactgtgctgtcctgattgttgctgctggtgttggtgaatttgaagctggtatctccaagaatgggcagacccgagagcatgcccttctggctgtagggtggctcagtggaatccatctttgtgacaccgaccattagtg

SEQ ID NO: 449840 - DNA, 564 bp, Homo sapiens
gctttttcgcaacgggtttgccgccagaacacaggtgtcgtgaaaactacccctaaaagccaaaatgggaaaggaaaagactcatatcaacattgtcgtcattggacacgtagattcgggcaagtccaccactactggccatctgatctataaatgcggtggcatcgacaaaagaaccattgaaaaatttgagaaggaggctgctgagatgggaaagggtcaccaagtctgcccagaaagctcagaaggctaaatgaatattatccctaatacctgccaccccactcttaatcagtggtggaagaacggtctcagaactgtttgtttcaattggccatttaagtttagtagtaaaagactggttaatgataacaatgcatcgtaaaaccttcagaaggaaaggagaatgttttgtggaccactttggttttcttttttgcgtgtggcagttttaagttattagtttttaaaatcagtactttttaatggaaacaacttgaccaaaaatttgtcacagaattttgagacccattaaaaaagttaaatgagaaaaaaaataataat

SEQ ID NO: 449841 - DNA, 552 bp, Homo sapiens
actactactaaattcgcggccgcgtcgaccttctgaaggttttacgatgcattgttatcattaaccagtcttttactactaaacttaaatggccaattgaaacaaacagttctgagaccgttcttccaccactgattaagagtggggtggcaggtattagggataatattcatttagccttctgagctttctgggcagacttggtgaccttgccagctccagcagccttcttgtccactgctttgatgacacccaccgcaactgtctgtctcatatcacgaacagcaaagcgacccaaaggtggatagtctgagaagctctcaacacacatgggcttgccaggaaccatatcaacaatggcagcatcaccagaaaccttcagaaggaaaggagaatgttttgtggaccactttggttttcttttttgcgtgtggcagttttaagttattagtttttaaaatcagtactttttaatggaaacaacttgaccaaaaatttgtcacagaattttgagacccattaaaaaagttaaatgagaaaaaaaataataat

SEQ ID NO: 449842 - DNA, 1734 bp, Homo sapiens
gcacgagaaaaaaaaaaaaaaaaaaaaaaaaaaaaaaaaaaaaaaaaaaaaaacctcatatcaacattgtcgtcattggacacgtagattcgggcaagtccaccactactggccatctgatctataaatgcggtggcatcgacaaaagaaccattgaaaaatttgagaaggaggctgctgagatgggaaagggctccttcaagtatgcctgggtcttggataaactgaaagctgagcgtgaacgtggtatcaccattgatatctccttgtggaaatttgagaccagcaagtactatgtgactatcattgatgccccaggacacagagactttatcaaaaacatgattacagggacatctcaggctgactgtgctgtcctgattgttgctgctggtgttggtgaatttgaagctggtatctccaagaatgggcagacccgagagcatgcccttctggcttacacactgggtgtgaaacaactaattgtcggtgttaacaaaatggattccactgagccaccctacagccagaagagatatgaggaaattgttaaggaagtcagcacttacattaagaaaattggctacaaccccgacacagtagcatttgtgccaatttctggttggaatggtgacaacatgctggagccaagtgctaacatgccttggttcaagggatggaaagtcacccgtaaggatggcaatgccagtggaaccacgctgcttgaggctctggactgcatcctaccaccaactcgtccaactgacaagcccttgcgcctgcctctccaggatgtctacaaaattggtggtattggtactgttcctgttggccgagtggagactggtgttctcaaacccggtatggtggtcacctttgctccagtcaacgttacaacggaagtaaaatctgtcgaaatgcaccatgaagctttgagtgaagctcttcctggggacaatgtgggcttcaatgtcaagaatgtgtctgtcaaggatgttcgtcgtggcaacgttgctggtgacagcaaaaatgacccaccaatggaagcagctggcttcactgctcaggtgattatcctgaaccatccaggccaaataagcgccggctatgcccctgtattggattgccacacggctcacattgcatgcaagtttgctgagctgaaggaaaagattgatcgccgttctggtaaaaagctggaagatggccctaaattcttgaagtctggtgatgctgccattgttgatatggttcctggcaagcccatgtgtgttgagagcttctcagactatccacctttgggtcgctttgctgttcgtgatatgagacagacagttgcggtgggtgtcatcaaagcagtggacaagaaggctgctggagctggcaaggtcaccaagtctgcccagaaagctcagaaggctaaatgaatattatccctaatacctgccaccccactcttaatcagtggtggaagaacggtctcagaactgtttgtttcaattggccatttaagtttagtagtaaaagactggttaatgataacaatgcatcgtaaaaccttcagaaggaaaggagaatgttttgtggaccactttggttttcttttttgcgtgtggcagttttaagttattagtttttaaaatcagtactttttaatggaaacaacttgaccaaaaatttgtcacagaattttgagacccattaaaaaagttaaatgagaaaaaaaataataat

SEQ ID NO: 449843 - DNA, 1865 bp, Homo sapiens
  misc_feature (1737)..(1737): n is a, c, g, or t
gctttttcgcaacgggtttgccgccagaacacaggtgtcgtgaaaactacccctaaaagccaaaatgggaaaggaaaagactcatatcaacattgtcgtcattggacacgtagattcgggcaagtccaccactactggccatctgatctataaatgcggtggcatcgacaaaagaaccattgaaaaatttgagaaggaggctgctgagatgggaaagggctccttcaagtatgcctgggtcttggataaactgaaagctgagcgtgaacgtggtatcaccattgatatctccttgtggaaatttgagaccagcaagtactatgtgactatcattgatgccccaggacacagagactttatcaaaaacatgattacagggacatctcaggctgactgtgctgtcctgattgttgctgctggtgttggtgaatttgaagctggtatctccaagaatgggcagacccgagagcatgcccttctggcttacacactgggtgtgaaacaactaattgtcggtgttaacaaaatggattccactgagccaccctacagccagaagagatatgaggaaattgttaaggaagtcagcacttacattaagaaaattggctacaaccccgacacagtagcatttgtgccaatttctggttggaatggtgacaacatgctggagccaagtgctaacatgccttggttcaagggatggaaagtcacccgtaaggatggcaatgccagtggaaccacgctgcttgaggctctggactgcatcctaccaccaactcgtccaactgacaagcccttgcgcctgcctctccaggatgtctacaaaattggtggtattggtactgttcctgttggccgagtggagactggtgttctcaaacccggtatggtggtcacctttgctccagtcaacgttacaacggaagtaaaatctgtcgaaatgcaccatgaagctttgagtgaagctcttcctggggacaatgtgggcttcaatgtcaagaatgtgtctgtcaaggatgttcgtcgtggcaacgttgctggtgacagcaaaaatgacccaccaatggaagcagctggcttcactgctcaggtgattatcctgaaccatccaggccaaataagcgccggctatgcccctgtattggattgccacacggctcacattgcatgcaagtttgctgagctgaaggaaaagattgatcgccgttctggtaaaaagctggaagatggccctaaattcttgaagtctggtgatgctgccattgttgatatggttcctggcaagcccatgtgtgttgagagcttctcagactatccacctttgggtcgctttgctgttcgtgatatgagacagacagttgcggtgggtgtcatcaaagcagtggacaagaaggctgctggagctggcaaggtcaccaagtctgcccagaaagctcagaaggctaaatgaatattatccctaatacctgccaccccactcttaatcagtggtggaagaacggtctcagaactgtttgtttcaattggccatttaagtttagtagtaaaagactggttaatgataacaatgcatcgtaaaaccttcagaaggaaaggagaatgttttgtggaccactttggttttcttttttgcgtgtggcagttttaagttattagtttttaaaatcagtactttttaatggaaacaacttgaccaaaaatttgtcacagaattttgagacccattaaaaagtnttggaaaaaaaaaaaaggggggggcaaaaaatctcgagggccacatacgaacccttttgaagaggccacaaggggagataaaaagacgggggtaaacgaggaaagagggttggaaaccctggggtgac

SEQ ID NO: 449844 - DNA, 1830 bp, Homo sapiens
gctttttcgcaacgggtttgccgccagaacacaggtgtcgtgaaaactacccctaaaagccaaaatgggaaaggaaaagactcatatcaacattgtcgtcattggacacgtagattcgggcaagtccaccactactggccatctgatctataaatgcggtggcatcgacaaaagaaccattgaaaaatttgagaaggaggctgctgagatgggaaagggctccttcaagtatgcctgggtcttggataaactgaaagctgagcgtgaacgtggtatcaccattgatatctccttgtggaaatttgagaccagcaagtactatgtgactatcattgatgccccaggacacagagactttatcaaaaacatgattacagggacatctcaggctgactgtgctgtcctgattgttgctgctggtgttggtgaatttgaagctggtatctccaagaatgggcagacccgagagcatgcccttctggcttacacactgggtgtgaaacaactaattgtcggtgttaacaaaatggattccactgagccaccctacagccagaagagatatgaggaaattgttaaggaagtcagcacttacattaagaaaattggctacaaccccgacacagtagcatttgtgccaatttctggttggaatggtgacaacatgctggagccaagtgctaacatgccttggttcaagggatggaaagtcacccgtaaggatggcaatgccagtggaaccacgctgcttgaggctctggactgcatcctaccaccaactcgtccaactgacaagcccttgcgcctgcctctccaggatgtctacaaaattggtggtattggtactgttcctgttggccgagtggagactggtgttctcaaacccggtatggtggtcacctttgctccagtcaacgttacaacggaagtaaaatctgtcgaaatgcaccatgaagctttgagtgaagctcttcctggggacaatgtgggcttcaatgtcaagaatgtgtctgtcaaggatgttcgtcgtggcaacgttgctggtgacagcaaaaatgacccaccaatggaagcagctggcttcactgctcaggtgattatcctgaaccatccaggccaaataagcgccggctatgcccctgtattggattgccacacggctcacattgcatgcaagtttgctgagctgaaggaaaagattgatcgccgttctggtaaaaagctggaagatggccctaaattcttgaagtctggtgatgctgccattgttgatatggttcctggcaagcccatgtgtgttgagagcttctcagactatccacctttgggtcgctttgctgttcgtgatatgagacagacagttgcggtgggtgtcatcaaagcagtggacaagaaggctgctggagctggcaaggtcaccaagtctgcccagaaagctcagaaggctaaatgaatattatccctaatacctgccaccccactcttaatcagtggtggaagaacggtctcagaactgtttgtttcaattggccatttaagtttagtagtaaaagactggttaatgataacaatgcatcgtaacacatcatggacaatcacatcatgaacaatcacatcatgaacaatcacatcatgaacaatcacatcatgaacaatcacatcatgaacaatcacatcatgaacaatcacatcatgaacaatcacatcatgaacaatcacatcatgaacaatcacatcatgaacaatcacatcatgaacaatcacatcatgaacaatcacatcatgaacaatcacatcatgaacaatcacatcatgacaagagatcctcta

SEQ ID NO: 449845 - DNA, 1716 bp, Homo sapiens
gctttttcgcaacgggtttgccgccagaacacaggtgtcgtgaaaactacccctaaaagccaaaatgggaaaggaaaagactcatatcaacattgtcgtcattggacacgtagattcgggcaagtccaccactactggccatctgatctataaatgcggtggcatcgacaaaagaaccattgaaaaatttgagaaggaggctgctgagatgggaaagggctccttcaagtatgcctgggtcttggataaactgaaagctgagcgtgaacgtggtatcaccattgatatctccttgtggaaatttgagaccagcaagtactatgtgactatcattgatgccccaggacacagagactttatcaaaaacatgattacagggacatctcaggctgactgtgctgtcctgattgttgctgctggtgttggtgaatttgaagctggtatctccaagaatgggcagacccgagagcatgcccttctggcttacacactgggtgtgaaacaactaattgtcggtgttaacaaaatggattccactgagccaccctacagccagaagagatatgaggaaattgttaaggaagtcagcacttacattaagaaaattggctacaaccccgacacagtagcatttgtgccaatttctggttggaatggtgacaacatgctggagccaagtgctaacatgccttggttcaagggatggaaagtcacccgtaaggatggcaatgccagtggaaccacgctgcttgaggctctggactgcatcctaccaccaactcgtccaactgacaagcccttgcgcctgcctctccaggatgtctacaaaattggtggtattggtactgttcctgttggccgagtggagactggtgttctcaaacccggtatggtggtcacctttgctccagtcaacgttacaacggaagtaaaatctgtcgaaatgcaccatgaagctttgagtgaagctcttcctggggacaatgtgggcttcaatgtcaagaatgtgtctgtcaaggatgttcgtcgtggcaacgttgctggtgacagcaaaaatgacccaccaatggaagcagctggcttcactgctcaggtgattatcctgaaccatccaggccaaataagcgccggctatgcccctgtattggattgccacacggctcacattgcatgcaagtttgctgagctgaaggaaaagattgatcgccgttctggtagccattgttgatatggttcctggcaagcccatgtgtgttgagagcttctcagactatccacctttgggtcgctttgctgttcgtgatatgagacagacagttgcggtgggtgtcatcaaagcagtggacaagaaggctgctggagctggcaaggtcaccaagtctgcccagaaagctcagaaggctaaatgaatattatccctaatacctgccaccccactcttaatcagtggtggaagaacggtctcagaactgtttgtttcaattggccatttaagtttagtagtaaaagactggttaatgataacaatgcatcgtaaaaccttcagaaggaaaggagaatgttttgtggaccactttggttttcttttttgcgtgtggcagttttaagttattagtttttaaaatcagtactttttaatggaaacaacttgaccaaaaatttgtcacagaattttgagacccattaaaaaagttaaatgagaaaaaaaataataat

SEQ ID NO: 449846 - DNA, 1302 bp, Homo sapiens
  misc_feature (1244)..(1244): n is a, c, g, or t
  misc_feature (1255)..(1255): n is a, c, g, or t
  misc_feature (1280)..(1280): n is a, c, g, or t
  misc_feature (1283)..(1283): n is a, c, g, or t
  misc_feature (1302)..(1302): n is a, c, g, or t
gctttttcgcaacgggtttgccgccagaacacaggtgtcgtgaaaactacccctaaaagccaaaatgggaaaggaaaagactcatatcaacattgtcgtcattggacacgtagattcgggcaagtccaccactactggccatctgatctataaatgcggtggcatcgacaaaagaaccattgaaaaatttgagaaggaggctgctgagatgggaaagggctccttcaagtatgcctgggtcttggataaactgaaagctgagcgtgaacgtggtatcaccattgatatctccttgtggaaatttgagaccagcaagtactatgtgactatcattgatgccccaggacacagagactttatcaaaaacatgattacagggacatctcaggctgactgtgctgtcctgattgttgctgctggtgttggtgaatttgaagctggtatctccaagaatgggcagacccgagagcatgcccttctggcttacacactgggtgtgaaacaactaattgtcggtgttaacaaaatggattccactgagccaccctacagccagaagagatatgaggaaattgttaaggaagtcagcacttacattaagaaaattggctacaaccccgacacagtagcatttgtgccaatttctggttggaatggtgacaacatgctggagccaagtgctaacatgccttggttcaagggatggaaagtcacccgtaaggatggcaatgccagtggaaccacgctgcttgaggctctggactgcatcctaccaccaactcgtccaactgacaagcccttgcgcctgcctctccaggatgtctacaaaattggtggtattggtactgttcctgttggccgagtggagactggtgttctcaaacccggtatggtggtcacctttgctccagtcaacgttacaacggaagtaaaatctgtcgaaatgcaccatgaagctttgagtgaagctcttcctggggacaatgtgggcttcaatgtcaagaatgtgtctgtcaaggatgttcgtcgtggcaacgttgctggtgacagcaaaaatgacccaccaatggaagcagctggcttcactgctcaggtgattatcctgaaccatccaggccaaataagcgccggctatgcccctgtattggattgccacacggctcacattgcatgcaagttttggctggagcttgaaaaggaaaaaagaattggaattcgccccgtttccttgggttaaaaaaaancttgggaaaanaattgggcccccttaaaaatttccnttngaaaaattccttggggttn

SEQ ID NO: 449847 - DNA, 1729 bp, Homo sapiens
gctttttcgcaacgggtttgccgccagaacacaggtgtcgtgaaaactacccctaaaagccaaaatgggaaaggaaaagactcatatcaacattgtcgtcattggacacgtagattcgggcaagtccaccactactggccatctgatctataaatgcggtggcatcgacaaaagaaccattgaaaaatttgagaaggaggctgctgagatgggaaagggctccttcaagtatgcctgggtcttggataaactgaaagctgagcgtgaacgtggtatcaccattgatatctccttgtggaaatttgagaccagcaagtactatgtgactatcattgatgccccaggacacagagactttatcaaaaacatgattacagggacatctcaggctgactgtgctgtcctgattgttgctgctggtgttggtgaatttgaagctggtatctccaagaatgggcagacccgagagcatgcccttctggcttacacactgggtgtgaaacaactaattgtcggtgttaacaaaatggattccactgagccaccctacagccagaagagatatgaggaaattgttaaggaagtcagcacttacattaagaaaattggctacaaccccgacacagtagcatttgtgccaatttctggttggaatggtgacaacatgctggagccaagtgctaacatgccttggttcaagggatggaaagtcacccgtaaggatggcaatgccagtggaaccacgctgcttgaggctctggactgcatcctaccaccaactcgtccaactgacaagcccttgcgcctgcctctccaggatgtctacaaaattggtggtattggtactgttcctgttggccgagtggagactggtgttctcaaacccggtatggtggtcacctttgctccagtcaacgttacaacggaagtaaaatctgtcgaaatgcaccatgaagctttgagtgaagctcttcctggggacaatgtgggcttcaatgtcaagaatgtgtctgtcaaggatgttcgtcgtggcaacgttgctggtgacagcaaaaatgacccaccaatggaagcagctggcttcactgctcaggtgattatcctgaaccatccaggccttgccacacggctcacattgcatgcaagtttgctgagctgaaggaaaagattgatcgccgttctggtaaaaagctggaagatggccctaaattcttgaagtctggtgatgctgccattgttgatatggttcctggcaagcccatgtgtgttgagagcttctcagactatccacctttgggtcgctttgctgttcgtgatatgagacagacagttgcggtgggtgtcatcaaagcagtggacaagaaggctgctggagctggcaaggtcaccaagtctgcccagaaagctcagaaggctaaatgaatattatccctaatacctgccaccccactcttaatcagtggtggaagaacggtctcagaactgtttgtttcaattggccatttaagtttagtagtaaaagactggttaatgataacaatgcatcgtaaaaccttcagaaggaaaggagaatgttttgtggaccactttggttttcttttttgcgtgtggcagttttaagttattagtttttaaaatcagtactttttaatggaaacaacttgaccaaaaatttgtcacagaattttgagacccattaaaaaagttaaatgagaaaaaaaataataat

SEQ ID NO: 449848 - DNA, 1703 bp, Homo sapiens
gctttttcgcaacgggtttgccgccagaacacaggtgtcgtgaaaactacccctaaaagccaaaatgggaaaggaaaagactcatatcaacattgtcgtcattggacacgtagattcgggcaagtccaccactactggccatctgatctataaatgcggtggcatcgacaaaagaaccattgaaaaatttgagaaggaggctgctgagatgggaaagggctccttcaagtatgcctgggtcttggataaactgaaagctgagcgtgaacgtggtatcaccattgatatctccttgtggaaatttgagaccagcaagtactatgtgactatcattgatgccccaggacacagagactttatcaaaaacatgattacagggacatctcaggctgactgtgctgtcctgattgttgctgctggtgttggtgaatttgaagctggtatctccaagaatgggcagacccgagagcatgcccttctggcttacacactgggtgtgaaacaactaattgtcggtgttaacaaaatggattccactgagccaccctacagccagaagagatatgaggaaattgttaaggaagtcagcacttacattaagaaaattggctacaaccccgacacagtagcatttgtgccaatttctggttggaatggtgacaacatgctggagccaagtgctaacatgccttggttcaagggatggaaagtcacccgtaaggatggcaatgccagtggaaccacgctgcttgaggctctggactgcatcctaccaccaactcgtccaactgacaagcccttgcgcctgcctctccaggatgtctacaaaattggtgtggtcacctttgctccagtcaacgttacaacggaagtaaaatctgtcgaaatgcaccatgaagctttgagtgaagctcttcctggggacaatgtgggcttcaatgtcaagaatgtgtctgtcaaggatgttcgtcgtggcaacgttgctggtgacagcaaaaatgacccaccaatggaagcagctggcttcactgctcaggtgattatcctgaaccatccaggccaaataagcgccggctatgcccctgtattggattgccacacggctcacattgcatgcaagtttgctgagctgaaggaaaagattgatcgccgttctggtaaaaagctggaagatggccctaaattcttgaagtctggtgatgctgccattgttgatatggttcctggcaagcccatgtgtgttgagagcttctcagactatccacctttgggtcgctttgctgttcgtgatatgagacagacagttgcggtgggtgtcatcaaagcagtggacaagaaggctgctggagctggcaaggtcaccaagtctgcccagaaagctcagaaggctaaatgaatattatccctaatacctgccaccccactcttaatcagtggtggaagaacggtctcagaactgtttgtttcaattggccatttaagtttagtagtaaaagactggttaatgataacaatgcatcgtaaaaccttcagaaggaaaggagaatgttttgtggaccactttggttttcttttttgcgtgtggcagttttaagttattagtttttaaaatcagtactttttaatggaaacaacttgaccaaaaatttgtcacagaattttgagacccattaaaaaagttaaatgagaaaaaaaataataat

SEQ ID NO: 449849 - DNA, 1602 bp, Homo sapiens
gctttttcgcaacgggtttgccgccagaacacaggtgtcgtgaaaactacccctaaaagccaaaatgggaaaggaaaagactcatatcaacattgtcgtcattggacacgtagattcgggcaagtccaccactactggccatctgatctataaatgcggtggcatcgacaaaagaaccattgaaaaatttgagaaggaggctgctgagatgggaaagggctccttcaagtatgcctgggtcttggataaactgaaagctgagcgtgaacgtggtatcaccattgatatctccttgtggaaatttgagaccagcaagtactatgtgactatcattgatgccccaggacacagagactttatcaaaaacatgattacagggacatctcaggctgactgtgctgtcctgattgttgctgctggtgttggtgaatttgaagctggtatctccaagaatgggcagacccgagagcatgcccttctggcttacacactgggtgtgaaacaactaattgtcggtgttaacaaaatggattccactgagccaccctacagccagaagagatatgaggaaattgttaaggaagtcagcacttacattaagaaaattggctacaaccccgacacagtagcatttgtgccaatttctggttggaatggtgacaacatgctggagccaagtgctaacatgccttggttcaagggatggaaagtcacccgtaaggatggcaatgccagtggtcacctttgctccagtcaacgttacaacggaagtaaaatctgtcgaaatgcaccatgaagctttgagtgaagctcttcctggggacaatgtgggcttcaatgtcaagaatgtgtctgtcaaggatgttcgtcgtggcaacgttgctggtgacagcaaaaatgacccaccaatggaagcagctggcttcactgctcaggtgattatcctgaaccatccaggccaaataagcgccggctatgcccctgtattggattgccacacggctcacattgcatgcaagtttgctgagctgaaggaaaagattgatcgccgttctggtaaaaagctggaagatggccctaaattcttgaagtctggtgatgctgccattgttgatatggttcctggcaagcccatgtgtgttgagagcttctcagactatccacctttgggtcgctttgctgttcgtgatatgagacagacagttgcggtgggtgtcatcaaagcagtggacaagaaggctgctggagctggcaaggtcaccaagtctgcccagaaagctcagaaggctaaatgaatattatccctaatacctgccaccccactcttaatcagtggtggaagaacggtctcagaactgtttgtttcaattggccatttaagtttagtagtaaaagactggttaatgataacaatgcatcgtaaaaccttcagaaggaaaggagaatgttttgtggaccactttggttttcttttttgcgtgtggcagttttaagttattagtttttaaaatcagtactttttaatggaaacaacttgaccaaaaatttgtcacagaattttgagacccattaaaaaagttaaatgagaaaaaaaataataat

SEQ ID NO: 449850 - DNA, 1245 bp, Homo sapiens
gctttttcgcaacgggtttgccgccagaacacaggtgtcgtgaaaactacccctaaaagccaaaatgggaaaggaaaagactcatatcaacattgtcgtcattggacacgtagattcgggcaagtccaccactactggccatctgatctataaatgcggtggcatcgacaaaagaaccattgaaaaatttgagaaggaggctgctgagatgggaaagggctccttcaagtatgcctgggtcttggataaactgaaagctgagcgtgaacgtggtatcaccattgatatctccttgtggaaatttgagaccagcaagtactatgtgactatcattgatgccccaggacacagagactttatcaaaaacatgattacagggacatctcaggctgactgtgctgtcctgattgttgctgctggtgttggtgaatttgaagctggtatctccaagaatgggcagacccgagagcatgcccttcaatgtcaagaatgtgtctgtcaaggatgttcgtcgtggcaacgttgctggtgacagcaaaaatgacccaccaatggaagcagctggcttcactgctcaggtgattatcctgaaccatccaggccaaataagcgccggctatgcccctgtattggattgccacacggctcacattgcatgcaagtttgctgagctgaaggaaaagattgatcgccgttctggtaaaaagctggaagatggccctaaattcttgaagtctggtgatgctgccattgttgatatggttcctggcaagcccatgtgtgttgagagcttctcagactatccacctttgggtcgctttgctgttcgtgatatgagacagacagttgcggtgggtgtcatcaaagcagtggacaagaaggctgctggagctggcaaggtcaccaagtctgcccagaaagctcagaaggctaaatgaatattatccctaatacctgccaccccactcttaatcagtggtggaagaacggtctcagaactgtttgtttcaattggccatttaagtttagtagtaaaagactggttaatgataacaatgcatcgtaaaaccttcagaaggaaaggagaatgttttgtggaccactttggttttcttttttgcgtgtggcagttttaagttattagtttttaaaatcagtactttttaatggaaacaacttgaccaaaaatttgtcacagaattttgagacccattaaaaaagttaaatgagaaaaaaaataataat

SEQ ID NO: 449851 - DNA, 1341 bp, Homo sapiens
gctttttcgcaacgggtttgccgccagaacacaggtgtcgtgaaaactacccctaaaagccaaaatgggaaaggaaaagactcatatcaacattgtcgtcattggacacgtagattcgggcaagtccaccactactggccatctgatctataaatgcggtggcatcgacaaaagaaccattgaaaaatttgagaaggaggctgctgagatgggaaagggctccttcaagtatgcctgggtcttggataaactgaaagctgagcgtgaacgtggtatcaccattgatatctccttgtggaaatttgagaccagcaagtactatgtgactatcattgatgccccaggacacagagactttatcaaaaacatgattacagggacatctcaggctgactgtgctgtcctgattgttgctgctggtgttggtgaatttgaagctggtatctccaagaatgggcagacccgagagcatgcccttctggcttacacactgggtgtgaaacaactaattgtcggtgttaacaaaatggattccactgagccaccctacagccagaagagatatgaggaaattgttaaggaagtcagcacttacattaagaaaattggctacaaccccgacacagtagcatttgtgccaatttctggttggaatggtgacaacatgctggagccaagtgctaacatgccttggttcaagggatggaaagtcacccgtaaggatggcaatgccagtggaaccacgctgcttgaggctctggactgcatcctaccaccaactcgtccaactgacaagcccttgcgcctgcctctccaggatgtctacaaaattggtggtattggtactgttcctgttggccgagtggagactggtgttctcaaacccggtatggtggtcacctttgctccagtcaacgttacaacgtgtagtcgactacatacttccgccaccctccccgagttggtccctttgctgggtggggttagggccttcctccgtgtcctgtactttcagggtacctggtgggggtgtgtatcccagaggcaaaaactcttcccctctcacactctgggactcacagtccttcacctgactcacagtgtagactgcagcctcctgcgtccttcaaagcgtccctgggttttcctgttcaatgactgcatcgcctcttgaaaaaagttcacaaagtgaatgtctctacactattttgtccttccacgtgggagaggcgtgccagcaatgcctctcatccgccatcttgacagaaacagttaaaaaaccttattgcattttcagttcatgaaatgttcatttgcttctcccgaagtatgtacattcgg

SEQ ID NO: 449852 - DNA, 5899 bp, Homo sapiens
cggaggacagccggaccgagccaacgccggggactttgttccctccacggaggggactcggcaactcgcagcggcagggtctggggccggcgcctgggagggatctgcgccccccactcactccctagctgtgttcccgccgccgccccggctagtctccggcgctggcgcctatggtcggcctccgacagcgctccggagggaccgggggagctcccaggcgcccgggactggagactgatgcatgaggggcctacggaggcgcaggagcggtggtgatggtctgggaagcggagctgaagtcccctgggctttggtgaggcgtgacagtttatcatgaccgtgttcaggcaggaaaacgtggatgattactacgacaccggcgaggaacttggcagtggacagtttgcggttgtgaagaaatgccgtgagaaaagtaccggcctccagtatgccgccaaattcatcaagaaaaggaggactaagtccagccggcggggtgtgagccgcgaggacatcgagcgggaggtcagcatcctgaaggagatccagcaccccaatgtcatcaccctgcacgaggtctatgagaacaagacggacgtcatcctgatcttggaactcgttgcaggtggcgagctgtttgacttcttagctgaaaaggaatctttaactgaagaggaagcaactgaatttctcaaacaaattcttaatggtgtttactacctgcactcccttcaaatcgcccactttgatcttaagcctgagaacataatgcttttggatagaaatgtccccaaacctcggatcaagatcattgactttgggttggcccataaaattgactttggaaatgaatttaaaaacatatttgggactccagagtttgtcgctcctgagatagtcaactatgaacctcttggtcttgaggcagatatgtggagtatcggggtaataacctatatcctcctaagtggggcctccccatttcttggagacactaagcaagaaacgttagcaaatgtatccgctgtcaactacgaatttgaggatgaatacttcagtaataccagtgccctagccaaagatttcataagaagacttctggtcaaggatccaaagaagagaatgacaattcaagatagtttgcagcatccctggatcaagcctaaagatacacaacaggcacttagtagaaaagcatcagcagtaaacatggagaaattcaagaagtttgcagcccggaaaaaatggaaacaatccgttcgcttgatatcactgtgccaaagattatccaggtcattcctgtccagaagtaacatgagtgttgccagaagcgatgatactctggatgaggaagactcctttgtgatgaaagccatcatccatgccatcaacgatgacaatgtcccaggcctgcagcaccttctgggctcattatccaactatgatgttaaccaacccaacaagcacgggacacctccattactcattgctgctggctgtgggaatattcaaatactacagttgctcattaaaagaggctcgagaatcgatgtccaggataagggcgggtccaatgccgtctactgggctgctcggcatggccacgtcgataccttgaaatttctcagtgagaacaaatgccctttggatgtgaaagacaagtctggagagatggccctccacgtggcagctcgctatggccatgctgacgtggctcagttactgtgcagcttcggctcaaatcccaatatccaggacaaggaagaagaaacccccctgcactgtgctgcttggcacggctattactctgtggccaaagccctttgtgaagccggctgtaacgtgaacatcaagaaccgagaaggagagacgcccctcctgacagcctctgccaggggctaccacgacatcgtggagtgtctggccgaacatggagccgaccttaatgcttgcgacaaggacggacacattgcccttcatctggctgtaagacggtgtcagatggaggtaatcaagactctcctcagccaagggtgtttcgtcgattatcaagacaggcacggcaatactcccctccatgtggcatgtaaagatggcaacatgcctatcgtggtggccctctgtgaagcaaactgcaatttggacatctccaacaagtatgggcgaacgcctctgcaccttgcggccaacaacggaatcctagacgtggtccggtatctctgtctgatgggagccagcgttgaggcgctgaccacggacggaaagacggcagaagatcttgctagatcggaacagcacgagcacgtagcaggtctccttgcaagacttcgaaaggatacgcaccgaggactcttcatccagcagctccgacccacacagaacctgcagccaagaattaagctcaagctgtttggccactcgggatccgggaaaaccacccttgtagaatctctcaagtgtgggctgctgaggagctttttcagaaggcgtcggcccagactgtcttccaccaactccagcaggttcccaccttcacccctggcttctaagcccacagtctcagtgagcatcaacaacctgtacccaggctgcgagaacgtgagtgtgaggagccgcagcatgatgttcgagccgggtcttaccaaagggatgctggaggtgtttgtggccccgacccaccacccgcactgctcggccgatgaccagtccaccaaggccatcgacatccagaacgcttatttgaatggagttggcgatttcagcgtgtgggagttctctggaaatcctgtgtatttctgctgttatgactattttgctgcaaatgatcccacgtcaatccatgttgttgtctttagtctagaagagccctatgagatccagctgaaccaagtgattttctggctcagtttcctgaagtcccttgtcccagttgaagaacccatagccttcggtggcaagctgaagaacccactccaagttgtcctggtggccacccacgctgacatcatgaatgttcctcgaccggctggaggcgagtttggatatgacaaagacacatcgttgctgaaagagattaggaacaggtttggaaatgatcttcacatttcaaataagctgtttgttctggatgctggggcttctgggtcaaaggacatgaaggtacttcgaaatcatctgcaagaaatacgaagccagattgtttcggtctgtcctcccatgactcacctgtgtgagaaaatcatctccacgctgccttcctggaggaagctcaatggacccaaccagctgatgtcgctgcagcagtttgtgtacgacgtgcaggaccagctgaaccccctggccagcgaggaggacctcaggcgcattgctcagcagctccacagcacaggcgagatcaacatcatgcaaagtgaaacagttcaggacgtgctgctcctggacccccgctggctctgcacaaacgtcctggggaagttgctgtccgtggagaccccacgggcgctgcaccactaccggggccgctacaccgtggaggacatccagcgcctggtgcccgacagcgacgtggaggagctgctgcagatcctcgatgccatggacatctgcgcccgggacctgagcagcgggaccatggtggacgtcccagccctgatcaagacagacaacctgcaccgctcctgggctgatgaggaggacgaggtgatggtgtatggtggcgtgcgcatcgtgcccgtggaacacctcacccccttcccatgtggcatctttcacaaggtccaggtgaacctgtgccggtggatccaccagcaaagcacagagggcgacgcggacatccgcctgtgggtgaatggctgcaagctggccaaccgtggggccgagctgctggtgctgctggtcaaccacggccagggcattgaggtccaggtccgcggcctggagacggagaagatcaagtgctgcctgctgctggactcggtgtgcagcaccattgagaacgtcatggccaccacgctgccagggctcctgaccgtgaagcattacctgagcccccagcagctgcgggagcaccatgagcccgtcatgatctaccagccacgggacttcttccgggcacagactctgaaggaaacctcactgaccaacaccatgggggggtacaaggaaagcttcagcagcatcatgtgcttcgggtgtcacgacgtctactcacaggccagcctcggcatggacatccatgcatcagacctgaacctcctcactcggaggaaactgagtcgcctgctggacccgcccgaccccctggggaaggactggtgccttctcgccatgaacttaggcctccctgacctcgtggcaaagtacaacaccagtaacggggctcccaaggatttcctccccagccccctccacgccctgctgcgggaatggaccacctaccctgagagcacagtgggcaccctcatgtccaaactgagggagctgggtcgccgggatgccgcagactttttgctgaaggcatcctctgtgttcaaaatcaacctggatggcaatggccaggaggcctatgcctcgagctgcaacagcggcacctcttacaattccattagctctgttgtatcccggtgagggcagcctctggcttgggcagggtctgtttggactgcagaagcaagggggtgatgtagcccatccttccctttggagatgctgagggtgtttcttcctgcacccacagccagggggatgccactcctccctccggcttgacctgtttctctgccgctacctccctccccgtctcattccgttgtctgtggatggtcattgcagtttaagagcagaacagatcttttactttggccgcttgaaaagctagtgtacctcctctcagtgttttggactccatctctcatcctccagtaccttgcttcttactgataattttgctggaattcctaacttttcaatgacattttttttaactactatattgattgtcctttaaaaaagaaaagtgcatatttatccaaaatgtgtatttcttatacgcttttctttgttataccatttcctcagcttatctcttttatatttgtaggagaaactcccatgtatggaatcccactgtatgatttataaacagacaatatgtgagtgccttttgcagaagagggtgtgtttgaaatcatcggagtcagccaggagctgtcaccaaggaaacgctacctctctgtcccttgctgtatgctgatcatcgccagaggtgcttcaccctgagttttgttttgtattgttttctgacagtttttctgttttgtttggcaaggaaaggggagaagggaatcctcctccagggtgattttatgatcagtgttgttgctctaggaagacatttttccgtttgcttttgttccaatgtcaatgtgaacgtccacatgaaacctacacactgtcatgcttcatcattccctctcatctcaggtagaaggttgacacagttgtagggttacagagacctatgtaagaattcagaagacccctgactcatcatttgtggcagtcccttataattggtgcatagcagatggtttccacatttagatcctggtttcataacttcctgtacttgaagtctaaaagcagaaaataaaggaagcaagttttcttccatgattttaaattgtgatcgagttttaaattgataggagggaacatgtcctaattcttctgtcctgagaagcatgtaatgttaatgttatatcatatgtatatatatatatgcactatgtatatacatatatattaatactggtatttttacttaatctataaaatgtcgttaaaaagttgtttgtttttttctttttttataaataaactgttgctcgttgcatta

SEQ ID NO: 449853 - DNA, 961 bp, Homo sapiens
agtatgtgggcttaatactcactgtgtggtggacaccccaacctcaggtccccatcctagccactataggggcatctgcccaaggtgggtgggtggaaccaaaggggacagagtggaaccaggcaggcctgggtgtaggccttgggttctggtctccatagcctgctcacagatgtggctctgaatcaccggctccttttcttctgcagtctggagagatggccctccacgtggcagctcgctatggccatgctgacgtggctcagttactgtgcagcttcggctcaaatcccaatatccaggacaaggaagaagaaacccccctgcactgtgctgcttggcacggctattactctgtggccaaagccctttgtgaagccggctgtaacgtgaacatcaagaaccgagaaggagagacgcccctcctgacagcctctgccaggggctaccacgacatcgtggagtgtctggccgaacatggagccgaccttaatgcttgcgacaaggtgccttatgggggaagactcatatgcactgggaagtgatctaggggtctagagggaccacaagactcctcagtttgtttccctaagataacaaacttgaatgcagcaaactgtaattaccccgtctcttctctgttccaaagattctgtgaacttttctatattgtatttaatagttaatattaatttatggcatataacaaaattcatgagttgatcaattgactttggtctctaaataatttttagcttttttagctttagagcaggtacagtgatgttcactgaatccgagacaattctcattgaggactgacattggcaacacgctattaatttttagataaacaaagaaatagatgttttacttatttctatcatccgctgtgttgtaaaaagacaataaaccactcttgtctggcaatctcgatgctagaccaggtttaattaaacaa

SEQ ID NO: 449854 - DNA, 2976 bp, Homo sapiens
ccggtggtcctgcagactgttggatacggcagagccggtgacactgtgccgggcggagcgaagtgcgtgggttcctggctgacatcatgaatgttcctcgaccggctggaggcgagtttggatatgacaaagacacatcgttgctgaaagagattaggaacaggtttggaaatgatcttcacatttcaaataagctgtttgttctggatgctggggcttctgggtcaaaggacatgaaggtacttcgaaatcatctgcaagaaatacgaagccagattgtttcggtctgtcctcccatgactcacctgtgtgagaaaatcatctccacgctgccttcctggaggaagctcaatggacccaaccagctgatgtcgctgcagcagtttgtgtacgacgtgcaggaccagctgaaccccctggccagcgaggaggacctcaggcgcattgctcagcagctccacagcacaggcgagatcaacatcatgcaaagtgaaacagttcaggacgtgctgctcctggacccccgctggctctgcacaaacgtcctggggaagttgctgtccgtggagaccccacgggcgctgcaccactaccggggccgctacaccgtggaggacatccagcgcctggtgcccgacagcgacgtggaggagctgctgcagatcctcgatgccatggacatctgcgcccgggacctgagcagcgggaccatggtggacgtcccagccctgatcaagacagacaacctgcaccgctcctgggctgatgaggaggacgaggtgatggtgtatggtggcgtgcgcatcgtgcccgtggaacacctcacccccttcccatgtggcatctttcacaaggtccaggtgaacctgtgccggtggatccaccagcaaagcacagagggcgacgcggacatccgcctgtgggtgaatggctgcaagctggccaaccgtggggccgagctgctggtgctgctggtcaaccacggccagggcattgaggtccaggtccgcggcctggagacggagaagatcaagtgctgcctgctgctggactcggtgtgcagcaccattgagaacgtcatggccaccacgctgccagggctcctgaccgtgaagcattacctgagcccccagcagctgcgggagcaccatgagcccgtcatgatctaccagccacgggacttcttccgggcacagactctgaaggaaacctcactgaccaacaccatgggggggtacaaggaaagcttcagcagcatcatgtgcttcgggtgtcacgacgtctactcacaggccagcctcggcatggacatccatgcatcagacctgaacctcctcactcggaggaaactgagtcgcctgctggacccgcccgaccccctggggaaggactggtgccttctcgccatgaacttaggcctccctgacctcgtggcaaagtacaacaccagtaacggggctcccaaggatttcctccccagccccctccacgccctgctgcgggaatggaccacctaccctgagagcacagtgggcaccctcatgtccaaactgagggagctgggtcgccgggatgccgcagactttttgctgaaggcatcctctgtgttcaaaatcaacctggatggcaatggccaggaggcctatgcctcgagctgcaacagcggcacctcttacaattccattagctctgttgtatcccggtgagggcagcctctggcttgggcagggtctgtttggactgcagaagcaagggggtgatgtagcccatccttccctttggagatgctgagggtgtttcttcctgcacccacagccagggggatgccactcctccctccggcttgacctgtttctctgccgctacctccctccccgtctcattccgttgtctgtggatggtcattgcagtttaagagcagaacagatcttttactttggccgcttgaaaagctagtgtacctcctctcagtgttttggactccatctctcatcctccagtaccttgcttcttactgataattttgctggaattcctaacttttcaatgacattttttttaactactatattgattgtcctttaaaaaagaaaagtgcatatttatccaaaatgtgtatttcttatacgcttttctttgttataccatttcctcagcttatctcttttatatttgtaggagaaactcccatgtatggaatcccactgtatgatttataaacagacaatatgtgagtgccttttgcagaagagggtgtgtttgaaatcatcggagtcagccaggagctgtcaccaaggaaacgctacctctctgtcccttgctgtatgctgatcatcgccagaggtgcttcaccctgagttttgttttgtattgttttctgacagtttttctgttttgtttggcaaggaaaggggagaagggaatcctcctccagggtgattttatgatcagtgttgttgctctaggaagacatttttccgtttgcttttgttccaatgtcaatgtgaacgtccacatgaaacctacacactgtcatgcttcatcattccctctcatctcaggtagaaggttgacacagttgtagggttacagagacctatgtaagaattcagaagacccctgactcatcatttgtggcagtcccttataattggtgcatagcagatggtttccacatttagatcctggtttcataacttcctgtacttgaagtctaaaagcagaaaataaaggaagcaagttttcttccatgattttaaattgtgatcgagttttaaattgataggagggaacatgtcctaattcttctgtcctgagaagcatgtaatgttaatgttatatcatatgtatatatatatatgcactatgtatatacatatatattaatactggtatttttacttaatctataaaatgtcgttaaaaagttgtttgtttttttctttttttataaataaactgttgctcgttgcatta

SEQ ID NO: 449855 - DNA, 5845 bp, Homo sapiens
cggaggacagccggaccgagccaacgccggggactttgttccctccacggaggggactcggcaactcgcagcggcagggtctggggccggcgcctgggagggatctgcgccccccactcactccctagctgtgttcccgccgccgccccggctagtctccggcgctggcgcctatggtcggcctccgacagcgctccggagggaccgggggagctcccaggcgcccgggactggagactgatgcatgaggggcctacggaggcgcaggagcggtggtgatggtctgggaagcggagctgaagtcccctgggctttggtgaggcgtgacagtttatcatgaccgtgttcaggcaggaaaacgtggatgattactacgacaccggcgaggaacttggcagtggacagtttgcggttgtgaagaaatgccgtgagaaaagtaccggcctccagtatgccgccaaattcatcaagaaaaggaggactaagtccagccggcggggtgtgagccgcgaggacatcgagcgggaggtcagcatcctgaaggagatccagcaccccaatgtcatcaccctgcacgaggtctatgagaacaagacggacgtcatcctgatcttggaactcgttgcaggtggcgagctgtttgacttcttagctgaaaaggaatctttaactgaagaggaagcaactgaatttctcaaacaaattcttaatggtgtttactacctgcactcccttcaaatcgcccactttgatcttaagcctgagaacataatgcttttggatagaaatgtccccaaacctcggatcaagatcattgactttgggttggcccataaaattgactttggaaatgaatttaaaaacatatttgggactccagagtttgtcgctcctgagatagtcaactatgaacctcttggtcttgaggcagatatgtggagtatcggggtaataacctatatcctcctaagtggggcctccccatttcttggagacactaagcaagaaacgttagcaaatgtatccgctgtcaactacgaatttgaggatgaatacttcagtaataccagtgccctagccaaagatttcataagaagacttctggtcaaggatccaaagaagagaatgacaattcaagatagtttgcagcatccctggatcaagcctaaagatacacaacaggcacttagtagaaaagcatcagcagtaaacatggagaaattcaagaagtttgcagcccggaaaaaatggaaacaatccgttcgcttgatatcactgtgccaaagattatccaggtcattcctgtccagaagtaacatgagtgttgccagaagcgatgatactctggatgaggaagactcctttgtgatgaaagccatcatccatgccatcaacgatgacaatgtcccaggcctgcagcaccttctgggctcattatccaactatgatgttaaccaacccaacaagcacgggacacctccattactcattgctgctggctgtgggaatattcaaatactacagttgctcattaaaagaggctcgagaatcgatgtccaggataagggcgggtccaatgccgtctactgggctgctcggcatggccacgtcgataccttgaaatttctcagtgagaacaaatgccctttggatgtgaaagacaagtctggagagatggccctccacgtggcagctcgctatggccatgctgacgtggctcagttactgtgcagcttcggctcaaatcccaatatccaggacaaggaagaagaaacccccctgcactgtgctgcttggcacggctattactctgtggccaaagccctttgtgaagccggctgtaacgtgaacatcaagaaccgagaaggagagacgcccctcctgacagcctctgccaggggctaccacgacatcgtggagtgtctggccgaacatggagccgaccttaatgcttgcgacaaggacggacacattgcccttcatctggctgtaagacggtgtcagatggaggtaatcaagactctcctcagccaagggtgtttcgtcgattatcaagacaggcacggcaatactcccctccatgtggcatgtaaagatggcaacatgcctatcgtggtggccctctgtgaagcaaactgcaatttggacatctccaacaagtatgggcgaacgcctctgcaccttgcggccaacaacggaatcctagacgtggtccggtatctctgtctgatgggagccagcgttgaggcgctgaccacggacggaaagacggcagaagatcttgctagatcggaacagcacgagcacgtagcaggtctccttgcaagacttcgaaaggatacgcaccgaggactcttcatccagcagctccgacccacacagaacctgcagccaagaattaagctcaagctgtttggccactcgggatccgggaaaaccacccttgtagaatctctcaagtgtgggctgctgaggagctttttcagaaggcgtcggcccagactgtcttccaccaactccagcaggttcccaccttcacccctggcttctaagcccacagtctcagtgagcatcaacaacctgtacccaggctgcgagaacgtgagtgtgaggagccgcagcatgatgttcgagccgggtcttaccaaagggatgctggaggtgtttgtggccccgacccaccacccgcactgctcggccgatgaccagtccaccaaggccatcgacatccagaacgcttatttgaatggagttggcgatttcagcgtgtgggagttctctggaaatcctgtgtatttctgctgttatgactattttgctgcaaatgatcccacgtcaatccatgttgttgtctttagtctagaagagccctatgagatccagctgaaccaagtgattttctggctcagtttcctgaagtcccttgtcccagttgaagaacccatagccttcggtggcaagctgaagaacccactccaagttgtcctggtggccacccacgctgacatcatgaatgttcctcgaccggctggaggcgagtttggatatgacaaagacacatcgttgctgaaagagattaggaacaggtttggaaatgatcttcacatttcaaataagctgtttgttctggatgctggggcttctgggtcaaaggacatgaaggtacttcgaaatcatctgcaagaaatacgaagccagattgtttcggtctgtcctcccatgactcacctgtgtgagaaaatcatctccacgctgccttcctggaggaagctcaatggacccaaccagctgatgtcgctgcagcagtttgtgtacgacgtgcaggaccagctgaaccccctggccagcgaggaggacctcaggcgcattgctcagcagctccacagcacaggcgagatcaacatcatgcaaagtgaaacagttcaggacgtgctgctcctggacccccgctggctctgcacaaacgtcctggggaagttgctgtccgtggagaccccacgggcgctgcaccactaccggggccgctacaccgtggaggacatccagcgcctggtgcccgacagcgacgtggaggagctgctgcagatcctcgatgccatggacatctgcgcccgggacctgagcagcgggaccatggtggacgtcccagccctgatcaagacagacaacctgcaccgctcctgggctgatgaggaggacgaggtgatggtgtatggtggcgtgcgcatcgtgcccgtggaacacctcacccccttcccatgtggcatctttcacaaggtccaggtgaacctgtgccggtggatccaccagcaaagcacagagggcgacgcggacatccgcctgtgggtgaatggctgcaagctggccaaccgtggggccgagctgctggtgctgctggtcaaccacggccagggcattgaggtccaggtccgcggcctggagacggagaagatcaagtgctgcctgctgctggactcggtgtgcagcaccattgagaacgtcatggccaccacgctgccagggctcctgaccgtgaagcattacctgagcccccagcagctgcgggagcaccatgagcccgtcatgatctaccagccacgggacttcttccgggcacagactctgaaggaaacctcactgaccaacaccatgggggggtacaaggaaagcttcagcagcatcatgtgcttcgggtgtcacgacgtctactcacaggccagcctcggcatggacatccatgcatcagacctgaacctcctcactcggaggaaactgagtcgcctgctggacccgcccgaccccctggggaaggactggtgccttctcgccatgaacttaggcctccctgacctcgtggcaaagtacaacaccagtaacggggctcccaaggatttcctccccagccccctccacgccctgctgcgggaatggaccacctaccctgagagcacagtgggcaccctcatgtccaaactgagggagctgggtcgccgggatgccgcagactttttgctgaaggcatcctctgtgttcaaaatcaacctggatggcaatggccaggaggcctatgcctcgagctgcaacagcggcacctcttacaattccattagctctgttgtatcccggtgagggcagcctctggcttgggcagggtctgtttggactgcagaagcaagggggtgatgtagcccatccttccctttggagatgctgagggtgtttcttcctgcacccacagccagggggatgccactcctccctccggcttgacctgtttctctgccgctacctccctccccgtctcattccgttgtctgtggatggtcattgcagtttaagagcagaacagatcttttactttggccgcttgaaaagctagtgtacctcctctcagtgttttggactccatctctcatcctccagtaccttgcttcttactgataattttgctggaattcctaacttttcaatgacattttttttaactactatattgattgtcctttaaaaaagaaaagtgcatatttatcctcttttatatttgtaggagaaactcccatgtatggaatcccactgtatgatttataaacagacaatatgtgagtgccttttgcagaagagggtgtgtttgaaatcatcggagtcagccaggagctgtcaccaaggaaacgctacctctctgtcccttgctgtatgctgatcatcgccagaggtgcttcaccctgagttttgttttgtattgttttctgacagtttttctgttttgtttggcaaggaaaggggagaagggaatcctcctccagggtgattttatgatcagtgttgttgctctaggaagacatttttccgtttgcttttgttccaatgtcaatgtgaacgtccacatgaaacctacacactgtcatgcttcatcattccctctcatctcaggtagaaggttgacacagttgtagggttacagagacctatgtaagaattcagaagacccctgactcatcatttgtggcagtcccttataattggtgcatagcagatggtttccacatttagatcctggtttcataacttcctgtacttgaagtctaaaagcagaaaataaaggaagcaagttttcttccatgattttaaattgtgatcgagttttaaattgataggagggaacatgtcctaattcttctgtcctgagaagcatgtaatgttaatgttatatcatatgtatatatatatatgcactatgtatatacatatatattaatactggtatttttacttaatctataaaatgtcgttaaaaagttgtttgtttttttctttttttataaataaactgttgctcgttgcatta

SEQ ID NO: 449856 - DNA, 2417 bp, Homo sapiens
cggaggacagccggaccgagccaacgccggggactttgttccctccacggaggggactcggcaactcgcagcggcagggtctggggccggcgcctgggagggatctgcgccccccactcactccctagctgtgttcccgccgccgccccggctagtctccggcgctggcgcctatggtcggcctccgacagcgctccggagggaccgggggagctcccaggcgcccgggactggagactgatgcatgaggggcctacggaggcgcaggagcggtggtgatggtctgggaagcggagctgaagtcccctgggctttggtgaggcgtgacagtttatcatgaccgtgttcaggcaggaaaacgtggatgattactacgacaccggcgaggaacttggcagtggacagtttgcggttgtgaagaaatgccgtgagaaaagtaccggcctccagtatgccgccaaattcatcaagaaaaggaggactaagtccagccggcggggtgtgagccgcgaggacatcgagcgggaggtcagcatcctgaaggagatccagcaccccaatgtcatcaccctgcacgaggtctatgagaacaagacggacgtcatcctgatcttggaactcgttgcaggtggcgagctgtttgacttcttagctgaaaaggaatctttaactgaagaggaagcaactgaatttctcaaacaaattcttaatggtgtttactacctgcactcccttcaaatcgcccactttgatcttaagcctgagaacataatgcttttggatagaaatgtccccaaacctcggatcaagatcattgactttgggttggcccataaaattgactttggaaatgaatttaaaaacatatttgggactccagagtttgtcgctcctgagatagtcaactatgaacctcttggtcttgaggcagatatgtggagtatcggggtaataacctatatcctcctaagtggggcctccccatttcttggagacactaagcaagaaacgttagcaaatgtatccgctgtcaactacgaatttgaggatgaatacttcagtaataccagtgccctagccaaagatttcataagaagacttctggtcaaggatccaaagaagagaatgacaattcaagatagtttgcagcatccctggatcaagcctaaagatacacaacaggcacttagtagaaaagcatcagcagtaaacatggagaaattcaagaagtttgcagcccggaaaaaatggaaacaatccgttcgcttgatatcactgtgccaaagattatccaggtcattcctgtccagaagtaacatgagtgttgccagaagcgatgatactctggatgaggaagactcctttgtgatgaaagccatcatccatgccatcaacgatgacaatgtcccaggcctgcagcaccttctgggctcattatccaactatgatgttaaccaacccaacaagcacgggacacctccattactcattgctgctggctgtgggaatattcaaatactacagttgctcattaaaagaggctcgagaatcgatgtccaggataagggcgggtccaatgccgtctactgggctgctcggcatggccacgtcgataccttgaaatttctcagtgagaacaaatgccctttggatgtgaaagacaagtctggagagatggccctccacgtggcagctcgctatggccatgctgacgtggctcagttactgtgcagcttcggctcaaatcccaatatccaggacaaggaagaagaaacccccctgcactgtgctgcttggcacggctattactctgtggccaaagccctttgtgaagccggctgtaacgtgaacatcaagaaccgagaaggagagacgcccctcctgacagcctctgccaggggctaccacgacatcgtggagtgtctggccgaacatggagccgaccttaatgcttgcgacaaggtgccttatgggggaagactcatatgcactgggaagtgatctaggggtctagagggaccacaagactcctcagtttgtttccctaagataacaaacttgaatgcagcaaactgtaattaccccgtctcttctctgttccaaagattctgtgaacttttctatattgtatttaatagttaatattaatttatggcatataacaaaattcatgagttgatcaattgactttggtctctaaataatttttagcttttttagctttagagcaggtacagtgatgttcactgaatccgagacaattctcattgaggactgacattggcaacacgctattaatttttagataaacaaagaaatagatgttttacttatttctatcatccgctgtgttgtaaaaagacaataaaccactcttgtctggcaatctcgatgctagaccaggtttaattaaacaa

SEQ ID NO: 449857 - DNA, 1624 bp, Homo sapiens
cggaggacagccggaccgagccaacgccggggactttgttccctccacggaggggactcggcaactcgcagcggcagggtctggggccggcgcctgggagggatctgcgccccccactcactccctagctgtgttcccgccgccgccccggctagtctccggcgctggcgcctatggtcggcctccgacagcgctccggagggaccgggggagctcccaggcgcccgggactggagactgatgcatgaggggcctacggaggcgcaggagcggtggtgatggtctgggaagcggagctgaagtcccctgggctttggtgaggcgtgacagtttatcatgaccgtgttcaggcaggaaaacgtggatgattactacgacaccggcgaggaacttggcagtggacagtttgcggttgtgaagaaatgccgtgagaaaagtaccggcctccagtatgccgccaaattcatcaagaaaaggaggactaagtccagccggcggggtgtgagccgcgaggacatcgagcgggaggtcagcatcctgaaggagatccagcaccccaatgtcatcaccctgcacgaggtctatgagaacaagacggacgtcatcctgatcttggaactcgttgcaggtggcgagctgtttgacttcttagctgaaaaggaatctttaactgaagaggaagcaactgaatttctcaaacaaattcttaatggtgtttactacctgcactcccttcaaatcgcccactttgatcttaagcctgagaacataatgcttttggatagaaatgtccccaaacctcggatcaagatcattgactttgggttggcccataaaattgactttggaaatgaatttaaaaacatatttgggactccagagtttgtcgctcctgagatagtcaactatgaacctcttggtcttgaggcagatatgtggagtatcggggtaataacctatatcctcctaagtggggcctccccatttcttggagacactaagcaagaaacgttagcaaatgtatccgctgtcaactacgaatttgaggatgaatacttcagtaataccagtgccctagccaaagatttcataagaagacttctggtcaaggatccaaagaagagaatgacaattcaagatagtttgcagcatccctggatcaagcctaaagatacacaacaggcacttagtagaaaagcatcagcagtaaacatggagaaattcaagaagtttgcagcccggaaaaaatggaaacaatccgttcgcttgatatcactgtgccaaagattatccaggtcattcctgtccagaagtaacatgagtgttgccagaagcgatgatactctggatgaggaagactcctttgtgatgaaagccatcatccatgccatcaacgatgacaatgtcccaggcctgcagcaccttctgggctcattatccaactatgatgttaaccaacccaacaaggtctggttctgttctgccgcatactggaggggtgggtcacagcgaccttgcccttccatatccaaggaaagaccccatctgcttctccattctcccttccaattggaagctccatactgtggggaaaatcacttctgtttagaaagtgatttgagtt

SEQ ID NO: 449858 - DNA, 444 bp, Homo sapiens
gtttttttgatctttaattcaaaaggatttctttttacttgttgtggttttactgttgtcaccccacatagcaggacaacccagtccaaaacctagaaaatcattacacctcaactctcagggttattgagatgccgattattactcaaattaggaatggtgtgggaaagtgaaaagagttcagataattttcacatttcttcccattgtaaataaaacaggccccttagatttttctcgggtgaaccaaaaaaccaaactgactcttttagttttggcaacagggaacagaggaagctttgcgacttctacacaaaaatgatggggatggcaccaggaggaagagaaaacctacagcaaaaagaccttcgtgcctttcttacatttatagttcatttatgtttcaagcaagttgtccacaataaacatgattaactttcataa

SEQ ID NO: 449859 - DNA, 267 bp, Homo sapiens
agtaatttttttcttgcctattctagcacgggacacctccattactcattgctgctggctgtgggaatattcaaatactacagttgctcattaaaagaggctcgagaatcgatgtccaggataaggtcataattgttttattgaaatgaattgaattttaaagtattttcaagtgtctcttaatcataggggtaacagaggaaaaaaatttatgtcctaacttgtttctcagtttcctgtaaaggaagatgagctgcttttaaacag

SEQ ID NO: 449860 - DNA, 1521 bp, Homo sapiens
cggaggacagccggaccgagccaacgccggggactttgttccctccacggaggggactcggcaactcgcagcggcagggtctggggccggcgcctgggagggatctgcgccccccactcactccctagctgtgttcccgccgccgccccggctagtctccggcgctggcgcctatggtcggcctccgacagcgctccggagggaccgggggagctcccaggcgcccgggactggagactgatgcatgaggggcctacggaggcgcaggagcggtggtgatggtctgggaagcggagctgaagtcccctgggctttggtgaggcgtgacagtttatcatgaccgtgttcaggcaggaaaacgtggatgattactacgacaccggcgaggaacttggcagtggacagtttgcggttgtgaagaaatgccgtgagaaaagtaccggcctccagtatgccgccaaattcatcaagaaaaggaggactaagtccagccggcggggtgtgagccgcgaggacatcgagcgggaggtcagcatcctgaaggagatccagcaccccaatgtcatcaccctgcacgaggtctatgagaacaagacggacgtcatcctgatcttggaactcgttgcaggtggcgagctgtttgacttcttagctgaaaaggaatctttaactgaagaggaagcaactgaatttctcaaacaaattcttaatggtgtttactacctgcactcccttcaaatcgcccactttgatcttaagcctgagaacataatgcttttggatagaaatgtccccaaacctcggatcaagatcattgactttgggttggcccataaaattgactttggaaatgaatttaaaaacatatttgggactccagagtttgtcgctcctgagatagtcaactatgaacctcttggtcttgaggcagatatgtggagtatcggggtaataacctatatcctcctaagtggggcctccccatttcttggagacactaagcaagaaacgttagcaaatgtatccgctgtcaactacgaatttgaggatgaatacttcagtaataccagtgccctagccaaagatttcataagaagacttctggtcaaggatccaaagaagagaatgacaattcaagatagtttgcagcatccctggatcaagcctaaagatacacaacaggcacttagtagaaaagcatcagcagtaaacatggagaaattcaagaagtttgcagcccggaaaaaatggaaacaatccgttcgcttgatatcactgtgccaaagattatccaggtcattcctgtccagaagtaacatgagtgttgccagaagcgatgatactctggatgaggaagactcctttgtgatgaaagccatcatccatgccatcaacgatgacaatgtcccaggcctgcagcacctaagcaaaagattgtgaagcctgtgaaagtttcagctccccgagttggtggaaaacgctaaactggcagattagatttttaaataaagattggattat

SEQ ID NO: 449861 - DNA, 3798 bp, Homo sapiens
acagccagagaaacacaccgagacgtgctctttgtccacctggcttgcttctcacacctgctatgcttgtttctgcctcagacccacggaattggcgtatggaacacacacagctctccttttcagagaaaagaaactaatgcatttttctccaacaggacggaaagacggcagaagatcttgctagatcggaacagcacgagcacgtagcaggtctccttgcaagacttcgaaaggatacgcaccgaggactcttcatccagcagctccgacccacacagaacctgcagccaagaattaagctcaagctgtttggccactcgggatccgggaaaaccacccttgtagaatctctcaagtgtgggctgctgaggagctttttcagaaggcgtcggcccagactgtcttccaccaactccagcaggttcccaccttcacccctggcttctaagcccacagtctcagtgagcatcaacaacctgtacccaggctgcgagaacgtgagtgtgaggagccgcagcatgatgttcgagccgggtcttaccaaagggatgctggaggtgtttgtggccccgacccaccacccgcactgctcggccgatgaccagtccaccaaggccatcgacatccagaacgcttatttgaatggagttggcgatttcagcgtgtgggagttctctggaaatcctgtgtatttctgctgttatgactattttgctgcaaatgatcccacgtcaatccatgttgttgtctttagtctagaagagccctatgagatccagctgaaccaagtgattttctggctcagtttcctgaagtcccttgtcccagttgaagaacccatagccttcggtggcaagctgaagaacccactccaagttgtcctggtggccacccacgctgacatcatgaatgttcctcgaccggctggaggcgagtttggatatgacaaagacacatcgttgctgaaagagattaggaacaggtttggaaatgatcttcacatttcaaataagctgtttgttctggatgctggggcttctgggtcaaaggacatgaaggtacttcgaaatcatctgcaagaaatacgaagccagattgtttcggtctgtcctcccatgactcacctgtgtgagaaaatcatctccacgctgccttcctggaggaagctcaatggacccaaccagctgatgtcgctgcagcagtttgtgtacgacgtgcaggaccagctgaaccccctggccagcgaggaggacctcaggcgcattgctcagcagctccacagcacaggcgagatcaacatcatgcaaagtgaaacagttcaggacgtgctgctcctggacccccgctggctctgcacaaacgtcctggggaagttgctgtccgtggagaccccacgggcgctgcaccactaccggggccgctacaccgtggaggacatccagcgcctggtgcccgacagcgacgtggaggagctgctgcagatcctcgatgccatggacatctgcgcccgggacctgagcagcgggaccatggtggacgtcccagccctgatcaagacagacaacctgcaccgctcctgggctgatgaggaggacgaggtgatggtgtatggtggcgtgcgcatcgtgcccgtggaacacctcacccccttcccatgtggcatctttcacaaggtccaggtgaacctgtgccggtggatccaccagcaaagcacagagggcgacgcggacatccgcctgtgggtgaatggctgcaagctggccaaccgtggggccgagctgctggtgctgctggtcaaccacggccagggcattgaggtccaggtccgcggcctggagacggagaagatcaagtgctgcctgctgctggactcggtgtgcagcaccattgagaacgtcatggccaccacgctgccagggctcctgaccgtgaagcattacctgagcccccagcagctgcgggagcaccatgagcccgtcatgatctaccagccacgggacttcttccgggcacagactctgaaggaaacctcactgaccaacaccatgggggggtacaaggaaagcttcagcagcatcatgtgcttcgggtgtcacgacgtctactcacaggccagcctcggcatggacatccatgcatcagacctgaacctcctcactcggaggaaactgagtcgcctgctggacccgcccgaccccctggggaaggactggtgccttctcgccatgaacttaggcctccctgacctcgtggcaaagtacaacaccagtaacggggctcccaaggatttcctccccagccccctccacgccctgctgcgggaatggaccacctaccctgagagcacagtgggcaccctcatgtccaaactgagggagctgggtcgccgggatgccgcagactttttgctgaaggcatcctctgtgttcaaaatcaacctggatggcaatggccaggaggcctatgcctcgagctgcaacagcggcacctcttacaattccattagctctgttgtatcccggtgagggcagcctctggcttgggcagggtctgtttggactgcagaagcaagggggtgatgtagcccatccttccctttggagatgctgagggtgtttcttcctgcacccacagccagggggatgccactcctccctccggcttgacctgtttctctgccgctacctccctccccgtctcattccgttgtctgtggatggtcattgcagtttaagagcagaacagatcttttactttggccgcttgaaaagctagtgtacctcctctcagtgttttggactccatctctcatcctccagtaccttgcttcttactgataattttgctggaattcctaacttttcaatgacattttttttaactactatattgattgtcctttaaaaaagaaaagtgcatatttatccaaaatgtgtatttcttatacgcttttctttgttataccatttcctcagcttatctcttttatatttgtaggagaaactcccatgtatggaatcccactgtatgatttataaacagacaatatgtgagtgccttttgcagaagagggtgtgtttgaaatcatcggagtcagccaggagctgtcaccaaggaaacgctacctctctgtcccttgctgtatgctgatcatcgccagaggtgcttcaccctgagttttgttttgtattgttttctgacagtttttctgttttgtttggcaaggaaaggggagaagggaatcctcctccagggtgattttatgatcagtgttgttgctctaggaagacatttttccgtttgcttttgttccaatgtcaatgtgaacgtccacatgaaacctacacactgtcatgcttcatcattccctctcatctcaggtagaaggttgacacagttgtagggttacagagacctatgtaagaattcagaagacccctgactcatcatttgtggcagtcccttataattggtgcatagcagatggtttccacatttagatcctggtttcataacttcctgtacttgaagtctaaaagcagaaaataaaggaagcaagttttcttccatgattttaaattgtgatcgagttttaaattgataggagggaacatgtcctaattcttctgtcctgagaagcatgtaatgttaatgttatatcatatgtatatatatatatgcactatgtatatacatatatattaatactggtatttttacttaatctataaaatgtcgttaaaaagttgtttgtttttttctttttttataaataaactgttgctcgttgcatta

SEQ ID NO: 449862 - DNA, 6236 bp, Homo sapiens
cggaggacagccggaccgagccaacgccggggactttgttccctccacggaggggactcggcaactcgcagcggcagggtctggggccggcgcctgggagggatctgcgccccccactcactccctagctgtgttcccgccgccgccccggctagtctccggcgctggcgcctatggtcggcctccgacagcgctccggagggaccgggggagctcccaggcgcccgggactggagactgatgcatgaggggcctacggaggcgcaggagcggtggtgatggtctgggaagcggagctgaagtcccctgggctttggtgaggcgtgacagtttatcatgaccgtgttcaggcaggaaaacgtggatgattactacgacaccggcgaggaacttggcagtggacagtttgcggttgtgaagaaatgccgtgagaaaagtaccggcctccagtatgccgccaaattcatcaagaaaaggaggactaagtccagccggcggggtgtgagccgcgaggacatcgagcgggaggtcagcatcctgaaggagatccagcaccccaatgtcatcaccctgcacgaggtctatgagaacaagacggacgtcatcctgatcttggaactcgttgcaggtggcgagctgtttgacttcttagctgaaaaggaatctttaactgaagaggaagcaactgaatttctcaaacaaattcttaatggtgtttactacctgcactcccttcaaatcgcccactttgatcttaagcctgagaacataatgcttttggatagaaatgtccccaaacctcggatcaagatcattgactttgggttggcccataaaattgactttggaaatgaatttaaaaacatatttgggactccagagtttgtcgctcctgagatagtcaactatgaacctcttggtcttgaggcagatatgtggagtatcggggtaataacctatatcctcctaagtggggcctccccatttcttggagacactaagcaagaaacgttagcaaatgtatccgctgtcaactacgaatttgaggatgaatacttcagtaataccagtgccctagccaaagatttcataagaagacttctggtcaaggatccaaagaagagaatgacaattcaagatagtttgcagcatccctggatcaagcctaaagatacacaacaggcacttagtagaaaagcatcagcagtaaacatggagaaattcaagaagtttgcagcccggaaaaaatggaaacaatccgttcgcttgatatcactgtgccaaagattatccaggtcattcctgtccagaagtaacatgagtgttgccagaagcgatgatactctggatgaggaagactcctttgtgatgaaagccatcatccatgccatcaacgatgacaatgtcccaggcctgcagcaccttctgggctcattatccaactatgatgttaaccaacccaacaagcacgggacacctccattactcattgctgctggctgtgggaatattcaaatactacagttgctcattaaaagaggctcgagaatcgatgtccaggataagggcgggtccaatgccgtctactgggctgctcggcatggccacgtcgataccttgaaatttctcagtgagaacaaatgccctttggatgtgaaagacaagtctggagagatggccctccacgtggcagctcgctatggccatgctgacgtggctcagttactgtgcagcttcggctcaaatcccaatatccaggacaaggaagaagaaacccccctgcactgtgctgcttggcacggctattactctgtggccaaagccctttgtgaagccggctgtaacgtgaacatcaagaaccgagaaggagagacgcccctcctgacagcctctgccaggggctaccacgacatcgtggagtgtctggccgaacatggagccgaccttaatgcttgcgacaaggacggacacattgcccttcatctggctgtaagacggtgtcagatggaggtaatcaagactctcctcagccaagggtgtttcgtcgattatcaagacaggcacggcaatactcccctccatgtggcatgtaaagatggcaacatgcctatcgtggtggccctctgtgaagcaaactgcaatttggacatctccaacaagtatgggcgaacgcctctgcaccttgcggccaacaacggaatcctagacgtggtccggtatctctgtctgatgggagccagcgttgaggcgctgaccacggacggaaagacggcagaagatcttgctagatcggaacagcacgagcacgtagcaggtctccttgcaagacttcgaaaggatacgcaccgaggactcttcatccagcagctccgacccacacagaacctgcagccaagaattaagctcaagctgtttggccactcgggatccgggaaaaccacccttgtagaatctctcaagtgtgggctgctgaggagctttttcagaaggcgtcggcccagactgtcttccaccaactccagcaggttcccaccttcacccctggcttctaagcccacagtctcagtgagcatcaacaacctgtacccaggctgcgagaacgtgagtgtgaggagccgcagcatgatgttcgagccgggtcttaccaaagggatgctggaggtgtttgtggccccgacccaccacccgcactgctcggccgatgaccagtccaccaaggccatcgacatccagaacgcttatttgaatggagttggcgatttcagcgtgtgggagttctctggaaatcctgtgtatttctgctgttatgactattttgctgcaaatgatcccacgtcaatccatgttgttgtctttagtctagaagagccctatgagatccagctgaaccaagtgattttctggctcagtttcctgaagtcccttgtcccagttgaagaacccatagccttcggtggcaagctgaagaacccactccaagttgtcctggtggccacccacgctgacatcatgaatgttcctcgaccggctggaggcgagtttggatatgacaaagacacatcgttgctgaaagagattaggaacaggtttggaaatgatcttcacatttcaaataagctgtttgttctggatgctggggcttctgggtcaaaggacatgaaggtacttcgaaatcatctgcaagaaatacgaagccagattgtttcggtctgtcctcccatgactcacctgtgtgagaaaatcatctccacgctgccttcctggaggaagctcaatggacccaaccagctgatgtcgctgcagcagtttgtgtacgacgtgcaggaccagctgaaccccctggccagcgaggaggacctcaggcgcattgctcagcagctccacagcacaggcgagatcaacatcatgcaaagtgaaacagttcaggacgtgctgctcctggacccccgctggctctgcacaaacgtcctggggaagttgctgtccgtggagaccccacgggcgctgcaccactaccggggccgctacaccgtggaggacatccagcgcctggtgcccgacagcgacgtggaggagctgctgcagatcctcgatgccatggacatctgcgcccgggacctgagcagcgggaccatggtggacgtcccagccctgatcaagacagacaacctgcaccgctcctgggctgatgaggaggacgaggtgatggtgtatggtggcgtgcgcatcgtgcccgtggaacacctcacccccttcccatgtggcatctttcacaaggtccaggtgaacctgtgccggtggatccaccagcaaagcacagagggcgacgcggacatccgcctgtgggtgaatggctgcaagctggccaaccgtggggccgagctgctggtgctgctggtcaaccacggccagggcattgaggtccaggtccgcggcctggagacggagaagatcaagtgctgcctgctgctggactcggtgtgcagcaccattgagaacgtcatggccaccacgctgccagggctcctgaccgtgaagcattacctgagcccccagcagctgcgggagcaccatgagcccgtcatgatctaccagccacgggacttcttccgggcacagactctgaaggaaacctcactgaccaacaccatgggggggtacaaggaaagcttcagcagcatcatgtgcttcgggtgtcacgacgtctactcacaggccagcctcggcatggacatccatgcatcagacctgaacctcctcactcggaggaaactgagtcgcctgctggacccgcccgaccccctggggaaggactggtgccttctcgccatgaacttaggcctccctgacctcgtggcaaagtacaacaccagtaacggggctcccaaggatttcctccccagccccctccacgccctgctgcgggaatggaccacctaccctgagagcacagtgggcaccctcatgtccaaactgagggagctgggtcgccgggatgccgcagactttttgctgaaggcatcctctgtgttcaaaatcaacctggatggcaatggccaggaggcctatgcctcgagctgcaacagcggcacctcttacaattccattagctctgttgtatcccggtgagggcagcctctggcttgggcagggtctgtttggactgcagaagcaagggggtgatgtagcccatccttccctttggagatgctgagggtgtttcttcctgcacccacagccagggggatgccactcctccctccggcttgacctgtttctctgccgctacctccctccccgtctcattccgttgtctgtggatggtcattgcagtttaagagcagaacagatcttttactttggccgcttgaaaagctagtgtacctcctctcagtgttttggactccatctctcatcctccagtaccttgcttcttactgataattttgctggaattcctaacttttcaatgacattttttttaactactatattgattgtcctttaaaaaagaaaagtgcatatttatccaaaatgtgtatttcttatacgcttttctttgttataccatttcctcagcttatctcttttatatttgtaggagaaactcccatgtatggaatcccactgtatgatttataaacagacaatatgtgagtgccttttgcagaagagggtgtgtttgaaatcatcggagtcagccaggagctgtcaccaaggaaacgctacctctctgtcccttgctgtatgctgatcatcgccagaggtgcttcaccctgagttttgttttgtattgttttctgacagtttttctgttttgtttggcaaggaaaggggagaagggaatcctcctccagggtgattttatgatcagtgttgttgctctaggaagacatttttccgtttgcttttgttccaatgtcaatgtgaacgtccacatgaaacctacacactgtcatgcttcatcattccctctcatctcaggtagaaggttgacacagttgtagggttacagagacctatgtaagaattcagaagacccctgactcatcatttgtggcagtcccttataattggtgcatagcagatggtttccacatttagatcctggtttcataacttcctgtacttgaagtctaaaagcagaaaataaaggaagcaagttttcttccatgattttaaattgtgatcgagttttaaattgataggagggaacatgtcctaattcttctgtcctgagaagcatgtaatgttaatgttatatcatatgtatatatatatatgcactatgtatatacatatatattaatactggtatttttacttaatctataaaatgtcgttaaaaagttgtttgtttttttctttttttataaataaactgttgctcgttgcattaaaaaaaaaaaaaaaaaaaaaaaaaaaaaaaaaaaaaaaacaaaaaaaaaaaaacaacagaaaaaaccccggcgaggggccgcgtgggaggcggcgcaaaagaacatctacagcaacccgggggtgacggcgggggacaaagtgacgcaacacaggcggcgacgagagggtcgacacaggagaggacaacggagacaaaaaaaatagggagacgagcccgccaagatagcaaaagcgcgaggagacacacgggggcgtgagacaaaacccaggagagaactaccagggacaaacgagggaatataaaagagggaacaaagacagacggagcaaatgcg

SEQ ID NO: 449863 - DNA, 2527 bp, Homo sapiens
cggaggacagccggaccgagccaacgccggggactttgttccctccacggaggggactcggcaactcgcagcggcagggtctggggccggcgcctgggagggatctgcgccccccactcactccctagctgtgttcccgccgccgccccggctagtctccggcgctggcgcctatggtcggcctccgacagcgctccggagggaccgggggagctcccaggcgcccgggactggagactgatgcatgaggggcctacggaggcgcaggagcggtggtgatggtctgggaagcggagctgaagtcccctgggctttggtgaggcgtgacagtttatcatgaccgtgttcaggcaggaaaacgtggatgattactacgacaccggcgaggaacttggcagtggacagtttgcggttgtgaagaaatgccgtgagaaaagtaccggcctccagtatgccgccaaattcatcaagaaaaggaggactaagtccagccggcggggtgtgagccgcgaggacatcgagcgggaggtcagcatcctgaaggagatccagcaccccaatgtcatcaccctgcacgaggtctatgagaacaagacggacgtcatcctgatcttggaactcgttgcaggtggcgagctgtttgacttcttagctgaaaaggaatctttaactgaagaggaagcaactgaatttctcaaacaaattcttaatggtgtttactacctgcactcccttcaaatcgcccactttgatcttaagcctgagaacataatgcttttggatagaaatgtccccaaacctcggatcaagatcattgactttgggttggcccataaaattgactttggaaatgaatttaaaaacatatttgggactccagagtttgtcgctcctgagatagtcaactatgaacctcttggtcttgaggcagatatgtggagtatcggggtaataacctatatcctcctaagtggggcctccccatttcttggagacactaagcaagaaacgttagcaaatgtatccgctgtcaactacgaatttgaggatgaatacttcagtaataccagtgccctagccaaagatttcataagaagacttctggtcaaggatccaaagaagagaatgacaattcaagatagtttgcagcatccctggatcaagcctaaagatacacaacaggcacttagtagaaaagcatcagcagtaaacatggagaaattcaagaagtttgcagcccggaaaaaatggaaacaatccgttcgcttgatatcactgtgccaaagattatccaggtcattcctgtccagaagtaacatgagtgttgccagaagcgatgatactctggatgaggaagactcctttgtgatgaaagccatcatccatgccatcaacgatgacaatgtcccaggcctgcagcaccttctgggctcattatccaactatgatgttaaccaacccaacaagcacgggacacctccattactcattgctgctggctgtgggaatattcaaatactacagttgctcattaaaagaggctcgagaatcgatgtccaggataagggcgggtccaatgccgtctactgggctgctcggcatggccacgtcgataccttgaaatttctcagtgagaacaaatgccctttggatgtgaaagacaagtctggagagatggccctccacgtggcagctcgctatggccatgctgacgtggctcagttactgtgcagcttcggctcaaatcccaatatccaggacaaggaagaagaaacccccctgcactgtgctgcttggcacggctattactctgtggccaaagccctttgtgaagccggctgtaacgtgaacatcaagaaccgagaaggagagacgcccctcctgacagcctctgccaggggctaccacgacatcgtggagtgtctggccgaacatggagccgaccttaatgcttgcgacaaggacggacacattgcccttcatctggctgtaagacggtgtcagatggaggtaatcaagactctcctcagccaagggtgtttcgtcgattatcaagacaggcacggcaatactcccctccatgtggcatgtaaagatggcaacatgcctatcgtggtggccctctgtgaagcaaactgcaatttggacatctccaacaagtatgggcgaacgcctctgcaccttgcggccaacaacggaatcctagacgtggtccggtatctctgtctgatgggagccagcgttgaggcgctgaccacgtgatctctaaaactgcaacagaacagcccctacatgtcccttttctccccagtggcaggggaacagtgacagcttctgcctctcaggggtgacttcaaggactgaggcttgcagagagcactgagagctgggtcgagcacatattatgaggtggtgttcaataaatacttgctgtcatcgtgtatgttcatggtgtagatacagaaacaaatttattcagtgtgaaactgcagcctatgaaaaatctctaaataaaaagcaagcataa

SEQ ID NO: 449864 - DNA, 1992 bp, Homo sapiens
cctagctgggatattggagcagcaagaggctgggaagccatcacttaccttgcactgagaaagaagacaaaggccagtatgcacagctttcctccactgctgctgctgctgttctggggtgtggtgtctcacagcttcccagcgactctagaaacacaagagcaagatgtggacttagtccagaaatacctggaaaaatactacaacctgaagaatgatgggaggcaagttgaaaagcggagaaatagtggcccagtggttgaaaaattgaagcaaatgcaggaattctttgggctgaaagtgactgggaaaccagatgctgaaaccctgaaggtgatgaagcagcccagatgtggagtgcctgatgtggctcagtttgtcctcactgaggggaaccctcgctgggagcaaacacatctgacctacaggattgaaaattacacgccagatttgccaagagcagatgtggaccatgccattgagaaagccttccaactctggagtaatgtcacacctctgacattcaccaaggtctctgagggtcaagcagacatcatgatatcttttgtcaggggagatcatcgggacaactctccttttgatggacctggaggaaatcttgctcatgcttttcaaccaggcccaggtattggaggggatgctcattttgatgaagatgaaaggtggaccaacaatttcagagagtacaacttacatcgtgttgcggctcatgaactcggccattctcttggactctcccattctactgatatcggggctttgatgtaccctagctacaccttcagtggtgatgttcagctagctcaggatgacattgatggcatccaagccatatatggacgttcccaaaatcctgtccagcccatcggcccacaaaccccaaaagcgtgtgacagtaagctaacctttgatgctataactacgattcggggagaagtgatgttctttaaagacagattctacatgcgcacaaatcccttctacccggaagttgagctcaatttcatttctgttttctggccacaactgccaaatgggcttgaagctgcttacgaatttgccgacagagatgaagtccggtttttcaaagggaataagtactgggctgttcagggacagaatgtgctacacggataccccaaggacatctacagctcctttggcttccctagaactgtgaagcatatcgatgctgctctttctgaggaaaacactggaaaaacctacttctttgttgctaacaaatactggaggtatgatgaatataaacgatctatggatccaggttatcccaaaatgatagcacatgactttcctggaattggccacaaagttgatgcagttttcatgaaagatggatttttctatttctttcatggaacaagacaatacaaatttgatcctaaaacgaagagaattttgactctccagaaagctaatagctggttcaactgcaggaaaaattgaacattactaatttgaatggaaaacacatggtgtgagtccaaagaaggtgttttcctgaagaactgtctattttctcagtcatttttaacctctagagtcactgatacacagaatataatcttatttatacctcagtttgcatatttttttactatttagaatgtagccctttttgtactgatataatttagttccacaaatggtgggtacaaaaagtcaagtttgtggcttatggattcatataggccagagttgcaaagatcttttccagagtatgcaactctgacgttgatcccagagagcagcttcagtgacaaacatatcctttcaagacagaaagagacaggagacatgagtctttgccggaggaaaagcagctcaagaacacatgtgcagtcactggtgtcaccctggataggcaagggataactcttctaacacaaaataagtgttttatgtttggaataaagtcaaccttgtttctactgttttataaaaaaaaaa

SEQ ID NO: 449865 - DNA, 4113 bp, Homo sapiens
agcgggctcttcctcctcccctccgtcggtcagtcagtccgcgaggagagtccgcggtggcggcgacggtggcgagagccgcgggggccgtaggaagccaaccttccctgcttctccggggccctcgccccctcctccccacaaaatcagggatggaggcgcctccccggcaccctcttagcagccctccccaggaaaagtgtcccccctgagctcctaacgctccccaacagctacccctgccccccacgccatggggcccggggccccttttgcccgggtggggtggccactgccgcttctggttgtgatggcggcaggggtggctccggtgtgggcctcccactccccccatctcccgcggcctcactcgcgggtccccccgcaccacactcagaacggcgcgcagtgtacatcggggcactgtttcccatgagcgggggctggccagggggccaggcctgccagcccgcggtggagatggcgctggaggacgtgaatagccgcagggacatcctgccggactatgagctcaagctcatccaccacgacagcaagtgtgatccaggccaagccaccaagtacctatatgagctgctctacaacgaccctatcaagatcatccttatgcctggctgcagctctgtctccacgctggtggctgaggctgctaggatgtggaacctcattgtgctttcctatggctccagctcaccagccctgtcaaaccggcagcgtttccccactttcttccgaacgcacccatcagccacactccacaaccctacccgcgtgaaactctttgaaaagtggggctggaagaagattgctaccatccagcagaccactgaggtcttcacttcgactctggacgacctggaggaacgagtgaaggaggctggaattgagattactttccgccagagtttcttctcagatccagctgtgcccgtcaaaaacctgaagcgccaggatgcccgaatcatcgtgggacttttctatgagactgaagcccggaaagttttttgtgaggtgtacaaggagcgtctctttgggaagaagtacgtctggttcctcattgggtggtatgctgacaattggttcaagatctacgacccttctatcaactgcacagtggatgagatgactgaggcggtggagggccacatcacaactgagattgtcatgctgaatcctgccaatacccgcagcatttccaacatgacatcccaggaatttgtggagaaactaaccaagcgactgaaaagacaccctgaggagacaggaggcttccaggaggcaccgctggcctatgatgccatctgggccttggcactggccctgaacaagacatctggaggaggcggccgttctggtgtgcgcctggaggacttcaactacaacaaccagaccattaccgaccaaatctaccgggcaatgaactcttcgtcctttgagggtgtctctggccatgtggtgtttgatgccagcggctctcggatggcatggacgcttatcgagcagcttcagggtggcagctacaagaagattggctactatgacagcaccaaggatgatctttcctggtccaaaacagataaatggattggagggtcccccccagctgaccagaccctggtcatcaagacattccgcttcctgtcacagaaactctttatctccgtctcagttctctccagcctgggcattgtcctagctgttgtctgtctgtcctttaacatctacaactcacatgtccgttatatccagaactcacagcccaacctgaacaacctgactgctgtgggctgctcactggctttagctgctgtcttccccctggggctcgatggttaccacattgggaggaaccagtttcctttcgtctgccaggcccgcctctggctcctgggcctgggctttagtctgggctacggttccatgttcaccaagatttggtgggtccacacggtcttcacaaagaaggaagaaaagaaggagtggaggaagactctggaaccctggaagctgtatgccacagtgggcctgctggtgggcatggatgtcctcactctcgccatctggcagatcgtggaccctctgcaccggaccattgagacatttgccaaggaggaacctaaggaagatattgacgtctctattctgccccagctggagcattgcagctccaggaagatgaatacatggcttggcattttctatggttacaaggggctgctgctgctgctgggaatcttccttgcttatgagaccaagagtgtgtccactgagaagatcaatgatcaccgggctgtgggcatggctatctacaatgtggcagtcctgtgcctcatcactgctcctgtcaccatgattctgtccagccagcaggatgcagcctttgcctttgcctctcttgccatagttttctcctcctatatcactcttgttgtgctctttgtgcccaagatgcgcaggctgatcacccgaggggaatggcagtcggaggcgcaggacaccatgaagacagggtcatcgaccaacaacaacgaggaggagaagtcccggctgttggagaaggagaaccgtgaactggaaaagatcattgctgagaaagaggagcgtgtctctgaactgcgccatcaactccagtctcggcagcagctccgctcccggcgccacccaccgacacccccagaaccctctgggggcctgcccaggggaccccctgagccccccgaccggcttagctgtgatgggagtcgagtgcatttgctttataagtgagggtagggtgagggaggacaggccagtagggggagggaaagggagaggggaagggcaggggactcaggaagcagggggtccccatccccagctgggaagaacatgctatccaatctcatctcttgtaaatacatgtccccctgtgagttctgggctgatttgggtctctcatacctctgggaaacagacctttttctctcttactgcttcatgtaattttgtatcacctcttcacaatttagttcgtacctggcttgaagctgctcactgctcacacgctgcctcctcagcagcctcactgcatctttctcttcccatgcaacaccctcttctagttaccacggcaacccctgcagctcctctgcctttgtgctctgttcctgtccagcaggggtctcccaacaagtgctctttccaccccaaaggggcctctccttttctccactgtcataatctctttccatcttacttgcccttctatactttctcacatgtggctccccctgaattttgcttcctttgggagctcattcttttcgccaaggctcacatgctccttgcctctgctctgtgcactcacgctcagcacacatgcatcctcccctctcctgcgtgtgcccactgaacatgctcatgtgtacacacgcttttcccgtatgctttcttcatgttcagtcacatgtgctctcgggtgccctgcattcacagctacgtgtgcccctctcatggtcatgggtctgcccttgagcgtgtttgggtaggcatgtgcaatttgtctagcatgctgagtcatgtctttcctatttgcacacgtccatgtttatccatgtactttccctgtgtaccctccatgtaccttgtgtactttcttcccttaaatcatggtattcttctgacagagccatatgtaccctaccctgcacattgttatgcacttttccccaattcatgtttggtggggccatccacaccctctccttgtcacagaatctccatttctgctcagattccccccatctccattgcattcatgtactaccctcagtctacactcacaatcatcttctcccaagactgctcccttttgttttgtgtttttttgaggggaattaaggaaaaataagtgggggcaggtttggagagctgcttccagtggatagttgatgagaatcctgaccaaaggaaggcacccttgactgttgggatagacagatggacctatggggtgggaggtggtgtccctttcacactgtggtgtctcttggggaaggatctccccgaatctcaataaaccagtgaacagtgtgactcggcaaaaaaaaaaaa

SEQ ID NO: 449866 - DNA, 4331 bp, Homo sapiens
agcggcccttgcaccctccttcttccctccgcccgggagctctccctggtccccggcgccgcctccttccctcccggctccccgctccccgctcccgtggctgccgccgccccggggaagaagagacaggggtggggtttgggggaagcgagagaggaggggagagaccctggccaggctggagcctggattcgaggggaggagggacgggaggaggagaaaggtggaggagaagggaggggggagcggggaggagcggccgggcctggggccttgaggcccggggagagccggggagccgggcccgcgcgccgagatgttgctgctgctgctactggcgccactcttcctccgccccccgggcgcgggcggggcgcagacccccaacgccacctcagaaggttgccagatcatacacccgccctgggaagggggcatcaggtaccggggcctgactcgggaccaggtgaaggctatcaacttcctgccagtggactatgagattgagtatgtgtgccggggggagcgcgaggtggtggggcccaaggtccgcaagtgcctggccaacggctcctggacagatatggacacacccagccgctgtgccacactcagaacggcgcgcagtgtacatcggggcactgtttcccatgagcgggggctggccagggggccaggcctgccagcccgcggtggagatggcgctggaggacgtgaatagccgcagggacatcctgccggactatgagctcaagctcatccaccacgacagcaagtgtgatccaggccaagccaccaagtacctatatgagctgctctacaacgaccctatcaagatcatccttatgcctggctgcagctctgtctccacgctggtggctgaggctgctaggatgtggaacctcattgtgctttcctatggctccagctcaccagccctgtcaaaccggcagcgtttccccactttcttccgaacgcacccatcagccacactccacaaccctacccgcgtgaaactctttgaaaagtggggctggaagaagattgctaccatccagcagaccactgaggtcttcacttcgactctggacgacctggaggaacgagtgaaggaggctggaattgagattactttccgccagagtttcttctcagatccagctgtgcccgtcaaaaacctgaagcgccaggatgcccgaatcatcgtgggacttttctatgagactgaagcccggaaagttttttgtgaggtgtacaaggagcgtctctttgggaagaagtacgtctggttcctcattgggtggtatgctgacaattggttcaagatctacgacccttctatcaactgcacagtggatgagatgactgaggcggtggagggccacatcacaactgagattgtcatgctgaatcctgccaatacccgcagcatttccaacatgacatcccaggaatttgtggagaaactaaccaagcgactgaaaagacaccctgaggagacaggaggcttccaggaggcaccgctggcctatgatgccatctgggccttggcactggccctgaacaagacatctggaggaggcggccgttctggtgtgcgcctggaggacttcaactacaacaaccagaccattaccgaccaaatctaccgggcaatgaactcttcgtcctttgagggtgtctctggccatgtggtgtttgatgccagcggctctcggatggcatggacgcttatcgagcagcttcagggtggcagctacaagaagattggctactatgacagcaccaaggatgatctttcctggtccaaaacagataaatggattggagggtcccccccagctgaccagaccctggtcatcaagacattccgcttcctgtcacagaaactctttatctccgtctcagttctctccagcctgggcattgtcctagctgttgtctgtctgtcctttaacatctacaactcacatgtccgttatatccagaactcacagcccaacctgaacaacctgactgctgtgggctgctcactggctttagctgctgtcttccccctggggctcgatggttaccacattgggaggaaccagtttcctttcgtctgccaggcccgcctctggctcctgggcctgggctttagtctgggctacggttccatgttcaccaagatttggtgggtccacacggtcttcacaaagaaggaagaaaagaaggagtggaggaagactctggaaccctggaagctgtatgccacagtgggcctgctggtgggcatggatgtcctcactctcgccatctggcagatcgtggaccctctgcaccggaccattgagacatttgccaaggaggaacctaaggaagatattgacgtctctattctgccccagctggagcattgcagctccaggaagatgaatacatggcttggcattttctatggttacaaggggctgctgctgctgctgggaatcttccttgcttatgagaccaagagtgtgtccactgagaagatcaatgatcaccgggctgtgggcatggctatctacaatgtggcagtcctgtgcctcatcactgctcctgtcaccatgattctgtccagccagcaggatgcagcctttgcctttgcctctcttgccatagttttctcctcctatatcactcttgttgtgctctttgtgcccaagatgcgcaggctgatcacccgaggggaatggcagtcggaggcgcaggacaccatgaagacagggtcatcgaccaacaacaacgaggaggagaagtcccggctgttggagaaggagaaccgtgaactggaaaagatcattgctgagaaagaggagcgtgtctctgaactgcgccatcaactccagtctcggcagcagctccgctcccggcgccacccaccgacacccccagaaccctctgggggcctgcccaggggaccccctgagccccccgaccggcttagctgtgatgggagtcgagtgcatttgctttataagtgagggtagggtgagggaggacaggccagtagggggagggaaagggagaggggaagggcaggggactcaggaagcagggggtccccatccccagctgggaagaacatgctatccaatctcatctcttgtaaatacatgtccccctgtgagttctgggctgatttgggtctctcatacctctgggaaacagacctttttctctcttactgcttcatgtaattttgtatcacctcttcacaatttagttcgtacctggcttgaagctgctcactgctcacacgctgcctcctcagcagcctcactgcatctttctcttcccatgcaacaccctcttctagttaccacggcaacccctgcagctcctctgcctttgtgctctgttcctgtccagcaggggtctcccaacaagtgctctttccaccccaaaggggcctctccttttctccactgtcataatctctttccatcttacttgcccttctatactttctcacatgtggctccccctgaattttgcttcctttgggagctcattcttttcgccaaggctcacatgctccttgcctctgctctgtgcactcacgctcagcacacatgcatcctcccctctcctgcgtgtgcccactgaacatgctcatgtgtacacacgcttttcccgtatgctttcttcatgttcagtcacatgtgctctcgggtgccctgcattcacagctacgtgtgcccctctcatggtcatgggtctgcccttgagcgtgtttgggtaggcatgtgcaatttgtctagcatgctgagtcatgtctttcctatttgcacacgtccatgtttatccatgtactttccctgtgtaccctccatgtaccttgtgtactttcttcccttaaatcatggtattcttctgacagagccatatgtaccctaccctgcacattgttatgcacttttccccaattcatgtttggtggggccatccacaccctctccttgtcacagaatctccatttctgctcagattccccccatctccattgcattcatgtactaccctcagtctacactcacaatcatcttctcccaagactgctcccttttgttttgtgtttttttgaggggaattaaggaaaaataagtgggggcaggtttggagagctgcttccagtggatagttgatgagaatcctgaccaaaggaaggcacccttgactgttgggatagacagatggacctatggggtgggaggtggtgtccctttcacactgtggtgtctcttggggaaggatctccccgaatctcaataaaccagtgaacagtgtgactcggcaaaaaaaaaaaa

SEQ ID NO: 449867 - DNA, 1936 bp, Homo sapiens
agcggcccttgcaccctccttcttccctccgcccgggagctctccctggtccccggcgccgcctccttccctcccggctccccgctccccgctcccgtggctgccgccgccccggggaagaagagacaggggtggggtttgggggaagcgagagaggaggggagagaccctggccaggctggagcctggattcgaggggaggagggacgggaggaggagaaaggtggaggagaagggaggggggagcggggaggagcggccgggcctggggccttgaggcccggggagagccggggagccgggcccgcgcgccgagatgttgctgctgctgctactggcgccactcttcctccgccccccgggcgcgggcggggcgcagacccccaacgccacctcagaaggttgccagatcatacacccgccctgggaagggggcatcaggtaccggggcctgactcgggaccaggtgaaggctatcaacttcctgccagtggactatgagattgagtatgtgtgccggggggagcgcgaggtggtggggcccaaggtccgcaagtgcctggccaacggctcctggacagatatggacacacccagccgctgtgtccgaatctgctccaagtcttatttgaccctggaaaatgggaaggttttcctgacgggtggggacctcccagctctggacggagcccgggtggatttccggtgtgaccccgacttccatctggtgggcagctcccggagcatctgtagtcagggccagtggagcacccccaagccccactgccaggtgaatcgaacgctgcctgcatgcagctgatgaggacgcttgtgtgaggatgggagtggggtgggaatggataatgggaaagaatggagagctataaaaatgtgggggaggacattggaaaggggagatgaaagtccctttgtcctccatcacctgcctcaaacttcctcttgcagtccccggtatcctctgtaggttgggggcttccttcctttaccttttaaaaaaatcttcctgctcccgattcttagacctcacgttttctcttttcctttatgaatctcacctctctcaccttcttcaggtttaaatactccaattttccctttctctaaacttagaaatttccatgcatcaccctcttctagaattcatccctcaccattccttatataattgatttattgtaaagactcagaaataaatcaaacattctactaagaaaaattgagaaggggagctctgggggtggaaacatattagggtaaaagacttaaaattggaggcagcattatcagaagatgaagaacaactcagggatggggtgggaagaagacaggtccttttctgtacttcctagacaacctccattattccctaagggaatcagtgttgtgtctgtctacttttttttttttttttttgccacgtaattttacaaactctcccttttctaggcacccgaactctctgccatcttctctcctgggatgcagtcatcccatttgtatgcctcatacttcctctaccctggtagattctttcaagatccttgggctttactttcctcacataactcagttattctgcttctagtttaccattttattctggaaattgagagtcccatccaggggtggacttatgacactactgaaacttagacttcaaggttcctcacctacagggccctcttcctgtgctctaataatatagagggctcgatggatatgtgttcatatggtaacaggcttttgtaaaaattgcagaaataagattttaacagcaattgcttaaagccaattgtatgtgtaattttttttcttaaagactcccaattttgtaatattcaggcaccacagaaccaagatctgccccaaacttagctattggcattcccgtctcaaattctgttgtcctatgaaa

SEQ ID NO: 449868 - DNA, 488 bp, Homo sapiens
cattgagggtctcataggaaaacagttggaagccagagactgagaagcgttgaggagaggaggggaggctggcaaccatctttcttgtgaccttgtttctgccctagacatttgccaaggaggaacctaaggaagatattgacgtctctattctgccccagctggagcattgcagctccaggaagatgaatacatggcttggcattttctatggttacaaggggctgctgctgctgctgggaatcttccttgcttatgagaccaagagtgtgtccactgagaagatcaatgatcaccgggctgtgggcatggctatctacaatgtggcagtgagcactgaccccatggcattgaccctgtaggctgaccacagcagcccagatatagaggactaggaagaatcaatgctagatctgggatcggttgcttagaagtcttaaaaagtttgttaattcttcaggtctataaagcactttacagtttaaaaa

SEQ ID NO: 449869 - DNA, 5113 bp, Homo sapiens
  misc_feature (4529)..(4529): n is a, c, g, or t
agcggcccttgcaccctccttcttccctccgcccgggagctctccctggtccccggcgccgcctccttccctcccggctccccgctccccgctcccgtggctgccgccgccccggggaagaagagacaggggtggggtttgggggaagcgagagaggaggggagagaccctggccaggctggagcctggattcgaggggaggagggacgggaggaggagaaaggtggaggagaagggaggggggagcggggaggagcggccgggcctggggccttgaggcccggggagagccggggagccgggcccgcgcgccgagatgttgctgctgctgctactggcgccactcttcctccgccccccgggcgcgggcggggcgcagacccccaacgccacctcagaaggttgccagatcatacacccgccctgggaagggggcatcaggtaccggggcctgactcgggaccaggtgaaggctatcaacttcctgccagtggactatgagattgagtatgtgtgccggggggagcgcgaggtggtggggcccaaggtccgcaagtgcctggccaacggctcctggacagatatggacacacccagccgctgtgtccgaatctgctccaagtcttatttgaccctggaaaatgggaaggttttcctgacgggtggggacctcccagctctggacggagcccgggtggatttccggtgtgaccccgacttccatctggtgggcagctcccggagcatctgtagtcagggccagtggagcacccccaagccccactgccaggtgaatcgaacgccacactcagaacggcgcgcagtgtacatcggggcactgtttcccatgagcgggggctggccagggggccaggcctgccagcccgcggtggagatggcgctggaggacgtgaatagccgcagggacatcctgccggactatgagctcaagctcatccaccacgacagcaagtgtgatccaggccaagccaccaagtacctatatgagctgctctacaacgaccctatcaagatcatccttatgcctggctgcagctctgtctccacgctggtggctgaggctgctaggatgtggaacctcattgtgctttcctatggctccagctcaccagccctgtcaaaccggcagcgtttccccactttcttccgaacgcacccatcagccacactccacaaccctacccgcgtgaaactctttgaaaagtggggctggaagaagattgctaccatccagcagaccactgaggtcttcacttcgactctggacgacctggaggaacgagtgaaggaggctggaattgagattactttccgccagagtttcttctcagatccagctgtgcccgtcaaaaacctgaagcgccaggatgcccgaatcatcgtgggacttttctatgagactgaagcccggaaagttttttgtgaggtgtacaaggagcgtctctttgggaagaagtacgtctggttcctcattgggtggtatgctgacaattggttcaagatctacgacccttctatcaactgcacagtggatgagatgactgaggcggtggagggccacatcacaactgagattgtcatgctgaatcctgccaatacccgcagcatttccaacatgacatcccaggaatttgtggagaaactaaccaagcgactgaaaagacaccctgaggagacaggaggcttccaggaggcaccgctggcctatgatgccatctgggccttggcactggccctgaacaagacatctggaggaggcggccgttctggtgtgcgcctggaggacttcaactacaacaaccagaccattaccgaccaaatctaccgggcaatgaactcttcgtcctttgagggtgtctctggccatgtggtgtttgatgccagcggctctcggatggcatggacgcttatcgagcagcttcagggtggcagctacaagaagattggctactatgacagcaccaaggatgatctttcctggtccaaaacagataaatggattggagggtcccccccagctgaccagaccctggtcatcaagacattccgcttcctgtcacagaaactctttatctccgtctcagttctctccagcctgggcattgtcctagctgttgtctgtctgtcctttaacatctacaactcacatgtccgttatatccagaactcacagcccaacctgaacaacctgactgctgtgggctgctcactggctttagctgctgtcttccccctggggctcgatggttaccacattgggaggaaccagtttcctttcgtctgccaggcccgcctctggctcctgggcctgggctttagtctgggctacggttccatgttcaccaagatttggtgggtccacacggtcttcacaaagaaggaagaaaagaaggagtggaggaagactctggaaccctggaagctgtatgccacagtgggcctgctggtgggcatggatgtcctcactctcgccatctggcagatcgtggaccctctgcaccggaccattgagacatttgccaaggaggaacctaaggaagatattgacgtctctattctgccccagctggagcattgcagctccaggaagatgaatacatggcttggcattttctatggttacaaggggctgctgctgctgctgggaatcttccttgcttatgagaccaagagtgtgtccactgagaagatcaatgatcaccgggctgtgggcatggctatctacaatgtggcagtcctgtgcctcatcactgctcctgtcaccatgattctgtccagccagcaggatgcagcctttgcctttgcctctcttgccatagttttctcctcctatatcactcttgttgtgctctttgtgcccaagatgcgcaggctgatcacccgaggggaatggcagtcggaggcgcaggacaccatgaagacagggtcatcgaccaacaacaacgaggaggagaagtcccggctgttggagaaggagaaccgtgaactggaaaagatcattgctgagaaagaggagcgtgtctctgaactgcgccatcaactccagtctcggcagcagctccgctcccggcgccacccaccgacacccccagaaccctctgggggcctgcccaggggaccccctgagccccccgaccggcttagctgtgatgggagtcgagtgcatttgctttataagtgagggtagggtgagggaggacaggccagtagggggagggaaagggagaggggaagggcaggggactcaggaagcagggggtccccatccccagctgggaagaacatgctatccaatctcatctcttgtaaatacatgtccccctgtgagttctgggctgatttgggtctctcatacctctgggaaacagacctttttctctcttactgcttcatgtaattttgtatcacctcttcacaatttagttcgtacctggcttgaagctgctcactgctcacacgctgcctcctcagcagcctcactgcatctttctcttcccatgcaacaccctcttctagttaccacggcaacccctgcagctcctctgcctttgtgctctgttcctgtccagcaggggtctcccaacaagtgctctttccaccccaaaggggcctctccttttctccactgtcataatctctttccatcttacttgcccttctatactttctcacatgtggctccccctgaattttgcttcctttgggagctcattcttttcgccaaggctcacatgctccttgcctctgctctgtgcactcacgctcagcacacatgcatcctcccctctcctgcgtgtgcccactgaacatgctcatgtgtacacacgcttttcccgtatgctttcttcatgttcagtcacatgtgctctcgggtgccctgcattcacagctacgtgtgcccctctcatggtcatgggtctgcccttgagcgtgtttgggtaggcatgtgcaatttgtctagcatgctgagtcatgtctttcctatttgcacacgtccatgtttatccatgtactttccctgtgtaccctccatgtaccttgtgtactttcttcccttaaatcatggtattcttctgacagagccatatgtaccctaccctgcacattgttatgcacttttccccaattcatgtttggtggggccatccacaccctctccttgtcacagaatctccatttctgctcagattccccccatctccattgcattcatgtactaccctcagtctacactcacaatcatcttctcccaagactgctcccttttgttttgtgtttttttgaggggaattaaggaaaaataagtgggggcaggtttggagagctgcttccagtggatagttgatgagaatcctgaccaaaggaaggcacccttgactgttgggatagacagatggacctatggggtgggaggtggtgtccctttcacactgtggtgtctcttggggaaggatctccccgaatctcaataaaccagtgaacagtgaaaaaaaaaaaaaaaaaaaaanaaaaaaaaaaaaaaaaaaaaaaaaaaaaaaaaaaaaaaaaaaaaaaaaaaaaagagagagagggagggcggcgcggcacaacaagagatcatcctcctcgcggagagggcgccaccagcatgtgcgcggcggacccccgcggtgtttgttgtaagacagaaggggggcgccccagaaggaagaggagagtctatatatatcagacgagagacgcgcgagccgggggccctgtgtttaaaaaacgacgcgcgggagcggtgggagaacaaacggcgcgccacgacggcgcgaagaccctatcgtgggagggagacgaccacacactatacggggggggggggagaaaacaactcagggggagaacaaccatcacccctacaggagaagaattattaaagagacccctgtagaggggagagataataaatcaacacctcctaacgagagggtagtaataatgtgggtggtgcgaacacacaaggggggggtaaattccgccgcggcgcgctgagaaagaagagtctggggcgcccacgccgggggtactctgtattagctgagaaagaattcttttacccgcgggg

SEQ ID NO: 449870 - DNA, 3818 bp, Homo sapiens
agcggcccttgcaccctccttcttccctccgcccgggagctctccctggtccccggcgccgcctccttccctcccggctccccgctccccgctcccgtggctgccgccgccccggggaagaagagacaggggtggggtttgggggaagcgagagaggaggggagagaccctggccaggctggagcctggattcgaggggaggagggacgggaggaggagaaaggtggaggagaagggaggggggagcggggaggagcggccgggcctggggccttgaggcccggggagagccggggagccgggcccgcgcgccgagatgttgctgctgctgctactggcgccactcttcctccgccccccgggcgcgggcggggcgcagacccccaacgccacctcagaaggttgccagatcatacacccgccctgggaagggggcatcaggtaccggggcctgactcgggaccaggtgaaggctatcaacttcctgccagtggactatgagattgagtatgtgtgccggggggagcgcgaggtggtggggcccaaggtccgcaagtgcctggccaacggctcctggacagatatggacacacccagccgctgtgtccgaatctgctccaagtcttatttgaccctggaaaatgggaaggttttcctgacgggtggggacctcccagctctggacggagcccgggtggatttccggtgtgaccccgacttccatctggtgggcagctcccggagcatctgtagtcagggccagtggagcacccccaagccccactgccaggtgaatcgaacgccacactcagaacggcgcgcagtgtacatcggggcactgtttcccatgagcgggggctggccagggggccaggcctgccagcccgcggtggagatggcgctggaggacgtgaatagccgcagggacatcctgccggactatgagctcaagctcatccaccacgacagcaagtgtgatccaggccaagccaccaagtacctatatgagctgctctacaacgaccctatcaagatcatccttatgcctggctgcagctctgtctccacgctggtggctgaggctgctaggatgtggaacctcattgtgctttcctatggctccagctcaccagccctgtcaaaccggcagcgtttccccactttcttccgaacgcacccatcagccacactccacaaccctacccgcgtgaaactctttgaaaagtggggctggaagaagattgctaccatccagcagaccactgaggtcttcacttcgactctggacgacctggaggaacgagtgaaggaggctggaattgagattactttccgccagagtttcttctcagatccagctgtgcccgtcaaaaacctgaagcgccaggatgcccgaatcatcgtgggacttttctatgagactgaagcccggaaagttttttgtgaggtgtacaaggagcgtctctttgggaagaagtacgtctggttcctcattgggtggtatgctgacaattggttcaagatctacgacccttctatcaactgcacagtggatgagatgactgaggcggtggagggccacatcacaactgagattgtcatgctgaatcctgccaatacccgcagcatttccaacatgacatcccaggaatttgtggagaaactaaccaagcgactgaaaagacaccctgaggagacaggaggcttccaggaggcaccgctggcctatgatgccatctgggccttggcactggccctgaacaagacatctggaggaggcggccgttctggtgtgcgcctggaggacttcaactacaacaaccagaccattaccgaccaaatctaccgggcaatgaactcttcgtcctttgagggtgtctctggccatgtggtgtttgatgccagcggctctcggatggcatggacgcttatcgagcagcttcagggtggcagctacaagaagattggctactatgacagcaccaaggatgatctttcctggtccaaaacagataaatggattgttatatccagaactcacagcccaacctgaacaacctgactgctgtgggctgctcactggctttagctgctgtcttccccctggggctcgatggttaccacattgggaggaaccagtttcctttcgtctgccaggcccgcctctggctcctgggcctgggctttagtctgggctacggttccatgttcaccaagatttggtgggtccacacggtcttcacaaagaaggaagaaaagaaggagtggaggaagactctggaaccctggaagctgtatgccacagtgggcctgctggtgggcatggatgtcctcactctcgccatctggcagatcgtggaccctctgcaccggaccattgagacatttgccaaggaggaacctaaggaagatattgacgtctctattctgccccagctggagcattgcagctccaggaagatgaatacatggcttgctgtgatgggagtcgagtgcatttgctttataagtgagggtagggtgagggaggacaggccagtagggggagggaaagggagaggggaagggcaggggactcaggaagcagggggtccccatccccagctgggaagaacatgctatccaatctcatctcttgtaaatacatgtccccctgtgagttctgggctgatttgggtctctcatacctctgggaaacagacctttttctctcttactgcttcatgtaattttgtatcacctcttcacaatttagttcgtacctggcttgaagctgctcactgctcacacgctgcctcctcagcagcctcactgcatctttctcttcccatgcaacaccctcttctagttaccacggcaacccctgcagctcctctgcctttgtgctctgttcctgtccagcaggggtctcccaacaagtgctctttccaccccaaaggggcctctccttttctccactgtcataatctctttccatcttacttgcccttctatactttctcacatgtggctccccctgaattttgcttcctttgggagctcattcttttcgccaaggctcacatgctccttgcctctgctctgtgcactcacgctcagcacacatgcatcctcccctctcctgcgtgtgcccactgaacatgctcatgtgtacacacgcttttcccgtatgctttcttcatgttcagtcacatgtgctctcgggtgccctgcattcacagctacgtgtgcccctctcatggtcatgggtctgcccttgagcgtgtttgggtaggcatgtgcaatttgtctagcatgctgagtcatgtctttcctatttgcacacgtccatgtttatccatgtactttccctgtgtaccctccatgtaccttgtgtactttcttcccttaaatcatggtattcttctgacagagccatatgtaccctaccctgcacattgttatgcacttttccccaattcatgtttggtggggccatccacaccctctccttgtcacagaatctccatttctgctcagattccccccatctccattgcattcatgtactaccctcagtctacactcacaatcatcttctcccaagactgctcccttttgttttgtgtttttttgaggggaattaaggaaaaataagtgggggcaggtttggagagctgcttccagtggatagttgatgagaatcctgaccaaaggaaggcacccttgactgttgggatagacagatggacctatggggtgggaggtggtgtccctttcacactgtggtgtctcttggggaaggatctccccgaatctcaataaaccagtgaacagtg

SEQ ID NO: 449871 - DNA, 1909 bp, Homo sapiens
gctcaagtgactctctcctgccatcctaggcattttctatggttacaaggggctgctgctgctgctgggaatcttccttgcttatgagaccaagagtgtgtccactgagaagatcaatgatcaccgggctgtgggcatggctatctacaatgtggcagtcctgtgcctcatcactgctcctgtcaccatgattctgtccagccagcaggatgcagcctttgcctttgcctctcttgccatagttttctcctcctatatcactcttgttgtgctctttgtgcccaagatgcgcaggctgatcacccgaggggaatggcagtcggaggcgcaggacaccatgaagacagggtcatcgaccaacaacaacgaggaggagaagtcccggctgttggagaaggagaaccgtgaactggaaaagatcattgctgagaaagaggagcgtgtctctgaactgcgccatcaactccagtctcggcagcagctccgctcccggcgccacccaccgacacccccagaaccctctgggggcctgcccaggggaccccctgagccccccgaccggcttagctgtgatgggagtcgagtgcatttgctttataagtgagggtagggtgagggaggacaggccagtagggggagggaaagggagaggggaagggcaggggactcaggaagcagggggtccccatccccagctgggaagaacatgctatccaatctcatctcttgtaaatacatgtccccctgtgagttctgggctgatttgggtctctcatacctctgggaaacagacctttttctctcttactgcttcatgtaattttgtatcacctcttcacaatttagttcgtacctggcttgaagctgctcactgctcacacgctgcctcctcagcagcctcactgcatctttctcttcccatgcaacaccctcttctagttaccacggcaacccctgcagctcctctgcctttgtgctctgttcctgtccagcaggggtctcccaacaagtgctctttccaccccaaaggggcctctccttttctccactgtcataatctctttccatcttacttgcccttctatactttctcacatgtggctccccctgaattttgcttcctttgggagctcattcttttcgccaaggctcacatgctccttgcctctgctctgtgcactcacgctcagcacacatgcatcctcccctctcctgcgtgtgcccactgaacatgctcatgtgtacacacgcttttcccgtatgctttcttcatgttcagtcacatgtgctctcgggtgccctgcattcacagctacgtgtgcccctctcatggtcatgggtctgcccttgagcgtgtttgggtaggcatgtgcaatttgtctagcatgctgagtcatgtctttcctatttgcacacgtccatgtttatccatgtactttccctgtgtaccctccatgtaccttgtgtactttcttcccttaaatcatggtattcttctgacagagccatatgtaccctaccctgcacattgttatgcacttttccccaattcatgtttggtggggccatccacaccctctccttgtcacagaatctccatttctgctcagattccccccatctccattgcattcatgtactaccctcagtctacactcacaatcatcttctcccaagactgctcccttttgttttgtgtttttttgaggggaattaaggaaaaataagtgggggcaggtttggagagctgcttccagtggatagttgatgagaatcctgaccaaaggaaggcacccttgactgttgggatagacagatggacctatggggtgggaggtggtgtccctttcacactgtggtgtctcttggggaaggatctccccgaatctcaataaaccagtgaacagtg

SEQ ID NO: 449872 - DNA, 1913 bp, Homo sapiens
tttctcaatctatatttgaggatgatcctgaatttggatccttttcaaagggaaagttcaccaggaaactgtctgcatagactccctcccatgggaagtaaactctggatcttgtctgagcctgcagacctgagactccctcaatgtgtctttccctctaggtcctgtgcctcatcactgctcctgtcaccatgattctgtccagccagcaggatgcagcctttgcctttgcctctcttgccatagttttctcctcctatatcactcttgttgtgctctttgtgcccaagatgcgcaggctgatcacccgaggggaatggcagtcggaggcgcaggacaccatgaagacagggtcatcgaccaacaacaacgaggaggagaagtcccggctgttggagaaggagaaccgtgaactggaaaagatcattgctgagaaagaggagcgtgtctctgaactgcgccatcaactccagtctcggcagcagctccgctcccggcgccacccaccgacacccccagaaccctctgggggcctgcccaggggaccccctgagccccccgaccggcttagctgtgatgggagtcgagtgcatttgctttataagtgagggtagggtgagggaggacaggccagtagggggagggaaagggagaggggaagggcaggggactcaggaagcagggggtccccatccccagctgggaagaacatgctatccaatctcatctcttgtaaatacatgtccccctgtgagttctgggctgatttgggtctctcatacctctgggaaacagacctttttctctcttactgcttcatgtaattttgtatcacctcttcacaatttagttcgtacctggcttgaagctgctcactgctcacacgctgcctcctcagcagcctcactgcatctttctcttcccatgcaacaccctcttctagttaccacggcaacccctgcagctcctctgcctttgtgctctgttcctgtccagcaggggtctcccaacaagtgctctttccaccccaaaggggcctctccttttctccactgtcataatctctttccatcttacttgcccttctatactttctcacatgtggctccccctgaattttgcttcctttgggagctcattcttttcgccaaggctcacatgctccttgcctctgctctgtgcactcacgctcagcacacatgcatcctcccctctcctgcgtgtgcccactgaacatgctcatgtgtacacacgcttttcccgtatgctttcttcatgttcagtcacatgtgctctcgggtgccctgcattcacagctacgtgtgcccctctcatggtcatgggtctgcccttgagcgtgtttgggtaggcatgtgcaatttgtctagcatgctgagtcatgtctttcctatttgcacacgtccatgtttatccatgtactttccctgtgtaccctccatgtaccttgtgtactttcttcccttaaatcatggtattcttctgacagagccatatgtaccctaccctgcacattgttatgcacttttccccaattcatgtttggtggggccatccacaccctctccttgtcacagaatctccatttctgctcagattccccccatctccattgcattcatgtactaccctcagtctacactcacaatcatcttctcccaagactgctcccttttgttttgtgtttttttgaggggaattaaggaaaaataagtgggggcaggtttggagagctgcttccagtggatagttgatgagaatcctgaccaaaggaaggcacccttgactgttgggatagacagatggacctatggggtgggaggtggtgtccctttcacactgtggtgtctcttggggaaggatctccccgaatctcaataaaccagtgaacagtg

SEQ ID NO: 449873 - DNA, 3217 bp, Homo sapiens
agcggcccttgcaccctccttcttccctccgcccgggagctctccctggtccccggcgccgcctccttccctcccggctccccgctccccgctcccgtggctgccgccgccccggggaagaagagacaggggtggggtttgggggaagcgagagaggaggggagagaccctggccaggctggagcctggattcgaggggaggagggacgggaggaggagaaaggtggaggagaagggaggggggagcggggaggagcggccgggcctggggccttgaggcccggggagagccggggagccgggcccgcgcgccgagatgttgctgctgctgctactggcgccactcttcctccgccccccgggcgcgggcggggcgcagacccccaacgccacctcagaaggttgccagatcatacacccgccctgggaagggggcatcaggtaccggggcctgactcgggaccaggtgaaggctatcaacttcctgccagtggactatgagattgagtatgtgtgccggggggagcgcgaggtggtggggcccaaggtccgcaagtgcctggccaacggctcctggacagatatggacacacccagccgctgtgtccgaatctgctccaagtcttatttgaccctggaaaatgggaaggttttcctgacgggtggggacctcccagctctggacggagcccgggtggatttccggtgtgaccccgacttccatctggtgggcagctcccggagcatctgtagtcagggccagtggagcacccccaagccccactgccaggtgaatcgaacgccacactcagaacggcgcgcagtgtacatcggggcactgtttcccatgagcgggggctggccagggggccaggcctgccagcccgcggtggagatggcgctggaggacgtgaatagccgcagggacatcctgccggactatgagctcaagctcatccaccacgacagcaagtgtgatccaggccaagccaccaagtacctatatgagctgctctacaacgaccctatcaagatcatccttatgcctggctgcagctctgtctccacgctggtggctgaggctgctaggatgtggaacctcattgtgctttcctatggctccagctcaccagccctgtcaaaccggcagcgtttccccactttcttccgaacgcacccatcagccacactccacaaccctacccgcgtgaaactctttgaaaagtggggctggaagaagattgctaccatccagcagaccactgaggtcttcacttcgactctggacgacctggaggaacgagtgaaggaggctggaattgagattactttccgccagagtttcttctcagatccagctgtgcccgtcaaaaacctgaagcgccaggatgcccgaatcatcgtgggacttttctatgagactgaagcccggaaagttttttgtgaggtgtacaaggagcgtctctttgggaagaagtacgtctggttcctcattgggtggtatgctgacaattggttcaagatctacgacccttctatcaactgcacagtggatgagatgactgaggcggtggagggccacatcacaactgagattgtcatgctgaatcctgccaatacccgcagcatttccaacatgacatcccaggaatttgtggagaaactaaccaagcgactgaaaagacaccctgaggagacaggaggcttccaggaggcaccgctggcctatgatgccatctgggccttggcactggccctgaacaagacatctggaggaggcggccgttctggtgtgcgcctggaggacttcaactacaacaaccagaccattaccgaccaaatctaccgggcaatgaactcttcgtcctttgagggtgtctctggccatgtggtgtttgatgccagcggctctcggatggcatggacgcttatcgagcagcttcagggtggcagctacaagaagattggctactatgacagcaccaaggatgatctttcctggtccaaaacagataaatggattgttatatccagaactcacagcccaacctgaacaacctgactgctgtgggctgctcactggctttagctgctgtcttccccctggggctcgatggttaccacattgggaggaaccagtttcctttcgtctgccaggcccgcctctggctcctgggcctgggctttagtctgggctacggttccatgttcaccaagatttggtgggtccacacggtcttcacaaagaaggaagaaaagaaggagtggaggaagactctggaaccctggaagctgtatgccacagtgggcctgctggtgggcatggatgtcctcactctcgccatctggcagatcgtggaccctctgcaccggaccattgagacatttgccaaggaggaacctaaggaagatattgacgtctctattctgccccagctggagcattgcagctccaggaagatgaatacatggcttggcattttctatggttacaaggggctgctgctgctgctgggaatcttccttgcttatgagaccaagagtgtgtccactgagaagatcaatgatcaccgggctgtgggcatggctatctacaatgtggcagtcctgtgcctcatcactgctcctgtcaccatgattctgtccagccagcaggatgcagcctttgcctttgcctctcttgccatagttttctcctcctatatcactcttgttgtgctctttgtgcccaagatgcgcaggctgatcacccgaggggaatggcagtcggaggcgcaggacaccatgaagacagggtcatcgaccaacaacaacgaggaggagaagtcccggctgttggagaaggagaaccgtgaactggaaaagatcattgctgagaaagaggagcgtgtctctgaactgcgccatcaactccacagattccccccatctccattgcattcatgtactaccctcagtctacactcacaatcatcttctcccaagactgctcccttttgttttgtgtttttttgaggggaattaaggaaaaataagtgggggcaggtttggagagctgcttccagtggatagttgatgagaatcctgaccaaaggaaggcacccttgactgttgggatagacagatggacctatggggtgggaggtggtgtccctttcacactgtggtgtctcttggggaaggatctccccgaatctcaataaaccagtgaacagtg

SEQ ID NO: 449874 - DNA, 2304 bp, Homo sapiens
agcggcccttgcaccctccttcttccctccgcccgggagctctccctggtccccggcgccgcctccttccctcccggctccccgctccccgctcccgtggctgccgccgccccggggaagaagagacaggggtggggtttgggggaagcgagagaggaggggagagaccctggccaggctggagcctggattcgaggggaggagggacgggaggaggagaaaggtggaggagaagggaggggggagcggggaggagcggccgggcctggggccttgaggcccggggagagccggggagccgggcccgcgcgccgagatgttgctgctgctgctactggcgccactcttcctccgccccccgggcgcgggcggggcgcagacccccaacgccacctcagaaggttgccagatcatacacccgccctgggaagggggcatcaggtaccggggcctgactcgggaccaggtgaaggctatcaacttcctgccagtggactatgagattgagtatgtgtgccggggggagcgcgaggtggtggggcccaaggtccgcaagtgcctggccaacggctcctggacagatatggacacacccagccgctgtgtccgaatctgctccaagtcttatttgaccctggaaaatgggaaggttttcctgacgggtggggacctcccagctctggacggagcccgggtggatttccggtgtgaccccgacttccatctggtgggcagctcccggagcatctgtagtcagggccagtggagcacccccaagccccactgccaggtgaatcgaacgccacactcagaacggcgcgcagtgtacatcggggcactgtttcccatgagcgggggctggccagggggccaggcctgccagcccgcggtggagatggcgctggaggacgtgaatagccgcagggacatcctgccggactatgagctcaagctcatccaccacgacagcaagtgtgatccaggccaagccaccaagtacctatatgagctgctctacaacgaccctatcaagatcatccttatgcctggctgcagctctgtctccacgctggtggctgaggctgctaggatgtggaacctcattgtgctttcctatggctccagctcaccagccctgtcaaaccggcagcgtttccccactttcttccgaacgcacccatcagccacactccacaaccctacccgcgtgaaactctttgaaaagtggggctggaagaagattgctaccatccagcagaccactgaggtcttcacttcgactctggacgacctggaggaacgagtgaaggaggctggaattgagattactttccgccagagtttcttctcagatccagctgtgcccgtcaaaaacctgaagcgccaggatgcccgaatcatcgtgggacttttctatgagactgaagcccggaaagttttttgtgaggtgtacaaggagcgtctctttgggaagaagtacgtctggttcctcattgggtggtatgctgacaattggttcaagatctacgacccttctatcaactgcacagtggatgagatgactgaggcggtggagggccacatcacaactgagattgtcatgctgaatcctgccaatacccgcagcatttccaacatgacatcccaggaatttgtggagaaactaaccaagcgactgaaaagacaccctgaggagacaggaggcttccaggaggcaccgctggcctatgatgccatctgggccttggcactggccctgaacaagacatctggaggaggcggccgttctggtgtgcgcctggaggacttcaactacaacaaccagaccattaccgaccaaatctaccgggcaatgaactcttcgtcctttgagggtgtctctggccatgtggtgtttgatgccagcggctctcggatggcatggacgcttatcgagcagcttcagggtggcagctacaagaagattggctactatgacagcaccaaggatgatctttcctggtccaaaacagataaatggattgttatatccagaactcacagcccaacctgaacaacctgactgctgtgggctgctcactggctttagctgctgtcttccccctggggctcgatggttaccacattgggaggaaccagtttcctttcgtctgccaggtgaggaggtggtgggcaaattccttacaggatgtgactctcccacccgtctcaggagcaccttccatgatttatgattctctgcccttcctcctcagctttccctgactcttgtccctgttctttccttctagcatcacccctctg

SEQ ID NO: 449875 - DNA, 487 bp, Homo sapiens
tgggggtcccccccacaatggtaccccgtggtggcccttttctttcccccttaaaattcggggggttttcttcgggaaggagcccatatgtaccctaccctgcacattgttatgcacttttccccaattcatgtttggtggggccatccacaccctctccttgtcacagaatctccatttctgctcagattccccccatctccattgcattcatgtactaccctcagtctacactcacaatcatcttctcccaagactgctcccttttgttttgtgtttttttgaggggaattaaggaaaaataagtgggggcaggtttggagagctgcttccagtggatagttgatgagaatcctgaccaaaggaaggcacccttgactgttgggatagacagatggacctatggggtgggaggtggtgtccctttcacactgtggtgtctcttggggaaggatctccccgaatctcaataaaccagtgaacagtg

SEQ ID NO: 449876 - DNA, 410 bp, Homo sapiens
agacacagctaatacctactctagtctagtagcttccgatctaaggcagacacatgggtatagttaaagattttgaatgtacatgtgtccaatctgacaacagtaacacaaaccatccattcaagtagaagtgattgagtcagaattggattgcaccccttcccccacacccacacacatttcagttctttcctcatgattttttcctcccaagacatcccaggaatttgtggagaaactaaccaagcgactgaaaagacaccctgaggagacaggaggcttccaggaggcaccgctggcctatgatgccatctgggccttggcactggccctgaacaagacatctggaggaggcggccgttctggtgtgcgcctggaggacttcaactacaacaaccagaccattaccg

SEQ ID NO: 449877 - DNA, 351 bp, Homo sapiens
cacagaccacgccctactctccccttcctcccactggggagcctgccttttcctctttcccaccattcctctctgtatgcctccccgactcaccccttaggttgccagatcatacacccgccctgggaagggggcatcaggtaccggggcctgactcgggaccaggtgaaggctatcaacttcctgccagtggactatgagattgagtatgtgtgccggggggagcgcgaggtggtggggcccaaggtccgcaagtgcctggccaacggctcctggacagatatggacacacccagccgctgtggagtagcctcggaagcccctcccctcttcaagactattccttttcct

SEQ ID NO: 449878 - DNA, 436 bp, Homo sapiens
ttcttgttctgttttgatttctccttttaatttattctgtccacttaccctacgtcctccccctacatttttctgtgcccttcctctctttccctgtgcccttcctctctttccctcctccccactccttcatcacctcctcttctcctactatcccaattgtgcttcttcctccagaaagaggagcgtgtctctgaactgcgccatcaactccagtctcggcagcagctccgctcccggcgccacccaccgacacccccagaaccctctgggggcctgcccaggggaccccctgagccccccgaccggcttagctgtgatgggagtcgagtgcatttgctttataagtgagggtagggtgagggaggacaggccagtagggggagggaaagggagaggggaagggcaggggactcaggaagcagggggtccccat

SEQ ID NO: 449879 - DNA, 399 bp, Homo sapiens
aagaaaacggtaattaatgatgaaagtgagtaattgagaaaggaactaatttgttcgagaaagataagagcaggaattgcagacaggggaggggccccaggagagcttgccctcatctcctcttgtctttcagtgtgatccaggccaagccaccaagtacctatatgagctgctctacaacgaccctatcaagatcatccttatgcctggctgcagctctgtctccacgctggtggctgaggctgctaggatgtggaacctcattgtggtaagcagggctatgggggtcagaagatggggtcattcccttttgagctctactgaagggacgatggcgattgtgggtttgtattgaaaaggagtgtggaggacctgctactaagattcagagtcctctgc

SEQ ID NO: 449880 - DNA, 4528 bp, Homo sapiens
agcggcccttgcaccctccttcttccctccgcccgggagctctccctggtccccggcgccgcctccttccctcccggctccccgctccccgctcccgtggctgccgccgccccggggaagaagagacaggggtggggtttgggggaagcgagagaggaggggagagaccctggccaggctggagcctggattcgaggggaggagggacgggaggaggagaaaggtggaggagaagggaggggggagcggggaggagcggccgggcctggggccttgaggcccggggagagccggggagccgggcccgcgcgccgagatgttgctgctgctgctactggcgccactcttcctccgccccccgggcgcgggcggggcgcagacccccaacgccacctcagaaggttgccagatcatacacccgccctgggaagggggcatcaggtaccggggcctgactcgggaccaggtgaaggctatcaacttcctgccagtggactatgagattgagtatgtgtgccggggggagcgcgaggtggtggggcccaaggtccgcaagtgcctggccaacggctcctggacagatatggacacacccagccgctgtgtccgaatctgctccaagtcttatttgaccctggaaaatgggaaggttttcctgacgggtggggacctcccagctctggacggagcccgggtggatttccggtgtgaccccgacttccatctggtgggcagctcccggagcatctgtagtcagggccagtggagcacccccaagccccactgccaggtgaatcgaacgccacactcagaacggcgcgcagtgtacatcggggcactgtttcccatgagcgggggctggccagggggccaggcctgccagcccgcggtggagatggcgctggaggacgtgaatagccgcagggacatcctgccggactatgagctcaagctcatccaccacgacagcaagtgtgatccaggccaagccaccaagtacctatatgagctgctctacaacgaccctatcaagatcatccttatgcctggctgcagctctgtctccacgctggtggctgaggctgctaggatgtggaacctcattgtgctttcctatggctccagctcaccagccctgtcaaaccggcagcgtttccccactttcttccgaacgcacccatcagccacactccacaaccctacccgcgtgaaactctttgaaaagtggggctggaagaagattgctaccatccagcagaccactgaggtcttcacttcgactctggacgacctggaggaacgagtgaaggaggctggaattgagattactttccgccagagtttcttctcagatccagctgtgcccgtcaaaaacctgaagcgccaggatgcccgaatcatcgtgggacttttctatgagactgaagcccggaaagttttttgtgaggtgtacaaggagcgtctctttgggaagaagtacgtctggttcctcattgggtggtatgctgacaattggttcaagatctacgacccttctatcaactgcacagtggatgagatgactgaggcggtggagggccacatcacaactgagattgtcatgctgaatcctgccaatacccgcagcatttccaacatgacatcccaggaatttgtggagaaactaaccaagcgactgaaaagacaccctgaggagacaggaggcttccaggaggcaccgctggcctatgatgccatctgggccttggcactggccctgaacaagacatctggaggaggcggccgttctggtgtgcgcctggaggacttcaactacaacaaccagaccattaccgaccaaatctaccgggcaatgaactcttcgtcctttgagggtgtctctggccatgtggtgtttgatgccagcggctctcggatggcatggacgcttatcgagcagcttcagggtggcagctacaagaagattggctactatgacagcaccaaggatgatctttcctggtccaaaacagataaatggattggagggtcccccccagctgaccagaccctggtcatcaagacattccgcttcctgtcacagaaactctttatctccgtctcagttctctccagcctgggcattgtcctagctgttgtctgtctgtcctttaacatctacaactcacatgtccgttatatccagaactcacagcccaacctgaacaacctgactgctgtgggctgctcactggctttagctgctgtcttccccctggggctcgatggttaccacattgggaggaaccagtttcctttcgtctgccaggcccgcctctggctcctgggcctgggctttagtctgggctacggttccatgttcaccaagatttggtgggtccacacggtcttcacaaagaaggaagaaaagaaggagtggaggaagactctggaaccctggaagctgtatgccacagtgggcctgctggtgggcatggatgtcctcactctcgccatctggcagatcgtggaccctctgcaccggaccattgagacatttgccaaggaggaacctaaggaagatattgacgtctctattctgccccagctggagcattgcagctccaggaagatgaatacatggcttggcattttctatggttacaaggggctgctgctgctgctgggaatcttccttgcttatgagaccaagagtgtgtccactgagaagatcaatgatcaccgggctgtgggcatggctatctacaatgtggcagtcctgtgcctcatcactgctcctgtcaccatgattctgtccagccagcaggatgcagcctttgcctttgcctctcttgccatagttttctcctcctatatcactcttgttgtgctctttgtgcccaagatgcgcaggctgatcacccgaggggaatggcagtcggaggcgcaggacaccatgaagacagggtcatcgaccaacaacaacgaggaggagaagtcccggctgttggagaaggagaaccgtgaactggaaaagatcattgctgagaaagaggagcgtgtctctgaactgcgccatcaactccagtctcggcagcagctccgctcccggcgccacccaccgacacccccagaaccctctgggggcctgcccaggggaccccctgagccccccgaccggcttagctgtgatgggagtcgagtgcatttgctttataagtgagggtagggtgagggaggacaggccagtagggggagggaaagggagaggggaagggcaggggactcaggaagcagggggtccccatccccagctgggaagaacatgctatccaatctcatctcttgtaaatacatgtccccctgtgagttctgggctgatttgggtctctcatacctctgggaaacagacctttttctctcttactgcttcatgtaattttgtatcacctcttcacaatttagttcgtacctggcttgaagctgctcactgctcacacgctgcctcctcagcagcctcactgcatctttctcttcccatgcaacaccctcttctagttaccacggcaacccctgcagctcctctgcctttgtgctctgttcctgtccagcaggggtctcccaacaagtgctctttccaccccaaaggggcctctccttttctccactgtcataatctctttccatcttacttgcccttctatactttctcacatgtggctccccctgaattttgcttcctttgggagctcattcttttcgccaaggctcacatgctccttgcctctgctctgtgcactcacgctcagcacacatgcatcctcccctctcctgcgtgtgcccactgaacatgctcatgtgtacacacgcttttcccgtatgctttcttcatgttcagtcacatgtgctctcgggtgccctgcattcacagctacgtgtgcccctctcatggtcatgggtctgcccttgagcgtgtttgggtaggcatgtgcaatttgtctagcatgctgagtcatgtctttcctatttgcacacgtccatgtttatccatgtactttccctgtgtaccctccatgtaccttgtgtactttcttcccttaaatcatggtattcttctgacagagccatatgtaccctaccctgcacattgttatgcacttttccccaattcatgtttggtggggccatccacaccctctccttgtcacagaatctccatttctgctcagattccccccatctccattgcattcatgtactaccctcagtctacactcacaatcatcttctcccaagactgctcccttttgttttgtgtttttttgaggggaattaaggaaaaataagtgggggcaggtttggagagctgcttccagtggatagttgatgagaatcctgaccaaaggaaggcacccttgactgttgggatagacagatggacctatggggtgggaggtggtgtccctttcacactgtggtgtctcttggggaaggatctccccgaatctcaataaaccagtgaacagtgtgactcggcaaaaaaaaaaaa

SEQ ID NO: 449881 - DNA, 4377 bp, Homo sapiens
agcggcccttgcaccctccttcttccctccgcccgggagctctccctggtccccggcgccgcctccttccctcccggctccccgctccccgctcccgtggctgccgccgccccggggaagaagagacaggggtggggtttgggggaagcgagagaggaggggagagaccctggccaggctggagcctggattcgaggggaggagggacgggaggaggagaaaggtggaggagaagggaggggggagcggggaggagcggccgggcctggggccttgaggcccggggagagccggggagccgggcccgcgcgccgagatgttgctgctgctgctactggcgccactcttcctccgccccccgggcgcgggcggggcgcagacccccaacgccacctcagaaggttgccagatcatacacccgccctgggaagggggcatcaggtaccggggcctgactcgggaccaggtgaaggctatcaacttcctgccagtggactatgagattgagtatgtgtgccggggggagcgcgaggtggtggggcccaaggtccgcaagtgcctggccaacggctcctggacagatatggacacacccagccgctgtgtccgaatctgctccaagtcttatttgaccctggaaaatgggaaggttttcctgacgggtggggacctcccagctctggacggagcccgggtggatttccggtgtgaccccgacttccatctggtgggcagctcccggagcatctgtagtcagggccagtggagcacccccaagccccactgccaggtgaatcgaacgccacactcagaacggcgcgcagtgtacatcggggcactgtttcccatgagcgggggctggccagggggccaggcctgccagcccgcggtggagatggcgctggaggacgtgaatagccgcagggacatcctgccggactatgagctcaagctcatccaccacgacagcaagtgtgatccaggccaagccaccaagtacctatatgagctgctctacaacgaccctatcaagatcatccttatgcctggctgcagctctgtctccacgctggtggctgaggctgctaggatgtggaacctcattgtgctttcctatggctccagctcaccagccctgtcaaaccggcagcgtttccccactttcttccgaacgcacccatcagccacactccacaaccctacccgcgtgaaactctttgaaaagtggggctggaagaagattgctaccatccagcagaccactgaggtcttcacttcgactctggacgacctggaggaacgagtgaaggaggctggaattgagattactttccgccagagtttcttctcagatccagctgtgcccgtcaaaaacctgaagcgccaggatgcccgaatcatcgtgggacttttctatgagactgaagcccggaaagttttttgtgaggtgtacaaggagcgtctctttgggaagaagtacgtctggttcctcattgggtggtatgctgacaattggttcaagatctacgacccttctatcaactgcacagtggatgagatgactgaggcggtggagggccacatcacaactgagattgtcatgctgaatcctgccaatacccgcagcatttccaacatgacatcccaggaatttgtggagaaactaaccaagcgactgaaaagacaccctgaggagacaggaggcttccaggaggcaccgctggcctatgatgccatctgggccttggcactggccctgaacaagacatctggaggaggcggccgttctggtgtgcgcctggaggacttcaactacaacaaccagaccattaccgaccaaatctaccgggcaatgaactcttcgtcctttgagggtgtctctggccatgtggtgtttgatgccagcggctctcggatggcatggacgcttatcgagcagcttcagggtggcagctacaagaagattggctactatgacagcaccaaggatgatctttcctggtccaaaacagataaatggattgttatatccagaactcacagcccaacctgaacaacctgactgctgtgggctgctcactggctttagctgctgtcttccccctggggctcgatggttaccacattgggaggaaccagtttcctttcgtctgccaggcccgcctctggctcctgggcctgggctttagtctgggctacggttccatgttcaccaagatttggtgggtccacacggtcttcacaaagaaggaagaaaagaaggagtggaggaagactctggaaccctggaagctgtatgccacagtgggcctgctggtgggcatggatgtcctcactctcgccatctggcagatcgtggaccctctgcaccggaccattgagacatttgccaaggaggaacctaaggaagatattgacgtctctattctgccccagctggagcattgcagctccaggaagatgaatacatggcttggcattttctatggttacaaggggctgctgctgctgctgggaatcttccttgcttatgagaccaagagtgtgtccactgagaagatcaatgatcaccgggctgtgggcatggctatctacaatgtggcagtcctgtgcctcatcactgctcctgtcaccatgattctgtccagccagcaggatgcagcctttgcctttgcctctcttgccatagttttctcctcctatatcactcttgttgtgctctttgtgcccaagatgcgcaggctgatcacccgaggggaatggcagtcggaggcgcaggacaccatgaagacagggtcatcgaccaacaacaacgaggaggagaagtcccggctgttggagaaggagaaccgtgaactggaaaagatcattgctgagaaagaggagcgtgtctctgaactgcgccatcaactccagtctcggcagcagctccgctcccggcgccacccaccgacacccccagaaccctctgggggcctgcccaggggaccccctgagccccccgaccggcttagctgtgatgggagtcgagtgcatttgctttataagtgagggtagggtgagggaggacaggccagtagggggagggaaagggagaggggaagggcaggggactcaggaagcagggggtccccatccccagctgggaagaacatgctatccaatctcatctcttgtaaatacatgtccccctgtgagttctgggctgatttgggtctctcatacctctgggaaacagacctttttctctcttactgcttcatgtaattttgtatcacctcttcacaatttagttcgtacctggcttgaagctgctcactgctcacacgctgcctcctcagcagcctcactgcatctttctcttcccatgcaacaccctcttctagttaccacggcaacccctgcagctcctctgcctttgtgctctgttcctgtccagcaggggtctcccaacaagtgctctttccaccccaaaggggcctctccttttctccactgtcataatctctttccatcttacttgcccttctatactttctcacatgtggctccccctgaattttgcttcctttgggagctcattcttttcgccaaggctcacatgctccttgcctctgctctgtgcactcacgctcagcacacatgcatcctcccctctcctgcgtgtgcccactgaacatgctcatgtgtacacacgcttttcccgtatgctttcttcatgttcagtcacatgtgctctcgggtgccctgcattcacagctacgtgtgcccctctcatggtcatgggtctgcccttgagcgtgtttgggtaggcatgtgcaatttgtctagcatgctgagtcatgtctttcctatttgcacacgtccatgtttatccatgtactttccctgtgtaccctccatgtaccttgtgtactttcttcccttaaatcatggtattcttctgacagagccatatgtaccctaccctgcacattgttatgcacttttccccaattcatgtttggtggggccatccacaccctctccttgtcacagaatctccatttctgctcagattccccccatctccattgcattcatgtactaccctcagtctacactcacaatcatcttctcccaagactgctcccttttgttttgtgtttttttgaggggaattaaggaaaaataagtgggggcaggtttggagagctgcttccagtggatagttgatgagaatcctgaccaaaggaaggcacccttgactgttgggatagacagatggacctatggggtgggaggtggtgtccctttcacactgtggtgtctcttggggaaggatctccccgaatctcaataaaccagtgaacagtgtgactcggcaaaaaaaaaaaa

SEQ ID NO: 449882 - DNA, 4507 bp, Homo sapiens
agcggcccttgcaccctccttcttccctccgcccgggagctctccctggtccccggcgccgcctccttccctcccggctccccgctccccgctcccgtggctgccgccgccccggggaagaagagacaggggtggggtttgggggaagcgagagaggaggggagagaccctggccaggctggagcctggattcgaggggaggagggacgggaggaggagaaaggtggaggagaagggaggggggagcggggaggagcggccgggcctggggccttgaggcccggggagagccggggagccgggcccgcgcgccgagatgttgctgctgctgctactggcgccactcttcctccgccccccgggcgcgggcggggcgcagacccccaacgccacctcagaaggttgccagatcatacacccgccctgggaagggggcatcaggtaccggggcctgactcgggaccaggtgaaggctatcaacttcctgccagtggactatgagattgagtatgtgtgccggggggagcgcgaggtggtggggcccaaggtccgcaagtgcctggccaacggctcctggacagatatggacacacccagccgctgtgtccgaatctgctccaagtcttatttgaccctggaaaatgggaaggttttcctgacgggtggggacctcccagctctggacggagcccgggtggatttccggtgtgaccccgacttccatctggtgggcagctcccggagcatctgtagtcagggccagtggagcacccccaagccccactgccaggtgaatcgaacgccacactcagaacggcgcgcagtgtacatcggggcactgtttcccatgagcgggggctggccagggggccaggcctgccagcccgcggtggagatggcgctggaggacgtgaatagccgcagggacatcctgccggactatgagctcaagctcatccaccacgacagcaagtgtgatccaggccaagccaccaagtacctatatgagctgctctacaacgaccctatcaagatcatccttatgcctggctgcagctctgtctccacgctggtggctgaggctgctaggatgtggaacctcattgtgctttcctatggctccagctcaccagccctgtcaaaccggcagcgtttccccactttcttccgaacgcacccatcagccacactccacaaccctacccgcgtgaaactctttgaaaagtggggctggaagaagattgctaccatccagcagaccactgaggtcttcacttcgactctggacgacctggaggaacgagtgaaggaggctggaattgagattactttccgccagagtttcttctcagatccagctgtgcccgtcaaaaacctgaagcgccaggatgcccgaatcatcgtgggacttttctatgagactgaagcccggaaagttttttgtgaggtgtacaaggagcgtctctttgggaagaagtacgtctggttcctcattgggtggtatgctgacaattggttcaagatctacgacccttctatcaactgcacagtggatgagatgactgaggcggtggagggccacatcacaactgagattgtcatgctgaatcctgccaatacccgcagcatttccaacatgacatcccaggaatttgtggagaaactaaccaagcgactgaaaagacaccctgaggagacaggaggcttccaggaggcaccgctggcctatgatgccatctgggccttggcactggccctgaacaagacatctggaggaggcggccgttctggtgtgcgcctggaggacttcaactacaacaaccagaccattaccgaccaaatctaccgggcaatgaactcttcgtcctttgagggtgtctctggccatgtggtgtttgatgccagcggctctcggatggcatggacgcttatcgagcagcttcagggtggcagctacaagaagattggctactatgacagcaccaaggatgatctttcctggtccaaaacagataaatggattggagggtcccccccagctgaccagaccctggtcatcaagacattccgcttcctgtcacagaaactctttatctccgtctcagttctctccagcctgggcattgtcctagctgttgtctgtctgtcctttaacatctacaactcacatgtccgttatatccagaactcacagcccaacctgaacaacctgactgctgtgggctgctcactggctttagctgctgtcttccccctggggctcgatggttaccacattgggaggaaccagtttcctttcgtctgccaggcccgcctctggctcctgggcctgggctttagtctgggctacggttccatgttcaccaagatttggtgggtccacacggtcttcacaaagaaggaagaaaagaaggagtggaggaagactctggaaccctggaagctgtatgccacagtgggcctgctggtgggcatggatgtcctcactctcgccatctggcagatcgtggaccctctgcaccggaccattgagacatttgccaaggaggaacctaaggaagatattgacgtctctattctgccccagctggagcattgcagctccaggaagatgaatacatggcttggcattttctatggttacaaggggctgctgctgctgctgggaatcttccttgcttatgagaccaagagtgtgtccactgagaagatcaatgatcaccgggctgtgggcatggctatctacaatgtggcagtcctgtgcctcatcactgctcctgtcaccatgattctgtccagccagcaggatgcagcctttgcctttgcctctcttgccatagttttctcctcctatatcactcttgttgtgctctttgtgcccaagatgcgcaggctgatcacccgaggggaatggcagtcggaggcgcaggacaccatgaagacagggtcatcgaccaacaacaacgaggaggagaagtcccggctgttggagaaggagaaccgtgaactggaaaagatcattgctgagaaagaggagcgtgtctctgaactgcgccatcaactccagtctcggcagcagctccgctcccggcgccacccaccgacacccccagaaccctctgggggcctgcccaggggaccccctgagccccccgaccggcttagctgtgatgggagtcgagtgcatttgctttataagtgagggtagggtgagggaggacaggccagtagggggagggaaagggagaggggaagggcaggggactcaggaagcagggggtccccatccccagctgggaagaacatgctatccaatctcatctcttgtaaatacatgtccccctgtgagttctgggctgatttgggtctctcatacctctgggaaacagacctttttctctcttactgcttcatgtaattttgtatcacctcttcacaatttagttcgtacctggcttgaagctgctcactgctcacacgctgcctcctcagcagcctcactgcatctttctcttcccatgcaacaccctcttctagttaccacggcaacccctgcagctcctctgcctttgtgctctgttcctgtccagcaggggtctcccaacaagtgctctttccaccccaaaggggcctctccttttctccactgtcataatctctttccatcttacttgcccttctatactttctcacatgtggctccccctgaattttgcttcctttgggagctcattcttttcgccaaggctcacatgctccttgcctctgctctgtgcactcacgctcagcacacatgcatcctcccctctcctgcgtgtgcccactgaacatgctcatgtgtacacacgcttttcccgtatgctttcttcatgttcagtcacatgtgctctcgggtgccctgcattcacagctacgtgtgcccctctcatggtcatgggtctgcccttgagcgtgtttgggtaggcatgtgcaatttgtctagcatgctgagtcatgtctttcctatttgcacacgtccatgtttatccatgtactttccctgtgtaccctccatgtaccttgtgtactttcttcccttaaatcatggtattcttctgacagagccatatgtaccctaccctgcacattgttatgcacttttccccaattcatgtttggtggggccatccacaccctctccttgtcacagaatctccatttctgctcagattccccccatctccattgcattcatgtactaccctcagtctacactcacaatcatcttctcccaagactgctcccttttgttttgtgtttttttgaggggaattaaggaaaaataagtgggggcaggtttggagagctgcttccagtggatagttgatgagaatcctgaccaaaggaaggcacccttgactgttgggatagacagatggacctatggggtgggaggtggtgtccctttcacactgtggtgtctcttggggaaggatctccccgaatctcaataaaccagtgaacagtg

SEQ ID NO: 449883 - DNA, 4290 bp, Homo sapiens
agcggcccttgcaccctccttcttccctccgcccgggagctctccctggtccccggcgccgcctccttccctcccggctccccgctccccgctcccgtggctgccgccgccccggggaagaagagacaggggtggggtttgggggaagcgagagaggaggggagagaccctggccaggctggagcctggattcgaggggaggagggacgggaggaggagaaaggtggaggagaagggaggggggagcggggaggagcggccgggcctggggccttgaggcccggggagagccggggagccgggcccgcgcgccgagatgttgctgctgctgctactggcgccactcttcctccgccccccgggcgcgggcggggcgcagacccccaacgccacctcagaaggttgccagatcatacacccgccctgggaagggggcatcaggtaccggggcctgactcgggaccaggtgaaggctatcaacttcctgccagtggactatgagattgagtatgtgtgccggggggagcgcgaggtggtggggcccaaggtccgcaagtgcctggccaacggctcctggacagatatggacacacccagccgctgtgtccgaatctgctccaagtcttatttgaccctggaaaatgggaaggttttcctgacgggtggggacctcccagctctggacggagcccgggtggatttccggtgtgaccccgacttccatctggtgggcagctcccggagcatctgtagtcagggccagtggagcacccccaagccccactgccaggtgaatcgaacgccacactcagaacggcgcgcagtgtacatcggggcactgtttcccatgagcgggggctggccagggggccaggcctgccagcccgcggtggagatggcgctggaggacgtgaatagccgcagggacatcctgccggactatgagctcaagctcatccaccacgacagcaagtgtgatccaggccaagccaccaagtacctatatgagctgctctacaacgaccctatcaagatcatccttatgcctggctgcagctctgtctccacgctggtggctgaggctgctaggatgtggaacctcattgtgctttcctatggctccagctcaccagccctgtcaaaccggcagcgtttccccactttcttccgaacgcacccatcagccacactccacaaccctacccgcgtgaaactctttgaaaagtggggctggaagaagattgctaccatccagcagaccactgaggtcttcacttcgactctggacgacctggaggaacgagtgaaggaggctggaattgagattactttccgccagagtttcttctcagatccagctgtgcccgtcaaaaacctgaagcgccaggatgcccgaatcatcgtgggacttttctatgagactgaagcccggaaagttttttgtgaggtgtacaaggagcgtctctttgggaagaagtacgtctggttcctcattgggtggtatgctgacaattggttcaagatctacgacccttctatcaactgcacagtggatgagatgactgaggcggtggagggccacatcacaactgagattgtcatgctgaatcctgccaatacccgcagcatttccaacatgacatcccaggaatttgtggagaaactaaccaagcgactgaaaagacaccctgaggagacaggaggcttccaggaggcaccgctggcctatgatgccatctgggccttggcactggccctgaacaagacatctggaggaggcggccgttctggtgtgcgcctggaggacttcaactacaacaaccagaccattaccgaccaaatctaccgggcaatgaactcttcgtcctttgagggtgtctctggccatgtggtgtttgatgccagcggctctcggatggcatggacgcttatcgagcagcttcagggtggcagctacaagaagattggctactatgacagcaccaaggatgatctttcctggtccaaaacagataaatggattggagggtcccccccagctgaccagaccctggtcatcaagacattccgcttcctgtcacagaaactctttatctccgtctcagttctctccagcctgggcattgtcctagctgttgtctgtctgtcctttaacatctacaactcacatgtccgttatatccagaactcacagcccaacctgaacaacctgactgctgtgggctgctcactggctttagctgctgtcttccccctggggctcgatggttaccacattgggaggaaccagtttcctttcgtctgccaggcccgcctctggctcctgggcctgggctttagtctgggctacggttccatgttcaccaagatttggtgggtccacacggtcttcacaaagaaggaagaaaagaaggagtggaggaagactctggaaccctggaagctgtatgccacagtgggcctgctggtgggcatggatgtcctcactctcgccatctggcagatcgtggaccctctgcaccggaccattgagacatttgccaaggaggaacctaaggaagatattgacgtctctattctgccccagctggagcattgcagctccaggaagatgaatacatggcttggcattttctatggttacaaggggctgctgctgctgctgggaatcttccttgcttatgagaccaagagtgtgtccactgagaagatcaatgatcaccgggctgtgggcatggctatctacaatgtggcagtcctgtgcctcatcactgctcctgtcaccatgattctgtccagccagcaggatgcagcctttgcctttgcctctcttgccatagttttctcctcctatatcactcttgttgtgctctttgtgcccaagatgcgcaggctgatcacccgaggggaatggcagtcggaggcgcaggacaccatgaagacagggtcatcgaccaacaacaacgaggaggagaagtcccggctgttggagaaggagaaccgtgaactggaaaagatcattgctgagaaagaggagcgtgtctctgaactgcgccatcaactccagtctcggcagcagctccgctcccggcgccacccaccgacacccccagaaccctctgggggcctgcccaggggaccccctgagccccccgaccggcttagctgtgatgggagtcgagtgcatttgctttataagtgagggtagggtgagggaggacaggccagtagggggagggaaagggagaggggaagggcaggggactcaggaagcagggggtccccatccccagctgggaagaacatgctatccaatctcatctcttgtaaatacatgtccccctgtgagttctgggctgatttgggtctctcatacctctgggaaacagacctttttctctcttactgcttcatgtaattttgtatcacctcttcacaatttagttcgtacctggcttgaagctgctcactgctcacacgctgcctcctcagcagcctcactgcatctttctcttcccatgcaacaccctcttctagttaccacggcaacccctgcagctcctctgcctttgtgctctgttcctgtccagcaggggtctcccaacaagtgctctttccaccccaaaggggcctctccttttctccactgtcataatctctttccatcttacttgcccttctatactttctcacatgtggctccccctgaattttgcttcctttgggagctcattcttttcgccaaggctcacatgctccttgcctctgctctgtgcactcacgctcagcacacatgcatcctcccctctcctgcgtgtgcccactgaacatgctcatgtgtacacacgcttttcccgtatgctttcttcatgttcagtcacatgtgctctcgggtgccctgcattcacagctacgtgtgcccctctcatggtcatgggtctgcccttgagcgtgtttgggtaggcatgtgcaatttgtctagcatgctgagtcatgtctttcctatttgcacacgtccatgtttatccatgtactttccctgtgtaccctccatgtaccttgtgtactttcttcccttaaatcatggtattcttctgacagagccatatgtaccctaccctgcacattgttatgcacttttccccaattcatgtttggtggggccatccacaccctctccttgtcacagaatctccatttctgcttcgcaacactgttgcgaggaatgctgagagtgatggtttccggttacatccatgtccctacaaaggacatgaactcatcattaat

SEQ ID NO: 449884 - DNA, 2081 bp, Homo sapiens
cattgagggtctcataggaaaacagttggaagccagagactgagaagcgttgaggagaggaggggaggctggcaaccatctttcttgtgaccttgtttctgccctagacatttgccaaggaggaacctaaggaagatattgacgtctctattctgccccagctggagcattgcagctccaggaagatgaatacatggcttggcattttctatggttacaaggggctgctgctgctgctgggaatcttccttgcttatgagaccaagagtgtgtccactgagaagatcaatgatcaccgggctgtgggcatggctatctacaatgtggcagtcctgtgcctcatcactgctcctgtcaccatgattctgtccagccagcaggatgcagcctttgcctttgcctctcttgccatagttttctcctcctatatcactcttgttgtgctctttgtgcccaagatgcgcaggctgatcacccgaggggaatggcagtcggaggcgcaggacaccatgaagacagggtcatcgaccaacaacaacgaggaggagaagtcccggctgttggagaaggagaaccgtgaactggaaaagatcattgctgagaaagaggagcgtgtctctgaactgcgccatcaactccagtctcggcagcagctccgctcccggcgccacccaccgacacccccagaaccctctgggggcctgcccaggggaccccctgagccccccgaccggcttagctgtgatgggagtcgagtgcatttgctttataagtgagggtagggtgagggaggacaggccagtagggggagggaaagggagaggggaagggcaggggactcaggaagcagggggtccccatccccagctgggaagaacatgctatccaatctcatctcttgtaaatacatgtccccctgtgagttctgggctgatttgggtctctcatacctctgggaaacagacctttttctctcttactgcttcatgtaattttgtatcacctcttcacaatttagttcgtacctggcttgaagctgctcactgctcacacgctgcctcctcagcagcctcactgcatctttctcttcccatgcaacaccctcttctagttaccacggcaacccctgcagctcctctgcctttgtgctctgttcctgtccagcaggggtctcccaacaagtgctctttccaccccaaaggggcctctccttttctccactgtcataatctctttccatcttacttgcccttctatactttctcacatgtggctccccctgaattttgcttcctttgggagctcattcttttcgccaaggctcacatgctccttgcctctgctctgtgcactcacgctcagcacacatgcatcctcccctctcctgcgtgtgcccactgaacatgctcatgtgtacacacgcttttcccgtatgctttcttcatgttcagtcacatgtgctctcgggtgccctgcattcacagctacgtgtgcccctctcatggtcatgggtctgcccttgagcgtgtttgggtaggcatgtgcaatttgtctagcatgctgagtcatgtctttcctatttgcacacgtccatgtttatccatgtactttccctgtgtaccctccatgtaccttgtgtactttcttcccttaaatcatggtattcttctgacagagccatatgtaccctaccctgcacattgttatgcacttttccccaattcatgtttggtggggccatccacaccctctccttgtcacagaatctccatttctgctcagattccccccatctccattgcattcatgtactaccctcagtctacactcacaatcatcttctcccaagactgctcccttttgttttgtgtttttttgaggggaattaaggaaaaataagtgggggcaggtttggagagctgcttccagtggatagttgatgagaatcctgaccaaaggaaggcacccttgactgttgggatagacagatggacctatggggtgggaggtggtgtccctttcacactgtggtgtctcttggggaaggatctccccgaatctcaataaaccagtgaacagtg

SEQ ID NO: 449885 - DNA, 4008 bp, Homo sapiens
  misc_feature (3424)..(3424): n is a, c, g, or t
agcggcccttgcaccctccttcttccctccgcccgggagctctccctggtccccggcgccgcctccttccctcccggctccccgctccccgctcccgtggctgccgccgccccggggaagaagagacaggggtggggtttgggggaagcgagagaggaggggagagaccctggccaggctggagcctggattcgaggggaggagggacgggaggaggagaaaggtggaggagaagggaggggggagcggggaggagcggccgggcctggggccttgaggcccggggagagccggggagccgggcccgcgcgccgagatgttgctgctgctgctactggcgccactcttcctccgccccccgggcgcgggcggggcgcagacccccaacgccacctcagaaggttgccagatcatacacccgccctgggaagggggcatcaggtaccggggcctgactcgggaccaggtgaaggctatcaacttcctgccagtggactatgagattgagtatgtgtgccggggggagcgcgaggtggtggggcccaaggtccgcaagtgcctggccaacggctcctggacagatatggacacacccagccgctgtgtccgaatctgctccaagtcttatttgaccctggaaaatgggaaggttttcctgacgggtggggacctcccagctctggacggagcccgggtggatttccggtgtgaccccgacttccatctggtgggcagctcccggagcatctgtagtcagggccagtggagcacccccaagccccactgccaggtgaatcgaacgccacactcagaacggcgcgcagtgtacatcggggcactgtttcccatgagcgggggctggccagggggccaggcctgccagcccgcggtggagatggcgctggaggacgtgaatagccgcagggacatcctgccggactatgagctcaagctcatccaccacgacagcaagtgtgatccaggccaagccaccaagtacctatatgagctgctctacaacgaccctatcaagatcatccttatgcctggctgcagctctgtctccacgctggtggctgaggctgctaggatgtggaacctcattgtgctttcctatggctccagctcaccagccctgtcaaaccggcagcgtttccccactttcttccgaacgcacccatcagccacactccacaaccctacccgcgtgaaactctttgaaaagtggggctggaagaagattgctaccatccagcagaccactgaggtcttcacttcgactctggacgacctggaggaacgagtgaaggaggctggaattgagattactttccgccagagtttcttctcagatccagctgtgcccgtcaaaaacctgaagcgccaggatgcccgaatcatcgtgggacttttctatgagactgaagcccggaaagttttttgtgaggtgtacaaggagcgtctctttgggaagaagtacgtctggttcctcattgggtggtatgctgacaattggttcaagatctacgacccttctatcaactgcacagtggatgagatgactgaggcggtggagggccacatcacaactgagattgtcatgctgaatcctgccaatacccgcagcatttccaacatgacatcccaggaatttgtggagaaactaaccaagcgactgaaaagacaccctgaggagacaggaggcttccaggaggcaccgctggcctatgatgccatctgggccttggcactggccctgaacaagacatctggaggaggcggccgttctggtgtgcgcctggaggacttcaactacaacaaccagaccattaccgaccaaatctaccgggcaatgaactcttcgtcctttgagggtgtctctggccatgtggtgtttgatgccagcggctctcggatggcatggacgcttatcgagcagcttcagggtggcagctacaagaagattggctactatgacagcaccaaggatgatctttcctggtccaaaacagataaatggattggagggtcccccccagctgaccagaccctggtcatcaagacattccgcttcctgtcacagaaactctttatctccgtctcagttctctccagcctgggcattgtcctagctgttgtctgtctgtcctttaacatctacaactcacatgtccgttatatccagaactcacagcccaacctgaacaacctgactgctgtgggctgctcactggctttagctgctgtcttccccctggggctcgatggttaccacattgggaggaaccagtttcctttcgtctgccaggcccgcctctggctcctgggcctgggctttagtctgggctacggttccatgttcaccaagatttggtgggtccacacggtcttcacaaagaaggaagaaaagaaggagtggaggaagactctggaaccctggaagctgtatgccacagtgggcctgctggtgggcatggatgtcctcactctcgccatctggcagatcgtggaccctctgcaccggaccattgagacatttgccaaggaggaacctaaggaagatattgacgtctctattctgccccagctggagcattgcagctccaggaagatgaatacatggcttggcattttctatggttacaaggggctgctgctgctgctgggaatcttccttgcttatgagaccaagagtgtgtccactgagaagatcaatgatcaccgggctgtgggcatggctatctacaatgtggcagtcctgtgcctcatcactgctcctgtcaccatgattctgtccagccagcaggatgcagcctttgcctttgcctctcttgccatagttttctcctcctatatcactcttgttgtgctctttgtgcccaagatgcgcaggctgatcacccgaggggaatggcagtcggaggcgcaggacaccatgaagacagggtcatcgaccaacaacaacgaggaggagaagtcccggctgttggagaaggagaaccgtgaactggaaaagatcattgctgagaaagaggagcgtgtctctgaactgcgccatcaactccagtctcggcagcagctccgctcccggcgccacccaccgacacccccagaaccctctgggggcctgcccaggggaccccctgagccccccgaccggcttagctgtgatgggagtcgagtgcatttgctttataagtgagggtagggtgagggaggacaggccagtagggggagggaaagggagaggggaagggcaggggactcaggaagcagggggtccccatccccagctgggaagaacatgctatccaatctcatctcttgtaaatacatgtccccctgtgagttctgggctgatttgggtctctcatacctctgggaaacagacctttttctctcaaaaaaaaaaaaaaaaaaaaanaaaaaaaaaaaaaaaaaaaaaaaaaaaaaaaaaaaaaaaaaaaaaaaaaaaaagagagagagggagggcggcgcggcacaacaagagatcatcctcctcgcggagagggcgccaccagcatgtgcgcggcggacccccgcggtgtttgttgtaagacagaaggggggcgccccagaaggaagaggagagtctatatatatcagacgagagacgcgcgagccgggggccctgtgtttaaaaaacgacgcgcgggagcggtgggagaacaaacggcgcgccacgacggcgcgaagaccctatcgtgggagggagacgaccacacactatacggggggggggggagaaaacaactcagggggagaacaaccatcacccctacaggagaagaattattaaagagacccctgtagaggggagagataataaatcaacacctcctaacgagagggtagtaataatgtgggtggtgcgaacacacaaggggggggtaaattccgccgcggcgcgctgagaaagaagagtctggggcgcccacgccgggggtactctgtattagctgagaaagaattcttttacccgcgggg

SEQ ID NO: 449886 - DNA, 2763 bp, Homo sapiens
agcggcccttgcaccctccttcttccctccgcccgggagctctccctggtccccggcgccgcctccttccctcccggctccccgctccccgctcccgtggctgccgccgccccggggaagaagagacaggggtggggtttgggggaagcgagagaggaggggagagaccctggccaggctggagcctggattcgaggggaggagggacgggaggaggagaaaggtggaggagaagggaggggggagcggggaggagcggccgggcctggggccttgaggcccggggagagccggggagccgggcccgcgcgccgagatgttgctgctgctgctactggcgccactcttcctccgccccccgggcgcgggcggggcgcagacccccaacgccacctcagaaggttgccagatcatacacccgccctgggaagggggcatcaggtaccggggcctgactcgggaccaggtgaaggctatcaacttcctgccagtggactatgagattgagtatgtgtgccggggggagcgcgaggtggtggggcccaaggtccgcaagtgcctggccaacggctcctggacagatatggacacacccagccgctgtgtccgaatctgctccaagtcttatttgaccctggaaaatgggaaggttttcctgacgggtggggacctcccagctctggacggagcccgggtggatttccggtgtgaccccgacttccatctggtgggcagctcccggagcatctgtagtcagggccagtggagcacccccaagccccactgccaggtgaatcgaacgccacactcagaacggcgcgcagtgtacatcggggcactgtttcccatgagcgggggctggccagggggccaggcctgccagcccgcggtggagatggcgctggaggacgtgaatagccgcagggacatcctgccggactatgagctcaagctcatccaccacgacagcaagtgtgatccaggccaagccaccaagtacctatatgagctgctctacaacgaccctatcaagatcatccttatgcctggctgcagctctgtctccacgctggtggctgaggctgctaggatgtggaacctcattgtgctttcctatggctccagctcaccagccctgtcaaaccggcagcgtttccccactttcttccgaacgcacccatcagccacactccacaaccctacccgcgtgaaactctttgaaaagtggggctggaagaagattgctaccatccagcagaccactgaggtcttcacttcgactctggacgacctggaggaacgagtgaaggaggctggaattgagattactttccgccagagtttcttctcagatccagctgtgcccgtcaaaaacctgaagcgccaggatgcccgaatcatcgtgggacttttctatgagactgaagcccggaaagttttttgtgaggtgtacaaggagcgtctctttgggaagaagtacgtctggttcctcattgggtggtatgctgacaattggttcaagatctacgacccttctatcaactgcacagtggatgagatgactgaggcggtggagggccacatcacaactgagattgtcatgctgaatcctgccaatacccgcagcatttccaacatgacatcccaggaatttgtggagaaactaaccaagcgactgaaaagacaccctgaggagacaggaggcttccaggaggcaccgctggcctatgatgccatctgggccttggcactggccctgaacaagacatctggaggaggcggccgttctggtgtgcgcctggaggacttcaactacaacaaccagaccattaccgaccaaatctaccgggcaatgaactcttcgtcctttgagggtgtctctggccatgtggtgtttgatgccagcggctctcggatggcatggacgcttatcgagcagcttcagggtggcagctacaagaagattggctactatgacagcaccaaggatgatctttcctggtccaaaacagataaatggattgttatatccagaactcacagcccaacctgaacaacctgactgctgtgggctgctcactggctttagctgctgtcttccccctggggctcgatggttaccacattgggaggaaccagtttcctttcgtctgccaggcccgcctctggctcctgggcctgggctttagtctgggctacggttccatgttcaccaagatttggtgggtccacacggtcttcacaaagaaggaagaaaagaaggagtggaggaagactctggaaccctggaagctgtatgccacagtgggcctgctggtgggcatggatgtcctcactctcgccatctggcagatcgtggaccctctgcaccggaccattgagacatttgccaaggaggaacctaaggaagatattgacgtctctattctgccccagctggagcattgcagctccaggaagatgaatacatggcttggcattttctatggttacaaggggctgctgctgctgctgggaatcttccttgcttatgagaccaagagtgtgtccactgagaagatcaatgatcaccgggctgtgggcatggctatctacaatgtggcagtgagcactgaccccatggcattgaccctgtaggctgaccacagcagcccagatatagaggactaggaagaatcaatgctagatctgggatcggttgcttagaagtcttaaaaagtttgttaattcttcaggtctataaagcactttacagtttaaaaa

SEQ ID NO: 449887 - DNA, 986 bp, Homo sapiens
agcggcccttgcaccctccttcttccctccgcccgggagctctccctggtccccggcgccgcctccttccctcccggctccccgctccccgctcccgtggctgccgccgccccggggaagaagagacaggggtggggtttgggggaagcgagagaggaggggagagaccctggccaggctggagcctggattcgaggggaggagggacgggaggaggagaaaggtggaggagaagggaggggggagcggggaggagcggccgggcctggggccttgaggcccggggagagccggggagccgggcccgcgcgccgagatgttgctgctgctgctactggcgccactcttcctccgccccccgggcgcgggcggggcgcagacccccaacgccacctcagaaggttgccagatcatacacccgccctgggaagggggcatcaggtaccggggcctgactcgggaccaggtgaaggctatcaacttcctgccagtggactatgagattgagtatgtgtgccggggggagcgcgaggtggtggggcccaaggtccgcaagtgcctggccaacggctcctggacagatatggacacacccagccgctgtggagtagcctcggaagcccctcccctcttcaagactattccttttcctgccgcaaacttagcattactgcttgcaagtcagcactttaaatccagtataccaaaattcacaaatacatttattgaatgactactacataagagcaattttgctctgtgcggttggaggtagtagagctagcagcctgcacagttcatttcatcctcccttcattaggccactgatcattggcctataacattgataattcatcttgtcagttattctctttgaggatcattagtggcagatgatgacaaaaaaattctaaaatgatttcatcacatttttgaatacctctgtcaccaacccagagaccatatgcccaagaaacaaaagccag

SEQ ID NO: 449888 - DNA, 1671 bp, Homo sapiens
  misc_feature (39)..(39): n is a, c, g, or t
  misc_feature (76)..(76): n is a, c, g, or t
gttaaatcagtattcagtatttacataattatgactgantttacatgactactattattcacagttgatgtatacngtgtatacagtgtagtttttaaatttttatttttctcagcgttcaaaattatatgttctgttttcttaattttgaaaaatatgcattcactaatttatccccacactctttggaaaatgaaagctctctaggctgtattcaaatacaccaggtactctatcaattttcattttttaaactattctacctgagctctccatctttagccatttcctgttgacttcatactgttctcccctaccactctccctctttaatatattaccgttttagaaactttatggctaccctgtaagtaataaaaatgtctttccccactcaacaacagacagtacctttcaagtttccactttataaggacataacccccattccatttacttcccccgccctccttcaacattcccacttgtattttccggctgtatttttaaaacatggtaaataacatttgcactccactttgtaaccataattaagtatgcccttaaacaataaaaaccataaacaacatttgtattttacgattatttaaatgttattcactgaacagccaagctttgtgctactatgggatttcgttttctgcggttccaagtcttgatccacgtcctgccacaggatcactgaagtagagcccattttcttacactctcgccattagttcaaaagcttgcagcattttatgtctggtacttggaggatgattttcctgtacagttttgcgtttttttcaccgaaaatttctgattattattgttttctcttgtgggatgaaatatgtaccttctatatcacagccttaataccttcagcttcttattcattcaaatcttgcttacaatccagtccgaggattcccggtttactgattttctttttcctgcaaattttagccttctgttttgttttgaaataatgcatcctctgcgctttgtcacattctgaaattcgtcaggtgttttaggatgcacactttcttagatcttttcgagggtcttaactgcagttctgtttccggaatggcgtattttctttctaggaattgtaggctcccggccgccccctgaggagctccgctagcagctaagagggcagccacgaagagcgcctgagcactctcgcgagactgtggggctcgccattggctgctccgccgcgccgcaacggaccctgggagtcggccatcatgctggccccggaggccgttatcttagtcatggctctaaatatgtacctgcaatcggatgttgaggatcaccgagcccgcgacgtagaagtacgggaagttcatgcgcagctgccaggccagctcgaagaaggcgagcagggtgcgggagagccccttgcagaagacgccgtacgaggtgggtgtcgcggcggggcttgaggctctgacggccaaggaggacggagccgccgcgggggccatgagccaggtgtcgccggccgcccagcgtctgtagcgagggttgccgcagggcccgcggacctcctagcgacggctgggaccggcaggacggtaagcaaagcggctcccgggctcacacccaagcttgccgctgccgccgctcggtgcagtgcggcgcgtagcc

SEQ ID NO: 449889 - DNA, 886 bp, Homo sapiens
aatgaaggggaaagactaactgtctaacccaattgaaaatcaaatgatgaccaaacttcaattgtagtatttgtgctgattgcttggatactgtttcttcagaaactatgctcaagtcacagtttgtacctaaccacatcctaccaccacatcctgctgggctaaaatcccaaaaagtaataagagacgcattcaactttatgagaggaaagcaaaacctaatctttcaggtggtgaggtccacccagtatggagctcaaaggtgccattgttctgctcatgtttataaagggagctgccatgtttctctgaacgcagagttgggagcaactccagagcctccttcaagatgctgctggtcctgctctcagtggtccttctggctctgagctcagctcagagcacagataatgatgtgaactatgaagactttactttcaccataccagatgtagaggactcaagtcagagaccagatcagggaccccagagacctcctcctgaaggactcctacctagaccccctggtgatagtggtaaccaagatgatggtcctcagcagagaccaccaaaaccaggaggccatcaccgccatcctcccccacctccttttcaaaatcagcaacgaccaccccaacgaggacaccgtcaactctctctaccccgatttccttctgtcagcctgcaggaagcatcatcattcttccggagggacagaccagcaagacatccccaggagcaaccactctggtaatctagaattcagtggcagaaaataaataagaagataacttccttcagaaagccatgacattgaaataatgtggtcataactctttcttcagtataccaataaaatattaatagcatgcaaaaaaaaattgtt

SEQ ID NO: 449890 - DNA, 2637 bp, Homo sapiens
  misc_feature (595)..(595): n is a, c, g, or t
  misc_feature (1312)..(1312): n is a, c, g, or t
  misc_feature (1519)..(1519): n is a, c, g, or t
  misc_feature (2028)..(2028): n is a, c, g, or t
  misc_feature (2035)..(2035): n is a, c, g, or t
  misc_feature (2065)..(2065): n is a, c, g, or t
  misc_feature (2074)..(2074): n is a, c, g, or t
  misc_feature (2161)..(2161): n is a, c, g, or t
  misc_feature (2175)..(2175): n is a, c, g, or t
  misc_feature (2191)..(2191): n is a, c, g, or t
  misc_feature (2207)..(2207): n is a, c, g, or t
  misc_feature (2210)..(2210): n is a, c, g, or t
  misc_feature (2215)..(2215): n is a, c, g, or t
  misc_feature (2260)..(2260): n is a, c, g, or t
  misc_feature (2263)..(2263): n is a, c, g, or t
tgcactccagcctgggagacaacgagactccgtctcaaaaacaacaacaacaacaacaaaaaaaacaaaaaccgcataaaatttaaataatggaatagaatgatggagctgtggttgagattctatatgtaattaatgacattttgagatccagtgctgctcattgaatttccctgtgaaaagagtttgtggtgatgacccagcaacagataagctactatccaaaaaaagctattgacatgaaatcaatttccagttttttccgagtttcatgaggctgcctagatcctgcttttactctcttctttgaccaaagtattacaaaaataaaaatatcattaccattttcatgtcaggtatactaaaagtttaaaaaaactttttttaataacttgattttaggaatattggtttagtttctccgttagaaaacgatttatataaggagaacaaaaagttcatttctacctctaaaacaataagacaaaaaaaagggtcatcaattttgagaatccaatagcgttaacaaccagttaaacataagaaagaattagtgaattggaagataactacccagaatgaagcataaagagancaagaggtagaaaatataaggctagagggccacagacagtgaagctacaatcagaacaactaacatacttctgcagttccagaagattagaagagagcaaatggggcagaagcaatgtggagatttttccaaaagtgataaagtatatcagttcatatatttttagaaactatcagacttcagacacgataactaaaaccaaattaacataaaatgacaggacatcaaagaccaatagaaaacctgaaaagtaactagaggaaaagatagattatgttaaagggaataactgtctaaacgacaagctgattttcaacagacaaaaataaagctagagttcaatggattcatgtcttcagtgtatttcaaaagtagaatagatcttgataaacagaaatttaaaatatatcttttcagataaaagaaaaattattattattattatttttgttggtagagttggattctcactctgttgtccacgctggagttcagtggtaggatcatggcttactgcagtctggaactcctgggctcaaaccatcctcccacctcagccttgtgagtagcttcactatgcctgactaactttttcattcattgtagaggcagttttgctgtgttgcacaggctggtcttgaactcctgggtgctcctgccccagccttacaaaatgttgggattatgggtgtgagctaccctgcctggccaataaanggtcttattgaaaatattaagttgaatatgcaagaaggaatacaaattaatgaaagtggtaaatatgtgcataattctaaatgaatgtttagaaaataataatgtcttgttggggtaattatacaattgataagacatgcaaatggcaaaaaatagaatggaggtaaaggtgacaggagtaagtttagttaaattattttctgaacntttctatgtctatgaggagattttgaacaatgataatataattctactcataggtatatatgcaaaggaattgtatcaaatgatatatgaaagaatgttctagtagaattattcataactgttcaaaaaagaaactggccaaatacatattaaggttggatgaatcattacagtaattccatgcaatggaacaatatagagaagtgaaaaaaaatcacatgtgcttgcaactatgtgactaaatttcagaaacataatgttgagttcaggaagccacaaacaagaggaacatgtaggattgcacctatacagcgttcaaagtaggctagaccaagcgatggagtttagggttgcatacctagttggtaaagtatgaagaaaattgaggaaataaccattataaattatggatattgcttatatcaggagatgcgaagaagggtttagggacttggaaagtggaatggaggtggatctagcctgttttaggtgttccttgtcttgccctncatcatngttacttgagtgtttatgatacactgtggnatttcccanttttgtattggttcatttctaagtgcgcattataactttaatatacaaatttgtaattaggagaaatatagaaattattattactcntctcattatatacngaagggaaatatcaantatttgtatacattcntanacaantctaagatagttgaaataggaactttcttatttagttgcaacatnagnaaatttgagatgatgttatctgccacccccagatctttccaaaggatttcttctagccttaattatcgacctcacaggacaaacctttgccattccccatctattttttctttcggctcctgaattcctgacacaacaaggttgtacatatttcccacactcttggtttaagagttcttttatcagttatgtttctctgcaggagaagacccttcaaaactacattagatatttatatctcacatgtcgtttgatgttggttttttgttttgttttgttttgttttgttttgttttgttttttgacagagtcttgctgtgtcgcccaggctggagtgcagtggcataatctcagttcactgcaacctccgcctc

SEQ ID NO: 449891 - DNA, 654 bp, Homo sapiens
aatgaaggggaaagactaactgtctaacccaattgaaaatcaaatgatgaccaaacttcaattgtagtatttgtgctgattgcttggatactgtttcttcagaaactatgctcaagtcacagtttgtacctaaccacatcctaccaccacatcctgctgggctaaaatcccaaaaagtaataagagacgcattcaactttatgagaggaaagcaaaacctaatctttcaggtggtgaggtccacccagtatggagctcaaaggtgccattgttctgctcatgtttataaagggagctgccatgtttctctgaacgcagagttgggagcaactccagagcctccttcaagatgctgctggtcctgctctcagtggtccttctggctctgagctcagctcagagcacagataatgatgtgaactatgaagactttactttcaccataccagcctgcaggaagcatcatcattcttccggagggacagaccagcaagacatccccaggagcaaccactctggtaatctagaattcagtggcagaaaataaataagaagataacttccttcagaaagccatgacattgaaataatgtggtcataactctttcttcagtataccaataaaatattaatagcatgcaaaaaaaaattgtt

SEQ ID NO: 449892 - DNA, 1431 bp, Homo sapiens
gaggtgttcgaagccgggtggtgcgtgggctaccccaacctgtgtggctgggccgcgggctcccctcaagggcctggggccgtgcctcgggtgtacgcgtaggggtctgtgtgctgggggtggctcaccgggcagcgtgggtgagcggcgcagcggcggcagcggagagcgagagaggggagcagctgctgcagaagaatattttgcctgctggaacctgctgtatctactcaagagtggaagttttcacagaagatgcagcacactgtcaaaatatccggagacgccagcaccaaagcccacagaggagttaaaagtgtgatcactttcttcctactctatgccattttctctctgtcttttttcatatcagtttggacctctgaaaggttggaggaaaatctaattattctttcccaggtgatgggaatggcttatccttcatgtcactcatgtgttctgattcttggaaacaagaagctgagacaggcctctctgtcagtgctactgtggctgaggtacatgttcaaagatggggagccctcaggtcacaaagaatttagagaatcatcttgaatatattagaaaaaaaatagctcctaagaaattcttgtatgttatataaactttatacttccttaagattctttcattgtgtataactttgtgaattttacaaagatatgcttggaatcaacaccatccaaacatatcacaaattaggatatatgaaagtatgtatattaccatacagagaagaatgcgaatactataaagagttcttatacaaacagataatatagattttgtatcaatcattcaccttttttgagatttttaaatgagaaaacctataatgtataaaatacatgtgtgtatgtatgtatgtgacacagttactaaaaataggcttcttaaacttacatctcaatctggtagataaagtacataaaagaatatggaattttagtacctatattaagtgtttttaatttttgtataatatttagtacctgattagcgtgtatgcaaaaaagtaatttgcttcgtttgttgaattagaagccagctgccttactaaactaccacatttgctttgctcattctcttggctttgcagatagaaaattatatcatctgcatatagtgacttataatgattattttacttctccattttactacttgtaattcttttttggtatcagttgtataatgaaatggtttgaacattcaaagtgttaagtaatcctgatcgtaactgctgtctttgcaaatggagtgttttctagtgttttaacaataaacgtaatactgactctagctttgagataaattcttttaaaaatattattcagggagaatatttgtttcctatcttcctgtgtatagtattgtaataaaatctctgttaaaaactatcaaaaaaaa

SEQ ID NO: 449893 - DNA, 484 bp, Homo sapiens
attgtttggttgttccgtaatctatttaaccaatccctgtcactggatattaaggctggattcacattctcactattatatgatatgttgcagtgcccatctttgtaaaaatagcccttacataaccaacagcagcaaagcatgaacacataacaataattgtttctctttctcatctaagcaacactttaaatcacattatgtgcaatggcttaaagagtgaacaaagaaaatattactaaggagaagggggctgtagaagggatagagggcaagagtaggggcttgcatctccatcactgcagtaacccccagtgagggattagacatttcctgccatgtcaagtgttgtctgtaatcttccttgtttgcttgtctttttcaggaagtgaataagaagataacagtgtttcaaatgccgtgaaacatggcatcatgctctaacttcagtataccaataaaacaatcagcttgcaaaaatctg

SEQ ID NO: 449894 - DNA, 1040 bp, Homo sapiens
aatgaaggggaaagactaactgtctaacccaattgaaaatcaaatgatgaccaaacttcaattgtagtatttgtgctgattgcttggatactgtttcttcagaaactatgctcaagtcacagtttgtacctaaccacatcctaccaccacatcctgctgggctaaaatcccaaaaagtaataagagacgcattcaactttatgagaggaaagcaaaacctaatctttcaggtggtgaggtccacccagtatggagctcaaaggtgccattgttctgctcatgtttataaagggagctgccatgtttctctgaacgcagagttgggagcaactccagagcctccttcaagatgctgctggtcctgctctcagtggtccttctggctctgagctcagctcagagcacagataatggtaaaaaaattatttttttaaaaaaggagatggggagtgggatgaggggccatgactcttctagggcctcaggggttcaccctacaccactgcagcggaagagcaggaggggaggaaggaggttgagaagaagggtagggctttggagctctcattccaaggatgacatctgttgtgccctcattccatgccaaggccttatactttatttgatatacacttggaacccaatagagaatttcaattagaggaatgacaaagtaagatttgtatttttagaaagacctggctgtgctgtgaaggatgcagtggagaatgcaagactgatccagggaagtccagctatgaagatgctacagtaatctcagtggacagcgatgatggtgtccttgctgtacaggggatgcagaatcaatgaaagagataaacaaacatcagagtactgtcagacatagaggactggataatacatttgtgtctttctacatagtggtatagaaatatcaggtccccaaattcccatttttcttccaatcacatttaaaatttcaatatgttgcaggcagcatgtgtaagattatatccaaatatttactcctggttgctcctcttgggcaagcttgtgaa

SEQ ID NO: 449895 - DNA, 404 bp, Homo sapiens
gcgtcgatctgaggatcccctatgtgtcgccggccgcccagcgtctgtagcgagggttgccgcagggcccgcggacctcctagcgacggctgggaccggcaggacggggaagtccaggaaactcacttgctctgggctgcatgctggctaaacagaaaggatctgccagtgaaggaaggcagaaaacccaccaatcctggactctgcatgaacaccaggaaaaacccatttgctgcaggaagggggcagttaacctgatgatatcaagaccctccactgatacaagacattgattgactgacactcaaggaggggcaggaagattgcctgacttggactcccatgctgacactgggtgaaagccatctgttgctactggaggagggggagaaaaccggctttca

SEQ ID NO: 449896 - DNA, 183 bp, Homo sapiens
actactacaggttcaagttgcagtcattttcataaatataaccttgaatgttttgaacagtaaccaaaacataaacaccataaaaaaatctgttttcttaatcttgaaagcaataatttacttcagtaatatcatcaaggaattagataagttttgccatgttgtatgttgtgtataaatttc

SEQ ID NO: 449897 - DNA, 2152 bp, Homo sapiens
  misc_feature (39)..(39): n is a, c, g, or t
  misc_feature (76)..(76): n is a, c, g, or t
gttaaatcagtattcagtatttacataattatgactgantttacatgactactattattcacagttgatgtatacngtgtatacagtgtagtttttaaatttttatttttctcagcgttcaaaattatatgttctgttttcttaattttgaaaaatatgcattcactaatttatccccacactctttggaaaatgaaagctctctaggctgtattcaaatacaccaggtactctatcaattttcattttttaaactattctacctgagctctccatctttagccatttcctgttgacttcatactgttctcccctaccactctccctctttaatatattaccgttttagaaactttatggctaccctgtaagtaataaaaatgtctttccccactcaacaacagacagtacctttcaagtttccactttataaggacataacccccattccatttacttcccccgccctccttcaacattcccacttgtattttccggctgtatttttaaaacatggtaaataacatttgcactccactttgtaaccataattaagtatgcccttaaacaataaaaaccataaacaacatttgtattttacgattatttaaatgttattcactgaacagccaagctttgtgctactatgggatttcgttttctgcggttccaagtcttgatccacgtcctgccacaggatcactgaagtagagcccattttcttacactctcgccattagttcaaaagcttgcagcattttatgtctggtacttggaggatgattttcctgtacagttttgcgtttttttcaccgaaaatttctgattattattgttttctcttgtgggatgaaatatgtaccttctatatcacagccttaataccttcagcttcttattcattcaaatcttgcttacaatccagtccgaggattcccggtttactgattttctttttcctgcaaattttagccttctgttttgttttgaaataatgcatcctctgcgctttgtcacattctgaaattcgtcaggtgttttaggatgcacactttcttagatcttttcgagggtcttaactgcagttctgtttccggaatggcgtattttctttctaggaattgtaggctcccggccgccccctgaggagctccgctagcagctaagagggcagccacgaagagcgcctgagcactctcgcgagactgtggggctcgccattggctgctccgccgcgccgcaacggaccctgggagtcggccatcatgctggccccggaggccgttatcttagtcatggctctaaatatgtacctgcaatcggatgttgaggatcaccgagcccgcgacgtagaagtacgggaagttcatgcgcagctgccaggccagctcgaagaaggcgagcagggtgcgggagagccccttgcagaagacgccgtacgaggttctccagcatttggctcaaggccccaagggcacatgtgacaagaaggcgccggctttttaaacattggaagttcttctgtgtcagttctgtgacagaacatttacttaacacatcatgaaggctagtttggatgtggaggggaatagactccatctatccatatgagctgctgcagaagaatattttgcctgctggaacctgctgtatctactcaagagtggaagttttcacagatgtgaactatgaagactttactttcaccataccagatgtagaggactcaagtcagagaccagatcagggaccccagagacctcctcctgaaggactcctacctagaccccctggtgatagtggtaaccaagatgatggtcctcagcagagaccaccaaaaccaggaggccatcaccgccatcctcccccacctccttttcaaaatcagcaacgaccaccccaacgaggacaccgtcaactctctctaccccgatttccttctgtcagcctgcaggaagcatcatcattcttccggagggacagaccagcaagacatccccaggagcaaccactctggtaatctagaattcagtggcagaaaataaataagaagataacttccttcagaaagccatgacattgaaataatgtggtcataactctttcttcagtataccaataaaatattaatagcatgcaaaaaaaaattgtt

SEQ ID NO: 449898 - DNA, 2323 bp, Homo sapiens
  misc_feature (39)..(39): n is a, c, g, or t
  misc_feature (76)..(76): n is a, c, g, or t
gttaaatcagtattcagtatttacataattatgactgantttacatgactactattattcacagttgatgtatacngtgtatacagtgtagtttttaaatttttatttttctcagcgttcaaaattatatgttctgttttcttaattttgaaaaatatgcattcactaatttatccccacactctttggaaaatgaaagctctctaggctgtattcaaatacaccaggtactctatcaattttcattttttaaactattctacctgagctctccatctttagccatttcctgttgacttcatactgttctcccctaccactctccctctttaatatattaccgttttagaaactttatggctaccctgtaagtaataaaaatgtctttccccactcaacaacagacagtacctttcaagtttccactttataaggacataacccccattccatttacttcccccgccctccttcaacattcccacttgtattttccggctgtatttttaaaacatggtaaataacatttgcactccactttgtaaccataattaagtatgcccttaaacaataaaaaccataaacaacatttgtattttacgattatttaaatgttattcactgaacagccaagctttgtgctactatgggatttcgttttctgcggttccaagtcttgatccacgtcctgccacaggatcactgaagtagagcccattttcttacactctcgccattagttcaaaagcttgcagcattttatgtctggtacttggaggatgattttcctgtacagttttgcgtttttttcaccgaaaatttctgattattattgttttctcttgtgggatgaaatatgtaccttctatatcacagccttaataccttcagcttcttattcattcaaatcttgcttacaatccagtccgaggattcccggtttactgattttctttttcctgcaaattttagccttctgttttgttttgaaataatgcatcctctgcgctttgtcacattctgaaattcgtcaggtgttttaggatgcacactttcttagatcttttcgagggtcttaactgcagttctgtttccggaatggcgtattttctttctaggaattgtaggctcccggccgccccctgaggagctccgctagcagctaagagggcagccacgaagagcgcctgagcactctcgcgagactgtggggctcgccattggctgctccgccgcgccgcaacggaccctgggagtcggccatcatgctggccccggaggccgttatcttagtcatggctctaaatatgtacctgcaatcggatgttgaggatcaccgagcccgcgacgtagaagtacgggaagttcatgcgcagctgccaggccagctcgaagaaggcgagcagggtgcgggagagccccttgcagaagacgccgtacgagtttctccagcatttggctctaggtgccaagggcacatgtgacaagaaggtgccagctttataaaccttggaacttcttctgtgtcagttctgagacatacagtttactaaaacacatcatgaaggcctgttttgaagagaaggggaataagactgcatctgttcatatgaggttctccagcatttggctcaaggccccaagggcacatgtgacaagaaggcgccggctttttaaacattggaagttcttctgtgtcagttctgtgacagaacatttacttaacacatcatgaaggctagtttggatgtggaggggaatagactccatctatccatatgagctgctgcagaagaatattttgcctgctggaacctgctgtatctactcaagagtggaagttttcacagatgtgaactatgaagactttactttcaccataccagatgtagaggactcaagtcagagaccagatcagggaccccagagacctcctcctgaaggactcctacctagaccccctggtgatagtggtaaccaagatgatggtcctcagcagagaccaccaaaaccaggaggccatcaccgccatcctcccccacctccttttcaaaatcagcaacgaccaccccaacgaggacaccgtcaactctctctaccccgatttccttctgtcagcctgcaggaagcatcatcattcttccggagggacagaccagcaagacatccccaggagcaaccactctggtaatctagaattcagtggcagaaaataaataagaagataacttccttcagaaagccatgacattgaaataatgtggtcataactctttcttcagtataccaataaaatattaatagcatgcaaaaaaaaattgtt

SEQ ID NO: 449899 - DNA, 2307 bp, Homo sapiens
  misc_feature (39)..(39): n is a, c, g, or t
  misc_feature (76)..(76): n is a, c, g, or t
gttaaatcagtattcagtatttacataattatgactgantttacatgactactattattcacagttgatgtatacngtgtatacagtgtagtttttaaatttttatttttctcagcgttcaaaattatatgttctgttttcttaattttgaaaaatatgcattcactaatttatccccacactctttggaaaatgaaagctctctaggctgtattcaaatacaccaggtactctatcaattttcattttttaaactattctacctgagctctccatctttagccatttcctgttgacttcatactgttctcccctaccactctccctctttaatatattaccgttttagaaactttatggctaccctgtaagtaataaaaatgtctttccccactcaacaacagacagtacctttcaagtttccactttataaggacataacccccattccatttacttcccccgccctccttcaacattcccacttgtattttccggctgtatttttaaaacatggtaaataacatttgcactccactttgtaaccataattaagtatgcccttaaacaataaaaaccataaacaacatttgtattttacgattatttaaatgttattcactgaacagccaagctttgtgctactatgggatttcgttttctgcggttccaagtcttgatccacgtcctgccacaggatcactgaagtagagcccattttcttacactctcgccattagttcaaaagcttgcagcattttatgtctggtacttggaggatgattttcctgtacagttttgcgtttttttcaccgaaaatttctgattattattgttttctcttgtgggatgaaatatgtaccttctatatcacagccttaataccttcagcttcttattcattcaaatcttgcttacaatccagtccgaggattcccggtttactgattttctttttcctgcaaattttagccttctgttttgttttgaaataatgcatcctctgcgctttgtcacattctgaaattcgtcaggtgttttaggatgcacactttcttagatcttttcgagggtcttaactgcagttctgtttccggaatggcgtattttctttctaggaattgtaggctcccggccgccccctgaggagctccgctagcagctaagagggcagccacgaagagcgcctgagcactctcgcgagactgtggggctcgccattggctgctccgccgcgccgcaacggaccctgggagtcggccatcatgctggccccggaggccgttatcttagtcatggctctaaatatgtacctgcaatcggatgttgaggatcaccgagcccgcgacgtagaagtacgggaagttcatgcgcagctgccaggccagctcgaagaaggcgagcagggtgcgggagagccccttgcagaagacgccgtacgaggtgggtgtcgcggcggggcttgaggctctgacggccaaggaggacggagccgccgcgggggccatgagccaggtgtcgccggccgcccagcgtctgtagcgagggttgccgcagggcccgcggacctcctagcgacggctgggaccggcaggacggttctccagcatttggctcaaggccccaagggcacatgtgacaagaaggcgccggctttttaaacattggaagttcttctgtgtcagttctgtgacagaacatttacttaacacatcatgaaggctagtttggatgtggaggggaatagactccatctatccatatgagctgctgcagaagaatattttgcctgctggaacctgctgtatctactcaagagtggaagttttcacagatgtgaactatgaagactttactttcaccataccagatgtagaggactcaagtcagagaccagatcagggaccccagagacctcctcctgaaggactcctacctagaccccctggtgatagtggtaaccaagatgatggtcctcagcagagaccaccaaaaccaggaggccatcaccgccatcctcccccacctccttttcaaaatcagcaacgaccaccccaacgaggacaccgtcaactctctctaccccgatttccttctgtcagcctgcaggaagcatcatcattcttccggagggacagaccagcaagacatccccaggagcaaccactctggtaatctagaattcagtggcagaaaataaataagaagataacttccttcagaaagccatgacattgaaataatgtggtcataactctttcttcagtataccaataaaatattaatagcatgcaaaaaaaaattgtt

SEQ ID NO: 449900 - DNA, 2256 bp, Homo sapiens
  misc_feature (39)..(39): n is a, c, g, or t
  misc_feature (76)..(76): n is a, c, g, or t
gttaaatcagtattcagtatttacataattatgactgantttacatgactactattattcacagttgatgtatacngtgtatacagtgtagtttttaaatttttatttttctcagcgttcaaaattatatgttctgttttcttaattttgaaaaatatgcattcactaatttatccccacactctttggaaaatgaaagctctctaggctgtattcaaatacaccaggtactctatcaattttcattttttaaactattctacctgagctctccatctttagccatttcctgttgacttcatactgttctcccctaccactctccctctttaatatattaccgttttagaaactttatggctaccctgtaagtaataaaaatgtctttccccactcaacaacagacagtacctttcaagtttccactttataaggacataacccccattccatttacttcccccgccctccttcaacattcccacttgtattttccggctgtatttttaaaacatggtaaataacatttgcactccactttgtaaccataattaagtatgcccttaaacaataaaaaccataaacaacatttgtattttacgattatttaaatgttattcactgaacagccaagctttgtgctactatgggatttcgttttctgcggttccaagtcttgatccacgtcctgccacaggatcactgaagtagagcccattttcttacactctcgccattagttcaaaagcttgcagcattttatgtctggtacttggaggatgattttcctgtacagttttgcgtttttttcaccgaaaatttctgattattattgttttctcttgtgggatgaaatatgtaccttctatatcacagccttaataccttcagcttcttattcattcaaatcttgcttacaatccagtccgaggattcccggtttactgattttctttttcctgcaaattttagccttctgttttgttttgaaataatgcatcctctgcgctttgtcacattctgaaattcgtcaggtgttttaggatgcacactttcttagatcttttcgagggtcttaactgcagttctgtttccggaatggcgtattttctttctaggaattgtaggctcccggccgccccctgaggagctccgctagcagctaagagggcagccacgaagagcgcctgagcactctcgcgagactgtggggctcgccattggctgctccgccgcgccgcaacggaccctgggagtcggccatcatgctggccccggaggccgttatcttagtcatggctctaaatatgtacctgcaatcggatgttgaggatcaccgagcccgcgacgtagaagtacgggaagttcatgcgcagctgccaggccagctcgaagaaggcgagcagggtgcgggagagccccttgcagaagacgccgtacgaggttctccagcatttggctcaaggccccaagggcacatgtgacaagaaggcgccggctttttaaacattggaagttcttctgtgtcagttctgtgacagaacatttacttaacacatcatgaaggctagtttggatgtggaggggaatagactccatctatccatatgagagttggagtctcactctgttatccaggctggagttcagtggtaggatcatggcttactgcagtctggaactcctgggctcaaaccatcctcccacctcagccttctgctgcagaagaatattttgcctgctggaacctgctgtatctactcaagagtggaagttttcacagatgtgaactatgaagactttactttcaccataccagatgtagaggactcaagtcagagaccagatcagggaccccagagacctcctcctgaaggactcctacctagaccccctggtgatagtggtaaccaagatgatggtcctcagcagagaccaccaaaaccaggaggccatcaccgccatcctcccccacctccttttcaaaatcagcaacgaccaccccaacgaggacaccgtcaactctctctaccccgatttccttctgtcagcctgcaggaagcatcatcattcttccggagggacagaccagcaagacatccccaggagcaaccactctggtaatctagaattcagtggcagaaaataaataagaagataacttccttcagaaagccatgacattgaaataatgtggtcataactctttcttcagtataccaataaaatattaatagcatgcaaaaaaaaattgtt

SEQ ID NO: 449901 - DNA, 613 bp, Homo sapiens
aattcgtggtgctgctctgggtgctgctgtggtgctgctcggcgaattcgtggtgctgctcggcgaattcgtggtgatgctgctggtcctgctctcagtggtccttctggctctgagctcagctcagagcacagataatgatgtgaactatgaagactttactttcaccataccagatgtagaggactcaagtcagagaccagatcagggaccccagagacctcctcctgaaggactcctacctagaccccctggtgatagtggtaaccaagatgatggtcctcagcagagaccaccaaaaccaggaggccatcaccgccatcctcccccacctccttttcaaaatcagcaacgaccaccccaacgaggacaccgtcaactctctctaccccgatttccttctgtcagcctgcaggaagcatcatcattcttccggagggacagaccagcaagacatccccaggagcaaccactctggtaatctagaattcagtggcagaaaataaataagaagataacttccttcagaaagccatgacattgaaataatgtggtcataactctttcttcagtataccaataaaatattaatagcatgcaaaaaaaaattgtt

SEQ ID NO: 449902 - DNA, 2464 bp, Homo sapiens
  misc_feature (39)..(39): n is a, c, g, or t
  misc_feature (76)..(76): n is a, c, g, or t
gttaaatcagtattcagtatttacataattatgactgantttacatgactactattattcacagttgatgtatacngtgtatacagtgtagtttttaaatttttatttttctcagcgttcaaaattatatgttctgttttcttaattttgaaaaatatgcattcactaatttatccccacactctttggaaaatgaaagctctctaggctgtattcaaatacaccaggtactctatcaattttcattttttaaactattctacctgagctctccatctttagccatttcctgttgacttcatactgttctcccctaccactctccctctttaatatattaccgttttagaaactttatggctaccctgtaagtaataaaaatgtctttccccactcaacaacagacagtacctttcaagtttccactttataaggacataacccccattccatttacttcccccgccctccttcaacattcccacttgtattttccggctgtatttttaaaacatggtaaataacatttgcactccactttgtaaccataattaagtatgcccttaaacaataaaaaccataaacaacatttgtattttacgattatttaaatgttattcactgaacagccaagctttgtgctactatgggatttcgttttctgcggttccaagtcttgatccacgtcctgccacaggatcactgaagtagagcccattttcttacactctcgccattagttcaaaagcttgcagcattttatgtctggtacttggaggatgattttcctgtacagttttgcgtttttttcaccgaaaatttctgattattattgttttctcttgtgggatgaaatatgtaccttctatatcacagccttaataccttcagcttcttattcattcaaatcttgcttacaatccagtccgaggattcccggtttactgattttctttttcctgcaaattttagccttctgttttgttttgaaataatgcatcctctgcgctttgtcacattctgaaattcgtcaggtgttttaggatgcacactttcttagatcttttcgagggtcttaactgcagttctgtttccggaatggcgtattttctttctaggaattgtaggctcccggccgccccctgaggagctccgctagcagctaagagggcagccacgaagagcgcctgagcactctcgcgagactgtggggctcgccattggctgctccgccgcgccgcaacggaccctgggagtcggccatcatgctggccccggaggccgttatcttagtcatggctctaaatatgtacctgcaatcggatgttgaggatcaccgagcccgcgacgtagaagtacgggaagttcatgcgcagctgccaggccagctcgaagaaggcgagcagggtgcgggagagccccttgcagaagacgccgtacgaggttctccagcatttggctcaaggccccaagggcacatgtgacaagaaggcgccggctttttaaacattggaagttcttctgtgtcagttctgtgacagaacatttacttaacacatcatgaaggctagtttggatgtggaggggaatagactccatctatccatatgagagttggagtctcactctgttatccaggctggagttcagtggtaggatcatggcttactgcagtctggaactcctgggctcaaaccatcctcccacctcagccttctgctgcagaagaatattttgcctgctggaacctgctgtatctactcaagagtggaagttttcacagtaaagggagctgacacgtttctcccagcacaaagttgggagtgacaccagagcctcctgcaagatgcttctgattctgctgtcagtggccctgctggccttcagctcagctcaggatttaaatgaagatgtcagccaggaagatgttcccctcgtaatatcagatggaggagactctgagcagttcatagatgaggagcgtcagggaccacctttgggaggacagcaatctcaaccctctgctggtgatgggaaccagaatgatggccctcagcagggaccaccccaacaaggaggccagcagcaacaaggtccaccacctcctcagggaaagccacaaggaccaccccaacagggaggccatccccctcctcctcaaggaaggccacaaggaccaccccaacagggaggccatccccgtcctcctcgaggaaggccacaaggaccaccccaacagggaggccatcagcaaggtcctcccccacctcctcctggaaagccccagggaccacctccccaagggggccgcccacaaggacctccacaggggcagtctcctcagtaatctaggattcaatgacaggaagtgaataagaagataacagtgtttcaaatgccgtgaaacatggcatcatgctctaacttcagtataccaataaaacaatcagcttgcaaaaatctg

SEQ ID NO: 449903 - DNA, 2536 bp, Homo sapiens
  misc_feature (39)..(39): n is a, c, g, or t
  misc_feature (76)..(76): n is a, c, g, or t
gttaaatcagtattcagtatttacataattatgactgantttacatgactactattattcacagttgatgtatacngtgtatacagtgtagtttttaaatttttatttttctcagcgttcaaaattatatgttctgttttcttaattttgaaaaatatgcattcactaatttatccccacactctttggaaaatgaaagctctctaggctgtattcaaatacaccaggtactctatcaattttcattttttaaactattctacctgagctctccatctttagccatttcctgttgacttcatactgttctcccctaccactctccctctttaatatattaccgttttagaaactttatggctaccctgtaagtaataaaaatgtctttccccactcaacaacagacagtacctttcaagtttccactttataaggacataacccccattccatttacttcccccgccctccttcaacattcccacttgtattttccggctgtatttttaaaacatggtaaataacatttgcactccactttgtaaccataattaagtatgcccttaaacaataaaaaccataaacaacatttgtattttacgattatttaaatgttattcactgaacagccaagctttgtgctactatgggatttcgttttctgcggttccaagtcttgatccacgtcctgccacaggatcactgaagtagagcccattttcttacactctcgccattagttcaaaagcttgcagcattttatgtctggtacttggaggatgattttcctgtacagttttgcgtttttttcaccgaaaatttctgattattattgttttctcttgtgggatgaaatatgtaccttctatatcacagccttaataccttcagcttcttattcattcaaatcttgcttacaatccagtccgaggattcccggtttactgattttctttttcctgcaaattttagccttctgttttgttttgaaataatgcatcctctgcgctttgtcacattctgaaattcgtcaggtgttttaggatgcacactttcttagatcttttcgagggtcttaactgcagttctgtttccggaatggcgtattttctttctaggaattgtaggctcccggccgccccctgaggagctccgctagcagctaagagggcagccacgaagagcgcctgagcactctcgcgagactgtggggctcgccattggctgctccgccgcgccgcaacggaccctgggagtcggccatcatgctggccccggaggccgttatcttagtcatggctctaaatatgtacctgcaatcggatgttgaggatcaccgagcccgcgacgtagaagtacgggaagttcatgcgcagctgccaggccagctcgaagaaggcgagcagggtgcgggagagccccttgcagaagacgccgtacgaggttctccagcatttggctcaaggccccaagggcacatgtgacaagaaggcgccggctttttaaacattggaagttcttctgtgtcagttctgtgacagaacatttacttaacacatcatgaaggctagtttggatgtggaggggaatagactccatctatccatatgagagttggagtctcactctgttatccaggctggagttcagtggtaggatcatggcttactgcagtctggaactcctgggctcaaaccatcctcccacctcagccttctgctgcagaagaatattttgcctgctggaacctgctgtatctactcaagagtggaagttttcacagtaaagggagctgacacgtttctcccagcacaaagttgggagtgacaccagagcctcctgcaagatgcttctgattctgctgtcagtggccctgctggccttcagctcagctcaggatttaaatgaagatgtcagccaggaagatgttcccctcgtaatatcagatggaggagactctgagcagttcatagatgaggagcgtcagggaccacctttgggaggacagcaatctcaaccctctgctggtgatgggaaccagaatgatggccctcagcagggaccaccccaacaaggaggccagcagcaacaaggtccaccacctcctcagggaaagccacaaggaccaccccaacagggaggccatccccctcctcctcaaggaaggccacaaggaccaccccaacagggaggccatccccgtcctcctcgaggaaggccacaaggaccaccccaacagggaggccatcagcaaggtcctcccccacatcagcaacgaccaccccaacgaggacaccgtcaactctctctaccccgatttccttctgtcagcctgcaggaagcatcatcattcttccggagggacagaccagcaagacatccccaggagcaaccactctggtaatctagaattcagtggcagaaaataaataagaagataacttccttcagaaagccatgacattgaaataatgtggtcataactctttcttcagtataccaataaaatattaatagcatgcaaaaaaaaattgtt

SEQ ID NO: 449904 - DNA, 1780 bp, Homo sapiens
gcggcgctggttgtgtgggttgtgggggggtggtgagggtggagttgggggggtggtgtggtgtgtggttgttggtgtgtgctacgatctccgtcgagtggtggacgggttgttgttttatgtggtgttggtgtgtggagtagatgataggtaggtgggggctcctgccccgccccgctgtggtagtgagtgggtggtctcctcccgcgcggcgttgtttgggtgtgtgtggggcccaccgccacgggtgttgtgtttgtgtgtgcgcccgcgcgggggggggaccgccccccccccaacaaaaaaaaaaagggggggggggtgaaaaaaaagggggttttgttgtgccccccgcaaaaaaaaagggcctttgcagcattttatggcgtctggggggtacttggaggatgattttcctgtacagttttgcgtttttttcaccgaaaatttctgattattattgttttctcttgtgggatgaaatatgtaccttctatatcacagccttaataccttcagcttcttattcattcaaatcttgcttacaatccagtccgaggattcccggtttactgattttctttttcctgcaaattttagccttctgttttgttttgaaataatgcatcctctgcgctttgtcacattctgaaattcgtcaggtgttttaggatgcacactttcttagatcttttcgagggtcttaactgcagttctgtttccggaatggcgtattttctttctaggaattgtaggctcccggccgccccctgaggagctccgctagcagctaagagggcagccacgaagagcgcctgagcactctcgcgagactgtggggctcgccattggctgctccgccgcgccgcaacggaccctgggagtcggccatcatgctggccccggaggccgttatcttagtcatggctctaaatatgtacctgcaatcggatgttgaggatcaccgagcccgcgacgtagaagtacgggaagttcatgcgcagctgccaggccagctcgaagaaggcgagcagggtgcgggagagccccttgcagaagacgccgtacgaggttctccagcatttggctcaaggccccaagggcacatgtgacaagaaggcgccggctttttaaacattggaagttcttctgtgtcagttctgtgacagaacatttacttaacacatcatgaaggctagtttggatgtggaggggaatagactccatctatccatatgagctgctgcagaagaatattttgcctgctggaacctgctgtatctactcaagagtggaagttttcacagatgtgaactatgaagactttactttcaccataccagatgtagaggactcaagtcagagaccagatcagggaccccagagacctcctcctgaaggactcctacctagaccccctggtgatagtggtaaccaagatgatggtcctcagcagagaccaccaaaaccaggaggccatcaccgccatcctcccccacctccttttcaaaatcagcaacgaccaccccaacgaggacaccgtcaactctctctaccccgatttccttctgtcagcctgcaggaagcatcatcattcttccggagggacagaccagcaagacatccccaggagcaaccactctggtaatctagaattcagtggcagaaaataaataagaagataacttccttcagaaagccatgacattgaaataatgtggtcataactctttcttcagtataccaataaaatattaatagcatgcaaaaaaaaattgtt

SEQ ID NO: 449905 - DNA, 2567 bp, Homo sapiens
  misc_feature (39)..(39): n is a, c, g, or t
  misc_feature (76)..(76): n is a, c, g, or t
gttaaatcagtattcagtatttacataattatgactgantttacatgactactattattcacagttgatgtatacngtgtatacagtgtagtttttaaatttttatttttctcagcgttcaaaattatatgttctgttttcttaattttgaaaaatatgcattcactaatttatccccacactctttggaaaatgaaagctctctaggctgtattcaaatacaccaggtactctatcaattttcattttttaaactattctacctgagctctccatctttagccatttcctgttgacttcatactgttctcccctaccactctccctctttaatatattaccgttttagaaactttatggctaccctgtaagtaataaaaatgtctttccccactcaacaacagacagtacctttcaagtttccactttataaggacataacccccattccatttacttcccccgccctccttcaacattcccacttgtattttccggctgtatttttaaaacatggtaaataacatttgcactccactttgtaaccataattaagtatgcccttaaacaataaaaaccataaacaacatttgtattttacgattatttaaatgttattcactgaacagccaagctttgtgctactatgggatttcgttttctgcggttccaagtcttgatccacgtcctgccacaggatcactgaagtagagcccattttcttacactctcgccattagttcaaaagcttgcagcattttatgtctggtacttggaggatgattttcctgtacagttttgcgtttttttcaccgaaaatttctgattattattgttttctcttgtgggatgaaatatgtaccttctatatcacagccttaataccttcagcttcttattcattcaaatcttgcttacaatccagtccgaggattcccggtttactgattttctttttcctgcaaattttagccttctgttttgttttgaaataatgcatcctctgcgctttgtcacattctgaaattcgtcaggtgttttaggatgcacactttcttagatcttttcgagggtcttaactgcagttctgtttccggaatggcgtattttctttctaggaattgtaggctcccggccgccccctgaggagctccgctagcagctaagagggcagccacgaagagcgcctgagcactctcgcgagactgtggggctcgccattggctgctccgccgcgccgcaacggaccctgggagtcggccatcatgctggccccggaggccgttatcttagtcatggctctaaatatgtacctgcaatcggatgttgaggatcaccgagcccgcgacgtagaagtacgggaagttcatgcgcagctgccaggccagctcgaagaaggcgagcagggtgcgggagagccccttgcagaagacgccgtacgaggttctccagcatttggctcaaggccccaagggcacatgtgacaagaaggcgccggctttttaaacattggaagttcttctgtgtcagttctgtgacagaacatttacttaacacatcatgaaggctagtttggatgtggaggggaatagactccatctatccatatgagctgctgcagaagaatattttgcctgctggaacctgctgtatctactcaagagtggaagttttcacagatgtgaactatgaagactttactttcaccataccagatgtagaggactcaagtcagagaccagatcagggaccccagagacctcctcctgaaggactcctacctagaccccctggtgatagtggtaaccaagatgatggtcctcagcagagaccaccaaaaccaggaggccatcaccgccatcctcccccacctccttttcaaaatcagcaacgaccaccccaacgaggacaccgtcaactctctctaccccgatttccttctgtcagcctgcaggaagcatcatcattcttccggagggacagaccagcaagacatccccaggagcaaccactctggtaatctagaattcagtggcaggtatgattccagttcattctccattaaatgcccaaactgctaccattcccaaactttatcgtgttcacaaatcaattggaaatatgttgaaattacataatcctggaccccatttctaaagatttgtattcagatattcttggataaggttgcaagtccttgtatttttaacaagtggttcaaagaattcttatcttttgaaatactgacctccccaacttttttcttaagatgacttgtctcattaaaatgagttggtaatgaggaagtggggtgtgctctccctttggtgctctgcctcctgtctttgagtctgccttctcaaacccaaggactctccatctcaggtttctctcaggtttccgccagaggactctttgctcagtcctgcctcacactagcctctcaggtccagtgtccctgctaaatgatacttgaacttgatgctcttatatcttatttaatttttaaaatacttattttgaaattagtacatgctcaaggaaaaaaaaatctaactgaacagaat

SEQ ID NO: 449906 - DNA, 2962 bp, Homo sapiens
  misc_feature (39)..(39): n is a, c, g, or t
  misc_feature (76)..(76): n is a, c, g, or t
gttaaatcagtattcagtatttacataattatgactgantttacatgactactattattcacagttgatgtatacngtgtatacagtgtagtttttaaatttttatttttctcagcgttcaaaattatatgttctgttttcttaattttgaaaaatatgcattcactaatttatccccacactctttggaaaatgaaagctctctaggctgtattcaaatacaccaggtactctatcaattttcattttttaaactattctacctgagctctccatctttagccatttcctgttgacttcatactgttctcccctaccactctccctctttaatatattaccgttttagaaactttatggctaccctgtaagtaataaaaatgtctttccccactcaacaacagacagtacctttcaagtttccactttataaggacataacccccattccatttacttcccccgccctccttcaacattcccacttgtattttccggctgtatttttaaaacatggtaaataacatttgcactccactttgtaaccataattaagtatgcccttaaacaataaaaaccataaacaacatttgtattttacgattatttaaatgttattcactgaacagccaagctttgtgctactatgggatttcgttttctgcggttccaagtcttgatccacgtcctgccacaggatcactgaagtagagcccattttcttacactctcgccattagttcaaaagcttgcagcattttatgtctggtacttggaggatgattttcctgtacagttttgcgtttttttcaccgaaaatttctgattattattgttttctcttgtgggatgaaatatgtaccttctatatcacagccttaataccttcagcttcttattcattcaaatcttgcttacaatccagtccgaggattcccggtttactgattttctttttcctgcaaattttagccttctgttttgttttgaaataatgcatcctctgcgctttgtcacattctgaaattcgtcaggtgttttaggatgcacactttcttagatcttttcgagggtcttaactgcagttctgtttccggaatggcgtattttctttctaggaattgtaggctcccggccgccccctgaggagctccgctagcagctaagagggcagccacgaagagcgcctgagcactctcgcgagactgtggggctcgccattggctgctccgccgcgccgcaacggaccctgggagtcggccatcatgctggccccggaggccgttatcttagtcatggctctaaatatgtacctgcaatcggatgttgaggatcaccgagcccgcgacgtagaagtacgggaagttcatgcgcagctgccaggccagctcgaagaaggcgagcagggtgcgggagagccccttgcagaagacgccgtacgaggttctccagcatttggctcaaggccccaagggcacatgtgacaagaaggcgccggctttttaaacattggaagttcttctgtgtcagttctgtgacagaacatttacttaacacatcatgaaggctagtttggatgtggaggggaatagactccatctatccatatgagagttggagtctcactctgttatccaggctggagttcagtggtaggatcatggcttactgcagtctggaactcctgggctcaaaccatcctcccacctcagccttctgctgcagaagaatattttgcctgctggaacctgctgtatctactcaagagtggaagttttcacagaagatgcagcacactgtcaaaatatccggagacgccagcaccaaagcccacagaggagttaaaagtgtgatcactttcttcctactctatgccattttctctctgtcttttttcatatcagtttggacctctgaaaggttggaggaaaatctaattattctttcccaggtgatgggaatggcttatccttcatgtcactcatgtgttctgattcttggaaacaagaagctgagacaggcctctctgtcagtgctactgtggctgaggtacatgttcaaagatggggagccctcaggtcacaaagaatttagagaatcatcttgaatatattagaaaaaaaatagctcctaagaaattcttgtatgttatataaactttatacttccttaagattctttcattgtgtataactttgtgaattttacaaagatatgcttggaatcaacaccatccaaacatatcacaaattaggatatatgaaagtatgtatattaccatacagagaagaatgcgaatactataaagagttcttatacaaacagataatatagattttgtatcaatcattcaccttttttgagatttttaaatgagaaaacctataatgtataaaatacatgtgtgtatgtatgtatgtgacacagttactaaaaataggcttcttaaacttacatctcaatctggtagataaagtacataaaagaatatggaattttagtacctatattaagtgtttttaatttttgtataatatttagtacctgattagcgtgtatgcaaaaaagtaatttgcttcgtttgttgaattagaagccagctgccttactaaactaccacatttgctttgctcattctcttggctttgcagatagaaaattatatcatctgcatatagtgacttataatgattattttacttctccattttactacttgtaattcttttttggtatcagttgtataatgaaatggtttgaacattcaaagtgttaagtaatcctgatcgtaactgctgtctttgcaaatggagtgttttctagtgttttaacaataaacgtaatactgactctagctttgagataaattcttttaaaaatattattcagggagaatatttgtttcctatcttcctgtgtatagtattgtaataaaatctctgttaaaaactatcaaaaaaaa

SEQ ID NO: 449907 - DNA, 2238 bp, Homo sapiens
  misc_feature (39)..(39): n is a, c, g, or t
  misc_feature (76)..(76): n is a, c, g, or t
gttaaatcagtattcagtatttacataattatgactgantttacatgactactattattcacagttgatgtatacngtgtatacagtgtagtttttaaatttttatttttctcagcgttcaaaattatatgttctgttttcttaattttgaaaaatatgcattcactaatttatccccacactctttggaaaatgaaagctctctaggctgtattcaaatacaccaggtactctatcaattttcattttttaaactattctacctgagctctccatctttagccatttcctgttgacttcatactgttctcccctaccactctccctctttaatatattaccgttttagaaactttatggctaccctgtaagtaataaaaatgtctttccccactcaacaacagacagtacctttcaagtttccactttataaggacataacccccattccatttacttcccccgccctccttcaacattcccacttgtattttccggctgtatttttaaaacatggtaaataacatttgcactccactttgtaaccataattaagtatgcccttaaacaataaaaaccataaacaacatttgtattttacgattatttaaatgttattcactgaacagccaagctttgtgctactatgggatttcgttttctgcggttccaagtcttgatccacgtcctgccacaggatcactgaagtagagcccattttcttacactctcgccattagttcaaaagcttgcagcattttatgtctggtacttggaggatgattttcctgtacagttttgcgtttttttcaccgaaaatttctgattattattgttttctcttgtgggatgaaatatgtaccttctatatcacagccttaataccttcagcttcttattcattcaaatcttgcttacaatccagtccgaggattcccggtttactgattttctttttcctgcaaattttagccttctgttttgttttgaaataatgcatcctctgcgctttgtcacattctgaaattcgtcaggtgttttaggatgcacactttcttagatcttttcgagggtcttaactgcagttctgtttccggaatggcgtattttctttctaggaattgtaggctcccggccgccccctgaggagctccgctagcagctaagagggcagccacgaagagcgcctgagcactctcgcgagactgtggggctcgccattggctgctccgccgcgccgcaacggaccctgggagtcggccatcatgctggccccggaggccgttatcttagtcatggctctaaatatgtacctgcaatcggatgttgaggatcaccgagcccgcgacgtagaagtacgggaagttcatgcgcagctgccaggccagctcgaagaaggcgagcagggtgcgggagagccccttgcagaagacgccgtacgaggttctccagcatttggctcaaggccccaagggcacatgtgacaagaaggcgccggctttttaaacattggaagttcttctgtgtcagttctgtgacagaacatttacttaacacatcatgaaggctagtttggatgtggaggggaatagactccatctatccatatgagagttggagtctcactctgttatccaggctggagttcagtggtaggatcatggcttactgcagtctggaactcctgggctcaaaccatcctcccacctcagccttctgctgcagaagaatattttgcctgctggaacctgctgtatctactcaagagtggaagttttcacagtaaagggagctgacacgtttctcccagcacaaagttgggagtgacaccagagcctcctgcaagatgcttctgattctgctgtcagtggccctgctggccttcagctcagctcaggatttaaatgaagatgtcagccaggaagatgttcccctcgtaatatcagatggaggagactctgagcagttcatagatgaggagcgtcagggaccacctttgggaggacagcaatctcaaccctctgctggtgatgggaaccagaatgatggccctcagcagggaccaccccaacaaggaggccagcagcaacaaggtccaccacctcctcagggaaagccacaaggaccaccccaacagggaggccatccccctcctcctcaaggaaggccacaaggaccaccccaacagggaggccatccccgtcctcctcgaggaaggggtgctgacgttggaccgag

SEQ ID NO: 449908 - DNA, 2858 bp, Homo sapiens
  misc_feature (39)..(39): n is a, c, g, or t
  misc_feature (76)..(76): n is a, c, g, or t
gttaaatcagtattcagtatttacataattatgactgantttacatgactactattattcacagttgatgtatacngtgtatacagtgtagtttttaaatttttatttttctcagcgttcaaaattatatgttctgttttcttaattttgaaaaatatgcattcactaatttatccccacactctttggaaaatgaaagctctctaggctgtattcaaatacaccaggtactctatcaattttcattttttaaactattctacctgagctctccatctttagccatttcctgttgacttcatactgttctcccctaccactctccctctttaatatattaccgttttagaaactttatggctaccctgtaagtaataaaaatgtctttccccactcaacaacagacagtacctttcaagtttccactttataaggacataacccccattccatttacttcccccgccctccttcaacattcccacttgtattttccggctgtatttttaaaacatggtaaataacatttgcactccactttgtaaccataattaagtatgcccttaaacaataaaaaccataaacaacatttgtattttacgattatttaaatgttattcactgaacagccaagctttgtgctactatgggatttcgttttctgcggttccaagtcttgatccacgtcctgccacaggatcactgaagtagagcccattttcttacactctcgccattagttcaaaagcttgcagcattttatgtctggtacttggaggatgattttcctgtacagttttgcgtttttttcaccgaaaatttctgattattattgttttctcttgtgggatgaaatatgtaccttctatatcacagccttaataccttcagcttcttattcattcaaatcttgcttacaatccagtccgaggattcccggtttactgattttctttttcctgcaaattttagccttctgttttgttttgaaataatgcatcctctgcgctttgtcacattctgaaattcgtcaggtgttttaggatgcacactttcttagatcttttcgagggtcttaactgcagttctgtttccggaatggcgtattttctttctaggaattgtaggctcccggccgccccctgaggagctccgctagcagctaagagggcagccacgaagagcgcctgagcactctcgcgagactgtggggctcgccattggctgctccgccgcgccgcaacggaccctgggagtcggccatcatgctggccccggaggccgttatcttagtcatggctctaaatatgtacctgcaatcggatgttgaggatcaccgagcccgcgacgtagaagtacgggaagttcatgcgcagctgccaggccagctcgaagaaggcgagcagggtgcgggagagccccttgcagaagacgccgtacgaggttctccagcatttggctcaaggccccaagggcacatgtgacaagaaggcgccggctttttaaacattggaagttcttctgtgtcagttctgtgacagaacatttacttaacacatcatgaaggctagtttggatgtggaggggaatagactccatctatccatatgagctgctgcagaagaatattttgcctgctggaacctgctgtatctactcaagagtggaagttttcacagaagatgcagcacactgtcaaaatatccggagacgccagcaccaaagcccacagaggagttaaaagtgtgatcactttcttcctactctatgccattttctctctgtcttttttcatatcagtttggacctctgaaaggttggaggaaaatctaattattctttcccaggtgatgggaatggcttatccttcatgtcactcatgtgttctgattcttggaaacaagaagctgagacaggcctctctgtcagtgctactgtggctgaggtacatgttcaaagatggggagccctcaggtcacaaagaatttagagaatcatcttgaatatattagaaaaaaaatagctcctaagaaattcttgtatgttatataaactttatacttccttaagattctttcattgtgtataactttgtgaattttacaaagatatgcttggaatcaacaccatccaaacatatcacaaattaggatatatgaaagtatgtatattaccatacagagaagaatgcgaatactataaagagttcttatacaaacagataatatagattttgtatcaatcattcaccttttttgagatttttaaatgagaaaacctataatgtataaaatacatgtgtgtatgtatgtatgtgacacagttactaaaaataggcttcttaaacttacatctcaatctggtagataaagtacataaaagaatatggaattttagtacctatattaagtgtttttaatttttgtataatatttagtacctgattagcgtgtatgcaaaaaagtaatttgcttcgtttgttgaattagaagccagctgccttactaaactaccacatttgctttgctcattctcttggctttgcagatagaaaattatatcatctgcatatagtgacttataatgattattttacttctccattttactacttgtaattcttttttggtatcagttgtataatgaaatggtttgaacattcaaagtgttaagtaatcctgatcgtaactgctgtctttgcaaatggagtgttttctagtgttttaacaataaacgtaatactgactctagctttgagataaattcttttaaaaatattattcagggagaatatttgtttcctatcttcctgtgtatagtattgtaataaaatctctgttaaaaactatcaaaaaaaa

SEQ ID NO: 449909 - DNA, 2024 bp, Homo sapiens
  misc_feature (39)..(39): n is a, c, g, or t
  misc_feature (76)..(76): n is a, c, g, or t
gttaaatcagtattcagtatttacataattatgactgantttacatgactactattattcacagttgatgtatacngtgtatacagtgtagtttttaaatttttatttttctcagcgttcaaaattatatgttctgttttcttaattttgaaaaatatgcattcactaatttatccccacactctttggaaaatgaaagctctctaggctgtattcaaatacaccaggtactctatcaattttcattttttaaactattctacctgagctctccatctttagccatttcctgttgacttcatactgttctcccctaccactctccctctttaatatattaccgttttagaaactttatggctaccctgtaagtaataaaaatgtctttccccactcaacaacagacagtacctttcaagtttccactttataaggacataacccccattccatttacttcccccgccctccttcaacattcccacttgtattttccggctgtatttttaaaacatggtaaataacatttgcactccactttgtaaccataattaagtatgcccttaaacaataaaaaccataaacaacatttgtattttacgattatttaaatgttattcactgaacagccaagctttgtgctactatgggatttcgttttctgcggttccaagtcttgatccacgtcctgccacaggatcactgaagtagagcccattttcttacactctcgccattagttcaaaagcttgcagcattttatgtctggtacttggaggatgattttcctgtacagttttgcgtttttttcaccgaaaatttctgattattattgttttctcttgtgggatgaaatatgtaccttctatatcacagccttaataccttcagcttcttattcattcaaatcttgcttacaatccagtccgaggattcccggtttactgattttctttttcctgcaaattttagccttctgttttgttttgaaataatgcatcctctgcgctttgtcacattctgaaattcgtcaggtgttttaggatgcacactttcttagatcttttcgagggtcttaactgcagttctgtttccggaatggcgtattttctttctaggaattgtaggctcccggccgccccctgaggagctccgctagcagctaagagggcagccacgaagagcgcctgagcactctcgcgagactgtggggctcgccattggctgctccgccgcgccgcaacggaccctgggagtcggccatcatgctggccccggaggccgttatcttagtcatggctctaaatatgtacctgcaatcggatgttgaggatcaccgagcccgcgacgtagaagtacgggaagttcatgcgcagctgccaggccagctcgaagaaggcgagcagggtgcgggagagccccttgcagaagacgccgtacgaggttctccagcatttggctcaaggccccaagggcacatgtgacaagaaggcgccggctttttaaacattggaagttcttctgtgtcagttctgtgacagaacatttacttaacacatcatgaaggctagtttggatgtggaggggaatagactccatctatccatatgagagttggagtctcactctgttatccaggctggagttcagtggtaggatcatggcttactgcagtctggaactcctgggctcaaaccatcctcccacctcagccttctgctgcagaagaatattttgcctgctggaacctgctgtatctactcaagagtggaagttttcacagatgtgaactatgaagactttactttcaccataccagcctgcaggaagcatcatcattcttccggagggacagaccagcaagacatccccaggagcaaccactctggtaatctagaattcagtggcagaaaataaataagaagataacttccttcagaaagccatgacattgaaataatgtggtcataactctttcttcagtataccaataaaatattaatagcatgcaaaaaaaaattgtt

SEQ ID NO: 449910 - DNA, 2689 bp, Homo sapiens
  misc_feature (39)..(39): n is a, c, g, or t
  misc_feature (76)..(76): n is a, c, g, or t
gttaaatcagtattcagtatttacataattatgactgantttacatgactactattattcacagttgatgtatacngtgtatacagtgtagtttttaaatttttatttttctcagcgttcaaaattatatgttctgttttcttaattttgaaaaatatgcattcactaatttatccccacactctttggaaaatgaaagctctctaggctgtattcaaatacaccaggtactctatcaattttcattttttaaactattctacctgagctctccatctttagccatttcctgttgacttcatactgttctcccctaccactctccctctttaatatattaccgttttagaaactttatggctaccctgtaagtaataaaaatgtctttccccactcaacaacagacagtacctttcaagtttccactttataaggacataacccccattccatttacttcccccgccctccttcaacattcccacttgtattttccggctgtatttttaaaacatggtaaataacatttgcactccactttgtaaccataattaagtatgcccttaaacaataaaaaccataaacaacatttgtattttacgattatttaaatgttattcactgaacagccaagctttgtgctactatgggatttcgttttctgcggttccaagtcttgatccacgtcctgccacaggatcactgaagtagagcccattttcttacactctcgccattagttcaaaagcttgcagcattttatgtctggtacttggaggatgattttcctgtacagttttgcgtttttttcaccgaaaatttctgattattattgttttctcttgtgggatgaaatatgtaccttctatatcacagccttaataccttcagcttcttattcattcaaatcttgcttacaatccagtccgaggattcccggtttactgattttctttttcctgcaaattttagccttctgttttgttttgaaataatgcatcctctgcgctttgtcacattctgaaattcgtcaggtgttttaggatgcacactttcttagatcttttcgagggtcttaactgcagttctgtttccggaatggcgtattttctttctaggaattgtaggctcccggccgccccctgaggagctccgctagcagctaagagggcagccacgaagagcgcctgagcactctcgcgagactgtggggctcgccattggctgctccgccgcgccgcaacggaccctgggagtcggccatcatgctggccccggaggccgttatcttagtcatggctctaaatatgtacctgcaatcggatgttgaggatcaccgagcccgcgacgtagaagtacgggaagttcatgcgcagctgccaggccagctcgaagaaggcgagcagggtgcgggagagccccttgcagaagacgccgtacgagctgctgcagaagaatattttgcctgctggaacctgctgtatctactcaagagtggaagttttcacagaagatgcagcacactgtcaaaatatccggagacgccagcaccaaagcccacagaggagttaaaagtgtgatcactttcttcctactctatgccattttctctctgtcttttttcatatcagtttggacctctgaaaggttggaggaaaatctaattattctttcccaggtgatgggaatggcttatccttcatgtcactcatgtgttctgattcttggaaacaagaagctgagacaggcctctctgtcagtgctactgtggctgaggtacatgttcaaagatggggagccctcaggtcacaaagaatttagagaatcatcttgaatatattagaaaaaaaatagctcctaagaaattcttgtatgttatataaactttatacttccttaagattctttcattgtgtataactttgtgaattttacaaagatatgcttggaatcaacaccatccaaacatatcacaaattaggatatatgaaagtatgtatattaccatacagagaagaatgcgaatactataaagagttcttatacaaacagataatatagattttgtatcaatcattcaccttttttgagatttttaaatgagaaaacctataatgtataaaatacatgtgtgtatgtatgtatgtgacacagttactaaaaataggcttcttaaacttacatctcaatctggtagataaagtacataaaagaatatggaattttagtacctatattaagtgtttttaatttttgtataatatttagtacctgattagcgtgtatgcaaaaaagtaatttgcttcgtttgttgaattagaagccagctgccttactaaactaccacatttgctttgctcattctcttggctttgcagatagaaaattatatcatctgcatatagtgacttataatgattattttacttctccattttactacttgtaattcttttttggtatcagttgtataatgaaatggtttgaacattcaaagtgttaagtaatcctgatcgtaactgctgtctttgcaaatggagtgttttctagtgttttaacaataaacgtaatactgactctagctttgagataaattcttttaaaaatattattcagggagaatatttgtttcctatcttcctgtgtatagtattgtaataaaatctctgttaaaaactatcaaaaaaaa

SEQ ID NO: 449911 - DNA, 2256 bp, Homo sapiens
  misc_feature (39)..(39): n is a, c, g, or t
  misc_feature (76)..(76): n is a, c, g, or t
gttaaatcagtattcagtatttacataattatgactgantttacatgactactattattcacagttgatgtatacngtgtatacagtgtagtttttaaatttttatttttctcagcgttcaaaattatatgttctgttttcttaattttgaaaaatatgcattcactaatttatccccacactctttggaaaatgaaagctctctaggctgtattcaaatacaccaggtactctatcaattttcattttttaaactattctacctgagctctccatctttagccatttcctgttgacttcatactgttctcccctaccactctccctctttaatatattaccgttttagaaactttatggctaccctgtaagtaataaaaatgtctttccccactcaacaacagacagtacctttcaagtttccactttataaggacataacccccattccatttacttcccccgccctccttcaacattcccacttgtattttccggctgtatttttaaaacatggtaaataacatttgcactccactttgtaaccataattaagtatgcccttaaacaataaaaaccataaacaacatttgtattttacgattatttaaatgttattcactgaacagccaagctttgtgctactatgggatttcgttttctgcggttccaagtcttgatccacgtcctgccacaggatcactgaagtagagcccattttcttacactctcgccattagttcaaaagcttgcagcattttatgtctggtacttggaggatgattttcctgtacagttttgcgtttttttcaccgaaaatttctgattattattgttttctcttgtgggatgaaatatgtaccttctatatcacagccttaataccttcagcttcttattcattcaaatcttgcttacaatccagtccgaggattcccggtttactgattttctttttcctgcaaattttagccttctgttttgttttgaaataatgcatcctctgcgctttgtcacattctgaaattcgtcaggtgttttaggatgcacactttcttagatcttttcgagggtcttaactgcagttctgtttccggaatggcgtattttctttctaggaattgtaggctcccggccgccccctgaggagctccgctagcagctaagagggcagccacgaagagcgcctgagcactctcgcgagactgtggggctcgccattggctgctccgccgcgccgcaacggaccctgggagtcggccatcatgctggccccggaggccgttatcttagtcatggctctaaatatgtacctgcaatcggatgttgaggatcaccgagcccgcgacgtagaagtacgggaagttcatgcgcagctgccaggccagctcgaagaaggcgagcagggtgcgggagagccccttgcagaagacgccgtacgaggttctccagcatttggctcaaggccccaagggcacatgtgacaagaaggcgccggctttttaaacattggaagttcttctgtgtcagttctgtgacagaacatttacttaacacatcatgaaggctagtttggatgtggaggggaatagactccatctatccatatgagagttggagtctcactctgttatccaggctggagttcagtggtaggatcatggcttactgcagtctggaactcctgggctcaaaccatcctcccacctcagccttctgctgcagaagaatattttgcctgctggaacctgctgtatctactcaagagtggaagttttcacagagatatttgcttacattccagtgtaaagcttcttcttcagaaggcaagatggacaggttactcacagtgatcaaagtttttaagactggagtttcctaattttgagatttctcttttgatagacaccactacttgcacatgtaacatcagtttctcatcttatccctgtgaggggactgaagcttgaagaaatagtacgatgatattcctctgactactgctagtacttcagtgaataataaaccatcttttgccttctgcaagtacaacaagtgacaagctaagttgttagcttataataattttggcaacgaggatggaacacagcccaaagacctggccttctgaggagaaagtgaaggatcctacaagctgattaataggatttgctgaaagtccatgggaactggtagctaacatgttgactaaaatgtttgtaattggtaaataaatattcttctattaaaagctca

SEQ ID NO: 449912 - DNA, 2411 bp, Homo sapiens
  misc_feature (39)..(39): n is a, c, g, or t
  misc_feature (76)..(76): n is a, c, g, or t
gttaaatcagtattcagtatttacataattatgactgantttacatgactactattattcacagttgatgtatacngtgtatacagtgtagtttttaaatttttatttttctcagcgttcaaaattatatgttctgttttcttaattttgaaaaatatgcattcactaatttatccccacactctttggaaaatgaaagctctctaggctgtattcaaatacaccaggtactctatcaattttcattttttaaactattctacctgagctctccatctttagccatttcctgttgacttcatactgttctcccctaccactctccctctttaatatattaccgttttagaaactttatggctaccctgtaagtaataaaaatgtctttccccactcaacaacagacagtacctttcaagtttccactttataaggacataacccccattccatttacttcccccgccctccttcaacattcccacttgtattttccggctgtatttttaaaacatggtaaataacatttgcactccactttgtaaccataattaagtatgcccttaaacaataaaaaccataaacaacatttgtattttacgattatttaaatgttattcactgaacagccaagctttgtgctactatgggatttcgttttctgcggttccaagtcttgatccacgtcctgccacaggatcactgaagtagagcccattttcttacactctcgccattagttcaaaagcttgcagcattttatgtctggtacttggaggatgattttcctgtacagttttgcgtttttttcaccgaaaatttctgattattattgttttctcttgtgggatgaaatatgtaccttctatatcacagccttaataccttcagcttcttattcattcaaatcttgcttacaatccagtccgaggattcccggtttactgattttctttttcctgcaaattttagccttctgttttgttttgaaataatgcatcctctgcgctttgtcacattctgaaattcgtcaggtgttttaggatgcacactttcttagatcttttcgagggtcttaactgcagttctgtttccggaatggcgtattttctttctaggaattgtaggctcccggccgccccctgaggagctccgctagcagctaagagggcagccacgaagagcgcctgagcactctcgcgagactgtggggctcgccattggctgctccgccgcgccgcaacggaccctgggagtcggccatcatgctggccccggaggccgttatcttagtcatggctctaaatatgtacctgcaatcggatgttgaggatcaccgagcccgcgacgtagaagtacgggaagttcatgcgcagctgccaggccagctcgaagaaggcgagcagggtgcgggagagccccttgcagaagacgccgtacgaggtgggtgtcgcggcggggcttgaggctctgacggccaaggaggacggagccgccgcgggggccatgagccaggtgtcgccggccgcccagcgtctgtagcgagggttgccgcagggcccgcggacctcctagcgacggctgggaccggcaggacggttctccagcatttggctcaaggccccaagggcacatgtgacaagaaggcgccggctttttaaacattggaagttcttctgtgtcagttctgtgacagaacatttacttaacacatcatgaaggctagtttggatgtggaggggaatagactccatctatccatatgagagttggagtctcactctgttatccaggctggagttcagtggtaggatcatggcttactgcagtctggaactcctgggctcaaaccatcctcccacctcagccttctgctgcagaagaatattttgcctgctggaacctgctgtatctactcaagagtggaagttttcacagagatatttgcttacattccagtgtaaagcttcttcttcagaaggcaagatggacaggttactcacagtgatcaaagtttttaagactggagtttcctaattttgagatttctcttttgatagacaccactacttgcacatgtaacatcagtttctcatcttatccctgtgaggggactgaagcttgaagaaatagtacgatgatattcctctgactactgctagtacttcagtgaataataaaccatcttttgccttctgcaagtacaacaagtgacaagctaagttgttagcttataataattttggcaacgaggatggaacacagcccaaagacctggccttctgaggagaaagtgaaggatcctacaagctgattaataggatttgctgaaagtccatgggaactggtagctaacatgttgactaaaatgtttgtaattggtaaataaatattcttctattaaaagctca

SEQ ID NO: 449913 - DNA, 2056 bp, Homo sapiens
  misc_feature (39)..(39): n is a, c, g, or t
  misc_feature (76)..(76): n is a, c, g, or t
gttaaatcagtattcagtatttacataattatgactgantttacatgactactattattcacagttgatgtatacngtgtatacagtgtagtttttaaatttttatttttctcagcgttcaaaattatatgttctgttttcttaattttgaaaaatatgcattcactaatttatccccacactctttggaaaatgaaagctctctaggctgtattcaaatacaccaggtactctatcaattttcattttttaaactattctacctgagctctccatctttagccatttcctgttgacttcatactgttctcccctaccactctccctctttaatatattaccgttttagaaactttatggctaccctgtaagtaataaaaatgtctttccccactcaacaacagacagtacctttcaagtttccactttataaggacataacccccattccatttacttcccccgccctccttcaacattcccacttgtattttccggctgtatttttaaaacatggtaaataacatttgcactccactttgtaaccataattaagtatgcccttaaacaataaaaaccataaacaacatttgtattttacgattatttaaatgttattcactgaacagccaagctttgtgctactatgggatttcgttttctgcggttccaagtcttgatccacgtcctgccacaggatcactgaagtagagcccattttcttacactctcgccattagttcaaaagcttgcagcattttatgtctggtacttggaggatgattttcctgtacagttttgcgtttttttcaccgaaaatttctgattattattgttttctcttgtgggatgaaatatgtaccttctatatcacagccttaataccttcagcttcttattcattcaaatcttgcttacaatccagtccgaggattcccggtttactgattttctttttcctgcaaattttagccttctgttttgttttgaaataatgcatcctctgcgctttgtcacattctgaaattcgtcaggtgttttaggatgcacactttcttagatcttttcgagggtcttaactgcagttctgtttccggaatggcgtattttctttctaggaattgtaggctcccggccgccccctgaggagctccgctagcagctaagagggcagccacgaagagcgcctgagcactctcgcgagactgtggggctcgccattggctgctccgccgcgccgcaacggaccctgggagtcggccatcatgctggccccggaggccgttatcttagtcatggctctaaatatgtacctgcaatcggatgttgaggatcaccgagcccgcgacgtagaagtacgggaagttcatgcgcagctgccaggccagctcgaagaaggcgagcagggtgcgggagagccccttgcagaagacgccgtacgaggttctccagcatttggctcaaggccccaagggcacatgtgacaagaaggcgccggctttttaaacattggaagttcttctgtgtcagttctgtgacagaacatttacttaacacatcatgaaggctagtttggatgtggaggggaatagactccatctatccatatgagctgctgcagaagaatattttgcctgctggaacctgctgtatctactcaagagtggaagttttcacaggtaacttctacatatcaagtaacacaggatcaaatgaaaacctagcaacacttggtttctgcctgtatcagacaggtgaaattgcaagcagttatacaagtagtgtactaacttctcataaagcctactcaaggagggtattgttattgtgtgcgttttacagatggctatcctaaggctgatagtagttgtaaaatatagtctaagttcatatctatatgaaacagagtatctgggtttctgtcctggccatcagacttgaagatcatttcttagaaacaattatattatcaaaactgaaaagaaatacaatccaaggttggagtcttattttagcatctattaatcttaagccattaagtaatcaaaaataaatt

SEQ ID NO: 449914 - DNA, 1716 bp, Homo sapiens
  misc_feature (39)..(39): n is a, c, g, or t
  misc_feature (76)..(76): n is a, c, g, or t
gttaaatcagtattcagtatttacataattatgactgantttacatgactactattattcacagttgatgtatacngtgtatacagtgtagtttttaaatttttatttttctcagcgttcaaaattatatgttctgttttcttaattttgaaaaatatgcattcactaatttatccccacactctttggaaaatgaaagctctctaggctgtattcaaatacaccaggtactctatcaattttcattttttaaactattctacctgagctctccatctttagccatttcctgttgacttcatactgttctcccctaccactctccctctttaatatattaccgttttagaaactttatggctaccctgtaagtaataaaaatgtctttccccactcaacaacagacagtacctttcaagtttccactttataaggacataacccccattccatttacttcccccgccctccttcaacattcccacttgtattttccggctgtatttttaaaacatggtaaataacatttgcactccactttgtaaccataattaagtatgcccttaaacaataaaaaccataaacaacatttgtattttacgattatttaaatgttattcactgaacagccaagctttgtgctactatgggatttcgttttctgcggttccaagtcttgatccacgtcctgccacaggatcactgaagtagagcccattttcttacactctcgccattagttcaaaagcttgcagcattttatgtctggtacttggaggatgattttcctgtacagttttgcgtttttttcaccgaaaatttctgattattattgttttctcttgtgggatgaaatatgtaccttctatatcacagccttaataccttcagcttcttattcattcaaatcttgcttacaatccagtccgaggattcccggtttactgattttctttttcctgcaaattttagccttctgttttgttttgaaataatgcatcctctgcgctttgtcacattctgaaattcgtcaggtgttttaggatgcacactttcttagatcttttcgagggtcttaactgcagttctgtttccggaatggcgtattttctttctaggaattgtaggctcccggccgccccctgaggagctccgctagcagctaagagggcagccacgaagagcgcctgagcactctcgcgagactgtggggctcgccattggctgctccgccgcgccgcaacggaccctgggagtcggccatcatgctggccccggaggccgttatcttagtcatggctctaaatatgtacctgcaatcggatgttgaggatcaccgagcccgcgacgtagaagtacgggaagttcatgcgcagctgccaggccagctcgaagaaggcgagcagggtgcgggagagccccttgcagaagacgccgtacgaggttctccagcatttggctcaaggccccaagggcacatgtgacaagaaggcgccggctttttaaacattggaagttcttctgtgtcagttctgtgacagaacatttacttaacacatcatgaaggctagtttggatgtggaggggaatagactccatctatccatatgagctgctgcagaagaatattttgcctgctggaacctgctgtatctactcaagagtggaagttttcacagaagatgcagttccatggcaaaggatctccagattcca

SEQ ID NO: 449915 - DNA, 1661 bp, Homo sapiens
  misc_feature (39)..(39): n is a, c, g, or t
  misc_feature (76)..(76): n is a, c, g, or t
gttaaatcagtattcagtatttacataattatgactgantttacatgactactattattcacagttgatgtatacngtgtatacagtgtagtttttaaatttttatttttctcagcgttcaaaattatatgttctgttttcttaattttgaaaaatatgcattcactaatttatccccacactctttggaaaatgaaagctctctaggctgtattcaaatacaccaggtactctatcaattttcattttttaaactattctacctgagctctccatctttagccatttcctgttgacttcatactgttctcccctaccactctccctctttaatatattaccgttttagaaactttatggctaccctgtaagtaataaaaatgtctttccccactcaacaacagacagtacctttcaagtttccactttataaggacataacccccattccatttacttcccccgccctccttcaacattcccacttgtattttccggctgtatttttaaaacatggtaaataacatttgcactccactttgtaaccataattaagtatgcccttaaacaataaaaaccataaacaacatttgtattttacgattatttaaatgttattcactgaacagccaagctttgtgctactatgggatttcgttttctgcggttccaagtcttgatccacgtcctgccacaggatcactgaagtagagcccattttcttacactctcgccattagttcaaaagcttgcagcattttatgtctggtacttggaggatgattttcctgtacagttttgcgtttttttcaccgaaaatttctgattattattgttttctcttgtgggatgaaatatgtaccttctatatcacagccttaataccttcagcttcttattcattcaaatcttgcttacaatccagtccgaggattcccggtttactgattttctttttcctgcaaattttagccttctgttttgttttgaaataatgcatcctctgcgctttgtcacattctgaaattcgtcaggtgttttaggatgcacactttcttagatcttttcgagggtcttaactgcagttctgtttccggaatggcgtattttctttctaggaattgtaggctcccggccgccccctgaggagctccgctagcagctaagagggcagccacgaagagcgcctgagcactctcgcgagactgtggggctcgccattggctgctccgccgcgccgcaacggaccctgggagtcggccatcatgctggccccggaggccgttatcttagtcatggctctaaatatgtacctgcaatcggatgttgaggatcaccgagcccgcgacgtagaagtacgggaagttcatgcgcagctgccaggccagctcgaagaaggcgagcagggtgcgggagagccccttgcagaagacgccgtacgaggttctccagcatttggctcaaggccccaagggcacatgtgacaagaaggcgccggctttttaaacattggaagttcttctgtgtcagttctgtgacagaacatttacttaacacatcatgaaggctagtttggatgtggaggggaatagactccatctatccatatgaggtgttgctctgtctccccgttggagtgcagtggtgtgatctcgaccaaa

SEQ ID NO: 449916 - DNA, 671 bp, Homo sapiens
gttgatgctcagcgatagtaacaatcctgcctcccctaacatcttcctccccttccagcagcttcacagaacatggttgatgaggtaacttaggggatgcacagggtgtggccagaagacccctttccctatagaccactatgagccctgaaagatttatgaggtaatgttcacttcatcctgtgcttcttttcctagatgtgaactatgaagactttactttcaccataccagatgtagaggactcaagtcagagaccagatcagggaccccagagacctcctcctgaaggactcctacctagaccccctggtgatagtggtaaccaagatgatggtcctcagcagagaccaccaaaaccaggaggccatcaccgccatcctcccccacctccttttcaaaatcagcaacgaccaccccaacgaggacaccgtcaactctctctaccccgatttccttctgtcagcctgcaggaagcatcatcattcttccggagggacagaccagcaagacatccccaggagcaaccactctggtaatctagaattcagtggcagaaaataaataagaagataacttccttcagaaagccatgacattgaaataatgtggtcataactctttcttcagtataccaataaaatattaatagcatgcaaaaaaaaattgtt

SEQ ID NO: 449917 - DNA, 2179 bp, Homo sapiens
  misc_feature (39)..(39): n is a, c, g, or t
  misc_feature (76)..(76): n is a, c, g, or t
gttaaatcagtattcagtatttacataattatgactgantttacatgactactattattcacagttgatgtatacngtgtatacagtgtagtttttaaatttttatttttctcagcgttcaaaattatatgttctgttttcttaattttgaaaaatatgcattcactaatttatccccacactctttggaaaatgaaagctctctaggctgtattcaaatacaccaggtactctatcaattttcattttttaaactattctacctgagctctccatctttagccatttcctgttgacttcatactgttctcccctaccactctccctctttaatatattaccgttttagaaactttatggctaccctgtaagtaataaaaatgtctttccccactcaacaacagacagtacctttcaagtttccactttataaggacataacccccattccatttacttcccccgccctccttcaacattcccacttgtattttccggctgtatttttaaaacatggtaaataacatttgcactccactttgtaaccataattaagtatgcccttaaacaataaaaaccataaacaacatttgtattttacgattatttaaatgttattcactgaacagccaagctttgtgctactatgggatttcgttttctgcggttccaagtcttgatccacgtcctgccacaggatcactgaagtagagcccattttcttacactctcgccattagttcaaaagcttgcagcattttatgtctggtacttggaggatgattttcctgtacagttttgcgtttttttcaccgaaaatttctgattattattgttttctcttgtgggatgaaatatgtaccttctatatcacagccttaataccttcagcttcttattcattcaaatcttgcttacaatccagtccgaggattcccggtttactgattttctttttcctgcaaattttagccttctgttttgttttgaaataatgcatcctctgcgctttgtcacattctgaaattcgtcaggtgttttaggatgcacactttcttagatcttttcgagggtcttaactgcagttctgtttccggaatggcgtattttctttctaggaattgtaggctcccggccgccccctgaggagctccgctagcagctaagagggcagccacgaagagcgcctgagcactctcgcgagactgtggggctcgccattggctgctccgccgcgccgcaacggaccctgggagtcggccatcatgctggccccggaggccgttatcttagtcatggctctaaatatgtacctgcaatcggatgttgaggatcaccgagcccgcgacgtagaagtacgggaagttcatgcgcagctgccaggccagctcgaagaaggcgagcagggtgcgggagagccccttgcagaagacgccgtacgagtttctccagcatttggctctaggtgccaagggcacatgtgacaagaaggtgccagctttataaaccttggaacttcttctgtgtcagttctgagacatacagtttactaaaacacatcatgaaggcctgttttgaagagaaggggaataagactgcatctgttcatatgagagttggattctcactctgttgtccacgctggagttcagtggtaggatcatggcttactgcagtctggaactcctgggctcaaaccatcctcccacctcagccttgttctccagcatttggctcaaggccccaagggcacatgtgacaagaaggcgccggctttttaaacattggaagttcttctgtgtcagttctgtgacagaacatttacttaacacatcatgaaggctagtttggatgtggaggggaatagactccatctatccatatgagttttgtggcagatgacacgctgagtgaaagaagagaaacctcatccatagattcaccaggggctcgtgggtcttctagcagaaaaaaactgatgctgtgcgaacaatattggcccgcggacctgcggttttctccgagcggcggtttccaggaactttcatttcaggtacccggtcctggaaacgacactgggttgccgttcacaggggaagcagcgctcaacaggtgcaatctccaaccccggggaggtgggggccaacaccagcgggcgagacaactccttcaaacagct

SEQ ID NO: 449918 - DNA, 1833 bp, Homo sapiens
  misc_feature (39)..(39): n is a, c, g, or t
  misc_feature (76)..(76): n is a, c, g, or t
gttaaatcagtattcagtatttacataattatgactgantttacatgactactattattcacagttgatgtatacngtgtatacagtgtagtttttaaatttttatttttctcagcgttcaaaattatatgttctgttttcttaattttgaaaaatatgcattcactaatttatccccacactctttggaaaatgaaagctctctaggctgtattcaaatacaccaggtactctatcaattttcattttttaaactattctacctgagctctccatctttagccatttcctgttgacttcatactgttctcccctaccactctccctctttaatatattaccgttttagaaactttatggctaccctgtaagtaataaaaatgtctttccccactcaacaacagacagtacctttcaagtttccactttataaggacataacccccattccatttacttcccccgccctccttcaacattcccacttgtattttccggctgtatttttaaaacatggtaaataacatttgcactccactttgtaaccataattaagtatgcccttaaacaataaaaaccataaacaacatttgtattttacgattatttaaatgttattcactgaacagccaagctttgtgctactatgggatttcgttttctgcggttccaagtcttgatccacgtcctgccacaggatcactgaagtagagcccattttcttacactctcgccattagttcaaaagcttgcagcattttatgtctggtacttggaggatgattttcctgtacagttttgcgtttttttcaccgaaaatttctgattattattgttttctcttgtgggatgaaatatgtaccttctatatcacagccttaataccttcagcttcttattcattcaaatcttgcttacaatccagtccgaggattcccggtttactgattttctttttcctgcaaattttagccttctgttttgttttgaaataatgcatcctctgcgctttgtcacattctgaaattcgtcaggtgttttaggatgcacactttcttagatcttttcgagggtcttaactgcagttctgtttccggaatggcgtattttctttctaggaattgtaggctcccggccgccccctgaggagctccgctagcagctaagagggcagccacgaagagcgcctgagcactctcgcgagactgtggggctcgccattggctgctccgccgcgccgcaacggaccctgggagtcggccatcatgctggccccggaggccgttatcttagtcatggctctaaatatgtacctgcaatcggatgttgaggatcaccgagcccgcgacgtagaagtacgggaagttcatgcgcagctgccaggccagctcgaagaaggcgagcagggtgcgggagagccccttgcagaagacgccgtacgagtttctccagcatttggctctaggtgccaagggcacatgtgacaagaaggtgccagctttataaaccttggaacttcttctgtgtcagttctgagacatacagtttactaaaacacatcatgaaggcctgttttgaagagaaggggaataagactgcatctgttcatatgaggtatgtcgaagcacttggatatgttttcaaaccaccaatcttgatcatttagaaatgtgctcccttttccaatttcatcctgataaaaatgtatgatctctggacgttgccaatattcccctccattccatcatgagccgttctctgtaattcagaatctgtggactaagctgtaaaactaatgactgtcaatctattctacgtgaaatagtgggccaa

SEQ ID NO: 449919 - DNA, 1955 bp, Homo sapiens
  misc_feature (39)..(39): n is a, c, g, or t
  misc_feature (76)..(76): n is a, c, g, or t
gttaaatcagtattcagtatttacataattatgactgantttacatgactactattattcacagttgatgtatacngtgtatacagtgtagtttttaaatttttatttttctcagcgttcaaaattatatgttctgttttcttaattttgaaaaatatgcattcactaatttatccccacactctttggaaaatgaaagctctctaggctgtattcaaatacaccaggtactctatcaattttcattttttaaactattctacctgagctctccatctttagccatttcctgttgacttcatactgttctcccctaccactctccctctttaatatattaccgttttagaaactttatggctaccctgtaagtaataaaaatgtctttccccactcaacaacagacagtacctttcaagtttccactttataaggacataacccccattccatttacttcccccgccctccttcaacattcccacttgtattttccggctgtatttttaaaacatggtaaataacatttgcactccactttgtaaccataattaagtatgcccttaaacaataaaaaccataaacaacatttgtattttacgattatttaaatgttattcactgaacagccaagctttgtgctactatgggatttcgttttctgcggttccaagtcttgatccacgtcctgccacaggatcactgaagtagagcccattttcttacactctcgccattagttcaaaagcttgcagcattttatgtctggtacttggaggatgattttcctgtacagttttgcgtttttttcaccgaaaatttctgattattattgttttctcttgtgggatgaaatatgtaccttctatatcacagccttaataccttcagcttcttattcattcaaatcttgcttacaatccagtccgaggattcccggtttactgattttctttttcctgcaaattttagccttctgttttgttttgaaataatgcatcctctgcgctttgtcacattctgaaattcgtcaggtgttttaggatgcacactttcttagatcttttcgagggtcttaactgcagttctgtttccggaatggcgtattttctttctaggaattgtaggctcccggccgccccctgaggagctccgctagcagctaagagggcagccacgaagagcgcctgagcactctcgcgagactgtggggctcgccattggctgctccgccgcgccgcaacggaccctgggagtcggccatcatgctggccccggaggccgttatcttagtcatggctctaaatatgtacctgcaatcggatgttgaggatcaccgagcccgcgacgtagaagtacgggaagttcatgcgcagctgccaggccagctcgaagaaggcgagcagggtgcgggagagccccttgcagaagacgccgtacgagtttctccagcatttggctctaggtgccaagggcacatgtgacaagaaggtgccagctttataaaccttggaacttcttctgtgtcagttctgagacatacagtttactaaaacacatcatgaaggcctgttttgaagagaaggggaataagactgcatctgttcatatgagacaggtaaaatggaaagcagttatacaaatgctatactaactcctcacaaagactacccaaagataatattatcatctgtgttttttggtgatcatactgaggcagagagcagttgtgaaatggagtctcagaatcgtcggtatatgaagcagaaaaactggtttcctctcttggcagtctgactccaagatctcttagaaacaattatactgtaaaaacctgaaaaagaagtaaaaaacaagaatggagactaatactaacatctattcttcttaatagcataatcaaaaataaattaaacagaaaaataaaagtgaatattcataccaagggaagtcta

SEQ ID NO: 449920 - DNA, 3199 bp, Homo sapiens
  misc_feature (39)..(39): n is a, c, g, or t
  misc_feature (76)..(76): n is a, c, g, or t
  misc_feature (1874)..(1874): n is a, c, g, or t
  misc_feature (2081)..(2081): n is a, c, g, or t
  misc_feature (2590)..(2590): n is a, c, g, or t
  misc_feature (2597)..(2597): n is a, c, g, or t
  misc_feature (2627)..(2627): n is a, c, g, or t
  misc_feature (2636)..(2636): n is a, c, g, or t
  misc_feature (2723)..(2723): n is a, c, g, or t
  misc_feature (2737)..(2737): n is a, c, g, or t
  misc_feature (2753)..(2753): n is a, c, g, or t
  misc_feature (2769)..(2769): n is a, c, g, or t
  misc_feature (2772)..(2772): n is a, c, g, or t
  misc_feature (2777)..(2777): n is a, c, g, or t
  misc_feature (2822)..(2822): n is a, c, g, or t
  misc_feature (2825)..(2825): n is a, c, g, or t
gttaaatcagtattcagtatttacataattatgactgantttacatgactactattattcacagttgatgtatacngtgtatacagtgtagtttttaaatttttatttttctcagcgttcaaaattatatgttctgttttcttaattttgaaaaatatgcattcactaatttatccccacactctttggaaaatgaaagctctctaggctgtattcaaatacaccaggtactctatcaattttcattttttaaactattctacctgagctctccatctttagccatttcctgttgacttcatactgttctcccctaccactctccctctttaatatattaccgttttagaaactttatggctaccctgtaagtaataaaaatgtctttccccactcaacaacagacagtacctttcaagtttccactttataaggacataacccccattccatttacttcccccgccctccttcaacattcccacttgtattttccggctgtatttttaaaacatggtaaataacatttgcactccactttgtaaccataattaagtatgcccttaaacaataaaaaccataaacaacatttgtattttacgattatttaaatgttattcactgaacagccaagctttgtgctactatgggatttcgttttctgcggttccaagtcttgatccacgtcctgccacaggatcactgaagtagagcccattttcttacactctcgccattagttcaaaagcttgcagcattttatgtctggtacttggaggatgattttcctgtacagttttgcgtttttttcaccgaaaatttctgattattattgttttctcttgtgggatgaaatatgtaccttctatatcacagccttaataccttcagcttcttattcattcaaatcttgcttacaatccagtccgaggattcccggtttactgattttctttttcctgcaaattttagccttctgttttgttttgaaataatgcatcctctgcgctttgtcacattctgaaattcgtcaggtgttttaggatgcacactttcttagatcttttcgagggtcttaactgcagttctgtttccggaatggcgtattttctttctaggaattgtaggctcccggccgccccctgaggagctccgctagcagctaagagggcagccacgaagagcgcctgagcactctcgcgagactgtggggctcgccattggctgctccgccgcgccgcaacggaccctgggagtcggccatcatgctggccccggaggccgttatcttagtcatggctctaaatatgtacctgcaatcggatgttgaggatcaccgagcccgcgacgtagaagtacgggaagttcatgcgcagctgccaggccagctcgaagaaggcgagcagggtgcgggagagccccttgcagaagacgccgtacgagtttctccagcatttggctctaggtgccaagggcacatgtgacaagaaggtgccagctttataaaccttggaacttcttctgtgtcagttctgagacatacagtttactaaaacacatcatgaaggcctgttttgaagagaaggggaataagactgcatctgttcatatgagagttggattctcactctgttgtccacgctggagttcagtggtaggatcatggcttactgcagtctggaactcctgggctcaaaccatcctcccacctcagccttgtgagtagcttcactatgcctgactaactttttcattcattgtagaggcagttttgctgtgttgcacaggctggtcttgaactcctgggtgctcctgccccagccttacaaaatgttgggattatgggtgtgagctaccctgcctggccaataaanggtcttattgaaaatattaagttgaatatgcaagaaggaatacaaattaatgaaagtggtaaatatgtgcataattctaaatgaatgtttagaaaataataatgtcttgttggggtaattatacaattgataagacatgcaaatggcaaaaaatagaatggaggtaaaggtgacaggagtaagtttagttaaattattttctgaacntttctatgtctatgaggagattttgaacaatgataatataattctactcataggtatatatgcaaaggaattgtatcaaatgatatatgaaagaatgttctagtagaattattcataactgttcaaaaaagaaactggccaaatacatattaaggttggatgaatcattacagtaattccatgcaatggaacaatatagagaagtgaaaaaaaatcacatgtgcttgcaactatgtgactaaatttcagaaacataatgttgagttcaggaagccacaaacaagaggaacatgtaggattgcacctatacagcgttcaaagtaggctagaccaagcgatggagtttagggttgcatacctagttggtaaagtatgaagaaaattgaggaaataaccattataaattatggatattgcttatatcaggagatgcgaagaagggtttagggacttggaaagtggaatggaggtggatctagcctgttttaggtgttccttgtcttgccctncatcatngttacttgagtgtttatgatacactgtggnatttcccanttttgtattggttcatttctaagtgcgcattataactttaatatacaaatttgtaattaggagaaatatagaaattattattactcntctcattatatacngaagggaaatatcaantatttgtatacattcntanacaantctaagatagttgaaataggaactttcttatttagttgcaacatnagnaaatttgagatgatgttatctgccacccccagatctttccaaaggatttcttctagccttaattatcgacctcacaggacaaacctttgccattccccatctattttttctttcggctcctgaattcctgacacaacaaggttgtacatatttcccacactcttggtttaagagttcttttatcagttatgtttctctgcaggagaagacccttcaaaactacattagatatttatatctcacatgtcgtttgatgttggttttttgttttgttttgttttgttttgttttgttttgttttttgacagagtcttgctgtgtcgcccaggctggagtgcagtggcataatctcagttcactgcaacctccgcctc

SEQ ID NO: 449921 - DNA, 461 bp, Homo sapiens
tcttgtccattaattactcacacaatgtagaggactcaagtcagagaccagatcagggaccccagagacctcctcctgaaggactcctacctagaccccctggtgatagtggtaaccaagatgatggtcctcagcagagaccaccaaaaccaggaggccatcaccgccatcctcccccacctccttttcaaaatcagcaacgaccaccccaacgaggacaccgtcaactctctctaccccgatttccttctgtcagcctgcaggaagcatcatcattcttccggagggacagaccagcaagacatccccaggagcaaccactctggtaatctagaattcagtggcagaaaataaataagaagataacttccttcagaaagccatgacattgaaataatgtggtcataactctttcttcagtataccaataaaatattaatagcatgcaaaaaaaaattgtt

SEQ ID NO: 449922 - DNA, 381 bp, Homo sapiens
aattcgtggtgctgctctgggtgctgctgtggtgctgctcggcgaattcgtggtgctgctcggcgaattcgtggtgatgctgctggtcctgctctcagtggtccttctggctctgagctcagctcagagcacagataatgatgtgaactatgaagactttactttcaccataccagatgtagaggactcaagtcagagaccagatcagggaccccagagacctcctcctgaaggactcctacctagaccccctggtgatagtggtaaccaagatgatggtcctcagcagagaccaccaaaaccaggaggccatcaccgccatcctcccccacctccttttcaaaccgcatcatcccagccaccagttttacagcgtccacc

SEQ ID NO: 449923 - DNA, 646 bp, Homo sapiens
tagagagatcggacggggtgtagacgagtacggacgcgttcgatgaagcgaccgtgtgggtagcagcaatctcaaccctctgctggtgatgggaaccagaatgatggccctcagcagggaccaccccaacaaggaggccagcagcaacaaggtccaccacctcctcagggaaagccacaaggaccaccccaacagggaggccagtccaccacctcctcagggaaagccacaaggaccaccccaacagggaggccatccccctcctcctcaaggaaggccacaaggaccaccccaacagggaggccatccccgtcctcctcgaggaaggccacaaggaccaccccaacagggaggccatcagcaaggtcctcccccacatcagcaacgaccaccccaacgaggacaccgtcaactctctctaccccgatttccttctgtcagcctgcaggaagcatcatcattcttccggagggacagaccagcaagacatccccaggagcaaccactctggtaatctagaattcagtggcagaaaataaataagaagataacttccttcagaaagccatgacattgaaataatgtggtcataactctttcttcagtataccaataaaatattaatagcatgcaaaaaaaaattgtt

SEQ ID NO: 449924 - DNA, 1194 bp, Homo sapiens
tagagagatcggacggggtgtagacgagtacggacgcgttcgatgaagcgaccgtgtgggtagcagcaatctcaaccctctgctggtgatgggaaccagaatgatggccctcagcagggaccaccccaacaaggaggccagcagcaacaaggtccaccacctcctcagggaaagccacaaggaccaccccaacagggaggccagtccaccacctcctcagggaaagccacaaggaccaccccaacagggaggccatccccctcctcctcaaggaaggccacaaggaccaccccaacagggaggccatccccgtcctcctcgaggaaggccacaaggaccaccccaacagggaggccatcagcaaggtcctcccccacctcctcctggaaagccccagggaccacctccccaagggggccgcccacaaggacctccacaggggcagtctcctcagtaatctaggattcaatgacaggtacgattccagtttattatccatcaaaggctccaactgctacagttctccaacttcattgtgccaatgaatcctctgaaaacctgttaatattgccctgtcctggaacacatttctaaaaattgttattcagatattcttgtatagagtatcaagaccctgtgaccctgtgttttacagaagctcttgaaggcaattctgattttgagaatcactatcttcaaattacatgtcttaagtagggttgacaatgaggacatagaaccatgttccccctttggctctctctattttctttcctcaaactcagactcccatttaaagttttcacctgaacatgctttgctcagtcctgcctcacatcaggctttcaggtccagtattcctgctaagtggtccttgaactttcagttgtaaaatggtatctcatttttagtatacttacatttaaagtcatacatgcttaagctaacaaaaactaatctcactgaaccgaaatgtacagagctaaatagtaagagcctaactcatctttcctcccttctatccttctcaaaacccccaccttttactctttggaatctactttttgaaatatatattgctacataaatatatataatgcttttattacaagcacttataccatactgtatattcagatttgtgtcttactcactggaaaaatttattgtttagaaaactttctcatgagttca

SEQ ID NO: 449925 - DNA, 1809 bp, Homo sapiens
atgggtggtgtcataaagagcatatttacattcgttttaattgtggaatttataattggaaatttaggaaatagtttcatagcactggtgaactgtattgactgggtcaagggaagaaagatctcttcggttgatcggatcctcactgctttggcaatctctcgaattagcctggtttggttaatattcggaagctggtgtgtgtctgtgtttttcccagctttatttgccactgaaaaaatgttcagaatgcttactaatatctggacagtgatcaatcattttagtgtctggttagctacaggcctcggtactttttattttctcaagatagccaatttttctaactctatttttctctacctaaagtggagggttaaaaaggtggttttggtgctgcttcttgtgacttcggtcttcttgtttttaaatattgcactgataaacatccatataaatgccagtatcaatggatacagaagaaacaagacttgcagttctgattcaagtaactttacacgattttccagtcttattgtattaaccagcactgtgttcattttcataccctttactttgtccctggcaatgtttcttctcctcatcttctccatgtggaaacatcgcaagaagatgcagcacactgtcaaaatatccggagacgccagcaccaaagcccacagaggagttaaaagtgtgatcactttcttcctactctatgccattttctctctgtcttttttcatatcagtttggacctctgaaaggttggaggaaaatctaattattctttcccaggtgatgggaatggcttatccttcatgtcactcatgtgttctgattcttggaaacaagaagctgagacaggcctctctgtcagtgctactgtggctgaggtacatgttcaaagatggggagccctcaggtcacaaagaatttagagaatcatcttgaatatattagaaaaaaaatagctcctaagaaattcttgtatgttatataaactttatacttccttaagattctttcattgtgtataactttgtgaattttacaaagatatgcttggaatcaacaccatccaaacatatcacaaattaggatatatgaaagtatgtatattaccatacagagaagaatgcgaatactataaagagttcttatacaaacagataatatagattttgtatcaatcattcaccttttttgagatttttaaatgagaaaacctataatgtataaaatacatgtgtgtatgtatgtatgtgacacagttactaaaaataggcttcttaaacttacatctcaatctggtagataaagtacataaaagaatatggaattttagtacctatattaagtgtttttaatttttgtataatatttagtacctgattagcgtgtatgcaaaaaagtaatttgcttcgtttgttgaattagaagccagctgccttactaaactaccacatttgctttgctcattctcttggctttgcagatagaaaattatatcatctgcatatagtgacttataatgattattttacttctccattttactacttgtaattcttttttggtatcagttgtataatgaaatggtttgaacattcaaagtgttaagtaatcctgatcgtaactgctgtctttgcaaatggagtgttttctagtgttttaacaataaacgtaatactgactctagctttgagataaattcttttaaaaatattattcagggagaatatttgtttcctatcttcctgtgtatagtattgtaataaaatctctgttaaaaactatcaaaaaaaa

SEQ ID NO: 449926 - DNA, 560 bp, Homo sapiens
ggggtgctgtgaacactgggtggatgctgctggtcctgctctcagtggtccttctggctctgagctcagctcagagcacagataatgatgtgaactatgaagactttactttcaccataccagatgtagaggactcaagtcagagaccagatcagggaccccagagacctcctcctgaaggactcctacctagaccccctggtgatagtggtaaccaagatgatggtcctcagcagagaccaccaaaaccaggaggccatcaccgccatcctcccccacctccttttcaaaatcagcaacgaccaccccaacgaggacaccgtcaactctctctaccccgatttccttctgtcagcctgcaggaagcatcatcattcttccggagggacagaccagcaagacatccccaggagcaaccactctggtaatctagaattcagtggcagaaaataaataagaagataacttccttcagaaagccatgacattgaaataatgtggtcataactctttcttcagtataccaataaaatattaatagcatgcaaaaaaaaattgtt

SEQ ID NO: 449927 - DNA, 2360 bp, Homo sapiens
  misc_feature (39)..(39): n is a, c, g, or t
  misc_feature (76)..(76): n is a, c, g, or t
gttaaatcagtattcagtatttacataattatgactgantttacatgactactattattcacagttgatgtatacngtgtatacagtgtagtttttaaatttttatttttctcagcgttcaaaattatatgttctgttttcttaattttgaaaaatatgcattcactaatttatccccacactctttggaaaatgaaagctctctaggctgtattcaaatacaccaggtactctatcaattttcattttttaaactattctacctgagctctccatctttagccatttcctgttgacttcatactgttctcccctaccactctccctctttaatatattaccgttttagaaactttatggctaccctgtaagtaataaaaatgtctttccccactcaacaacagacagtacctttcaagtttccactttataaggacataacccccattccatttacttcccccgccctccttcaacattcccacttgtattttccggctgtatttttaaaacatggtaaataacatttgcactccactttgtaaccataattaagtatgcccttaaacaataaaaaccataaacaacatttgtattttacgattatttaaatgttattcactgaacagccaagctttgtgctactatgggatttcgttttctgcggttccaagtcttgatccacgtcctgccacaggatcactgaagtagagcccattttcttacactctcgccattagttcaaaagcttgcagcattttatgtctggtacttggaggatgattttcctgtacagttttgcgtttttttcaccgaaaatttctgattattattgttttctcttgtgggatgaaatatgtaccttctatatcacagccttaataccttcagcttcttattcattcaaatcttgcttacaatccagtccgaggattcccggtttactgattttctttttcctgcaaattttagccttctgttttgttttgaaataatgcatcctctgcgctttgtcacattctgaaattcgtcaggtgttttaggatgcacactttcttagatcttttcgagggtcttaactgcagttctgtttccggaatggcgtattttctttctaggaattgtaggctcccggccgccccctgaggagctccgctagcagctaagagggcagccacgaagagcgcctgagcactctcgcgagactgtggggctcgccattggctgctccgccgcgccgcaacggaccctgggagtcggccatcatgctggccccggaggccgttatcttagtcatggctctaaatatgtacctgcaatcggatgttgaggatcaccgagcccgcgacgtagaagtacgggaagttcatgcgcagctgccaggccagctcgaagaaggcgagcagggtgcgggagagccccttgcagaagacgccgtacgaggttctccagcatttggctcaaggccccaagggcacatgtgacaagaaggcgccggctttttaaacattggaagttcttctgtgtcagttctgtgacagaacatttacttaacacatcatgaaggctagtttggatgtggaggggaatagactccatctatccatatgagctgctgcagaagaatattttgcctgctggaacctgctgtatctactcaagagtggaagttttcacagtaaagggagctgacacgtttctcccagcacaaagttgggagtgacaccagagcctcctgcaagatgcttctgattctgctgtcagtggccctgctggccttcagctcagctcaggatttaaatgaagatgtcagccaggaagatgttcccctcgtaatatcagatggaggagactctgagcagttcatagatgaggagcgtcagggaccacctttgggaggacagcaatctcaaccctctgctggtgatgggaaccagaatgatggccctcagcagggaccaccccaacaaggaggccagcagcaacaaggtccaccacctcctcagggaaagccacaaggaccaccccaacagggaggccatccccctcctcctcaaggaaggccacaaggaccaccccaacagggaggccatccccgtcctcctcgaggaaggccacaaggaccaccccaacagggaggccatcagcaaggtcctcccccacctcctcctggaaagccccagggaccacctccccaagggggccgcccacaaggacctccacaggggcagtctcctcagtaatctaggattcaatgacaggaagtgaataagaagataacagtgtttcaaatgccgtgaaacatggcatcatgctctaacttcagtataccaataaaacaatcagcttgcaaaaatctg

SEQ ID NO: 449928 - DNA, 3084 bp, Homo sapiens
  misc_feature (39)..(39): n is a, c, g, or t
  misc_feature (76)..(76): n is a, c, g, or t
gttaaatcagtattcagtatttacataattatgactgantttacatgactactattattcacagttgatgtatacngtgtatacagtgtagtttttaaatttttatttttctcagcgttcaaaattatatgttctgttttcttaattttgaaaaatatgcattcactaatttatccccacactctttggaaaatgaaagctctctaggctgtattcaaatacaccaggtactctatcaattttcattttttaaactattctacctgagctctccatctttagccatttcctgttgacttcatactgttctcccctaccactctccctctttaatatattaccgttttagaaactttatggctaccctgtaagtaataaaaatgtctttccccactcaacaacagacagtacctttcaagtttccactttataaggacataacccccattccatttacttcccccgccctccttcaacattcccacttgtattttccggctgtatttttaaaacatggtaaataacatttgcactccactttgtaaccataattaagtatgcccttaaacaataaaaaccataaacaacatttgtattttacgattatttaaatgttattcactgaacagccaagctttgtgctactatgggatttcgttttctgcggttccaagtcttgatccacgtcctgccacaggatcactgaagtagagcccattttcttacactctcgccattagttcaaaagcttgcagcattttatgtctggtacttggaggatgattttcctgtacagttttgcgtttttttcaccgaaaatttctgattattattgttttctcttgtgggatgaaatatgtaccttctatatcacagccttaataccttcagcttcttattcattcaaatcttgcttacaatccagtccgaggattcccggtttactgattttctttttcctgcaaattttagccttctgttttgttttgaaataatgcatcctctgcgctttgtcacattctgaaattcgtcaggtgttttaggatgcacactttcttagatcttttcgagggtcttaactgcagttctgtttccggaatggcgtattttctttctaggaattgtaggctcccggccgccccctgaggagctccgctagcagctaagagggcagccacgaagagcgcctgagcactctcgcgagactgtggggctcgccattggctgctccgccgcgccgcaacggaccctgggagtcggccatcatgctggccccggaggccgttatcttagtcatggctctaaatatgtacctgcaatcggatgttgaggatcaccgagcccgcgacgtagaagtacgggaagttcatgcgcagctgccaggccagctcgaagaaggcgagcagggtgcgggagagccccttgcagaagacgccgtacgaggttctccagcatttggctcaaggccccaagggcacatgtgacaagaaggcgccggctttttaaacattggaagttcttctgtgtcagttctgtgacagaacatttacttaacacatcatgaaggctagtttggatgtggaggggaatagactccatctatccatatgagagttggagtctcactctgttatccaggctggagttcagtggtaggatcatggcttactgcagtctggaactcctgggctcaaaccatcctcccacctcagccttctgctgcagaagaatattttgcctgctggaacctgctgtatctactcaagagtggaagttttcacagtaaagggagctgacacgtttctcccagcacaaagttgggagtgacaccagagcctcctgcaagatgcttctgattctgctgtcagtggccctgctggccttcagctcagctcaggatttaaatgaagatgtcagccaggaagatgttcccctcgtaatatcagatggaggagactctgagcagttcatagatgaggagcgtcagggaccacctttgggaggacagcaatctcaaccctctgctggtgatgggaaccagaatgatggccctcagcagggaccaccccaacaaggaggccagcagcaacaaggtccaccacctcctcagggaaagccacaaggaccaccccaacagggaggccatccccctcctcctcaaggaaggccacaaggaccaccccaacagggaggccatccccgtcctcctcgaggaaggccacaaggaccaccccaacagggaggccatcagcaaggtcctcccccacctcctcctggaaagccccagggaccacctccccaagggggccgcccacaaggacctccacaggggcagtctcctcagtaatctaggattcaatgacaggtacgattccagtttattatccatcaaaggctccaactgctacagttctccaacttcattgtgccaatgaatcctctgaaaacctgttaatattgccctgtcctggaacacatttctaaaaattgttattcagatattcttgtatagagtatcaagaccctgtgaccctgtgttttacagaagctcttgaaggcaattctgattttgagaatcactatcttcaaattacatgtcttaagtagggttgacaatgaggacatagaaccatgttccccctttggctctctctattttctttcctcaaactcagactcccatttaaagttttcacctgaacatgctttgctcagtcctgcctcacatcaggctttcaggtccagtattcctgctaagtggtccttgaactttcagttgtaaaatggtatctcatttttagtatacttacatttaaagtcatacatgcttaagctaacaaaaactaatctcactgaaccgaaatgtacagagctaaatagtaagagcctaactcatctttcctcccttctatccttctcaaaacccccaccttttactctttggaatctactttttgaaatatatattgctacataaatatatataatgcttttattacaagcacttataccatactgtatattcagatttgtgtcttactcactggaaaaatttattgtttagaaaactttctcatgagttca

SEQ ID NO: 449929 - DNA, 500 bp, Homo sapiens
tggctccatggtataggtggtctctgctgaggaccatcatcttggttccactttcaccataccatgtagaggactcaagtcagagaccagatcagggaccccagagacctcctcctgaaggactcctacctagaccccctggtgatagtggtaaccaagatgatggtcctcagcagagaccaccaaaaccaggaggccatcaccgccatcctcccccacctccttttcaaaatcagcaacgaccaccccaacgaggacaccgtcaactctctctaccccgatttccttctgtcagcctgcaggaagcatcatcattcttccggagggacagaccagcaagacatccccaggagcaaccactctggtaatctagaattcagtggcagaaaataaataagaagataacttccttcagaaagccatgacattgaaataatgtggtcataactctttcttcagtataccaataaaatattaatagcatgcaaaaaaaaattgtt

SEQ ID NO: 449930 - DNA, 749 bp, Homo sapiens
catctctttgtacatagctgagaagtatctgcgtatagaagaatagaggcagagaaatatgaaggactaaggagaagggtatgagagtaaataggatttgtaatagccaacccagaagttaagtagaaagcctgttgcttttccttccttcatttatccaaccttaataccaggcaactgaagagggaaaagtcagattgcggtgtttgcaaacaccgcagcaatctcaaccctctgctggtgatgggaaccagaatgatggccctcagcagggaccaccccaacaaggaggccagcagcaacaaggtccaccacctcctcagggaaagccacaaggaccaccccaacagggaggccatccccctcctcctcaaggaaggccacaaggaccaccccaacagggaggccatccccgtcctcctcgaggaaggccacaaggaccaccccaacagggaggccatcagcaaggtcctcccccacatcagcaacgaccaccccaacgaggacaccgtcaactctctctaccccgatttccttctgtcagcctgcaggaagcatcatcattcttccggagggacagaccagcaagacatccccaggagcaaccactctggtaatctagaattcagtggcagaaaataaataagaagataacttccttcagaaagccatgacattgaaataatgtggtcataactctttcttcagtataccaataaaatattaatagcatgcaaaaaaaaattgtt

SEQ ID NO: 449931 - DNA, 599 bp, Homo sapiens
gattcaggaagtaacttttcccatcatcctgtacttcttttctagatgtcagccaggaagatgttcccctcgtaatatcagatggaggagactctgagcagttcatagatgaggagcgtcagggaccacctttgggaggacagcaatctcaaccctctgctggtgatgggaaccagaatgatggccctcagcagggaccaccccaacaaggaggccagcagcaacaaggtccaccacctcctcagggaaagccacaaggaccaccccaacagggaggccatccccctcctcctcaaggaaggccacaaggaccaccccaacagggaggccatccccgtcctcctcgaggaaggccacaaggaccaccccaacagggaggccatcagcaaggtcctcccccacctcctcctggaaagccccagggaccacctccccaagggggccgcccacaaggacctccacaggggcagtctcctcagtaatctaggattcaatgacaggaagtgaataagaagataacagtgtttcaaatgccgtgaaacatggcatcatgctctaacttcagtataccaataaaacaatcagcttgcaaaaatctg

SEQ ID NO: 449932 - DNA, 1719 bp, Homo sapiens
gcatggttcctgacggaaacttgaccacctgcatcccagctgccaggccgcctccaccccattgggagctgggatgcaggtggtcatggttcctgacggaaacttgagccgagatctgacaacaaaggccaccctggtgctgaattccctgcaggacttccagcccgagctgtttggtttgccctcctatgagtgagagggagggcctcagtcttccgcccccagcccactctcatggtccacactgctgggggaaagggaaaggaaatcagcaactcttcaatcccaacctgcgctgtgattttagcctcctgagattggagtttccatcccatgttggtttgtcccagtctaacgtgttgataaaatgtgacttgacggttgagacaaaaaatacagtagagacagaaacgaagcccagaacaaagatgaaacttgaattaccatctcagaagtcaagctgatggagtatgtgataaagtgaatgtacatgtatatacacacacacctccatatatacacgtgtgtatcagtttggtaatatgcaggtaggcattacatgcatatgtatgtagacatatgcatgcatgtatatgtaaaatatatacttttccaagacaaaatggaacatcacttctctcttctagtttttctgaacactggctgggaaatgtaaactgtgtatgcatataagtatatgctttatgtatgcatatgtatgtagatatgtttatatctatcgtctgcatcactctcctcagtgttgatgtcaacatgcaatgacaactgataaagcgagatggtagttctgcctggtttgcagtctgagtgggaaagtcctgtttttgatgagcactccttgttagctaacatttaaattctttttgtgacctcagaatgtctctggatctttcctcattgactgactctgtgccacgtcatccatagtttattgttagtatgaacacaactgtaacatttacctggtatctacatccttacctgcattggaaaatgtttgctacctcacaacaaccatttgcctcctttaagaacactgatgggctgcactttttggatagaaatagaatttgatttcagaatgtatgcttggtgagtctcagtgcccaggaacacttttggaataatttatcagacattgaacttctgtgattaatcgcttttatagatttactcagtctttaaaattcgtctctgatttgccagagaaaaacggtggtagccatggaaatcgggagtgaaggagcactgcttcattgtggctcagcccttcctaggggcctctgccctttgatgtccttgagctactcttcagctctggaagttgtggacaaaccgtaggaatgtatgtgtgcgtgtggtggagtgattgtctgtgaatgacaggccctggctattgattgatgttgcatcaatttagcaaattcatttcctcattcttgatggcctgaatatatgtctgcacttttaatgctcctcttaaccagttgtaacatcttaccatttccctaacaaattgaattagtttaataaaatcttttgacacatgttaaaaaagagaaaagagaaagacagcaaaaaccgtttggggagcgcttgggccacctggaaaggtttctgaaaccatctcgttggggcgcgggggccccagaggggaacaggcaacgtgtggcaaaagggggtccccagggaaaccgg

SEQ ID NO: 449933 - DNA, 2348 bp, Homo sapiens
gcgtgcgcggggcgggcgggtgcgcgcgcacttcctcctcgcccccacccagacccagaaggcgccaccatggcggcgcccccgcagcccgtcacccacctcatctttgacatggacggacttcttctgggttatacaggaagcatagtggcagctgcttcgggggagtcctcaagaggcttacaatcacggtggacggatactgaacggctgtattcagtggtgtttcaagaaatatgtaatcgctatgacaagaaatacagctgggatgtaaagtccctggttatgggtaagaaggcattagaggcggcacagattataatagacgtcttgcagctcccgatgtccaaagaggagctggtggaagaaagccaaacgaagttaaaggaagtgttccccacggctgcgctcatgccaggggcggagaaactcatcatccacctgcggaaacatggcatcccctttgcactggccaccagctcggggtccgcgtcgttcgatatgaagacaagccgccacaaggagttcttcagcttgttttcccacattgtgctgggagatgaccccgaagtgcagcatggcaagccagacccagacatcttcctagcttgtgccaagaggttctctccccctcctgctatggagaagtgccttgtctttgaagatgctcccaatggggtggaggcggccctggcagctgggatgcaggtggtcatggttcctgacggaaacttgagccgagatctgacaacaaaggccaccctggtgctgaattccctgcaggacttccagcccgagctgtttggtttgccctcctatgagtgagagggagggcctcagtcttccgcccccagcccactctcatggtccacactgctgggggaaagggaaaggaaatcagcaactcttcaatcccaacctgcgctgtgattttagcctcctgagattggagtttccatcccatgttggtttgtcccagtctaacgtgttgataaaatgtgacttgacggttgagacaaaaaatacagtagagacagaaacgaagcccagaacaaagatgaaacttgaattaccatctcagaagtcaagctgatggagtatgtgataaagtgaatgtacatgtatatacacacacacctccatatatacacgtgtgtatcagtttggtaatatgcaggtaggcattacatgcatatgtatgtagacatatgcatgcatgtatatgtaaaatatatacttttccaagacaaaatggaacatcacttctctcttctagtttttctgaacactggctgggaaatgtaaactgtgtatgcatataagtatatgctttatgtatgcatatgtatgtagatatgtttatatctatcgtctgcatcactctcctcagtgttgatgtcaacatgcaatgacaactgataaagcgagatggtagttctgcctggtttgcagtctgagtgggaaagtcctgtttttgatgagcactccttgttagctaacatttaaattctttttgtgacctcagaatgtctctggatctttcctcattgactgactctgtgccacgtcatccatagtttattgttagtatgaacacaactgtaacatttacctggtatctacatccttacctgcattggaaaatgtttgctacctcacaacaaccatttgcctcctttaagaacactgatgggctgcactttttggatagaaatagaatttgatttcagaatgtatgcttggtgagtctcagtgcccaggaacacttttggaataatttatcagacattgaacttctgtgattaatcgcttttatagatttactcagtctttaaaattcgtctctgatttgccagagaaaaacggtggtagccatggaaatcgggagtgaaggagcactgcttcattgtggctcagcccttcctaggggcctctgccctttgatgtccttgagctactcttcagctctggaagttgtggacaaaccgtaggaatgtatgtgtgcgtgtggtggagtgattgtctgtgaatgacaggccctggctattgattgatgttgcatcaatttagcaaattcatttcctcattcttgatggcctgaatatatgtctgcacttttaatgctcctcttaaccagttgtaacatcttaccatttccctaacaaattgaattagtttaataaaatcttttgacacatgttaaaaaagagaaaagagaaagacagcaaaaaccgtttggggagcgcttgggccacctggaaaggtttctgaaaccatctcgttggggcgcgggggccccagaggggaacaggcaacgtgtggcaaaagggggtccccagggaaaccgg

SEQ ID NO: 449934 - DNA, 2279 bp, Homo sapiens
gcgtgcgcggggcgggcgggtgcgcgcgcacttcctcctcgcccccacccagacccagaaggcgccaccatggcggcgcccccgcagcccgtcacccacctcatctttgacatggacggacttcttctggatactgaacggctgtattcagtggtgtttcaagaaatatgtaatcgctatgacaagaaatacagctgggatgtaaagtccctggttatgggtaagaaggcattagaggcggcacagattataatagacgtcttgcagctcccgatgtccaaagaggagctggtggaagaaagccaaacgaagttaaaggaagtgttccccacggctgcgctcatgccaggggcggagaaactcatcatccacctgcggaaacatggcatcccctttgcactggccaccagctcggggtccgcgtcgttcgatatgaagacaagccgccacaaggagttcttcagcttgttttcccacattgtgctgggagatgaccccgaagtgcagcatggcaagccagacccagacatcttcctagcttgtgccaagaggttctctccccctcctgctatggagaagtgccttgtctttgaagatgctcccaatggggtggaggcggccctggcagctgggatgcaggtggtcatggttcctgacggaaacttgagccgagatctgacaacaaaggccaccctggtgctgaattccctgcaggacttccagcccgagctgtttggtttgccctcctatgagtgagagggagggcctcagtcttccgcccccagcccactctcatggtccacactgctgggggaaagggaaaggaaatcagcaactcttcaatcccaacctgcgctgtgattttagcctcctgagattggagtttccatcccatgttggtttgtcccagtctaacgtgttgataaaatgtgacttgacggttgagacaaaaaatacagtagagacagaaacgaagcccagaacaaagatgaaacttgaattaccatctcagaagtcaagctgatggagtatgtgataaagtgaatgtacatgtatatacacacacacctccatatatacacgtgtgtatcagtttggtaatatgcaggtaggcattacatgcatatgtatgtagacatatgcatgcatgtatatgtaaaatatatacttttccaagacaaaatggaacatcacttctctcttctagtttttctgaacactggctgggaaatgtaaactgtgtatgcatataagtatatgctttatgtatgcatatgtatgtagatatgtttatatctatcgtctgcatcactctcctcagtgttgatgtcaacatgcaatgacaactgataaagcgagatggtagttctgcctggtttgcagtctgagtgggaaagtcctgtttttgatgagcactccttgttagctaacatttaaattctttttgtgacctcagaatgtctctggatctttcctcattgactgactctgtgccacgtcatccatagtttattgttagtatgaacacaactgtaacatttacctggtatctacatccttacctgcattggaaaatgtttgctacctcacaacaaccatttgcctcctttaagaacactgatgggctgcactttttggatagaaatagaatttgatttcagaatgtatgcttggtgagtctcagtgcccaggaacacttttggaataatttatcagacattgaacttctgtgattaatcgcttttatagatttactcagtctttaaaattcgtctctgatttgccagagaaaaacggtggtagccatggaaatcgggagtgaaggagcactgcttcattgtggctcagcccttcctaggggcctctgccctttgatgtccttgagctactcttcagctctggaagttgtggacaaaccgtaggaatgtatgtgtgcgtgtggtggagtgattgtctgtgaatgacaggccctggctattgattgatgttgcatcaatttagcaaattcatttcctcattcttgatggcctgaatatatgtctgcacttttaatgctcctcttaaccagttgtaacatcttaccatttccctaacaaattgaattagtttaataaaatcttttgacacatgttaaaaaagagaaaagagaaagacagcaaaaaccgtttggggagcgcttgggccacctggaaaggtttctgaaaccatctcgttggggcgcgggggccccagaggggaacaggcaacgtgtggcaaaagggggtccccagggaaaccgg

SEQ ID NO: 449935 - DNA, 964 bp, Homo sapiens
gcgtgcgcggggcgggcgggtgcgcgcgcacttcctcctcgcccccacccagacccagaaggcgccaccatggcggcgcccccgcagcccgtcacccacctcatctttgacatggacggacttcttctggatactgaacggctgtattcagtggtgtttcaagaaatatgtaatcgctatgacaagaaatacagctgggatgtaaagtccctggttatgggtaagaaggcattagaggcggcacagattataatagacgtcttgcagctcccgatgtccaaagaggagctggtggaagaaagccaaacgaagttaaaggaagtgttccccacggctgcgctcatgccagggcatcagctcttcacacagcaacagcttcctgcatgtggcccctgactgtccattgatgaccgaaggctcgtggacttgccaagttgcccacgtaaaacccagggttcagagagcgagacaagtccttgcattgtgaagtgccaacaattctagtattccaaagctcagtgttgttcagaacatggtacccttgtgagatcacgtgtgacatttgtgaagaacctggaactgatgtttccttaggaagcctcgcaacagggcggagaaactcatcatccacctgcggaaacatggcatcccctttgcactggccaccagctcggggtccgcgtcgttcgatatgaagacaagccgccacaaggagttcttcagcttgttttcccacattgtgctgggagatgaccccgaagtgcagcatggcaagccagacccagacatcttcctagcttgtgccaagaggttctctccccctcctgctatggagaagagctccatccatagacctcgtctgctcaccgcacagaaatgccagggctgccgggatcccttctcagcgctcctccttctgtgtaatcaactgcttctctgctctgatgacacctgaccgcacctc

SEQ ID NO: 449936 - DNA, 1690 bp, Homo sapiens
gttacctaggggtggtttcttttcctgcagtcgcgatgtgtgattgcagatggaaaacaaagtattttatgcctacgtttctaagatagaagaaatggacttgttgaaaagaagccagtttgtaaaggacacagtaggagaatttaaggtaccaccaccagagagaggttgagagtgcgtttgacttttggttttgtcaaacgcgaggttttccgtttccttccggggcaagttgaacctgtccagcccccgtaggctgtgggtcaaaagtgccggtcaaaatggaagtgaatccccctaaacaggagcacctgctggcgctaaaagtgatgcggctgactaagcctactttattcaccaatatcccagtaacatgtgaagagaaagacttacctggagatctctttaaccagctgatgagagatgatccttcaaccgttaatggtgcagaagttttaatgttgggagaaatgctgactttaccacagaattttgggaatatatttttgggagagaccttttccagttatatcagcgttcataatgatagcaatcaagttgtaaaagacatattagtaaaagctgatcttcagacaagttctcagcgtttaaatctttcagcctccaatgctgcagtggctgaacttaaaccggattgttgtattgatgatgtcatacatcatgaagtcaaagaaattggaacacacatcttggtatgtgctgtgagttatacaactcaggctggagaaaaaatgtatttcagaaaattcttcaaatttcaggttctcaaaccattggatgtgaaaaccaaattttacaatgcagagagtgacctcagttctgtgactgatgaagtatttctggaagcccagattcagaatatgacaacctcacctatgtttatggagaaggtttcactggagccatctattatgtacaatgtaacagaattaaattcagtcagccaagctggagaatgtgtgtctacgtttgggtcaagagcatatttgcaaccaatggatacacgccagtacttatactgcctaaagccaaagaatgaatttgcagaaaaagcaggcatcattaagggagtaacagtaattggaaaattggatatagtatggaaaacaaatctaggtgaaaggggaaggttacagaccagccaacttcaaagaatggctccaggttatggagatgttaggttgtctttggaggcaataccagataccgtaaaccttgaagaaccttttcatattacctgtaaaataacaaactgcagcagtgaaaggactatggatctggttttggaaatgtgcaataccaattccatccactggtgtggaatttcaggaagacagctgggaaagctgcatccaagttcttcgctctgtcttgcccttactctgctttcttcagtacagggactgcaaagcatctctggcttaagactaacagacacattcttaaagagaacatatgaatatgatgacatcgcacaagtctgtgtggtatcttctgccattaaagtggaaagctgaaggaaacttccaatgttaggcttttcatttagtttcacagaactgctctttttgttacctttgtaaaatgatgacgtcaacaacgaagtaaatatgttacttaaattttctttcctgtaaaatggttaaaatattaaatatttgttttgaag

SEQ ID NO: 449937 - DNA, 2444 bp, Homo sapiens
attcgtgtgcactcgaggactgtatttgtgactaattgtataacaggttattttagtttctgttctgtggaaagtgtaaagcattccaacaaagggttttaatgtagatttttttttttgcaccccatgctgttgattgctaaatgtaacagtctgatcgtgacgctgaataaatgtctgtacaaaataaagtgcaagcagtgtaaaattgaagtctgtctttgtttcaaaatgattaagattaaatgatgaaataatattttatagccactgcattggatacttggattgtttttcaagcatcttcttatgactaaatcttctgtttcattctgttttaaatctaaaaagtaaaatgatggtcacttggaatctgctctatattttaattatagtctcttctgtttataaacaataacttacacatatttttcatagttttaagtaaagattaaataatgccatcttagaaaggatctgtttaacctatattataaaagttagatacacaatttggtacattaaatgaaaatgtcatttgcatatatagaacctgttctgttttacacagtatcataatagctacagctactacaagaaatatggttaatggaagtcaaacatttagtacgatgcttaaagagttactttaataatgccctcttatttttctagttagatagcaactatatttcccagacaagcaagaaaatatatggggcattttttataaatttaaaagtagctagcacaatccaaccacgcaactttttttgaaatagcttgcaatgctatgattccaaagtgatcaaggtacttgaagagcaaaaatggcttgaatagaatggaaatgtaggcaagtggacagatagcatctagattgaatttgttacaggtggtatattagcaaagaaatagaaaaatgaaatggaagaaatataccaattcccattatttcatgtaaaaagaatggctaatttaactacagatgttagcacatgaagacattgttttaaagttttttttcttatagtatctttgtctgggtaatactggtcaaataaaatgagttgggaagtatttcctcctcttctgtttcctggaagagattgtttagaattgatattatttctcccttaagtgtttggtaaaattcatcacggaagttatctgggcctgtagttttctttactggaaggtttttaacttaaccacaaactcaatttccttaataaatatggttctgtttaggttatctgtttctacagtgagctttctagtttgtatcctatagggaatctgtttcatctaagttgttaaatatacaatccttgagttggtcatggtgttttctagttagccttttaataactatagtgtctgtagtgtattccctttcatttctgacactgaatttgtatcttctgtttttctaggcagtcagctagaagcttatcttattgctctaaaagcatttttaatgcactcaagatagttatgctagaaactttaacttcttattcaacactgaatatgagtgactaatttttaattaaggatctattttgctttttatatcacagtaatgacttctatgtgttagtagtagtacttcgttctgtgtaatactggaatactaggagttcattctaacttaatgaaaatcaaagttggcttagatggaatatgaatttaacttctgagggccgaagacttaaattgtgctctttttaaattctgcagaactatatatcttcatacagatcttcgttgtagctttgtttggcccaggtgcttaggtgtttgcaggtctgagaaacctctaacctagtgttcctctaaattagagtccttggatctgtatcaaaaccacctagtgtactgtttaaaaatggccattcctaggccttattacaggacctactgtatcagaattgaacacgtggccctgaatctgcatctttaatgaattatccaggtgattcttacaatgaagttatagaactactgttctaatgtcacaaaggagaaagagaaaagttggattttaaacttcaagatacaaaataattagtttcttagtctcttttttttttttttttgaaatggagtcttgctctgtcacccaggctggagtgcagtggcgcaatcttggctcactgcaacctctgcctctcaggttcgagcaattctcatgcttcagcctcccaagtagctgggactacgggtgcccgccaccaagccaggctaatttttgtattttcagtagaggtgggtttcaccatgttggccaggctggtctcaaactcctgacctcaggtgatcccccctgccttggcctcccaaagtgctgggattacaggcatgagccacagcgcccggccaattagtcttttgataagggttctataaggcctaatcatctgcattattactcatttaat

SEQ ID NO: 449938 - DNA, 5232 bp, Homo sapiens
gttacctaggggtggtttcttttcctgcagtcgcgatgtgtgattgcagatggaaaacaaagtattttatgcctacgtttctaagatagaagaaatggacttgttgaaaagaagccagtttgtaaaggacacagtaggagaatttaaggtaccaccaccagagagaggttgagagtgcgtttgacttttggttttgtcaaacgcgaggttttccgtttccttccggggcaagttgaacctgtccagcccccgtaggctgtgggtcaaaagtgccggtcaaaatggaagtgaatccccctaaacaggagcacctgctggcgctaaaagtgatgcggctgactaagcctactttattcaccaatatcccagtaacatgtgaagagaaagacttacctggagatctctttaaccagctgatgagagatgatccttcaaccgttaatggtgcagaagttttaatgttgggagaaatgctgactttaccacagaattttgggaatatatttttgggagagaccttttccagttatatcagcgttcataatgatagcaatcaagttgtaaaagacatattagtaaaagctgatcttcagacaagttctcagcgtttaaatctttcagcctccaatgctgcagtggctgaacttaaaccggattgttgtattgatgatgtcatacatcatgaagtcaaagaaattggaacacacatcttggtatgtgctgtgagttatacaactcaggctggagaaaaaatgtatttcagaaaattcttcaaatttcaggttctcaaaccattggatgtgaaaaccaaattttacaatgcagagagtgacctcagttctgtgactgatgaagtatttctggaagcccagattcagaatatgacaacctcacctatgtttatggagaaggtttcactggagccatctattatgtacaatgtaacagaattaaattcagtcagccaagctggagaatgtgtgtctacgtttgggtcaagagcatatttgcaaccaatggatacacgccagtacttatactgcctaaagccaaagaatgaatttgcagaaaaagcaggcatcattaagggagtaacagtaattggaaaattggatatagtatggaaaacaaatctaggtgaaaggggaaggttacagaccagccaacttcaaagaatggctccaggttatggagatgttaggttgtctttggaggcaataccagataccgtaaaccttgaagaaccttttcatattacctgtaaaataacaaactgcagcagtgaaaggactatggatctggttttggaaatgtgcaataccaattccatccactggtgtggaatttcaggaagacagctgggaaagctgcatccaagttcttcgctctgtcttgcccttactctgctttcttcagtacagggactgcaaagcatctctggcttaagactaacagacacattcttaaagagaacatatgaatatgatgacatcgcacaagtctgtgtggtatcttctgccattaaagtggaaagctgaaggaaacttccaatgttaggcttttcatttagtttcacagaactgctctttttgttacctttgtaaaatgatgacgtcaacaacgaagtaaatatgttacttaaattttctttcctgtaaaatggttaaaatattaaatatttgttttgaagagatctgattttatcttgtaatttatatttgaaatgaacatgtgtatattttctacacctattatttaatttcatttcattttagatgaccattggactttgttctccaaaagctgtgtatctgagaccatttgtccctagcaagttatctagaacacgagtcagcacactttttatgtaaggtacaagatactaaatattttaggctttgcaggccgtaaggtttctgtcacaaatactgaactctgccatcgtacttcaagagcagccagtaggcaaaaaaagtacagtggtgtacacaaaaagaagcagttggactcgggaagctgaggcaggagaatcacttgaaccggggaggcagaggttgcagttaagccgagatcatgctactgcactctagcctgagcgacagagtgagactctgtctcaaaaaaaaagaggcagctgggcagatttggcctgcagggtatagttggctgacctcaatctagaagatagagttgtttcttagaactttgtaatattttggttagaaatatttcagttaactccagttttttcctagctattcggtcagcagaaaaagtttgcttaaaacaaagggggtagtcctcttataacctgatatttgtcaacacagtataagctttctagttgttttcaaaattactgtaatggtttgtgtctgtatttgtatattatacctacaaacatacatatctttcagctactgaacacatcagaattggttttactttttaggttgttgattttttttaattaactattaactaagaataatacttattttctaattataagccaaaaacccctgggtttttttctcattgattaagccacttatttttataaggtatatttaaataattcccatcttctgatatgattttaaactctaaatcatgtgttactgttacaaaactttctctctccatgtaatcacacttagttatgagcaaagcagtgagaaagttgaggtgataaacaactttgcagcattaatgtaacaaaaagtttcagtatttgtcaggaaaacaaaagcttaggctgttaaataaaagctattctattttggtaagttgaaattcaagaatgtatatataatttcttaaatgtaagagtgcattaaatcaaatacaaaaattggtttttcaatgcatcattatttattgccataacaaattgtttggtccaaaatgaaagctatattcagaaggtttgcacctcaaaattgagtaataattaatgaaatgtctgtacaaaataaagtgcaagcagtgtaaaattgaagtctgtctttgtttcaaaatgattaagattaaatgatgaaataatattttatagccactgcattggatacttggattgtttttcaagcatcttcttatgactaaatcttctgtttcattctgttttaaatctaaaaagtaaaatgatggtcacttggaatctgctctatattttaattatagtctcttctgtttataaacaataacttacacatatttttcatagttttaagtaaagattaaataatgccatcttagaaaggatctgtttaacctatattataaaagttagatacacaatttggtacattaaatgaaaatgtcatttgcatatatagaacctgttctgttttacacagtatcataatagctacagctactacaagaaatatggttaatggaagtcaaacatttagtacgatgcttaaagagttactttaataatgccctcttatttttctagttagatagcaactatatttcccagacaagcaagaaaatatatggggcattttttataaatttaaaagtagctagcacaatccaaccacgcaactttttttgaaatagcttgcaatgctatgattccaaagtgatcaaggtacttgaagagcaaaaatggcttgaatagaatggaaatgtaggcaagtggacagatagcatctagattgaatttgttacaggtggtatattagcaaagaaatagaaaaatgaaatggaagaaatataccaattcccattatttcatgtaaaaagaatggctaatttaactacagatgttagcacatgaagacattgttttaaagttttttttcttatagtatctttgtctgggtaatactggtcaaataaaatgagttgggaagtatttcctcctcttctgtttcctggaagagattgtttagaattgatattatttctcccttaagtgtttggtaaaattcatcacggaagttatctgggcctgtagttttctttactggaaggtttttaacttaaccacaaactcaatttccttaataaatatggttctgtttaggttatctgtttctacagtgagctttctagtttgtatcctatagggaatctgtttcatctaagttgttaaatatacaatccttgagttggtcatggtgttttctagttagccttttaataactatagtgtctgtagtgtattccctttcatttctgacactgaatttgtatcttctgtttttctaggcagtcagctagaagcttatcttattgctctaaaagcatttttaatgcactcaagatagttatgctagaaactttaacttcttattcaacactgaatatgagtgactaatttttaattaaggatctattttgctttttatatcacagtaatgacttctatgtgttagtagtagtacttcgttctgtgtaatactggaatactaggagttcattctaacttaatgaaaatcaaagttggcttagatggaatatgaatttaacttctgagggccgaagacttaaattgtgctctttttaaattctgcagaactatatatcttcatacagatcttcgttgtagctttgtttggcccaggtgcttaggtgtttgcaggtctgagaaacctctaacctagtgttcctctaaattagagtccttggatctgtatcaaaaccacctagtgtactgtttaaaaatggccattcctaggccttattacaggacctactgtatcagaattgaacacgtggccctgaatctgcatctttaatgaattatccaggtgattcttacaatgaagttatagaactactgttctaatgtcacaaaggagaaagagaaaagttggattttaaacttcaagatacaaaataattagtttcttagtctcttttttttttttttttgaaatggagtcttgctctgtcacccaggctggagtgcagtggcgcaatcttggctcactgcaacctctgcctctcaggttcgagcaattctcatgcttcagcctcccaagtagctgggactacgggtgcccgccaccaagccaggctaatttttgtattttcagtagaggtgggtttcaccatgttggccaggctggtctcaaactcctgacctcaggtgatcccccctgccttggcctcccaaagtgctgggattacaggcatgagccacagcgcccggccaattagtcttttgataagggttctataaggcctaatcatctgcattattactcatttaat

SEQ ID NO: 449939 - DNA, 5170 bp, Homo sapiens
gttacctaggggtggtttcttttcctgcagtcgcgatgtgtgattgcagatggaaaacaaagtattttatgcctacgtttctaagatagaagaaatggacttgttgaaaagaagccagtttgtaaaggacacagtaggagaatttaaggtaccaccaccagagagaggttgagagtgcgtttgacttttggttttgtcaaacgcgaggttttccgtttccttccggggcaagttgaacctgtccagcccccgtaggctgtgggtcaaaagtgccggtcaaaatggaagtgaatccccctaaacaggagcacctgctggcgctaaaagtgatgcggctgactaagcctactttattcaccaatatcccagtaacatgtgaagagaaagacttacctggagatctctttaaccagctgatgagagatgatccttcaaccgttaatggtgcagaagttttaatgttgggagaaatgctgactttaccacagaattttgggaatatatttttgggagagaccttttccagttatatcagcgttcataatgatagcaatcaagttgtaaaagacatattagtaaaagctgatcttcagacaagttctcagcgtttaaatctttcagcctccaatgctgcagtggctgaacttaaaccggattgttgtattgatgatgtcatacatcatgaagtcaaagaaattggaacacacatcttggtatgtgctgtgagttatacaactcaggctggagaaaaaatgtatttcagaaaattcttcaaatttcaggactgatgaagtatttctggaagcccagattcagaatatgacaacctcacctatgtttatggagaaggtttcactggagccatctattatgtacaatgtaacagaattaaattcagtcagccaagctggagaatgtgtgtctacgtttgggtcaagagcatatttgcaaccaatggatacacgccagtacttatactgcctaaagccaaagaatgaatttgcagaaaaagcaggcatcattaagggagtaacagtaattggaaaattggatatagtatggaaaacaaatctaggtgaaaggggaaggttacagaccagccaacttcaaagaatggctccaggttatggagatgttaggttgtctttggaggcaataccagataccgtaaaccttgaagaaccttttcatattacctgtaaaataacaaactgcagcagtgaaaggactatggatctggttttggaaatgtgcaataccaattccatccactggtgtggaatttcaggaagacagctgggaaagctgcatccaagttcttcgctctgtcttgcccttactctgctttcttcagtacagggactgcaaagcatctctggcttaagactaacagacacattcttaaagagaacatatgaatatgatgacatcgcacaagtctgtgtggtatcttctgccattaaagtggaaagctgaaggaaacttccaatgttaggcttttcatttagtttcacagaactgctctttttgttacctttgtaaaatgatgacgtcaacaacgaagtaaatatgttacttaaattttctttcctgtaaaatggttaaaatattaaatatttgttttgaagagatctgattttatcttgtaatttatatttgaaatgaacatgtgtatattttctacacctattatttaatttcatttcattttagatgaccattggactttgttctccaaaagctgtgtatctgagaccatttgtccctagcaagttatctagaacacgagtcagcacactttttatgtaaggtacaagatactaaatattttaggctttgcaggccgtaaggtttctgtcacaaatactgaactctgccatcgtacttcaagagcagccagtaggcaaaaaaagtacagtggtgtacacaaaaagaagcagttggactcgggaagctgaggcaggagaatcacttgaaccggggaggcagaggttgcagttaagccgagatcatgctactgcactctagcctgagcgacagagtgagactctgtctcaaaaaaaaagaggcagctgggcagatttggcctgcagggtatagttggctgacctcaatctagaagatagagttgtttcttagaactttgtaatattttggttagaaatatttcagttaactccagttttttcctagctattcggtcagcagaaaaagtttgcttaaaacaaagggggtagtcctcttataacctgatatttgtcaacacagtataagctttctagttgttttcaaaattactgtaatggtttgtgtctgtatttgtatattatacctacaaacatacatatctttcagctactgaacacatcagaattggttttactttttaggttgttgattttttttaattaactattaactaagaataatacttattttctaattataagccaaaaacccctgggtttttttctcattgattaagccacttatttttataaggtatatttaaataattcccatcttctgatatgattttaaactctaaatcatgtgttactgttacaaaactttctctctccatgtaatcacacttagttatgagcaaagcagtgagaaagttgaggtgataaacaactttgcagcattaatgtaacaaaaagtttcagtatttgtcaggaaaacaaaagcttaggctgttaaataaaagctattctattttggtaagttgaaattcaagaatgtatatataatttcttaaatgtaagagtgcattaaatcaaatacaaaaattggtttttcaatgcatcattatttattgccataacaaattgtttggtccaaaatgaaagctatattcagaaggtttgcacctcaaaattgagtaataattaatgaaatgtctgtacaaaataaagtgcaagcagtgtaaaattgaagtctgtctttgtttcaaaatgattaagattaaatgatgaaataatattttatagccactgcattggatacttggattgtttttcaagcatcttcttatgactaaatcttctgtttcattctgttttaaatctaaaaagtaaaatgatggtcacttggaatctgctctatattttaattatagtctcttctgtttataaacaataacttacacatatttttcatagttttaagtaaagattaaataatgccatcttagaaaggatctgtttaacctatattataaaagttagatacacaatttggtacattaaatgaaaatgtcatttgcatatatagaacctgttctgttttacacagtatcataatagctacagctactacaagaaatatggttaatggaagtcaaacatttagtacgatgcttaaagagttactttaataatgccctcttatttttctagttagatagcaactatatttcccagacaagcaagaaaatatatggggcattttttataaatttaaaagtagctagcacaatccaaccacgcaactttttttgaaatagcttgcaatgctatgattccaaagtgatcaaggtacttgaagagcaaaaatggcttgaatagaatggaaatgtaggcaagtggacagatagcatctagattgaatttgttacaggtggtatattagcaaagaaatagaaaaatgaaatggaagaaatataccaattcccattatttcatgtaaaaagaatggctaatttaactacagatgttagcacatgaagacattgttttaaagttttttttcttatagtatctttgtctgggtaatactggtcaaataaaatgagttgggaagtatttcctcctcttctgtttcctggaagagattgtttagaattgatattatttctcccttaagtgtttggtaaaattcatcacggaagttatctgggcctgtagttttctttactggaaggtttttaacttaaccacaaactcaatttccttaataaatatggttctgtttaggttatctgtttctacagtgagctttctagtttgtatcctatagggaatctgtttcatctaagttgttaaatatacaatccttgagttggtcatggtgttttctagttagccttttaataactatagtgtctgtagtgtattccctttcatttctgacactgaatttgtatcttctgtttttctaggcagtcagctagaagcttatcttattgctctaaaagcatttttaatgcactcaagatagttatgctagaaactttaacttcttattcaacactgaatatgagtgactaatttttaattaaggatctattttgctttttatatcacagtaatgacttctatgtgttagtagtagtacttcgttctgtgtaatactggaatactaggagttcattctaacttaatgaaaatcaaagttggcttagatggaatatgaatttaacttctgagggccgaagacttaaattgtgctctttttaaattctgcagaactatatatcttcatacagatcttcgttgtagctttgtttggcccaggtgcttaggtgtttgcaggtctgagaaacctctaacctagtgttcctctaaattagagtccttggatctgtatcaaaaccacctagtgtactgtttaaaaatggccattcctaggccttattacaggacctactgtatcagaattgaacacgtggccctgaatctgcatctttaatgaattatccaggtgattcttacaatgaagttatagaactactgttctaatgtcacaaaggagaaagagaaaagttggattttaaacttcaagatacaaaataattagtttcttagtctcttttttttttttttttgaaatggagtcttgctctgtcacccaggctggagtgcagtggcgcaatcttggctcactgcaacctctgcctctcaggttcgagcaattctcatgcttcagcctcccaagtagctgggactacgggtgcccgccaccaagccaggctaatttttgtattttcagtagaggtgggtttcaccatgttggccaggctggtctcaaactcctgacctcaggtgatcccccctgccttggcctcccaaagtgctgggattacaggcatgagccacagcgcccggccaattagtcttttgataagggttctataaggcctaatcatctgcattattactcatttaat

SEQ ID NO: 449940 - DNA, 4521 bp, Homo sapiens
ctttgatttgcaggcatgaactaatcacatttgtggttaatattttttcttcatatagataagatatttttgttgagataaatattttaaatgccaccacaccttggtggatatttttttcatatcctcagacgactgatgaagtatttctggaagcccagattcagaatatgacaacctcacctatgtttatggagaaggtttcactggagccatctattatgtacaatgtaacagaattaaattcagtcagccaagctggagaatgtgtgtctacgtttgggtcaagagcatatttgcaaccaatggatacacgccagtacttatactgcctaaagccaaagaatgaatttgcagaaaaagcaggcatcattaagggagtaacagtaattggaaaattggatatagtatggaaaacaaatctaggtgaaaggggaaggttacagaccagccaacttcaaagaatggctccaggttatggagatgttaggttgtctttggaggcaataccagataccgtaaaccttgaagaaccttttcatattacctgtaaaataacaaactgcagcagtgaaaggactatggatctggttttggaaatgtgcaataccaattccatccactggtgtggaatttcaggaagacagctgggaaagctgcatccaagttcttcgctctgtcttgcccttactctgctttcttcagtacagggactgcaaagcatctctggcttaagactaacagacacattcttaaagagaacatatgaatatgatgacatcgcacaagtctgtgtggtatcttctgccattaaagtggaaagctgaaggaaacttccaatgttaggcttttcatttagtttcacagaactgctctttttgttacctttgtaaaatgatgacgtcaacaacgaagtaaatatgttacttaaattttctttcctgtaaaatggttaaaatattaaatatttgttttgaagagatctgattttatcttgtaatttatatttgaaatgaacatgtgtatattttctacacctattatttaatttcatttcattttagatgaccattggactttgttctccaaaagctgtgtatctgagaccatttgtccctagcaagttatctagaacacgagtcagcacactttttatgtaaggtacaagatactaaatattttaggctttgcaggccgtaaggtttctgtcacaaatactgaactctgccatcgtacttcaagagcagccagtaggcaaaaaaagtacagtggtgtacacaaaaagaagcagttggactcgggaagctgaggcaggagaatcacttgaaccggggaggcagaggttgcagttaagccgagatcatgctactgcactctagcctgagcgacagagtgagactctgtctcaaaaaaaaagaggcagctgggcagatttggcctgcagggtatagttggctgacctcaatctagaagatagagttgtttcttagaactttgtaatattttggttagaaatatttcagttaactccagttttttcctagctattcggtcagcagaaaaagtttgcttaaaacaaagggggtagtcctcttataacctgatatttgtcaacacagtataagctttctagttgttttcaaaattactgtaatggtttgtgtctgtatttgtatattatacctacaaacatacatatctttcagctactgaacacatcagaattggttttactttttaggttgttgattttttttaattaactattaactaagaataatacttattttctaattataagccaaaaacccctgggtttttttctcattgattaagccacttatttttataaggtatatttaaataattcccatcttctgatatgattttaaactctaaatcatgtgttactgttacaaaactttctctctccatgtaatcacacttagttatgagcaaagcagtgagaaagttgaggtgataaacaactttgcagcattaatgtaacaaaaagtttcagtatttgtcaggaaaacaaaagcttaggctgttaaataaaagctattctattttggtaagttgaaattcaagaatgtatatataatttcttaaatgtaagagtgcattaaatcaaatacaaaaattggtttttcaatgcatcattatttattgccataacaaattgtttggtccaaaatgaaagctatattcagaaggtttgcacctcaaaattgagtaataattaatgaaatgtctgtacaaaataaagtgcaagcagtgtaaaattgaagtctgtctttgtttcaaaatgattaagattaaatgatgaaataatattttatagccactgcattggatacttggattgtttttcaagcatcttcttatgactaaatcttctgtttcattctgttttaaatctaaaaagtaaaatgatggtcacttggaatctgctctatattttaattatagtctcttctgtttataaacaataacttacacatatttttcatagttttaagtaaagattaaataatgccatcttagaaaggatctgtttaacctatattataaaagttagatacacaatttggtacattaaatgaaaatgtcatttgcatatatagaacctgttctgttttacacagtatcataatagctacagctactacaagaaatatggttaatggaagtcaaacatttagtacgatgcttaaagagttactttaataatgccctcttatttttctagttagatagcaactatatttcccagacaagcaagaaaatatatggggcattttttataaatttaaaagtagctagcacaatccaaccacgcaactttttttgaaatagcttgcaatgctatgattccaaagtgatcaaggtacttgaagagcaaaaatggcttgaatagaatggaaatgtaggcaagtggacagatagcatctagattgaatttgttacaggtggtatattagcaaagaaatagaaaaatgaaatggaagaaatataccaattcccattatttcatgtaaaaagaatggctaatttaactacagatgttagcacatgaagacattgttttaaagttttttttcttatagtatctttgtctgggtaatactggtcaaataaaatgagttgggaagtatttcctcctcttctgtttcctggaagagattgtttagaattgatattatttctcccttaagtgtttggtaaaattcatcacggaagttatctgggcctgtagttttctttactggaaggtttttaacttaaccacaaactcaatttccttaataaatatggttctgtttaggttatctgtttctacagtgagctttctagtttgtatcctatagggaatctgtttcatctaagttgttaaatatacaatccttgagttggtcatggtgttttctagttagccttttaataactatagtgtctgtagtgtattccctttcatttctgacactgaatttgtatcttctgtttttctaggcagtcagctagaagcttatcttattgctctaaaagcatttttaatgcactcaagatagttatgctagaaactttaacttcttattcaacactgaatatgagtgactaatttttaattaaggatctattttgctttttatatcacagtaatgacttctatgtgttagtagtagtacttcgttctgtgtaatactggaatactaggagttcattctaacttaatgaaaatcaaagttggcttagatggaatatgaatttaacttctgagggccgaagacttaaattgtgctctttttaaattctgcagaactatatatcttcatacagatcttcgttgtagctttgtttggcccaggtgcttaggtgtttgcaggtctgagaaacctctaacctagtgttcctctaaattagagtccttggatctgtatcaaaaccacctagtgtactgtttaaaaatggccattcctaggccttattacaggacctactgtatcagaattgaacacgtggccctgaatctgcatctttaatgaattatccaggtgattcttacaatgaagttatagaactactgttctaatgtcacaaaggagaaagagaaaagttggattttaaacttcaagatacaaaataattagtttcttagtctcttttttttttttttttgaaatggagtcttgctctgtcacccaggctggagtgcagtggcgcaatcttggctcactgcaacctctgcctctcaggttcgagcaattctcatgcttcagcctcccaagtagctgggactacgggtgcccgccaccaagccaggctaatttttgtattttcagtagaggtgggtttcaccatgttggccaggctggtctcaaactcctgacctcaggtgatcccccctgccttggcctcccaaagtgctgggattacaggcatgagccacagcgcccggccaattagtcttttgataagggttctataaggcctaatcatctgcattattactcatttaat

SEQ ID NO: 449941 - DNA, 5147 bp, Homo sapiens
gttacctaggggtggtttcttttcctgcagtcgcgatgtgtgattgcagatggaaaacaaagtattttatgcctacgtttctaagatagaagaaatggacttgttgaaaagaagccagtttgtaaaggacacagtaggagaatttaaggtaccaccaccagagagaggttgagagtgcgtttgacttttggttttgtcaaacgcgaggttttccgtttccttccggggcaagttgaacctgtccagcccccgtaggctgtgggtcaaaagtgccggtcaaaatggaagtgaatccccctaaacaggagcacctgctggcgctaaaagtgatgcggctgactaagcctactttattcaccaatatcccagtaacatgtgaagagaaagacttacctggagatctctttaaccagctgatgagagatgatccttcaaccgttaatggtgcagaagttttaatgttgggagaaatgctgactttaccacagaattttgggctgatcttcagacaagttctcagcgtttaaatctttcagcctccaatgctgcagtggctgaacttaaaccggattgttgtattgatgatgtcatacatcatgaagtcaaagaaattggaacacacatcttggtatgtgctgtgagttatacaactcaggctggagaaaaaatgtatttcagaaaattcttcaaatttcaggttctcaaaccattggatgtgaaaaccaaattttacaatgcagagagtgacctcagttctgtgactgatgaagtatttctggaagcccagattcagaatatgacaacctcacctatgtttatggagaaggtttcactggagccatctattatgtacaatgtaacagaattaaattcagtcagccaagctggagaatgtgtgtctacgtttgggtcaagagcatatttgcaaccaatggatacacgccagtacttatactgcctaaagccaaagaatgaatttgcagaaaaagcaggcatcattaagggagtaacagtaattggaaaattggatatagtatggaaaacaaatctaggtgaaaggggaaggttacagaccagccaacttcaaagaatggctccaggttatggagatgttaggttgtctttggaggcaataccagataccgtaaaccttgaagaaccttttcatattacctgtaaaataacaaactgcagcagtgaaaggactatggatctggttttggaaatgtgcaataccaattccatccactggtgtggaatttcaggaagacagctgggaaagctgcatccaagttcttcgctctgtcttgcccttactctgctttcttcagtacagggactgcaaagcatctctggcttaagactaacagacacattcttaaagagaacatatgaatatgatgacatcgcacaagtctgtgtggtatcttctgccattaaagtggaaagctgaaggaaacttccaatgttaggcttttcatttagtttcacagaactgctctttttgttacctttgtaaaatgatgacgtcaacaacgaagtaaatatgttacttaaattttctttcctgtaaaatggttaaaatattaaatatttgttttgaagagatctgattttatcttgtaatttatatttgaaatgaacatgtgtatattttctacacctattatttaatttcatttcattttagatgaccattggactttgttctccaaaagctgtgtatctgagaccatttgtccctagcaagttatctagaacacgagtcagcacactttttatgtaaggtacaagatactaaatattttaggctttgcaggccgtaaggtttctgtcacaaatactgaactctgccatcgtacttcaagagcagccagtaggcaaaaaaagtacagtggtgtacacaaaaagaagcagttggactcgggaagctgaggcaggagaatcacttgaaccggggaggcagaggttgcagttaagccgagatcatgctactgcactctagcctgagcgacagagtgagactctgtctcaaaaaaaaagaggcagctgggcagatttggcctgcagggtatagttggctgacctcaatctagaagatagagttgtttcttagaactttgtaatattttggttagaaatatttcagttaactccagttttttcctagctattcggtcagcagaaaaagtttgcttaaaacaaagggggtagtcctcttataacctgatatttgtcaacacagtataagctttctagttgttttcaaaattactgtaatggtttgtgtctgtatttgtatattatacctacaaacatacatatctttcagctactgaacacatcagaattggttttactttttaggttgttgattttttttaattaactattaactaagaataatacttattttctaattataagccaaaaacccctgggtttttttctcattgattaagccacttatttttataaggtatatttaaataattcccatcttctgatatgattttaaactctaaatcatgtgttactgttacaaaactttctctctccatgtaatcacacttagttatgagcaaagcagtgagaaagttgaggtgataaacaactttgcagcattaatgtaacaaaaagtttcagtatttgtcaggaaaacaaaagcttaggctgttaaataaaagctattctattttggtaagttgaaattcaagaatgtatatataatttcttaaatgtaagagtgcattaaatcaaatacaaaaattggtttttcaatgcatcattatttattgccataacaaattgtttggtccaaaatgaaagctatattcagaaggtttgcacctcaaaattgagtaataattaatgaaatgtctgtacaaaataaagtgcaagcagtgtaaaattgaagtctgtctttgtttcaaaatgattaagattaaatgatgaaataatattttatagccactgcattggatacttggattgtttttcaagcatcttcttatgactaaatcttctgtttcattctgttttaaatctaaaaagtaaaatgatggtcacttggaatctgctctatattttaattatagtctcttctgtttataaacaataacttacacatatttttcatagttttaagtaaagattaaataatgccatcttagaaaggatctgtttaacctatattataaaagttagatacacaatttggtacattaaatgaaaatgtcatttgcatatatagaacctgttctgttttacacagtatcataatagctacagctactacaagaaatatggttaatggaagtcaaacatttagtacgatgcttaaagagttactttaataatgccctcttatttttctagttagatagcaactatatttcccagacaagcaagaaaatatatggggcattttttataaatttaaaagtagctagcacaatccaaccacgcaactttttttgaaatagcttgcaatgctatgattccaaagtgatcaaggtacttgaagagcaaaaatggcttgaatagaatggaaatgtaggcaagtggacagatagcatctagattgaatttgttacaggtggtatattagcaaagaaatagaaaaatgaaatggaagaaatataccaattcccattatttcatgtaaaaagaatggctaatttaactacagatgttagcacatgaagacattgttttaaagttttttttcttatagtatctttgtctgggtaatactggtcaaataaaatgagttgggaagtatttcctcctcttctgtttcctggaagagattgtttagaattgatattatttctcccttaagtgtttggtaaaattcatcacggaagttatctgggcctgtagttttctttactggaaggtttttaacttaaccacaaactcaatttccttaataaatatggttctgtttaggttatctgtttctacagtgagctttctagtttgtatcctatagggaatctgtttcatctaagttgttaaatatacaatccttgagttggtcatggtgttttctagttagccttttaataactatagtgtctgtagtgtattccctttcatttctgacactgaatttgtatcttctgtttttctaggcagtcagctagaagcttatcttattgctctaaaagcatttttaatgcactcaagatagttatgctagaaactttaacttcttattcaacactgaatatgagtgactaatttttaattaaggatctattttgctttttatatcacagtaatgacttctatgtgttagtagtagtacttcgttctgtgtaatactggaatactaggagttcattctaacttaatgaaaatcaaagttggcttagatggaatatgaatttaacttctgagggccgaagacttaaattgtgctctttttaaattctgcagaactatatatcttcatacagatcttcgttgtagctttgtttggcccaggtgcttaggtgtttgcaggtctgagaaacctctaacctagtgttcctctaaattagagtccttggatctgtatcaaaaccacctagtgtactgtttaaaaatggccattcctaggccttattacaggacctactgtatcagaattgaacacgtggccctgaatctgcatctttaatgaattatccaggtgattcttacaatgaagttatagaactactgttctaatgtcacaaaggagaaagagaaaagttggattttaaacttcaagatacaaaataattagtttcttagtctcttttttttttttttttgaaatggagtcttgctctgtcacccaggctggagtgcagtggcgcaatcttggctcactgcaacctctgcctctcaggttcgagcaattctcatgcttcagcctcccaagtagctgggactacgggtgcccgccaccaagccaggctaatttttgtattttcagtagaggtgggtttcaccatgttggccaggctggtctcaaactcctgacctcaggtgatcccccctgccttggcctcccaaagtgctgggattacaggcatgagccacagcgcccggccaattagtcttttgataagggttctataaggcctaatcatctgcattattactcatttaat

SEQ ID NO: 449942 - DNA, 2507 bp, Homo sapiens
gttacctaggggtggtttcttttcctgcagtcgcgatgtgtgattgcagatggaaaacaaagtattttatgcctacgtttctaagatagaagaaatggacttgttgaaaagaagccagtttgtaaaggacacagtaggagaatttaaggtaccaccaccagagagaggttgagagtgcgtttgacttttggttttgtcaaacgcgaggttttccgtttccttccggggcaagttgaacctgtccagcccccgtaggctgtgggtcaaaagtgccggtcaaaatggaagtgaatccccctaaacaggagcacctgctggcgctaaaagtgatgcggctgactaagcctactttattcaccaatatcccagtaacatgtgaagagaaagacttacctggagatctctttaaccagctgatgagagatgatccttcaaccgttaatggtgcagaagttttaatgttgggagaaatgctgactttaccacagaattttgggaatatatttttgggagagaccttttccagttatatcagcgttcataatgatagcaatcaagttgtaaaagacatattagtaaaagctgatcttcagacaagttctcagcgtttaaatctttcagcctccaatgctgcagtggctgaacttaaaccggattgttgtattgatgatgtcatacatcatgaagtcaaagaaattggaacacacatcttggtatgtgctgtgagttatacaactcaggctggagaaaaaatgtatttcagaaaattcttcaaatttcaggttctcaaaccattggatgtgaaaaccaaattttacaatgcagagagtgacctcagttctgtgactgatgaagtatttctggaagcccagattcagaatatgacaacctcacctatgtttatggagaaggtttcactggagccatctattatgtacaatgtaacagaattaaattcagtcagccaagctggagaatgtgtgtctacgtttgggtcaagagcatatttgcaaccaatggatacacgccagtacttatactgcctaaagccaaagaatgaatttgcagaaaaagcaggcatcattaagggagtaacagtaattggaaaattggatatagtatggaaaacaaatctaggtgaaaggggaaggttacagaccagccaacttcaaagaatggctccaggttatggagatgttaggttgtctttggaggcaataccagataccgtaaaccttgaagaaccttttcatattacctgtaaaataacaaactgcagcagtgaaaggactatggatctggttttggaaatgtgcaataccaattccatccactggtgtggaatttcaggaagacagctgggaaagctgcatccaagttcttcgctctgtcttgcccttactctgctttcttcagtacagggactgcaaagcatctctggcttaagactaacagacacattcttaaagagaacatatgaatatgatgacatcgcacaagtctgtgtggtatcttctgccattaaagtggaaagctgaaggaaacttccaatgttaggcttttcatttagtttcacagaactgctctttttgttacctttgtaaaatgatgacgtcaacaacgaagtaaatatgttacttaaattttctttcctgtaaaatggttaaaatattaaatatttgttttgaagagatctgattttatcttgtaatttatatttgaaatgaacatgtgtatattttctacacctattatttaatttcatttcattttagatgaccattggactttgttctccaaaagctgtgtatctgagaccatttgtccctagcaagttatctagaacacgagtcagcacactttttatgtaaggtacaagatactaaatattttaggctttgcaggccgtaaggtttctgtcacaaatactgaactctgccatcgtacttcaagagcagccagtaggcaaaaaaagtacagtggtgtacacaaaaagaagcagttggactcgggaagctgaggcaggagaatcacttgaaccggggaggcagaggttgcagttaagccgagatcatgctactgcactctagcctgagcgacagagtgagactctgtctcaaaaaaaaagaggcagctgggcagatttggcctgcagggtatagttggctgacctcaatctagaagatagagttgtttcttagaactttgtaatattttggttagaaatatttcagttaactccagttttttcctagctattcggtcagcagaaaaagtttgcttaaaacaaagggggtagtcctcttataacctgatatttgtcaacacagtataagctttctagttgttttcaaaattactgtaatggtttgtgtctgtatttgtatattatacctacaaaaaactaacctgccactaatagttatgtcatccctctttttaatcatcatcctagccctaagtctggcctttgagtgactacaaaaaggattagactgaaccgaata

SEQ ID NO: 449943 - DNA, 487 bp, Homo sapiens
cgtattgttacctaggggtggtttcttttcctgcagtcgcgatgtgtgattgcagatggaaaacaaagtattttatgcctacgtttctaagatagaagaaatggacttgttgaaaagaagccagtttgtaaaggacacagtaggagaatttaaggtaccaccaccagagagaggttgagagtgcgtttgacttttggttttgtcaaacgcgaggttttccgtttccttccggggcaagttgaacctgtccagcccccgtaggctgtgggtcaaaagtgccggtcaaaatggaagtgaatccccctaaacaggagcacctgctggcgctaaaaggtaaacttttgcgaacctgattcccccttttctgtttccttgcattccctacttatcgaagcctttgccatgtaggcctcatccttcttaaacactcagtgctcgccctcctgctctgtcctttgccgccaagcgggaggaagcgatttctcct

SEQ ID NO: 449944 - DNA, 1571 bp, Homo sapiens
gttacctaggggtggtttcttttcctgcagtcgcgatgtgtgattgcagatggaaaacaaagtattttatgcctacgtttctaagatagaagaaatggacttgttgaaaagaagccagtttgtaaaggacacagtaggagaatttaaggtaccaccaccagagagaggttgagagtgcgtttgacttttggttttgtcaaacgcgaggttttccgtttccttccggggcaagttgaacctgtccagcccccgtaggctgtgggtcaaaagtgccggtcaaaatggaagtgaatccccctaaacaggagcacctgctggcgctaaaaggtcctgtttccctctgatttggcaagagagacaatcttgcaataataaattaacattctagctctgaggagttcaactaagaaattttctcatcactaagagtaactggattactgcagaatgactacagaagtaatattacattatcgaccatgtgagagtgatcccacacaactgccaaaaattgcagaaaaagcaattcaagactttcctactcgtccgctatcaagatttataccttggtttccatatgatgggtccaagcttccactcagacctaaaagatcaccacctgtgatttctgaagaggcagctgaagatgtgaaacagtacttaaccatttcagaacatgatgctaagtcacacagttatgattgcacagtagatctattggagtttcaacctagcttgaaaaagcagcatttaacctggtcacacacactgaaggaacagactaattctggaaatctgggtaaacaatcagaaaagggaaaacagcacaagaggagatcttggagtatttcccttcccagcaataattgtactaaaaacgtttctcctttgtctaaaaaattgcaagatagtttaaaggcactaaatttacactcactttatagagcaagatggacaatagaacacactatttgtaacagccaaactctggaagacatttggacaaaactcaatcaaattattaggcacaatgaacttccatcttgtaatgctacaattcagaggcatttaggccaaatatgggtgttctgtgatattatgtattgtgaatatgtgggaagtcttcttaaaggaagattagctcttactggaaaaattaatttatttgtgcataaatatggtgttatttttagtatgtaatgaattccactgattgtcaaaaagaatattctgaatgaaatgaatatggattgaaatagataaaataatttttacaggttttaaaatttttaatgactttttagaattcctaggcttgtcaattaagtcaagaaattgctgagttctacttattggcagccttcttttaaatgtgataaattattgtttacactgaatttgaaggtaaaaatgttctgttccttttgttacaaactgtgattgaattagtcatgaattaagttgtatagtttggattttggttaatctctaaaatctaattttactgtatttttttccttacctcaagtgtaattttttaaaaaataaaactcgaaacaattctctttgga

SEQ ID NO: 449945 - DNA, 5175 bp, Homo sapiens
gttacctaggggtggtttcttttcctgcagtcgcgatgtgtgattgcagatggaaaacaaagtattttatgcctacgtttctaagatagaagaaatggacttgttgaaaagaagccagtttgtaaaggacacagtaggagaatttaaggtaccaccaccagagagaggttgagagtgcgtttgacttttggttttgtcaaacgcgaggttttccgtttccttccggggcaagttgaacctgtccagcccccgtaggctgtgggtcaaaagtgccggtcaaaatggaagtgaatccccctaaacaggagcacctgctggcgctaaaagtgatgcggctgactaagcctactttattcaccaatatcccagtaacatgtgaagagaaagacttacctggagatctctttaaccagctgatgagagatgatccttcaaccgttaatggtgcagaagttttaatgttgggagaaatgctgactttaccacagaattttgggaatatatttttgggagagaccttttccagttatatcagcgttcataatgatagcaatcaagttgtaaaagacatattagtaaaagctgatcttcagacaagttctcagcgtttaaatctttcagcctccaatgctgcagtggctgaacttaaaccggattgttgtattgatgatgtcatacatcatgaagtcaaagaaattggaacacacatcttggtatgtgctgtgagttatacaactcaggctggagaaaaaatgtatttcagaaaattcttcaaatttcaggttctcaaaccattggatgtgaaaaccaaattttacaatgcagagagtgacctcagttctgtgactgatgaagtatttctggaagcccagattcagaatatgacaacctcacctatgtttatggagaaggtttcactggagccatctattatgtacaatgtaacagaattaaattcagtcagccaagctggagaatgtgtgtctacgtttgggtcaagagcatatttgcaaccaatggatacacgccagtacttatactgcctaaagccaaagaatgaatttgcagaaaaagcaggcatcattaagggagtaacagtaattggaaaattggatatagtatggaaaacaaatctaggtgaaaggggaaggttacagaccagccaacttcaaagaatggctccaggttatggagatgttaggttgtctttggaggcaataccagataccgtaaaccttgaagaaccttttcatattacctataccaattccatccactggtgtggaatttcaggaagacagctgggaaagctgcatccaagttcttcgctctgtcttgcccttactctgctttcttcagtacagggactgcaaagcatctctggcttaagactaacagacacattcttaaagagaacatatgaatatgatgacatcgcacaagtctgtgtggtatcttctgccattaaagtggaaagctgaaggaaacttccaatgttaggcttttcatttagtttcacagaactgctctttttgttacctttgtaaaatgatgacgtcaacaacgaagtaaatatgttacttaaattttctttcctgtaaaatggttaaaatattaaatatttgttttgaagagatctgattttatcttgtaatttatatttgaaatgaacatgtgtatattttctacacctattatttaatttcatttcattttagatgaccattggactttgttctccaaaagctgtgtatctgagaccatttgtccctagcaagttatctagaacacgagtcagcacactttttatgtaaggtacaagatactaaatattttaggctttgcaggccgtaaggtttctgtcacaaatactgaactctgccatcgtacttcaagagcagccagtaggcaaaaaaagtacagtggtgtacacaaaaagaagcagttggactcgggaagctgaggcaggagaatcacttgaaccggggaggcagaggttgcagttaagccgagatcatgctactgcactctagcctgagcgacagagtgagactctgtctcaaaaaaaaagaggcagctgggcagatttggcctgcagggtatagttggctgacctcaatctagaagatagagttgtttcttagaactttgtaatattttggttagaaatatttcagttaactccagttttttcctagctattcggtcagcagaaaaagtttgcttaaaacaaagggggtagtcctcttataacctgatatttgtcaacacagtataagctttctagttgttttcaaaattactgtaatggtttgtgtctgtatttgtatattatacctacaaacatacatatctttcagctactgaacacatcagaattggttttactttttaggttgttgattttttttaattaactattaactaagaataatacttattttctaattataagccaaaaacccctgggtttttttctcattgattaagccacttatttttataaggtatatttaaataattcccatcttctgatatgattttaaactctaaatcatgtgttactgttacaaaactttctctctccatgtaatcacacttagttatgagcaaagcagtgagaaagttgaggtgataaacaactttgcagcattaatgtaacaaaaagtttcagtatttgtcaggaaaacaaaagcttaggctgttaaataaaagctattctattttggtaagttgaaattcaagaatgtatatataatttcttaaatgtaagagtgcattaaatcaaatacaaaaattggtttttcaatgcatcattatttattgccataacaaattgtttggtccaaaatgaaagctatattcagaaggtttgcacctcaaaattgagtaataattaatgaaatgtctgtacaaaataaagtgcaagcagtgtaaaattgaagtctgtctttgtttcaaaatgattaagattaaatgatgaaataatattttatagccactgcattggatacttggattgtttttcaagcatcttcttatgactaaatcttctgtttcattctgttttaaatctaaaaagtaaaatgatggtcacttggaatctgctctatattttaattatagtctcttctgtttataaacaataacttacacatatttttcatagttttaagtaaagattaaataatgccatcttagaaaggatctgtttaacctatattataaaagttagatacacaatttggtacattaaatgaaaatgtcatttgcatatatagaacctgttctgttttacacagtatcataatagctacagctactacaagaaatatggttaatggaagtcaaacatttagtacgatgcttaaagagttactttaataatgccctcttatttttctagttagatagcaactatatttcccagacaagcaagaaaatatatggggcattttttataaatttaaaagtagctagcacaatccaaccacgcaactttttttgaaatagcttgcaatgctatgattccaaagtgatcaaggtacttgaagagcaaaaatggcttgaatagaatggaaatgtaggcaagtggacagatagcatctagattgaatttgttacaggtggtatattagcaaagaaatagaaaaatgaaatggaagaaatataccaattcccattatttcatgtaaaaagaatggctaatttaactacagatgttagcacatgaagacattgttttaaagttttttttcttatagtatctttgtctgggtaatactggtcaaataaaatgagttgggaagtatttcctcctcttctgtttcctggaagagattgtttagaattgatattatttctcccttaagtgtttggtaaaattcatcacggaagttatctgggcctgtagttttctttactggaaggtttttaacttaaccacaaactcaatttccttaataaatatggttctgtttaggttatctgtttctacagtgagctttctagtttgtatcctatagggaatctgtttcatctaagttgttaaatatacaatccttgagttggtcatggtgttttctagttagccttttaataactatagtgtctgtagtgtattccctttcatttctgacactgaatttgtatcttctgtttttctaggcagtcagctagaagcttatcttattgctctaaaagcatttttaatgcactcaagatagttatgctagaaactttaacttcttattcaacactgaatatgagtgactaatttttaattaaggatctattttgctttttatatcacagtaatgacttctatgtgttagtagtagtacttcgttctgtgtaatactggaatactaggagttcattctaacttaatgaaaatcaaagttggcttagatggaatatgaatttaacttctgagggccgaagacttaaattgtgctctttttaaattctgcagaactatatatcttcatacagatcttcgttgtagctttgtttggcccaggtgcttaggtgtttgcaggtctgagaaacctctaacctagtgttcctctaaattagagtccttggatctgtatcaaaaccacctagtgtactgtttaaaaatggccattcctaggccttattacaggacctactgtatcagaattgaacacgtggccctgaatctgcatctttaatgaattatccaggtgattcttacaatgaagttatagaactactgttctaatgtcacaaaggagaaagagaaaagttggattttaaacttcaagatacaaaataattagtttcttagtctcttttttttttttttttgaaatggagtcttgctctgtcacccaggctggagtgcagtggcgcaatcttggctcactgcaacctctgcctctcaggttcgagcaattctcatgcttcagcctcccaagtagctgggactacgggtgcccgccaccaagccaggctaatttttgtattttcagtagaggtgggtttcaccatgttggccaggctggtctcaaactcctgacctcaggtgatcccccctgccttggcctcccaaagtgctgggattacaggcatgagccacagcgcccggccaattagtcttttgataagggttctataaggcctaatcatctgcattattactcatttaat

SEQ ID NO: 449946 - DNA, 5259 bp, Homo sapiens
gttacctaggggtggtttcttttcctgcagtcgcgatgtgtgattgcagatggaaaacaaagtattttatgcctacgtttctaagatagaagaaatggacttgttgaaaagaagccagtttgtaaaggacacagtaggagaatttaaggtaccaccaccagagagaggttgagagtgcgtttgacttttggttttgtcaaacgcgaggttttccgtttccttccggggcaagttgaacctgtccagcccccgtaggctgtgggtcaaaagtgccggtcaaaatggaagtgaatccccctaaacaggagcacctgctggcgctaaaagtgatgcggctgactaagcctactttattcaccaatatcccagtaacatgtgaagagaaagacttacctggagatctctttaaccagctgatgagagatgatccttcaaccgttaatggtgcagaagttttaatgttgggagaaatgctgactttaccacagaattttgggaatatatttttgggagagaccttttccagttatatcagcgttcataatgatagcaatcaagttgtaaaagacatattagtaaaagctgatcttcagacaagttctcagcgtttaaatctttcagcctccaatgctgcagtggctgaacttaaaccggattgttgtattgatgatgtcatacatcatgaagtcaaagaaattggaacacacatcttggtatgtgctgtgagttatacaactcaggctggagaaaaaatgtatttcacgcaccacacaaattttttcccctttttttccaaaaaaatttcaggttctcaaaccattggcatgtgaaaaccaaattttacaatgcagagagtgacctcagttctgtggactgatgaagtatttctggaagcccagattcagaatatgacaacctcacctatgtttatggagaaggtttcactggagccatctattatgtacaatgtaacagaattaaattcagtcagccaagctggagaatgtgtgtctacgtttgggtcaagagcatatttgcaaccaatggatacacgccagtacttatactgcctaaagccaaagaatgaatttgcagaaaaagcaggcatcattaagggagtaacagtaattggaaaattggatatagtatggaaaacaaatctaggtgaaaggggaaggttacagaccagccaacttcaaagaatggctccaggttatggagatgttaggttgtctttggaggcaataccagataccgtaaaccttgaagaaccttttcatattacctgtaaaataacaaactgcagcagtgaaaggactatggatctggttttggaaatgtgcaataccaattccatccactggtgtggaatttcaggaagacagctgggaaagctgcatccaagttcttcgctctgtcttgcccttactctgctttcttcagtacagggactgcaaagcatctctggcttaagactaacagacacattcttaaagagaacatatgaatatgatgacatcgcacaagtctgtgtggtatcttctgccattaaagtggaaagctgaaggaaacttccaatgttaggcttttcatttagtttcacagaactgctctttttgttacctttgtaaaatgatgacgtcaacaacgaagtaaatatgttacttaaattttctttcctgtaaaatggttaaaatattaaatatttgttttgaagagatctgattttatcttgtaatttatatttgaaatgaacatgtgtatattttctacacctattatttaatttcatttcattttagatgaccattggactttgttctccaaaagctgtgtatctgagaccatttgtccctagcaagttatctagaacacgagtcagcacactttttatgtaaggtacaagatactaaatattttaggctttgcaggccgtaaggtttctgtcacaaatactgaactctgccatcgtacttcaagagcagccagtaggcaaaaaaagtacagtggtgtacacaaaaagaagcagttggactcgggaagctgaggcaggagaatcacttgaaccggggaggcagaggttgcagttaagccgagatcatgctactgcactctagcctgagcgacagagtgagactctgtctcaaaaaaaaagaggcagctgggcagatttggcctgcagggtatagttggctgacctcaatctagaagatagagttgtttcttagaactttgtaatattttggttagaaatatttcagttaactccagttttttcctagctattcggtcagcagaaaaagtttgcttaaaacaaagggggtagtcctcttataacctgatatttgtcaacacagtataagctttctagttgttttcaaaattactgtaatggtttgtgtctgtatttgtatattatacctacaaacatacatatctttcagctactgaacacatcagaattggttttactttttaggttgttgattttttttaattaactattaactaagaataatacttattttctaattataagccaaaaacccctgggtttttttctcattgattaagccacttatttttataaggtatatttaaataattcccatcttctgatatgattttaaactctaaatcatgtgttactgttacaaaactttctctctccatgtaatcacacttagttatgagcaaagcagtgagaaagttgaggtgataaacaactttgcagcattaatgtaacaaaaagtttcagtatttgtcaggaaaacaaaagcttaggctgttaaataaaagctattctattttggtaagttgaaattcaagaatgtatatataatttcttaaatgtaagagtgcattaaatcaaatacaaaaattggtttttcaatgcatcattatttattgccataacaaattgtttggtccaaaatgaaagctatattcagaaggtttgcacctcaaaattgagtaataattaatgaaatgtctgtacaaaataaagtgcaagcagtgtaaaattgaagtctgtctttgtttcaaaatgattaagattaaatgatgaaataatattttatagccactgcattggatacttggattgtttttcaagcatcttcttatgactaaatcttctgtttcattctgttttaaatctaaaaagtaaaatgatggtcacttggaatctgctctatattttaattatagtctcttctgtttataaacaataacttacacatatttttcatagttttaagtaaagattaaataatgccatcttagaaaggatctgtttaacctatattataaaagttagatacacaatttggtacattaaatgaaaatgtcatttgcatatatagaacctgttctgttttacacagtatcataatagctacagctactacaagaaatatggttaatggaagtcaaacatttagtacgatgcttaaagagttactttaataatgccctcttatttttctagttagatagcaactatatttcccagacaagcaagaaaatatatggggcattttttataaatttaaaagtagctagcacaatccaaccacgcaactttttttgaaatagcttgcaatgctatgattccaaagtgatcaaggtacttgaagagcaaaaatggcttgaatagaatggaaatgtaggcaagtggacagatagcatctagattgaatttgttacaggtggtatattagcaaagaaatagaaaaatgaaatggaagaaatataccaattcccattatttcatgtaaaaagaatggctaatttaactacagatgttagcacatgaagacattgttttaaagttttttttcttatagtatctttgtctgggtaatactggtcaaataaaatgagttgggaagtatttcctcctcttctgtttcctggaagagattgtttagaattgatattatttctcccttaagtgtttggtaaaattcatcacggaagttatctgggcctgtagttttctttactggaaggtttttaacttaaccacaaactcaatttccttaataaatatggttctgtttaggttatctgtttctacagtgagctttctagtttgtatcctatagggaatctgtttcatctaagttgttaaatatacaatccttgagttggtcatggtgttttctagttagccttttaataactatagtgtctgtagtgtattccctttcatttctgacactgaatttgtatcttctgtttttctaggcagtcagctagaagcttatcttattgctctaaaagcatttttaatgcactcaagatagttatgctagaaactttaacttcttattcaacactgaatatgagtgactaatttttaattaaggatctattttgctttttatatcacagtaatgacttctatgtgttagtagtagtacttcgttctgtgtaatactggaatactaggagttcattctaacttaatgaaaatcaaagttggcttagatggaatatgaatttaacttctgagggccgaagacttaaattgtgctctttttaaattctgcagaactatatatcttcatacagatcttcgttgtagctttgtttggcccaggtgcttaggtgtttgcaggtctgagaaacctctaacctagtgttcctctaaattagagtccttggatctgtatcaaaaccacctagtgtactgtttaaaaatggccattcctaggccttattacaggacctactgtatcagaattgaacacgtggccctgaatctgcatctttaatgaattatccaggtgattcttacaatgaagttatagaactactgttctaatgtcacaaaggagaaagagaaaagttggattttaaacttcaagatacaaaataattagtttcttagtctcttttttttttttttttgaaatggagtcttgctctgtcacccaggctggagtgcagtggcgcaatcttggctcactgcaacctctgcctctcaggttcgagcaattctcatgcttcagcctcccaagtagctgggactacgggtgcccgccaccaagccaggctaatttttgtattttcagtagaggtgggtttcaccatgttggccaggctggtctcaaactcctgacctcaggtgatcccccctgccttggcctcccaaagtgctgggattacaggcatgagccacagcgcccggccaattagtcttttgataagggttctataaggcctaatcatctgcattattactcatttaat

SEQ ID NO: 449947 - DNA, 5233 bp, Homo sapiens
gttacctaggggtggtttcttttcctgcagtcgcgatgtgtgattgcagatggaaaacaaagtattttatgcctacgtttctaagatagaagaaatggacttgttgaaaagaagccagtttgtaaaggacacagtaggagaatttaaggtaccaccaccagagagaggttgagagtgcgtttgacttttggttttgtcaaacgcgaggttttccgtttccttccggggcaagttgaacctgtccagcccccgtaggctgtgggtcaaaagtgccggtcaaaatggaagtgaatccccctaaacaggagcacctgctggcgctaaaagtgatgcggctgactaagcctactttattcaccaatatcccagtaacatgtgaagagaaagacttacctggagatctctttaaccagctgatgagagatgatccttcaaccgttaatggtgcagaagttttaatgttgggagaaatgctgactttaccacagaattttgggaatatatttttgggagagaccttttccagttatatcagcgttcataatgatagcaatcaagttgtaaaagacatattagtaaaagctgatcttcagacaagttctcagcgtttaaatctttcagcctccaatgctgcagtggctgaacttaaaccggattgttgtattgatgatgtcatacatcatgaagtcaaagaaattggaacacacatcttggtatgtgctgtgagttatacaactcaggctggagaaaaaatgtatttcagaaaattcttcaaatttcaggttctcaaaccattggatgtgaaaaccaaattttacaatgcagagagtgacctcagttctgtgactgatgaagtatttctggaagcccagattcagaatatgacaacctcacctatgtttatggagaaggtttcactggagccatctattatgtacaatgtaacagaattaaattcagtcagccaagctggagaatgtgtgtctacgtttgggtcaagagcatatttgcaaccaatggatacacgccagtacttatactgcctaaagccaaagaatgaatttgcagaaaaagcaggcatcattaagggagtaacagtaattggaaaattggatatagtatggaaaacaaatctaggtgaaaggggaaggttacagaccagccaacttcaaagaatggctccaggttatggagatgttaggttgtctttggaggcaataccagataccgtaaaccttgaagaaccttttcatattacctgtaaaataacaaactgcagcagtgaaaggactatggatctggttttggaaatgtgcaataccaattccatccactggtgtggaatttcaggaagacagctgggaaagctgcatccaagttcttcgctctgtcttgcccttactctgctttcttcagtacagggactgcaaagcatctctggcttaagactaacagacacattcttaaagagaacatatgaatatgatgacatcgcacaagtctgtgtggtatcttctgccattaaagtggaaagctgaaggaaacttccaatgttaggcttttcatttagtttcacagaactgctctttttgttacctttgtaaaatgatgacgtcaacaacgaagtaaatatgttacttaaattttctttcctgtaaaatggttaaaatattaaatatttgttttgaagagatctgattttatcttgtaatttatatttgaaatgaacatgtgtatattttctacacctattatttaatttcatttcattttagatgaccattggactttgttctccaaaagctgtgtatctgagaccatttgtccctagcaagttatctagaacacgagtcagcacactttttatgtaaggtacaagatactaaatattttaggctttgcaggccgtaaggtttctgtcacaaatactgaactctgccatcgtacttcaagagcagccagtaggcaaaaaaagtacagtggtgtacacaaaaagaagcagttggactcgggaagctgaggcaggagaatcacttgaaccggggaggcagaggttgcagttaagccgagatcatgctactgcactctagcctgagcgacagagtgagactctgtctcaaaaaaaaagaggcagctgggcagatttggcctgcagggtatagttggctgacctcaatctagaagatagagttgtttcttagaactttgtaatattttggttagaaatatttcagttaactccagttttttcctagctattcggtcagcagaaaaagtttgcttaaaacaaagggggtagtcctcttataacctgatatttgtcaacacagtataagctttctagttgttttcaaaattactgtaatggtttgtgtctgtatttgtatattatacctacaaacatacatatctttcagctactgaacacatcagaattggttttactttttaggttgttgattttttttaattaactattaactaagaataatacttattttctaattataagccaaaaacccctgggtttttttctcattgattaagccacttatttttataaggtatatttaaataattcccatcttctgatatgattttaaactctaaatcatgtgttactgttacaaaactttctctctccatgtaatcacacttagttatgagcaaagcagtgagaaagttgaggtgataaacaactttgcagcattaatgtaacaaaaagtttcagtatttgtcaggaaaacaaaagcttaggctgttaaataaaagctattctattttggtaagttgaaattcaagaatgtatatataatttcttaaatgtaagagtgcattaaatcaaatacaaaaattggtttttcaatgcatcattatttattgccataacaaattgtttggtccaaaatgaaagcttttgccgggggttttccccccccctgggcccaccgccgggggctgttcccacaccggccgcggcccctcctggggtcgagcacccgctctgtctttgtttcaaaatgattaagattaaatgatgaaataatattttatagccactgcattggatacttggattgtttttcaagcatcttcttatgactaaatcttctgtttcattctgttttaaatctaaaaagtaaaatgatggtcacttggaatctgctctatattttaattatagtctcttctgtttataaacaataacttacacatatttttcatagttttaagtaaagattaaataatgccatcttagaaaggatctgtttaacctatattataaaagttagatacacaatttggtacattaaatgaaaatgtcatttgcatatatagaacctgttctgttttacacagtatcataatagctacagctactacaagaaatatggttaatggaagtcaaacatttagtacgatgcttaaagagttactttaataatgccctcttatttttctagttagatagcaactatatttcccagacaagcaagaaaatatatggggcattttttataaatttaaaagtagctagcacaatccaaccacgcaactttttttgaaatagcttgcaatgctatgattccaaagtgatcaaggtacttgaagagcaaaaatggcttgaatagaatggaaatgtaggcaagtggacagatagcatctagattgaatttgttacaggtggtatattagcaaagaaatagaaaaatgaaatggaagaaatataccaattcccattatttcatgtaaaaagaatggctaatttaactacagatgttagcacatgaagacattgttttaaagttttttttcttatagtatctttgtctgggtaatactggtcaaataaaatgagttgggaagtatttcctcctcttctgtttcctggaagagattgtttagaattgatattatttctcccttaagtgtttggtaaaattcatcacggaagttatctgggcctgtagttttctttactggaaggtttttaacttaaccacaaactcaatttccttaataaatatggttctgtttaggttatctgtttctacagtgagctttctagtttgtatcctatagggaatctgtttcatctaagttgttaaatatacaatccttgagttggtcatggtgttttctagttagccttttaataactatagtgtctgtagtgtattccctttcatttctgacactgaatttgtatcttctgtttttctaggcagtcagctagaagcttatcttattgctctaaaagcatttttaatgcactcaagatagttatgctagaaactttaacttcttattcaacactgaatatgagtgactaatttttaattaaggatctattttgctttttatatcacagtaatgacttctatgtgttagtagtagtacttcgttctgtgtaatactggaatactaggagttcattctaacttaatgaaaatcaaagttggcttagatggaatatgaatttaacttctgagggccgaagacttaaattgtgctctttttaaattctgcagaactatatatcttcatacagatcttcgttgtagctttgtttggcccaggtgcttaggtgtttgcaggtctgagaaacctctaacctagtgttcctctaaattagagtccttggatctgtatcaaaaccacctagtgtactgtttaaaaatggccattcctaggccttattacaggacctactgtatcagaattgaacacgtggccctgaatctgcatctttaatgaattatccaggtgattcttacaatgaagttatagaactactgttctaatgtcacaaaggagaaagagaaaagttggattttaaacttcaagatacaaaataattagtttcttagtctcttttttttttttttttgaaatggagtcttgctctgtcacccaggctggagtgcagtggcgcaatcttggctcactgcaacctctgcctctcaggttcgagcaattctcatgcttcagcctcccaagtagctgggactacgggtgcccgccaccaagccaggctaatttttgtattttcagtagaggtgggtttcaccatgttggccaggctggtctcaaactcctgacctcaggtgatcccccctgccttggcctcccaaagtgctgggattacaggcatgagccacagcgcccggccaattagtcttttgataagggttctataaggcctaatcatctgcattattactcatttaat

SEQ ID NO: 449948 - DNA, 2446 bp, Homo sapiens
  misc_feature (1546)..(1546): n is a, c, g, or t
  misc_feature (1563)..(1563): n is a, c, g, or t
  misc_feature (1993)..(1993): n is a, c, g, or t
gttacctaggggtggtttcttttcctgcagtcgcgatgtgtgattgcagatggaaaacaaagtattttatgcctacgtttctaagatagaagaaatggacttgttgaaaagaagccagtttgtaaaggacacagtaggagaatttaaggtaccaccaccagagagaggttgagagtgcgtttgacttttggttttgtcaaacgcgaggttttccgtttccttccggggcaagttgaacctgtccagcccccgtaggctgtgggtcaaaagtgccggtcaaaatggaagtgaatccccctaaacaggagcacctgctggcgctaaaagtgatgcggctgactaagcctactttattcaccaatatcccagtaacatgtgaagagaaagacttacctggagatctctttaaccagctgatgagagatgatccttcaaccgttaatggtgcagaagttttaatgttgggagaaatgctgactttaccacagaattttgggaatatatttttgggagagaccttttccagttatatcagcgttcataatgatagcaatcaagttgtaaaagacatattagtaaaagctgatcttcagacaagttctcagcgtttaaatctttcagcctccaatgctgcagtggctgaacttaaaccggattgttgtattgatgatgtcatacatcatgaagtcaaagaaattggaacacacatcttggtatgtgctgtgagttatacaactcaggctggagaaaaaatgtatttcagaaaattcttcaaatttcaggttctcaaaccattggatgtgaaaaccaaattttacaatgcagagagtgacctcagttctgtgactgatgaagtatttctggaagcccagattcagaatatgacaacctcacctatgtttatggagaaggtttcactggagccatctattatgtacaatgtaacagaattaaattcagtcagccaagctggagaatggtaaatattaatttatgaagtctttatccttgttttgaaagatacatgtttttctaaacatccattgctcttcagtgggtttttttttaatagactttttttaaagaatttgaggttcatagaaaaattcatcagaaagtagagtttccacataccctcttccactcctcacagtttctcttgttatttacgtcttgttttttattttatttttatttttatttatttatttatttatttattttttgaaagagtccagctctatgcagtggcatgatcttgatctaggctcactgtaacctccacctcccaggttcaagcaattttggtgcatcagcctcccaagctgctgggattacaggtgcatgccaccacgcttggttaatttttttatttttagtagagatggggtttcaccatattggccaggctggtcttcagctcctgacctcaagcgatctgcccaccttatcctcccaaagtgctgtccttacaggcgtgagccactgtgcctggcctacatcttgttttaatgtggtacatttactacaattgatgaaatgatantgacactgattactaantaatgtctataatttacattagaattcacactttttgttgtatgttttattgtttttggtttttggtttgttttgttttaagagacaggtctcattaatgttgcccaggctgaagtcaaatttctggactcaaacgatctcccaagtatctgggactatagtcaagcactgtaggttttgacaaatatataacatgtatccaccattactatattatgcaaaatagtttcactttccaaaaactctcctgtgctccatcttcatccctccattacataaaaataaagatcctagcccttttaatttcatgttttactattcaaagcatttggtcttttaagtctcataaaaatccagtgaggtaaatatgaatcctatcattgctatcctgcaaataataaaatggaggaatgtgaaggaatggtagagnagttaaaaagagtaagggtgaatgtgggtttaaaaaaagaaatactctctcaacatcaaaagaaaaggacataggaatagatggtttaatactttgtgaaaaggaaatacatacacctttccacagctaatttaaaagaggaagaataaatgtaaagttgacaataatacagataagaaagtaataggctgggtgtggtggctcatgcctgtaatcctaaccctttggaaggctgaggccagaggattgcttgaagctatgagttctagaccaacctgggcaacttggcattttttttatttagctgggcatggtggtacactcctgcattcctagctccttgggagagaggcaggaaaatcgcttgagtccacaagttcaaggctgcagtgagccatgattgcaccactgtactccaacctggtgacagagagagaccttgtattttaaaca

SEQ ID NO: 449949 - DNA, 914 bp, Homo sapiens
cgtggcgggaaaacggcggccgcggcgtctcctccgggacgctgaggggcccgaggagaccgtgaggctctggcctgcagctcgcgccgccatggacgctgccgaggtcgaattcctcgccgagaaggagctggttaccattatccccaacttcagtctggacaagatctacctcatcgggggggacctggggccttttaaccctggtttacccgtggaagtgcccctgtggctggcgattaacctgaaacaaagacagaaatgtcgcctgctccctccagagtggatggatgtagaaaagttggagaagatgagggatcatgaacgaaaggaagaaacttttaccccaatgcccagcccttactacatggaacttacgaagctcctgttaaatcatgcttcagacaacatcccgaaggcagacgaaatccggaccctggtcaaggatatgtgggacactcgtatagccaaactccgagtgtctgctgacagctttgtgagacagcaggaggcacatgccaagctggataacttgaccttgatggagatcaacaccagcgggactttcctcacacaagcgctcaaccacatgtacaaactccgcacgaacctccagcctctggagagtactcagtctcaggacttctagagaaaggcctggtgcaggcggcttgctgggggatgtgagcgctcaggacgtgatgaggtactcgtggttctggagctctagaaacacttctgatgcatgaaaaatgtgtgatggtgcaaggaatggattcaggatgttgttggagaaacaagtttgtgattagtccttaaaacttagctccctgggacattcttcaattccacatctgtttctagaaaccagccctttttccccccacttttgagaaataaaaaagccttaggta

SEQ ID NO: 449950 - DNA, 557 bp, Homo sapiens
  misc_feature (549)..(549): n is a, c, g, or t
  misc_feature (555)..(555): n is a, c, g, or t
cgtggcgggaaaacggcggccgcggcgtctcctccgggacgctgaggggcccgaggagaccgtgaggctctggcctgcagctcgcgccgccatggacgctgccgaggtcgaattcctcgccgagaaggagctggttaccattatccccaacttcagtctggacaagatctacctcatcgggggggacctggggccttttaaccctggtttacccgtggaagtgcccctgtggctggcgattaacctgaaacaaagacagaaatgtcgcctgctccctccagagtggatggatgtagaaaagttggagaagatgagggatcatgaacgaaaggaagaaacttttaccccaatgcccagcccttactacatggaacttacgaagctcctgttaaatcatgcttcagacaacatcccgaaggcagacgaaatccggaccctggtcaaggatatgtgggacactcgtatagccaaactccgagtgtctgctgacagcttttgttaagaacaagccagggaggggaccaattgccaaaagcttggggtaaaacntttggncc

SEQ ID NO: 449951 - DNA, 1769 bp, Homo sapiens
cgggtgccgggacaaactatacggctaggtacgaggctggtgtctcctccgggacgctgaggggcccgaggagaccgtgaggctctggcctgcagctcgcgccgccatggacgctgccgaggtcgaattcctcgccgagaaggagctggttaccattatccccaacttcagtctggacaagatctacctcatcgggggggacctggggccttttaaccctggtttacccgtggaagtgcccctgtggctggcgattaacctgaaacaaagacagaaatgtcgcctgctccctccagagtggatggatgtagaaaagttggagaagatgagggatcatgaacgaaaggaagaaacttttaccccaatgcccagcccttactacatggaacttacgaagctcctgttaaatcatgcttcagacaacatcccgaaggcagacgaaatccggaccctggtcaaggatatgtgggacactcgtatagccaaactccgagtgtctgctgacagctttgtgagacagcaggaggcacatgccaagctggataacttgaccttgatggagatcaacaccagcgggactttcctcacacaagcgctcaaccacatgtacaaactccgcacgaacctccagcctctggagagtactcagtctcaggacttctagagaaaggcctggtgcaggcggcttgctgggggatgtgagcgctcaggacgtgatgaggtactcgtggttctggagctctagaaacacttctgatgcatgaaaaatgtgtgatggtgcaaggaatggattcaggatgttgttggagaaacaagtttgtgattagtccttaaaacttagctccctgggacattcttcaattccacatctgtttctagaaaccagccctttttccccccacttttgagaaataaaaaagccttaggtaaataagtcattctccctagcagagccacttgggtctcctgcatggaagccatcacacttgggcaggtgttcagtgactggtaggtgtagatacagcaggagtggccatgtggtccacggctttttaccccttcttgatcctgatttcttgggctgaatttagactctctcacagaggtggctcacagagaaggatggcagatggtgcagccaacaatgctgaccggtgcttatcctctaagccctgatccacaataaaaatggacccaactcagctctgactctctaggtttttgtgctgcgtaactaccaagtaaaaggactgagcctgtggctgagatgactcagtcaacgaaactgaggcacacggcagttaagtggaaactgcagaccaacacctggggtgtctccttctcttggctacttctagctcaggtttaatgggttgcttatcaagaggagagtcaggaaaaaaacgaatccaatgtattgagcatgagtgacaatgtattgagcatgagtgacaatgctagaagaaaagtcactttcagtgctgctcttgatggatttagggaaggattctttgttgtaggtaacagtgggctcaggggaaattatttttttcctaagagaaaattactttattcgtagcattttggaaatgttaggacctttacagaaattacattaccttgagaggtgaaatgatcgtccagcatcatgcaatggatagaaggttctgtaatcagctttaaaaaaaactttaatttttggccgggcacattggcttggctcatgcatgtaatcccagcactttgggaggccaaggcaggtggatcac

SEQ ID NO: 449952 - DNA, 1007 bp, Homo sapiens
cgtggcgggaaaacggcggccgcggcgtctcctccgggacgctgaggggcccgaggagaccgtgaggctctggcctgcagctcgcgccgccatggacgctgccgaggtcgaattcctcgccgagaaggagctggttaccattatccccaacttcagtctggacaagatctacctcatcgggggggacctggggccttttaaccctggtttacccgtggaagtgcccctgtggctggcgattaacctgaaacaaagacagaaatgtcgcctgctccctccagagtggatggatgtagaaaagttggagaagatgagggatcatgaacgaaaggaagaaacttttaccccaatgcccagcccttactacatggaacttacgaagctcctgttaaatcatgcttcagacaacatcccgaaggcagacgaaatccggaccctggtcaaggatatgtgggacactcgtatagccaaactccgagtgtctgctgacagctttgtgagacagcaggaggcacatgccaagctggataacttgaccttgatggagatcaacaccagcgggactttcctcacacaagcgctcaaccacatgtacaaactccgcacgaacctccagcctctggagagtactcagtctcaggacttctagagaaaggcctggtgcaggcggcttgctgggggatgtgagcgctcaggacgtgatgaggtactcgtggttctggagctctagaaacacttctgatgcatgaaaaatgtgtgatggtgcaaggaatggattcaggatgttgttggagaaacaagtttgtgattagtccttaaaacttagctccctgggacattcttcaattccacatctgtttctagaaaccagccctttttccccatttggaataaaagcctagtattatattcctgcagcctgggctgctgagccccctgggggtctcgcggggtgacacgggcggggcgggtaccccgtctcggggacccccgggcaagggggcgcg

SEQ ID NO: 449953 - DNA, 1527 bp, Homo sapiens
  misc_feature (49)..(50): n is a, c, g, or t
tacaaaaagcagctgtaccgtccggaatccccggatatgtccctgctcnntccagagtggatgatgtagaaaagttggagaagatgagggatcatgaacgaaaggaagaaacttttaccccaatgcccagcccttactacatggaacttacgaagctcctgttaaatcatgcttcagacaacatcccgaaggcagacgaaatccggaccctggtcaaggatatgtgggacactcgtatagccaaactccgagtgtctgctgacagctttgtgagacagcaggaggcacatgccaagctggataacttgaccttgatggagatcaacaccagcgggactttcctcacacaagcgctcaaccacatgtacaaactccgcacgaacctccagcctctggagagtactcagtctcaggacttctagagaaaggcctggtgcaggcggcttgctgggggatgtgagcgctcaggacgtgatgaggtactcgtggttctggagctctagaaacacttctgatgcatgaaaaatgtgtgatggtgcaaggaatggattcaggatgttgttggagaaacaagtttgtgattagtccttaaaacttagctccctgggacattcttcaattccacatctgtttctagaaaccagccctttttccccccacttttgagaaataaaaaagccttaggtaaataagtcattctccctagcagagccacttgggtctcctgcatggaagccatcacacttgggcaggtgttcagtgactggtaggtgtagatacagcaggagtggccatgtggtccacggctttttaccccttcttgatcctgatttcttgggctgaatttagactctctcacagaggtggctcacagagaaggatggcagatggtgcagccaacaatgctgaccggtgcttatcctctaagccctgatccacaataaaaatggacccaactcagctctgactctctaggtttttgtgctgcgtaactaccaagtaaaaggactgagcctgtggctgagatgactcagtcaacgaaactgaggcacacggcagttaagtggaaactgcagaccaacacctggggtgtctccttctcttggctacttctagctcaggtttaatgggttgcttatcaagaggagagtcaggaaaaaaacgaatccaatgtattgagcatgagtgacaatgtattgagcatgagtgacaatgctagaagaaaagtcactttcagtgctgctcttgatggatttagggaaggattctttgttgtaggtaacagtgggctcaggggaaattatttttttcctaagagaaaattactttattcgtagcattttggaaatgttaggacctttacagaaattacattaccttgagaggtgaaatgatcgtccagcatcatgcaatggatagaaggttctgtaatcagctttaaaaaaaactttaatttttggccgggcacattggcttggctcatgcatgtaatcccagcactttgggaggccaaggcaggtggatcac

SEQ ID NO: 449954 - DNA, 316 bp, Homo sapiens
tttttcatgtatttgctagttgataatgtatttgccagataatataggcacttggtaaatttggaaggtttaataaatatcttggttataatgatggtaaaatgtattaacttctaaatttcagaaaagttggagaagatgagggatcatgaacgaaaggaagaaacttttaccccaatgcccagcccttactacatggaacttacgaagctcctgttaaatcagtaagtagatctcacctcttagaggccacacccaagactggactcgccatgcccttcccctaaccctcgtccttcctctccgcttccctgct

SEQ ID NO: 449955 - DNA, 1754 bp, Homo sapiens
cgtggcgggaaaacggcggccgcggcgtctcctccgggacgctgaggggcccgaggagaccgtgaggctctggcctgcagctcgcgccgccatggacgctgccgaggtcgaattcctcgccgagaaggagctggttaccattatccccaacttcagtctggacaagatctacctcatcgggggggacctggggccttttaaccctggtttacccgtggaagtgcccctgtggctggcgattaacctgaaacaaagacagaaatgtcgcctgctccctccagagtggatggatgtagaaaagttggagaagatgagggatcatgaacgaaaggaagaaacttttaccccaatgcccagcccttactacatggaacttacgaagctcctgttaaatcatgcttcagacaacatcccgaaggcagacgaaatccggaccctggtcaaggatatgtgggacactcgtatagccaaactccgagtgtctgctgacagctttgtgagacagcaggaggcacatgccaagctggataacttgaccttgatggagatcaacaccagcgggactttcctcacacaagcgctcaaccacatgtacaaactccgcacgaacctccagcctctggagagtactcagtctcaggacttctagagaaaggcctggtgcaggcggcttgctgggggatgtgagcgctcaggacgtgatgaggtactcgtggttctggagctctagaaacacttctgatgcatgaaaaatgtgtgatggtgcaaggaatggattcaggatgttgttggagaaacaagtttgtgattagtccttaaaacttagctccctgggacattcttcaattccacatctgtttctagaaaccagccctttttccccccacttttgagaaataaaaaagccttaggtaaataagtcattctccctagcagagccacttgggtctcctgcatggaagccatcacacttgggcaggtgttcagtgactggtaggtgtagatacagcaggagtggccatgtggtccacggctttttaccccttcttgatcctgatttcttgggctgaatttagactctctcacagaggtggctcacagagaaggatggcagatggtgcagccaacaatgctgaccggtgcttatcctctaagccctgatccacaataaaaatggacccaactcagctctgactctctaggtttttgtgctgcgtaactaccaagtaaaaggactgagcctgtggctgagatgactcagtcaacgaaactgaggcacacggcagttaagtggaaactgcagaccaacacctggggtgtctccttctcttggctacttctagctcaggtttaatgggttgcttatcaagaggagagtcaggaaaaaaacgaatccaatgtattgagcatgagtgacaatgtattgagcatgagtgacaatgctagaagaaaagtcactttcagtgctgctcttgatggatttagggaaggattctttgttgtaggtaacagtgggctcaggggaaattatttttttcctaagagaaaattactttattcgtagcattttggaaatgttaggacctttacagaaattacattaccttgagaggtgaaatgatcgtccagcatcatgcaatggatagaaggttctgtaatcagctttaaaaaaaactttaatttttggccgggcacattggcttggctcatgcatgtaatcccagcactttgggaggccaaggcaggtggatcac

SEQ ID NO: 449956 - DNA, 1514 bp, Homo sapiens
cgtggcgggaaaacggcggccgcggcgtctcctccgggacgctgaggggcccgaggagaccgtgaggctctggcctgcagctcgcgccgccatggacgctgccgaggtcgaattcctcgccgagaaggagctggttaccattatccccaacttcagtctggacaagatctacctcatcgggggggacctggggccttttaaccctggtttacccgtggaagtgcccctgtggctggcgattaacctgaaacaaagacagaaatgtcgcctgctccctccagagtggatggatgtagaaaagttggagaagatgagggatcatgaacgaaaggaagaaacttttaccccaatgcccagcccttactacatggaacttacgaagctcctgttaaatcatgcttcagacaacatcccgaaggcagacgaaatccggaccctggtcaaggatatgtgggacactcgtatagccaaactccgagtgtctgctgacagctttgtgagacagcaggaggcacatgccaagctggataacttgaccttgatggagatcaacaccagcgggactttcctcacacaagcgctcaaccacatgtacaaactccgcacgaacctccagcctctggagagtactcagtctcaggacttctagagaaaggcctggtgcaggcggcttgctgggggatgtgagcgctcaggacgtgatgaggtactcgtggttctggagctctagaaacacttctgatgcatgaaaaatgtgtgatggtgcaaggaatggattcaggatgttgttggagaaacaagtttgtgattagtccttaaaacttagctccctgggacattcttcaattccacatctgtttctagaaaccagccctttttccccccacttttgagaaataaaaaagccttaggtaaataagtcattctccctagcagagccacttgggtctcctgcatggaagccatcacacttgggcaggtgttcagtgactggtaggtgtagatacagcaggagtggccatgtggtccacggctttttaccccttcttgatcctgatttcttgggctgaatttagactctctcacagaggtggctcacagagaaggatggcagatggtgcagccaacaatgctgaccggtgcttatcctctaagccctgatccacaataaaaatggacccaacgcaacaaaaaaaaaaaaaaaaaaaaaaaaaaatttgggggggggcctggggccccggaaaaggtttttaaacccatcggtggggcgccggcgggcgcccaggaagggtaagggagcaaggggcgcccatagcgggtggtccccagaggagaaaccgcgggctccgaggaaccagggggcggggaattcttcccccatgtaaaaaaaagcccgcgggggaaaacggcgagggttttcggaacaattcccagaagggagtcccgggggcccacagggggactatacacccgggggctccaggaaccgcaatttcaattagcccccagggggc

SEQ ID NO: 449957 - DNA, 857 bp, Homo sapiens
cgtggcgggaaaacggcggccgcggcgtctcctccgggacgctgaggggcccgaggagaccgtgaggctctggcctgcagctcgcgccgccatggacgctgccgaggtcgaattcctcgccgagaaggagctggttaccattatccccaacttcagtctggacaagatctacctcatcgggggggacctggggccttttaaccctggtttacccgtggaagtgcccctgtggctggcgattaacctgaaacaaagacagaaatgtcgcctgctccctccagagtggatggatgtagaaaagttggagaagatgagggatcatgaacgaaaggaagaaacttttaccccaatgcccagcccttactacatggaacttacgaagctcctgttaaatcatgcttcagacaacatcccgaaggcagacgaaatccggaccctggtcaaggatatgtgggacactcgtatagccaaactccgagtgtctgctgacagctttgtgagacagcaggaggcacatgccaagctggataacttgaccttgatggagatcaacaccagcgggactttcctcacacaagcgctcaaccacatgtacaaactccgcacgaacctccagcctctggagagtactcagtctcaggacttctagagaaaggcctggtgcaggcggcttgctgggggatgtgagcgctcaggacgtgatgaggtactcgtggttctggagctctagaaacacttctgatgcatgaaaaatgtgtgatggtgcaaggaatggattcaggatgttgttggagaaacaagtttgtgattaaaactcttgtagctcatatgagatcgccggagcagttccacttagg

SEQ ID NO: 449958 - DNA, 507 bp, Homo sapiens
ggaggttggggggcagagaagcccagtcagccatgatgaggtgaagttctcttcttcacctcagggggccagggtgtaaggggcgtcctgcagagcccccgtctcccactgtggccatctcaaagcctcagcccctctttcttccagaaacccccactgccttggcccatacctctccagctccctaggggcccaggctgggaggctggagactcagggtatggcccttgcttgacttagtctaagcttggggaggtggtccaagattgcgaggggtgggtacaggctgcggggtcgtctggtgcctttgggagctgtgctgctggggtcttgactcttgtaccccagagaccccacccccaccccccccccaccccgccgcgagcatgcgcaggcaccgcccctaccccctccggttcggttcgtttccggtttgtttgctgagctgtcaatgaaagacccgtgtaattattcccgagctttacaataaaagtgtgaaaaccggac

SEQ ID NO: 449959 - DNA, 4329 bp, Homo sapiens
agattttaaaaggtttaattaaattgatagatgatagatccatcatgaaaggtaaatttaaggggtgggggacattctgaatgtttttaggacaatgtcagtaaagggcagtgctcacccaagagacatatattggtatcactgtcagaatatagggccggatgaactgttgtgcttgtgaattattgggttacattattgaattgtgacccatttaatgacgtgttctgcttagcgtctttaggccccacctaactcttccagctctctattcgacattctctttggattgttttgctataacttgaaatttgggatgtcacaaacgaaactgtcatctgtttccgccaaactgtggttctgctaatctcccaggctggcagcattggagacttgctgacttctttcatcccccactcttttcacctgaaattcctttccttggttttgctctaagtcctatgcttcagtcaggggccaaccaaatctcactgcctcctttttatcatgaagcctttgatcactgatagttctttttatatcttgaaaaatcacccttcccagtacagttaatatttagtatctctactcatcttggcacttactcacagctccataattcagtgtttctcgtacctcttcatggtgatggggagccctttggaggtggtgactgtgctttatactcctcatgatgcttcacatgtggcaggcgtggagtgcccggaggcggccctcctgattctggggcctcccaggatggagcccctgaggcacagcccaggccctggggggcaacggctactgctgccctccatgctgctagcactgctgctcctgctggctccatccccaggccacgccactcgggtagtgtacaaggtgccggaggaacagccacccaacaccctcattgggagcctcgcagccgactatggttttccagatgtggggcacctgtacaagctagaggtgggtgccccgtaccttcgcgtggatggcaagacaggtgacattttcaccaccgagacctccatcgaccgtgaggggctccgtgaatgccagaaccagctccctggtgatccctgcatcctggagtttgaggtatctatcacagacctcgtgcagaatggcagcccccggctgctagagggccagatagaagtacaagacatcaatgacaacacacccaacttcgcctcaccagtcatcactctggccatccctgagaacaccaacatcggctcactcttccccatcccgctggcttcagaccgtgatgctggtcccaacggtgtggcatcctatgagctgcaggtggcagaggaccaggaggagaagcaaccacagctcattgtgatgggcaacctggaccgtgagcgctgggactcctatgacctcaccatcaaggtgcaggatggcggcagccccccacgcgccagcagtgccctgctgcgtgtcaccgtgcttgacaccaatgacaacgcccccaagtttgagcggccctcctatgaggccgaactatctgagaatagccccataggccactcggtcatccaggtgaaggccaatgactcagaccaaggtgccaatgcagaaatcgaatacacattccaccaggcgcccgaagttgtgaggcgtcttcttcgactggacaggaacactggacttatcactgttcagggcccggtggaccgtgaggacctaagcaccctgcgcttctcagtgcttgctaaggaccgaggcaccaaccccaagagtgcccgtgcccaggtggttgtgaccgtgaaggacatgaatgacaatgcccccaccattgagatccggggcatagggctagtgactcatcaagatgggatggctaacatctcagaggatgtggcagaggagacagctgtggccctggtgcaggtgtctgaccgagatgagggagagaatgcagctgtcacctgtgtggtggcaggtgatgtgcccttccagctgcgccaggccagtgagacaggcagtgacagcaagaagaagtatttcctgcagactaccaccccgctagactacgagaaggtcaaagactacaccattgagattgtggctgtggactctggcaaccccccactctccagcactaactccctcaaggtgcaggtggtggacgtcaatgacaacgcacctgtcttcactcagagtgtcactgaggtcgccttcccggaaaacaacaagcctggtgaagtgattgctgagatcactgccagtgatgctgactctggctctaatgctgagctggtttactctctggagcctgagccggctgctaagggcctcttcaccatctcacccgagactggagagatccaggtgaagacatctctggatcgggaacagcgggagagctatgagttgaaggtggtggcagctgaccggggcagtcctagcctccagggcacagccactgtccttgtcaatgtgctggactgcaatgacaatgaccccaaatttatgctgagtggctacaacttctcagtgatggagaacatgccagcactgagtccagtgggcatggtgactgtcattgatggagacaagggggagaatgcccaggtgcagctctcagtggagcaggacaacggtgactttgttatccagaatggcacaggcaccatcctatccagcctgagctttgatcgagagcaacaaagcacctacaccttccagctgaaggcagtggatggtggcgtcccacctcgctcagcttacgttggtgtcaccatcaatgtgctggacgagaatgacaacgcaccctatatcactgccccttctaacacctctcacaagctgctgaccccccagacacgtcttggtgagacggtcagccaggtggcagccgaggactttgactctggtgtcaatgctgagctgatctacagcattgcaggtggcaacccttatggactcttccagattgggtcacattcaggtgccatcaccctggagaaggagattgagcggcgccaccatgggctacaccgcctggtggtgaaggtcagtgaccgcggcaagcccccacgctatggcacagccttggtccatctttatgtcaatgagactctggccaaccgcacgctgctggagaccctcctgggccacagcctggacacgccgctggatattgacattgctggggatccagaatatgagcgctccaagcagcgtggcaacattctctttggtgtggtggctggtgtggtggccgtggccttgctcatcgccctggcggttcttgtgcgctactgcagacagcgggaggccaaaagtggttaccaggctggtaagaaggagaccaaggacctgtatgcccccaagcccagtggcaaggcctccaagggaaacaaaagcaaaggcaagaagagcaagtccccaaagcccgtgaagccagtggaggacgaggatgaggccgggctgcagaagtccctcaagttcaacctgatgagcgatgcccctggggacagtccccgcatccacctgcccctcaactacccaccaggcagccctgacctgggccgccactatcgctctaactccccactgccttccatccagctgcagccccagtcaccctcagcctccaagaagcaccaggtggtacaggacctgccacctgcaaacacattcgtgggcaccggggacaccacgtccacgggctctgagcagtactccgactacagctaccgcaccaacccccccaaataccccagcaagcaggtaggccagccctttcagctcagcacaccccagcccctaccccacccctaccacggagccatctggaccgaggtgtgggagtgatggagcaggtttactgtgcctgcccgtgttgggggccagcctgagccagcagtgggaggtggggccttagtgcctcaccgggcacacggattaggctgagtgaagattaagggagggtgtgctctgtggtctcctccctgccctctccccactggggagagacctgtgatttgccaagtccctggaccctggaccagctactgggccttatgggttgggggtggtaggcaggtgagcgtaagtggggagggaaatgggtaagaagtctactccaaacctaggtctctatgtcagaccagacctaggtgcttctctaggagggaaacagggagacctggggtcctgtggataactgagtggggagtctgccaggggagggcaccttcccattgtgccttctgtgtgtattgtgcattaacctcttcctcaccactaggcttctggggctgggtcccacatgcccttgaccctgacaataaagttctctat

SEQ ID NO: 449960 - DNA, 3750 bp, Homo sapiens
gccggagccggagcccgaactgcagctccagccccagccgtgcggagccgcagcccaggccggggccggcggcggctcatggacagcggggcgggcggccggcgctgcccggaggcggccctcctgattctggggcctcccaggatggagcccctgaggcacagcccaggccctggggggcaacggctactgctgccctccatgctgctagcactgctgctcctgctggctccatccccaggccacgccactcgggtagtgtacaaggtgccggaggaacagccacccaacaccctcattgggagcctcgcagccgactatggttttccagatgtggggcacctgtacaagctagaggtgggtgccccgtaccttcgcgtggatggcaagacaggtgacattttcaccaccgagacctccatcgaccgtgaggggctccgtgaatgccagaaccagctccctggtgatccctgcatcctggagtttgaggtatctatcacagacctcgtgcagaatggcagcccccggctgctagagggccagatagaagtacaagacatcaatgacaacacacccaacttcgcctcaccagtcatcactctggccatccctgagaacaccaacatcggctcactcttccccatcccgctggcttcagaccgtgatgctggtcccaacggtgtggcatcctatgagctgcaggctgggcctgaggcccaggagctatttgggctgcaggtggcagaggaccaggaggagaagcaaccacagctcattgtgatgggcaacctggaccgtgagcgctgggactcctatgacctcaccatcaaggtgcaggatggcggcagccccccacgcgccagcagtgccctgctgcgtgtcaccgtgcttgacaccaatgacaacgcccccaagtttgagcggccctcctatgaggccgaactatctgagaatagccccataggccactcggtcatccaggtgaaggccaatgactcagaccaaggtgccaatgcagaaatcgaatacacattccaccaggcgcccgaagttgtgaggcgtcttcttcgactggacaggaacactggacttatcactgttcagggcccggtggaccgtgaggacctaagcaccctgcgcttctcagtgcttgctaaggaccgaggcaccaaccccaagagtgcccgtgcccaggtggttgtgaccgtgaaggacatgaatgacaatgcccccaccattgagatccggggcatagggctagtgactcatcaagatgggatggctaacatctcagaggatgtggcagaggagacagctgtggccctggtgcaggtgtctgaccgagatgagggagagaatgcagctgtcacctgtgtggtggcaggtgatgtgcccttccagctgcgccaggccagtgagacaggcagtgacagcaagaagaagtatttcctgcagactaccaccccgctagactacgagaaggtcaaagactacaccattgagattgtggctgtggactctggcaaccccccactctccagcactaactccctcaaggtgcaggtggtggacgtcaatgacaacgcacctgtcttcactcagagtgtcactgaggtcgccttcccggaaaacaacaagcctggtgaagtgattgctgagatcactgccagtgatgctgactctggctctaatgctgagctggtttactctctggagcctgagccggctgctaagggcctcttcaccatctcacccgagactggagagatccaggtgaagacatctctggatcgggaacagcgggagagctatgagttgaaggtggtggcagctgaccggggcagtcctagcctccagggcacagccactgtccttgtcaatgtgctggactgcaatgacaatgaccccaaatttatgctgagtggctacaacttctcagtgatggagaacatgccagcactgagtccagtgggcatggtgactgtcattgatggagacaagggggagaatgcccaggtgcagctctcagtggagcaggacaacggtgactttgttatccagaatggcacaggcaccatcctatccagcctgagctttgatcgagagcaacaaagcacctacaccttccagctgaaggcagtggatggtggcgtcccacctcgctcagcttacgttggtgtcaccatcaatgtgctggacgagaatgacaacgcaccctatatcactgccccttctaacacctctcacaagctgctgaccccccagacacgtcttggtgagacggtcagccaggtggcagccgaggactttgactctggtgtcaatgctgagctgatctacagcattgcaggtggcaacccttatggactcttccagattgggtcacattcaggtgccatcaccctggagaaggagattgagcggcgccaccatgggctacaccgcctggtggtgaaggtcagtgaccgcggcaagcccccacgctatggcacagccttggtccatctttatgtcaatgagactctggccaaccgcacgctgctggagaccctcctgggccacagcctggacacgccgctggatattgacattgctggggatccagaatatgagcgctccaagcagcgtggcaacattctctttggtgtggtggctggtgtggtggccgtggccttgctcatcgccctggcggttcttgtgcgctactgcagacagcgggaggccaaaagtggttaccaggctggtaagaaggagaccaaggacctgtatgcccccaagcccagtggcaaggcctccaagggaaacaaaagcaaaggcaagaagagcaagtccccaaagcccgtgaagccagtggaggacgaggatgaggccgggctgcagaagtccctcaagttcaacctgatgagcgatgcccctggggacagtccccgcatccacctgcccctcaactacccaccaggcagccctgacctgggccgccactatcgctctaactccccactgccttccatccagctgcagccccagtcaccctcagcctccaagaagcaccaggtggtacaggacctgccacctgcaaacacattcgtgggcaccggggacaccacgtccacgggctctgagcagtactccgactacagctaccgcaccaacccccccaaataccccagcaagcaggtaggccagccctttcagctcagcacaccccagcccctaccccacccctaccacggagccatctggaccgaggtgtgggagtgatggagcaggtttactgtgcctgcccgtgttgggggccagcctgagccagcagtgggaggtggggccttagtgcctcaccgggcacacggattaggctgagtgaagattaagggagggtgtgctctgtggtctcctccctgccctctccccactggggagagacctgtgatttgccaagtccctggaccctggaccagctactgggccttatgggttgggggtggtaggcaggtgagcgtaagtggggagggaaatgggtaagaagtctactccaaacctaggtctctatgtcagaccagacctaggtgcttctctaggagggaaacagggagacctggggtcctgtggataactgagtggggagtctgccaggggagggcaccttcccattgtgccttctgtgtgtattgtgcattaacctcttcctcaccactaggcttctggggctgggtcccacatgcccttgaccctgacaataaagttctctat

SEQ ID NO: 449961 - DNA, 3895 bp, Homo sapiens
gccggagccggagcccgaactgcagctccagccccagccgtgcggagccgcagcccaggccggggccggcggcggctcatggacagcggggcgggcggccggcgctgcccggaggcggccctcctgattctggggcctcccaggatggagcccctgaggcacagcccaggccctggggggcaacggctactgctgccctccatgctgctagcactgctgctcctgctggctccatccccaggccacgccactcgggtagtgtacaaggtgccggaggaacagccacccaacaccctcattgggagcctcgcagccgactatggttttccagatgtggggcacctgtacaagctagaggtgggtgccccgtaccttcgcgtggatggcaagacaggtgacattttcaccaccgagacctccatcgaccgtgaggggctccgtgaatgccagaaccagctccctggtgatccctgcatcctggagtttgaggtatctatcacagacctcgtgcagaatggcagcccccggctgctagagggccagatagaagtacaagacatcaatgacaacacacccaacttcgcctcaccagtcatcactctggccatccctgagaacaccaacatcggctcactcttccccatcccgctggcttcagaccgtgatgctggtcccaacggtgtggcatcctatgagctgcaggctgggcctgaggcccaggagctatttgggctgcaggtggcagaggaccaggaggagaagcaaccacagctcattgtgatgggcaacctggaccgtgagcgctgggactcctatgacctcaccatcaaggtgcaggatggcggcagccccccacgcgccagcagtgccctgctgcgtgtcaccgtgcttgacaccaatgacaacgcccccaagtttgagcggccctcctatgaggccgaactatctgagaatagccccataggccactcggtcatccagagcctggtggactgggacctggaaaagagactgagaaagaaaagggagacagacagtcggggatagcaaataataatagcctaggtgccaggcaccgttctaaacacatgatgtgtattatatcatttaatccttacagtacaaggtgaaggccaatgactcagaccaaggtgccaatgcagaaatcgaatacacattccaccaggcgcccgaagttgtgaggcgtcttcttcgactggacaggaacactggacttatcactgttcagggcccggtggaccgtgaggacctaagcaccctgcgcttctcagtgcttgctaaggaccgaggcaccaaccccaagagtgcccgtgcccaggtggttgtgaccgtgaaggacatgaatgacaatgcccccaccattgagatccggggcatagggctagtgactcatcaagatgggatggctaacatctcagaggatgtggcagaggagacagctgtggccctggtgcaggtgtctgaccgagatgagggagagaatgcagctgtcacctgtgtggtggcaggtgatgtgcccttccagctgcgccaggccagtgagacaggcagtgacagcaagaagaagtatttcctgcagactaccaccccgctagactacgagaaggtcaaagactacaccattgagattgtggctgtggactctggcaaccccccactctccagcactaactccctcaaggtgcaggtggtggacgtcaatgacaacgcacctgtcttcactcagagtgtcactgaggtcgccttcccggaaaacaacaagcctggtgaagtgattgctgagatcactgccagtgatgctgactctggctctaatgctgagctggtttactctctggagcctgagccggctgctaagggcctcttcaccatctcacccgagactggagagatccaggtgaagacatctctggatcgggaacagcgggagagctatgagttgaaggtggtggcagctgaccggggcagtcctagcctccagggcacagccactgtccttgtcaatgtgctggactgcaatgacaatgaccccaaatttatgctgagtggctacaacttctcagtgatggagaacatgccagcactgagtccagtgggcatggtgactgtcattgatggagacaagggggagaatgcccaggtgcagctctcagtggagcaggacaacggtgactttgttatccagaatggcacaggcaccatcctatccagcctgagctttgatcgagagcaacaaagcacctacaccttccagctgaaggcagtggatggtggcgtcccacctcgctcagcttacgttggtgtcaccatcaatgtgctggacgagaatgacaacgcaccctatatcactgccccttctaacacctctcacaagctgctgaccccccagacacgtcttggtgagacggtcagccaggtggcagccgaggactttgactctggtgtcaatgctgagctgatctacagcattgcaggtggcaacccttatggactcttccagattgggtcacattcaggtgccatcaccctggagaaggagattgagcggcgccaccatgggctacaccgcctggtggtgaaggtcagtgaccgcggcaagcccccacgctatggcacagccttggtccatctttatgtcaatgagactctggccaaccgcacgctgctggagaccctcctgggccacagcctggacacgccgctggatattgacattgctggggatccagaatatgagcgctccaagcagcgtggcaacattctctttggtgtggtggctggtgtggtggccgtggccttgctcatcgccctggcggttcttgtgcgctactgcagacagcgggaggccaaaagtggttaccaggctggtaagaaggagaccaaggacctgtatgcccccaagcccagtggcaaggcctccaagggaaacaaaagcaaaggcaagaagagcaagtccccaaagcccgtgaagccagtggaggacgaggatgaggccgggctgcagaagtccctcaagttcaacctgatgagcgatgcccctggggacagtccccgcatccacctgcccctcaactacccaccaggcagccctgacctgggccgccactatcgctctaactccccactgccttccatccagctgcagccccagtcaccctcagcctccaagaagcaccaggtggtacaggacctgccacctgcaaacacattcgtgggcaccggggacaccacgtccacgggctctgagcagtactccgactacagctaccgcaccaacccccccaaataccccagcaagcaggtaggccagccctttcagctcagcacaccccagcccctaccccacccctaccacggagccatctggaccgaggtgtgggagtgatggagcaggtttactgtgcctgcccgtgttgggggccagcctgagccagcagtgggaggtggggccttagtgcctcaccgggcacacggattaggctgagtgaagattaagggagggtgtgctctgtggtctcctccctgccctctccccactggggagagacctgtgatttgccaagtccctggaccctggaccagctactgggccttatgggttgggggtggtaggcaggtgagcgtaagtggggagggaaatgggtaagaagtctactccaaacctaggtctctatgtcagaccagacctaggtgcttctctaggagggaaacagggagacctggggtcctgtggataactgagtggggagtctgccaggggagggcaccttcccattgtgccttctgtgtgtattgtgcattaacctcttcctcaccactaggcttctggggctgggtcccacatgcccttgaccctgacaataaagttctctat

SEQ ID NO: 449962 - DNA, 4382 bp, Homo sapiens
gccggagccggagcccgaactgcagctccagccccagccgtgcggagccgcagcccaggccggggccggcggcggctcatggacagcggggcgggcggccggcgctgcccggaggcggccctcctgattctggggcctcccaggatggagcccctgaggcacagcccaggccctggggggcaacggctactgctgccctccatgctgctagcactgctgctcctgctggctccatccccaggccacgccactcgggtagtgtacaaggtgccggaggaacagccacccaacaccctcattgggagcctcgcagccgactatggttttccagatgtggggcacctgtacaagctagaggtgggtgccccgtaccttcgcgtggatggcaagacaggtgacattttcaccaccgagacctccatcgaccgtgaggggctccgtgaatgccagaaccagctccctggtgatccctgcatcctggagtttgaggtatctatcacagacctcgtgcagaatggcagcccccggctgctagagggccagatagaagtacaagacatcaatgacaacacacccaacttcgcctcaccagtcatcactctggccatccctgagaacaccaacatcggctcactcttccccatcccgctggcttcagaccgtgatgctggtcccaacggtgtggcatcctatgagctgcaggctgggcctgaggcccaggagctatttgggctgcaggtggcagaggaccaggaggagaagcaaccacagctcattgtgatgggcaacctggaccgtgagcgctgggactcctatgacctcaccatcaaggtgcaggatggcggcagccccccacgcgccagcagtgccctgctgcgtgtcaccgtgcttgacaccaatgacaacgcccccaagtttgagcggccctcctatgaggccgaactatctgagaatagccccataggccactcggtcatccaggtgaaggccaatgactcagaccaaggtgccaatgcagaaatcgaatacacattccaccaggcgcccgaagttgtgaggcgtcttcttcgactggacaggaacactggacttatcactgttcagggcccggtggaccgtgaggacctaagcaccctgcgcttctcagtgcttgctaaggaccgaggcaccaaccccaagagtgcccgtgcccaggtggttgtgaccgtgaaggacatgaatgacaatgcccccaccattgagatccggggcatagggctagtgactcatcaagatgggatggctaacatctcagaggatgtggcagaggagacagctgtggccctggtgcaggtgtctgaccgagatgagggagagaatgcagctgtcacctgtgtggtggcaggtgatgtgcccttccagctgcgccaggccagtgagacaggcagtgacagcaagaagaagtatttcctgcagactaccaccccgctagactacgagaaggtcaaagactacaccattgagattgtggctgtggactctggcaaccccccactctccagcactaactccctcaaggtgcaggtggtggacgtcaatgacaacgcacctgtcttcactcagagtgtcactgaggtcgccttcccggaaaacaacaagcctggtgaagtgattgctgagatcactgccagtgatgctgactctggctctaatgctgagctggtttactctctggagcctgagccggctgctaagggcctcttcaccatctcacccgagactggagagatccaggtgaagacatctctggatcgggaacagcgggagagctatgagttgaaggtggtggcagctgaccggggcagtcctagcctccagggcacagccactgtccttgtcaatgtgctggactgcaatgacaatgaccccaaatttatgctgagtggctacaacttctcagtgatggagaacatgccagcactgagtccagtgggcatggtgactgtcattgatggagacaagggggagaatgcccaggtgcagctctcagtggagcaggacaacggtgactttgttatccagaatggcacaggcaccatcctatccagcctgagctttgatcgagagcaacaaagcacctacaccttccagctgaaggcagtggatggtggcgtcccacctcgctcagcttacgttggtgtcaccatcaatgtgctggacgagaatgacaacgcaccctatatcactgccccttctaacacctctcacaagctgctgaccccccagacacgtcttggtgagacggtcagccaggtggcagccgaggactttgactctggtgtcaatgctgagctgatctacagcattgcaggtggcaacccttatggactcttccagattgggtcacattcaggtgccatcaccctggagaaggagattgagcggcgccaccatgggctacaccgcctggtggtgaaggtcagtgaccgcggcaagcccccacgctatggcacagccttggtccatctttatgtcaatgagactctggccaaccgcacgctgctggagaccctcctgggccacagcctggacacgccgctggatattgacattgctggggatccagaatatgagcgctccaagcagcgtggcaacattctctttggtgtggtggctggtgtggtggccgtggccttgctcatcgccctggcggttcttgtgcgctactgcagacagcgggaggccaaaagtggttaccaggctggtaagaaggagaccaaggacctgtatgcccccaagcccagtggcaaggcctccaagggaaacaaaagcaaaggcaagaagagcaagtccccaaagcccgtgaagccagtggaggacgaggatgaggccgggctgcagaagtccctcaagttcaacctgatgagcgatgcccctggggacagtccccgcatccacctgcccctcaactacccaccaggcagccctgacctgggccgccactatcgctctaactccccactgccttccatccagctgcagccccagtcaccctcagcctccaagaagcaccaggtggtacaggacctgccacctgcaaacacattcgtgggcaccggggacaccacgtccacgggctctgagcagtactccgactacagctaccgcaccaacccccccaaataccccagcaagcagttacctcaccgccgcgtcaccttctcggccaccagccaggcccaggagctgcaggacccatcccagcacagttactatgacagtggcctggaggagtctgagacgccgtccagcaagtcatcctcagggcctcgactcggtcccctggccctgcctgaggatcactatgagcgcaccacccctgatggcagcataggagagatggagcaccccgagaatgaccttcgccctttgcctgatgtcgccatgacaggcacatgtacccgggagtgcagtgagtttggccactctgacacatgctggatgcctggccagtcatctcccagccgccggaccaagagcagcgccctcaaactctccaccttcatgccttaccaggaccgaggagggcaggagcctgcgggcgccggcagccccagccccccggaagaccggaacaccaaaacggcccccgtgcgcctcctgccctcctacagtgccttctcccacagtagccatgattcctgcaaggactcggccaccttggaggaaatccccctgacccagacctcggacttcccacccgcagccacaccggcatctgcccagacggccaagcgcgagatctacctgtgagccccctactggccggcccccctcccccagcgccggccagctcccaaatgcccattccagggcctcactctccaccccttcagcgtggacttcctgccagggcccaagtgggggtatcactgacctcatgaccacgctggcccttctcccatgcagggtccaggtcctctcccctcatttccatctcccagcccccaggggccccttcccctttatggggcttcccccagctgatgcccaagagggctcctctgcaatgactgggctccttcccttgacttccagggagcaccccctcgatttgggcagatggtggagtcaagggtgggcagcgtacttctaactcattgtttccctcatggccgaccagggcggggatagcatgcccaattttagccctgaagcagggctgaactggggagcccctttccctgggagctcccagaggaaactcttgaccaccagtggctccctgaagggcttttgttaccccctccggttcggttcgtttccggtttgtttgctgagctgtcaatgaaagacccgtgtaattattcccgagctttacaataaaagtgtgaaaaccggac

SEQ ID NO: 449963 - DNA, 2099 bp, Homo sapiens
gccggagccggagcccgaactgcagctccagccccagccgtgcggagccgcagcccaggccggggccggcggcggctcatggacagcggggcgggcggccggcgctgcccggaggcggccctcctgattctggggcctcccaggatggagcccctgaggcacagcccaggccctggggggcaacggctactgctgccctccatgctgctagcactgctgctcctgctggctccatccccaggccacgccactcgggtagtgtacaaggtgccggaggaacagccacccaacaccctcattgggagcctcgcagccgactatggttttccagatgtggggcacctgtacaagctagaggtgggtgccccgtaccttcgcgtggatggcaagacaggtgacattttcaccaccgagacctccatcgaccgtgaggggctccgtgaatgccagaaccagctccctggtgatccctgcatcctggagtttgaggtatctatcacagacctcgtgcagaatggcagcccccggctgctagagggccagatagaagtacaagacatcaatgacaacacacccaacttcgcctcaccagtcatcactctggccatccctgagaacaccaacatcggctcactcttccccatcccgctggcttcagaccgtgatgctggtcccaacggtgtggcatcctatgagctgcaggctgggcctgaggcccaggagctatttgggctgcaggtggcagaggaccaggaggagaagcaaccacagctcattgtgatgggcaacctggaccgtgagcgctgggactcctatgacctcaccatcaaggtgcaggatggcggcagccccccacgcgccagcagtgccctgctgcgtgtcaccgtgcttgacaccaatgacaacgcccccaagtttgagcggccctcctatgaggccgaactatctgagaatagccccataggccactcggtcatccaggtgaaggccaatgactcagaccaaggtgccaatgcagaaatcgaatacacattccaccaggcgcccgaagttgtgaggcgtcttcttcgactggacaggaacactggacttatcactgttcagggcccggtggaccgtgaggacctaagcaccctgcgcttctcagtgcttgctaaggaccgaggcaccaaccccaagagtgcccgtgcccaggtggttgtgaccgtgaaggacatgaatgacaatgcccccaccattgagatccggggcatagggctagtgactcatcaagatgggatggctaacatctcagaggatgtggcagaggagacagctgtggccctggtgcaggtgtctgaccgagatgagggagagaatgcagctgtcacctgtgtggtggcaggtgatgtgcccttccagctgcgccaggccagtgagacaggcagtgacagcaagaagaagtatttcctgcagactaccaccccgctagactacgagaaggtcaaagactacaccattgagattgtggctgtggactctggcaaccccccactctccagcactaactccctcaaggtgcaggtggtggacgtcaatgacaacgcacctgtcttcactcagagtgtcactgaggtcgccttcccggaaaacaacaagcctggtgaagtgattgctgagatcactgccagtgatgctgactctggctctaatgctgagctggtttactctctggagcctgagccggctgctaagggcctcttcaccatctcacccgagactggagagatccaggtgaagacatctctggatcgggaacagcgggagagctatgagttgaaggtggtggcagctgaccggggcagtcctagcctccagggcacagccactgtccttgtcaatgtgctggactgcaatgacaatgaccccaaatttatgctgagtggctacaacttctcagtgatggagaacatgccagcactgagtccagtgggcatggtgactaggactgccccggtcagactgccaccaccttcaactcatagctctcccgctgttcccgatccagagatgtcttacacctggatctctccagtctcgggtgagtcgctttccacata

SEQ ID NO: 449964 - DNA, 4917 bp, Homo sapiens
agattttaaaaggtttaattaaattgatagatgatagatccatcatgaaaggtaaatttaaggggtgggggacattctgaatgtttttaggacaatgtcagtaaagggcagtgctcacccaagagacatatattggtatcactgtcagaatatagggccggatgaactgttgtgcttgtgaattattgggttacattattgaattgtgacccatttaatgacgtgttctgcttagcgtctttaggccccacctaactcttccagctctctattcgacattctctttggattgttttgctataacttgaaatttgggatgtcacaaacgaaactgtcatctgtttccgccaaactgtggttctgctaatctcccaggctggcagcattggagacttgctgacttctttcatcccccactcttttcacctgaaattcctttccttggttttgctctaagtcctatgcttcagtcaggggccaaccaaatctcactgcctcctttttatcatgaagcctttgatcactgatagttctttttatatcttgaaaaatcacccttcccagtacagttaatatttagtatctctactcatcttggcacttactcacagctccataattcagtgtttctcgtacctcttcatggtgatggggagccctttggaggtggtgactgtgctttatactcctcatgatgcttcacatgtggcaggcgtggagtgcccggaggcggccctcctgattctggggcctcccaggatggagcccctgaggcacagcccaggccctggggggcaacggctactgctgccctccatgctgctagcactgctgctcctgctggctccatccccaggccacgccactcgggtagtgtacaaggtgccggaggaacagccacccaacaccctcattgggagcctcgcagccgactatggttttccagatgtggggcacctgtacaagctagaggtgggtgccccgtaccttcgcgtggatggcaagacaggtgacattttcaccaccgagacctccatcgaccgtgaggggctccgtgaatgccagaaccagctccctggtgatccctgcatcctggagtttgaggtatctatcacagacctcgtgcagaatggcagcccccggctgctagagggccagatagaagtacaagacatcaatgacaacacacccaacttcgcctcaccagtcatcactctggccatccctgagaacaccaacatcggctcactcttccccatcccgctggcttcagaccgtgatgctggtcccaacggtgtggcatcctatgagctgcaggtggcagaggaccaggaggagaagcaaccacagctcattgtgatgggcaacctggaccgtgagcgctgggactcctatgacctcaccatcaaggtgcaggatggcggcagccccccacgcgccagcagtgccctgctgcgtgtcaccgtgcttgacaccaatgacaacgcccccaagtttgagcggccctcctatgaggccgaactatctgagaatagccccataggccactcggtcatccaggtgaaggccaatgactcagaccaaggtgccaatgcagaaatcgaatacacattccaccaggcgcccgaagttgtgaggcgtcttcttcgactggacaggaacactggacttatcactgttcagggcccggtggaccgtgaggacctaagcaccctgcgcttctcagtgcttgctaaggaccgaggcaccaaccccaagagtgcccgtgcccaggtggttgtgaccgtgaaggacatgaatgacaatgcccccaccattgagatccggggcatagggctagtgactcatcaagatgggatggctaacatctcagaggatgtggcagaggagacagctgtggccctggtgcaggtgtctgaccgagatgagggagagaatgcagctgtcacctgtgtggtggcaggtgatgtgcccttccagctgcgccaggccagtgagacaggcagtgacagcaagaagaagtatttcctgcagactaccaccccgctagactacgagaaggtcaaagactacaccattgagattgtggctgtggactctggcaaccccccactctccagcactaactccctcaaggtgcaggtggtggacgtcaatgacaacgcacctgtcttcactcagagtgtcactgaggtcgccttcccggaaaacaacaagcctggtgaagtgattgctgagatcactgccagtgatgctgactctggctctaatgctgagctggtttactctctggagcctgagccggctgctaagggcctcttcaccatctcacccgagactggagagatccaggtgaagacatctctggatcgggaacagcgggagagctatgagttgaaggtggtggcagctgaccggggcagtcctagcctccagggcacagccactgtccttgtcaatgtgctggactgcaatgacaatgaccccaaatttatgctgagtggctacaacttctcagtgatggagaacatgccagcactgagtccagtgggcatggtgactgtcattgatggagacaagggggagaatgcccaggtgcagctctcagtggagcaggacaacggtgactttgttatccagaatggcacaggcaccatcctatccagcctgagctttgatcgagagcaacaaagcacctacaccttccagctgaaggcagtggatggtggcgtcccacctcgctcagcttacgttggtgtcaccatcaatgtgctggacgagaatgacaacgcaccctatatcactgccccttctaacacctctcacaagctgctgaccccccagacacgtcttggtgagacggtcagccaggtggcagccgaggactttgactctggtgtcaatgctgagctgatctacagcattgcaggtggcaacccttatggactcttccagattgggtcacattcaggtgccatcaccctggagaaggagattgagcggcgccaccatgggctacaccgcctggtggtgaaggtcagtgaccgcggcaagcccccacgctatggcacagccttggtccatctttatgtcaatgagactctggccaaccgcacgctgctggagaccctcctgggccacagcctggacacgccgctggatattgacattgctggggatccagaatatgagcgctccaagcagcgtggcaacattctctttggtgtggtggctggtgtggtggccgtggccttgctcatcgccctggcggttcttgtgcgctactgcagacagcgggaggccaaaagtggttaccaggctggtaagaaggagaccaaggacctgtatgcccccaagcccagtggcaaggcctccaagggaaacaaaagcaaaggcaagaagagcaagtccccaaagcccgtgaagccagtggaggacgaggatgaggccgggctgcagaagtccctcaagttcaacctgatgagcgatgcccctggggacagtccccgcatccacctgcccctcaactacccaccaggcagccctgacctgggccgccactatcgctctaactccccactgccttccatccagctgcagccccagtcaccctcagcctccaagaagcaccaggtggtacaggacctgccacctgcaaacacattcgtgggcaccggggacaccacgtccacgggctctgagcagtactccgactacagctaccgcaccaacccccccaaataccccagcaagcagttacctcaccgccgcgtcaccttctcggccaccagccaggcccaggagctgcaggacccatcccagcacagttactatgacagtggcctggaggagtctgagacgccgtccagcaagtcatcctcagggcctcgactcggtcccctggccctgcctgaggatcactatgagcgcaccacccctgatggcagcataggagagatggagcaccccgagaatgaccttcgccctttgcctgatgtcgccatgacaggcacatgtacccgggagtgcagtgagtttggccactctgacacatgctggatgcctggccagtcatctcccagccgccggaccaagagcagcgccctcaaactctccaccttcatgccttaccaggaccgaggagggcaggagcctgcgggcgccggcagccccagccccccggaagaccggaacaccaaaacggcccccgtgcgcctcctgccctcctacagtgccttctcccacagtagccatgattcctgcaaggactcggccaccttggaggaaatccccctgacccagacctcggacttcccacccgcagccacaccggcatctgcccagacggccaagcgcgagatctacctgtgagccccctactggccggcccccctcccccagcgccggccagctcccaaatgcccattccagggcctcactctccaccccttcagcgtggacttcctgccagggcccaagtgggggtatcactgacctcatgaccacgctggcccttctcccatgcagggtccaggtcctctcccctcatttccatctcccagcccccaggggccccttcccctttatggggcttcccccagctgatgcccaagagggctcctctgcaatgactgggctccttcccttgacttccagggagcaccccctcgatttgggcagatggtggagtcaagggtgggcagcgtacttctaactcattgtttccctcatggccgaccagggcggggatagcatgcccaattttagccctgaagcagggctgaactggggagcccctttccctgggagctcccagaggaaactcttgaccaccagtggctccctgaagggcttttgttaccaaaggtggggtagggacgggggtgggagtggagcggaggccttgttttcccgtgg

SEQ ID NO: 449965 - DNA, 3771 bp, Homo sapiens
  misc_feature (3752)..(3753): n is a, c, g, or t
  misc_feature (3762)..(3762): n is a, c, g, or t
  misc_feature (3765)..(3765): n is a, c, g, or t
gccggagccggagcccgaactgcagctccagccccagccgtgcggagccgcagcccaggccggggccggcggcggctcatggacagcggggcgggcggccggcgctgcccggaggcggccctcctgattctggggcctcccaggatggagcccctgaggcacagcccaggccctggggggcaacggctactgctgccctccatgctgctagcactgctgctcctgctggctccatccccaggccacgccactcgggtagtgtacaaggtgccggaggaacagccacccaacaccctcattgggagcctcgcagccgactatggttttccagatgtggggcacctgtacaagctagaggtgggtgccccgtaccttcgcgtggatggcaagacaggtgacattttcaccaccgagacctccatcgaccgtgaggggctccgtgaatgccagaaccagctccctggtgatccctgcatcctggagtttgaggtatctatcacagacctcgtgcagaatggcagcccccggctgctagagggccagatagaagtacaagacatcaatgacaacacacccaacttcgcctcaccagtcatcactctggccatccctgagaacaccaacatcggctcactcttccccatcccgctggcttcagaccgtgatgctggtcccaacggtgtggcatcctatgagctgcaggctgggcctgaggcccaggagctatttgggctgcaggtggcagaggaccaggaggagaagcaaccacagctcattgtgatgggcaacctggaccgtgagcgctgggactcctatgacctcaccatcaaggtgcaggatggcggcagccccccacgcgccagcagtgccctgctgcgtgtcaccgtgcttgacaccaatgacaacgcccccaagtttgagcggccctcctatgaggccgaactatctgagaatagccccataggccactcggtcatccaggtgaaggccaatgactcagaccaaggtgccaatgcagaaatcgaatacacattccaccaggcgcccgaagttgtgaggcgtcttcttcgactggacaggaacactggacttatcactgttcagggcccggtggaccgtgaggacctaagcaccctgcgcttctcagtgcttgctaaggaccgaggcaccaaccccaagagtgcccgtgcccaggtggttgtgaccgtgaaggacatgaatgacaatgcccccaccattgagatccggggcatagggctagtgactcatcaagatgggatggctaacatctcagaggatgtggcagaggagacagctgtggccctggtgcaggtgtctgaccgagatgagggagagaatgcagctgtcacctgtgtggtggcaggtgatgtgcccttccagctgcgccaggccagtgagacaggcagtgacagcaagaagaagtatttcctgcagactaccaccccgctagactacgagaaggtcaaagactacaccattgagattgtggctgtggactctggcaaccccccactctccagcactaactccctcaaggtgcaggtggtggacgtcaatgacaacgcacctgtcttcactcagagtgtcactgaggtcgccttcccggaaaacaacaagcctggtgaagtgattgctgagatcactgccagtgatgctgactctggctctaatgctgagctggtttactctctggagcctgagccggctgctaagggcctcttcaccatctcacccgagactggagagatccaggtgaagacatctctggatcgggaacagcgggagagctatgagttgaaggtggtggcagctgaccggggcagtcctagcctccagggcacagccactgtccttgtcaatgtgctggactgcaatgacaatgaccccaaatttatgctgagtggctacaacttctcagtgatggagaacatgccagcactgagtccagtgggcatggtgactgtcattgatggagacaagggggagaatgcccaggtgcagctctcagtggagcaggacaacggtgactttgttatccagaatggcacaggcaccatcctatccagcctgagctttgatcgagagcaacaaagcacctacaccttccagctgaaggcagtggatggtggcgtcccacctcgctcagcttacgttggtgtcaccatcaatgtgctggacgagaatgacaacgcaccctatatcactgccccttctaacacctctcacaagctgctgaccccccagacacgtcttggtgagacggtcagccaggtggcagccgaggactttgactctggtgtcaatgctgagctgatctacagcattgcaggtggcaacccttatggactcttccagattgggtcacattcaggtgccatcaccctggagaaggagattgagcggcgccaccatgggctacaccgcctggtggtgaaggtcagtgaccgcggcaagcccccacgctatggcacagccttggtccatctttatgtcaatgagactctggccaaccgcacgctgctggagaccctcctgggccacagcctggacacgccgctggatattgacattgctggggatccagaatatgagcgctccaagcagcgtggcaacattctctttggtgtggtggctggtgtggtggccgtggccttgctcatcgccctggcggttcttgtgcgctactgcagacagcgggaggccaaaagtggttaccaggctggtaagaaggagaccaaggacctgtatgcccccaagcccagtggcaaggcctccaagggaaacaaaagcaaaggcaagaagagcaagtccccaaagcccgtgaagccagtggaggacgaggatgaggccgggctgcagaagtccctcaagttcaacctgatgagcgatgcccctggggacagtccccgcatccacctgcccctcaactacccaccaggcagccctgacctgggccgccactatcgctctaactccccactgccttccatccagctgcagccccagtcaccctcagcctccaagaagcaccaggtggtacaggacctgccacctgcaaacacattcgtgggcaccggggacaccacgtccacgggctctgagcagtactccgactacagctaccgcaccaacccccccaaataccccagcaagcaggtaggccagccctttcagctcagcacaccccagcccctaccccacccctaccacggagccatctggaccgaggtgtgggagtgatggagcaggtttactgtgcctgcccgtgttgggggccagcctgagccagcagtgggaggtggggccttagtgcctcaccgggcacacggattaggctgagtgaagattaagggagggtgtgctctgtggtctcctccctgccctctccccactggggagagacctgtgatttgccaagtccctggaccctggaccagctactgggccttatgggttgggggtggtaggcaggtgagcgtaagtggggagggaaatgggtaagaagtctactccaaacctaggtctctatgtcagaccagacctaggtgcttctctaggagggaaacagggagacctggggtcctgtggataactgagtggggagtctgccaggggagggcaccttcccattgtgccttctgtgtgtattgtgcattaacctcttcctcaccactaggcttctggggctgggtcccacatgcccttgaccctgacaataaagttctctatanngagaccaanaanaacaac

SEQ ID NO: 449966 - DNA, 1048 bp, Homo sapiens
  misc_feature (102)..(102): n is a, c, g, or t
  misc_feature (253)..(253): n is a, c, g, or t
tctcagactccacacatccccgccaaaccccagtcctgggtcttctgcattctggggacatggggacaccacgctggtcggtagggtcccaggctcttctcnatctctctcgggcccctcctctcctgctgccgctgccgcggtgagactccgaggcctgtaggaagcttcaggtgcctgagcctccagtacagcccttcccctactccacccaagcctccaggccacccctgttcctactgcagccaaatcnccaggcagccctgacctgggccgccactatcgctctaactccccactgccttccatccagctgcagccccagtcaccctcagcctccaagaagcaccaggtggtacaggacctgccacctgcaaacacattcgtgggcaccggggacaccacgtccacgggctctgagcagtactccgactacagctaccgcaccaacccccccaaataccccagcaagcaggtaggccagccctttcagctcagcacaccccagcccctaccccacccctaccacggagccatctggaccgaggtgtgggagtgatggagcaggtttactgtgcctgcccgtgttgggggccagcctgagccagcagtgggaggtggggccttagtgcctcaccgggcacacggattaggctgagtgaagattaagggagggtgtgctctgtggtctcctccctgccctctccccactggggagagacctgtgatttgccaagtccctggaccctggaccagctactgggccttatgggttgggggtggtaggcaggtgagcgtaagtggggagggaaatgggtaagaagtctactccaaacctaggtctctatgtcagaccagacctaggtgcttctctaggagggaaacagggagacctggggtcctgtggataactgagtggggagtctgccaggggagggcaccttcccattgtgccttctgtgtgtattgtgcattaacctcttcctcaccactaggcttctggggctgggtcccacatgcccttgaccctgacaataaagttctctat

SEQ ID NO: 449967 - DNA, 2481 bp, Homo sapiens
cagggagagcgtgcccgggcacgacagcctggtgcacagccgagaaaacaacagcgcgtgcgcgtagcgacctctttgcgcctgcgccccccttgccagtctttcgccggcaaaaggaggacgtagaaaaggggacaccggaaactcactcttcacccggaaatggttattgaggaacatggcgttgctggtgcgagtccttacggagttttgctcttgttgcgcaagctggagtgcaatggcgtgatcttggctcactgcaacctctgcctcccgggttcaagcgattctcctgcctcagcctcctgagtagctgggattacagaggaaccagactagcatttctcagtgggttccagtatgcagccgattgatacctgtgtctcctacccaaggacagggggacagggctctgtctcgcacttcccagtggccccagatgagccagtcccaagcatgtggtggatcagaacagattcctggaatagacatacagctgaataggaagtatcacaccacacgtaagctttctactaccaaagattccccacagcctgttgaggagaaggttggtgctttcacaaagataatagaagccatgggattcacgggacctttgaaatacagtaaatggggtgtcagatgcctgatacattcaattcatggtttcttataaccctactccacgtctggatgtgtctagtccgaatgaagcaggaaggccggagtgggaagtacatgtgtcgtatcatagttcattttatgtgggaggatgttcagcagcgcggcagagtcatgggggttaatccctatatcctgaagaagaacatgatcctcatgacaaatcatttctatgcagcgatcttgggatatgatgaggggatcctttcagatgatcatgggctggccgctgccctctggagaaccttcttcaaccggaaatgtgaagaccctcgacatcttgaattgctggtagagtatgtgaggaaacagatacagtacctggactccatgaacggggaggatctgcttctgacaggggaggtgagctggcgccctctagtggagaagaatcctcagagcatcctgaagccccattctccgacttacaacgacgagggactttgatgggctgggccctccgcacggcccgccagctggcttcgaggaacctccaggagagaagtgcctgttggtccaggaccctgcagaaagtggcctgaactgacctctgaacagcatctgtcaaatacctggccccatttgtgttgagtttcctcttagtgtgcccaggagtctgatctgctggggtacagggctgggagaacccctagctctcccggggtgtcctctcccttaggggaagccccgagtgagagtcccccagcacacactccccaaccccctccagcaactacatgtgactgatagcttttcccaaaggccaaggaagggatggtgtaggttcaaaagggaaaccccccagggcctgctgtggcctaggagcagattgtaatgctgccgagtccggtcggtgaccacgcgttgtccctcggctttcagccatggggttgagttggccattaaaagaaacagagacttctctctgccatggcccttctttattccagggacttagaaacttgcctgagatggtggacgcagtaatgagggcaccgcgcagctcagttagagacggagaaagggaagaggctgggatggtctctgctgctcttgcctctagttcatggagatgtgtctctgttcaggccaagatacagccagccaggcctgtcgtctgggacccaggaggcctctgatgaccaagggctttcacatcctaagtcatttggaaggaggccttgagaacaaagtcacctttgtcactcccagtgaactgaatgaggaacatgctgtctcctgtcttggcctcccctttcatgagatactggggagaagagaacattcctcctggcttagttgtagcagacccagacctgtgcccagctttggtcccccttcccaacttctgaagcacgtgctgcagagccaccttggtctgagcacctgaggaccagcccctcctccctcagtgcgggtcatctcttgggggattttcttaaagtgaagaaagggggtggggaaccatattgcccctccctcccccatcaaacttccttcatttaacttgctataaaatgagtcatataaagaaactctatatgggtgaggtatatcccacttctgtgaaaacattacaaatcaaaccgcttctctcagtttatttaagatgcttttgttgcgagcggagctctagagtgaagcctcctgtgtgtgtgtgagataataacaccttgtaactcattacagctgggcactatttacataaaccagagctgagccaggcaggaatttgctgattaatttatttttaatggagtgaagtataccatgcaccaaaataaactttactgtgtgtac

SEQ ID NO: 449968 - DNA, 2353 bp, Homo sapiens
cagggagagcgtgcccgggcacgacagcctggtgcacagccgagaaaacaacagcgcgtgcgcgtagcgacctctttgcgcctgcgccccccttgccagtctttcgccggcaaaaggaggacgtagaaaaggggacaccggaaactcactcttcacccggaaatggttattgaggaacatggcgttgctggtgcgagtccttaggaaccagactagcatttctcagtgggttccagtatgcagccgattgatacctgtgtctcctacccaaggacagggggacagggctctgtctcgcacttcccagtggccccagatgagccagtcccaagcatgtggtggatcagaacagattcctggaatagacatacagctgaataggaagtatcacaccacacgtaagctttctactaccaaagattccccacagcctgttgaggagaaggttggtgctttcacaaagataatagaagccatgggattcacgggacctttgaaatacagtaaatggaagattaagattgcggccctgcgcatgtatactagctgtgtggagaaaactgacttcgaggaattctttctaaggtgtcagatgcctgatacattcaattcatggtttcttataaccctactccacgtctggatgtgtctagtccgaatgaagcaggaaggccggagtgggaagtacatgtgtcgtatcatagttcattttatgtgggaggatgttcagcagcgcggcagagtcatgggggggatcctttcagatgatcatgggctggccgctgccctctggagaaccttcttcaaccggaaatgtgaagaccctcgacatcttgaattgctggtagagtatgtgaggaaacagatacagtacctggactccatgaacggggaggatctgcttctgacaggggaggtgagctggcgccctctagtggagaagaatcctcagagcatcctgaagccccattctccgacttacaacgacgagggactttgatgggctgggccctccgcacggcccgccagctggcttcgaggaacctccaggagagaagtgcctgttggtccaggaccctgcagaaagtggcctgaactgacctctgaacagcatctgtcaaatacctggccccatttgtgttgagtttcctcttagtgtgcccaggagtctgatctgctggggtacagggctgggagaacccctagctctcccggggtgtcctctcccttaggggaagccccgagtgagagtcccccagcacacactccccaaccccctccagcaactacatgtgactgatagcttttcccaaaggccaaggaagggatggtgtaggttcaaaagggaaaccccccagggcctgctgtggcctaggagcagattgtaatgctgccgagtccggtcggtgaccacgcgttgtccctcggctttcagccatggggttgagttggccattaaaagaaacagagacttctctctgccatggcccttctttattccagggacttagaaacttgcctgagatggtggacgcagtaatgagggcaccgcgcagctcagttagagacggagaaagggaagaggctgggatggtctctgctgctcttgcctctagttcatggagatgtgtctctgttcaggccaagatacagccagccaggcctgtcgtctgggacccaggaggcctctgatgaccaagggctttcacatcctaagtcatttggaaggaggccttgagaacaaagtcacctttgtcactcccagtgaactgaatgaggaacatgctgtctcctgtcttggcctcccctttcatgagatactggggagaagagaacattcctcctggcttagttgtagcagacccagacctgtgcccagctttggtcccccttcccaacttctgaagcacgtgctgcagagccaccttggtctgagcacctgaggaccagcccctcctccctcagtgcgggtcatctcttgggggattttcttaaagtgaagaaagggggtggggaaccatattgcccctccctcccccatcaaacttccttcatttaacttgctataaaatgagtcatataaagaaactctatatgggtgaggtatatcccacttctgtgaaaacattacaaatcaaaccgcttctctcagtttatttaagatgcttttgttgcgagcggagctctagagtgaagcctcctgtgtgtgtgtgagataataacaccttgtaactcattacagctgggcactatttacataaaccagagctgagccaggcaggaatttgctgattaatttatttttaatggagtgaagtataccatgcaccaaaataaactttactgtgtgtac

SEQ ID NO: 449969 - DNA, 2232 bp, Homo sapiens
gattcttggaagggggaatgacctaaagcctaagatgaagtctcctggccctgcagcagtggcttctctggatgatgaccattttaatggcagagctgtctgcccctactgtcctagagaggtgatactggggcccactgaccaggggcccactagaggacaacagaggcatacatatgtttaaagcgtgagtgcctagcactgcatatatgcatattgttgaatctcttcatgtgtcctgtgaggtacctgtttctatcccctctctcaagacaagggaacttaaatctcagagaggggaagctgccaccctgggtagcagcactgggaagggacagaatcaggactctcacccagcagtgctggggtggacagcatggctgtgtgcgctgcaagccctgacttcctggcctgcaggagctgtctagggagggcgtgtaggggagacgtgtccttgggaggtgtgtgtctgtctccattcagaggtgtgatagggaattccctaactgcccccgccacccagctccccagtgactgctttctctgaaccaccttagtgaaattatctaggagatcagagacggcttggcctgggacggcttggtctgggacctgggatggtcagaagcccccctcatgccccgtccccttccttcctctcctctgggaggctggttcctgacgctggctcctcacctctgccctgcctctgtcgcttcctccttccccctcccctggttgcagatacagtacctggactccatgaacggggaggatctgcttctgacaggggaggtgagctggcgccctctagtggagaagaatcctcagagcatcctgaagccccattctccgacttacaacgacgagggactttgatgggctgggccctccgcacggcccgccagctggcttcgaggaacctccaggagagaagtgcctgttggtccaggaccctgcagaaagtggcctgaactgacctctgaacagcatctgtcaaatacctggccccatttgtgttgagtttcctcttagtgtgcccaggagtctgatctgctggggtacagggctgggagaacccctagctctcccggggtgtcctctcccttaggggaagccccgagtgagagtcccccagcacacactccccaaccccctccagcaactacatgtgactgatagcttttcccaaaggccaaggaagggatggtgtaggttcaaaagggaaaccccccagggcctgctgtggcctaggagcagattgtaatgctgccgagtccggtcggtgaccacgcgttgtccctcggctttcagccatggggttgagttggccattaaaagaaacagagacttctctctgccatggcccttctttattccagggacttagaaacttgcctgagatggtggacgcagtaatgagggcaccgcgcagctcagttagagacggagaaagggaagaggctgggatggtctctgctgctcttgcctctagttcatggagatgtgtctctgttcaggccaagatacagccagccaggcctgtcgtctgggacccaggaggcctctgatgaccaagggctttcacatcctaagtcatttggaaggaggccttgagaacaaagtcacctttgtcactcccagtgaactgaatgaggaacatgctgtctcctgtcttggcctcccctttcatgagatactggggagaagagaacattcctcctggcttagttgtagcagacccagacctgtgcccagctttggtcccccttcccaacttctgaagcacgtgctgcagagccaccttggtctgagcacctgaggaccagcccctcctccctcagtgcgggtcatctcttgggggattttcttaaagtgaagaaagggggtggggaaccatattgcccctccctcccccatcaaacttccttcatttaacttgctataaaatgagtcatataaagaaactctatatgggtgaggtatatcccacttctgtgaaaacattacaaatcaaaccgcttctctcagtttatttaagatgcttttgttgcgagcggagctctagagtgaagcctcctgtgtgtgtgtgagataataacaccttgtaactcattacagctgggcactatttacataaaccagagctgagccaggcaggaatttgctgattaatttatttttaatggagtgaagtataccatgcaccaaaataaactttactgtgtgtac

SEQ ID NO: 449970 - DNA, 2515 bp, Homo sapiens
cagggagagcgtgcccgggcacgacagcctggtgcacagccgagaaaacaacagcgcgtgcgcgtagcgacctctttgcgcctgcgccccccttgccagtctttcgccggcaaaaggaggacgtagaaaaggggacaccggaaactcactcttcacccggaaatggttattgaggaacatggcgttgctggtgcgagtccttaggaaccagactagcatttctcagtgggttccagtatgcagccgattgatacctgtgtctcctacccaaggacagggggacagggctctgtctcgcacttcccagtggccccagatgagccagtcccaagcatgtggtggatcagaacagattcctggaatagacatacagctgaataggaagtatcacaccacacgtaagctttctactaccaaagattccccacagcctgttgaggagaaggttggtgctttcacaaagataatagaagccatgggattcacgggacctttgaaatacagtaaatggaagattaagattgcggccctgcgcatgtatactagctgtgtggagaaaactgacttcgaggaattctttctaaggtgtcagatgcctgatacattcaattcatggtttcttataaccctactccacgtctggatgtgtctagtccgaatgaagcaggaaggccggagtgggaagtacatgtgtcgtatcatagttcattttatgtgggaggatgttcagcagcgcggcagagtcatgggggttaatccctatatcctgaagaagaacatgatcctcatgacaaatcatttctatgcagcgatcttgggatatgatgaggggatcctttcagatgatcatgggctggccgctgccctctggagaaccttcttcaaccggaaatgtgaagaccctcgacatcttgaattgctggtagagtatgtgaggaaacagatacagtacctggactccatgaacggggaggatctgcttctgacaggggaggtgagctggcgccctctagtggagaagaatcctcagagcatcctgaagccccattctccgacttacaacgacgagggactttgatgggctgggccctccgcacggcccgccagctggcttcgaggaacctccaggagagaagtgcctgttggtccaggaccctgcagaaagtggcctgaactgacctctgaacagcatctgtcaaatacctggccccatttgtgttgagtttcctcttagtgtgcccaggagtctgatctgctggggtacagggctgggagaacccctagctctcccggggtgtcctctcccttaggggaagccccgagtgagagtcccccagcacacactccccaaccccctccagcaactacatgtgactgatagcttttcccaaaggccaaggaagggatggtgtaggttcaaaagggaaaccccccagggcctgctgtggcctaggagcagattgtaatgctgccgagtccggtcggtgaccacgcgttgtccctcggctttcagccatggggttgagttggccattaaaagaaacagagacttctctctgccatggcccttctttattccagggacttagaaacttgcctgagatggtggacgcagtaatgagggcaccgcgcagctcagttagagacggagaaagggaagaggctgggatggtctctgctgctcttgcctctagttcatggagatgtgtctctgttcaggccaagatacagccagccaggcctgtcgtctgggacccaggaggcctctgatgaccaagggctttcacatcctaagtcatttggaaggaggccttgagaacaaagtcacctttgtcactcccagtgaactgaatgaggaacatgctgtctcctgtcttggcctcccctttcatgagatactggggagaagagaacattcctcctggcttagttgtagcagacccagacctgtgcccagctttggtcccccttcccaacttctgaagcacgtgctgcagagccaccttggtctgagcacctgaggaccagcccctcctccctcagtgcgggtcatctcttgggggattttcttaaagtgaagaaagggggtggggaaccatattgcccctccctcccccatcaaacttccttcatttaacttgctataaaatgagtcatataaagaaactctatatgggtgaggtatatcccacttctgtgaaaacattacaaatcaaaccgcttctctcagtttatttaagatgcttttgttgcgagcggagctctagagtgaagcctcctgtgtgtgtgtgagataataacaccttgtaactcattacagctgggcactatttacataaaccagagctgagccaggcaggaatttgctgattaatttatttttaatggagtgaagtataccatgcaccaaaataaactttactgtgtgtactaaaaacacacaacaaaacctaaacggcaaggagacaaaacaacaaaacaagggggggggaaaaattctcgggggagattacaa

SEQ ID NO: 449971 - DNA, 2330 bp, Homo sapiens
atttcctctattttacagataagaaaactgaaccacagagaggtattcctggccaggtgccgtggctcacacctgtaatcccagcacattgggaggctgagaggaaccagactagcatttctcagtgggttccagtatgcagccgattgatacctgtgtctcctacccaaggacagggggacagggctctgtctcgcacttcccagtggccccagatgagccagtcccaagcatgtggtggatcagaacagattcctggaatagacatacagctgaataggaagtatcacaccacacgtaagctttctactaccaaagattccccacagcctgttgaggagaaggttggtgctttcacaaagataatagaagccatgggattcacgggacctttgaaatacagtaaatggaagattaagattgcggccctgcgcatgtatactagctgtgtggagaaaactgacttcgaggaattctttctaaggtgtcagatgcctgatacattcaattcatggtttcttataaccctactccacgtctggatgtgtctagtccgaatgaagcaggaaggccggagtgggaagtacatgtgtcgtatcatagttcattttatgtgggaggatgttcagcagcgcggcagagtcatgggggttaatccctatatcctgaagaagaacatgatcctcatgacaaatcatttctatgcagcgatcttgggatatgatgaggggatcctttcagatgatcatgggctggccgctgccctctggagaaccttcttcaaccggaaatgtgaagaccctcgacatcttgaattgctggtagagtatgtgaggaaacagatacagtacctggactccatgaacggggaggatctgcttctgacaggggaggtgagctggcgccctctagtggagaagaatcctcagagcatcctgaagccccattctccgacttacaacgacgagggactttgatgggctgggccctccgcacggcccgccagctggcttcgaggaacctccaggagagaagtgcctgttggtccaggaccctgcagaaagtggcctgaactgacctctgaacagcatctgtcaaatacctggccccatttgtgttgagtttcctcttagtgtgcccaggagtctgatctgctggggtacagggctgggagaacccctagctctcccggggtgtcctctcccttaggggaagccccgagtgagagtcccccagcacacactccccaaccccctccagcaactacatgtgactgatagcttttcccaaaggccaaggaagggatggtgtaggttcaaaagggaaaccccccagggcctgctgtggcctaggagcagattgtaatgctgccgagtccggtcggtgaccacgcgttgtccctcggctttcagccatggggttgagttggccattaaaagaaacagagacttctctctgccatggcccttctttattccagggacttagaaacttgcctgagatggtggacgcagtaatgagggcaccgcgcagctcagttagagacggagaaagggaagaggctgggatggtctctgctgctcttgcctctagttcatggagatgtgtctctgttcaggccaagatacagccagccaggcctgtcgtctgggacccaggaggcctctgatgaccaagggctttcacatcctaagtcatttggaaggaggccttgagaacaaagtcacctttgtcactcccagtgaactgaatgaggaacatgctgtctcctgtcttggcctcccctttcatgagatactggggagaagagaacattcctcctggcttagttgtagcagacccagacctgtgcccagctttggtcccccttcccaacttctgaagcacgtgctgcagagccaccttggtctgagcacctgaggaccagcccctcctccctcagtgcgggtcatctcttgggggattttcttaaagtgaagaaagggggtggggaaccatattgcccctccctcccccatcaaacttccttcatttaacttgctataaaatgagtcatataaagaaactctatatgggtgaggtatatcccacttctgtgaaaacattacaaatcaaaccgcttctctcagtttatttaagatgcttttgttgcgagcggagctctagagtgaagcctcctgtgtgtgtgtgagataataacaccttgtaactcattacagctgggcactatttacataaaccagagctgagccaggcaggaatttgctgattaatttatttttaatggagtgaagtataccatgcaccaaaataaactttactgtgtgtac

SEQ ID NO: 449972 - DNA, 2473 bp, Homo sapiens
cagggagagcgtgcccgggcacgacagcctggtgcacagccgagaaaacaacagcgcgtgcgcgtagcgacctctttgcgcctgcgccccccttgccagtctttcgccggcaaaaggaggacgtagaaaaggggacaccggaaactcactcttcacccggaaatggttattgaggaacatggcgttgctggtgcgagtccttaggaaccagactagcatttctcagtgggttccagtatgcagccgattgatacctgtgtctcctacccaaggacagggggacagggctctgtctcgcacttcccaggtcccctggttggaaacttctgcttcagaatggcatcctcagtggccccagatgagccagtcccaagcatgtggtggatcagaacagattcctggaatagacatacagctgaataggaagtatcacaccacacgtaagctttctactaccaaagattccccacagcctgttgaggagaaggttggtgctttcacaaagataatagaagccatgggattcacgggacctttgaaatacagtaaatggaagattaagattgcggccctgcgcatgtatactagctgtgtggagaaaactgacttcgaggaattctttctaaggtgtcagatgcctgatacattcaattcatggtttcttataaccctactccacgtctggatgtgtctagtccgaatgaagcaggaaggccggagtgggaagtacatgtgtcgtatcatagttcattttatgtgggaggatgttcagcagcgcggcagagtcatgggggttaatccctatatcctgaagaagaacatgatcctcatgacaaatcatttctatgcagcgatcttgggatatgatgaggggatcctttcagatgatcatgggctggccgctgccctctggagaaccttcttcaaccggaaatgtgaagaccctcgacatcttgaattgctggtagagtatgtgaggaaacagatacagtacctggactccatgaacggggaggatctgcttctgacaggggaggtgagctggcgccctctagtggagaagaatcctcagagcatcctgaagccccattctccgacttacaacgacgagggactttgatgggctgggccctccgcacggcccgccagctggcttcgaggaacctccaggagagaagtgcctgttggtccaggaccctgcagaaagtggcctgaactgacctctgaacagcatctgtcaaatacctggccccatttgtgttgagtttcctcttagtgtgcccaggagtctgatctgctggggtacagggctgggagaacccctagctctcccggggtgtcctctcccttaggggaagccccgagtgagagtcccccagcacacactccccaaccccctccagcaactacatgtgactgatagcttttcccaaaggccaaggaagggatggtgtaggttcaaaagggaaaccccccagggcctgctgtggcctaggagcagattgtaatgctgccgagtccggtcggtgaccacgcgttgtccctcggctttcagccatggggttgagttggccattaaaagaaacagagacttctctctgccatggcccttctttattccagggacttagaaacttgcctgagatggtggacgcagtaatgagggcaccgcgcagctcagttagagacggagaaagggaagaggctgggatggtctctgctgctcttgcctctagttcatggagatgtgtctctgttcaggccaagatacagccagccaggcctgtcgtctgggacccaggaggcctctgatgaccaagggctttcacatcctaagtcatttggaaggaggccttgagaacaaagtcacctttgtcactcccagtgaactgaatgaggaacatgctgtctcctgtcttggcctcccctttcatgagatactggggagaagagaacattcctcctggcttagttgtagcagacccagacctgtgcccagctttggtcccccttcccaacttctgaagcacgtgctgcagagccaccttggtctgagcacctgaggaccagcccctcctccctcagtgcgggtcatctcttgggggattttcttaaagtgaagaaagggggtggggaaccatattgcccctccctcccccatcaaacttccttcatttaacttgctataaaatgagtcatataaagaaactctatatgggtgaggtatatcccacttctgtgaaaacattacaaatcaaaccgcttctctcagtttatttaagatgcttttgttgcgagcggagctctagagtgaagcctcctgtgtgtgtgtgagataataacaccttgtaactcattacagctgggcactatttacataaaccagagctgagccaggcaggaatttgctgattaatttatttttaatggagtgaagtataccatgcaccaaaataaactttactgtgtgtac

SEQ ID NO: 449973 - DNA, 2335 bp, Homo sapiens
cagggagagcgtgcccgggcacgacagcctggtgcacagccgagaaaacaacagcgcgtgcgcgtagcgacctctttgcgcctgcgccccccttgccagtctttcgccggcaaaaggaggacgtagaaaaggggacaccggaaactcactcttcacccggaaatggttattgaggaacatggcgttgctggtgcgagtccttaggaaccagactagcatttctcagtgggttccagtatgcagccgattgatacctgtgtctcctacccaaggacagggggacagggctctgtctcgcacttcccagctttctactaccaaagattccccacagcctgttgaggagaaggttggtgctttcacaaagataatagaagccatgggattcacgggacctttgaaatacagtaaatggaagattaagattgcggccctgcgcatgtatactagctgtgtggagaaaactgacttcgaggaattctttctaaggtgtcagatgcctgatacattcaattcatggtttcttataaccctactccacgtctggatgtgtctagtccgaatgaagcaggaaggccggagtgggaagtacatgtgtcgtatcatagttcattttatgtgggaggatgttcagcagcgcggcagagtcatgggggttaatccctatatcctgaagaagaacatgatcctcatgacaaatcatttctatgcagcgatcttgggatatgatgaggggatcctttcagatgatcatgggctggccgctgccctctggagaaccttcttcaaccggaaatgtgaagaccctcgacatcttgaattgctggtagagtatgtgaggaaacagatacagtacctggactccatgaacggggaggatctgcttctgacaggggaggtgagctggcgccctctagtggagaagaatcctcagagcatcctgaagccccattctccgacttacaacgacgagggactttgatgggctgggccctccgcacggcccgccagctggcttcgaggaacctccaggagagaagtgcctgttggtccaggaccctgcagaaagtggcctgaactgacctctgaacagcatctgtcaaatacctggccccatttgtgttgagtttcctcttagtgtgcccaggagtctgatctgctggggtacagggctgggagaacccctagctctcccggggtgtcctctcccttaggggaagccccgagtgagagtcccccagcacacactccccaaccccctccagcaactacatgtgactgatagcttttcccaaaggccaaggaagggatggtgtaggttcaaaagggaaaccccccagggcctgctgtggcctaggagcagattgtaatgctgccgagtccggtcggtgaccacgcgttgtccctcggctttcagccatggggttgagttggccattaaaagaaacagagacttctctctgccatggcccttctttattccagggacttagaaacttgcctgagatggtggacgcagtaatgagggcaccgcgcagctcagttagagacggagaaagggaagaggctgggatggtctctgctgctcttgcctctagttcatggagatgtgtctctgttcaggccaagatacagccagccaggcctgtcgtctgggacccaggaggcctctgatgaccaagggctttcacatcctaagtcatttggaaggaggccttgagaacaaagtcacctttgtcactcccagtgaactgaatgaggaacatgctgtctcctgtcttggcctcccctttcatgagatactggggagaagagaacattcctcctggcttagttgtagcagacccagacctgtgcccagctttggtcccccttcccaacttctgaagcacgtgctgcagagccaccttggtctgagcacctgaggaccagcccctcctccctcagtgcgggtcatctcttgggggattttcttaaagtgaagaaagggggtggggaaccatattgcccctccctcccccatcaaacttccttcatttaacttgctataaaatgagtcatataaagaaactctatatgggtgaggtatatcccacttctgtgaaaacattacaaatcaaaccgcttctctcagtttatttaagatgcttttgttgcgagcggagctctagagtgaagcctcctgtgtgtgtgtgagataataacaccttgtaactcattacagctgggcactatttacataaaccagagctgagccaggcaggaatttgctgattaatttatttttaatggagtgaagtataccatgcaccaaaataaactttactgtgtgtac

SEQ ID NO: 449974 - DNA, 2377 bp, Homo sapiens
cagggagagcgtgcccgggcacgacagcctggtgcacagccgagaaaacaacagcgcgtgcgcgtagcgacctctttgcgcctgcgccccccttgccagtctttcgccggcaaaaggaggacgtagaaaaggggacaccggaaactcactcttcacccggaaatggttattgaggaacatggcgttgctggtgcgagtccttaggaaccagactagcatttctcagtgggttccagtatgcagccgattgatacctgtgtctcctacccaaggacagggggacagggctctgtctcgcacttcccagtggccccagatgagccagtcccaagcatgtggtggatcagaacagattcctggaatagacatacagctgaataggaagtatcacaccacacgtaagctttctactaccaaagattccccacagcctgttgaggagaaggttggtgctttcacaaagataatagaagccatgggattcacgggacctttgaaatacagtaaatggaagattaagattgcggccctgcgcatgtatactagctgtgtggagtcatggtttcttataaccctactccacgtctggatgtgtctagtccgaatgaagcaggaaggccggagtgggaagtacatgtgtcgtatcatagttcattttatgtgggaggatgttcagcagcgcggcagagtcatgggggttaatccctatatcctgaagaagaacatgatcctcatgacaaatcatttctatgcagcgatcttgggatatgatgaggggatcctttcagatgatcatgggctggccgctgccctctggagaaccttcttcaaccggaaatgtgaagaccctcgacatcttgaattgctggtagagtatgtgaggaaacagatacagtacctggactccatgaacggggaggatctgcttctgacaggggaggtgagctggcgccctctagtggagaagaatcctcagagcatcctgaagccccattctccgacttacaacgacgagggactttgatgggctgggccctccgcacggcccgccagctggcttcgaggaacctccaggagagaagtgcctgttggtccaggaccctgcagaaagtggcctgaactgacctctgaacagcatctgtcaaatacctggccccatttgtgttgagtttcctcttagtgtgcccaggagtctgatctgctggggtacagggctgggagaacccctagctctcccggggtgtcctctcccttaggggaagccccgagtgagagtcccccagcacacactccccaaccccctccagcaactacatgtgactgatagcttttcccaaaggccaaggaagggatggtgtaggttcaaaagggaaaccccccagggcctgctgtggcctaggagcagattgtaatgctgccgagtccggtcggtgaccacgcgttgtccctcggctttcagccatggggttgagttggccattaaaagaaacagagacttctctctgccatggcccttctttattccagggacttagaaacttgcctgagatggtggacgcagtaatgagggcaccgcgcagctcagttagagacggagaaagggaagaggctgggatggtctctgctgctcttgcctctagttcatggagatgtgtctctgttcaggccaagatacagccagccaggcctgtcgtctgggacccaggaggcctctgatgaccaagggctttcacatcctaagtcatttggaaggaggccttgagaacaaagtcacctttgtcactcccagtgaactgaatgaggaacatgctgtctcctgtcttggcctcccctttcatgagatactggggagaagagaacattcctcctggcttagttgtagcagacccagacctgtgcccagctttggtcccccttcccaacttctgaagcacgtgctgcagagccaccttggtctgagcacctgaggaccagcccctcctccctcagtgcgggtcatctcttgggggattttcttaaagtgaagaaagggggtggggaaccatattgcccctccctcccccatcaaacttccttcatttaacttgctataaaatgagtcatataaagaaactctatatgggtgaggtatatcccacttctgtgaaaacattacaaatcaaaccgcttctctcagtttatttaagatgcttttgttgcgagcggagctctagagtgaagcctcctgtgtgtgtgtgagataataacaccttgtaactcattacagctgggcactatttacataaaccagagctgagccaggcaggaatttgctgattaatttatttttaatggagtgaagtataccatgcaccaaaataaactttactgtgtgtac

SEQ ID NO: 449975 - DNA, 1553 bp, Homo sapiens
cagggagagcgtgcccgggcacgacagcctggtgcacagccgagaaaacaacagcgcgtgcgcgtagcgacctctttgcgcctgcgccccccttgccagtctttcgccggcaaaaggaggacgtagaaaaggggacaccggaaactcactcttcacccggaaatggttattgaggaacatggcgttgctggtgcgagtccttaggaaccagactagcatttctcagtgggttccagtatgcagccgattgatacctgtgtctcctacccaaggacagggggacagggctctgtctcgcacttcccagtggccccagatgagccagtcccaagcatgtggtggatcagaacagattcctggaatagacatacagctgaataggaagtatcacaccacacgtaagctttctactaccaaagattccccacagcctgttgaggagaaggttggtgctttcacaaagataatagaagccatgggattcacgggacctttgaaatacagtaaatggaagattaagattgcggccctgcgcatgtatactagctgtgtggagaaaactgacttcgaggaattctttctaaggtgtcagatgcctgatacattcaattcatggtttcttataaccctactccacgtctggatgtgtctagtccgaatgaagcaggaaggccggagtgggaagtacatgtgtcgtatcatagttcattttatgtgggaggatgttcagcagcgcggcagagtcatgggggttaatccctatatcctgaagaagaacatgatcctcatgacaaatcatttctatgcagcgatcttgggatatgatgaggggatcctttcagatgatcatgggctggccgctgccctctggagaaccttcttcaaccggaaatgtgaagaccctcgacatcttgaattgctggtagagtatgtgaggaaacagatacagtacctggactccatgaacggggaggatctgcttctgacaggggaggtgagctggcgccctctagtggagaagaatcctcagagcatcctgaagccccattctccgacttacaacgacgagggactttgatgggctgggccctccgcacggcccgccagctggcttcgaggaacctccaggagagaagtgcctgttggtccaggaccctgcagaaagtggcctgaactgacctctgaacagcatctgtcaaatacctggccccatttgtgttgagtttcctcttagtgtgcccaggagtctgatctgctggggtacagggctgggagaacccctagctctcccggggtgtcctctcccttaggggaagccccgagtgagagtcccccagcacacactccccaaccccctccagcaactacatgtgactgatagcttttcccaaaggccaaggaagggatggtgtaggttcaaaagggaaaccccccagggcctgctgtggcctaggagcagattgtaatgctgccgagtccggtcggtgaccacgcgttgtccctcggctttcagccatggggttgagttggccattaaaagaaacagagacttc

SEQ ID NO: 449976 - DNA, 1803 bp, Homo sapiens
cagggagagcgtgcccgggcacgacagcctggtgcacagccgagaaaacaacagcgcgtgcgcgtagcgacctctttgcgcctgcgccccccttgccagtctttcgccggcaaaaggaggacgtagaaaaggggacaccggaaactcactcttcacccggaaatggttattgaggaacatggcgttgctggtgcgagtccttaggaaccagactagcatttctcagtgggttccagtatgcagccgattgatacctgtgtctcctacccaaggacagggggacagggctctgtctcgcacttcccagtggccccagatgagccagtcccaagcatgtggtggatcagaacagattcctggaatagacatacagctgaataggaagtatcacaccacacgtaagctttctactaccaaagattccccacagcctgttgaggagaaggttggtgctttcacaaagataatagaagccatgggattcacgggacctttgaaatacagtaaatggaagattaagattgcggccctgcgcatgtatactagctgtgtggagaaaactgacttcgaggaattctttctaaggtgtcagatgcctgatacattcaattcatggtttcttataaccctactccacgtctggatgtgtctagtccgaatgaagcaggaaggccggagtgggaagtacatgtgtcgtatcatagttcattttatgtgggaggatgttcagcagcgcggcagagtcatgggggttaatccctatatcctgaagaagaacatgatcctcatgacaaatcatttctatgcagcgatcttgggatatgatgaggggatcctttcagatgatcatgggctggccgctgccctctggagaaccttcttcaaccggaaatgtgaagaccctcgacatcttgaattgctggtagagtatgtgaggaaacaggtgagcgaccctttccctcccctcccaagtcctggcaacagtgggtcctcctcttgggctttcaggggatcatgagaggtggagttaccaaggaccagcctgagagaattctgaccagatcacatcagcactagacgctgaagaaggagcgccttctgtatgtccaaccatgaactgggccagggagcgggaaatgggaagagagagagaaagaggcatcgagtagtctcctgccctcaggaactttgagtcattcattcactgtgcacctcattgcctactgtgcgcccagtgctatgctagcagctgggcccacagagtcctggcagatatgagcacgtggtgtagtagcagctgcccactgtggaccccttctctacccacttggatttgtttcctgctcctgacttccagcaaaactgggcagcaggcagcatttcacagacagcctcttcctgctagatgctctccacagtcaagtagagtccccccacttcagtttctcacccctctggctccccagggctccccgacatcaaagcttctacgagaaagctccgcagtgggggctgcttacccacatagctgtcctcaagccccggggaattaattccttgacctccctgccctcagatcctgtattgatgggaaactcatacttgatagatgagtgagctgactggcagcgaagaggacatagaggctcttccagggcctcccagtgagtcagcctgcacagctgccctagggccccaagctgtgtgattcatgtgaccactgaggcctcagctgcctcagacagctcaggctgtgccatgagtcacacctttgcttcatggcctggcccctggagctgaagg

SEQ ID NO: 449977 - DNA, 2507 bp, Homo sapiens
catgggttgctggtgcgagtccttaggaaccagactagcatttctcagtgggttccagtatgcagccgattgatacctgtgtctcctacccaaggacagggggacagggctctgtctcgcacttcccagtggccccagatgagccagtcccaagcatgtggtggatcagaacagattcctggaatagacatacagctgaataggaagtatcacaccacacgtaagctttctactaccaaagattccccacagcctgttgaggagaaggttggtgctttcacaaagataatagaagccatgggattcacgggacctttgaaatacagtaaatggaagattaagattgcggccctgcgcatgtatactagctgtgtggagaaaactgacttcgaggaattctttctaaggtgtcagatgcctgatacattcaattcatggtttcttataaccctactccacgtctggatgtgtctagtccgaatgaagcaggaaggccggagtgggaagtacatgtgtcgtatcatagttcattttatgtgggaggatgttcagcagcgcggcagagtcatgggggtaagtgagtgctgtcagatgcttgtcctggacaattccagagaagggtttgagtttggagttttatctgttgtaaaatggccctgcttttagatttctgtgaaatgctgcctaatatcaagtggcagttccgctaaagtcactttttctgcctctgtggaaactaatactccacagatactttatgtgtttgtacacattatagtgatttgtcagtgtgaagtcatcctgtatggagatgggattgtaaagcccaaatcgtggtgataggagggatggatttggtgaatggagggaatcaaatgataatccagttaaggatactatacctttgacaccagttcaatatttgaaccagtccttctataaattagttctgatgggaggccctggtatggggcctgcactgtcttcaggaactgaaactcaagctccttgatcactggcaacctagaagagtctggtaagatacctcctgaaaatgtacattagtacatttaataattaacctgagaaaggggaatatattatatatatatatatgtcacatgggatgtaatgacaatagaaaaatgaaaccaaaacactagaatatagctggttatacagatcatagtgtgtccggagttggttccttgtggtgggttcttggtctcgcgacttcaagaatgaagccgcagaccttcgctgtgagtgttacagctcttaaagatggtgtgtccggagtttcttccttccagtgggttcgtggtctcgctgacttcaagaatgaagccgcagaccttcacagcaagtgttaccagctcttaaaggtggtgcggacccaaagagtgagcagcagcaagatttatggtgaagaccgaaagaacaaagcttccacagtgtggaagggggacctgagcgggttgccactgctggctagggtggccagcttttattcccttatttgtccctgcccatgtctgctgattggtccattttacagagtgctgattggtgcgtttttacagagtgctgattggtgcatttacaatcctgtagctagacacagagcgctgattggtgcgtttttacagaatgctgattggtgcatttacaatcctctagctagacacagagcactgattggtgcaagtatccacccgacccagaagcccagctggcttcacctcccactagtatcttcttttgtttatgttgtgtattttgtgtatctagatcacgttttagtagcttgtagttccctgttactgggaagcatttcattgcctcccagcttgggagcatccaaagtagaaccatgactgggtcatgaaatgggttaatttggtttctttcattacagggcaaagttctccctgtggactgagaaataaacatattataaaagttacatatgctcatagaatagaaatcaaagagtaaaaagtattgagtgtaaaaaacaagtgtcttttttccccccagtctaactccccagaagtaaccttttttattttttatgttattttttcttaccttcaaggaaggagaaaagtaaccatttttgagttgatgcgtatccttcgcctgagagctatctttgtaatcatcctttttggttcctttttcattttttgctttctttctgtcgtagctgctgtgtaatatagagaatgacacatttgtgggagtttctccccacacagcaaacaggcagtcaattctggagagaggtcaccaggtgggtgtcctctaacccaattcaattccaacattgtgtactcggagatagtgtcagatcccacaggttgagggctctgcccacaagactgcccccaacttgccacaccaattgcaagctccaggctgttttacctgtgcttctggccaaccgattataaattggggttccccacccctttctttggtcaattaatttgctggagcggctc

SEQ ID NO: 449978 - DNA, 1850 bp, Homo sapiens
tactagtacagaacatggcgtcgttagttagccatctcctgtacgagaccccaagactagacatgccttcataaggggattccgatttatgcagccgattgatacctgtgtctcctacccaaggacagggggacagggctctgtctcgcacttcccagtggccccagatgagccagtcccaagcatgtggtggatcagaacagattcctggaatagacatacagctgaataggaagtatcacaccacacgtaagctttctactaccaaagattccccacagcctgttgaggagaaggttggtgctttcacaaagataatagaagccatgggattcacgggacctttgaaatacagtaaatggaagattaagattgcggccctgcgcatgtatactagctgtgtggagaaaactgacttcgaggaattctttctaaggtgtcagatgcctgatacattcaattcatggtttcttataaccctactccacgtctggatgtgtctagtccgaatgaagcaggaaggccggagtgggaagtacatgtgtcgtatcatagttcattttatgtgggaggatgttcagcagcgcggcagagtcatggggtgggttcgtggtctcgctgacttcaagaatgaagccgcagaccttcacagcaagtgttaccagctcttaaaggtggtgcggacccaaagagtgagcagcagcaagatttatggtgaagaccgaaagaacaaagcttccacagtgtggaagggggacctgagcgggttgccactgctggctagggtggccagcttttattcccttatttgtccctgcccatgtctgctgattggtccattttacagagtgctgattggtgcgtttttacagagtgctgattggtgcatttacaatcctgtagctagacacagagcgctgattggtgcgtttttacagaatgctgattggtgcatttacaatcctctagctagacacagagcactgattggtgcaagtatccacccgacccagaagcccagctggcttcacctcccactagtatcttcttttgtttatgttgtgtattttgtgtatctagatcacgttttagtagcttgtagttccctgttactgggaagcatttcattgcctcccagcttgggagcatccaaagtagaaccatgactgggtcatgaaatgggttaatttggtttctttcattacagggcaaagttctccctgtggactgagaaataaacatattataaaagttacatatgctcatagaatagaaatcaaagagtaaaaagtattgagtgtaaaaaacaagtgtcttttttccccccagtctaactccccagaagtaaccttttttattttttatgttattttttcttaccttcaaggaaggagaaaagtaaccatttttgagttgatgcgtatccttcgcctgagagctatctttgtaatcatcctttttggttcctttttcattttttgctttctttctgtcgtagctgctgtgtaatatagagaaaaaaagtattttttcagctctctcactcaattacaattacacagaaggtttctgtgacacatttgtgggagtttctccccacacagcaaacaggcagtcaattctggagagaggtcaccaggtgggtgtcctctaacccaattcaattccaacattgtgtactcggagatagtgtcagatcccacaggttgagggctctgcccacaagactgcccccaacttgccacaccaattgcaagctccaggctgttttacctgtgcttctggccaaccgattataaattggggttccccacccctttctttggtcaattaatttgctggagcggctc

SEQ ID NO: 449979 - DNA, 186 bp, Homo sapiens
taagaaaacaaaaaaaatttatattggtttaaattacctagagagtggtttggacccttccttctagttgaagaaatataagattttgtgacccatgtctaatggaagtagaacatccacttggtcatgtcttgagtttggttttattctctttgtctagaagattaagattgcggccctgcgcat

SEQ ID NO: 449980 - DNA, 608 bp, Homo sapiens
gggtttcgccatgttggccaggctggtcttgatctcctgacctgaggtgatctgcccacctcggcctcccaaagtgctggaattacaggcatgagccaccgcatccatcctttttttttcttttactcctggcgtgctatgattcaaagttcttttatcctgtggtctcgccctattgttctactggacttttctgcaatagcataatcagagagcaccataagtgccgtgcctgccaatatttaatatatggtcaatatgcttcctttaaaccctcacatacttataccttattgttattttctagggtgtcagatgcctgatacattcaattcatggtttcttataaccctactccacgtctggtaagtgagcaatttaaatgaagtcaccaaatgtatttttttaaacactgctgacttgtaaggtatagccttcaggagggctgattatatgaaatggcagttgttcaggtgttaaaaactgttcctttcattttaataactggtgtcttgaagcacatttttattaaaggtcaaagcataagcccagaaggaaactaatatttgtaggattttttcagagaacacctaacccagtgaacaatg

SEQ ID NO: 449981 - DNA, 2431 bp, Homo sapiens
cagggagagcgtgcccgggcacgacagcctggtgcacagccgagaaaacaacagcgcgtgcgcgtagcgacctctttgcgcctgcgccccccttgccagtctttcgccggcaaaaggaggacgtagaaaaggggacaccggaaactcactcttcacccggaaatggttattgaggaacatggcgttgctggtgcgagtccttaggaaccagactagcatttctcagtgggttccagtatgcagccgattgatacctgtgtctcctacccaaggacagggggacagggctctgtctcgcacttcccagtggccccagatgagccagtcccaagcatgtggtggatcagaacagattcctggaatagacatacagctgaataggaagtatcacaccacacgtaagctttctactaccaaagattccccacagcctgttgaggagaaggttggtgctttcacaaagataatagaagccatgggattcacgggacctttgaaatacagtaaatggaagattaagattgcggccctgcgcatgtatactagctgtgtggagaaaactgacttcgaggaattctttctaaggtgtcagatgcctgatacattcaattcatggtttcttataaccctactccacgtctggatgtgtctagtccgaatgaagcaggaaggccggagtgggaagtacatgtgtcgtatcatagttcattttatgtgggaggatgttcagcagcgcggcagagtcatgggggttaatccctatatcctgaagaagaacatgatcctcatgacaaatcatttctatgcagcgatcttgggatatgatgaggggatcctttcagatgatcatgggctggccgctgccctctggagaaccttcttcaaccggaaatgtgaagaccctcgacatcttgaattgctggtagagtatgtgaggaaacagatacagtacctggactccatgaacggggaggatctgcttctgacaggggaggtgagctggcgccctctagtggagaagaatcctcagagcatcctgaagccccattctccgacttacaacgacgagggactttgatgggctgggccctccgcacggcccgccagctggcttcgaggaacctccaggagagaagtgcctgttggtccaggaccctgcagaaagtggcctgaactgacctctgaacagcatctgtcaaatacctggccccatttgtgttgagtttcctcttagtgtgcccaggagtctgatctgctggggtacagggctgggagaacccctagctctcccggggtgtcctctcccttaggggaagccccgagtgagagtcccccagcacacactccccaaccccctccagcaactacatgtgactgatagcttttcccaaaggccaaggaagggatggtgtaggttcaaaagggaaaccccccagggcctgctgtggcctaggagcagattgtaatgctgccgagtccggtcggtgaccacgcgttgtccctcggctttcagccatggggttgagttggccattaaaagaaacagagacttctctctgccatggcccttctttattccagggacttagaaacttgcctgagatggtggacgcagtaatgagggcaccgcgcagctcagttagagacggagaaagggaagaggctgggatggtctctgctgctcttgcctctagttcatggagatgtgtctctgttcaggccaagatacagccagccaggcctgtcgtctgggacccaggaggcctctgatgaccaagggctttcacatcctaagtcatttggaaggaggccttgagaacaaagtcacctttgtcactcccagtgaactgaatgaggaacatgctgtctcctgtcttggcctcccctttcatgagatactggggagaagagaacattcctcctggcttagttgtagcagacccagacctgtgcccagctttggtcccccttcccaacttctgaagcacgtgctgcagagccaccttggtctgagcacctgaggaccagcccctcctccctcagtgcgggtcatctcttgggggattttcttaaagtgaagaaagggggtggggaaccatattgcccctccctcccccatcaaacttccttcatttaacttgctataaaatgagtcatataaagaaactctatatgggtgaggtatatcccacttctgtgaaaacattacaaatcaaaccgcttctctcagtttatttaagatgcttttgttgcgagcggagctctagagtgaagcctcctgtgtgtgtgtgagataataacaccttgtaactcattacagctgggcactatttacataaaccagagctgagccaggcaggaatttgctgattaatttatttttaatggagtgaagtataccatgcaccaaaataaactttactgtgtgtac

SEQ ID NO: 449982 - DNA, 1976 bp, Homo sapiens
catgggttgctggtgcgagtccttaggaaccagactagcatttctcagtgggttccagtatgcagccgattgatacctgtgtctcctacccaaggacagggggacagggctctgtctcgcacttcccagggtgtcagatgcctgatacattcaattcatggtttcttataaccctactccacgtctggatgtgtctagtccgaatgaagcaggaaggccggagtgggaagtacatgtgtcgtatcatagttcattttatgtgggaggatgttcagcagcgcggcagagtcatgggggttaatccctatatcctgaagaagaacatgatcctcatgacaaatcatttctatgcagcgatcttgggatatgatgaggggatcctttcagatgatcatgggctggccgctgccctctggagaaccttcttcaaccggaaatgtgaagaccctcgacatcttgaattgctggtagagtatgtgaggaaacagatacagtacctggactccatgaacggggaggatctgcttctgacaggggaggtgagctggcgccctctagtggagaagaatcctcagagcatcctgaagccccattctccgacttacaacgacgagggactttgatgggctgggccctccgcacggcccgccagctggcttcgaggaacctccaggagagaagtgcctgttggtccaggaccctgcagaaagtggcctgaactgacctctgaacagcatctgtcaaatacctggccccatttgtgttgagtttcctcttagtgtgcccaggagtctgatctgctggggtacagggctgggagaacccctagctctcccggggtgtcctctcccttaggggaagccccgagtgagagtcccccagcacacactccccaaccccctccagcaactacatgtgactgatagcttttcccaaaggccaaggaagggatggtgtaggttcaaaagggaaaccccccagggcctgctgtggcctaggagcagattgtaatgctgccgagtccggtcggtgaccacgcgttgtccctcggctttcagccatggggttgagttggccattaaaagaaacagagacttctctctgccatggcccttctttattccagggacttagaaacttgcctgagatggtggacgcagtaatgagggcaccgcgcagctcagttagagacggagaaagggaagaggctgggatggtctctgctgctcttgcctctagttcatggagatgtgtctctgttcaggccaagatacagccagccaggcctgtcgtctgggacccaggaggcctctgatgaccaagggctttcacatcctaagtcatttggaaggaggccttgagaacaaagtcacctttgtcactcccagtgaactgaatgaggaacatgctgtctcctgtcttggcctcccctttcatgagatactggggagaagagaacattcctcctggcttagttgtagcagacccagacctgtgcccagctttggtcccccttcccaacttctgaagcacgtgctgcagagccaccttggtctgagcacctgaggaccagcccctcctccctcagtgcgggtcatctcttgggggattttcttaaagtgaagaaagggggtggggaaccatattgcccctccctcccccatcaaacttccttcatttaacttgctataaaatgagtcatataaagaaactctatatgggtgaggtatatcccacttctgtgaaaacattacaaatcaaaccgcttctctcagtttatttaagatgcttttgttgcgagcggagctctagagtgaagcctcctgtgtgtgtgtgagataataacaccttgtaactcattacagctgggcactatttacataaaccagagctgagccaggcaggaatttgctgattaatttatttttaatggagtgaagtataccatgcaccaaaataaactttactgtgtgtac

SEQ ID NO: 449983 - DNA, 1221 bp, Homo sapiens
gctcggtaccctccccgtacgcccaaattcatggtttcttataaccctactccacgtctggatgtgtctagtccgaatgaagcaggaaggccggagtgggaagtacatgtgtcgtatcatagttcattttatgtgggaggatgttcagcagcgcggcagagtcatgggggttaatccctatatcctgaagaagaacatgatcctcatgacaaatcatttctatgcagcgatcttgggatatgatgaggggatcctttcagatgatcatgggctggccgctgccctctggagaaccttcttcaaccggaaatgtgaagaccctcgacatcttgaattgctggtagagtatgtgaggaaacaggtgagcgaccctttccctcccctcccaagtcctggcaacagtgggtcctcctcttgggctttcaggggatcatgagaggtggagttaccaaggaccagcctgagagaattctgaccagatcacatcagcactagacgctgaagaaggagcgccttctgtatgtccaaccatgaactgggccagggagcgggaaatgggaagagagagagaaagaggcatcgagtagtctcctgccctcaggaactttgagtcattcattcactgtgcacctcattgcctactgtgcgcccagtgctatgctagcagctgggcccacagagtcctggcagatatgagcacgtggtgtagtagcagctgcccactgtggaccccttctctacccacttggatttgtttcctgctcctgacttccagcaaaactgggcagcaggcagcatttcacagacagcctcttcctgctagatgctctccacagtcaagtagagtccccccacttcagtttctcacccctctggctccccagggctccccgacatcaaagcttctacgagaaagctccgcagtgggggctgcttacccacatagctgtcctcaagccccggggaattaattccttgacctccctgccctcagatcctgtattgatgggaaactcatacttgatagatgagtgagctgactggcagcgaagaggacatagaggctcttccagggcctcccagtgagtcagcctgcacagctgccctagggccccaagctgtgtgattcatgtgaccactgaggcctcagctgcctcagacagctcaggctgtgccatgagtcacacctttgcttcatggcctggcccctggagctgaagg

SEQ ID NO: 449984 - DNA, 2253 bp, Homo sapiens
catgggttgctggtgcgagtccttaggaaccagactagcatttctcagtgggttccagtatgcagccgattgatacctgtgtctcctacccaaggacagggggacagggctctgtctcgcacttcccagtggccccagatgagccagtcccaagcatgtggtggatcagaacagattcctggaatagacatacagctgaataggaagtatcacaccacacgtaagctttctactaccaaagattccccacagcctgttgaggagaaggttggtgctttcacaaagataatagaagccatgggattcacgggacctttgaaatacagtaaatggaagattaagattgcggccctgcgcatgtatactagctgtgtggagaaaactgacttcgaggaattctttctaaggtgtcagatgcctgatacattcaattcatggtttcttataaccctactccacgtctggatgtgtctagtccgaatgaagcaggaaggccggagtgggaagtacatgtgtcgtatcatagttcattttatgtgggaggatgttcagcagcgcggcagagtcatgggggttaatccctatatcctgaagaagaacatgatcctcatgacaaatcatttctatgcagcgatcttgggatatgatgaggggatcctttcagatgatcatgggctggccgctgccctctggagaaccttcttcaaccggaaatgtgaagaccctcgacatcttgaattgctggtagagtatgtgaggaaacagatacagtacctggactccatgaacggggaggatctgcttctgacaggggaggtgagctggcgccctctagtggagaagaatcctcagagcatcctgaagccccattctccgacttacaacgacgagggactttgatgggctgggccctccgcacggcccgccagctggcttcgaggaacctccaggagagaagtgcctgttggtccaggaccctgcagaaagtggcctgaactgacctctgaacagcatctgtcaaatacctggccccatttgtgttgagtttcctcttagtgtgcccaggagtctgatctgctggggtacagggctgggagaacccctagctctcccggggtgtcctctcccttaggggaagccccgagtgagagtcccccagcacacactccccaaccccctccagcaactacatgtgactgatagcttttcccaaaggccaaggaagggatggtgtaggttcaaaagggaaaccccccagggcctgctgtggcctaggagcagattgtaatgctgccgagtccggtcggtgaccacgcgttgtccctcggctttcagccatggggttgagttggccattaaaagaaacagagacttctctctgccatggcccttctttattccagggacttagaaacttgcctgagatggtggacgcagtaatgagggcaccgcgcagctcagttagagacggagaaagggaagaggctgggatggtctctgctgctcttgcctctagttcatggagatgtgtctctgttcaggccaagatacagccagccaggcctgtcgtctgggacccaggaggcctctgatgaccaagggctttcacatcctaagtcatttggaaggaggccttgagaacaaagtcacctttgtcactcccagtgaactgaatgaggaacatgctgtctcctgtcttggcctcccctttcatgagatactggggagaagagaacattcctcctggcttagttgtagcagacccagacctgtgcccagctttggtcccccttcccaacttctgaagcacgtgctgcagagccaccttggtctgagcacctgaggaccagcccctcctccctcagtgcgggtcatctcttgggggattttcttaaagtgaagaaagggggtggggaaccatattgcccctccctcccccatcaaacttccttcatttaacttgctataaaatgagtcatataaagaaactctatatgggtgaggtatatcccacttctgtgaaaacattacaaatcaaaccgcttctctcagtttatttaagatgcttttgttgcgagcggagctctagagtgaagcctcctgtgtgtgtgtgagataataacaccttgtaactcattacagctgggcactatttacataaaccagagctgagccaggcaggaatttgctgattaatttatttttaatggagtgaagtataccatgcaccaaaataaactttactgtgtgtac

SEQ ID NO: 449985 - DNA, 2475 bp, Homo sapiens
aaaatttgtagaaatagagtcttgctatgttccccaggctgagtcttaaactctggcctcaagcaatcctctcaccttgacctcccaaagtgttggaattacaggtgtgagctattgtgcctggcccaaattcttttatttcttcaggtattcaacagatatttcttgggcatctaccatgtactagacacccttctaggtgctgatcttgggtcttcctggtgagctgatcacggggaagtgggctaagtaaggttggaaagatcctatagtctttactttgaaacagctctgttcagattaaccctgtaagtgctcagtgttgcatagatctgtgtttttattcttcagtggccccagatgagccagtcccaagcatgtggtggatcagaacagattcctggaatagacatacagctgaataggaagtatcacaccacacgtaagctttctactaccaaagattccccacagcctgttgaggagaaggttggtgctttcacaaagataatagaagccatgggattcacgggacctttgaaatacagtaaatggaagattaagattgcggccctgcgcatgtatactagctgtgtggagaaaactgacttcgaggaattctttctaaggtgtcagatgcctgatacattcaattcatggtttcttataaccctactccacgtctggatgtgtctagtccgaatgaagcaggaaggccggagtgggaagtacatgtgtcgtatcatagttcattttatgtgggaggatgttcagcagcgcggcagagtcatgggggttaatccctatatcctgaagaagaacatgatcctcatgacaaatcatttctatgcagcgatcttgggatatgatgaggggatcctttcagatgatcatgggctggccgctgccctctggagaaccttcttcaaccggaaatgtgaagaccctcgacatcttgaattgctggtagagtatgtgaggaaacagatacagtacctggactccatgaacggggaggatctgcttctgacaggggaggtgagctggcgccctctagtggagaagaatcctcagagcatcctgaagccccattctccgacttacaacgacgagggactttgatgggctgggccctccgcacggcccgccagctggcttcgaggaacctccaggagagaagtgcctgttggtccaggaccctgcagaaagtggcctgaactgacctctgaacagcatctgtcaaatacctggccccatttgtgttgagtttcctcttagtgtgcccaggagtctgatctgctggggtacagggctgggagaacccctagctctcccggggtgtcctctcccttaggggaagccccgagtgagagtcccccagcacacactccccaaccccctccagcaactacatgtgactgatagcttttcccaaaggccaaggaagggatggtgtaggttcaaaagggaaaccccccagggcctgctgtggcctaggagcagattgtaatgctgccgagtccggtcggtgaccacgcgttgtccctcggctttcagccatggggttgagttggccattaaaagaaacagagacttctctctgccatggcccttctttattccagggacttagaaacttgcctgagatggtggacgcagtaatgagggcaccgcgcagctcagttagagacggagaaagggaagaggctgggatggtctctgctgctcttgcctctagttcatggagatgtgtctctgttcaggccaagatacagccagccaggcctgtcgtctgggacccaggaggcctctgatgaccaagggctttcacatcctaagtcatttggaaggaggccttgagaacaaagtcacctttgtcactcccagtgaactgaatgaggaacatgctgtctcctgtcttggcctcccctttcatgagatactggggagaagagaacattcctcctggcttagttgtagcagacccagacctgtgcccagctttggtcccccttcccaacttctgaagcacgtgctgcagagccaccttggtctgagcacctgaggaccagcccctcctccctcagtgcgggtcatctcttgggggattttcttaaagtgaagaaagggggtggggaaccatattgcccctccctcccccatcaaacttccttcatttaacttgctataaaatgagtcatataaagaaactctatatgggtgaggtatatcccacttctgtgaaaacattacaaatcaaaccgcttctctcagtttatttaagatgcttttgttgcgagcggagctctagagtgaagcctcctgtgtgtgtgtgagataataacaccttgtaactcattacagctgggcactatttacataaaccagagctgagccaggcaggaatttgctgattaatttatttttaatggagtgaagtataccatgcaccaaaataaactttactgtgtgtac

SEQ ID NO: 449986 - DNA, 2358 bp, Homo sapiens
cagggagagcgtgcccgggcacgacagcctggtgcacagccgagaaaacaacagcgcgtgcgcgtagcgacctctttgcgcctgcgccccccttgccagtctttcgccggcaaaaggaggacgtagaaaaggggacaccggaaactcactcttcacccggaaatggttattgaggaacatggcgttgctggtgcgagtccttaggaaccagactagcatttctcagtgggttccagtatgcagccgattgatacctgtgtctcctacccaaggacagggggacagggctctgtctcgcacttcccagtggccccagatgagccagtcccaagcatgtggtggatcagaacagattcctggaatagacatacagctgaataggaagtatcacaccacacgtaagctttctactaccaaagattccccacagcctgttgaggagaaggttggtgctttcacaaagataatagaagccatgggattcacgggacctttgaaatacagtaaatggggtgtcagatgcctgatacattcaattcatggtttcttataaccctactccacgtctggatgtgtctagtccgaatgaagcaggaaggccggagtgggaagtacatgtgtcgtatcatagttcattttatgtgggaggatgttcagcagcgcggcagagtcatgggggttaatccctatatcctgaagaagaacatgatcctcatgacaaatcatttctatgcagcgatcttgggatatgatgaggggatcctttcagatgatcatgggctggccgctgccctctggagaaccttcttcaaccggaaatgtgaagaccctcgacatcttgaattgctggtagagtatgtgaggaaacagatacagtacctggactccatgaacggggaggatctgcttctgacaggggaggtgagctggcgccctctagtggagaagaatcctcagagcatcctgaagccccattctccgacttacaacgacgagggactttgatgggctgggccctccgcacggcccgccagctggcttcgaggaacctccaggagagaagtgcctgttggtccaggaccctgcagaaagtggcctgaactgacctctgaacagcatctgtcaaatacctggccccatttgtgttgagtttcctcttagtgtgcccaggagtctgatctgctggggtacagggctgggagaacccctagctctcccggggtgtcctctcccttaggggaagccccgagtgagagtcccccagcacacactccccaaccccctccagcaactacatgtgactgatagcttttcccaaaggccaaggaagggatggtgtaggttcaaaagggaaaccccccagggcctgctgtggcctaggagcagattgtaatgctgccgagtccggtcggtgaccacgcgttgtccctcggctttcagccatggggttgagttggccattaaaagaaacagagacttctctctgccatggcccttctttattccagggacttagaaacttgcctgagatggtggacgcagtaatgagggcaccgcgcagctcagttagagacggagaaagggaagaggctgggatggtctctgctgctcttgcctctagttcatggagatgtgtctctgttcaggccaagatacagccagccaggcctgtcgtctgggacccaggaggcctctgatgaccaagggctttcacatcctaagtcatttggaaggaggccttgagaacaaagtcacctttgtcactcccagtgaactgaatgaggaacatgctgtctcctgtcttggcctcccctttcatgagatactggggagaagagaacattcctcctggcttagttgtagcagacccagacctgtgcccagctttggtcccccttcccaacttctgaagcacgtgctgcagagccaccttggtctgagcacctgaggaccagcccctcctccctcagtgcgggtcatctcttgggggattttcttaaagtgaagaaagggggtggggaaccatattgcccctccctcccccatcaaacttccttcatttaacttgctataaaatgagtcatataaagaaactctatatgggtgaggtatatcccacttctgtgaaaacattacaaatcaaaccgcttctctcagtttatttaagatgcttttgttgcgagcggagctctagagtgaagcctcctgtgtgtgtgtgagataataacaccttgtaactcattacagctgggcactatttacataaaccagagctgagccaggcaggaatttgctgattaatttatttttaatggagtgaagtataccatgcaccaaaataaactttactgtgtgtac

SEQ ID NO: 449987 - DNA, 1674 bp, Homo sapiens
gtactgcctgagtcccagctctgcatcacctaactggtggcttggcccctctggaccccctgttctccctctgggatcctttcagatgatcatgggctggccgctgccctctggagaaccttcttcaaccggaaatgtgaagaccctcgacatcttgaattgctggtagagtatgtgaggaaacagatacagtacctggactccatgaacggggaggatctgcttctgacaggggaggtgagctggcgccctctagtggagaagaatcctcagagcatcctgaagccccattctccgacttacaacgacgagggactttgatgggctgggccctccgcacggcccgccagctggcttcgaggaacctccaggagagaagtgcctgttggtccaggaccctgcagaaagtggcctgaactgacctctgaacagcatctgtcaaatacctggccccatttgtgttgagtttcctcttagtgtgcccaggagtctgatctgctggggtacagggctgggagaacccctagctctcccggggtgtcctctcccttaggggaagccccgagtgagagtcccccagcacacactccccaaccccctccagcaactacatgtgactgatagcttttcccaaaggccaaggaagggatggtgtaggttcaaaagggaaaccccccagggcctgctgtggcctaggagcagattgtaatgctgccgagtccggtcggtgaccacgcgttgtccctcggctttcagccatggggttgagttggccattaaaagaaacagagacttctctctgccatggcccttctttattccagggacttagaaacttgcctgagatggtggacgcagtaatgagggcaccgcgcagctcagttagagacggagaaagggaagaggctgggatggtctctgctgctcttgcctctagttcatggagatgtgtctctgttcaggccaagatacagccagccaggcctgtcgtctgggacccaggaggcctctgatgaccaagggctttcacatcctaagtcatttggaaggaggccttgagaacaaagtcacctttgtcactcccagtgaactgaatgaggaacatgctgtctcctgtcttggcctcccctttcatgagatactggggagaagagaacattcctcctggcttagttgtagcagacccagacctgtgcccagctttggtcccccttcccaacttctgaagcacgtgctgcagagccaccttggtctgagcacctgaggaccagcccctcctccctcagtgcgggtcatctcttgggggattttcttaaagtgaagaaagggggtggggaaccatattgcccctccctcccccatcaaacttccttcatttaacttgctataaaatgagtcatataaagaaactctatatgggtgaggtatatcccacttctgtgaaaacattacaaatcaaaccgcttctctcagtttatttaagatgcttttgttgcgagcggagctctagagtgaagcctcctgtgtgtgtgtgagataataacaccttgtaactcattacagctgggcactatttacataaaccagagctgagccaggcaggaatttgctgattaatttatttttaatggagtgaagtataccatgcaccaaaataaactttactgtgtgtac

SEQ ID NO: 449988 - DNA, 2561 bp, Homo sapiens
catgggttgctggtgcgagtccttaggaaccagactagcatttctcagtgggttccagtatgcagccgattgatacctgtgtctcctacccaaggacagggggacagggctctgtctcgcacttcccagtggccccagatgagccagtcccaagcatgtggtggatcagaacagattcctggaatagacatacagctgaataggaagtatcacaccacacgtaagctttctactaccaaagattccccacagcctgttgaggagaaggttggtgctttcacaaagataatagaagccatgggattcacgggacctttgaaatacagtaaatggaagattaagattgcggccctgcgcatgtatactagctgtgtggagaaaactgacttcgaggaattctttctaaggtgtcagatgcctgatacattcaattcatggtttcttataaccctactccacgtctggatgtgtctagtccgaatgaagcaggaaggccggagtgggaagtacatgtgtcgtatcatagttcattttatgtgggaggatgttcagcagcgcggcagagtcatgggggtaagtgagtgctgtcagatgcttgtcctggacaattccagagaagggtttgagtttggagttttatctgttgtaaaatggccctgcttttagatttctgtgaaatgctgcctaatatcaagtggcagttccgctaaagtcactttttctgcctctgtggaaactaatactccacagatactttatgtgtttgtacacattatagtgatttgtcagtgtgaagtcatcctgtatggagatgggattgtaaagcccaaatcgtggtgataggagggatggatttggtgaatggagggaatcaaatgataatccagttaaggatactatacctttgacaccagttcaatatttgaaccagtccttctataaattagttctgatgggaggccctggtatggggcctgcactgtcttcaggaactgaaactcaagctccttgatcactggcaacctagaagagtctggtaagatacctcctgaaaatgtacattagtacatttaataattaacctgagaaaggggaatatattatatatatatatatgtcacatgggatgtaatgacaatagaaaaatgaaaccaaaacactagaatatagctggttatacagatcatagtgtgtccggagttggttccttgtggtgggttcttggtctcgcgacttcaagaatgaagccgcagaccttcgctgtgagtgttacagctcttaaagatggtgtgtccggagtttcttccttccagtgggttcgtggtctcgctgacttcaagaatgaagccgcagaccttcacagcaagtgttaccagctcttaaaggtggtgcggacccaaagagtgagcagcagcaagatttatggtgaagaccgaaagaacaaagcttccacagtgtggaagggggacctgagcgggttgccactgctggctagggtggccagcttttattcccttatttgtccctgcccatgtctgctgattggtccattttacagagtgctgattggtgcgtttttacagagtgctgattggtgcatttacaatcctgtagctagacacagagcgctgattggtgcgtttttacagaatgctgattggtgcatttacaatcctctagctagacacagagcactgattggtgcaagtatccacccgacccagaagcccagctggcttcacctcccactagtatcttcttttgtttatgttgtgtattttgtgtatctagatcacgttttagtagcttgtagttccctgttactgggaagcatttcattgcctcccagcttgggagcatccaaagtagaaccatgactgggtcatgaaatgggttaatttggtttctttcattacagggcaaagttctccctgtggactgagaaataaacatattataaaagttacatatgctcatagaatagaaatcaaagagtaaaaagtattgagtgtaaaaaacaagtgtcttttttccccccagtctaactccccagaagtaaccttttttattttttatgttattttttcttaccttcaaggaaggagaaaagtaaccatttttgagttgatgcgtatccttcgcctgagagctatctttgtaatcatcctttttggttcctttttcattttttgctttctttctgtcgtagctgctgtgtaatatagagaaaaaaagtattttttcagctctctcactcaattacaattacacagaaggtttctgtgacacatttgtgggagtttctccccacacagcaaacaggcagtcaattctggagagaggtcaccaggtgggtgtcctctaacccaattcaattccaacattgtgtactcggagatagtgtcagatcccacaggttgagggctctgcccacaagactgcccccaacttgccacaccaattgcaagctccaggctgttttacctgtgcttctggccaaccgattataaattggggttccccacccctttctttggtcaattaatttgctggagcggctc

SEQ ID NO: 449989 - DNA, 1868 bp, Homo sapiens
catgggttgctggtgcgagtccttaggaaccagactagcatttctcagtgggttccagtatgcagccgattgatacctgtgtctcctacccaaggacagggggacagggctctgtctcgcacttcccagtggccccagatgagccagtcccaagcatgtggtggatcagaacagattcctggaatagacatacagctgaataggaagtatcacaccacacgtaagctttctactaccaaagattccccacagcctgttgaggagaaggttggtgctttcacaaagataatagaagccatgggattcacgggacctttgaaatacagtaaatggaagattaagattgcggccctgcgcatgtatactagctgtgtggagaaaactgacttcgaggaattctttctaaggtgtcagatgcctgatacattcaattcatggtttcttataaccctactccacgtctggatgtgtctagtccgaatgaagcaggaaggccggagtgggaagtacatgtgtcgtatcatagttcattttatgtgggaggatgttcagcagcgcggcagagtcatgggggaactgaaactcaagctccttgatcactggcaacctagaagagtctgtgggttcgtggtctcgctgacttcaagaatgaagccgcagaccttcacagcaagtgttaccagctcttaaaggtggtgcggacccaaagagtgagcagcagcaagatttatggtgaagaccgaaagaacaaagcttccacagtgtggaagggggacctgagcgggttgccactgctggctagggtggccagcttttattcccttatttgtccctgcccatgtctgctgattggtccattttacagagtgctgattggtgcgtttttacagagtgctgattggtgcatttacaatcctgtagctagacacagagcgctgattggtgcgtttttacagaatgctgattggtgcatttacaatcctctagctagacacagagcactgattggtgcaagtatccacccgacccagaagcccagctggcttcacctcccactagtatcttcttttgtttatgttgtgtattttgtgtatctagatcacgttttagtagcttgtagttccctgttactgggaagcatttcattgcctcccagcttgggagcatccaaagtagaaccatgactgggtcatgaaatgggttaatttggtttctttcattacagggcaaagttctccctgtggactgagaaataaacatattataaaagttacatatgctcatagaatagaaatcaaagagtaaaaagtattgagtgtaaaaaacaagtgtcttttttccccccagtctaactccccagaagtaaccttttttattttttatgttattttttcttaccttcaaggaaggagaaaagtaaccatttttgagttgatgcgtatccttcgcctgagagctatctttgtaatcatcctttttggttcctttttcattttttgctttctttctgtcgtagctgctgtgtaatatagagaaaaaaagtattttttcagctctctcactcaattacaattacacagaaggtttctgtgacacatttgtgggagtttctccccacacagcaaacaggcagtcaattctggagagaggtcaccaggtgggtgtcctctaacccaattcaattccaacattgtgtactcggagatagtgtcagatcccacaggttgagggctctgcccacaagactgcccccaacttgccacaccaattgcaagctccaggctgttttacctgtgcttctggccaaccgattataaattggggttccccacccctttctttggtcaattaatttgctggagcggctc

SEQ ID NO: 449990 - DNA, 1047 bp, Homo sapiens
ggcggggcggcggtgcccttgcggcgcagctggggtcgcggccctgctccccgcgctttcttaaggcccgcgggcggcgcaggagcggcactcgtggctgtggtggcttcggcagcggcttcagcagatcggcggcatcagcggtagcaccagcactagcagcatgttgagccgggcagtgtgcggcaccagcaggcagctggctccggttttggggtatctgggctccaggcagaagcacagcctccccgacctgccctacgactacggcgccctggaacctcacatcaacgcgcagatcatgcagctgcaccacagcaagcaccacgcggcctacgtgaacaacctgaacgtcaccgaggagaagtaccaggaggcgttggccaagggagatgttacagcccagatagctcttcagcctgcactgaagttcaatggtggtggtcatatcaatcatagcattttctggacaaacctcagccctaacggtggtggagaacccaaaggggagttgctggaagccatcaaacgtgactttggttcctttgacaagtttaaggagaagctgacggctgcatctgttggtgtccaaggctcaggttggggttggcttggtttcaataaggaacggggacacttacaaattgctgcttgtccaaatcaggatccactgcaaggaacaacaggccttattccactgctggggattgatgtgtgggagcacgcttactaccttcagtataaaaatgtcaggcctgattatctaaaagctatttggaatgtaatcaactgggagaatgtaactgaaagatacatggcttgcaaaaagtaaaccacgatcgttatgctgagtatgttaagctctttatgactgtttttgtagtggtatagagtactgcagaatacagtaagctgctctattgtagcatttcttgatgttgcttagtcacttatttcataaacaacttaatgttctgaataatttcttactaaacattttgttattgggcaagtgattgaaaatagtaaatgctttgtgtgattgaa

SEQ ID NO: 449991 - DNA, 597 bp, Homo sapiens
  misc_feature (283)..(283): n is a, c, g, or t
cgcagtcttctcccatcagctcatccacatagtctcgtttgagttcctcaggaacatcactgtcactgtcatactcttgataggcactcttttcttgttcatcagattcatacccattagaagctaagacatcttctgtttcttcatctttgtggttggcctgaatttcaaatggattcccaccactacagtactgctcaaacaaggtcactgtttttgaagaagttgagactggctgtttactaggtgaaactgatgggacgaagatgcgccagtcttctcncttcagtataaaaatgtcaggcctgattatctaaaagctatttggaatgtaatcaactgggagaatgtaactgaaagatacatggcttgcaaaaagtaaaccacgatcgttatgctgagtatgttaagctctttatgactgtttttgtagtggtatagagtactgcagaatacagtaagctgctctattgtagcatttcttgatgttgcttagtcacttatttcataaacaacttaatgttctgaataatttcttactaaacattttgttattgggcaagtgattgaaaatagtaaatgctttgtgtgattgaa

SEQ ID NO: 449992 - DNA, 4207 bp, Homo sapiens
ggcggggcggcggtgcccttgcggcgcagctggggtcgcggccctgctccccgcgctttcttaaggcccgcgggcggcgcaggagcggcactcgtggctgtggtggcttcggcagcggcttcagcagatcggcggcatcagcggtagcaccagcactagcagcatgttgagccgggcagtgtgcggcaccagcaggcagctggctccggttttggggtatctgggctccaggcagaagcacagcctccccgacctgccctacgactacggcgccctggaacctcacatcaacgcgcagatcatgcagctgcaccacagcaagcaccacgcggcctacgtgaacaacctgaacgtcaccgaggagaagtaccaggaggcgttggccaagggagatgttacagcccagatagctcttcagcctgcactgaagttcaatggtggtggtcatatcaatcatagcattttctggacaaacctcagccctaacggtggtggagaacccaaaggggagttgctggaagccatcaaacgtgactttggttcctttgacaagtttaaggagaagctgacggctgcatctgttggtgtccaaggctcaggttggggttggcttggtttcaataaggaacggggacacttacaaattgctgcttgtccaaatcaggatccactgcaaggaacaacaggccttattccactgctggggattgatgtgtgggagcacgcttactaccttcagtataaaaatgtcaggcctgattatctaaaagctatttggaatgtaatcaactgggagaatgtaactgaaagatacatggcttgcaaaaagtaaaccacgatcgttatgctgagtatgttaagctctttatgactgtttttgtagtggtatagagtactgcagaatacagtaagctgctctattgtagcatttcttgatgttgcttagtcacttatttcataaacaacttaatgttctgaataatttcttactaaacattttgttattgggcaagtgattgaaaatagtaaatgctttgtgtgattgaatctgattggacattttcttcagagagctaaattacaattgtcatttataaaaccatcaaaaatattccatccatatactttggggacttgtagggatgcctttctagtcctattctattgcagttatagaaaatctagtcttttgccccagttacttaaaaataaaatattaacactttcccaagggaaacactcggctttctatagaaaattgcactttttgtcgagtaatcctctgcagtgatacttctggtagatgtcacccagtggtttttgttaggtcaaatgttcctgtatagtttttgcaaatagagctgtatactgtttaaatgtagcaggtgaactgaactggggtttgctcacctgcacagtaaaggcaaacttcaacagcaaaactgcaaaaaggtggtttttgcagtaggagaaaggaggatgtttatttgcagggcgccaagcaaggagaattgggcagctcatgcttgagacccaatctccatgatgacctacaagctagagtatttaaaggcagtggtaaatttcaggaaagcagaagttaaaggcaaaattgtaaatcagtcgagatcgggtgccttcagggtggtatggctgtataccaaaattgtaaatcactacatgaagcttatatattggtttggcctgaaaggtgaagtggggtaggcagggggcgggcttacaggttatggtggattcaaagactccctgatttgtgattggttaaggaagcaaagctttgtctaaaaacttggggtccgcagaaaggaacattaaggtctggccaggcccctcaggaagaaactgagagcaaagaatggaggtcagagtttagtccctggtgttcccccttatctgacgtctgtgtgaatccatttggtgggggtctgggtttctgaaaagtagctcaggggcacgtgttaaggatgtctctaggtgactctaacttccctggctattgtttgaaactgttatgaccttcttgcttatcagcttgctggtttccttctcggggcgagctgggtgcctggagttttcggtgaaggaaactcaagattctcctttatttctgtgcttgtgggaatccccctggcacaccccaaagaggggtccctgctccgtctcacagggatctttttgtatatttggcttagcatcatacatttgccatgttgtttcatcatctgcctaatttactgtttttgaatatttcatttgtttctaattgttactacagataatgctggggtgagcaactctgtgtacataggtttatctcctattggaatattttctttatataggcgtttttttttttcttttttttgggagacagagtcttgctctgttgcccaggctggagtgcagtggcgcgaccggagctcactgcaacctccacttcccgggttcaagtgattgtcccacctcagcctcctgaatagctgggattacaggtgcatgctaccatgcctggctacttttggtatttttagcagagacagggtttcaccatgttggccagggtggtctcgaactcctgacctcaagtgatccgtctggctcagcctcccaaagtgctgggattacaggtgtgagccactgcacctggcctatataggcttttttcttaaacctatttagtaatgttttcccaagtttattttttatttttaattttttccccaagtttatttttctatttttttttcatggaaaaatggggtaacttagcagtttcaatattgaagactgaagtttaaaaaaaatttaaattcaaggtacttttaaaattcagttagaaaagtaggctttaaaaattattagagacaagagtaccaaagcggtgtgtgtatgtgtgtgtgtgtatgcatgcttgtggattggaaaaactttggagactgattacttttcattatatatgtgtcacagtgaaacagcttttatgtgtcatgtaagattactgcttgcctctctaaggaaggtcgtgactgtttaaatagacgggcaaggtggaaccttttgaaagatgagcttttgaatataagttgtctgctagatcatggttgtattgaactaacaaggtttgcagatctgctgacttatataaagctttttgattcctactaagctttaagatttaaaaaatgttcaatgttgaaatttctgtggggctctatttttgctttggctttctggtgagagagtgaggaagcattctttccttcactaagtttgtctttcttgtcttctggatagattgattttaagagactaagggaatttacaaactaaagattttagtcatctggtggaaaaggagactttaagattgtttagggctgggcggggtgactcacatctgtaatcccagcactttgggaggccaaggcaggcagaacacttgaaggagttcaagaccagcgtggccaacgtggtgaaaccctgtctctactaaaaatacaaaaattgtttagctctgtttttcataatagaaatagaaaaggtaaaattgcttttcttctgaaaagaacaagtattgttcatccaagaagggtttttgtgactgaatcagcagtgcctgccctagtcatagctgtgcttcaaaaacctcagcatgattagtgttggagcaaaacaaggaagcaaagcaaatactgtttttgaaattctatctgttgcttgaactattttgtaataattaaactttgatgttgagaaatcacaactttattgtacacttcattgcaacttgaaattcatggtcttaaagtgagatttgaatttctattgagcgcctttaaaaaagtaataccaaaccataaagttaaaatctatgtatattgagtcatatctaaaaccacgtataaacataaattgtatttcctgttttaattccaggggaagtactgtttgggaaagctattattaggtaaatgttttacaaattactgtttctcactttcagtcataccctaatgatcccagcaagataatgtcctgtcttctaagatgtgcatcaagcctggtacatactgaaaaccctataaggtcctggataatttttgtttgattattcattgaagaaacatttattttccaattgtgtgaagtttttgactgttaataaaagaatctgtcaaccatcaaa

SEQ ID NO: 449993 - DNA, 4337 bp, Homo sapiens
ggcggggcggcggtgcccttgcggcgcagctggggtcgcggccctgctccccgcgctttcttaaggcccgcgggcggcgcaggagcggcactcgtggctgtggtggcttcggcagcggcttcagcagatcggcggcatcagcggtagcaccagcactagcagcatgttgagccgggcagtgtgcggcaccagcaggcagctggctccggttttggggtatctgggctccaggcagaagcacagcctccccgacctgccctacgactacggcgccctggaacctcacatcaacgcgcagatcatgcagctgcaccacagcaagcaccacgcggcctacgtgaacaacctgaacgtcaccgaggagaagtaccaggaggcgttggccaagggtaggttccaggctgagcggcgggaggcagtccccggcagaggcgaccccagggagccaggccccatacggacgggcctctccgtggaggagaactcgcttcgtatttgtaccggttccgagttttccaggagatgttacagcccagatagctcttcagcctgcactgaagttcaatggtggtggtcatatcaatcatagcattttctggacaaacctcagccctaacggtggtggagaacccaaaggggagttgctggaagccatcaaacgtgactttggttcctttgacaagtttaaggagaagctgacggctgcatctgttggtgtccaaggctcaggttggggttggcttggtttcaataaggaacggggacacttacaaattgctgcttgtccaaatcaggatccactgcaaggaacaacaggccttattccactgctggggattgatgtgtgggagcacgcttactaccttcagtataaaaatgtcaggcctgattatctaaaagctatttggaatgtaatcaactgggagaatgtaactgaaagatacatggcttgcaaaaagtaaaccacgatcgttatgctgagtatgttaagctctttatgactgtttttgtagtggtatagagtactgcagaatacagtaagctgctctattgtagcatttcttgatgttgcttagtcacttatttcataaacaacttaatgttctgaataatttcttactaaacattttgttattgggcaagtgattgaaaatagtaaatgctttgtgtgattgaatctgattggacattttcttcagagagctaaattacaattgtcatttataaaaccatcaaaaatattccatccatatactttggggacttgtagggatgcctttctagtcctattctattgcagttatagaaaatctagtcttttgccccagttacttaaaaataaaatattaacactttcccaagggaaacactcggctttctatagaaaattgcactttttgtcgagtaatcctctgcagtgatacttctggtagatgtcacccagtggtttttgttaggtcaaatgttcctgtatagtttttgcaaatagagctgtatactgtttaaatgtagcaggtgaactgaactggggtttgctcacctgcacagtaaaggcaaacttcaacagcaaaactgcaaaaaggtggtttttgcagtaggagaaaggaggatgtttatttgcagggcgccaagcaaggagaattgggcagctcatgcttgagacccaatctccatgatgacctacaagctagagtatttaaaggcagtggtaaatttcaggaaagcagaagttaaaggcaaaattgtaaatcagtcgagatcgggtgccttcagggtggtatggctgtataccaaaattgtaaatcactacatgaagcttatatattggtttggcctgaaaggtgaagtggggtaggcagggggcgggcttacaggttatggtggattcaaagactccctgatttgtgattggttaaggaagcaaagctttgtctaaaaacttggggtccgcagaaaggaacattaaggtctggccaggcccctcaggaagaaactgagagcaaagaatggaggtcagagtttagtccctggtgttcccccttatctgacgtctgtgtgaatccatttggtgggggtctgggtttctgaaaagtagctcaggggcacgtgttaaggatgtctctaggtgactctaacttccctggctattgtttgaaactgttatgaccttcttgcttatcagcttgctggtttccttctcggggcgagctgggtgcctggagttttcggtgaaggaaactcaagattctcctttatttctgtgcttgtgggaatccccctggcacaccccaaagaggggtccctgctccgtctcacagggatctttttgtatatttggcttagcatcatacatttgccatgttgtttcatcatctgcctaatttactgtttttgaatatttcatttgtttctaattgttactacagataatgctggggtgagcaactctgtgtacataggtttatctcctattggaatattttctttatataggcgtttttttttttcttttttttgggagacagagtcttgctctgttgcccaggctggagtgcagtggcgcgaccggagctcactgcaacctccacttcccgggttcaagtgattgtcccacctcagcctcctgaatagctgggattacaggtgcatgctaccatgcctggctacttttggtatttttagcagagacagggtttcaccatgttggccagggtggtctcgaactcctgacctcaagtgatccgtctggctcagcctcccaaagtgctgggattacaggtgtgagccactgcacctggcctatataggcttttttcttaaacctatttagtaatgttttcccaagtttattttttatttttaattttttccccaagtttatttttctatttttttttcatggaaaaatggggtaacttagcagtttcaatattgaagactgaagtttaaaaaaaatttaaattcaaggtacttttaaaattcagttagaaaagtaggctttaaaaattattagagacaagagtaccaaagcggtgtgtgtatgtgtgtgtgtgtatgcatgcttgtggattggaaaaactttggagactgattacttttcattatatatgtgtcacagtgaaacagcttttatgtgtcatgtaagattactgcttgcctctctaaggaaggtcgtgactgtttaaatagacgggcaaggtggaaccttttgaaagatgagcttttgaatataagttgtctgctagatcatggttgtattgaactaacaaggtttgcagatctgctgacttatataaagctttttgattcctactaagctttaagatttaaaaaatgttcaatgttgaaatttctgtggggctctatttttgctttggctttctggtgagagagtgaggaagcattctttccttcactaagtttgtctttcttgtcttctggatagattgattttaagagactaagggaatttacaaactaaagattttagtcatctggtggaaaaggagactttaagattgtttagggctgggcggggtgactcacatctgtaatcccagcactttgggaggccaaggcaggcagaacacttgaaggagttcaagaccagcgtggccaacgtggtgaaaccctgtctctactaaaaatacaaaaattgtttagctctgtttttcataatagaaatagaaaaggtaaaattgcttttcttctgaaaagaacaagtattgttcatccaagaagggtttttgtgactgaatcagcagtgcctgccctagtcatagctgtgcttcaaaaacctcagcatgattagtgttggagcaaaacaaggaagcaaagcaaatactgtttttgaaattctatctgttgcttgaactattttgtaataattaaactttgatgttgagaaatcacaactttattgtacacttcattgcaacttgaaattcatggtcttaaagtgagatttgaatttctattgagcgcctttaaaaaagtaataccaaaccataaagttaaaatctatgtatattgagtcatatctaaaaccacgtataaacataaattgtatttcctgttttaattccaggggaagtactgtttgggaaagctattattaggtaaatgttttacaaattactgtttctcactttcagtcataccctaatgatcccagcaagataatgtcctgtcttctaagatgtgcatcaagcctggtacatactgaaaaccctataaggtcctggataatttttgtttgattattcattgaagaaacatttattttccaattgtgtgaagtttttgactgttaataaaagaatctgtcaaccatcaaa

SEQ ID NO: 449994 - DNA, 4510 bp, Homo sapiens
ggcggggcggcggtgcccttgcggcgcagctggggtcgcggccctgctccccgcgctttcttaaggcccgcgggcggcgcaggagcggcactcgtggctgtggtggcttcggcagcggcttcagcagatcggcggcatcagcggtagcaccagcactagcagcatgttgagccgggcagtgtgcggcaccagcaggcagctggctccggttttggggtatctgggctccaggcagaagcacagcctccccgacctgccctacgactacggcgccctggaacctcacatcaacgcgcagatcatgcagctgcaccacagcaagcaccacgcggcctacgtgaacaacctgaacgtcaccgaggagaagtaccaggaggcgttggccaagggagatgttacagcccagatagctcttcagcctgcactgaagttcaatggtggtggtcatatcaatcatagcattttctggacaaacctcagccctaacggtggtggagaacccaaaggggagttgctggaagccatcaaacgtgactttggttcctttgacaagtttaaggagaagctgacggctgcatctgttggtgtccaaggctcaggttggggttggcttggtttcaataaggaacggggacacttacaaattgctgcttgtccaaatcaggatccactgcaaggaacaacaggccttattccactgctggggattgatgtgtgggagcacgcttactaccttcagtataaaaatgtcaggcctgattatctaaaagctatttggaatgtaatcaactgggagaatgtaactgaaagatacatggcttgcaaaaagtaaaccacgatcgttatgctgagtatgttaagctctttatgactgtttttgtagtggtatagagtactgcagaatacagtaagctgctctattgtagcatttcttgatgttgcttagtcacttatttcataaacaacttaatgttctgaataatttcttactaaacattttgttattgggcaagtgattgaaaatagtaaatgctttgtgtgattgaatctgattggacattttcttcagagagctaaattacaattgtcatttataaaaccatcaaaaatattccatccatatactttggggacttgtagggatgcctttctagtcctattctattgcagttatagaaaatctagtcttttgccccagttacttaaaaataaaatattaacactttcccaagggaaacactcggctttctatagaaaattgcactttttgtcgagtaatcctctgcagtgatacttctggtagatgtcacccagtggtttttgttaggtcaaatgttcctgtatagtttttgcaaatagagctgtatactgtttaaatgtagcaggtgaactgaactggggtttgctcacctgcacagtaaaggcaaacttcaacagcaaaactgcaaaaaggtggtttttgcagtaggagaaaggaggatgtttatttgcagggcgccaagcaaggagaattgggcagctcatgcttgagacccaatctccatgatgacctacaagctagagtatttaaaggcagtggtaaatttcaggaaagcagaagttaaaggcaaaattgtaaatcagtcgagatcgggtgccttcagggtggtatggctgtataccaaaattgtaaatcactacatgaagcttatatattggtttggcctgaaaggtgaagtggggtaggcagggggcgggcttacaggttatggtggattcaaagactccctgatttgtgattggttaaggaagcaaagctttgtctaaaaacttggggtccgcagaaaggaacattaaggtctggccaggcccctcaggaagaaactgagagcaaagaatggaggtcagagtttagtccctggtgttcccccttatctgacgtctgtgtgaatccatttggtgggggtctgggtttctgaaaagtagctcaggggcacgtgttaaggatgtctctaggtgactctaacttccctggctattgtttgaaactgttatgaccttcttgcttatcagcttgctggtttccttctcggggcgagctgggtgcctggagttttcggtgaaggaaactcaagattctcctttatttctgtgcttgtgggaatccccctggcacaccccaaagaggggtccctgctccgtctcacagggatctttttgtatatttggcttagcatcatacatttgccatgttgtttcatcatctgcctaatttactgtttttgaatatttcatttgtttctaattgttactacagataatgctggggtgagcaactctgtgtacataggtttatctcctattggaatattttctttatataggcgtttttttttttcttttttttgggagacagagtcttgctctgttgcccaggctggagtgcagtggcgcgaccggagctcactgcaacctccacttcccgggttcaagtgattgtcccacctcagcctcctgaatagctgggattacaggtgcatgctaccatgcctggctacttttggtatttttagcagagacagggtttcaccatgttggccagggtggtctcgaactcctgacctcaagtgatccgtctggctcagcctcccaaagtgctgggattacaggtgtgagccactgcacctggcctatataggcttttttcttaaacctatttagtaatgttttcccaagtttattttttatttttaattttttccccaagtttatttttctatttttttttcatggaaaaatggggtaacttagcagtttcaatattgaagactgaagtttaaaaaaaatttaaattcaaggtacttttaaaattcagttagaaaagtaggctttaaaaattattagagacaagagtaccaaagcggtgtgtgtatgtgtgtgtgtgtatgcatgcttgtggattggaaaaactttggagactgattacttttcattatatatgtgtcacagtgaaacagcttttatgtgtcatgtaagattactgcttgcctctctaaggaaggtcgtgactgtttaaatagacgggcaaggtggaaccttttgaaagatgagcttttgaatataagttgtctgctagatcatggttgtattgaactaacaaggtttgcagatctgctgacttatataaagctttttgattcctactaagctttaagatttaaaaaatgttcaatgttgaaatttctgtggggctctatttttgctttggctttctggtgagagagtgaggaagcattctttccttcactaagtttgtctttcttgtcttctggatagattgattttaagagactaagggaatttacaaactaaagattttagtcatctggtggaaaaggagactttaagattgtttagggctgggcggggtgactcacatctgtaatcccagcactttgggaggccaaggcaggcagaacacttgaaggagttcaagaccagcgtggccaacgtggtgaaaccctgtctctactaaaaatacaaaaattgtttagctctgtttttcataatagaaatagaaaaggtaaaattgcttttcttctgaaaagaacaagtattgttcatccaagaagggtttttgtgactgaatcagcagtgcctgccctagtcatagctgtgcttcaaaaacctcagcatgattagtgttggagcaaaacaaggaagcaaagcaaatactgtttttgaaattctatctgttgcttgaactattttgtaataattaaactttgatgttgagaaatcacaactttattgtacacttcattgcaacttgaaattcatggtcttaaagtgagatttgaatttctattgagcgcctttaaaaaagtaataccaaaccataaagttaaaatctatgtatattgagtcatatctaaaaccacgtataaacataaattgtatttcctgttttaattccaggggaagtactgtttgggaaagctattattaggtaaatgttttacaaattactgtttctcactttcagtcataccctaatgatcccagcaagataatgtcctgtcttctaagatgtgcatcaagcctggtacatactgaaaaccctataaggtcctggataatttttgtttgattattcattgaagaaacatttattttccaattgtgtgaagtttttgactgttaataaaagaatctgtcaaccatcaaaaaaaaaaaaaaacaaaaaaaaaaaaaaaaaaaaaaaaaaaaaaaaaaaaaaaaaataaaatacctttgcggcccccttggcccaaggggattttaacttgggcaaggttattgctgccgcccgaatttggggttaattggccaattccgccttatggggggcggttataaattccatggcccggggttttacagggcggggctgggaaaacccctgggggtacccaacttaattgcgctgggagaaaatcccctttttccaggttggggaaaaagcgaagaggcccggaccggtggcctctcc

SEQ ID NO: 449995 - DNA, 2590 bp, Homo sapiens
gtcggtacctacttttccacagggagggtggtatggctgtataccaaaattgtaaatcactacatgaagcttatatattggtttggcctgaaaggtgaagtggggtaggcagggggcgggcttacaggttatggtggattcaaagactccctgatttgtgattggttaaggaagcaaagctttgtctaaaaacttggggtccgcagaaaggaacattaaggtctggccaggcccctcaggaagaaactgagagcaaagaatggaggtcagagtttagtccctggtgttcccccttatctgacgtctgtgtgaatccatttggtgggggtctgggtttctgaaaagtagctcaggggcacgtgttaaggatgtctctaggtgactctaacttccctggctattgtttgaaactgttatgaccttcttgcttatcagcttgctggtttccttctcggggcgagctgggtgcctggagttttcggtgaaggaaactcaagattctcctttatttctgtgcttgtgggaatccccctggcacaccccaaagaggggtccctgctccgtctcacagggatctttttgtatatttggcttagcatcatacatttgccatgttgtttcatcatctgcctaatttactgtttttgaatatttcatttgtttctaattgttactacagataatgctggggtgagcaactctgtgtacataggtttatctcctattggaatattttctttatataggcgtttttttttttcttttttttgggagacagagtcttgctctgttgcccaggctggagtgcagtggcgcgaccggagctcactgcaacctccacttcccgggttcaagtgattgtcccacctcagcctcctgaatagctgggattacaggtgcatgctaccatgcctggctacttttggtatttttagcagagacagggtttcaccatgttggccagggtggtctcgaactcctgacctcaagtgatccgtctggctcagcctcccaaagtgctgggattacaggtgtgagccactgcacctggcctatataggcttttttcttaaacctatttagtaatgttttcccaagtttattttttatttttaattttttccccaagtttatttttctatttttttttcatggaaaaatggggtaacttagcagtttcaatattgaagactgaagtttaaaaaaaatttaaattcaaggtacttttaaaattcagttagaaaagtaggctttaaaaattattagagacaagagtaccaaagcggtgtgtgtatgtgtgtgtgtgtatgcatgcttgtggattggaaaaactttggagactgattacttttcattatatatgtgtcacagtgaaacagcttttatgtgtcatgtaagattactgcttgcctctctaaggaaggtcgtgactgtttaaatagacgggcaaggtggaaccttttgaaagatgagcttttgaatataagttgtctgctagatcatggttgtattgaactaacaaggtttgcagatctgctgacttatataaagctttttgattcctactaagctttaagatttaaaaaatgttcaatgttgaaatttctgtggggctctatttttgctttggctttctggtgagagagtgaggaagcattctttccttcactaagtttgtctttcttgtcttctggatagattgattttaagagactaagggaatttacaaactaaagattttagtcatctggtggaaaaggagactttaagattgtttagggctgggcggggtgactcacatctgtaatcccagcactttgggaggccaaggcaggcagaacacttgaaggagttcaagaccagcgtggccaacgtggtgaaaccctgtctctactaaaaatacaaaaattgtttagctctgtttttcataatagaaatagaaaaggtaaaattgcttttcttctgaaaagaacaagtattgttcatccaagaagggtttttgtgactgaatcagcagtgcctgccctagtcatagctgtgcttcaaaaacctcagcatgattagtgttggagcaaaacaaggaagcaaagcaaatactgtttttgaaattctatctgttgcttgaactattttgtaataattaaactttgatgttgagaaatcacaactttattgtacacttcattgcaacttgaaattcatggtcttaaagtgagatttgaatttctattgagcgcctttaaaaaagtaataccaaaccataaagttaaaatctatgtatattgagtcatatctaaaaccacgtataaacataaattgtatttcctgttttaattccaggggaagtactgtttgggaaagctattattaggtaaatgttttacaaattactgtttctcactttcagtcataccctaatgatcccagcaagataatgtcctgtcttctaagatgtgcatcaagcctggtacatactgaaaaccctataaggtcctggataatttttgtttgattattcattgaagaaacatttattttccaattgtgtgaagtttttgactgttaataaaagaatctgtcaaccatcaaa

SEQ ID NO: 449996 - DNA, 2430 bp, Homo sapiens
cggacgcgtgggtcgacccacgcgtctaaaaacttggggtccgcagaaaggaacattaaggtctggccaggcccctcaggaagaaactgagagcaaagaatggaggtcagagtttagtccctggtgttcccccttatctgacgtctgtgtgaatccatttggtgggggtctgggtttctgaaaagtagctcaggggcacgtgttaaggatgtctctaggtgactctaacttccctggctattgtttgaaactgttatgaccttcttgcttatcagcttgctggtttccttctcggggcgagctgggtgcctggagttttcggtgaaggaaactcaagattctcctttatttctgtgcttgtgggaatccccctggcacaccccaaagaggggtccctgctccgtctcacagggatctttttgtatatttggcttagcatcatacatttgccatgttgtttcatcatctgcctaatttactgtttttgaatatttcatttgtttctaattgttactacagataatgctggggtgagcaactctgtgtacataggtttatctcctattggaatattttctttatataggcgtttttttttttcttttttttgggagacagagtcttgctctgttgcccaggctggagtgcagtggcgcgaccggagctcactgcaacctccacttcccgggttcaagtgattgtcccacctcagcctcctgaatagctgggattacaggtgcatgctaccatgcctggctacttttggtatttttagcagagacagggtttcaccatgttggccagggtggtctcgaactcctgacctcaagtgatccgtctggctcagcctcccaaagtgctgggattacaggtgtgagccactgcacctggcctatataggcttttttcttaaacctatttagtaatgttttcccaagtttattttttatttttaattttttccccaagtttatttttctatttttttttcatggaaaaatggggtaacttagcagtttcaatattgaagactgaagtttaaaaaaaatttaaattcaaggtacttttaaaattcagttagaaaagtaggctttaaaaattattagagacaagagtaccaaagcggtgtgtgtatgtgtgtgtgtgtatgcatgcttgtggattggaaaaactttggagactgattacttttcattatatatgtgtcacagtgaaacagcttttatgtgtcatgtaagattactgcttgcctctctaaggaaggtcgtgactgtttaaatagacgggcaaggtggaaccttttgaaagatgagcttttgaatataagttgtctgctagatcatggttgtattgaactaacaaggtttgcagatctgctgacttatataaagctttttgattcctactaagctttaagatttaaaaaatgttcaatgttgaaatttctgtggggctctatttttgctttggctttctggtgagagagtgaggaagcattctttccttcactaagtttgtctttcttgtcttctggatagattgattttaagagactaagggaatttacaaactaaagattttagtcatctggtggaaaaggagactttaagattgtttagggctgggcggggtgactcacatctgtaatcccagcactttgggaggccaaggcaggcagaacacttgaaggagttcaagaccagcgtggccaacgtggtgaaaccctgtctctactaaaaatacaaaaattgtttagctctgtttttcataatagaaatagaaaaggtaaaattgcttttcttctgaaaagaacaagtattgttcatccaagaagggtttttgtgactgaatcagcagtgcctgccctagtcatagctgtgcttcaaaaacctcagcatgattagtgttggagcaaaacaaggaagcaaagcaaatactgtttttgaaattctatctgttgcttgaactattttgtaataattaaactttgatgttgagaaatcacaactttattgtacacttcattgcaacttgaaattcatggtcttaaagtgagatttgaatttctattgagcgcctttaaaaaagtaataccaaaccataaagttaaaatctatgtatattgagtcatatctaaaaccacgtataaacataaattgtatttcctgttttaattccaggggaagtactgtttgggaaagctattattaggtaaatgttttacaaattactgtttctcactttcagtcataccctaatgatcccagcaagataatgtcctgtcttctaagatgtgcatcaagcctggtacatactgaaaaccctataaggtcctggataatttttgtttgattattcattgaagaaacatttattttccaattgtgtgaagtttttgactgttaataaaagaatctgtcaaccatcaaa

SEQ ID NO: 449997 - DNA, 4271 bp, Homo sapiens
ggcggggcggcggtgcccttgcggcgcagctggggtcgcggccctgctccccgcgctttcttaaggcccgcgggcggcgcaggagcggcactcgtggctgtggtggcttcggcagcggcttcagcagatcggcggcatcagcggtagcaccagcactagcagcatgttgagccgggcagtgtgcggcaccagcaggcagctggctccggttttggggtatctgggctccaggcagaagcacagcctccccgacctgccctacgactacggcgccctggaacctcacatcaacgcgcagatcatgcagctgcaccacagcaagcaccacgcggcctacgtgaacaacctgaacgtcaccgaggagaagtaccaggaggcgttggccaagggagatgttacagcccagatagctcttcagcctgcactgaagttcaatggtggtggtcatatcaatcatagcattttctggacaaacctcagccctaacggtggtggagaacccaaaggggagttgctggaagccatcaaacgtgactttggttcctttgacaagtttaaggagaagctgacggctgcatctgttggtgtccaaggctcaggttggggttggcttggtttcaataaggaacggggacacttacaaattgctgcttgtccaaatcaggatccactgcaaggaacaacaggccttattccactgctggggattgatgtgtgggagcacgcttactaccttcagtataaaaatgtcaggcctgattatctaaaagctatttggaatgtaatcaactgggagaatgtaactgaaagatacatggcttgcaaaaagtaaaccacgatcgttatgctgagtatgttaagctctttatgactgtttttgtagtggtatagagtactgcagaatacagtaagctgctctattgtagcatttcttgatgttgcttagtcacttatttcataaacaacttaatgttctgaataatttcttactaaacattttgttattgggcaagtgattgaaaatagtaaatgctttgtgtgattgaatctgattggacattttcttcagagagctaaattacaattgtcatttataaaaccatcaaaaatattccatccatatactttggggacttgtagggatgcctttctagtcctattctattgcagttatagaaaatctagtcttttgccccagttacttaaaaataaaatattaacactttcccaagggaaacactcggctttctatagaaaattgcactttttgtcgagtaatcctctgcagtgatacttctggtagatgtcacccagtggtttttgttaggtcaaatgttcctgtatagtttttgcaaatagagctgtatactgtttaaatgtagcaggtgaactgaactggggtttgctcacctgcacagtaaaggcaaacttcaacagcaaaactgcaaaaaggtggtttttgcagtaggagaaaggaggatgtttatttgcagggcgccaagcaaggagaattgggcagctcatgcttgagacccaatctccatgatgacctacaagctagagtatttaaaggcagtggtaaatttcaggaaagcagaagttaaaggcaaaattgtaaatcagtcgagatcgggtgccttcagggtggtatggctgtataccaaaattgtaaatcactacatgaagcttatatattggtttggcctgaaaggtgaagtggggtaggcagggggcgggcttacaggttatggtggattcaaagactccctgatttgtgattggttaaggaagcaaagctttgtctaaaaacttggggtccgcagaaaggaacattaaggtctggccaggcccctcaggaagaaactgagagcaaagaatggaggtcagagtttagtccctggtgttcccccttatctgacgtctgtgtgaatccatttggtgggggtctgggtttctgaaaagtagctcaggggcacgtgttaaggatgtctctaggtgactctaacttccctggctattgtttgaaactgttatgaccttcttgcttatcagcttgctggtttccttctcggggcgagctgggtgcctggagttttcggtgaaggaaactcaagattctcctttatttctgtgcttgtgggaatccccctggcacaccccaaagaggggtccctgctccgtctcacagggatctttttgtatatttggcttagcatcatacatttgccatgttgtttcatcatctgcctaatttactgtttttgaatatttcatttgtttctaattgttactacagataatgctggggtgagcaactctgtgtacataggtttatctcctattggaatattttctttatataggcgtttttttttttcttttttttgggagacagagtcttgctctgttgcccaggctggagtgcagtggcgcgaccggagctcactgcaacctccacttcccgggttcaagtgattgtcccacctcagcctcctgaatagctgggattacaggtgcatgctaccatgcctggctacttttggtatttttagcagagacagggtttcaccatgttggccagggtggtctcgaactcctgacctcaagtgatccgtctggctcagcctcccaaagtgctgggattacaggtgtgagccactgcacctggcctatataggcttttttcttaaacctatttagtaatgttttcccaagtttattttttatttttaattttttccccaagtttatttttctatttttttttcatggaaaaatggggtaacttagcagtttcaatattgaagactgaagtttaaaaaaaatttaaattcaaggtacttttaaaattcagttagaaaagtaggctttaaaaattattagagacaagagtaccaaagcggtgtgtgtatgtgtgtgtgtgtatgcatgcttgtggattggaaaaactttggagactgattacttttcattatatatgtgtcacagtgaaacagcttttatgtgtcatgtaagattactgcttgcctctctaaggaaggtcgtgactgtttaaatagacgggcaaggtggaaccttttgaaagatgagcttttgaatataagttgtctgctagatcatggttgtattgaactaacaaggtttgcagatctgctgacttatataaagctttttgattcctactaagctttaagatttaaaaaatgttcaatgttgaaatttctgtggggctctatttttgctttggctttctggtgagagagtgaggaagcattctttccttcactaagtttgtctttcttgtcttctggatagattgattttaagagactaagggaatttacaaactaaagattttagtcatctggtggaaaaggagactttaagattgtttagggctgggcggggtgactcacatctgtaatcccagcactttgggaggccaaggcaggcagaacacttgaaggagttcaagaccagcgtggccaacgtggtgaaaccctgtctctactaaaaatacaaaaattgtttagctctgtttttcataatagaaatagaaaaggtaaaattgcttttcttctgaaaagaacaagtattgttcatccaagaagggtttttgtgactgaatcagcagtgcctgccctagtcatagctgtgcttcaaaaacctcagcatgattagtgttggagcaaaacaaggaagcaaagcaaatactgtttttgaaattctatctgttgcttgaactattttgtaataattaaactttgatgttgagaaatcacaactttattgtacacttcattgcaacttgaaattcatggtcttaaagtgagatttgaatttctattgagcgcctttaaaaaagtaataccaaaccataaagttaaaatctatgtatattgagtcatatctaaaaccacgtataaacataaattgtatttcctgttttaattccaggggaagtactgtttgggaaagctattattaggtaaatgttttacaaattactgtttctcactttcagtcataccctaatgatcccagcaagataatgtcctgtcttctaagatgtgcatcaagcctggtacatactgaaaaccctataaggtcctggataatttttgtttgattattcattgaagaaacatttattttccaattgtgtgaagtttttgactgttaataaaagaatctgtcaaccatcaaacaaagaggtctgcattatgcttgcatgtcaaaaacattaaaaatcctataatcttcaaaaaaat

SEQ ID NO: 449998 - DNA, 4266 bp, Homo sapiens
ggcggggcggcggtgcccttgcggcgcagctggggtcgcggccctgctccccgcgctttcttaaggcccgcgggcggcgcaggagcggcactcgtggctgtggtggcttcggcagcggcttcagcagatcggcggcatcagcggtagcaccagcactagcagcatgttgagccgggcagtgtgcggcaccagcaggcagctggctccggttttggggtatctgggctccaggcagaagcacagcctccccgacctgccctacgactacggcgccctggaacctcacatcaacgcgcagatcatgcagctgcaccacagcaagcaccacgcggcctacgtgaacaacctgaacgtcaccgaggagaagtaccaggaggcgttggccaagggagatgttacagcccagatagctcttcagcctgcactgaagttcaatggtggtggtcatatcaatcatagcattttctggacaaacctcagccctaacggtggtggagaacccaaaggggagttgctggaagccatcaaacgtgactttggttcctttgacaagtttaaggagaagctgacggctgcatctgttggtgtccaaggctcaggttggggttggcttggtttcaataaggaacggggacacttacaaattgctgcttgtccaaatcaggatccactgcaaggaacaacaggccttattccactgctggggattgatgtgtgggagcacgcttactaccttcagtataaaaatgtcaggcctgattatctaaaagctatttggaatgtaatcaactgggagaatgtaactgaaagatacatggcttgcaaaaagtaaaccacgatcgttatgctgagtatgttaagctctttatgactgtttttgtagtggtatagagtactgcagaatacagtaagctgctctattgtagcatttcttgatgttgcttagtcacttatttcataaacaacttaatgttctgaataatttcttactaaacattttgttattgggcaagtgattgaaaatagtaaatgctttgtgtgattgaatctgattggacattttcttcagagagctaaattacaattgtcatttataaaaccatcaaaaatattccatccatatactttggggacttgtagggatgcctttctagtcctattctattgcagttatagaaaatctagtcttttgccccagttacttaaaaataaaatattaacactttcccaagggaaacactcggctttctatagaaaattgcactttttgtcgagtaatcctctgcagtgatacttctggtagatgtcacccagtggtttttgttaggtcaaatgttcctgtatagtttttgcaaatagagctgtatactgtttaaatgtagcaggtgaactgaactggggtttgctcacctgcacagtaaaggcaaacttcaacagcaaaactgcaaaaaggtggtttttgcagtaggagaaaggaggatgtttatttgcagggcgccaagcaaggagaattgggcagctcatgcttgagacccaatctccatgatgacctacaagctagagtatttaaaggcagtggtaaatttcaggaaagcagaagttaaaggcaaaattgtaaatcagtcgagatcgggtgccttcagggtggtatggctgtataccaaaattgtaaatcactacatgaagcttatatattggtttggcctgaaaggtgaagtggggtaggcagggggcgggcttacaggttatggtggattcaaagactccctgatttgtgattggttaaggaagcaaagctttgtctaaaaacttggggtccgcagaaaggaacattaaggtctggccaggcccctcaggaagaaactgagagcaaagaatggaggtcagagtttagtccctggtgttcccccttatctgacgtctgtgtgaatccatttggtgggggtctgggtttctgaaaagtagctcaggggcacgtgttaaggatgtctctaggtgactctaacttccctggctattgtttgaaactgttatgaccttcttgcttatcagcttgctggtttccttctcggggcgagctgggtgcctggagttttcggtgaaggaaactcaagattctcctttatttctgtgcttgtgggaatccccctggcacaccccaaagaggggtccctgctccgtctcacagggatctttttgtatatttggcttagcatcatacatttgccatgttgtttcatcatctgcctaatttactgtttttgaatatttcatttgtttctaattgttactacagataatgctggggtgagcaactctgtgtacataggtttatctcctattggaatattttctttatataggcgtttttttttttcttttttttgggagacagagtcttgctctgttgcccaggctggagtgcagtggcgcgaccggagctcactgcaacctccacttcccgggttcaagtgattgtcccacctcagcctcctgaatagctgggattacaggtgcatgctaccatgcctggctacttttggtatttttagcagagacagggtttcaccatgttggccagggtggtctcgaactcctgacctcaagtgatccgtctggctcagcctcccaaagtgctgggattacaggtgtgagccactgcacctggcctatataggcttttttcttaaacctatttagtaatgttttcccaagtttattttttatttttaattttttccccaagtttatttttctatttttttttcatggaaaaatggggtaacttagcagtttcaatattgaagactgaagtttaaaaaaaatttaaattcaaggtacttttaaaattcagttagaaaagtaggctttaaaaattattagagacaagagtaccaaagcggtgtgtgtatgtgtgtgtgtgtatgcatgcttgtggattggaaaaactttggagactgattacttttcattatatatgtgtcacagtgaaacagcttttatgtgtcatgtaagattactgcttgcctctctaaggaaggtcgtgactgtttaaatagacgggcaaggtggaaccttttgaaagatgagcttttgaatataagttgtctgctagatcatggttgtattgaactaacaaggtttgcagatctgctgacttatataaagctttttgattcctactaagctttaagatttaaaaaatgttcaatgttgaaatttctgtggggctctatttttgctttggctttctggtgagagagtgaggaagcattctttccttcactaagtttgtctttcttgtcttctggatagattgattttaagagactaagggaatttacaaactaaagattttagtcatctggtggaaaaggagactttaagattgtttagggctgggcggggtgactcacatctgtaatcccagcactttgggaggccaaggcaggcagaacacttgaaggagttcaagaccagcgtggccaacgtggtgaaaccctgtctctactaaaaatacaaaaattgtttagctctgtttttcataatagaaatagaaaaggtaaaattgcttttcttctgaaaagaacaagtattgttcatccaagaagggtttttgtgactgaatcagcagtgcctgccctagtcatagctgtgcttcaaaaacctcagcatgattagtgttggagcaaaacaaggaagcaaagcaaatactgtttttgaaattctatctgttgcttgaactattttgtaataattaaactttgatgttgagaaatcacaactttattgtacacttcattgcaacttgaaattcatggtcttaaagtgagatttgaatttctattgagcgcctttaaaaaagtaataccaaaccataaagttaaaatctatgtatattgagtcatatctaaaaccacgtataaacataaattgtatttcctgttttaattccaggggaagtactgtttgggaaagctattattaggtaaatgttttacaaattactgtttctcactttcagtcataccctaatgatcccagcaagataatgtcctgtcttctaagatgtgcatcaagcctggtacatactgaaaaccctataaggtcctggataatttttgtttgattattcattgaagaaacatttattttccaattgtgtgaagtttttgactgttaataaaagaatctgtcaaccatcaaaattcaatcctaattcaccgacctcttgctctctccggttaaaaaattctcaaggggggg

SEQ ID NO: 449999 - DNA, 4397 bp, Homo sapiens
  misc_feature (4212)..(4212): n is a, c, g, or t
ggcggggcggcggtgcccttgcggcgcagctggggtcgcggccctgctccccgcgctttcttaaggcccgcgggcggcgcaggagcggcactcgtggctgtggtggcttcggcagcggcttcagcagatcggcggcatcagcggtagcaccagcactagcagcatgttgagccgggcagtgtgcggcaccagcaggcagctggctccggttttggggtatctgggctccaggcagaagcacagcctccccgacctgccctacgactacggcgccctggaacctcacatcaacgcgcagatcatgcagctgcaccacagcaagcaccacgcggcctacgtgaacaacctgaacgtcaccgaggagaagtaccaggaggcgttggccaagggagatgttacagcccagatagctcttcagcctgcactgaagttcaatggtggtggtcatatcaatcatagcattttctggacaaacctcagccctaacggtggtggagaacccaaaggggagttgctggaagccatcaaacgtgactttggttcctttgacaagtttaaggagaagctgacggctgcatctgttggtgtccaaggctcaggttggggttggcttggtttcaataaggaacggggacacttacaaattgctgcttgtccaaatcaggatccactgcaaggaacaacaggccttattccactgctggggattgatgtgtgggagcacgcttactaccttcagtataaaaatgtcaggcctgattatctaaaagctatttggaatgtaatcaactgggagaatgtaactgaaagatacatggcttgcaaaaagtaaaccacgatcgttatgctgagtatgttaagctctttatgactgtttttgtagtggtatagagtactgcagaatacagtaagctgctctattgtagcatttcttgatgttgcttagtcacttatttcataaacaacttaatgttctgaataatttcttactaaacattttgttattgggcaagtgattgaaaatagtaaatgctttgtgtgattgaatctgattggacattttcttcagagagctaaattacaattgtcatttataaaaccatcaaaaatattccatccatatactttggggacttgtagggatgcctttctagtcctattctattgcagttatagaaaatctagtcttttgccccagttacttaaaaataaaatattaacactttcccaagggaaacactcggctttctatagaaaattgcactttttgtcgagtaatcctctgcagtgatacttctggtagatgtcacccagtggtttttgttaggtcaaatgttcctgtatagtttttgcaaatagagctgtatactgtttaaatgtagcaggtgaactgaactggggtttgctcacctgcacagtaaaggcaaacttcaacagcaaaactgcaaaaaggtggtttttgcagtaggagaaaggaggatgtttatttgcagggcgccaagcaaggagaattgggcagctcatgcttgagacccaatctccatgatgacctacaagctagagtatttaaaggcagtggtaaatttcaggaaagcagaagttaaaggcaaaattgtaaatcagtcgagatcgggtgccttcagggtggtatggctgtataccaaaattgtaaatcactacatgaagcttatatattggtttggcctgaaaggtgaagtggggtaggcagggggcgggcttacaggttatggtggattcaaagactccctgatttgtgattggttaaggaagcaaagctttgtctaaaaacttggggtccgcagaaaggaacattaaggtctggccaggcccctcaggaagaaactgagagcaaagaatggaggtcagagtttagtccctggtgttcccccttatctgacgtctgtgtgaatccatttggtgggggtctgggtttctgaaaagtagctcaggggcacgtgttaaggatgtctctaggtgactctaacttccctggctattgtttgaaactgttatgaccttcttgcttatcagcttgctggtttccttctcggggcgagctgggtgcctggagttttcggtgaaggaaactcaagattctcctttatttctgtgcttgtgggaatccccctggcacaccccaaagaggggtccctgctccgtctcacagggatctttttgtatatttggcttagcatcatacatttgccatgttgtttcatcatctgcctaatttactgtttttgaatatttcatttgtttctaattgttactacagataatgctggggtgagcaactctgtgtacataggtttatctcctattggaatattttctttatataggcgtttttttttttcttttttttgggagacagagtcttgctctgttgcccaggctggagtgcagtggcgcgaccggagctcactgcaacctccacttcccgggttcaagtgattgtcccacctcagcctcctgaatagctgggattacaggtgcatgctaccatgcctggctacttttggtatttttagcagagacagggtttcaccatgttggccagggtggtctcgaactcctgacctcaagtgatccgtctggctcagcctcccaaagtgctgggattacaggtgtgagccactgcacctggcctatataggcttttttcttaaacctatttagtaatgttttcccaagtttattttttatttttaattttttccccaagtttatttttctatttttttttcatggaaaaatggggtaacttagcagtttcaatattgaagactgaagtttaaaaaaaatttaaattcaaggtacttttaaaattcagttagaaaagtaggctttaaaaattattagagacaagagtaccaaagcggtgtgtgtatgtgtgtgtgtgtatgcatgcttgtggattggaaaaactttggagactgattacttttcattatatatgtgtcacagtgaaacagcttttatgtgtcatgtaagattactgcttgcctctctaaggaaggtcgtgactgtttaaatagacgggcaaggtggaaccttttgaaagatgagcttttgaatataagttgtctgctagatcatggttgtattgaactaacaaggtttgcagatctgctgacttatataaagctttttgattcctactaagctttaagatttaaaaaatgttcaatgttgaaatttctgtggggctctatttttgctttggctttctggtgagagagtgaggaagcattctttccttcactaagtttgtctttcttgtcttctggatagattgattttaagagactaagggaatttacaaactaaagattttagtcatctggtggaaaaggagactttaagattgtttagggctgggcggggtgactcacatctgtaatcccagcactttgggaggccaaggcaggcagaacacttgaaggagttcaagaccagcgtggccaacgtggtgaaaccctgtctctactaaaaatacaaaaattgtttagctctgtttttcataatagaaatagaaaaggtaaaattgcttttcttctgaaaagaacaagtattgttcatccaagaagggtttttgtgactgaatcagcagtgcctgccctagtcatagctgtgcttcaaaaacctcagcatgattagtgttggagcaaaacaaggaagcaaagcaaatactgtttttgaaattctatctgttgcttgaactattttgtaataattaaactttgatgttgagaaatcacaactttattgtacacttcattgcaacttgaaattcatggtcttaaagtgagatttgaatttctattgagcgcctttaaaaaagtaataccaaaccataaagttaaaatctatgtatattgagtcatatctaaaaccacgtataaacataaattgtatttcctgttttaattccaggggaagtactgtttgggaaagctattattaggtaaatgttttacaaattactgtttctcactttcagtcataccctaatgatcccagcaagataatgtcctgtcttctaagatgtgcatcaagcctggtacatactgaaaaccctataaggtcctggataatttttgtttgattattcattgaagaaacatttattttccaattgtgtgaagtttttgactgttaataaaagaatctgtcaaccatcaaatctgntttttttttttttttttaagcataatacaaaataaatttttttaattgggcaaacttccagatgggaatttcaaagaacaaagtgcttgagatgcaaagattagttccagttgctttgaccaaattttttagacaagtatttcattttaaagggctctcgttggagaaaaacctcaaattgggcc

SEQ ID NO: 450000 - DNA, 1743 bp, Homo sapiens
  misc_feature (13)..(13): n is a, c, g, or t
  misc_feature (54)..(54): n is a, c, g, or t
gaccaggtcctgnctgctgcctgctggtcaggcttctagtttcagggggaactntggccccatgcctggctacttttggtatttttagcagagacagggtttcaccatgttggccagggtggtctcgaactcctgacctcaagtgatccgtctggctcagcctcccaaagtgctgggattacaggtgtgagccactgcacctggcctatataggcttttttcttaaacctatttagtaatgttttcccaagtttattttttatttttaattttttccccaagtttatttttctatttttttttcatggaaaaatggggtaacttagcagtttcaatattgaagactgaagtttaaaaaaaatttaaattcaaggtacttttaaaattcagttagaaaagtaggctttaaaaattattagagacaagagtaccaaagcggtgtgtgtatgtgtgtgtgtgtatgcatgcttgtggattggaaaaactttggagactgattacttttcattatatatgtgtcacagtgaaacagcttttatgtgtcatgtaagattactgcttgcctctctaaggaaggtcgtgactgtttaaatagacgggcaaggtggaaccttttgaaagatgagcttttgaatataagttgtctgctagatcatggttgtattgaactaacaaggtttgcagatctgctgacttatataaagctttttgattcctactaagctttaagatttaaaaaatgttcaatgttgaaatttctgtggggctctatttttgctttggctttctggtgagagagtgaggaagcattctttccttcactaagtttgtctttcttgtcttctggatagattgattttaagagactaagggaatttacaaactaaagattttagtcatctggtggaaaaggagactttaagattgtttagggctgggcggggtgactcacatctgtaatcccagcactttgggaggccaaggcaggcagaacacttgaaggagttcaagaccagcgtggccaacgtggtgaaaccctgtctctactaaaaatacaaaaattgtttagctctgtttttcataatagaaatagaaaaggtaaaattgcttttcttctgaaaagaacaagtattgttcatccaagaagggtttttgtgactgaatcagcagtgcctgccctagtcatagctgtgcttcaaaaacctcagcatgattagtgttggagcaaaacaaggaagcaaagcaaatactgtttttgaaattctatctgttgcttgaactattttgtaataattaaactttgatgttgagaaatcacaactttattgtacacttcattgcaacttgaaattcatggtcttaaagtgagatttgaatttctattgagcgcctttaaaaaagtaataccaaaccataaagttaaaatctatgtatattgagtcatatctaaaaccacgtataaacataaattgtatttcctgttttaattccaggggaagtactgtttgggaaagctattattaggtaaatgttttacaaattactgtttctcactttcagtcataccctaatgatcccagcaagataatgtcctgtcttctaagatgtgcatcaagcctggtacatactgaaaaccctataaggtcctggataatttttgtttgattattcattgaagaaacatttattttccaattgtgtgaagtttttgactgttaataaaagaatctgtcaaccatcaaa

SEQ ID NO: 450001 - DNA, 1804 bp, Homo sapiens
cttaatatagcttgacgaatcctacgcagcttgaagatttctaagatgttcaatgttgaaatttctgtggggctctatttttgctttggctttctggtgagagagtgaggaagcattctttccttcactaagtttgtctttcttgtcttctggatagattgattttaagagactaagggaatttacaaactaaagattttagtcatctggtggaaaaggagactttaagattgtttagattacaggtgtgagccactgcacctggcctatataggcttttttcttaaacctatttagtaatgttttcccaagtttattttttatttttaattttttccccaagtttatttttctatttttttttcatggaaaaatggggtaacttagcagtttcaatattgaagactgaagtttaaaaaaaatttaaattcaaggtacttttaaaattcagttagaaaagtaggctttaaaaattattagagacaagagtaccaaagcggtgtgtgtatgtgtgtgtgtgtatgcatgcttgtggattggaaaaactttggagactgattacttttcattatatatgtgtcacagtgaaacagcttttatgtgtcatgtaagattactgcttgcctctctaaggaaggtcgtgactgtttaaatagacgggcaaggtggaaccttttgaaagatgagcttttgaatataagttgtctgctagatcatggttgtattgaactaacaaggtttgcagatctgctgacttatataaagctttttgattcctactaagctttaagatttaaaaaatgttcaatgttgaaatttctgtggggctctatttttgctttggctttctggtgagagagtgaggaagcattctttccttcactaagtttgtctttcttgtcttctggatagattgattttaagagactaagggaatttacaaactaaagattttagtcatctggtggaaaaggagactttaagattgtttagggctgggcggggtgactcacatctgtaatcccagcactttgggaggccaaggcaggcagaacacttgaaggagttcaagaccagcgtggccaacgtggtgaaaccctgtctctactaaaaatacaaaaattgtttagctctgtttttcataatagaaatagaaaaggtaaaattgcttttcttctgaaaagaacaagtattgttcatccaagaagggtttttgtgactgaatcagcagtgcctgccctagtcatagctgtgcttcaaaaacctcagcatgattagtgttggagcaaaacaaggaagcaaagcaaatactgtttttgaaattctatctgttgcttgaactattttgtaataattaaactttgatgttgagaaatcacaactttattgtacacttcattgcaacttgaaattcatggtcttaaagtgagatttgaatttctattgagcgcctttaaaaaagtaataccaaaccataaagttaaaatctatgtatattgagtcatatctaaaaccacgtataaacataaattgtatttcctgttttaattccaggggaagtactgtttgggaaagctattattaggtaaatgttttacaaattactgtttctcactttcagtcataccctaatgatcccagcaagataatgtcctgtcttctaagatgtgcatcaagcctggtacatactgaaaaccctataaggtcctggataatttttgtttgattattcattgaagaaacatttattttccaattgtgtgaagtttttgactgttaataaaagaatctgtcaaccatcaaa

SEQ ID NO: 450002 - DNA, 1408 bp, Homo sapiens
ccagacaacttatattcaaaagctcatctttcaaaaggttccaccttgcccgtttatttaaacagtcacgaccttccttattagagacaagagtaccaaagcggtgtgtgtatgtgtgtgtgtgtatgcatgcttgtggattggaaaaactttggagactgattacttttcattatatatgtgtcacagtgaaacagcttttatgtgtcatgtaagattactgcttgcctctctaaggaaggtcgtgactgtttaaatagacgggcaaggtggaaccttttgaaagatgagcttttgaatataagttgtctgctagatcatggttgtattgaactaacaaggtttgcagatctgctgacttatataaagctttttgattcctactaagctttaagatttaaaaaatgttcaatgttgaaatttctgtggggctctatttttgctttggctttctggtgagagagtgaggaagcattctttccttcactaagtttgtctttcttgtcttctggatagattgattttaagagactaagggaatttacaaactaaagattttagtcatctggtggaaaaggagactttaagattgtttagggctgggcggggtgactcacatctgtaatcccagcactttgggaggccaaggcaggcagaacacttgaaggagttcaagaccagcgtggccaacgtggtgaaaccctgtctctactaaaaatacaaaaattgtttagctctgtttttcataatagaaatagaaaaggtaaaattgcttttcttctgaaaagaacaagtattgttcatccaagaagggtttttgtgactgaatcagcagtgcctgccctagtcatagctgtgcttcaaaaacctcagcatgattagtgttggagcaaaacaaggaagcaaagcaaatactgtttttgaaattctatctgttgcttgaactattttgtaataattaaactttgatgttgagaaatcacaactttattgtacacttcattgcaacttgaaattcatggtcttaaagtgagatttgaatttctattgagcgcctttaaaaaagtaataccaaaccataaagttaaaatctatgtatattgagtcatatctaaaaccacgtataaacataaattgtatttcctgttttaattccaggggaagtactgtttgggaaagctattattaggtaaatgttttacaaattactgtttctcactttcagtcataccctaatgatcccagcaagataatgtcctgtcttctaagatgtgcatcaagcctggtacatactgaaaaccctataaggtcctggataatttttgtttgattattcattgaagaaacatttattttccaattgtgtgaagtttttgactgttaataaaagaatctgtcaaccatcaaa

SEQ ID NO: 450003 - DNA, 3235 bp, Homo sapiens
ggcggggcggcggtgcccttgcggcgcagctggggtcgcggccctgctccccgcgctttcttaaggcccgcgggcggcgcaggagcggcactcgtggctgtggtggcttcggcagcggcttcagcagatcggcggcatcagcggtagcaccagcactagcagcatgttgagccgggcagtgtgcggcaccagcaggcagctggctccggttttggggtatctgggctccaggcagaagcacagcctccccgacctgccctacgactacggcgccctggaacctcacatcaacgcgcagatcatgcagctgcaccacagcaagcaccacgcggcctacgtgaacaacctgaacgtcaccgaggagaagtaccaggaggcgttggccaagggagatgttacagcccagatagctcttcagcctgcactgaagttcaatggtggtggtcatatcaatcatagcattttctggacaaacctcagccctaacggtggtggagaacccaaaggggagttgctggaagccatcaaacgtgactttggttcctttgacaagtttaaggagaagctgacggctgcatctgttggtgtccaaggctcaggttggggttggcttggtttcaataaggaacggggacacttacaaattgctgcttgtccaaatcaggatccactgcaaggaacaacaggccttattccactgctggggattgatgtgtgggagcacgcttactaccttcagtataaaaatgtcaggcctgattatctaaaagctatttggaatgtaatcaactgggagaatgtaactgaaagatacatggcttgcaaaaagtaaaccacgatcgttatgctgagtatgttaagctctttatgactgtttttgtagtggtatagagtactgcagaatacagtaagctgctctattgtagcatttcttgatgttgcttagtcacttatttcataaacaacttaatgttctgaataatttcttactaaacattttgttattgggcaagtgattgaaaatagtaaatgctttgtgtgattgaatctgattggacattttcttcagagagctaaattacaattgtcatttataaaaccatcaaaaatattccatccatatactttggggacttgtagggatgcctttctagtcctattctattgcagttatagaaaatctagtcttttgccccagttacttaaaaataaaatattaacactttcccaagggaaacactcggctttctatagaaaattgcactttttgtcgagtaatcctctgcagtgatacttctggtagatgtcacccagtggtttttgttaggtcaaatgttcctgtatagtttttgcaaatagagctgtatactgtttaaatgtagcaggtgaactgaactggggtttgctcacctgcacagtaaaggcaaacttcaacagcaaaactgcaaaaaggtggtttttgcagtaggagaaaggaggatgtttatttgcagggcgccaagcaaggagaattgggcagctcatgcttgagacccaatctccatgatgacctacaagctagagtatttaaaggcagtggtaaatttcaggaaagcagaagttaaaggcaaaattgtaaatcagtcgagatcgggtgccttcagggtggtatggctgtataccaaaattgtaaatcactacatgaagcttatatattggtttggcctgaaaggtgaagtggggtaggcagggggcgggcttacaggttatggtggattcaaagactccctgatttgtgattggttaaggaagcaaagctttgtctaaaaacttggggtccgcagaaaggaacattaaggtctggccaggcccctcaggaagaaactgagagcaaagaatggaggtcagagtttagtccctggtgttcccccttatctgacgtctgtgtgaatccatttggtgggggtctgggtttctgaaaagtagctcaggggcacgtgttaaggatgtctctaggtgactctaacttccctggctattgtttgaaactgttatgaccttcttgcttatcagcttgctggtttccttctcggggcgagctgggtgcctggagttttcggtgaaggaaactcaagattctcctttatttctgtgcttgtgggaatccccctggcacaccccaaagaggggtccctgctccgtctcacagggatctttttgtatatttggcttagcatcatacatttgccatgttgtttcatcatctgcctaatttactgtttttgaatatttcatttgtttctaattgttactacagataatgctggggtgagcaactctgtgtacataggtttatctcctattggaatattttctttatataggcgtttttttttttcttttttttgggagacagagtcttgctctgttgcccaggctggagtgcagtggcgcgaccggagctcactgcaacctccacttcccgggttcaagtgattgtcccacctcagcctcctgaatagctgggattacaggtgcatgctagaaaccctgtctctactaaaaatacaaaaattgtttagctctgtttttcataatagaaatagaaaaggtaaaattgcttttcttctgaaaagaacaagtattgttcatccaagaagggtttttgtgactgaatcagcagtgcctgccctagtcatagctgtgcttcaaaaacctcagcatgattagtgttggagcaaaacaaggaagcaaagcaaatactgtttttgaaattctatctgttgcttgaactattttgtaataattaaactttgatgttgagaaatcacaactttattgtacacttcattgcaacttgaaattcatggtcttaaagtgagatttgaatttctattgagcgcctttaaaaaagtaataccaaaccataaagttaaaatctatgtatattgagtcatatctaaaaccacgtataaacataaattgtatttcctgttttaattccaggggaagtactgtttgggaaagctattattaggtaaatgttttacaaattactgtttctcactttcagtcataccctaatgatcccagcaagataatgtcctgtcttctaagatgtgcatcaagcctggtacatactgaaaaccctataaggtcctggataatttttgtttgattattcattgaagaaacatttattttccaattgtgtgaagtttttgactgttaataaaagaatctgtcaaccatcaaa

SEQ ID NO: 450004 - DNA, 2076 bp, Homo sapiens
ggcggggcggcggtgcccttgcggcgcagctggggtcgcggccctgctccccgcgctttcttaaggcccgcgggcggcgcaggagcggcactcgtggctgtggtggcttcggcagcggcttcagcagatcggcggcatcagcggtagcaccagcactagcagcatgttgagccgggcagtgtgcggcaccagcaggcagctggctccggttttggggtatctgggctccaggcagaagcacagcctccccgacctgccctacgactacggcgccctggaacctcacatcaacgcgcagatcatgcagctgcaccacagcaagcaccacgcggcctacgtgaacaacctgaacgtcaccgaggagaagtaccaggaggcgttggccaagggagatgttacagcccagatagctcttcagcctgcactgaagttcaatggtggtggtcatatcaatcatagcattttctggacaaacctcagccctaacggtggtggagaacccaaaggggagttgctggaagccatcaaacgtgactttggttcctttgacaagtttaaggagaagctgacggctgcatctgttggtgtccaaggctcaggttggggttggcttggtttcaataaggaacggggacacttacaaattgctgcttgtccaaatcaggatccactgcaaggaacaacaggccttattccactgctggggattgatgtgtgggagcacgcttactaccttcagtataaaaatgtcaggcctgattatctaaaagctatttggaatgtaatcaactgggagaatgtaactgaaagatacatggcttgcaaaaagtaaaccacgatcgttatgctgagtatgttaagctctttatgactgtttttgtagtggtatagagtactgcagaatacagtaagctgctctattgtagcatttcttgatgttgcttagtcacttatttcataaacaacttaatgttctgaataatttcttactaaacattttgttattgggcaagtgattgaaaatagtaaatgctttgtgtgattgaatctgattggacattttcttcagagagctaaattacaattgtcatttataaaaccatcaaaaatattccatccatatactttggggacttgtagggatgcctttctagtcctattctattgcagttatagaaaatctagtcttttgccccagttacttaaaaataaaatattaacactttcccaagggaaacactcggctttctatagaaaattgcactttttgtcgagggtgactcacatctgtaatcccagcactttgggaggccaaggcaggcagaacacttgaaggagttcaagaccagcgtggccaacgtggtgaaaccctgtctctactaaaaatacaaaaattgtttagctctgtttttcataatagaaatagaaaaggtaaaattgcttttcttctgaaaagaacaagtattgttcatccaagaagggtttttgtgactgaatcagcagtgcctgccctagtcatagctgtgcttcaaaaacctcagcatgattagtgttggagcaaaacaaggaagcaaagcaaatactgtttttgaaattctatctgttgcttgaactattttgtaataattaaactttgatgttgagaaatcacaactttattgtacacttcattgcaacttgaaattcatggtcttaaagtgagatttgaatttctattgagcgcctttaaaaaagtaataccaaaccataaagttaaaatctatgtatattgagtcatatctaaaaccacgtataaacataaattgtatttcctgttttaattccaggggaagtactgtttgggaaagctattattaggtaaatgttttacaaattactgtttctcactttcagtcataccctaatgatcccagcaagataatgtcctgtcttctaagatgtgcatcaagcctggtacatactgaaaaccctataaggtcctggataatttttgtttgattattcattgaagaaacatttattttccaattgtgtgaagtttttgactgttaataaaagaatctgtcaaccatcaaa

SEQ ID NO: 450005 - DNA, 4153 bp, Homo sapiens
ggcggggcggcggtgcccttgcggcgcagctggggtcgcggccctgctccccgcgctttcttaaggcccgcgggcggcgcaggagcggcactcgtggctgtggtggcttcggcagcggcttcagcagatcggcggcatcagcggtagcaccagcactagcagcatgttgagccgggcagtgtgcggcaccagcaggcagctggctccggttttggggtatctgggctccaggcagaagcacagcctccccgacctgccctacgactacggcgccctggaacctcacatcaacgcgcagatcatgcagctgcaccacagcaagcaccacgcggcctacgtgaacaacctgaacgtcaccgaggagaagtaccaggaggcgttggccaagggagatgttacagcccagatagctcttcagcctgcactgaagttcaatggtggtggtcatatcaatcatagcattttctggacaaacctcagccctaacggtggtggagaacccaaaggggagttgctggaagccatcaaacgtgactttggttcctttgacaagtttaaggagaagctgacggctgcatctgttggtgtccaaggctcaggttggggttggcttggtttcaataaggaacggggacacttacaaattgctgcttgtccaaatcaggatccactgcaaggaacaacaggccttattccactgctggggattgatgtgtgggagcacgcttactaccttcagtataaaaatgtcaggcctgattatctaaaagctatttggaatgtaatcaactgggagaatgtaactgaaagatacatggcttgcaaaaagtaaaccacgatcgttatgctgagtatgttaagctctttatgactgtttttgtagtggtatagagtactgcagaatacagtaagctgctctattgtagcatttcttgatgttgcttagtcacttatttcataaacaacttaatgttctgaataatttcttactaaacattttgttattgggcaagtgattgaaaatagtaaatgctttgtgtgattgaatctgattggacattttcttcagagagctaaattacaattgtcatttataaaaccatcaaaaatattccatccatatactttggggacttgtagggatgcctttctagtcctattctattgcagttatagaaaatctagtcttttgccccagttacttaaaaataaaatattaacactttcccaagggaaacactcggctttctatagaaaattgcactttttgtcgagtaatcctctgcagtgatacttctggtagatgtcacccagtggtttttgttaggtcaaatgttcctgtatagtttttgcaaatagagctgtatactgtttaaatgtagcaggtgaactgaactggggtttgctcacctgcacagtaaaggcaaacttcaacagcaaaactgcaaaaaggtggtttttgcagtaggagaaaggaggatgtttatttgcagggcgccaagcaaggagaattgggcagctcatgcttgagacccaatctccatgatgacctacaagctagagtatttaaaggcagtggtaaatttcaggaaagcagaagttaaaggcaaaattgtaaatcagtcgagatcgggtgccttcagggtggtatggctgtataccaaaattgtaaatcactacatgaagcttatatattggtttggcctgaaaggtgaagtggggtaggcagggggcgggcttacaggttatggtggattcaaagactccctgatttgtgattggttaaggaagcaaagctttgtctaaaaacttggggtccgcagaaaggaacattaaggtctggccaggcccctcaggaagaaactgagagcaaagaatggaggtcagagtttagtccctggtgttcccccttatctgacgtctgtgtgaatccatttggtgggggtctgggtttctgaaaagtagctcaggggcacgtgttaaggatgtctctaggtgactctaacttccctggctattgtttgaaactgttatgaccttcttgcttatcagcttgctggtttccttctcggggcgagctgggtgcctggagttttcggtgaaggaaactcaagattctcctttatttctgtgcttgtgggaatccccctggcacaccccaaagaggggtccctgctccgtctcacagggatctttttgtatatttggcttagcatcatacatttgccatgttgtttcatcatctgcctaatttactgtttttgaatatttcatttgtttctaattgttactacagataatgctggggtgagcaactctgtgtacataggtttatctcctattggaatattttctttatataggcgtttttttttttcttttttttgggagacagagtcttgctctgttgcccaggctggagtgcagtggcgcgaccggagctcactgcaacctccacttcccgggttcaagtgattgtcccacctcagcctcctgaatagctgggattacaggtgcatgctaccatgcctggctacttttggtatttttagcagagacagggtttcaccatgttggccagggtggtctcgaactcctgacctcaagtgatccgtctggctcagcctcccaaagtgctgggattacaggtgtgagccactgcacctggcctatataggcttttttcttaaacctatttagtaatgttttcccaagtttattttttatttttaattttttccccaagtttatttttctatttttttttcatggaaaaatggggtaacttagcagtttcaatattgaagactgaagtttaaaaaaaatttaaattcaaggtacttttaaaattcagttagaaaagtaggctttaaaaattattagagacaagagtaccaaagcggtgtgtgtatgtgtgtgtgtgtatgcatgcttgtggattggaaaaactttggagactgattacttttcattatatatgtgtcacagtgaaacagcttttatgtgtcatgtaagattactgcttgcctctctaaggaaggtcgtgactgtttaaatagacgggcaaggtggaaccttttgaaagatgagcttttgaatataagttgtctgctagatcatggttgtattgaactaacaaggtttgcagatctgctgacttatataaagctttttgattcctactaagctttaagatttaaaaaatgttcaatgttgaaatttctgtggggctctatttttgctttggctttctggtgagagagtgaggaagcattctttccttcactaagtttgtctttcttgtcttctggatagattgattttaagagactaagggaatttacaaactaaagattttagtcatctggtggaaaaggagactttaagattgtttagggctgggcggggtgactcacatctgtaatcccagcactttgggaggccaaggcaggcagaacacttgaaggagttcaagaccagcgtggccaacgtggtgaaaccctgtctctactaaaaatacaaaaattgtttagctctgtttttcataatagaaatagaaaaggtaaaattgcttttcttctgaaaagaacaagtattgttcatccaagaagggtttttgtgactgaatcagcagtgcctgccctagtcatagctgtgcttcaaaaacctcagcatgattagtgttggagcaaaacaaggaagcaaagcaaatactgtttttgaaattctatctgttgcttgaactattttgtaataattaaactttgatgttgagaaatcacaactttattgtacacttcattgcaacttgaaattcatggtcttaaagtgagatttgaatttctattgagcgcctttaaaaaagtaataccaaaccataaagttaaaatctatgtatattgagtcatatcttgtttgggaaagctattattaggtaaatgttttacaaattactgtttctcactttcagtcataccctaatgatcccagcaagataatgtcctgtcttctaagatgtgcatcaagcctggtacatactgaaaaccctataaggtcctggataatttttgtttgattattcattgaagaaacatttattttccaattgtgtgaagtttttgactgttaataaaagaatctgtcaaccatcaaa

SEQ ID NO: 450006 - DNA, 3861 bp, Homo sapiens
  misc_feature (3717)..(3717): n is a, c, g, or t
  misc_feature (3720)..(3720): n is a, c, g, or t
  misc_feature (3732)..(3732): n is a, c, g, or t
  misc_feature (3736)..(3736): n is a, c, g, or t
  misc_feature (3740)..(3740): n is a, c, g, or t
  misc_feature (3745)..(3745): n is a, c, g, or t
ggcggggcggcggtgcccttgcggcgcagctggggtcgcggccctgctccccgcgctttcttaaggcccgcgggcggcgcaggagcggcactcgtggctgtggtggcttcggcagcggcttcagcagatcggcggcatcagcggtagcaccagcactagcagcatgttgagccgggcagtgtgcggcaccagcaggcagctggctccggttttggggtatctgggctccaggcagaagcacagcctccccgacctgccctacgactacggcgccctggaacctcacatcaacgcgcagatcatgcagctgcaccacagcaagcaccacgcggcctacgtgaacaacctgaacgtcaccgaggagaagtaccaggaggcgttggccaagggagatgttacagcccagatagctcttcagcctgcactgaagttcaatggtggtggtcatatcaatcatagcattttctggacaaacctcagccctaacggtggtggagaacccaaaggggagttgctggaagccatcaaacgtgactttggttcctttgacaagtttaaggagaagctgacggctgcatctgttggtgtccaaggctcaggttggggttggcttggtttcaataaggaacggggacacttacaaattgctgcttgtccaaatcaggatccactgcaaggaacaacaggccttattccactgctggggattgatgtgtgggagcacgcttactaccttcagtataaaaatgtcaggcctgattatctaaaagctatttggaatgtaatcaactgggagaatgtaactgaaagatacatggcttgcaaaaagtaaaccacgatcgttatgctgagtatgttaagctctttatgactgtttttgtagtggtatagagtactgcagaatacagtaagctgctctattgtagcatttcttgatgttgcttagtcacttatttcataaacaacttaatgttctgaataatttcttactaaacattttgttattgggcaagtgattgaaaatagtaaatgctttgtgtgattgaatctgattggacattttcttcagagagctaaattacaattgtcatttataaaaccatcaaaaatattccatccatatactttggggacttgtagggatgcctttctagtcctattctattgcagttatagaaaatctagtcttttgccccagttacttaaaaataaaatattaacactttcccaagggaaacactcggctttctatagaaaattgcactttttgtcgagtaatcctctgcagtgatacttctggtagatgtcacccagtggtttttgttaggtcaaatgttcctgtatagtttttgcaaatagagctgtatactgtttaaatgtagcaggtgaactgaactggggtttgctcacctgcacagtaaaggcaaacttcaacagcaaaactgcaaaaaggtggtttttgcagtaggagaaaggaggatgtttatttgcagggcgccaagcaaggagaattgggcagctcatgcttgagacccaatctccatgatgacctacaagctagagtatttaaaggcagtggtaaatttcaggaaagcagaagttaaaggcaaaattgtaaatcagtcgagatcgggtgccttcagggtggtatggctgtataccaaaattgtaaatcactacatgaagcttatatattggtttggcctgaaaggtgaagtggggtaggcagggggcgggcttacaggttatggtggattcaaagactccctgatttgtgattggttaaggaagcaaagctttgtctaaaaacttggggtccgcagaaaggaacattaaggtctggccaggcccctcaggaagaaactgagagcaaagaatggaggtcagagtttagtccctggtgttcccccttatctgacgtctgtgtgaatccatttggtgggggtctgggtttctgaaaagtagctcaggggcacgtgttaaggatgtctctaggtgactctaacttccctggctattgtttgaaactgttatgaccttcttgcttatcagcttgctggtttccttctcggggcgagctgggtgcctggagttttcggtgaaggaaactcaagattctcctttatttctgtgcttgtgggaatccccctggcacaccccaaagaggggtccctgctccgtctcacagggatctttttgtatatttggcttagcatcatacatttgccatgttgtttcatcatctgcctaatttactgtttttgaatatttcatttgtttctaattgttactacagataatgctggggtgagcaactctgtgtacataggtttatctcctattggaatattttctttatataggcgtttttttttttcttttttttgggagacagagtcttgctctgttgcccaggctggagtgcagtggcgcgaccggagctcactgcaacctccacttcccgggttcaagtgattgtcccacctcagcctcctgaatagctgggattacaggtgcatgctaccatgcctggctacttttggtatttttagcagagacagggtttcaccatgttggccagggtggtctcgaactcctgacctcaagtgatccgtctggctcagcctcccaaagtgctgggattacaggtgtgagccactgcacctggcctatataggcttttttcttaaacctatttagtaatgttttcccaagtttattttttatttttaattttttccccaagtttatttttctatttttttttcatggaaaaatggggtaacttagcagtttcaatattgaagactgaagtttaaaaaaaatttaaattcaaggtacttttaaaattcagttagaaaagtaggctttaaaaattattagagacaagagtaccaaagcggtgtgtgtatgtgtgtgtgtgtatgcatgcttgtggattggaaaaactttggagactgattacttttcattatatatgtgtcacagtgaaacagcttttatgtgtcatgtaagattactgcttgcctctctaaggaaggtcgtgactgtttaaatagacgggcaaggtggaaccttttgaaagatgagcttttgaatataagttgtctgctagatcatggttgtattgaactaacaaggtttgcagatctgctgacttatataaagctttttgattcctactaagctttaagatttaaaaaatgttcaatgttgaaatttctgtggggctctatttttgctttggctttctggtgagagagtgaggaagcattctttccttcactaagtttgtctttcttgtcttctggatagattgattttaagagactaagggaatttacaaactaaagattttagtcatctggtggaaaaggagactttaagattgtttagggctgggcggggtgactcacatctgtaatcccagcactttgggaggccaaggcaggcagaacacttgaaggagttcaagaccagcgtggccaacgtggtgaaaccctgtctctactaaaaatacaaaaattgtttagctctgtttttcataatagaaatagaaaaggtaaaattgcttttcttctgaaaagaacaagtattgttcatccaagaagggtttttgtgactgaatcagcagtgcctgccctagtcatagctgtgcttcaaaaacctcagcatgattagtgttggagcaaaacaaggaagcaagcacgtttgatnatntgtgtgacatgnatanttgngtganccactttggctttgatgatgtaggagtaatatggggtaaaagtccctataattttggattacgtaaagtgtggggaggaaatagaagtcaaaggtatgaagtgtgattgattaagt

SEQ ID NO: 450007 - DNA, 944 bp, Homo sapiens
cacttctgacattcttgtaatcaccgattcatacacaatctcctgatgtaatccattgactgcttcttttagaaaggcgaaactgaaacctgcttgaaggttaaataaaaactctgtgcttatgcttaaaaagtgcagtggcgggtgactcacatctgtaatcccagcactttgggaggccaaggcaggcagaacacttgaaggagttcaagaccagcgtggccaacgtggtgaaaccctgtctctactaaaaatacaaaaattgtttagctctgtttttcataatagaaatagaaaaggtaaaattgcttttcttctgaaaagaacaagtattgttcatccaagaagggtttttgtgactgaatcagcagtgcctgccctagtcatagctgtgcttcaaaaacctcagcatgattagtgttggagcaaaacaaggaagcaaagcaaatactgtttttgaaattctatctgttgcttgaactattttgtaataattaaactttgatgttgagaaatcacaactttattgtacacttcattgcaacttgaaattcatggtcttaaagtgagatttgaatttctattgagcgcctttaaaaaagtaataccaaaccataaagttaaaatctatgtatattgagtcatatctaaaaccacgtataaacataaattgtatttcctgttttaattccaggggaagtactgtttgggaaagctattattaggtaaatgttttacaaattactgtttctcactttcagtcataccctaatgatcccagcaagataatgtcctgtcttctaagatgtgcatcaagcctggtacatactgaaaaccctataaggtcctggataatttttgtttgattattcattgaagaaacatttattttccaattgtgtgaagtttttgactgttaataaaagaatctgtcaaccatcaaa

SEQ ID NO: 450008 - DNA, 891 bp, Homo sapiens
aagcagttaatacagactcagagtaaataacttgcctaagggtgatacaggatgtaggtgctacaatcaagattcaaagtccatgctttgggtgactcacatctgtaatcccagcactttgggaggccaaggcaggcagaacacttgaaggagttcaagaccagcgtggccaacgtggtgaaaccctgtctctactaaaaatacaaaaattgtttagctctgtttttcataatagaaatagaaaaggtaaaattgcttttcttctgaaaagaacaagtattgttcatccaagaagggtttttgtgactgaatcagcagtgcctgccctagtcatagctgtgcttcaaaaacctcagcatgattagtgttggagcaaaacaaggaagcaaagcaaatactgtttttgaaattctatctgttgcttgaactattttgtaataattaaactttgatgttgagaaatcacaactttattgtacacttcattgcaacttgaaattcatggtcttaaagtgagatttgaatttctattgagcgcctttaaaaaagtaataccaaaccataaagttaaaatctatgtatattgagtcatatctaaaaccacgtataaacataaattgtatttcctgttttaattccaggggaagtactgtttgggaaagctattattaggtaaatgttttacaaattactgtttctcactttcagtcataccctaatgatcccagcaagataatgtcctgtcttctaagatgtgcatcaagcctggtacatactgaaaaccctataaggtcctggataatttttgtttgattattcattgaagaaacatttattttccaattgtgtgaagtttttgactgttaataaaagaatctgtcaaccatcaaa

SEQ ID NO: 450009 - DNA, 825 bp, Homo sapiens
tgttaagaatatagcctatttttgccaagtgcagtgtctcacaccatgttaatccgagacactttgggacgctgagccagacggatcacttcaagtcctgaattggaaaacccgaaaccctgtctctactaaaaatacaaaaattgtttagctctgtttttcataatagaaatagaaaaggtaaaattgcttttcttctgaaaagaacaagtattgttcatccaagaagggtttttgtgactgaatcagcagtgcctgccctagtcatagctgtgcttcaaaaacctcagcatgattagtgttggagcaaaacaaggaagcaaagcaaatactgtttttgaaattctatctgttgcttgaactattttgtaataattaaactttgatgttgagaaatcacaactttattgtacacttcattgcaacttgaaattcatggtcttaaagtgagatttgaatttctattgagcgcctttaaaaaagtaataccaaaccataaagttaaaatctatgtatattgagtcatatctaaaaccacgtataaacataaattgtatttcctgttttaattccaggggaagtactgtttgggaaagctattattaggtaaatgttttacaaattactgtttctcactttcagtcataccctaatgatcccagcaagataatgtcctgtcttctaagatgtgcatcaagcctggtacatactgaaaaccctataaggtcctggataatttttgtttgattattcattgaagaaacatttattttccaattgtgtgaagtttttgactgttaataaaagaatctgtcaaccatcaaa

SEQ ID NO: 450010 - DNA, 3645 bp, Homo sapiens
ggcggggcggcggtgcccttgcggcgcagctggggtcgcggccctgctccccgcgctttcttaaggcccgcgggcggcgcaggagcggcactcgtggctgtggtggcttcggcagcggcttcagcagatcggcggcatcagcggtagcaccagcactagcagcatgttgagccgggcagtgtgcggcaccagcaggcagctggctccggttttggggtatctgggctccaggcagaagcacagcctccccgacctgccctacgactacggcgccctggaacctcacatcaacgcgcagatcatgcagctgcaccacagcaagcaccacgcggcctacgtgaacaacctgaacgtcaccgaggagaagtaccaggaggcgttggccaagggagatgttacagcccagatagctcttcagcctgcactgaagttcaatggtggtggtcatatcaatcatagcattttctggacaaacctcagccctaacggtggtggagaacccaaaggggagttgctggaagccatcaaacgtgactttggttcctttgacaagtttaaggagaagctgacggctgcatctgttggtgtccaaggctcaggttggggttggcttggtttcaataaggaacggggacacttacaaattgctgcttgtccaaatcaggatccactgcaaggaacaacaggccttattccactgctggggattgatgtgtgggagcacgcttactaccttcagtataaaaatgtcaggcctgattatctaaaagctatttggaatgtaatcaactgggagaatgtaactgaaagatacatggcttgcaaaaagtaaaccacgatcgttatgctgagtatgttaagctctttatgactgtttttgtagtggtatagagtactgcagaatacagtaagctgctctattgtagcatttcttgatgttgcttagtcacttatttcataaacaacttaatgttctgaataatttcttactaaacattttgttattgggcaagtgattgaaaatagtaaatgctttgtgtgattgaatctgattggacattttcttcagagagctaaattacaattgtcatttataaaaccatcaaaaatattccatccatatactttggggacttgtagggatgcctttctagtcctattctattgcagttatagaaaatctagtcttttgccccagttacttaaaaataaaatattaacactttcccaagggaaacactcggctttctatagaaaattgcactttttgtcgagtaatcctctgcagtgatacttctggtagatgtcacccagtggtttttgttaggtcaaatgttcctgtatagtttttgcaaatagagctgtatactgtttaaatgtagcaggtgaactgaactggggtttgctcacctgcacagtaaaggcaaacttcaacagcaaaactgcaaaaaggtggtttttgcagtaggagaaaggaggatgtttatttgcagggcgccaagcaaggagaattgggcagctcatgcttgagacccaatctccatgatgacctacaagctagagtatttaaaggcagtggtaaatttcaggaaagcagaagttaaaggcaaaattgtaaatcagtcgagatcgggtgccttcagggtggtatggctgtataccaaaattgtaaatcactacatgaagcttatatattggtttggcctgaaaggtgaagtggggtaggcagggggcgggcttacaggttatggtggattcaaagactccctgatttgtgattggttaaggaagcaaagctttgtctaaaaacttggggtccgcagaaaggaacattaaggtctggccaggcccctcaggaagaaactgagagcaaagaatggaggtcagagtttagtccctggtgttcccccttatctgacgtctgtgtgaatccatttggtgggggtctgggtttctgaaaagtagctcaggggcacgtgttaaggatgtctctaggtgactctaacttccctggctattgtttgaaactgttatgaccttcttgcttatcagcttgctggtttccttctcggggcgagctgggtgcctggagttttcggtgaaggaaactcaagattctcctttatttctgtgcttgtgggaatccccctggcacaccccaaagaggggtccctgctccgtctcacagggatctttttgtatatttggcttagcatcatacatttgccatgttgtttcatcatctgcctaatttactgtttttgaatatttcatttgtttctaattgttactacagataatgctggggtgagcaactctgtgtacataggtttatctcctattggaatattttctttatataggcgtttttttttttcttttttttgggagacagagtcttgctctgttgcccaggctggagtgcagtggcgcgaccggagctcactgcaacctccacttcccgggttcaagtgattgtcccacctcagcctcctgaatagctgggattacaggtgcatgctaccatgcctggctacttttggtatttttagcagagacagggtttcaccatgttggccagggtggtctcgaactcctgacctcaagtgatccgtctggctcagcctcccaaagtgctgggattacaggtgtgagccactgcacctggcctatataggcttttttcttaaacctatttagtaatgttttcccaagtttattttttatttttaattttttccccaagtttatttttctatttttttttcatggaaaaatggggtaacttagcagtttcaatattgaagactgaagtttaaaaaaaatttaaattcaaggtacttttaaaattcagttagaaaagtaggctttaaaaattattagagacaagagtaccaaagcggtgtgtgtatgtgtgtgtgtgtatgcatgcttgtggattggaaaaactttggagactgattacttttcattatatatgtgtcacagtgaaacagcttttatgtgtcatgtaagattactgcttgcctctctaaggaaggtcgtgactgtttaaatagacgggcaaggtggaaccttttgaaagatgagcttttgaatataagttgtctgctagatcatggttgtattgaactaacaaggtttgcagatctgctgacttatataaagctttttgattcctactaagctttaagatttaaaaaatgttcaatgttgaaatttctgtggggctctatttttgctttggctttctggtgagagagtgaggaagcattctttccttcactaagtttgtctttcttgtcttctggatagattgattttaagagactaagggaatttacaaactaaagattttagtcatctggtggaaaaggagactttaagattgtttagggctgggcgattacaggcataagccatcacgcctggccaaatcatggtttagaaaagggagatggtcaaatataattgttatgactgccatagtacctactatgtcccagataatttgcctaggtttttaaccctcacaacacatccctaaaacattgtacagatgcaaatgcagaggcacgaagaggcttaaaacattcccaaagtcacatagttactataaagccagtaactggctctatgtctaaa

SEQ ID NO: 450011 - DNA, 3159 bp, Homo sapiens
  misc_feature (3122)..(3122): n is a, c, g, or t
ggcggggcggcggtgcccttgcggcgcagctggggtcgcggccctgctccccgcgctttcttaaggcccgcgggcggcgcaggagcggcactcgtggctgtggtggcttcggcagcggcttcagcagatcggcggcatcagcggtagcaccagcactagcagcatgttgagccgggcagtgtgcggcaccagcaggcagctggctccggttttggggtatctgggctccaggcagaagcacagcctccccgacctgccctacgactacggcgccctggaacctcacatcaacgcgcagatcatgcagctgcaccacagcaagcaccacgcggcctacgtgaacaacctgaacgtcaccgaggagaagtaccaggaggcgttggccaagggagatgttacagcccagatagctcttcagcctgcactgaagttcaatggtggtggtcatatcaatcatagcattttctggacaaacctcagccctaacggtggtggagaacccaaaggggagttgctggaagccatcaaacgtgactttggttcctttgacaagtttaaggagaagctgacggctgcatctgttggtgtccaaggctcaggttggggttggcttggtttcaataaggaacggggacacttacaaattgctgcttgtccaaatcaggatccactgcaaggaacaacaggccttattccactgctggggattgatgtgtgggagcacgcttactaccttcagtataaaaatgtcaggcctgattatctaaaagctatttggaatgtaatcaactgggagaatgtaactgaaagatacatggcttgcaaaaagtaaaccacgatcgttatgctgagtatgttaagctctttatgactgtttttgtagtggtatagagtactgcagaatacagtaagctgctctattgtagcatttcttgatgttgcttagtcacttatttcataaacaacttaatgttctgaataatttcttactaaacattttgttattgggcaagtgattgaaaatagtaaatgctttgtgtgattgaatctgattggacattttcttcagagagctaaattacaattgtcatttataaaaccatcaaaaatattccatccatatactttggggacttgtagggatgcctttctagtcctattctattgcagttatagaaaatctagtcttttgccccagttacttaaaaataaaatattaacactttcccaagggaaacactcggctttctatagaaaattgcactttttgtcgagtaatcctctgcagtgatacttctggtagatgtcacccagtggtttttgttaggtcaaatgttcctgtatagtttttgcaaatagagctgtatactgtttaaatgtagcaggtgaactgaactggggtttgctcacctgcacagtaaaggcaaacttcaacagcaaaactgcaaaaaggtggtttttgcagtaggagaaaggaggatgtttatttgcagggcgccaagcaaggagaattgggcagctcatgcttgagacccaatctccatgatgacctacaagctagagtatttaaaggcagtggtaaatttcaggaaagcagaagttaaaggcaaaattgtaaatcagtcgagatcgggtgccttcagggtggtatggctgtataccaaaattgtaaatcactacatgaagcttatatattggtttggcctgaaaggtgaagtggggtaggcagggggcgggcttacaggttatggtggattcaaagactccctgatttgtgattggttaaggaagcaaagctttgtctaaaaacttggggtccgcagaaaggaacattaaggtctggccaggcccctcaggaagaaactgagagcaaagaatggaggtcagagtttagtccctggtgttcccccttatctgacgtctgtgtgaatccatttggtgggggtctgggtttctgaaaagtagctcaggggcacgtgttaaggatgtctctaggtgactctaacttccctggctattgtttgaaactgttatgaccttcttgcttatcagcttgctggtttccttctcggggcgagctgggtgcctggagttttcggtgaaggaaactcaagattctcctttatttctgtgcttgtgggaatccccctggcacaccccaaagaggggtccctgctccgtctcacagggatctttttgtatatttggcttagcatcatacatttgccatgttgtttcatcatctgcctaatttactgtttttgaatatttcatttgtttctaattgttactacagataatgctggggtgagcaactctgtgtacataggtttatctcctattggaatattttctttatataggcgtttttttttttcttttttttgggagacagagtcttgctctgttgcccaggctggagtgcagtggcgcgaccggagctcactgcaacctccacttcccgggttcaagtgattgtcccacctcagcctcctgaatagctgggattacaggtgcatgctaccatgcctggctacttttggtatttttagcagagacagggtttcaccatgttggccagggtggtctcgaactcctgacctcaagtgatccgtctggctcagcctcccaaagtgctgggattacaggtgtgagccactgcacctggcctatataggcttttttcttaaacctatttagtaatgttttcccaagtttattttttatttttaattttttccccaagtttatttttctatttttttttcatggaaaaatggggtaacttagcagtttcaatattgaagactgaagtttaaaaaaaatttaaattcaaggtacttttaaaattcagttagaaaagtaggctttaaaaattattagagacaagagtaccaaagcggtgtgtgtatgtgtgtgtgtgtatgcatgcttgtggattggaaaaactttggagactgattacttttcattatatatgtgtcacagtgaaacagcttttatgtgtcatgtaagattactgcttgcctctctaaggaaggtcgtgactgtttaaatagacgggcaaggtggaaccttttgaaagatgagcttttgaatataagtcagcagatctgcaaacncttgttagttcaataacaggtaccgagctcgattcta

SEQ ID NO: 450012 - DNA, 1370 bp, Homo sapiens
ggcggggcggcggtgcccttgcggcgcagctggggtcgcggccctgctccccgcgctttcttaaggcccgcgggcggcgcaggagcggcactcgtggctgtggtggcttcggcagcggcttcagcagatcggcggcatcagcggtagcaccagcactagcagcatgttgagccgggcagtgtgcggcaccagcaggcagctggctccggttttggggtatctgggctccaggcagaagcacagcctccccgacctgccctacgactacggcgccctggaacctcacatcaacgcgcagatcatgcagctgcaccacagcaagcaccacgcggcctacgtgaacaacctgaacgtcaccgaggagaagtaccaggaggcgttggccaagggagatgttacagcccagatagctcttcagcctgcactgaagttcaatggtggtggtcatatcaatcatagcattttctggacaaacctcagccctaacggtggtggagaacccaaaggggagttgctggaagccatcaaacgtgactttggttcctttgacaagtttaaggagaagctgacggctgcatctgttggtgtccaaggctcaggttggggttggcttggtttcaataaggaacggggacacttacaaattgctgcttgtccaaatcaggatccactgcaaggaacaacaggccttattccactgctggggattgatgtgtgggagcacgcttactaccttcagtataaaaatgtcaggcctgattatctaaaagctatttggaatgtaatcaactgggagaatgtaactgaaagatacatggcttgcaaaaagtaaaccacgatcgttatgctgagtatgttaagctctttatgactgtttttgtagtggtatagagtactgcagaatacagtaagctgctctattgtagcatttcttgatgttgcttagtcacttatttcataaacaacttaatgttctgaataatttcttactaaacattttgttattgggcaagtgattgaaaatagtaaatgctttgtgtgattgaaaaaaaaaaaaaaaaaaaaaaaaaaaaaaaaaacaaaaaaaaaaaaaaaaaaaaaaaaaaaaaaaaaaaaaaaaaataaaatacctttgcggcccccttggcccaaggggattttaacttgggcaaggttattgctgccgcccgaatttggggttaattggccaattccgccttatggggggcggttataaattccatggcccggggttttacagggcggggctgggaaaacccctgggggtacccaacttaattgcgctgggagaaaatcccctttttccaggttggggaaaaagcgaagaggcccggaccggtggcctctcc

SEQ ID NO: 450013 - DNA, 2051 bp, Homo sapiens
  misc_feature (1442)..(1442): n is a, c, g, or t
  misc_feature (1444)..(1444): n is a, c, g, or t
ggcggggcggcggtgcccttgcggcgcagctggggtcgcggccctgctccccgcgctttcttaaggcccgcgggcggcgcaggagcggcactcgtggctgtggtggcttcggcagcggcttcagcagatcggcggcatcagcggtagcaccagcactagcagcatgttgagccgggcagtgtgcggcaccagcaggcagctggctccggttttggggtatctgggctccaggcagaagcacagcctccccgacctgccctacgactacggcgccctggaacctcacatcaacgcgcagatcatgcagctgcaccacagcaagcaccacgcggcctacgtgaacaacctgaacgtcaccgaggagaagtaccaggaggcgttggccaagggtaggttccaggctgagcggcgggaggcagtccccggcagaggcgaccccagggagccaggccccatacggacgggcctctccgtggaggagaactcgcttcgtatttgtaccggttccgagttttccaggcacgatagtctctcttttaaacacatggtctacctcattgtagaaggagtgcctcgatgggtttgaacacacttctgtcatctcagggaacttggggtcctgcgaaggagcttgccttactgttgtgagccacattccgttacacatattgccagcactggtgaattgtagggcctgaaaagaaagctctactgtgtcactcgttttttttgcaaattgaaattgttcttgttgtataatgtgctttggggaaatgtttggtctctcaggtaggtgtgccagccgtttgcaggagggctgagagcgcctgtccactggtggccagacatcatcgggtccgcaggtgtctctgagtgtcagggtcacctcctgatagaagtgggagtggtgtcttactgccaggtcacactgaaggtgggagacaggaggacactactccgtgctaggaaccatggtccttgtcatcttcctgagagcaaacggggtcgggactccagcctaggacttggagactccctgcatccccagctaccctgcaggtgaaacttcactgagcccacttgacttcaggtgggagaggaggaggcacaccgttgtggtgtgcgttaccaaaaaagcagtaacctaactgtggaacagttcaggatctttagacttgatacttttcttgatttcccttaggggtcaaagttcacaaggaaaatagccctttagtgggaaactgaaacaggcttgtttttatttactatttactcatatttgtaatgcaattaaaatatatgttgttaactttttttttttttctcaagagctcggttgataaaaccaggggtatgtggactttttgagtctgtgccttttgggggtgtgtatgggaatgttatgttttaacgttttttacaaaatagtattgtctttttantntattcgttagtggtttgcacaaggaagataatcgatagtcatgttttttagactctctgtattgcttggtaagctacgtagtaaaaaatgtttacttttccttaaatgttttgaatttcggggttatgaaatttgttgagtaatttttagacagtcacatcttgttgactggaggcatctagtggaaaaatgcagtatttcagcctgattgtgtttgaagtaaatgattaaaagaggaggaagttaccacattctggaagatttacttgagacagacgaaccttgaattacgggaaaaggccccgtgatttaggaaataacaaatttgggaaacatgtaatggggagagactggggaataccccagttgtgaaagtacttcctgtaaggcaacatctgacaccaggaacctttctcttcagtattttaaaaacaacttaatttcagtcctttacttgtggaatcagagccttacttatgtaatacaacccactggaaaaaagctttttattgtattgtactatattgtttataagtgattgagtacctgcagagctttcttttacttaaacatattttaaaaattattaaaaagattttcatgtttg

SEQ ID NO: 450014 - DNA, 917 bp, Homo sapiens
ggcggggcggcggtgcccttgcggcgcagctggggtcgcggccctgctccccgcgctttcttaaggcccgcgggcggcgcaggagcggcactcgtggctgtggtggcttcggcagcggcttcagcagatcggcggcatcagcggtagcaccagcactagcagcatgttgagccgggcagtgtgcggcaccagcaggcagctggctccggttttggggtatctgggctccaggcagaagcacagcctccccgacctgccctacgactacggcgccctggaacctcacatcaacgcgcagatcatgcagctgcaccacagcaagcaccacgcggcctacgtgaacaacctgaacgtcaccgaggagaagtaccaggaggcgttggccaagggggagttgctggaagccatcaaacgtgactttggttcctttgacaagtttaaggagaagctgacggctgcatctgttggtgtccaaggctcaggttggggttggcttggtttcaataaggaacggggacacttacaaattgctgcttgtccaaatcaggatccactgcaaggaacaacaggccttattccactgctggggattgatgtgtgggagcacgcttactaccttcagtataaaaatgtcaggcctgattatctaaaagctatttggaatgtaatcaactgggagaatgtaactgaaagatacatggcttgcaaaaagtaaaccacgatcgttatgctgatcataccctaatgatcccagcaagataatgtcctgtcttctaagatgtgcatcaagcctggtacatactgaaaaccctataaggtcctggataatttttgtttgattattcattgaagaaacatttattttccaattgtgtgaagtttttgactgttaataaaagaatctgtcaaccatcaaa

SEQ ID NO: 450015 - DNA, 737 bp, Homo sapiens
ggcggggcggcggtgcccttgcggcgcagctggggtcgcggccctgctccccgcgctttcttaaggcccgcgggcggcgcaggagcggcactcgtggctgtggtggcttcggcagcggcttcagcagatcggcggcatcagcggtagcaccagcactagcagcatgttgagccgggcagtgtgcggcaccagcaggcagctggctccggttttggggtatctgggctccaggcagaagcacagcctccccgacctgccctacgactacggcgccctggaacctcacatcaacgcgcagatcatgcagctgcaccacagcaagcaccacgcggcctacgtgaacaacctgaacgtcaccgaggagaagtaccaggaggcgttggccaagggagatgttacagcccagatagctcttcagcctgcactgaagttcaatggtggtggtcatatcaatcatagcattttctggacaaacctcagccctaacggtggtggagaacccaaaggggagttgctggaagccatcaaacgtgactttggttccttggcttttctagcctatttacctgcaggctgagccactctcttccctttccccagcatcactccccaaggaagagccaatgttttccacccataatcctttctgccgacccctagttccctctgctcagccaagcttgttatcagctttcagggccatggttcacattagaataaaaggtagtaattagaaa

SEQ ID NO: 450016 - DNA, 690 bp, Homo sapiens
gaatgagattgttacaaagggtaattttgtgtgagtagaataataaaagttgaaattgagaagatgcaatgttttagactgaaactgatggttggtttgttttccccttctttctaacaggccttattccactgctggggattgatgtgtgggagcacgcttactaccttcagtataaaaatgtcaggcctgattatctaaaagctatttggaatgtaatcaactgggagaatgtaactgaaagatacatggcttgcaaaaagtaaaccacgatcgttatgctgagtatgttaagctctttatgactgtttttgtagtggtatagagtactgcagaatacagtaagctgctctattgtagcatttcttgatgttgcttagtcacttatttcataaacaacttaatgttctgaataatttcttactaaacattttgttattgggcaagtgattgaaaatagtaaatgctttgtgtgattgaatctgattggacattttcttcagagagctaaattacaattgtcatttataaaaccatcaaaaatattccatccatatactttggggacttgtagggatgcctttctagtcctattctattgcagttatagaaaatctagtcttttgccccagttacttaaaaataaaatattaacactttcccaagggaaacactcggctttctatagaa

SEQ ID NO: 450017 - DNA, 819 bp, Homo sapiens
cggacgcgtgggtcgacccacgcagaaatcacaactttattgtacacttcattgcaacttgaaattcatggtcttaaagtgagatttgaatttctattgagcgcctttaaaaaagtaataccaaaccataaagttaaaatctatgtatattgagtcatatctaaaaccacgtataaacataaattgtatttcctgttttaattccaggggaagtactgtttgggaaagctattattaggtaaatgttttacaaattactgtttctcactttcagtcataccctaatgatcccagcaagataatgtcctgtcttctaagatgtgcatcaagcctggtacatactgaaaaccctataaggtcctggataatttttgtttgattattcattgaagaaacatttattttccaattgtgtgaagtttttgactgttaataaaagaatctgtcaaccatcaaaaaaaaaaaaaaaaaaaaaaaaaaaaaaaaaaaaagggggggggggtaaaaaattccctgagagggggccaaaatttagggaacccaagttctgtttgaacaagatctggtgccccaatatggggagccagttataaaaaacgagagacagcggagacgaaacttaaacaaccgccgacgacgtggcaaaaccgcggcaccctcgacacctttgcagaagaaacccatacctggcggggggcacaattatggacgcacatccccacaagtatttaccgccaggcaacaaaacatataacagtactactatggtgaaaccacgatattatcgcactaaagttggtcagaaacattgaaaattag

SEQ ID NO: 450018 - DNA, 4089 bp, Homo sapiens
ggcggggcggcggtgcccttgcggcgcagctggggtcgcggccctgctccccgcgctttcttaaggcccgcgggcggcgcaggagcggcactcgtggctgtggtggcttcggcagcggcttcagcagatcggcggcatcagcggtagcaccagcactagcagcatgttgagccgggcagtgtgcggcaccagcaggcagctggctccggttttggggtatctgggctccaggcagaagcacagcctccccgacctgccctacgactacggcgccctggaacctcacatcaacgcgcagatcatgcagctgcaccacagcaagcaccacgcggcctacgtgaacaacctgaacgtcaccgaggagaagtaccaggaggcgttggccaagggagatgttacagcccagatagctcttcagcctgcactgaagttcaatggtggtggtcatatcaatcatagcattttctggacaaacctcagccctaacggtggtggagaacccaaaggggagttgctggaagccatcaaacgtgactttggttcctttgacaagtttaaggagaagctgacggctgcatctgttggtgtccaaggctcaggttggggttggcttggtttcaataaggaacggggacacttacaaattgctgcttgtccaaatcaggatccactgcaaggaacaacaggccttattccactgctggggattgatgtgtgggagcacgcttactaccttcagtataaaaatgtcaggcctgattatctaaaagctatttggaatgtaatcaactgggagaatgtaactgaaagatacatggcttgcaaaaagtaaaccacgatcgttatgctgagtatgttaagctctttatgactgtttttgtagtggtatagagtactgcagaatacagtaagctgctctattgtagcatttcttgatgttgcttagtcacttatttcataaacaacttaatgttctgaataatttcttactaaacattttgttattgggcaagtgattgaaaatagtaaatgctttgtgtgattgaatctgattggacattttcttcagagagctaaattacaattgtcatttataaaaccatcaaaaatattccatccatatactttggggacttgtagggatgcctttctagtcctattctattgcagttatagaaaatctagtcttttgccccagttacttaaaaataaaatattaacactttcccaagggaaacactcggctttctatagaaaattgcactttttgtcgagtaatcctctgcagtgatacttctggtagatgtcacccagtggtttttgttaggtcaaatgttcctgtatagtttttgcaaatagagctgtatactgtttaaatgtagcaggtgaactgaactggggtttgctcacctgcacagtaaaggcaaacttcaacagcaaaactgcaaaaaggtggtttttgcagtaggagaaaggaggatgtttatttgcagggcgccaagcaaggagaattgggcagctcatgcttgagacccaatctccatgatgacctacaagctagagtatttaaaggcagtggtaaatttcaggaaagcagaagttaaaggcaaaattgtaaatcagtcgagatcgggtgccttcagggtggtatggctgtataccaaaattgtaaatcactacatgaagcttatatattggtttggcctgaaaggtgaagtggggtaggcagggggcgggcttacaggttatggtggattcaaagactccctgatttgtgattggttaaggaagcaaagctttgtctaaaaacttggggtccgcagaaaggaacattaaggtctggccaggcccctcaggaagaaactgagagcaaagaatggaggtcagagtttagtccctggtgttcccccttatctgacgtctgtgtgaatccatttggtgggggtctgggtttctgaaaagtagctcaggggcacgtgttaaggatgtctctaggtgactctaacttccctggctattgtttgaaactgttatgaccttcttgcttatcagcttgctggtttccttctcggggcgagctgggtgcctggagttttcggtgaaggaaactcaagattctcctttatttctgtgcttgtgggaatccccctggcacaccccaaagaggggtccctgctccgtctcacagggatctttttgtatatttggcttagcatcatacatttgccatgttgtttcatcatctgcctaatttactgtttttgaatatttcatttgtttctaattgttactacagataatgctggggtgagcaactctgtgtacataggtttatctcctattggaatattttctttatataggcgtttttttttttcttttttttgggagacagagtcttgctctgttgcccaggctggagtgcagtggcgcgaccggagctcactgcaacctccacttcccgggttcaagtgattgtcccacctcagcctcctgaatagctgggattacaggtgcatgctaattacaggtgtgagccactgcacctggcctatataggcttttttcttaaacctatttagtaatgttttcccaagtttattttttatttttaattttttccccaagtttatttttctatttttttttcatggaaaaatggggtaacttagcagtttcaatattgaagactgaagtttaaaaaaaatttaaattcaaggtacttttaaaattcagttagaaaagtaggctttaaaaattattagagacaagagtaccaaagcggtgtgtgtatgtgtgtgtgtgtatgcatgcttgtggattggaaaaactttggagactgattacttttcattatatatgtgtcacagtgaaacagcttttatgtgtcatgtaagattactgcttgcctctctaaggaaggtcgtgactgtttaaatagacgggcaaggtggaaccttttgaaagatgagcttttgaatataagttgtctgctagatcatggttgtattgaactaacaaggtttgcagatctgctgacttatataaagctttttgattcctactaagctttaagatttaaaaaatgttcaatgttgaaatttctgtggggctctatttttgctttggctttctggtgagagagtgaggaagcattctttccttcactaagtttgtctttcttgtcttctggatagattgattttaagagactaagggaatttacaaactaaagattttagtcatctggtggaaaaggagactttaagattgtttagggctgggcggggtgactcacatctgtaatcccagcactttgggaggccaaggcaggcagaacacttgaaggagttcaagaccagcgtggccaacgtggtgaaaccctgtctctactaaaaatacaaaaattgtttagctctgtttttcataatagaaatagaaaaggtaaaattgcttttcttctgaaaagaacaagtattgttcatccaagaagggtttttgtgactgaatcagcagtgcctgccctagtcatagctgtgcttcaaaaacctcagcatgattagtgttggagcaaaacaaggaagcaaagcaaatactgtttttgaaattctatctgttgcttgaactattttgtaataattaaactttgatgttgagaaatcacaactttattgtacacttcattgcaacttgaaattcatggtcttaaagtgagatttgaatttctattgagcgcctttaaaaaagtaataccaaaccataaagttaaaatctatgtatattgagtcatatctaaaaccacgtataaacataaattgtatttcctgttttaattccaggggaagtactgtttgggaaagctattattaggtaaatgttttacaaattactgtttctcactttcagtcataccctaatgatcccagcaagataatgtcctgtcttctaagatgtgcatcaagcctggtacatactgaaaaccctataaggtcctggataatttttgtttgattattcattgaagaaacatttattttccaattgtgtgaagtttttgactgttaataaaagaatctgtcaaccatcaaa

SEQ ID NO: 450019 - DNA, 4090 bp, Homo sapiens
ggcggggcggcggtgcccttgcggcgcagctggggtcgcggccctgctccccgcgctttcttaaggcccgcgggcggcgcaggagcggcactcgtggctgtggtggcttcggcagcggcttcagcagatcggcggcatcagcggtagcaccagcactagcagcatgttgagccgggcagtgtgcggcaccagcaggcagctggctccggttttggggtatctgggctccaggcagaagcacagcctccccgacctgccctacgactacggcgccctggaacctcacatcaacgcgcagatcatgcagctgcaccacagcaagcaccacgcggcctacgtgaacaacctgaacgtcaccgaggagaagtaccaggaggcgttggccaagggggagttgctggaagccatcaaacgtgactttggttcctttgacaagtttaaggagaagctgacggctgcatctgttggtgtccaaggctcaggttggggttggcttggtttcaataaggaacggggacacttacaaattgctgcttgtccaaatcaggatccactgcaaggaacaacaggccttattccactgctggggattgatgtgtgggagcacgcttactaccttcagtataaaaatgtcaggcctgattatctaaaagctatttggaatgtaatcaactgggagaatgtaactgaaagatacatggcttgcaaaaagtaaaccacgatcgttatgctgagtatgttaagctctttatgactgtttttgtagtggtatagagtactgcagaatacagtaagctgctctattgtagcatttcttgatgttgcttagtcacttatttcataaacaacttaatgttctgaataatttcttactaaacattttgttattgggcaagtgattgaaaatagtaaatgctttgtgtgattgaatctgattggacattttcttcagagagctaaattacaattgtcatttataaaaccatcaaaaatattccatccatatactttggggacttgtagggatgcctttctagtcctattctattgcagttatagaaaatctagtcttttgccccagttacttaaaaataaaatattaacactttcccaagggaaacactcggctttctatagaaaattgcactttttgtcgagtaatcctctgcagtgatacttctggtagatgtcacccagtggtttttgttaggtcaaatgttcctgtatagtttttgcaaatagagctgtatactgtttaaatgtagcaggtgaactgaactggggtttgctcacctgcacagtaaaggcaaacttcaacagcaaaactgcaaaaaggtggtttttgcagtaggagaaaggaggatgtttatttgcagggcgccaagcaaggagaattgggcagctcatgcttgagacccaatctccatgatgacctacaagctagagtatttaaaggcagtggtaaatttcaggaaagcagaagttaaaggcaaaattgtaaatcagtcgagatcgggtgccttcagggtggtatggctgtataccaaaattgtaaatcactacatgaagcttatatattggtttggcctgaaaggtgaagtggggtaggcagggggcgggcttacaggttatggtggattcaaagactccctgatttgtgattggttaaggaagcaaagctttgtctaaaaacttggggtccgcagaaaggaacattaaggtctggccaggcccctcaggaagaaactgagagcaaagaatggaggtcagagtttagtccctggtgttcccccttatctgacgtctgtgtgaatccatttggtgggggtctgggtttctgaaaagtagctcaggggcacgtgttaaggatgtctctaggtgactctaacttccctggctattgtttgaaactgttatgaccttcttgcttatcagcttgctggtttccttctcggggcgagctgggtgcctggagttttcggtgaaggaaactcaagattctcctttatttctgtgcttgtgggaatccccctggcacaccccaaagaggggtccctgctccgtctcacagggatctttttgtatatttggcttagcatcatacatttgccatgttgtttcatcatctgcctaatttactgtttttgaatatttcatttgtttctaattgttactacagataatgctggggtgagcaactctgtgtacataggtttatctcctattggaatattttctttatataggcgtttttttttttcttttttttgggagacagagtcttgctctgttgcccaggctggagtgcagtggcgcgaccggagctcactgcaacctccacttcccgggttcaagtgattgtcccacctcagcctcctgaatagctgggattacaggtgcatgctaccatgcctggctacttttggtatttttagcagagacagggtttcaccatgttggccagggtggtctcgaactcctgacctcaagtgatccgtctggctcagcctcccaaagtgctgggattacaggtgtgagccactgcacctggcctatataggcttttttcttaaacctatttagtaatgttttcccaagtttattttttatttttaattttttccccaagtttatttttctatttttttttcatggaaaaatggggtaacttagcagtttcaatattgaagactgaagtttaaaaaaaatttaaattcaaggtacttttaaaattcagttagaaaagtaggctttaaaaattattagagacaagagtaccaaagcggtgtgtgtatgtgtgtgtgtgtatgcatgcttgtggattggaaaaactttggagactgattacttttcattatatatgtgtcacagtgaaacagcttttatgtgtcatgtaagattactgcttgcctctctaaggaaggtcgtgactgtttaaatagacgggcaaggtggaaccttttgaaagatgagcttttgaatataagttgtctgctagatcatggttgtattgaactaacaaggtttgcagatctgctgacttatataaagctttttgattcctactaagctttaagatttaaaaaatgttcaatgttgaaatttctgtggggctctatttttgctttggctttctggtgagagagtgaggaagcattctttccttcactaagtttgtctttcttgtcttctggatagattgattttaagagactaagggaatttacaaactaaagattttagtcatctggtggaaaaggagactttaagattgtttagggctgggcggggtgactcacatctgtaatcccagcactttgggaggccaaggcaggcagaacacttgaaggagttcaagaccagcgtggccaacgtggtgaaaccctgtctctactaaaaatacaaaaattgtttagctctgtttttcataatagaaatagaaaaggtaaaattgcttttcttctgaaaagaacaagtattgttcatccaagaagggtttttgtgactgaatcagcagtgcctgccctagtcatagctgtgcttcaaaaacctcagcatgattagtgttggagcaaaacaaggaagcaaagcaaatactgtttttgaaattctatctgttgcttgaactattttgtaataattaaactttgatgttgagaaatcacaactttattgtacacttcattgcaacttgaaattcatggtcttaaagtgagatttgaatttctattgagcgcctttaaaaaagtaataccaaaccataaagttaaaatctatgtatattgagtcatatctaaaaccacgtataaacataaattgtatttcctgttttaattccaggggaagtactgtttgggaaagctattattaggtaaatgttttacaaattactgtttctcactttcagtcataccctaatgatcccagcaagataatgtcctgtcttctaagatgtgcatcaagcctggtacatactgaaaaccctataaggtcctggataatttttgtttgattattcattgaagaaacatttattttccaattgtgtgaagtttttgactgttaataaaagaatctgtcaaccatcaaa

SEQ ID NO: 450020 - DNA, 4287 bp, Homo sapiens
  misc_feature (4212)..(4213): n is a, c, g, or t
  misc_feature (4224)..(4225): n is a, c, g, or t
  misc_feature (4231)..(4231): n is a, c, g, or t
  misc_feature (4241)..(4241): n is a, c, g, or t
ggcggggcggcggtgcccttgcggcgcagctggggtcgcggccctgctccccgcgctttcttaaggcccgcgggcggcgcaggagcggcactcgtggctgtggtggcttcggcagcggcttcagcagatcggcggcatcagcggtagcaccagcactagcagcatgttgagccgggcagtgtgcggcaccagcaggcagctggctccggttttggggtatctgggctccaggcagaagcacagcctccccgacctgccctacgactacggcgccctggaacctcacatcaacgcgcagatcatgcagctgcaccacagcaagcaccacgcggcctacgtgaacaacctgaacgtcaccgaggagaagtaccaggaggcgttggccaagggagatgttacagcccagatagctcttcagcctgcactgaagttcaatggtggtggtcatatcaatcatagcattttctggacaaacctcagccctaacggtggtggagaacccaaaggggagttgctggaagccatcaaacgtgactttggttcctttgacaagtttaaggagaagctgacggctgcatctgttggtgtccaaggctcaggttggggttggcttggtttcaataaggaacggggacacttacaaattgctgcttgtccaaatcaggatccactgcaaggaacaacaggccttattccactgctggggattgatgtgtgggagcacgcttactaccttcagtataaaaatgtcaggcctgattatctaaaagctatttggaatgtaatcaactgggagaatgtaactgaaagatacatggcttgcaaaaagtaaaccacgatcgttatgctgagtatgttaagctctttatgactgtttttgtagtggtatagagtactgcagaatacagtaagctgctctattgtagcatttcttgatgttgcttagtcacttatttcataaacaacttaatgttctgaataatttcttactaaacattttgttattgggcaagtgattgaaaatagtaaatgctttgtgtgattgaatctgattggacattttcttcagagagctaaattacaattgtcatttataaaaccatcaaaaatattccatccatatactttggggacttgtagggatgcctttctagtcctattctattgcagttatagaaaatctagtcttttgccccagttacttaaaaataaaatattaacactttcccaagggaaacactcggctttctatagaaaattgcactttttgtcgagtaatcctctgcagtgatacttctggtagatgtcacccagtggtttttgttaggtcaaatgttcctgtatagtttttgcaaatagagctgtatactgtttaaatgtagcaggtgaactgaactggggtttgctcacctgcacagtaaaggcaaacttcaacagcaaaactgcaaaaaggtggtttttgcagtaggagaaaggaggatgtttatttgcagggcgccaagcaaggagaattgggcagctcatgcttgagacccaatctccatgatgacctacaagctagagtatttaaaggcagtggtaaatttcaggaaagcagaagttaaaggcaaaattgtaaatcagtcgagatcgggtgccttcagggtggtatggctgtataccaaaattgtaaatcactacatgaagcttatatattggtttggcctgaaaggtgaagtggggtaggcagggggcgggcttacaggttatggtggattcaaagactccctgatttgtgattggttaaggaagcaaagctttgtctaaaaacttggggtccgcagaaaggaacattaaggtctggccaggcccctcaggaagaaactgagagcaaagaatggaggtcagagtttagtccctggtgttcccccttatctgacgtctgtgtgaatccatttggtgggggtctgggtttctgaaaagtagctcaggggcacgtgttaaggatgtctctaggtgactctaacttccctggctattgtttgaaactgttatgaccttcttgcttatcagcttgctggtttccttctcggggcgagctgggtgcctggagttttcggtgaaggaaactcaagattctcctttatttctgtgcttgtgggaatccccctggcacaccccaaagaggggtccctgctccgtctcacagggatctttttgtatatttggcttagcatcatacatttgccatgttgtttcatcatctgcctaatttactgtttttgaatatttcatttgtttctaattgttactacagataatgctggggtgagcaactctgtgtacataggtttatctcctattggaatattttctttatataggcgtttttttttttcttttttttgggagacagagtcttgctctgttgcccaggctggagtgcagtggcgcgaccggagctcactgcaacctccacttcccgggttcaagtgattgtcccacctcagcctcctgaatagctgggattacaggtgcatgctaccatgcctggctacttttggtatttttagcagagacagggtttcaccatgttggccagggtggtctcgaactcctgacctcaagtgatccgtctggctcagcctcccaaagtgctgggattacaggtgtgagccactgcacctggcctatataggcttttttcttaaacctatttagtaatgttttcccaagtttattttttatttttaattttttccccaagtttatttttctatttttttttcatggaaaaatggggtaacttagcagtttcaatattgaagactgaagtttaaaaaaaatttaaattcaaggtacttttaaaattcagttagaaaagtaggctttaaaaattattagagacaagagtaccaaagcggtgtgtgtatgtgtgtgtgtgtatgcatgcttgtggattggaaaaactttggagactgattacttttcattatatatgtgtcacagtgaaacagcttttatgtgtcatgtaagattactgcttgcctctctaaggaaggtcgtgactgtttaaatagacgggcaaggtggaaccttttgaaagatgagcttttgaatataagttgtctgctagatcatggttgtattgaactaacaaggtttgcagatctgctgacttatataaagctttttgattcctactaagctttaagatttaaaaaatgttcaatgttgaaatttctgtggggctctatttttgctttggctttctggtgagagagtgaggaagcattctttccttcactaagtttgtctttcttgtcttctggatagattgattttaagagactaagggaatttacaaactaaagattttagtcatctggtggaaaaggagactttaagattgtttagggctgggcggggtgactcacatctgtaatcccagcactttgggaggccaaggcaggcagaacacttgaaggagttcaagaccagcgtggccaacgtggtgaaaccctgtctctactaaaaatacaaaaattgtttagctctgtttttcataatagaaatagaaaaggtaaaattgcttttcttctgaaaagaacaagtattgttcatccaagaagggtttttgtgactgaatcagcagtgcctgccctagtcatagctgtgcttcaaaaacctcagcatgattagtgttggagcaaaacaaggaagcaaagcaaatactgtttttgaaattctatctgttgcttgaactattttgtaataattaaactttgatgttgagaaatcacaactttattgtacacttcattgcaacttgaaattcatggtcttaaagtgagatttgaatttctattgagcgcctttaaaaaagtaataccaaaccataaagttaaaatctatgtatattgagtcatatctaaaaccacgtataaacataaattgtatttcctgttttaattccaggggaagtactgtttgggaaagctattattaggtaaatgttttacaaattactgtttctcactttcagtcataccctaatgatcccagcaagataatgtcctgtcttctaagatgtgcatcaagcctggtacatactgaaaaccctataaggtcctggataatttttgtttgattattcattgaagaaacatttattttccaattgtgtgaagtttttgactgttaataaaagaatctgtcaaccatcaaactccnnaaagaaaaaanntttttnagtaatttcnttttttttctcctcgagggggggccccgtacccaattcgccctttt

SEQ ID NO: 450021 - DNA, 4383 bp, Homo sapiens
  misc_feature (4223)..(4223): n is a, c, g, or t
ggcggggcggcggtgcccttgcggcgcagctggggtcgcggccctgctccccgcgctttcttaaggcccgcgggcggcgcaggagcggcactcgtggctgtggtggcttcggcagcggcttcagcagatcggcggcatcagcggtagcaccagcactagcagcatgttgagccgggcagtgtgcggcaccagcaggcagctggctccggttttggggtatctgggctccaggcagaagcacagcctccccgacctgccctacgactacggcgccctggaacctcacatcaacgcgcagatcatgcagctgcaccacagcaagcaccacgcggcctacgtgaacaacctgaacgtcaccgaggagaagtaccaggaggcgttggccaagggagatgttacagcccagatagctcttcagcctgcactgaagttcaatggtggtggtcatatcaatcatagcattttctggacaaacctcagccctaacggtggtggagaacccaaaggggagttgctggaagccatcaaacgtgactttggttcctttgacaagtttaaggagaagctgacggctgcatctgttggtgtccaaggctcaggttggggttggcttggtttcaataaggaacggggacacttacaaattgctgcttgtccaaatcaggatccactgcaaggaacaacaggccttattccactgctggggattgatgtgtgggagcacgcttactaccttcagtataaaaatgtcaggcctgattatctaaaagctatttggaatgtaatcaactgggagaatgtaactgaaagatacatggcttgcaaaaagtaaaccacgatcgttatgctgagtatgttaagctctttatgactgtttttgtagtggtatagagtactgcagaatacagtaagctgctctattgtagcatttcttgatgttgcttagtcacttatttcataaacaacttaatgttctgaataatttcttactaaacattttgttattgggcaagtgattgaaaatagtaaatgctttgtgtgattgaatctgattggacattttcttcagagagctaaattacaattgtcatttataaaaccatcaaaaatattccatccatatactttggggacttgtagggatgcctttctagtcctattctattgcagttatagaaaatctagtcttttgccccagttacttaaaaataaaatattaacactttcccaagggaaacactcggctttctatagaaaattgcactttttgtcgagtaatcctctgcagtgatacttctggtagatgtcacccagtggtttttgttaggtcaaatgttcctgtatagtttttgcaaatagagctgtatactgtttaaatgtagcaggtgaactgaactggggtttgctcacctgcacagtaaaggcaaacttcaacagcaaaactgcaaaaaggtggtttttgcagtaggagaaaggaggatgtttatttgcagggcgccaagcaaggagaattgggcagctcatgcttgagacccaatctccatgatgacctacaagctagagtatttaaaggcagtggtaaatttcaggaaagcagaagttaaaggcaaaattgtaaatcagtcgagatcgggtgccttcagggtggtatggctgtataccaaaattgtaaatcactacatgaagcttatatattggtttggcctgaaaggtgaagtggggtaggcagggggcgggcttacaggttatggtggattcaaagactccctgatttgtgattggttaaggaagcaaagctttgtctaaaaacttggggtccgcagaaaggaacattaaggtctggccaggcccctcaggaagaaactgagagcaaagaatggaggtcagagtttagtccctggtgttcccccttatctgacgtctgtgtgaatccatttggtgggggtctgggtttctgaaaagtagctcaggggcacgtgttaaggatgtctctaggtgactctaacttccctggctattgtttgaaactgttatgaccttcttgcttatcagcttgctggtttccttctcggggcgagctgggtgcctggagttttcggtgaaggaaactcaagattctcctttatttctgtgcttgtgggaatccccctggcacaccccaaagaggggtccctgctccgtctcacagggatctttttgtatatttggcttagcatcatacatttgccatgttgtttcatcatctgcctaatttactgtttttgaatatttcatttgtttctaattgttactacagataatgctggggtgagcaactctgtgtacataggtttatctcctattggaatattttctttatataggcgtttttttttttcttttttttgggagacagagtcttgctctgttgcccaggctggagtgcagtggcgcgaccggagctcactgcaacctccacttcccgggttcaagtgattgtcccacctcagcctcctgaatagctgggattacaggtgcatgctaccatgcctggctacttttggtatttttagcagagacagggtttcaccatgttggccagggtggtctcgaactcctgacctcaagtgatccgtctggctcagcctcccaaagtgctgggattacaggtgtgagccactgcacctggcctatataggcttttttcttaaacctatttagtaatgttttcccaagtttattttttatttttaattttttccccaagtttatttttctatttttttttcatggaaaaatggggtaacttagcagtttcaatattgaagactgaagtttaaaaaaaatttaaattcaaggtacttttaaaattcagttagaaaagtaggctttaaaaattattagagacaagagtaccaaagcggtgtgtgtatgtgtgtgtgtgtatgcatgcttgtggattggaaaaactttggagactgattacttttcattatatatgtgtcacagtgaaacagcttttatgtgtcatgtaagattactgcttgcctctctaaggaaggtcgtgactgtttaaatagacgggcaaggtggaaccttttgaaagatgagcttttgaatataagttgtctgctagatcatggttgtattgaactaacaaggtttgcagatctgctgacttatataaagctttttgattcctactaagctttaagatttaaaaaatgttcaatgttgaaatttctgtggggctctatttttgctttggctttctggtgagagagtgaggaagcattctttccttcactaagtttgtctttcttgtcttctggatagattgattttaagagactaagggaatttacaaactaaagattttagtcatctggtggaaaaggagactttaagattgtttagggctgggcggggtgactcacatctgtaatcccagcactttgggaggccaaggcaggcagaacacttgaaggagttcaagaccagcgtggccaacgtggtgaaaccctgtctctactaaaaatacaaaaattgtttagctctgtttttcataatagaaatagaaaaggtaaaattgcttttcttctgaaaagaacaagtattgttcatccaagaagggtttttgtgactgaatcagcagtgcctgccctagtcatagctgtgcttcaaaaacctcagcatgattagtgttggagcaaaacaaggaagcaaagcaaatactgtttttgaaattctatctgttgcttgaactattttgtaataattaaactttgatgttgagaaatcacaactttattgtacacttcattgcaacttgaaattcatggtcttaaagtgagatttgaatttctattgagcgcctttaaaaaagtaataccaaaccataaagttaaaatctatgtatattgagtcatatctaaaaccacgtataaacataaattgtatttcctgttttaattccaggggaagtactgtttgggaaagctattattaggtaaatgttttacaaattactgtttctcactttcagtcataccctaatgatcccagcaagataatgtcctgtcttctaagatgtgcatcaagcctggtacatactgaaaaccctataaggtcctggataatttttgtttgattattcattgaagaaacatttattttccaattgtgtgaagtttttgactgttaataaaagaatctgtcaaccatcaaattctcctcccaaaaanctcacatttatttttttgcaacgcaaatagttgccaaccaacaaaacttaagtttccagaatgttatatttttaaaaaaggataaccggtggaggaggaaaatttccaaaaaggcgatagcccctggttaaaattgattggaatccccccggggggaaaa

SEQ ID NO: 450022 - DNA, 3186 bp, Homo sapiens
ggcggggcggcggtgcccttgcggcgcagctggggtcgcggccctgctccccgcgctttcttaaggcccgcgggcggcgcaggagcggcactcgtggctgtggtggcttcggcagcggcttcagcagatcggcggcatcagcggtagcaccagcactagcagcatgttgagccgggcagtgtgcggcaccagcaggcagctggctccggttttggggtatctgggctccaggcagaagcacagcctccccgacctgccctacgactacggcgccctggaacctcacatcaacgcgcagatcatgcagctgcaccacagcaagcaccacgcggcctacgtgaacaacctgaacgtcaccgaggagaagtaccaggaggcgttggccaagggagatgttacagcccagatagctcttcagcctgcactgaagttcaatggtggtggtcatatcaatcatagcattttctggacaaacctcagccctaacggtggtggagaacccaaaggggagttgctggaagccatcaaacgtgactttggttcctttgacaagtttaaggagaagctgacggctgcatctgttggtgtccaaggctcaggttggggttggcttggtttcaataaggaacggggacacttacaaattgctgcttgtccaaatcaggatccactgcaaggaacaacaggccttattccactgctggggattgatgtgtgggagcacgcttactaccttcagtataaaaatgtcaggcctgattatctaaaagctatttggaatgtaatcaactgggagaatgtaactgaaagatacatggcttgcaaaaagtaaaccacgatcgttatgctgagtatgttaagctctttatgactgtttttgtagtggtatagagtactgcagaatacagtaagctgctctattgtagcatttcttgatgttgcttagtcacttatttcataaacaacttaatgttctgaataatttcttactaaacattttgttattgggcaagtgattgaaaatagtaaatgctttgtgtgattgaatctgattggacattttcttcagagagctaaattacaattgtcatttataaaaccatcaaaaatattccatccatatactttggggacttgtagggatgcctttctagtcctattctattgcagttatagaaaatctagtcttttgccccagttacttaaaaataaaatattaacactttcccaagggaaacactcggctttctatagaaaattgcactttttgtcgagtaatcctctgcagtgatacttctggtagatgtcacccagtggtttttgttaggtcaaatgttcctgtatagtttttgcaaatagagctgtatactgtttaaatgtagcaggtgaactgaactggggtttgctcacctgcacagtaaaggcaaacttcaacagcaaaactgcaaaaaggtggtttttgcagtaggagaaaggaggatgtttatttgcagggcgccaagcaaggagaattgggcagctcatgcttgagacccaatctccatgatgacctacaagctagagtatttaaaggcagtggtaaatttcaggaaagcagaagttaaaggcaaaattgtaaatcagtcgagatcgggtgccttcagggtggtatggctgtataccaaaattgtaaatcactacatgaagcttatatattggtttggcctgaaaggtgaagtggggtaggcagggggcgggcttacaggttatggtggattcaaagactccctgatttgtgattggttaaggaagcaaagctttgtctaaaaacttggggtccgcagaaaggaacattaaggtctggccaggcccctcaggaagaaactgagagcaaagaatggaggtcagagtttagtccctggtgttcccccttatctgacgtctgtgtgaatccatttggtgggggtctgggtttctgaaaagtagctcaggggcacgtgttaaggatgtctctaggtgactctaacttccctggctattgtttgaaactgttatgaccttcttgcttatcagcttgctggtttccttctcggggcgagctgggtgcctggagttttcggtgaaggaaactcaagattctcctttatttctgtgcttgtgggaatccccctggcacaccccaaagaggggtccctgctccgtctcacagggatctttttgtatatttggcttagcatcatacatttgccatgttgtttcatcatctgcctaatttactgtttttgaatatttcatttgtttctaattgttactacagataatgctggggtgagcaactctgtgtacataggtttatctcctattggaatattttctttatataggcgtttttttttttcttttttttgggagacagagtcttgctctgttgcccaggctggagtgcagtggcgcgaccggagctcactgcaacctccacttcccgggttcaagtggaaaccctgtctctactaaaaatacaaaaattgtttagctctgtttttcataatagaaatagaaaaggtaaaattgcttttcttctgaaaagaacaagtattgttcatccaagaagggtttttgtgactgaatcagcagtgcctgccctagtcatagctgtgcttcaaaaacctcagcatgattagtgttggagcaaaacaaggaagcaaagcaaatactgtttttgaaattctatctgttgcttgaactattttgtaataattaaactttgatgttgagaaatcacaactttattgtacacttcattgcaacttgaaattcatggtcttaaagtgagatttgaatttctattgagcgcctttaaaaaagtaataccaaaccataaagttaaaatctatgtatattgagtcatatctaaaaccacgtataaacataaattgtatttcctgttttaattccaggggaagtactgtttgggaaagctattattaggtaaatgttttacaaattactgtttctcactttcagtcataccctaatgatcccagcaagataatgtcctgtcttctaagatgtgcatcaagcctggtacatactgaaaaccctataaggtcctggataatttttgtttgattattcattgaagaaacatttattttccaattgtgtgaagtttttgactgttaataaaagaatctgtcaaccatcaaa

SEQ ID NO: 450023 - DNA, 2959 bp, Homo sapiens
ggcggggcggcggtgcccttgcggcgcagctggggtcgcggccctgctccccgcgctttcttaaggcccgcgggcggcgcaggagcggcactcgtggctgtggtggcttcggcagcggcttcagcagatcggcggcatcagcggtagcaccagcactagcagcatgttgagccgggcagtgtgcggcaccagcaggcagctggctccggttttggggtatctgggctccaggcagaagcacagcctccccgacctgccctacgactacggcgccctggaacctcacatcaacgcgcagatcatgcagctgcaccacagcaagcaccacgcggcctacgtgaacaacctgaacgtcaccgaggagaagtaccaggaggcgttggccaagggagatgttacagcccagatagctcttcagcctgcactgaagttcaatggtggtggtcatatcaatcatagcattttctggacaaacctcagccctaacggtggtggagaacccaaaggggagttgctggaagccatcaaacgtgactttggttcctttgacaagtttaaggagaagctgacggctgcatctgttggtgtccaaggctcaggttggggttggcttggtttcaataaggaacggggacacttacaaattgctgcttgtccaaatcaggatccactgcaaggaacaacaggccttattccactgctggggattgatgtgtgggagcacgcttactaccttcagtataaaaatgtcaggcctgattatctaaaagctatttggaatgtaatcaactgggagaatgtaactgaaagatacatggcttgcaaaaagtaaaccacgatcgttatgctgagtatgttaagctctttatgactgtttttgtagtggtatagagtactgcagaatacagtaagctgctctattgtagcatttcttgatgttgcttagtcacttatttcataaacaacttaatgttctgaataatttcttactaaacattttgttattgggcaagtgattgaaaatagtaaatgctttgtgtgattgaatctgattggacattttcttcagagagctaaattacaattgtcatttataaaaccatcaaaaatattccatccatatactttggggacttgtagggatgcctttctagtcctattctattgcagttatagaaaatctagtcttttgccccagttacttaaaaataaaatattaacactttcccaagggaaacactcggctttctatagaaaattgcactttttgtcgagtaatcctctgcagtgatacttctggtagatgtcacccagtggtttttgttaggtcaaatgttcctgtatagtttttgcaaatagagctgtatactgtttaaatgtagcaggtgaactgaactggggtttgctcacctgcacagtaaaggcaaacttcaacagcaaaactgcaaaaaggtggtttttgcagtaggagaaaggaggatgtttatttgcagggcgccaagcaaggagaattgggcagctcatgcttgagacccaatctccatgatgacctacaagctagagtatttaaaggcagtggtaaatttcaggaaagcagaagttaaaggcaaaattgtaaatcagtcgagatcgggtgccttcagggtggtatggctgtataccaaaattgtaaatcactacatgaagcttatatattggtttggcctgaaaggtgaagtggggtaggcagggggcgggcttacaggttatggtggattcaaagactccctgatttgtgattggttaaggaagcaaagctttgtctaaaaacttggggtccgcagaaaggaacattaaggtctggccaggcccctcaggaagaaactgagagcaaagaatggaggtcagagtttagtccctggtgttcccccttatctgacgtctgtgtgaatccatttggtgggggtctgggtttctgaaaagtagctcaggggcacgtgttaaggatgtctctaggtgactctaacttccctggctattgtttgaaactgttatgaccttcttgcttatcagcttgctggtttccttctcggggcgagctgggtgcctggagttttcggtgaaggaaactcaagattctcctttatttctgtgcttgtgggaatccccctggcacaccccaaagaggggtccctgctccgtctcacagggatctttttgtatatttggcttagcatcatacatttgccatgttgtttcatcatctgcgaaaccctgtctctactaaaaatacaaaaattgtttagctctgtttttcataatagaaatagaaaaggtaaaattgcttttcttctgaaaagaacaagtattgttcatccaagaagggtttttgtgactgaatcagcagtgcctgccctagtcatagctgtgcttcaaaaacctcagcatgattagtgttggagcaaaacaaggaagcaaagcaaatactgtttttgaaattctatctgttgcttgaactattttgtaataattaaactttgatgttgagaaatcacaactttattgtacacttcattgcaacttgaaattcatggtcttaaagtgagatttgaatttctattgagcgcctttaaaaaagtaataccaaaccataaagttaaaatctatgtatattgagtcatatctaaaaccacgtataaacataaattgtatttcctgttttaattccaggggaagtactgtttgggaaagctattattaggtaaatgttttacaaattactgtttctcactttcagtcataccctaatgatcccagcaagataatgtcctgtcttctaagatgtgcatcaagcctggtacatactgaaaaccctataaggtcctggataatttttgtttgattattcattgaagaaacatttattttccaattgtgtgaagtttttgactgttaataaaagaatctgtcaaccatcaaa

SEQ ID NO: 450024 - DNA, 3940 bp, Homo sapiens
ggcggggcggcggtgcccttgcggcgcagctggggtcgcggccctgctccccgcgctttcttaaggcccgcgggcggcgcaggagcggcactcgtggctgtggtggcttcggcagcggcttcagcagatcggcggcatcagcggtagcaccagcactagcagcatgttgagccgggcagtgtgcggcaccagcaggcagctggctccggttttggggtatctgggctccaggcagaagcacagcctccccgacctgccctacgactacggcgccctggaacctcacatcaacgcgcagatcatgcagctgcaccacagcaagcaccacgcggcctacgtgaacaacctgaacgtcaccgaggagaagtaccaggaggcgttggccaagggagatgttacagcccagatagctcttcagcctgcactgaagttcaatggtggtggtcatatcaatcatagcattttctggacaaacctcagccctaacggtggtggagaacccaaaggggagttgctggaagccatcaaacgtgactttggttcctttgacaagtttaaggagaagctgacggctgcatctgttggtgtccaaggctcaggttggggttggcttggtttcaataaggaacggggacacttacaaattgctgcttgtccaaatcaggatccactgcaaggaacaacaggccttattccactgctggggattgatgtgtgggagcacgcttactaccttcagtataaaaatgtcaggcctgattatctaaaagctatttggaatgtaatcaactgggagaatgtaactgaaagatacatggcttgcaaaaagtaaaccacgatcgttatgctgagtatgttaagctctttatgactgtttttgtagtggtatagagtactgcagaatacagtaagctgctctattgtagcatttcttgatgttgcttagtcacttatttcataaacaacttaatgttctgaataatttcttactaaacattttgttattgggcaagtgattgaaaatagtaaatgctttgtgtgattgaatctgattggacattttcttcagagagctaaattacaattgtcatttataaaaccatcaaaaatattccatccatatactttggggacttgtagggatgcctttctagtcctattctattgcagttatagaaaatctagtcttttgccccagttacttaaaaataaaatattaacactttcccaagggaaacactcggctttctatagaaaattgcactttttgtcgagtaatcctctgcagtgatacttctggtagatgtcacccagtggtttttgttaggtcaaatgttcctgtatagtttttgcaaatagagctgtatactgtttaaatgtagcaggtgaactgaactggggtttgctcacctgcacagtaaaggcaaacttcaacagcaaaactgcaaaaaggtggtttttgcagtaggagaaaggaggatgtttatttgcagggcgccaagcaaggagaattgggcagctcatgcttgagacccaatctccatgatgacctacaagctagagtatttaaaggcagtggtaaatttcaggaaagcagaagttaaaggcaaaattgtaaatcagtcgagatcgggtgccttcagggtggtatggctgtataccaaaattgtaaatcactacatgaagcttatatattggtttggcctgaaaggtgaagtggggtaggcagggggcgggcttacaggttatggtggattcaaagactccctgatttgtgattggttaaggaagcaaagctttgtctaaaaacttggggtccgcagaaaggaacattaaggtctggccaggcccctcaggaagaaactgagagcaaagaatggaggtcagagtttagtccctggtgttcccccttatctgacgtctgtgtgaatccatttggtgggggtctgggtttctgaaaagtagctcaggggcacgtgttaaggatgtctctaggtgactctaacttccctggctattgtttgaaactgttatgaccttcttgcttatcagcttgctggtttccttctcggggcgagctgggtgcctggagttttcggtgaaggaaactcaagattctcctttatttctgtgcttgtgggaatccccctggcacaccccaaagaggggtccctgctccgtctcacagggatctttttgtatatttggcttagcatcatacatttgccatgttgtttcatcatctgcctaatttactgtttttgaatatttcatttgtttctaattgttactacagataatgctggggtgagcaactctgtgtacataggtttatctcctattggaatattttctttatataggcgtttttttttttcttttttttgggagacagagtcttgctctgttgcccaggctggagtgcagtggcgcgaccggagctcactgcaacctccacttcccgggttcaagtgattgtcccacctcagcctcctgaatagctgggattacaggtgcatgctaccatgcctggctacttttggtatttttagcagagacagggtttcaccatgttggccagggtggtctcgaactcctgacctcaagtgatccgtctggctcagcctcccaaagtgctgggattacaggtgtgagccactgcacctggcctatataggcttttttcttaaacctatttagtaatgttttcccaagtttattttttatttttaattttttccccaagtttatttttctatttttttttcatggaaaaatggggtaacttagcagtttcaatattgaagactgaagtttaaaaaaaatttaaattcaaggtacttttaaaattcagttagaaaagtaggctttaaaaattattagagacaagagtaccaaagcggtgtgtgtatgtgtgtgtgtgtatgcatgcttgtggattggaaaaactttggagactgattacttttcattatatatgtgtcacagtgaaacagcttttatgtgtcatgtaagattactgcttgcctctctaaggaaggtcgtgactgtttaaatagacgggcaaggtggaaccttttgaaagatgagcttttgaatataagttgtctgctagatcatggttgtattgaactaacaaggtttgcagatctgctgacttatataaagctttttgattcctactaagctttaagatttaaaaaatgttcaatgttgaaatttctgtggggctctatttttgctttggctttctggtgagagagtgaggaagcattctttccttcactaagtttgtctttcttgtcttctggatagattgattttaagagactaagggaatttacaaactaaagattttagtcatctggtggaaaaggagactttaagattgtttagggctgggcggggtgactcacatctgtaatcccagcactttgggaggccaaggcaggcagaacacttgaaggagttcaagaccagcgtggccaacgtggtgaaaccctgtctctactaaaaatacaaaaattgtttagctctgtttttcataatagaaatagaaaaggtaaaattgcttttcttctgaaaagaacaagtattgttcatccaagaagggtttttgtgactgaatcagcagtgcctgccctagtcatagctgtgcttcaaaaacctcagcatgattagtgttggagcaaaacaaggaagcaaagcaaatactgtttttgaaattctatctgttgcttgaactattttgtaataattaaactttgatgttgcttggtgtggaatccaattttggcctcttggatgaatcatggctaaggggatgagtctaggcgctttaaaatatacagctaggatctgtttggttataccctaaaaggtccggacccgacggggaccttggttcatggctccaaaaccaaagctcgtcgaccacgtg

SEQ ID NO: 450025 - DNA, 3612 bp, Homo sapiens
ggcggggcggcggtgcccttgcggcgcagctggggtcgcggccctgctccccgcgctttcttaaggcccgcgggcggcgcaggagcggcactcgtggctgtggtggcttcggcagcggcttcagcagatcggcggcatcagcggtagcaccagcactagcagcatgttgagccgggcagtgtgcggcaccagcaggcagctggctccggttttggggtatctgggctccaggcagaagcacagcctccccgacctgccctacgactacggcgccctggaacctcacatcaacgcgcagatcatgcagctgcaccacagcaagcaccacgcggcctacgtgaacaacctgaacgtcaccgaggagaagtaccaggaggcgttggccaagggagatgttacagcccagatagctcttcagcctgcactgaagttcaatggtggtggtcatatcaatcatagcattttctggacaaacctcagccctaacggtggtggagaacccaaaggggagttgctggaagccatcaaacgtgactttggttcctttgacaagtttaaggagaagctgacggctgcatctgttggtgtccaaggctcaggttggggttggcttggtttcaataaggaacggggacacttacaaattgctgcttgtccaaatcaggatccactgcaaggaacaacaggccttattccactgctggggattgatgtgtgggagcacgcttactaccttcagtataaaaatgtcaggcctgattatctaaaagctatttggaatgtaatcaactgggagaatgtaactgaaagatacatggcttgcaaaaagtaaaccacgatcgttatgctgagtatgttaagctctttatgactgtttttgtagtggtatagagtactgcagaatacagtaagctgctctattgtagcatttcttgatgttgcttagtcacttatttcataaacaacttaatgttctgaataatttcttactaaacattttgttattgggcaagtgattgaaaatagtaaatgctttgtgtgattgaatctgattggacattttcttcagagagctaaattacaattgtcatttataaaaccatcaaaaatattccatccatatactttggggacttgtagggatgcctttctagtcctattctattgcagttatagaaaatctagtcttttgccccagttacttaaaaataaaatattaacactttcccaagggaaacactcggctttctatagaaaattgcactttttgtcgagtaatcctctgcagtgatacttctggtagatgtcacccagtggtttttgttaggtcaaatgttcctgtatagtttttgcaaatagagctgtatactgtttaaatgtagcaggtgaactgaactggggtttgctcacctgcacagtaaaggcaaacttcaacagcaaaactgcaaaaaggtggtttttgcagtaggagaaaggaggatgtttatttgcagggcgccaagcaaggagaattgggcagctcatgcttgagacccaatctccatgatgacctacaagctagagtatttaaaggcagtggtaaatttcaggaaagcagaagttaaaggcaaaattgtaaatcagtcgagatcgggtgccttcagggtggtatggctgtataccaaaattgtaaatcactacatgaagcttatatattggtttggcctgaaaggtgaagtggggtaggcagggggcgggcttacaggttatggtggattcaaagactccctgatttgtgattggttaaggaagcaaagctttgtctaaaaacttggggtccgcagaaaggaacattaaggtctggccaggcccctcaggaagaaactgagagcaaagaatggaggtcagagtttagtccctggtgttcccccttatctgacgtctgtgtgaatccatttggtgggggtctgggtttctgaaaagtagctcaggggcacgtgttaaggatgtctctaggtgactctaacttccctggctattgtttgaaactgttatgaccttcttgcttatcagcttgctggtttccttctcggggcgagctgggtgcctggagttttcggtgaaggaaactcaagattctcctttatttctgtgcttgtgggaatccccctggcacaccccaaagaggggtccctgctccgtctcacagggatctttttgtatatttggcttagcatcatacatttgccatgttgtttcatcatctgcctaatttactgtttttgaatatttcatttgtttctaattgttactacagataatgctggggtgagcaactctgtgtacataggtttatctcctattggaatattttctttatataggcgtttttttttttcttttttttgggagacagagtcttgctctgttgcccaggctggagtgcagtggcgcgaccggagctcactgcaacctccacttcccgggttcaagtgattgtcccacctcagcctcctgaatagctgggattacaggtgcatgctaccatgcctggctacttttggtatttttagcagagacagggtttcaccatgttggccagggtggtctcgaactcctgacctcaagtgatccgtctggctcagcctcccaaagtgctgggattacaggtgtgagccactgcacctggcctatataggcttttttcttaaacctatttagtaatgttttcccaagtttattttttatttttaattttttccccaagtttatttttctatttttttttcatggaaaaatggggtaacttagcagtttcaatattgaagactgaagtttaaaaaaaatttaaattcaaggtacttttaaaattcagttagaaaagtaggctttaaaaattattagagacaagagtaccaaagcggtgtgtgtatgtgtgtgtgtgtatgcatgcttgtggattggaaaaactttggagactgattacttttcattatatatgtgtcacagtgaaacagcttttatgtgtcatgtaagattactgcttgcctctctaaggaaggtcgtgactgtttaaatagacgggcaaggtggaaccttttgaaagatgagcttttgaatataagttgtctgctagatcatggttgtattgaactaacaaggtttgcagatctgctgacttatataaagctttttgattcctactaagctttaagatttaaaaaatgttcaatgttgaaatttctgtggggctctatttttgctttggctttctggtgagagagtgaggaagcattctttccttcactaagtttgtctttcttgtcttctggatagattgattttaagagactaagggaatttacaaactaaagattttagtcatctggtggaaaaggagactttaagattgtttagggctgggcggctgagccactggcacctggcctatataggcttttttcttaaaacctatttaggtaatgtttttcccaagtctaatgtcataatcgttagatatactgccgcaacagttatcatatgtctagcatgccttgtcaagtgtgcgaatattagagggatctacacgcatggctagggctcgacaagattgagaaataaaatcaaagatag

SEQ ID NO: 450026 - DNA, 1034 bp, Homo sapiens
ggcggggcggcggtgcccttgcggcgcagctggggtcgcggccctgctccccgcgctttcttaaggcccgcgggcggcgcaggagcggcactcgtggctgtggtggcttcggcagcggcttcagcagatcggcggcatcagcggtagcaccagcactagcagcatgttgagccgggcagtgtgcggcaccagcaggcagctggctccggttttggggtatctgggctccaggcagaagcacagcctccccgacctgccctacgactacggcgccctggaacctcacatcaacgcgcagatcatgcagctgcaccacagcaagcaccacgcggcctacgtgaacaacctgaacgtcaccgaggagaagtaccaggaggcgttggccaagggagatgttacagcccagatagctcttcagcctgcactgaagttcaatggtggtggtcatatcaatcatagcattttctggacaaacctcagccctaacggtggtggagaacccaaaggggagttgctggaagccatcaaacgtgactttggttcctttgacaagtttaaggagaagctgacggctgcatctgttggtgtccaaggctcaggttggggttggcttggtttcaataaggaacggggacacttacaaattgctgcttgtccaaatcaggatccactgcaaggaacaacaggccttattccactgctggggattgatgtgtgggagcacgcttactaccttcagtataaaaatgtcaggcctgattatctaaaagctatttggaatgtaatcaactgggagaatgtaactgaaagatacatggcttgcaaaaagtaaaccacgatcgttatgctgatcataccctaatgatcccagcaagataatgtcctgtcttctaagatgtgcatcaagcctggtacatactgaaaaccctataaggtcctggataatttttgtttgattattcattgaagaaacatttattttccaattgtgtgaagtttttgactgttaataaaagaatctgtcaaccatcaaa

SEQ ID NO: 450027 - DNA, 869 bp, Homo sapiens
ggcggggcggcggtgcccttgcggcgcagctggggtcgcggccctgctccccgcgctttcttaaggcccgcgggcggcgcaggagcggcactcgtggctgtggtggcttcggcagcggcttcagcagatcggcggcatcagcggtagcaccagcactagcagcatgttgagccgggcagtgtgcggcaccagcaggcagctggctccggttttggggtatctgggctccaggcagaagcacagcctccccgacctgccctacgactacggcgccctggaacctcacatcaacgcgcagatcatgcagctgcaccacagcaagcaccacgcggcctacgtgaacaacctgaacgtcaccgaggagaagtaccaggaggcgttggccaagggagatgttacagcccagatagctcttcagcctgcactgaagttcaatggtggtggtcatatcaatcatagcattttctggacaaacctcagccctaacggtggtggagaacccaaaggggagttgctggaagccatcaaacgtgactttggttcctttgacaagtttaaggagaagctgacggctgcatctgttggtgtccaaggctcaggttggggttggcttggtttcaataaggaacggggacacttacaaattgctgcttgtccaaatcaggatccactgcaaggaacaacagtcataccctaatgatcccagcaagataatgtcctgtcttctaagatgtgcatcaagcctggtacatactgaaaaccctataaggtcctggataatttttgtttgattattcattgaagaaacatttattttccaattgtgtgaagtttttgactgttaataaaagaatctgtcaaccatcaaa

SEQ ID NO: 450028 - DNA, 1064 bp, Homo sapiens
ggcggggcggcggtgcccttgcggcgcagctggggtcgcggccctgctccccgcgctttcttaaggcccgcgggcggcgcaggagcggcactcgtggctgtggtggcttcggcagcggcttcagcagatcggcggcatcagcggtagcaccagcactagcagcatgttgagccgggcagtgtgcggcaccagcaggcagctggctccggttttggggtatctgggctccaggcagaagcacagcctccccgacctgccctacgactacggcgccctggaacctcacatcaacgcgcagatcatgcagctgcaccacagcaagcaccacgcggcctacgtgaacaacctgaacgtcaccgaggagaagtaccaggaggcgttggccaagggagatgttacagcccagatagctcttcagcctgcactgaagttcaatggtggtggtcatatcaatcatagcattttctggacaaacctcagccctaacggtggtggagaacccaaaggggagttgctggaagccatcaaacgtgactttggttcctttgacaagtttaaggagaagctgacggctgcatctgttggtgtccaaggctcaggttggggttggcttatcgagctcgataagggccaaagtcaaaccgcacatcaggatctctcacacccttccaattttgccatctaccagcacttagctaaacccatctcccatctcttccaccatgaattcactctttcatagtccagagttatattggcactcacccatgcataattgttttgtcaaaccttttaggggagaggtgtatttaaagaattatgaaaatactgacaagggaccagcccaattataccggagaggtttagagacatccacagaggatgagtcaagagtgttggattgggggttggaagacaagataggtggagagtcgagcactaaatgcaaatagatgtgatgtacattatgatttgtgcctgaaaaatagctgagaaatcattgttgctgttgcatagattgtatagggactggggtagttacagcatgtgagtgtgactagtta

SEQ ID NO: 450029 - DNA, 1284 bp, Homo sapiens
tgaaagcgaggccaaagtgggtgggagcgcgtgctgttgggagttgcttggaggttggcggcgcggggctgaaggctagcaaaccgagcgatcatgtcgcacaaacaaatttactattcggacaaatacgacgacgaggagtttgagtatcgacatgtcatgctgcccaaggacatagccaagctggtccctaaaacccatctgatgtctgaatctgaatggaggaatcttggcgttcagcagagtcagggatgggtccattatatgatccatgaaccagaacctcacatcttgctgttccggcgcccactacccaagaaaccaaagaaatgaagctggcaagctacttttcagcctcaagctttacacagctgtccttacttcctaacatctttctgataacattattatgttgccttcttgtttctcactttgatatttaaaagatgttcaatacactgtttgaatgtgctggtaactgctttgcttcttgagtagagccaccaccaccatagcccagccagatgagtgctctgtggacccacagcctaagctgagtgtgaccccagaagccacgatgtgctctgtatccagaacacacttggcagatggaggaagcatctgagtttgagaccatggctgttacagggatcatgtaaacttgctgtttttgttttttcctgccgggtgttgtatgtgtggtgacttgcggatttatgtttcagtgtactggaaactttccattttattcaagaaatctgttcatgttaaaagccttgattaaagaggaagtttttataatctagtgctgtaattgtacgggttttttccccctcactcagggtgagcatcatcaatatcatggttctaattatatgcccttcagtttgataatgaagctcagctctttgctgataatgaggtttaacattgagataactggtttttaatctactttaagcagacttgctgtcaaacatctactgaaatatatttcactctaactactagcctgaggtagaggttatatagggacaacttcatctcatccaaacaaatgaactgcttcctacagtcggggtgctgcctttaacatagtcccaatatttgaatggcacacatggataaaaggatgctgtcagtcaggggctgcttgtgtgtcccaattcctaataggaataataggcatatctatgacctattcactgtgccccttggttggggaaggttttcagctgttcttaacttggcttgggcgttggaatcacctggggagctttacaa

SEQ ID NO: 450030 - DNA, 799 bp, Homo sapiens
tgaaagcgaggccaaagtgggtgggagcgcgtgctgttgggagttgcttggaggttggcggcgcggggctgaaggctagcaaaccgagcgatcatgtcgcacaaacaaatttactattcggacaaatacgacgacgaggagtttgagtatcgacatgtcatgctgcccaaggacatagccaagctggtccctaaaacccatctgatgtctgaatctgaatggaggaatcttggcgttcagcagagtcagggatgggtccattatatgatccatgaaccagaacctcacatcttgctgttccggcgcccactacccaagaaaccaaagaaatgaagctggcaagctacttttcagcctcaagctttacacagctgtccttacttcctaacatctttctgataacattattatgttgccttcttgtttctcactttgatatttaaaagatgttcaatacactgtttgaatgtgctggtaactgctttgcttcttgagtagagccaccaccaccatagcccagccagatgagtgctctgtggacccacagcctaagctgagtgtgaccccagaagccacgatgtgctctgtatccagaacacacttggcagatggaggaagcatctgagtttgagaccatggctgttacagggatcatgtaaacttgctgtttttgttttttcctgccgggtgttgtatgtgtggtgacttgcggatttatgtttcagtgtactggaaactttccattttattcaagaaatctgttcatgttaaaagccttgattaaagaggaagtttttat

SEQ ID NO: 450031 - DNA, 1161 bp, Homo sapiens
tgaaagcgaggccaaagtgggtgggagcgcgtgctgttgggagttgcttggaggttggcggcgcggggctgaaggctagcaaaccgagcgatcatgtcgcacaaacaaatttactattcggacaaatacgacgacgaggagtttgagtatcgacatgtcatgctgcccaaggacatagccaagctggtccctaaaacccatctgatgtctgaatctgaatggaggaatcttggcgttcagcagagtcagggatgggtccattatatgatccatgaaccagaacctcacatcttgctgttccggcgcccactacccaagaaaccaaagaaatgaagctggcaagctacttttcagcctcaagctttacacagctgtccttacttcctaacatctttctgataacattattatgttgccttcttgtttctcactttgatatttaaaagatgttcaatacactgtttgaatgtgctggtaactgctttgcttcttgagtagagccaccaccaccatagcccagccagatgagtgctctgtggacccacagcctaagctgagtgtgaccccagaagccacgatgtgctctgtatccagaacacacttggcagatggaggaagcatctgagtttgagaccatggctgttacagggatcatgtaaacttgctgtttttgttttttcctgccgggtgttgtatgtgtggtgacttgcggatttatgtttcagtgtactggaaactttccattttattcaagaaatctgttcatgttaaaagccttgattaaagaggaagtttttataaaaaaaaaaaaaaaaaaaaaaaaaaaaaaaaaaaaaaaaaaaaaaaggggggggggggaaaaaattccccggggggggccaatttagcggataccacgcctttgtgtaacaaaagcggggcccccaacaagaaggggggctataattatagctgcagcagcgggggcgcgttttaaaacaagtgtttggggggaaaacatggtctaatggtgatttcttgtggaaagaacccacatcgggggggggacatatgggggaacactaacagaaggaattaaagttcctgggaaattaaaactcaggtgttcgagtgaaccaacgcatattttcggctagaaattggttcagatttgttgaaaat

SEQ ID NO: 450032 - DNA, 1392 bp, Homo sapiens
tgaaagcgaggccaaagtgggtgggagcgcgtgctgttgggagttgcttggaggttggcggcgcggggctgaaggctagcaaaccgagcgatcatgtcgcacaaacaaatttactattcggacaaatacgacgacgaggagtttgagtatcggttagtgctggcgcgggagcaatagcgagggtcgtgagctttggccgctgagggcacaaggaattagtaacaggaactgaggcgatagaattggcgcatgcgtacgagacatgtcatgctgcccaaggacatagccaagctggtccctaaaacccatctgatgtctgaatctgaatggaggaatcttggcgttcagcagagtcagggatgggtccattatatgatccatgaaccagaacctcacatcttgctgttccggcgcccactacccaagaaaccaaagaaatgaagctggcaagctacttttcagcctcaagctttacacagctgtccttacttcctaacatctttctgataacattattatgttgccttcttgtttctcactttgatatttaaaagatgttcaatacactgtttgaatgtgctggtaactgctttgcttcttgagtagagccaccaccaccatagcccagccagatgagtgctctgtggacccacagcctaagctgagtgtgaccccagaagccacgatgtgctctgtatccagaacacacttggcagatggaggaagcatctgagtttgagaccatggctgttacagggatcatgtaaacttgctgtttttgttttttcctgccgggtgttgtatgtgtggtgacttgcggatttatgtttcagtgtactggaaactttccattttattcaagaaatctgttcatgttaaaagccttgattaaagaggaagtttttataatctagtgctgtaattgtacgggttttttccccctcactcagggtgagcatcatcaatatcatggttctaattatatgcccttcagtttgataatgaagctcagctctttgctgataatgaggtttaacattgagataactggtttttaatctactttaagcagacttgctgtcaaacatctactgaaatatatttcactctaactactagcctgaggtagaggttatatagggacaacttcatctcatccaaacaaatgaactgcttcctacagtcggggtgctgcctttaacatagtcccaatatttgaatggcacacatggataaaaggatgctgtcagtcaggggctgcttgtgtgtcccaattcctaataggaataataggcatatctatgacctattcactgtgccccttggttggggaaggttttcagctgttcttaacttggcttgggcgttggaatcacctggggagctttacaa

SEQ ID NO: 450033 - DNA, 1204 bp, Homo sapiens
gggtgtgatgggagcacacaagacttgctaaggagagggaactggcgacccgaaggctgcggcttcctagctacatgtcatgctgcccaaggacatagccaagctggtccctaaaacccatctgatgtctgaatctgaatggaggaatcttggcgttcagcagagtcagggatgggtccattatatgatccatgaaccagaacctcacatcttgctgttccggcgcccactacccaagaaaccaaagaaatgaagctggcaagctacttttcagcctcaagctttacacagctgtccttacttcctaacatctttctgataacattattatgttgccttcttgtttctcactttgatatttaaaagatgttcaatacactgtttgaatgtgctggtaactgctttgcttcttgagtagagccaccaccaccatagcccagccagatgagtgctctgtggacccacagcctaagctgagtgtgaccccagaagccacgatgtgctctgtatccagaacacacttggcagatggaggaagcatctgagtttgagaccatggctgttacagggatcatgtaaacttgctgtttttgttttttcctgccgggtgttgtatgtgtggtgacttgcggatttatgtttcagtgtactggaaactttccattttattcaagaaatctgttcatgttaaaagccttgattaaagaggaagtttttataatctagtgctgtaattgtacgggttttttccccctcactcagggtgagcatcatcaatatcatggttctaattatatgcccttcagtttgataatgaagctcagctctttgctgataatgaggtttaacattgagataactggtttttaatctactttaagcagacttgctgtcaaacatctactgaaatatatttcactctaactactagcctgaggtagaggttatatagggacaacttcatctcatccaaacaaatgaactgcttcctacagtcggggtgctgcctttaacatagtcccaatatttgaatggcacacatggataaaaggatgctgtcagtcaggggctgcttgtgtgtcccaattcctaataggaataataggcatatctatgacctattcactgtgccccttggttggggaaggttttcagctgttcttaacttggcttgggcgttggaatcacctggggagctttacaa

SEQ ID NO: 450034 - DNA, 899 bp, Homo sapiens
  misc_feature (801)..(801): n is a, c, g, or t
tgaaagcgaggccaaagtgggtgggagcgcgtgctgttgggagttgcttggaggttggcggcgcggggctgaaggctagcaaaccgagcgatcatgtcgcacaaacaaatttactattcggacaaatacgacgacgaggagtttgagtatcgacatgtcatgctgcccaaggacatagccaagctggtccctaaaacccatctgatgtctgaatctgaatggaggaatcttggcgttcagcagagtcagggatgggtccattatatgatccatgaaccagaacctcacatcttgctgttccggcgcccactacccaagaaaccaaagaaatgaagctggcaagctacttttcagcctcaagctttacacagctgtccttacttcctaacatctttctgataacattattatgttgccttcttgtttctcactttgatatttaaaagatgttcaatacactgtttgaatgtgctggtaactgctttgcttcttgagtagagccaccaccaccatagcccagccagatgagtgctctgtggacccacagcctaagctgagtgtgaccccagaagccacgatgtgctctgtatccagaacacacttggcagatggaggaagcatctgagtttgagaccatggctgttacagggatcatgtaaacttgctgtttttgttttttcctgccgggtgttgtatgtgtggtgacttgcggatttatgtttcagtgtactggaaactttccattttattcaagaaatctgttcatgttaaaagccttgattaaagaggaagtttttatcnaaaagaaaaagatagaacaaaaaaaagggggaatttggggggaaaaaagaaaaaggaaggagatgtctaacttttaaaaagggaaaaggggccaaagg

SEQ ID NO: 450035 - DNA, 888 bp, Homo sapiens
tgaaagcgaggccaaagtgggtgggagcgcgtgctgttgggagttgcttggaggttggcggcgcggggctgaaggctagcaaaccgagcgatcatgtcgcacaaacaaatttactattcggacaaatacgacgacgaggagtttgagtatcgacatgtcatgctgcccaaggacatagccaagctggtccctaaaacccatctgatgtctgaatctgaatggaggaatcttggcgttcagcagagtcagggatgggtccattatatgatccatgaaccaggtcagtgcactggctaaaaacaaccatatagaactgctacactgagagaatgaaagaataagattgtataacccaaatagggagataggaaatggtttactggttccttccccctccagtcgtgggggatttttttaaaaaaaaactagtgaccaaaaataagactaaaatatctgggaagttcagagacaacctgtcactgaaaaacctcctgtaatctttcattcaatcagagggtattctttttaaggccacatatagcctgatcatagcccctgcctcattctccatcgaaaacattcttggatgtgttctaaataagcaaaggaaagtatatttattgataagacaccagacacccagctgccaggcaaaactaataagggacaccctggggctgtataaacatagcaaaagaactgatattaacaattctgtacttggcagacagtccagacttctgggtctgcttctaaggccatatgcttaagtctttatttagttataaagatctgagtgggtgatagctggggaggtggtagtggaatacactataggttgtacatagaatggtgtgagcttgtctcttagatttccctcactctttc

SEQ ID NO: 450036 - DNA, 1280 bp, Homo sapiens
  misc_feature (53)..(53): n is a, c, g, or t
  misc_feature (57)..(57): n is a, c, g, or t
gagtcaccggtaaggaaagatatcaaggcgtatgtatgttcgagggatataantatncaggaggctttcagaataaaagtaaatcatatatgtcgcacaaacaaatttactattcggacaaatacgacgacgaggagtttgagtatcgacatgtcatgctgcccaaggacatagccaagctggtccctaaaacccatctgatgtctgaatctgaatggaggaatcttggcgttcagcagagtcagggatgggtccattatatgatccatgaaccagaacctcacatcttgctgttccggcgcccactacccaagaaaccaaagaaatgaagctggcaagctacttttcagcctcaagctttacacagctgtccttacttcctaacatctttctgataacattattatgttgccttcttgtttctcactttgatatttaaaagatgttcaatacactgtttgaatgtgctggtaactgctttgcttcttgagtagagccaccaccaccatagcccagccagatgagtgctctgtggacccacagcctaagctgagtgtgaccccagaagccacgatgtgctctgtatccagaacacacttggcagatggaggaagcatctgagtttgagaccatggctgttacagggatcatgtaaacttgctgtttttgttttttcctgccgggtgttgtatgtgtggtgacttgcggatttatgtttcagtgtactggaaactttccattttattcaagaaatctgttcatgttaaaagccttgattaaagaggaagtttttataatctagtgctgtaattgtacgggttttttccccctcactcagggtgagcatcatcaatatcatggttctaattatatgcccttcagtttgataatgaagctcagctctttgctgataatgaggtttaacattgagataactggtttttaatctactttaagcagacttgctgtcaaacatctactgaaatatatttcactctaactactagcctgaggtagaggttatatagggacaacttcatctcatccaaacaaatgaactgcttcctacagtcggggtgctgcctttaacatagtcccaatatttgaatggcacacatggataaaaggatgctgtcagtcaggggctgcttgtgtgtcccaattcctaataggaataataggcatatctatgacctattcactgtgccccttggttggggaaggttttcagctgttcttaacttggcttgggcgttggaatcacctggggagctttacaa

SEQ ID NO: 450037 - DNA, 1131 bp, Homo sapiens
tgaaagcgaggccaaagtgggtgggagcgcgtgctgttgggagttgcttggaggttggcggcgcggggctgaaggctagcaaaccgagcgatcatgtcgcacaaacaaatttactattcggacaaatacgacgacgaggagtttgagtatcgacatgtcatgctgcccaaggacatagccaagctggtccctaaaacccatctgatgtctgaatctgaatggaggaatcttggcgttcagcagagtcagggatgggtccattatatgatccatgaaccagaacctcacatcttgctgttccggcgcccactacccaagaaaccaaagaaatgaagctggcaagctacttttcagcctcaagctttacacagctgtccttacttcctaacatctttctgataacattattatgttgccttcttgtttctcactttgatatttaaaagatgttcaatacactgtttgaatgtgctggtaactgctttgcttcttgagtagagccaccaccaccatagcccagccagatgagtgctctgtggacccacagcctaagctgagtgtgaccccagaagccacgatgtgctctgtatccagaacacacttggcagatggaggaagcatctgagtttgagaccatggctgttacagggatcatgtaaacttgctgtttttgttttttcctgccgggtgttgtatgtgtggtgacttgcggatttatgtttcagtgtactggaaactttccattttattcaagaaatctgttcatgttaaaagccttgattaaagaggaagtttttatgaaaaaaaacatacacacacaagacacaaactctgtgggcgcagcactagggcctcagaaaaggttttacacaacctctccgttggcagaccggagccccagaagggtaatgcaacactgggggccaacaaggggggaccccagagggaggatcccgtgggcacaaaaactacaggcagtggggatgtctcccgcattaaaaaacaacggcgcggggggggacaccccgacgagtctgttgtagaacacaatccccaagaggagaggtcccagaggagcacacacggaggtcctcacaacaggggaggtcacagagagaagcggcattcata

SEQ ID NO: 450038 - DNA, 1208 bp, Homo sapiens
ttcacagtaatcttgtcgaatccagtgggagaacgtagcaaaagcggagctggaagtttcctggcgtccctaacagacatgtcatgctgcccaaggacatagccaagctggtccctaaaacccatctgatgtctgaatctgaatggaggaatcttggcgttcagcagagtcagggatgggtccattatatgatccatgaaccagaacctcacatcttgctgttccggcgcccactacccaagaaaccaaagaaatgaagctggcaagctacttttcagcctcaagctttacacagctgtccttacttcctaacatctttctgataacattattatgttgccttcttgtttctcactttgatatttaaaagatgttcaatacactgtttgaatgtgctggtaactgctttgcttcttgagtagagccaccaccaccatagcccagccagatgagtgctctgtggacccacagcctaagctgagtgtgaccccagaagccacgatgtgctctgtatccagaacacacttggcagatggaggaagcatctgagtttgagaccatggctgttacagggatcatgtaaacttgctgtttttgttttttcctgccgggtgttgtatgtgtggtgacttgcggatttatgtttcagtgtactggaaactttccattttattcaagaaatctgttcatgttaaaagccttgattaaagaggaagtttttataatctagtgctgtaattgtacgggttttttccccctcactcagggtgagcatcatcaatatcatggttctaattatatgcccttcagtttgataatgaagctcagctctttgctgataatgaggtttaacattgagataactggtttttaatctactttaagcagacttgctgtcaaacatctactgaaatatatttcactctaactactagcctgaggtagaggttatatagggacaacttcatctcatccaaacaaatgaactgcttcctacagtcggggtgctgcctttaacatagtcccaatatttgaatggcacacatggataaaaggatgctgtcagtcaggggctgcttgtgtgtcccaattcctaataggaataataggcatatctatgacctattcactgtgccccttggttggggaaggttttcagctgttcttaacttggcttgggcgttggaatcacctggggagctttacaa

SEQ ID NO: 450039 - DNA, 907 bp, Homo sapiens
tgaaagcgaggccaaagtgggtgggagcgcgtgctgttgggagttgcttggaggttggcggcgcggggctgaaggctagcaaaccgagcgatcatgtcgcacaaacaaatttactattcggacaaatacgacgacgaggagtttgagtatcggttagtgctggcgcgggagcaatagcgagggtcgtgagctttggccgctgagggcacaaggaattagtaacaggaactgaggcgatagaattggcgcatgcgtacgagacatgtcatgctgcccaaggacatagccaagctggtccctaaaacccatctgatgtctgaatctgaatggaggaatcttggcgttcagcagagtcagggatgggtccattatatgatccatgaaccagaacctcacatcttgctgttccggcgcccactacccaagaaaccaaagaaatgaagctggcaagctacttttcagcctcaagctttacacagctgtccttacttcctaacatctttctgataacattattatgttgccttcttgtttctcactttgatatttaaaagatgttcaatacactgtttgaatgtgctggtaactgctttgcttcttgagtagagccaccaccaccatagcccagccagatgagtgctctgtggacccacagcctaagctgagtgtgaccccagaagccacgatgtgctctgtatccagaacacacttggcagatggaggaagcatctgagtttgagaccatggctgttacagggatcatgtaaacttgctgtttttgttttttcctgccgggtgttgtatgtgtggtgacttgcggatttatgtttcagtgtactggaaactttccattttattcaagaaatctgttcatgttaaaagccttgattaaagaggaagtttttat

SEQ ID NO: 450040 - DNA, 499 bp, Homo sapiens
  misc_feature (23)..(23): n is a, c, g, or t
  misc_feature (442)..(442): n is a, c, g, or t
  misc_feature (448)..(448): n is a, c, g, or t
  misc_feature (451)..(451): n is a, c, g, or t
  misc_feature (455)..(455): n is a, c, g, or t
  misc_feature (457)..(457): n is a, c, g, or t
  misc_feature (462)..(462): n is a, c, g, or t
  misc_feature (465)..(465): n is a, c, g, or t
gtatggttcccgtagtggacaangcgctacgcggagtttgagtatcgacatgtcatgctgcccaaggacatagccaagctggtccctaaaacccatctgatgtctgaatctgaatggaggaatcttggcgttcagcagagtcagggatgggtccattatatgatccatgaaccagaacctcacatcttgctgttccggcgcccactacccaagaaaccaaagaaatgaagctggcaagctacttttcagcctcaagctttacacagctgtccttacttcctaacatctttctgataacattattatgttgccttcttgtttctcactttgatatttaaaagatgttcaatacactgtttgaatgtgctggtaactgctttgcttcttgagtagagccaccaccaccatagcccagccagatgagtgctctgtgtctagctcnaggttngtntgangnatagnganaagcgcgtagcgcattgtccatagggtaccgggc

SEQ ID NO: 450041 - DNA, 134 bp, Homo sapiens
gacctgcaaactttttctgtaaaggaccagatagtaagtattttatgctttgtgagccatacagtttttgttgcaactagtcaactctcaactccactgtggacagcatgtaaatggatgggagtggctgcttt

SEQ ID NO: 450042 - DNA, 1548 bp, Homo sapiens
gccgtttctgccgcgtccaccacaacctctgctgtatcagagggggccttcgccgccgccgcccccaccaccgcccctgccgccatcgccacctccgccgctgccgccttggggccctcctccttcaccgcccccttcaccacctctacacgttctaggccttctgtcctggagaagaagctatagtcgttctcccttgtgggcccggggcgcagccatggcggacggcggcggcggcgggggaactggcgcggtgggcggcggcggaactagccaggcctctgccggggcagcgactggcgctactggggccagcgggggcggtggccccatcaacccggcctcgctgcctcccggcgacccgcagctcatcgctctcatcgtggagcagctcaagagccggggcctttttgacagcttccgccgggactgcctggccgacgtggacaccaagccagcttaccaaaacctgaggcagaaagtggataattttgtgtcaacacatctggacaagcaggaatggaatcctacgatgaacaaaaaccagttgcgaaatggtctgaggcagagtgtggttcagtcagggatgttggaagctggagtagacaggattatttctcaggtggtggatccaaaacttaaccacatcttcaggccacaaatagaacgagcaattcatgagttcctggcggcccagaaaaaagcagctgtgccagcaccccctccagagcccgaaggccaggaccctccagctccatctcaggacacttcctaagaatacgccagacaccttttgaaagctaatttttggtgaagaaatggattcggttacataagagtgcaacttcagactgaagataggccaaggtcgtcactgatctcaagatttcaaccttgaccatgggcagtgaccagattgaaaggggagcaagttcggcagtgggagagttgaccgtgtcaccccctgcattgtgctgccatttggccagcctgtccaagggcatgacaccaagtagacactacagagagagaaacactacagcaacccagggttgtcctgaaacagacttttatacttgaacatggagactgcacatggactttagggtttgtgctgtgggataaacggaagctacagtgagaacatagccagtcccaaagacaatttcaaagaaaaatgacagtaaagattagctgggagtagtctttgacagtgcttatttgatactgtctctcagagtttgcaaaccagattgtacaagtcattagcgtcagatagctttaaagttgtgaccttcttgtacatgaatcttctagccagtttcctttcctttgtaacgaaacatgaaatcctagaatgtatgagaagttcagacattaggcataaggaaactcgtttgcaggctctctgtccagggctgcttcctgtcctggaggggccagtgagtcttaggtatgtttattttattctcacatttgtgtttttttagaaaagtgaatggtcaataaatggcttatctttcataataaaattatttgatactttta

SEQ ID NO: 450043 - DNA, 1351 bp, Homo sapiens
gccgtttctgccgcgtccaccacaacctctgctgtatcagagggggccttcgccgccgccgcccccaccaccgcccctgccgccatcgccacctccgccgctgccgccttggggccctcctccttcaccgcccccttcaccacctctacacgttctaggccttctgtcctggagaagaagctatagtcgttctcccttgtgggcccggggcgcagccatggcggacggcggcggcggcgggggaactggcgcggtgggcggcggcggaactagccaggcctctgccggggcagcgactggcgctactggggccagcgggggcggtggccccatcaacccggcctcgctgcctcccggcgacccgcagctcatcgctctcatcgtggagcagctcaagagccggggcctttttgacagcttccgccgggactgcctggccgacgtggacaccaagccagcttaccaaaacctgaggcagaaagtggataattttgtgtcaacacatctggacaagcaggaatggaatcctacgatgaacaaaaaccagttgcgaaatggtctgaggcagagtgtggttcaaatacgccagacaccttttgaaagctaatttttggtgaagaaatggattcggttacataagagtgcaacttcagactgaagataggccaaggtcgtcactgatctcaagatttcaaccttgaccatgggcagtgaccagattgaaaggggagcaagttcggcagtgggagagttgaccgtgtcaccccctgcattgtgctgccatttggccagcctgtccaagggcatgacaccaagtagacactacagagagagaaacactacagcaacccagggttgtcctgaaacagacttttatacttgaacatggagactgcacatggactttagggtttgtgctgtgggataaacggaagctacagtgagaacatagccagtcccaaagacaatttcaaagaaaaatgacagtaaagattagctgggagtagtctttgacagtgcttatttgatactgtctctcagagtttgcaaaccagattgtacaagtcattagcgtcagatagctttaaagttgtgaccttcttgtacatgaatcttctagccagtttcctttcctttgtaacgaaacatgaaatcctagaatgtatgagaagttcagacattaggcataaggaaactcgtttgcaggctctctgtccagggctgcttcctgtcctggaggggccagtgagtcttaggtatgtttattttattctcacatttgtgtttttttagaaaagtgaatggtcaataaatggcttatctttcataataaaattatttgatactttta

SEQ ID NO: 450044 - DNA, 1380 bp, Homo sapiens
gactggtgtcatggccgttcactgaggtgcagcccgccgcacgacggtttgccagcttaccaaaacctgaggcagaaagtggataattttgtgtcaacacatctggacaagcaggaatggaatcctacgatgaacaaaaaccagttgcgaaatggtctgaggcagagtgtggttcagttgggtgattgtgggtgagattgtgcagtaggaataacagctgctggttgagaattacccctcaaaagtgaaaatagcgtgagctgtatatggtaagtggattgacctctaaactccctagaagggctgtagctttgaaggtggacatttattgggctcgcacgtgacacttattggggctaaagatgaatcccgaagaactaaataacagaatgatctgtttgtctccacaaggtcagggatgttggaagctggagtagacaggattatttctcaggtggtggatccaaaacttaaccacatcttcaggccacaaatagaacgagcaattcatgagttcctggcggcccagaaaaaagcagctgtgccagcaccccctccagagcccgaaggccaggaccctccagctccatctcaggacacttcctaagaatacgccagacaccttttgaaagctaatttttggtgaagaaatggattcggttacataagagtgcaacttcagactgaagataggccaaggtcgtcactgatctcaagatttcaaccttgaccatgggcagtgaccagattgaaaggggagcaagttcggcagtgggagagttgaccgtgtcaccccctgcattgtgctgccatttggccagcctgtccaagggcatgacaccaagtagacactacagagagagaaacactacagcaacccagggttgtcctgaaacagacttttatacttgaacatggagactgcacatggactttagggtttgtgctgtgggataaacggaagctacagtgagaacatagccagtcccaaagacaatttcaaagaaaaatgacagtaaagattagctgggagtagtctttgacagtgcttatttgatactgtctctcagagtttgcaaaccagattgtacaagtcattagcgtcagatagctttaaagttgtgaccttcttgtacatgaatcttctagccagtttcctttcctttgtaacgaaacatgaaatcctagaatgtatgagaagttcagacattaggcataaggaaactcgtttgcaggctctctgtccagggctgcttcctgtcctggaggggccagtgagtcttaggtatgtttattttattctcacatttgtgtttttttagaaaagtgaatggtcaataaatggcttatctttcataataaaattatttgatactttta

SEQ ID NO: 450045 - DNA, 1562 bp, Homo sapiens
gccgtttctgccgcgtccaccacaacctctgctgtatcagagggggccttcgccgccgccgcccccaccaccgcccctgccgccatcgccacctccgccgctgccgccttggggccctcctccttcaccgcccccttcaccacctctacacgttctaggccttctgtcctggagaagaagctatagtcgttctcccttgtgggcccggggcgcagccatggcggacggcggcggcggcgggggaactggcgcggtgggcggcggcggaactagccaggcctctgccggggcagcgactggcgctactggggccagcgggggcggtggccccatcaacccggcctcgctgcctcccggcgacccgcagctcatcgctctcatcgtggagcagctcaagagccggggcctttttgacagcttccgccgggactgcctggccgacgtggacaccaagccagcttaccaaaacctgaggcagaaagtggataattttgtgtcaacacatctggacaagcaggaatggaatcctacgatgaacaaaaaccagttgcgaaatggtctgaggcagagtgtggttcagtcagggatgttggaagctggagtagacaggattatttctcaggtggtggatccaaaacttaaccacatcttcaggccacaaatagaacgagcaattcatgagttcctggcggcccagaaaaaagcagctgtgccagcaccccctccagagcccgaaggccaggaccctccagctccatctcaggacacttcctaagaatacgccagacaccttttgaaagctaatttttggtgaagaaatggattcggttacataagagtgcaacttcagactgaagataggccaaggtcgtcactgatctcaagatttcaaccttgaccatgggcagtgaccagattgaaaggggagcaagttcggcagtgggagagttgaccgtgtcaccccctgcattgtgctgccatttggccagcctgtccaagggcatgacaccaagtagacactacagagagagaaacactacagcaacccagggttgtcctgaaacagacttttatacttgaacatggagactgcacatggactttagggtttgtgctgtgggataaacggaagctacagtgagaacatagccagtcccaaagacaatttcaaagaaaaatgacagtaaagattagctgggagtagtctttgacagtgcttatttgatactgtctctcagagtttgcaaaccagattgtacaagtcattagcgtcagatagctttaaagttgtgaccttcttgtacatgaatcttctagccagtttcctttcctttgtaacgaaacatgaaatcctagaatgtatgagaagttcagacattaggcataaggaaactcgtttgcaggctctctgtccagggctgcttcctgtcctggaggggccagtgagtcttaggtatgtttattttattctcacatttgtgtttttttattatgaaagataagccatttattgaccattcacttttctaaaaaaaactagttctagatcgcgagcggccgct

SEQ ID NO: 450046 - DNA, 1783 bp, Homo sapiens
gccgtttctgccgcgtccaccacaacctctgctgtatcagagggggccttcgccgccgccgcccccaccaccgcccctgccgccatcgccacctccgccgctgccgccttggggccctcctccttcaccgcccccttcaccacctctacacgttctaggccttctgtcctggagaagaagctatagtcgttctcccttgtgggcccggggcgcagccatggcggacggcggcggcggcgggggaactggcgcggtgggcggcggcggaactagccaggcctctgccggggcagcgactggcgctactggggccagcgggggcggtggccccatcaacccggcctcgctgcctcccggcgacccgcagctcatcgctctcatcgtggagcagctcaagagccggggcctttttgacagcttccgccgggactgcctggccgacgtggacaccaagccagcttaccaaaacctgaggcagaaagtggataattttgtgtcaacacatctggacaagcaggaatggaatcctacgatgaacaaaaaccagttgcgaaatggtctgaggcagagtgtggttcagttgggtgattgtgggtgagattgtgcagtaggaataacagctgctggttgagaattacccctcaaaagtgaaaatagcgtgagctgtatatggtaagtggattgacctctaaactccctagaagggctgtagctttgaaggtggacatttattgggctcgcacgtgacacttattggggctaaagatgaatcccgaagaactaaataacagaatgatctgtttgtctccacaaggtcagggatgttggaagctggagtagacaggattatttctcaggtggtggatccaaaacttaaccacatcttcaggccacaaatagaacgagcaattcatgagttcctggcggcccagaaaaaagcagctgtgccagcaccccctccagagcccgaaggccaggaccctccagctccatctcaggacacttcctaagaatacgccagacaccttttgaaagctaatttttggtgaagaaatggattcggttacataagagtgcaacttcagactgaagataggccaaggtcgtcactgatctcaagatttcaaccttgaccatgggcagtgaccagattgaaaggggagcaagttcggcagtgggagagttgaccgtgtcaccccctgcattgtgctgccatttggccagcctgtccaagggcatgacaccaagtagacactacagagagagaaacactacagcaacccagggttgtcctgaaacagacttttatacttgaacatggagactgcacatggactttagggtttgtgctgtgggataaacggaagctacagtgagaacatagccagtcccaaagacaatttcaaagaaaaatgacagtaaagattagctgggagtagtctttgacagtgcttatttgatactgtctctcagagtttgcaaaccagattgtacaagtcattagcgtcagatagctttaaagttgtgaccttcttgtacatgaatcttctagccagtttcctttcctttgtaacgaaacatgaaatcctagaatgtatgagaagttcagacattaggcataaggaaactcgtttgcaggctctctgtccagggctgcttcctgtcctggaggggccagtgagtcttaggtatgtttattttattctcacatttgtgtttttttagaaaagtgaatggtcaataaatggcttatctttcataataaaattatttgatactttta

SEQ ID NO: 450047 - DNA, 1836 bp, Homo sapiens
gccgtttctgccgcgtccaccacaacctctgctgtatcagagggggccttcgccgccgccgcccccaccaccgcccctgccgccatcgccacctccgccgctgccgccttggggccctcctccttcaccgcccccttcaccacctctacacgttctaggccttctgtcctggagaagaagctatagtcgttctcccttgtgggcccggggcgcagccatggcggacggcggcggcggcgggggaactggcgcggtgggcggcggcggaactagccaggcctctgccggggcagcgactggcgctactggggccagcgggggcggtggccccatcaacccggcctcgctgcctcccggcgacccgcagctcatcgctctcatcgtggagcagctcaagagccggggcctttttgacagcttccgccgggactgcctggccgacgtggacaccaagccagcttaccaaaacctgaggcagaaagtggataattttgtgtcaacacatctggacaagcaggaatggaatcctacgatgaacaaaaaccagttgcgaaatggtctgaggcagagtgtggttcagtcagggatgttggaagctggagtagacaggattatttctcaggtggtggatccaaaacttaaccacatcttcaggccacaaatagaacgagcaattcatgagttcctggcggcccagaaaaaagcagctgtgccagcaccccctccagagcccgaaggccaggaccctccagctccatctcaggacacttcctaagaatacgccagacaccttttgaaagctaatttttggtgaagaaatggattcggttacataagagtgcaacttcagactgaagataggccaaggtcgtcactgatctcaagatttcaaccttgaccatgggcagtgaccagattgaaaggggagcaagttcggcagtgggagagttgaccgtgtcaccccctgcattgtgctgccatttggccagcctgtccaagggcatgacaccaagtagacactacagagagagaaacactacagcaacccagggttgtcctgaaacagacttttatacttgaacatggagactgcacatggactttagggtttgtgctgtgggataaacggaagctacagtgagaacatagccagtcccaaagacaatttcaaagaaaaatgacagtaaagattagctgggagtagtctttgacagtgcttatttgatactgtctctcagagtttgcaaaccagattgtacaagtcattagcgtcagatagctttaaagttgtgaccttcttgtacatgaatcttctagccagtttcctttcctttgtaacgaaacatgaaatcctagaatgtatgagaagttcagacattaggcataaggaaactcgtttgcaggctctctgtccagggctgcttcctgtcctggaggggccagtgagtcttaggtatgtttattttattctcacatttgtgtttttttagaaaagtgaatggtcaataaatggcttatctttcataataaaattatttgatacttttaaaaaaaaaaaaaaaaaaaaaaaaaaaaaatttgtgggcggccagcgggccctggaaaaaagattcttaagaacacatgcgcggtgggccgcgggaccacggtagttgtagtgtgcacactggggcataagggtaccaaaggaagaccccggggcatggaacaagttgtgggggtttccccacccataaaaaaaccgcgggggacacagacgtctgtgacaaatcccgagggagtcgagggcatacggatctacaacggggcccaaggagcgataaatacggcgggggg

SEQ ID NO: 450048 - DNA, 892 bp, Homo sapiens
gccgtttctgccgcgtccaccacaacctctgctgtatcagagggggccttcgccgccgccgcccccaccaccgcccctgccgccatcgccacctccgccgctgccgccttggggccctcctccttcaccgcccccttcaccacctctacacgttctaggccttctgtcctggagaagaagctatagtcgttctcccttgtgggcccggggcgcagccatggcggacggcggcggcggcgggggaactggcgcggtgggcggcggcggaactagccaggcctctgccggggcagcgactggcgctactggggccagcgggggcggtggccccatcaacccggcctcgctgcctcccggcgacccgcagctcatcgctctcatcgtggagcagctcaagagccggggcctttttgacagcttccgccgggactgcctggccgacgtggacaccaagccagcttaccaaaacctgaggcagaaagtggataattttgtgtcaacacatctggacaagcaggaatggaatcctacgatgaacaaaaaccagttgcgaaatggtctgaggcagagtgtggttcaaatacgccagacaccttttgaaagctaatttttggtgaagaaatggattcggttacataagagtgcaacttcagactgaagataggccaaggtcgtcactgatctcaagatttcaaccttgaccatgggcagtgaccagattgaaaggggagcagacatacacccctgaggctcgctatatcctacgcatcccgcaacacaaactcgggggggcccctgtccccatatggccctatgtggcgccgcgtgacattccactcgccgcggtctaccactgcgtggatgggtgtggtgtcagaggatcaggcagcgt

SEQ ID NO: 450049 - DNA, 444 bp, Homo sapiens
agtataagaatgctaaagtcacagtactgaggatttaaaaaatgtggtttctagtttagcagtgggccgaagaagatacttgaggatgttaaagactcagactgatttgacatgcactgacctctcctatacccctcactggagaagggcacagatcacagacctcagaggataagattcccacattcctgatgtggaaatgttctcccaaacaggggtgattccatgccaccttcatgatttttactctgtccttgtattatccatattgtgtactcattttttaaaagtctgacataaaaataacttaaaaatgaaaactttatatcatgtccttaaaaggaggtatcacttgccataaatactaggtaactataaaagttatatgtaatggaactaaataaagttgtggactctagccagatactggtccaacattgacta

SEQ ID NO: 450050 - DNA, 3969 bp, Homo sapiens
tggagaatccggttggggtaggagctaaatctcaggaccacttgctctatatatgagtgccaagataatctagagcagggagaggcagagaggcaggcagcctgctgggctcttcctgctgttgaaaacttacccggcccttacagaggaaatcttcctcctctcttctgccctgaatgttttcccaaacatgaaggtgataagcttattcattttggtgggatttataggagagttccaaagtttttcaagtgcctcctctccagtcaactgccagtgggacttctatgccccttggtcagaatgcaatggctgtaccaagactcagactcgcaggcggtcagttgctgtgtatgggcagtatggaggccagccttgtgttggaaatgcttttgaaacacagtcctgtgaacctacaagaggatgtccaacagaggagggatgtggagagcgtttcaggtgcttttcaggtcagtgcatcagcaaatcattggtttgcaatggggattctgactgtgatgaagacagtgctgatgaagacagatgtgaggactcagaaaggagaccttcctgtgatatcgataaacctcctcctaacatagaacttactggaaatggttacaatgaactcactggccagtttaggaacagagtcatcaataccaaaagttttggtggtcaatgtagaaaggtgtttagtggggatggaaaagatttctacaggctgagtggaaatgtcctgtcctatacattccaggtgaaaataaataatgattttaattatgaattttacaatagtacttggtcttatgtaaaacatacgtcgacagaacacacatcatctagtcggaagcgctccttttttagatcttcatcatcttcttcacgcagttatacttcacataccaatgaaatccataaaggaaagagttaccaactgctggttgttgagaacactgttgaagtggctcagttcattaataacaatccagaatttttacaacttgctgagccattctggaaggagctttcccacctcccctctctgtatgactacagtgcctaccgaagattaatcgaccagtacgggacacattatctgcaatctgggtcgttaggaggagaatacagagttctattttatgtggactcagaaaaattaaaacaaaatgattttaattcagtcgaagaaaagaaatgtaaatcctcaggttggcattttgtcgttaaattttcaagtcatggatgcaaggaactggaaaacgctttaaaagctgcttcaggaacccagaacaatgtattgcgaggagaaccgttcatcagagggggaggtgcaggcttcatatctggccttagttacctagagctggacaatcctgctggaaacaaaaggcgatattctgcctgggcagaatctgtgactaatcttcctcaagtcataaaacaaaagctgacacctttatatgagctggtaaaggaagtaccttgtgcctctgtgaaaaaactatacctgaaatgggctcttgaagagtatctggatgaatttgacccctgtcattgccggccttgtcaaaatggtggtttggctactgttgaggggacccattgtctgtgccattgcaaaccgtacacatttggtgcggcgtgtgagcaaggagtcctcgtagggaatcaagcaggaggggttgatggaggttggagttgctggtcctcttggagcccctgtgtccaagggaagaaaacaagaagccgtgaatgcaataacccacctcccagtgggggtgggagatcctgcgttggagaaacgacagaaagcacacgatgaaggtacaatgtttcctgtggggaaaaatgtagtgtacacttgcaatgaaggatactctcttattggaaacccagtggccagatgtggagaagatttacggtggcttgttggggaaatgcattgtcagaaaattgcctgtgttctacctgtactgatggatggcatacagagtcacccccaaaaacctttctacacagttggtgagaaggtgactgtttcctgttcaggtggcatgtccttagaaggtccttcagcatttctctgtggctccagccttaagtggagtcctgagatgaagaatgcccgctgtgtacaaaaagaaaatccgttaacacaggcagtgcctaaatgtcagcgctgggagaaactgcagaattcaagatgtgtttgtaaaatgccctacgaatgtggaccttccttggatgtatgtgctcaagatgagagaagcaaaaggatactgcctctgacagtttgcaagatgcatgttctccactgtcagggtagaaattacacccttactggtagggacagctgtactctgcctgcctcagctgagaaagcttgtggtgcctgcccactgtggggaaaatgtgatgctgagagcagcaaatgtgtctgccgagaagcatcggagtgcgaggaagaagggtttagcatttgtgtggaagtgaacggcaaggagcagacgatgtctgagtgtgaggcgggcgctctgagatgcagagggcagagcatctctgtcaccagcataaggccttgtgctgcggaaacccagtaggctcctggaggccctggtcagcttgcttggaatccagcaggcagctggggctgagtgaaaacatctgcacaactgggcactggacagcttttccttcttctccagtgtctaccttcctcctcaactcccagccatctgtataaacacaatcctttgttctcccaaatctgaatcgaattactcttttgcctcctttttaatgtcagtaaggatatgagcctttgcacaggctggctgcgtgttcttgaaataggtgttaccttctctgggccttggttttttaaaatctgtaaaattagaggattgcactagagaaacttgaatgctccattcaggcctatcattttattaagtatgattgacacagcccatgggccagaacacactctacaaaatgactaggataacagaaagaacgtgatctcctgattagagagggtggttttcctcaatggaaccaaatataaagaggacttgaacaaaaatgacagatacaaactatttctatcctgagtagtaatctcacacttcatcctatagagtcaaccaccacagataggaattccttattctttttttaatttttttaagacagagtctcactttgttgcccaggctggagcgcagtggggtgatctcatctccctgcaacctccgcctcctgggttcaagcgattcttgtgcctcagcttcccaagcagctgggattacaggtgcccgccaccacgcccagctaatttttgcatttttagtagagatggggtttcaccatgttggccacgctcgtctccaactcctgacctcaggtaatccgcctgccttggcctcccaaagtgctgggattacagacatgaaccaccacgcctggctggaatacttactcttgtcgggagattgaaccactaaaatgttagagcagaattcattatgctgtggtcacaggggtgtcttgtctgagaacaaatacaattcagtcttctctttggggttttagtatgtgtcaaacataggactggaagtttgcccctgttcttttttcttttgaaagaacatcagttcatgcctgaggcatgagtgactgtgcatttgagaatagttttccctattctgtggatacagtcccagagttttcagggagtacacaggtagattagtttgaagcattgaccttttatttattccttatttctctttcatcaaaacaaaacagcagctgtgggaggagaaatgagagggcttaaatgaaatttaaaataagctatattatacaaatactatctctgtattgttctgaccctggtaaatatatttcaaaacttcagatgacaaggattagaacactcattaaagatgctattcttcagaa

SEQ ID NO: 450051 - DNA, 2182 bp, Homo sapiens
cccgtgccgattcttgcaaagatggattgtcaagatgaaggtacaatgtttcctgtggggaaaaatgtagtgtacacttgcaatgaaggatactctcttattggaaacccagtggccagatgtggagaagatttacggtggcttgttggggaaatgcattgtcagaaaattgcctgtgttctacctgtactgatggatggcatacagagtcacccccaaaaacctttctacacagttggtgagaaggtgactgtttcctgttcaggtggcatgtccttagaaggtccttcagcatttctctgtggctccagccttaagtggagtcctgagatgaagaatgcccgctgtgtacaaaaagaaaatccgttaacacaggcagtgcctaaatgtcagcgctgggagaaactgcagaattcaagatgtgtttgtaaaatgccctacgaatgtggaccttccttggatgtatgtgctcaagatgagagaagcaaaaggatactgcctctgacagtttgcaagatgcatgttctccactgtcagggtagaaattacacccttactggtagggacagctgtactctgcctgcctcagctgagaaagcttgtggtgcctgcccactgtggggaaaatgtgatgctgagagcagcaaatgtgtctgccgagaagcatcggagtgcgaggaagaagggtttagcatttgtgtggaagtgaacggcaaggagcagacgatgtctgagtgtgaggcgggcgctctgagatgcagagggcagagcatctctgtcaccagcataaggccttgtgctgcggaaacccagtaggctcctggaggccctggtcagcttgcttggaatccagcaggcagctggggctgagtgaaaacatctgcacaactgggcactggacagcttttccttcttctccagtgtctaccttcctcctcaactcccagccatctgtataaacacaatcctttgttctcccaaatctgaatcgaattactcttttgcctcctttttaatgtcagtaaggatatgagcctttgcacaggctggctgcgtgttcttgaaataggtgttaccttctctgggccttggttttttaaaatctgtaaaattagaggattgcactagagaaacttgaatgctccattcaggcctatcattttattaagtatgattgacacagcccatgggccagaacacactctacaaaatgactaggataacagaaagaacgtgatctcctgattagagagggtggttttcctcaatggaaccaaatataaagaggacttgaacaaaaatgacagatacaaactatttctatcctgagtagtaatctcacacttcatcctatagagtcaaccaccacagataggaattccttattctttttttaatttttttaagacagagtctcactttgttgcccaggctggagcgcagtggggtgatctcatctccctgcaacctccgcctcctgggttcaagcgattcttgtgcctcagcttcccaagcagctgggattacaggtgcccgccaccacgcccagctaatttttgcatttttagtagagatggggtttcaccatgttggccacgctcgtctccaactcctgacctcaggtaatccgcctgccttggcctcccaaagtgctgggattacagacatgaaccaccacgcctggctggaatacttactcttgtcgggagattgaaccactaaaatgttagagcagaattcattatgctgtggtcacaggggtgtcttgtctgagaacaaatacaattcagtcttctctttggggttttagtatgtgtcaaacataggactggaagtttgcccctgttcttttttcttttgaaagaacatcagttcatgcctgaggcatgagtgactgtgcatttgagaatagttttccctattctgtggatacagtcccagagttttcagggagtacacaggtagattagtttgaagcattgaccttttatttattccttatttctctttcatcaaaacaaaacagcagctgtgggaggagaaatgagagggcttaaatgaaatttaaaataagctatattatacaaatactatctctgtattgttctgaccctggtaaatatatttcaaaacttcagatgacaaggattagaacactcattaaagatgctattcttcagaa

SEQ ID NO: 450052 - DNA, 1669 bp, Homo sapiens
cccccatgccgcccgcgggaattcgattcagccttaccccttactggtagggacagctgtactctgcctgcctcagctgagaaagcttgtggtgcctgcccactgtggggaaaatgtgatgctgagagcagcaaatgtgtctgccgagaagcatcggagtgcgaggaagaagggtttagcatttgtgtggaagtgaacggcaaggagcagacgatgtctgagtgtgaggcgggcgctctgagatgcagagggcagagcatctctgtcaccagcataaggccttgtgctgcggaaacccagtaggctcctggaggccctggtcagcttgcttggaatccagcaggcagctggggctgagtgaaaacatctgcacaactgggcactggacagcttttccttcttctccagtgtctaccttcctcctcaactcccagccatctgtataaacacaatcctttgttctcccaaatctgaatcgaattactcttttgcctcctttttaatgtcagtaaggatatgagcctttgcacaggctggctgcgtgttcttgaaataggtgttaccttctctgggccttggttttttaaaatctgtaaaattagaggattgcactagagaaacttgaatgctccattcaggcctatcattttattaagtatgattgacacagcccatgggccagaacacactctacaaaatgactaggataacagaaagaacgtgatctcctgattagagagggtggttttcctcaatggaaccaaatataaagaggacttgaacaaaaatgacagatacaaactatttctatcctgagtagtaatctcacacttcatcctatagagtcaaccaccacagataggaattccttattctttttttaatttttttaagacagagtctcactttgttgcccaggctggagcgcagtggggtgatctcatctccctgcaacctccgcctcctgggttcaagcgattcttgtgcctcagcttcccaagcagctgggattacaggtgcccgccaccacgcccagctaatttttgcatttttagtagagatggggtttcaccatgttggccacgctcgtctccaactcctgacctcaggtaatccgcctgccttggcctcccaaagtgctgggattacagacatgaaccaccacgcctggctggaatacttactcttgtcgggagattgaaccactaaaatgttagagcagaattcattatgctgtggtcacaggggtgtcttgtctgagaacaaatacaattcagtcttctctttggggttttagtatgtgtcaaacataggactggaagtttgcccctgttcttttttcttttgaaagaacatcagttcatgcctgaggcatgagtgactgtgcatttgagaatagttttccctattctgtggatacagtcccagagttttcagggagtacacaggtagattagtttgaagcattgaccttttatttattccttatttctctttcatcaaaacaaaacagcagctgtgggaggagaaatgagagggcttaaatgaaatttaaaataagctatattatacaaatactatctctgtattgttctgaccctggtaaatatatttcaaaacttcagatgacaaggattagaacactcattaaagatgctattcttcagaa

SEQ ID NO: 450053 - DNA, 1576 bp, Homo sapiens
ctgcccacgaagtggggaaaatgtgatgctgagagcagcaaatgtgtctgccgagaagcatcggagtgcgaggaagaagggtttagcatttgtgtggaagtgaacggcaaggagcagacgatgtctgagtgtgaggcgggcgctctgagatgcagagggcagagcatctctgtcaccagcataaggccttgtgctgcggaaacccagtaggctcctggaggccctggtcagcttgcttggaatccagcaggcagctggggctgagtgaaaacatctgcacaactgggcactggacagcttttccttcttctccagtgtctaccttcctcctcaactcccagccatctgtataaacacaatcctttgttctcccaaatctgaatcgaattactcttttgcctcctttttaatgtcagtaaggatatgagcctttgcacaggctggctgcgtgttcttgaaataggtgttaccttctctgggccttggttttttaaaatctgtaaaattagaggattgcactagagaaacttgaatgctccattcaggcctatcattttattaagtatgattgacacagcccatgggccagaacacactctacaaaatgactaggataacagaaagaacgtgatctcctgattagagagggtggttttcctcaatggaaccaaatataaagaggacttgaacaaaaatgacagatacaaactatttctatcctgagtagtaatctcacacttcatcctatagagtcaaccaccacagataggaattccttattctttttttaatttttttaagacagagtctcactttgttgcccaggctggagcgcagtggggtgatctcatctccctgcaacctccgcctcctgggttcaagcgattcttgtgcctcagcttcccaagcagctgggattacaggtgcccgccaccacgcccagctaatttttgcatttttagtagagatggggtttcaccatgttggccacgctcgtctccaactcctgacctcaggtaatccgcctgccttggcctcccaaagtgctgggattacagacatgaaccaccacgcctggctggaatacttactcttgtcgggagattgaaccactaaaatgttagagcagaattcattatgctgtggtcacaggggtgtcttgtctgagaacaaatacaattcagtcttctctttggggttttagtatgtgtcaaacataggactggaagtttgcccctgttcttttttcttttgaaagaacatcagttcatgcctgaggcatgagtgactgtgcatttgagaatagttttccctattctgtggatacagtcccagagttttcagggagtacacaggtagattagtttgaagcattgaccttttatttattccttatttctctttcatcaaaacaaaacagcagctgtgggaggagaaatgagagggcttaaatgaaatttaaaataagctatattatacaaatactatctctgtattgttctgaccctggtaaatatatttcaaaacttcagatgacaaggattagaacactcattaaagatgctattcttcagaa

SEQ ID NO: 450054 - DNA, 1328 bp, Homo sapiens
tgatctagaggagcgtttctctgatcgctcacaactgggcactggacagcttttccttcttctccagtgtctaccttcctcctcaactcccagccatctgtataaacacaatcctttgttctcccaaatctgaatcgaattactcttttgcctcctttttaatgtcagtaaggatatgagcctttgcacaggctggctgcgtgttcttgaaataggtgttaccttctctgggccttggttttttaaaatctgtaaaattagaggattgcactagagaaacttgaatgctccattcaggcctatcattttattaagtatgattgacacagcccatgggccagaacacactctacaaaatgactaggataacagaaagaacgtgatctcctgattagagagggtggttttcctcaatggaaccaaatataaagaggacttgaacaaaaatgacagatacaaactatttctatcctgagtagtaatctcacacttcatcctatagagtcaaccaccacagataggaattccttattctttttttaatttttttaagacagagtctcactttgttgcccaggctggagcgcagtggggtgatctcatctccctgcaacctccgcctcctgggttcaagcgattcttgtgcctcagcttcccaagcagctgggattacaggtgcccgccaccacgcccagctaatttttgcatttttagtagagatggggtttcaccatgttggccacgctcgtctccaactcctgacctcaggtaatccgcctgccttggcctcccaaagtgctgggattacagacatgaaccaccacgcctggctggaatacttactcttgtcgggagattgaaccactaaaatgttagagcagaattcattatgctgtggtcacaggggtgtcttgtctgagaacaaatacaattcagtcttctctttggggttttagtatgtgtcaaacataggactggaagtttgcccctgttcttttttcttttgaaagaacatcagttcatgcctgaggcatgagtgactgtgcatttgagaatagttttccctattctgtggatacagtcccagagttttcagggagtacacaggtagattagtttgaagcattgaccttttatttattccttatttctctttcatcaaaacaaaacagcagctgtgggaggagaaatgagagggcttaaatgaaatttaaaataagctatattatacaaatactatctctgtattgttctgaccctggtaaatatatttcaaaacttcagatgacaaggattagaacactcattaaagatgctattcttcagaa

SEQ ID NO: 450055 - DNA, 793 bp, Homo sapiens
tgctgcggtgatctagaggatccgtctcactttgttgcccaggctggagcgcagtggggtgatctcatctccctgcaacctccgcctcctgggttcaagcgattcttgtgcctcagcttcccaagcagctgggattacaggtgcccgccaccacgcccagctaatttttgcatttttagtagagatggggtttcaccatgttggccacgctcgtctccaactcctgacctcaggtaatccgcctgccttggcctcccaaagtgctgggattacagacatgaaccaccacgcctggctggaatacttactcttgtcgggagattgaaccactaaaatgttagagcagaattcattatgctgtggtcacaggggtgtcttgtctgagaacaaatacaattcagtcttctctttggggttttagtatgtgtcaaacataggactggaagtttgcccctgttcttttttcttttgaaagaacatcagttcatgcctgaggcatgagtgactgtgcatttgagaatagttttccctattctgtggatacagtcccagagttttcagggagtacacaggtagattagtttgaagcattgaccttttatttattccttatttctctttcatcaaaacaaaacagcagctgtgggaggagaaatgagagggcttaaatgaaatttaaaataagctatattatacaaatactatctctgtattgttctgaccctggtaaatatatttcaaaacttcagatgacaaggattagaacactcattaaagatgctattcttcagaa

SEQ ID NO: 450056 - DNA, 2901 bp, Homo sapiens
tggagaatccggttggggtaggagctaaatctcaggaccacttgctctatatatgagtgccaagataatctagagcagggagaggcagagaggcaggcagcctgctgggctcttcctgctgttgaaaacttacccggcccttacagaggaaatcttcctcctctcttctgccctgaatgttttcccaaacatgaaggtgataagcttattcattttggtgggatttataggagagttccaaagtttttcaagtgcctcctctccagtcaactgccagtgggacttctatgccccttggtcagaatgcaatggctgtaccaagactcagactcgcaggcggtcagttgctgtgtatgggcagtatggaggccagccttgtgttggaaatgcttttgaaacacagtcctgtgaacctacaagaggatgtccaacagaggagggatgtggagagcgtttcaggtgcttttcaggtcagtgcatcagcaaatcattggtttgcaatggggattctgactgtgatgaagacagtgctgatgaagacagatgtgaggactcagaaaggagaccttcctgtgatatcgataaacctcctcctaacatagaacttactggaaatggttacaatgaactcactggccagtttaggaacagagtcatcaataccaaaagttttggtggtcaatgtagaaaggtgtttagtggggatggaaaagatttctacaggctgagtggaaatgtcctgtcctatacattccaggtgaaaataaataatgattttaattatgaattttacaatagtacttggtcttatgtaaaacatacgtcgacagaacacacatcatctagtcggaagcgctccttttttagatcttcatcatcttcttcacgcagttatacttcacataccaatgaaatccataaaggaaagagttaccaactgctggttgttgagaacactgttgaagtggctcagttcattaataacaatccagaatttttacaacttgctgagccattctggaaggagctttcccacctcccctctctgtatgactacagtgcctaccgaagattaatcgaccagtacgggacacattatctgcaatctgggtcgttaggaggagaatacagagttctattttatgtggactcagaaaaattaaaacaaaatgattttaattcagtcgaagaaaagaaatgtaaatcctcaggttggcattttgtcgttaaattttcaagtcatggatgcaaggaactggaaaacgctttaaaagctgcttcaggaacccagaacaatgtattgcgaggagaaccgttcatcagagggggaggtgcaggcttcatatctggccttagttacctagagctggacaatcctgctggaaacaaaaggcgatattctgcctgggcagaatctgtgactaatcttcctcaagtcataaaacaaaagctgacacctttatatgagctggtaaaggaagtaccttgtgcctctgtgaaaaaactatacctgaaatgggctcttgaagagtatctggatgaatttgacccctgtcattgccggccttgtcaaaatggtggtttggctactgttgaggggacccattgtctgtgccattgcaaaccgtacacatttggtgcggcgtgtgagcaaggagtcctcgtagggaatcaagcaggaggggttgatggaggttggagttgctggtcctcttggagcccctgtgtccaagggaagaaaacaagaagccgtgaatgcaataacccacctcccagtgggggtgggagatcctgcgttggagaaacgacagaaagcacacaatgcgaagatgaggagctggagcacttgaggttgcttgaaccacattgctttcctttgtctttggttccaacagaattctgtccatcacctcctgccttgaaagatggatttgttcaagatgaaggtacaatgtttcctgtggggaaaaatgtagtgtacacttgcaatgaaggatactctcttattggaaacccagtggccagatgtggagaagatttacggtggcttgttggggaaatgcattgtcagaaaattgcctgtgttctacctgtactgatggatggcatacagagtcacccccaaaaacctttctacacagttggtgagaaggtgactgtttcctgttcaggtggcatgtccttagaaggtccttcagcatttctctgtggctccagccttaagtggagtcctgagatgaagaatgcccgctgtgtacaaaaagaaaatccgttaacacaggcagtgcctaaatgtcagcgctgggagaaactgcagaattcaagatgtgtttgtaaaatgccctacgaatgtggaccttccttggatgtatgtgctcaagatgagagaagcaaaaggatactgcctctgacagtttgcaagatgcatgttctccactgtcagggtagaaattacacccttactggtagggacagctgtactctgcctgcctcagctgagaaagcttgtggtgcctgcccactgtggggaaaatgtgatgctgagagcagcaaatgtgtctgccgagaagcatcggagtgcgaggaagaagggtttagcatttgtgtggaagtgaacggcaaggagcagacgatgtctgagtgtgaggcgggcgctctgagatgcagagggcagagcatctctgtcaccagcataaggccttgtgctgcggaaacccagtaggctcctggaggccctggtcagcttgcttggaatccagcaggcagctggggctgagtgaaaacatctgcacaactgggcactggacagcttttccttcttctccagtgtctaccttcctcctcaactcccagccatctgtataaacacaatcctttgttctcccaaatctgaatcgaatt

SEQ ID NO: 450057 - DNA, 2807 bp, Homo sapiens
tggagaatccggttggggtaggagctaaatctcaggaccacttgctctatatatgagtgccaagataatctagagcagggagaggcagagaggcaggcagcctgctgggctcttcctgctgttgaaaacttacccggcccttacagaggaaatcttcctcctctcttctgccctgaatgttttcccaaacatgaaggtgataagcttattcattttggtgggatttataggagagttccaaagtttttcaagtgcctcctctccagtcaactgccagtgggacttctatgccccttggtcagaatgcaatggctgtaccaagactcagactcgcaggcggtcagttgctgtgtatgggcagtatggaggccagccttgtgttggaaatgcttttgaaacacagtcctgtgaacctacaagaggatgtccaacagaggagggatgtggagagcgtttcaggtgcttttcaggtcagtgcatcagcaaatcattggtttgcaatggggattctgactgtgatgaagacagtgctgatgaagacagatgtgaggactcagaaaggagaccttcctgtgatatcgataaacctcctcctaacatagaacttactggaaatggttacaatgaactcactggccagtttaggaacagagtcatcaataccaaaagttttggtggtcaatgtagaaaggtgtttagtggggatggaaaagatttctacaggctgagtggaaatgtcctgtcctatacattccaggtgaaaataaataatgattttaattatgaattttacaatagtacttggtcttatgtaaaacatacgtcgacagaacacacatcatctagtcggaagcgctccttttttagatcttcatcatcttcttcacgcagttatacttcacataccaatgaaatccataaaggaaagagttaccaactgctggttgttgagaacactgttgaagtggctcagttcattaataacaatccagaatttttacaacttgctgagccattctggaaggagctttcccacctcccctctctgtatgactacagtgcctaccgaagattaatcgaccagtacgggacacattatctgcaatctgggtcgttaggaggagaatacagagttctattttatgtggactcagaaaaattaaaacaaaatgattttaattcagtcgaagaaaagaaatgtaaatcctcaggttggcattttgtcgttaaattttcaagtcatggatgcaaggaactggaaaacgctttaaaagctgcttcaggaacccagaacaatgtattgcgaggagaaccgttcatcagagggggaggtgcaggcttcatatctggccttagttacctagagctggacaatcctgctggaaacaaaaggcgatattctgcctgggcagaatctgtgactaatcttcctcaagtcataaaacaaaagctgacacctttatatgagctggtaaaggaagtaccttgtgcctctgtgaaaaaactatacctgaaatgggctcttgaagagtatctggatgaatttgacccctgtcattgccggccttgtcaaaatggtggtttggctactgttgaggggacccattgtctgtgccattgcaaaccgtacacatttggtgcggcgtgtgagcaaggagtcctcgtagggaatcaagcaggaggggttgatggaggttggagttgctggtcctcttggagcccctgtgtccaagggaagaaaacaagaagccgtgaatgcaataacccacctcccagtgggggtgggagatcctgcgttggagaaacgacagaaagcacacaatgcgaagatgaggagctggagcacttgaggttgcttgaaccacattgctttcctttgtctttggttccaacagaattctgtccatcacctcctgccttgaaagatggatttgttcaagatgaaggtacaatgtttcctgtggggaaaaatgtagtgtacacttgcaatgaaggatactctcttattggaaacccagtggccagatgtggagaagatttacggtggcttgttggggaaatgcattgtcagaaaattgcctgtgttctacctgtactgatggatggcatacagagtcacccccaaaaacctttctacacagttggtgagaaggtgactgtttcctgttcaggtggcatgtccttagaaggtccttcagcatttctctgtggctccagccttaagtggagtcctgagatgaagaatgcccgctgtgtacaaaaagaaaatccgttaacacaggcagtgcctaagttcagagccaggcctggctctgaacttaggcctggctctggggatgatggagaacgactcctcggcctaggagtctgaggcaaagctttcggttctggggaagaatcacattcgcttctccctctagatggcgttctaggtatatctttcattccaggagaggacccagacaggctgtgcctcgagggagtcccagacccatctctaagtcctggagaagacccagacctgcttctccttgatggagttctgggtaaaccatctttcatttcaggagaagatgcagaactacttctttctctcgagggtgtactgggtacagcatcaagcacaggtgaagagatgctctgatttgaagacatccctgccttttccactgcatctggggataactcagaactgctgtgtccagaggatcttgtcgattgttctttcatgtctagagatggatctgtgtccagctgattaagaaacggtccattcaaatctctttaacctcagaagaaatccagta

SEQ ID NO: 450058 - DNA, 949 bp, Homo sapiens
tggagaatccggttggggtaggagctaaatctcaggaccacttgctctatatatgagtgccaagataatctagagcagggagaggcagagaggcaggcagcctgctgggctcttcctgctgttgaaaacttacccggcccttacagaggaaatcttcctcctctcttctgccctgaatgttttcccaaacatgaaggtgataagcttattcattttggtgggatttataggagagttccaaagtttttcaagtgcctcctctccagtcaactgccagtgggacttctatgccccttggtcagaatgcaatggctgtaccaagactcagactcgcaggcggtcagttgctgtgtatgggcagtatggaggccagccttgtgttggaaatgcttttgaaacacagtcctgtgaacctacaagaggatgtccaacagaggagggatgtggagagcgtttcaggtgcttttcaggtcagtgcatcagcaaatcattggtttgcaatggggattctgactgtgatgaagacagtgctgatgaagacagatgtgaggactcagaaaggagaccttcctgtgatatcgataaacctcctcctaacatagaacttactggaaatggttacaatgaactcactggccagtttaggaacagagtcatcaataccaaaagttttggtggtcaatgtagaaaggtgtttagtggggatggaaaagatttctacaggctgagtggaaatgtcctgtcctatacattccaggtgaaaataaataatgattttaattatgaattttacaatagtacttggtcttatgtaaaacatacgtcgacagaacacacatcatctagtcggaagcgctccttttttagatcttcatcatcttcttcacgcagttatacttcacataccaatgaaatccataaaggaaaggttagtataaaatgtcagtta

SEQ ID NO: 450059 - DNA, 4088 bp, Homo sapiens
tggagaatccggttggggtaggagctaaatctcaggaccacttgctctatatatgagtgccaagataatctagagcagggagaggcagagaggcaggcagcctgctgggctcttcctgctgttgaaaacttacccggcccttacagaggaaatcttcctcctctcttctgccctgaatgttttcccaaacatgaaggtgataagcttattcattttggtgggatttataggagagttccaaagtttttcaagtgcctcctctccagtcaactgccagtgggacttctatgccccttggtcagaatgcaatggctgtaccaagactcagactcgcaggcggtcagttgctgtgtatgggcagtatggaggccagccttgtgttggaaatgcttttgaaacacagtcctgtgaacctacaagaggatgtccaacagaggagggatgtggagagcgtttcaggtgcttttcaggtcagtgcatcagcaaatcattggtttgcaatggggattctgactgtgatgaagacagtgctgatgaagacagatgtgaggactcagaaaggagaccttcctgtgatatcgataaacctcctcctaacatagaacttactggaaatggttacaatgaactcactggccagtttaggaacagagtcatcaataccaaaagttttggtggtcaatgtagaaaggtgtttagtggggatggaaaagatttctacaggctgagtggaaatgtcctgtcctatacattccaggtgaaaataaataatgattttaattatgaattttacaatagtacttggtcttatgtaaaacatacgtcgacagaacacacatcatctagtcggaagcgctccttttttagatcttcatcatcttcttcacgcagttatacttcacataccaatgaaatccataaaggaaagagttaccaactgctggttgttgagaacactgttgaagtggctcagttcattaataacaatccagaatttttacaacttgctgagccattctggaaggagctttcccacctcccctctctgtatgactacagtgcctaccgaagattaatcgaccagtacgggacacattatctgcaatctgggtcgttaggaggagaatacagagttctattttatgtggactcagaaaaattaaaacaaaatgattttaattcagtcgaagaaaagaaatgtaaatcctcaggttggcattttgtcgttaaattttcaagtcatggatgcaaggaactggaaaacgctttaaaagctgcttcaggaacccagaacaatgtattgcgaggagaaccgttcatcagagggggaggtgcaggcttcatatctggccttagttacctagagctggacaatcctgctggaaacaaaaggcgatattctgcctgggcagaatctgtgactaatcttcctcaagtcataaaacaaaagctgacacctttatatgagctggtaaaggaagtaccttgtgcctctgtgaaaaaactatacctgaaatgggctcttgaagagtatctggatgaatttgacccctgtcattgccggccttgtcaaaatggtggtttggctactgttgaggggacccattgtctgtgccattgcaaaccgtacacatttggtgcggcgtgtgagcaaggagtcctcgtagggaatcaagcaggaggggttgatggaggttggagttgctggtcctcttggagcccctgtgtccaagggaagaaaacaagaagccgtgaatgcaataacccacctcccagtgggggtgggagatcctgcgttggagaaacgacagaaagcacacaatgcgaagatgaggagctggagcacttgaggttgcttgaaccacattgctttcctttgtctttggttccaacagaattctgtccatcacctcctgccttgaaagatggatttgttcaagatgaaggtacaatgtttcctgtggggaaaaatgtagtgtacacttgcaatgaaggatactctcttattggaaacccagtggccagatgtggagaagatttacggtggcttgttggggaaatgcattgtcagaaaattgcctgtgttctacctgtactgatggatggcatacagagtcacccccaaaaacctttctacacagttggtgagaaggtgactgtttcctgttcaggtggcatgtccttagaaggtccttcagcatttctctgtggctccagccttaagtggagtcctgagatgaagaatgcccgctgtgtacaaaaagaaaatccgttaacacaggcagtgcctaaatgtcagcgctgggagaaactgcagaattcaagatgtgtttgtaaaatgccctacgaatgtggaccttccttggatgtatgtgctcaagatgagagaagcaaaaggatactgcctctgacagtttgcaagatgcatgttctccactgtcagggtagaaattacacccttactggtagggacagctgtactctgcctgcctcagctgagaaagcttgtggtgcctgcccactgtggggaaaatgtgatgctgagagcagcaaatgtgtctgccgagaagcatcggagtgcgaggaagaagggtttagcatttgtgtggaagtgaacggcaaggagcagacgatgtctgagtgtgaggcgggcgctctgagatgcagagggcagagcatctctgtcaccagcataaggccttgtgctgcggaaacccagtaggctcctggaggccctggtcagcttgcttggaatccagcaggcagctggggctgagtgaaaacatctgcacaactgggcactggacagcttttccttcttctccagtgtctaccttcctcctcaactcccagccatctgtataaacacaatcctttgttctcccaaatctgaatcgaattactcttttgcctcctttttaatgtcagtaaggatatgagcctttgcacaggctggctgcgtgttcttgaaataggtgttaccttctctgggccttggttttttaaaatctgtaaaattagaggattgcactagagaaacttgaatgctccattcaggcctatcattttattaagtatgattgacacagcccatgggccagaacacactctacaaaatgactaggataacagaaagaacgtgatctcctgattagagagggtggttttcctcaatggaaccaaatataaagaggacttgaacaaaaatgacagatacaaactatttctatcctgagtagtaatctcacacttcatcctatagagtcaaccaccacagataggaattccttattctttttttaatttttttaagacagagtctcactttgttgcccaggctggagcgcagtggggtgatctcatctccctgcaacctccgcctcctgggttcaagcgattcttgtgcctcagcttcccaagcagctgggattacaggtgcccgccaccacgcccagctaatttttgcatttttagtagagatggggtttcaccatgttggccacgctcgtctccaactcctgacctcaggtaatccgcctgccttggcctcccaaagtgctgggattacagacatgaaccaccacgcctggctggaatacttactcttgtcgggagattgaaccactaaaatgttagagcagaattcattatgctgtggtcacaggggtgtcttgtctgagaacaaatacaattcagtcttctctttggggttttagtatgtgtcaaacataggactggaagtttgcccctgttcttttttcttttgaaagaacatcagttcatgcctgaggcatgagtgactgtgcatttgagaatagttttccctattctgtggatacagtcccagagttttcagggagtacacaggtagattagtttgaagcattgaccttttatttattccttatttctctttcatcaaaacaaaacagcagctgtgggaggagaaatgagagggcttaaatgaaatttaaaataagctatattatacaaatactatctctgtattgttctgaccctggtaaatatatttcaaaacttcagatgacaaggattagaacactcattaaagatgctattcttcagaa

SEQ ID NO: 450060 - DNA, 2496 bp, Homo sapiens
  misc_feature (13)..(13): n is a, c, g, or t
  misc_feature (26)..(26): n is a, c, g, or t
ttcgcctactacnactatgctgcganaaagacgacagaagatttggtgcggcgtgtgagcaaggagtcctcgtagggaatcaagcaggaggggttgatggaggttggagttgctggtcctcttggagcccctgtgtccaagggaagaaaacaagaagccgtgaatgcaataacccacctcccagtgggggtgggagatcctgcgttggagaaacgacagaaagcacacaatgcgaagatgaggagctggagcacttgaggttgcttgaaccacattgctttcctttgtctttggttccaacagaattctgtccatcacctcctgccttgaaagatggatttgttcaagatgaaggtacaatgtttcctgtggggaaaaatgtagtgtacacttgcaatgaaggatactctcttattggaaacccagtggccagatgtggagaagatttacggtggcttgttggggaaatgcattgtcagaaaattgcctgtgttctacctgtactgatggatggcatacagagtcacccccaaaaacctttctacacagttggtgagaaggtgactgtttcctgttcaggtggcatgtccttagaaggtccttcagcatttctctgtggctccagccttaagtggagtcctgagatgaagaatgcccgctgtgtacaaaaagaaaatccgttaacacaggcagtgcctaaatgtcagcgctgggagaaactgcagaattcaagatgtgtttgtaaaatgccctacgaatgtggaccttccttggatgtatgtgctcaagatgagagaagcaaaaggatactgcctctgacagtttgcaagatgcatgttctccactgtcagggtagaaattacacccttactggtagggacagctgtactctgcctgcctcagctgagaaagcttgtggtgcctgcccactgtggggaaaatgtgatgctgagagcagcaaatgtgtctgccgagaagcatcggagtgcgaggaagaagggtttagcatttgtgtggaagtgaacggcaaggagcagacgatgtctgagtgtgaggcgggcgctctgagatgcagagggcagagcatctctgtcaccagcataaggccttgtgctgcggaaacccagtaggctcctggaggccctggtcagcttgcttggaatccagcaggcagctggggctgagtgaaaacatctgcacaactgggcactggacagcttttccttcttctccagtgtctaccttcctcctcaactcccagccatctgtataaacacaatcctttgttctcccaaatctgaatcgaattactcttttgcctcctttttaatgtcagtaaggatatgagcctttgcacaggctggctgcgtgttcttgaaataggtgttaccttctctgggccttggttttttaaaatctgtaaaattagaggattgcactagagaaacttgaatgctccattcaggcctatcattttattaagtatgattgacacagcccatgggccagaacacactctacaaaatgactaggataacagaaagaacgtgatctcctgattagagagggtggttttcctcaatggaaccaaatataaagaggacttgaacaaaaatgacagatacaaactatttctatcctgagtagtaatctcacacttcatcctatagagtcaaccaccacagataggaattccttattctttttttaatttttttaagacagagtctcactttgttgcccaggctggagcgcagtggggtgatctcatctccctgcaacctccgcctcctgggttcaagcgattcttgtgcctcagcttcccaagcagctgggattacaggtgcccgccaccacgcccagctaatttttgcatttttagtagagatggggtttcaccatgttggccacgctcgtctccaactcctgacctcaggtaatccgcctgccttggcctcccaaagtgctgggattacagacatgaaccaccacgcctggctggaatacttactcttgtcgggagattgaaccactaaaatgttagagcagaattcattatgctgtggtcacaggggtgtcttgtctgagaacaaatacaattcagtcttctctttggggttttagtatgtgtcaaacataggactggaagtttgcccctgttcttttttcttttgaaagaacatcagttcatgcctgaggcatgagtgactgtgcatttgagaatagttttccctattctgtggatacagtcccagagttttcagggagtacacaggtagattagtttgaagcattgaccttttatttattccttatttctctttcatcaaaacaaaacagcagctgtgggaggagaaatgagagggcttaaatgaaatttaaaataagctatattatacaaatactatctctgtattgttctgaccctggtaaatatatttcaaaacttcagatgacaaggattagaacactcattaaagatgctattcttcagaa

SEQ ID NO: 450061 - DNA, 4289 bp, Homo sapiens
tggagaatccggttggggtaggagctaaatctcaggaccacttgctctatatatgagtgccaagataatctagagcagggagaggcagagaggcaggcagcctgctgggctcttcctgctgttgaaaacttacccggcccttacagaggaaatcttcctcctctcttctgccctgaatgttttcccaaacatgaaggtgataagcttattcattttggtgggatttataggagagttccaaagtttttcaagtgcctcctctccagtcaactgccagtgggacttctatgccccttggtcagaatgcaatggctgtaccaagactcagactcgcaggcggtcagttgctgtgtatgggcagtatggaggccagccttgtgttggaaatgcttttgaaacacagtcctgtgaacctacaagaggatgtccaacagaggagggatgtggagagcgtttcaggtgcttttcaggtcagtgcatcagcaaatcattggtttgcaatggggattctgactgtgatgaagacagtgctgatgaagacagatgtgaggactcagaaaggagaccttcctgtgatatcgataaacctcctcctaacatagaacttactggaaatggttacaatgaactcactggccagtttaggaacagagtcatcaataccaaaagttttggtggtcaatgtagaaaggtgtttagtggggatggaaaagatttctacaggctgagtggaaatgtcctgtcctatacattccaggtgaaaataaataatgattttaattatgaattttacaatagtacttggtcttatgtaaaacatacgtcgacagaacacacatcatctagtcggaagcgctccttttttagatcttcatcatcttcttcacgcagttatacttcacataccaatgaaatccataaaggaaagagttaccaactgctggttgttgagaacactgttgaagtggctcagttcattaataacaatccagaatttttacaacttgctgagccattctggaaggagctttcccacctcccctctctgtatgactacagtgcctaccgaagattaatcgaccagtacgggacacattatctgcaatctgggtcgttaggaggagaatacagagttctattttatgtggactcagaaaaattaaaacaaaatgattttaattcagtcgaagaaaagaaatgtaaatcctcaggttggcattttgtcgttaaattttcaagtcatggatgcaaggaactggaaaacgctttaaaagctgcttcaggaacccagaacaatgtattgcgaggagaaccgttcatcagagggggaggtgcaggcttcatatctggccttagttacctagagctggacaatcctgctggaaacaaaaggcgatattctgcctgggcagaatctgtgactaatcttcctcaagtcataaaacaaaagctgacacctttatatgagctggtaaaggaagtaccttgtgcctctgtgaaaaaactatacctgaaatgggctcttgaagagtatctggatgaatttgacccctgtcattgccggccttgtcaaaatggtggtttggctactgttgaggggacccattgtctgtgccattgcaaaccgtacacatttggtgcggcgtgtgagcaaggagtcctcgtagggaatcaagcaggaggggttgatggaggttggagttgctggtcctcttggagcccctgtgtccaagggaagaaaacaagaagccgtgaatgcaataacccacctcccagtgggggtgggagatcctgcgttggagaaacgacagaaagcacacaatgcgaagatgaggagctggagcacttgaggttgcttgaaccacattgctttcctttgtctttggttccaacagaattctgtccatcacctcctgccttgaaagatggatttgttcaagatgaaggtacaatgtttcctgtggggaaaaatgtagtgtacacttgcaatgaaggatactctcttattggaaacccagtggccagatgtggagaagatttacggtggcttgttggggaaatgcattgtcagaaaattgcctgtgttctacctgtactgatggatggcatacagagtcacccccaaaaacctttctacacagttggtgagaaggtgactgtttcctgttcaggtggcatgtccttagaaggtccttcagcatttctctgtggctccagccttaagtggagtcctgagatgaagaatgcccgctgtgtacaaaaagaaaatccgttaacacaggcagtgcctaaatgtcagcgctgggagaaactgcagaattcaagatgtgtttgtaaaatgccctacgaatgtggaccttccttggatgtatgtgctcaagatgagagaagcaaaaggatactgcctctgacagtttgcaagatgcatgttctccactgtcagggtagaaattacacccttactggtagggacagctgtactctgcctgcctcagctgagaaagcttgtggtgcctgcccactgtggggaaaatgtgatgctgagagcagcaaatgtgtctgccgagaagcatcggagtgcgaggaagaagggtttagcatttgtgtggaagtgaacggcaaggagcagacgatgtctgagtgtgaggcgggcgctctgagatgcagagggcagagcatctctgtcaccagcataaggccttgtgctgcggaaacccagtaggctcctggaggccctggtcagcttgcttggaatccagcaggcagctggggctgagtgaaaacatctgcacaactgggcactggacagcttttccttcttctccagtgtctaccttcctcctcaactcccagccatctgtataaacacaatcctttgttctcccaaatctgaatcgaattactcttttgcctcctttttaatgtcagtaaggatatgagcctttgcacaggctggctgcgtgttcttgaaataggtgttaccttctctgggccttggttttttaaaatctgtaaaattagaggattgcactagagaaacttgaatgctccattcaggcctatcattttattaagtatgattgacacagcccatgggccagaacacactctacaaaatgactaggataacagaaagaacgtgatctcctgattagagagggtggttttcctcaatggaaccaaatataaagaggacttgaacaaaaatgacagatacaaactatttctatcctgagtagtaatctcacacttcatcctatagagtcaaccaccacagataggaattccttattctttttttaatttttttaagacagagtctcactttgttgcccaggctggagcgcagtggggtgatctcatctccctgcaacctccgcctcctgggttcaagcgattcttgtgcctcagcttcccaagcagctgggattacaggtgcccgccaccacgcccagctaatttttgcatttttagtagagatggggtttcaccatgttggccacgctcgtctccaactcctgacctcaggtaatccgcctgccttggcctcccaaagtgctgggattacagacatgaaccaccacgcctggctggaatacttactcttgtcgggagattgaaccactaaaatgttagagcagaattcattatgctgtggtcacaggggtgtcttgtctgagaacaaatacaattcagtcttctctttggggttttagtatgtgtcaaacataggactggaagtttgcccctgttcttttttcttttgaaagaacatcagttcatgcctgaggcatgagtgactgtgcatttgagaatagttttccctattctgtggatacagtcccagagttttcagggagtacacaggtagattagtttgaagcattgaccttttatttattccttatttctctttcatcaaaacaaaacagcagctgtgggaggagaaatgagagggcttaaatgaaatttaaaataagctatattatacaaatactatctctgtattgttctgaccctggtaaatatatttcaaaacttcagatgacaaggattagaacactcattaaagatgctattcttcagaaaaaaaaaaaaaaaaaacaaaaaaaaaacgtggggggggcaggggccggaaaaagtttaaacccccggtggggccccggcccaggagagagaacgggccaagggggcccaggagagccgggcggaaacggggggggtccccaaaaaagccgggaacggggcggaacaccccaagggccgggccgggccacaggccccggcac

SEQ ID NO: 450062 - DNA, 4034 bp, Homo sapiens
tggagaatccggttggggtaggagctaaatctcaggaccacttgctctatatatgagtgccaagataatctagagcagggagaggcagagaggcaggcagcctgctgggctcttcctgctgttgaaaacttacccggcccttacagaggaaatcttcctcctctcttctgccctgaatgttttcccaaacatgaaggtgataagcttattcattttggtgggatttataggagagttccaaagtttttcaagtgcctcctctccagtcaactgccagtgggacttctatgccccttggtcagaatgcaatggctgtaccaagactcagactcgcaggcggtcagttgctgtgtatgggcagtatggaggccagccttgtgttggaaatgcttttgaaacacagtcctgtgaacctacaagaggatgtccaacagaggagggatgtggagagcgtttcaggtgcttttcaggtcagtgcatcagcaaatcattggtttgcaatggggattctgactgtgatgaagacagtgctgatgaagacagatgtgaggactcagaaaggagaccttcctgtgatatcgataaacctcctcctaacatagaacttactggaaatggttacaatgaactcactggccagtttaggaacagagtcatcaataccaaaagttttggtggtcaatgtagaaaggtgtttagtggggatggaaaagatttctacaggctgagtggaaatgtcctgtcctatacattccaggtgaaaataaataatgattttaattatgaattttacaatagtacttggtcttatgtaaaacatacgtcgacagaacacacatcatctagtcggaagcgctccttttttagatcttcatcatcttcttcacgcagttatacttcacataccaatgaaatccataaaggaaagagttaccaactgctggttgttgagaacactgttgaagtggctcagttcattaataacaatccagaatttttacaacttgctgagccattctggaaggagctttcccacctcccctctctgtatgactacagtgcctaccgaagattaatcgaccagtacgggacacattatctgcaatctgggtcgttaggaggagaatacagagttctattttatgtggactcagaaaaattaaaacaaaatgattttaattcagtcgaagaaaagaaatgtaaatcctcaggttggcattttgtcgttaaattttcaagtcatggatgcaaggaactggaaaacgctttaaaagctgcttcaggaacccagaacaatgtattgcgaggagaaccgttcatcagagggggaggtgcaggcttcatatctggccttagttacctagagctggacaatcctgctggaaacaaaaggcgatattctgcctgggcagaatctgtgactaatcttcctcaagtcataaaacaaaagctgacacctttatatgagctggtaaaggaagtaccttgtgcctctgtgaaaaaactatacctgaaatgggctcttgaagagtatctggatgaatttgacccctgtcattgccggccttgtcaaaatggtggtttggctactgttgaggggacccattgtctgtgccattgcaaaccgtacacatttggtgcggcgtgtgagcaaggagtcctcgtagggaatcaagcaggaggggttgatggaggttggagttgctggtcctcttggagcccctgtgtccaagggaagaaaacaagaagccgtgaatgcaataacccacctcccagtgggggtgggagatcctgcgttggagaaacgacagaaagcacacaatgcgaagatgaggagctggagcacttgaggttgcttgaaccacattgctttcctttgtctttggttccaacagaattctgtccatcacctcctgccttgaaagatggatttgttcaagatgaaggtacaatgtttcctgtggggaaaaatgtagtgtacacttgcaatgaaggatactctcttattggaaacccagtggccagatgtggagaagatttacggtggcttgttggggaaatgcattgtcagaaaattgcctgtgttctacctgtactgatggatggcatacagagtcacccccaaaaacctttctacacagttggtgagaaggtgactgtttcctgttcaggtggcatgtccttagaaggtccttcagcatttctctgtggctccagccttaagtggagtcctgagatgaagaatgcccgctgtgtacaaaaagaaaatccgttaacacaggcagtgcctaaatgtcagcgctgggagaaactgcagaattcaagatgtgtttgtaaaatgccctacgaatgtggaccttccttggatgtatgtgctcaagatgagagaagcaaaaggatactgcctctgacagtttgcaagatgcatgttctccactgtcagggtagaaattacacccttactggtagggacagctgtactctgcctgcctcagctgagaaagcttgtggtgcctgcccactgtggggaaaatgtgatgctgagagcagcaaatgtgtctgccgagaagcatcggagtgcgaggaagaagggtttagcatttgtgtggaagtgaacggcaaggagcagacgatgtctgagtgtgaggcgggcgctctgagatgcagagggcagagcatctctgtcaccagcataaggccttgtgctgcggaaacccagtaggctcctggaggccctggtcagcttgcttggaatccagcaggcagctggggctgagtgaaaacatctgcacaactgggcactggacagcttttccttcttctccagtgtctaccttcctcctcaactcccagccatctgtataaacacaatcctttgttctcccaaatctgaatcgaattactcttttgcctcctttttaatgtcagtaaggatatgagcctttgcacaggctggctgcgtgttcttgaaataggtgttaccttctctgggccttggttttttaaaatctgtaaaattagaggattgcactagagaaacttgaatgctccattcaggcctatcattttattaagtatgattgacacagcccatgggccagaacacactctacaaaatgactaggataacagaaagaacgtgatctcctgattagagagggtggttttcctcaatggaaccaaatataaagaggacttgaacaaaaatgacagatacaaactatttctatcctgagtagtaatctcacacttcatcctatagagtcaaccaccacagataggaattccttattctttttttaatttttttaagacagagtctcactttgttgcccaggctggagcgcagtggggtgatctcatctccctgcaacctccgcctcctgggttcaagcgattcttgtgcctcagcttcccaagcagctgggattacaggtgcccgccaccacgcccagctaatttttgcatttttagtagagatggggtttcaccatgttggccacgctcgtctccaactcctgacctcaggtaatccgcctgccttggcctcccaaagtgctgggattacagacatgaaccaccacgcctggctggaatacttactcttgtcgggagattgaaccactaacaaatacaattcagtcttctctttggggttttagtatgtgtcaaacataggactggaagtttgcccctgttcttttttcttttgaaagaacatcagttcatgcctgaggcatgagtgactgtgcatttgagaatagttttccctattctgtggatacagtcccagagttttcagggagtacacaggtagattagtttgaagcattgaccttttatttattccttatttctctttcatcaaaacaaaacagcagctgtgggaggagaaatgagagggcttaaatgaaatttaaaataagctatattatacaaatactatctctgtattgttctgaccctggtaaatatatttcaaaacttcagatgacaaggattagaacactcattaaagatgctattcttcagaa

SEQ ID NO: 450063 - DNA, 2930 bp, Homo sapiens
tggagaatccggttggggtaggagctaaatctcaggaccacttgctctatatatgagtgccaagataatctagagcagggagaggcagagaggcaggcagcctgctgggctcttcctgctgttgaaaacttacccggcccttacagaggaaatcttcctcctctcttctgccctgaatgttttcccaaacatgaaggtgataagcttattcattttggtgggatttataggagagttccaaagtttttcaagtgcctcctctccagtcaactgccagtgggacttctatgccccttggtcagaatgcaatggctgtaccaagactcagactcgcaggcggtcagttgctgtgtatgggcagtatggaggccagccttgtgttggaaatgcttttgaaacacagtcctgtgaacctacaagaggatgtccaacagaggagggatgtggagagcgtttcaggtgcttttcaggtcagtgcatcagcaaatcattggtttgcaatggggattctgactgtgatgaagacagtgctgatgaagacagatgtgaggactcagaaaggagaccttcctgtgatatcgataaacctcctcctaacatagaacttactggaaatggttacaatgaactcactggccagtttaggaacagagtcatcaataccaaaagttttggtggtcaatgtagaaaggtgtttagtggggatggaaaagatttctacaggctgagtggaaatgtcctgtcctatacattccaggtgaaaataaataatgattttaattatgaattttacaatagtacttggtcttatgtaaaacatacgtcgacagaacacacatcatctagtcggaagcgctccttttttagatcttcatcatcttcttcacgcagttatacttcacataccaatgaaatccataaaggaaagagttaccaactgctggttgttgagaacactgttgaagtggctcagttcattaataacaatccagaatttttacaacttgctgagccattctggaaggagctttcccacctcccctctctgtatgactacagtgcctaccgaagattaatcgaccagtacgggacacattatctgcaatctgggtcgttaggaggagaatacagagttctattttatgtggactcagaaaaattaaaacaaaatgattttaattcagtcgaagaaaagaaatgtaaatcctcaggttggcattttgtcgttaaattttcaagtcatggatgcaaggaactggaaaacgctttaaaagctgcttcaggaacccagaacaatgtattgcgaggagaaccgttcatcagagggggaggtgcaggcttcatatctggccttagttacctagagctggacaatcctgctggaaacaaaaggcgatattctgcctgggcagaatctgtgactaatcttcctcaagtcataaaacaaaagctgacacctttatatgagctggtaaaggaagtaccttgtgcctctgtgaaaaaactatacctgaaatgggctcttgaagagtatctggatgaatttgacccctgtcattgccggccttgtcaaaatggtggtttggctactgttgaggggacccattgtctgtgccattgcaaaccgtacacatttggtgcggcgtgtgagcaaggagtcctcgtagggaatcaagcaggaggggttgatggaggttggagttgctggtcctcttggagcccctgtgtccaagggaagaaaacaagaagccgtgaatgcaataacccacctcccagtgggggtgggagatcctgcgttggagaaacgacagaaagcacacaatgcgaagatgaggagctggagcacttgaggttgcttgaaccacattgctttcctttgtctttggttccaacagaattctgtccatcacctcctgccttgaaagatggatttgttcaagatgaaggtacaatgtttcctgtggggaaaaatgtagtgtacacttgcaatgaaggatactctcttattggaaacccagtggccagatgtggagaagatttacggtggcttgttggggaaatgcattgtcagaaaattgcctgtgttctacctgtactgatggatggcatacagagtcacccccaaaaacctttctacacagttggtgagaaggtgactgtttcctgttcaggtggcatgtccttagaaggtccttcagcatttctctgtggctccagccttaagtggagtcctgagatgaagaatgcccgctgtgtacaaaaagaaaatccgttaacacaggcagtgcctaaatgtcagcgctgggagaaactgcagaattcaagatgtgtttgtaaaatgccctacgaatgtggaccttccttggatgtatgtgctcaagatgagagaagcaaaaggatactgcctctgacagtttgcaagatgcatgttctccactgtcagggtagaaattacacccttactggtagggacagctgtactctgcctgcctcagctgagaaagcttgtggtgcctgcccactgtggggaaaatgtgatgtttagcagtgggccgaagaagatacttgaggatgttaaagactcagactgatttgacatgcactgacctctcctatacccctcactggagaagggcacagatcacagacctcagaggataagattcccacattcctgatgtggaaatgttctcccaaacaggggtgattccatgccaccttcatgatttttactctgtccttgtattatccatattgtgtactcattttttaaaagtctgacataaaaataacttaaaaatgaaaactttatatcatgtccttaaaaggaggtatcacttgccataaatactaggtaactataaaagttatatgtaatggaactaaataaagttgtggactctagccagatactggtccaacattgacta

SEQ ID NO: 450064 - DNA, 868 bp, Homo sapiens
tggagaatccggttggggtaggagctaaatctcaggaccacttgctctatatatgagtgccaagataatctagagcagggagaggcagagaggcaggcagcctgctgggctcttcctgctgttgaaaacttacccggcccttacagaggaaatcttcctcctctcttctgccctgaatgttttcccaaacatgaaggtgataagcttattcattttggtgggatttataggagagttccaaagtttttcaagtgcctcctctccagtcaactgccagtgggacttctatgccccttggtcagaatgcaatggctgtaccaagactcagactcgcaggcggtcagttgctgtgtatgggcagtatggaggccagccttgtgttggaaatgcttttgaaacacagtcctgtgaacctacaagaggatgtccaacagaggagggatgtggagagcgtttcaggtgcttttcaggtcagtgcatcagcaaatcattggtttgcaatggggattctgactgtgatgaagacagtgctgatgaagacagatgtgaggactcagaaaggagaccttcctgtgatatcgataaacctcctcctaacatagaacttactggaaatggattcaattcaaaaccagctgttgccatagatacgaaagagccatgtgtttcccaaatatgttcttagatggaaagaatgttggattttctgagccattagttttagtgattataccaagcaggggaagctggataatgtatggtgtgtattaggatgctgtgctcttcatttgaactctctcaaagaagtgtttaagtgtaatgcattttaagaatttgtagagttctgtaataaacttttttccccacc

SEQ ID NO: 450065 - DNA, 3433 bp, Homo sapiens
tgctctgcccgttgctcagcaagttacttggggttccagtttgataagaaaagacttcctgtggaggaatctgaagggaaggaggaggagctggcccattcctgcctgggaggttgtggaagaaggaagatggccagagctttgtgtccactgcaagccctctggcttctggagtgggtgctgctgctcttgggaccttgtgctgcccctccagcctgggccttgaacctggacccagtgcagctcaccttctatgcaggccccaatggcagccagtttggattttcactggacttccacaaggacagccatgggagagtggccatcgtggtgggcgccccgcggaccctgggccccagccaggaggagacgggcggcgtgttcctgtgcccctggagggccgagggcggccagtgcccctcgctgctctttgacctccgtgatgagacccgaaatgtaggctcccaaactttacaaaccttcaaggcccgccaaggactgggggcgtcggtcgtcagctggagcgacgtcattgtggcctgcgccccctggcagcactggaacgtcctagaaaagactgaggaggctgagaagacgcccgtaggtagctgctttttggctcagccagagagcggccgccgcgccgagtactccccctgtcgcgggaacaccctgagccgcatttacgtggaaaatgattttagctgggacaagcgttactgtgaagcgggcttcagctccgtggtcactcaggccggagagctggtgcttggggctcctggcggctattatttcttaggtctcctggcccaggctccagttgcggatattttctcgagttaccgcccaggcatccttttgtggcacgtgtcctcccagagcctctcctttgactccagcaacccagagtacttcgacggctactgggggtactcggtggccgtgggcgagttcgacggggatctcaacactacagaatatgtcgtcggtgcccccacttggagctggaccctgggagcggtggaaattttggattcctactaccagaggctgcatcggctgcgcgcagagcagatggcgtcgtattttgggcattcagtggctgtcactgacgtcaacggggatgggaggcatgatctgctggtgggcgctccactgtatatggagagccgggcagaccgaaaactggccgaagtggggcgtgtgtatttgttcctgcagccgcgaggcccccacgcgctgggtgcccccagcctcctgctgactggcacacagctctatgggcgattcggctctgccatcgcacccctgggcgacctcgaccgggatggctacaatgacattgcagtggctgccccctacgggggtcccagtggccggggccaagtgctggtgttcctgggtcagagtgaggggctgaggtcacgtccctcccaggtcctggacagccccttccccacaggctctgcctttggcttctcccttcgaggtgccgtagacatcgatgacaacggatacccagacctgatcgtgggagcttacggggccaaccaggtggctgtgtacagagctcagccagtggtgaaggcctctgtccagctactggtgcaagattcactgaatcctgctgtgaagagctgtgtcctacctcagaccaagacacccgtgagctgcttcaacatccagatgtgtgttggagccactgggcacaacattcctcagaagctatccctaaatgccgagctgcagctggaccggcagaagccccgccagggccggcgggtgctgctgctgggctctcaacaggcaggcaccaccctgaacctggatctgggcggaaagcacagccccatctgccacaccaccatggccttccttcgagatgaggcagacttccgggacaagctgagccccattgtgctcagcctcaatgtgtccctaccgcccacggaggctggaatggcccctgctgtcgtgctgcatggagacacccatgtgcaggagcagacacgaatcgtcctggactgtggggaagatgacgtatgtgtgccccagcttcagctcactgccagcgtgacgggctccccgctcctagttggggcagataatgtcctggagctgcagatggacgcagccaacgagggcgagggggcctatgaagcagagctggccgtgcacctgccccagggcgcccactacatgcgggccctaagcaatgtcgagggctttgagagactcatctgtaatcagaagaaggagaatgagaccagggtggtgctgtgtgagctgggcaaccccatgaagaagaacgcccagataggaatcgcgatgttggtgagcgtggggaatctggaagaggctggggagtctgtgtccttccagctgcagatacggagcaagaacagccagaatccaaacagcaagattgtgctgctggacgtgccggtccgggcagaggcccaagtggagctgcgagggaactcctttccagcctccctggtggtggcagcagaagaaggtgagagggagcagaacagcttggacagctggggacccaaagtggagcacacctatgagctccacaacaatggccctgggactgtgaatggtcttcacctcagcatccaccttccgggacagtcccagccctccgacctgctctacatcctggatatacagccccaggggggccttcagtgcttcccacagcctcctgtcaaccctctcaaggtggactgggggctgcccatccccagcccctcccccattcacccggcccatcacaagcgggatcgcagacagatcttcctgccagagcccgagcagccctcgaggcttcaggatccagttctcgtaagctgcgactcggcgccctgtactgtggtgcagtgtgacctgcaggagatggcgcgcgggcagcgggccatggtcacggtgctggccttcctgtggctgcccagcctctaccagaggcctctggatcagtttgtgctgcagtcgcacgcatggttcaacgtgtcctccctcccctatgcggtgcccccgctcagcctgccccgaggggaagctcaggtgtggacacagctgctccgggccttggaggagagggccattccaatctggtgggtgctggtgggtgtgctgggtggcctgctgctgctcaccatcctggtcctggccatgtggaaggtcggcttcttcaagcggaaccggccacccctggaagaagatgatgaagagggggagtgatggtgcagcctacactattctagcaggagggttgggcgtgctacctgcaccgccccttctccaacaagttgcctccaagctttgggttggagctgttccattgggtcctcttggtgtcgtttccctcccaacagagctgggctaccccccctcctgctgcctaataaagagactgagccctgat

SEQ ID NO: 450066 - DNA, 1104 bp, Homo sapiens
  misc_feature (1)..(2): n is a, c, g, or t
  misc_feature (4)..(4): n is a, c, g, or t
  misc_feature (8)..(8): n is a, c, g, or t
  misc_feature (10)..(10): n is a, c, g, or t
  misc_feature (12)..(15): n is a, c, g, or t
  misc_feature (17)..(17): n is a, c, g, or t
  misc_feature (19)..(20): n is a, c, g, or t
  misc_feature (23)..(24): n is a, c, g, or t
  misc_feature (26)..(26): n is a, c, g, or t
  misc_feature (36)..(36): n is a, c, g, or t
  misc_feature (50)..(50): n is a, c, g, or t
  misc_feature (61)..(61): n is a, c, g, or t
  misc_feature (68)..(69): n is a, c, g, or t
  misc_feature (80)..(80): n is a, c, g, or t
  misc_feature (99)..(99): n is a, c, g, or t
  misc_feature (107)..(107): n is a, c, g, or t
nnanaatntnannnngntnnggnncngtggctcacncctgtaatcccagnactttgggagnccaaggnnggcagatcacntgaggtcaggagttcgagntcagcctngccgaactcctttccagcctccctggtggtggcagcagaagaaggtgagagggagcagaacagcttggacagctggggacccaaagtggagcacacctatgagctccacaacaatggccctgggactgtgaatggtcttcacctcagcatccaccttccgggacagtcccagccctccgacctgctctacatcctggatatacagccccaggggggccttcagtgcttcccacagcctcctgtcaaccctctcaaggtggactgggggctgcccatccccagcccctcccccattcacccggcccatcacaagcgggatcgcagacagatcttcctgccagagcccgagcagccctcgaggcttcaggatccagttctcgtaagctgcgactcggcgccctgtactgtggtgcagtgtgacctgcaggagatggcgcgcgggcagcgggccatggtcacggtgctggccttcctgtggctgcccagcctctaccagaggcctctggatcagtttgtgctgcagtcgcacgcatggttcaacgtgtcgtttgaggaagaagcaaagtgtagtagttagaatggtgatttctgagcaagaagatgggggctctgtattcctggccaagtagcttggcttctctgggtctcagtttgctgccaaagcaaacgaggataatactgatcctacctgtaataggaccattgaaaggatttcacaggatgaggtttatgaaaatactttatagttaataattctacatcatatacctgaaatttgctaagagagaaaaatcttaaaacgttctcaccacaaaagataactatgtgaggtgatacatacgctaattagcttgattgtggtaatcctttcacaatgtatacatataccaaaacatcatattgcacactgtgaatatatacaatttatttgtcaattatacctcaatacagctggaaatacataaattttcatgcactgtgtaaatatgagagatgg

SEQ ID NO: 450067 - DNA, 563 bp, Homo sapiens
gctgaggcaggagaatcgtttgaacctgagaggcagaggttgtggtgagccgagatcatgccattgcactccagcctgggcaacgagagcgaaactctgtctcaaaaaaaataaaaactcaggggagaaaaaacaaaaacccaacaattcgttccatgcattatctctaaatgtcaaaaggcatccatttgtgagtacagtgggcttcatgttctgcgctggtccagggaggtgctcatagctagcatacttcctcacatgtgctctggggccagcaaatcatctgtataccctgaccttggcccccgtgtacccccaggtcggcttcttcaagcggaaccggccacccctggaagaagatgatgaagagggggagtgatggtgcagcctacactattctagcaggagggttgggcgtgctacctgcaccgccccttctccaacaagttgcctccaagctttgggttggagctgttccattgggtcctcttggtgtcgtttccctcccaacagagctgggctaccccccctcctgctgcctaataaagagactgagccctgat

SEQ ID NO: 450068 - DNA, 3597 bp, Homo sapiens
tgctctgcccgttgctcagcaagttacttggggttccagtttgataagaaaagacttcctgtggaggaatctgaagggaaggaggaggagctggcccattcctgcctgggaggttgtggaagaaggaagatggccagagctttgtgtccactgcaagccctctggcttctggagtgggtgctgctgctcttgggaccttgtgctgcccctccagcctgggccttgaacctggacccagtgcagctcaccttctatgcaggccccaatggcagccagtttggattttcactggacttccacaaggacagccatgggagagtggccatcgtggtgggcgccccgcggaccctgggccccagccaggaggagacgggcggcgtgttcctgtgcccctggagggccgagggcggccagtgcccctcgctgctctttgacctccgtgagtcccaggcaaggagagcaaggttggggtcagagggacgtggactgccgggcttcagcgccccaccccttcttgtgccttccaggtgatgagacccgaaatgtaggctcccaaactttacaaaccttcaaggcccgccaaggactgggggcgtcggtcgtcagctggagcgacgtcattgtggtgggccccgcggtacagggcacagggaacaatcgggggcagggacacctggggccaggaggagcccaagtctcgcgcccgtccccactcctgtggcctttctccaggcctgcgccccctggcagcactggaacgtcctagaaaagactgaggaggctgagaagacgcccgtaggtagctgctttttggctcagccagagagcggccgccgcgccgagtactccccctgtcgcgggaacaccctgagccgcatttacgtggaaaatgattttagctgggacaagcgttactgtgaagcgggcttcagctccgtggtcactcaggcgagtagggagcaaaagcgcagtgggggcggctcccaaacagggccccctctcaccctcaggacttcccttccaggccggagagctggtgcttggggctcctggcggctattatttcttaggtctcctggcccaggctccagttgcggatattttctcgagttaccgcccaggcatccttttgtggcacgtgtcctcccagagcctctcctttgactccagcaacccagagtacttcgacggctactgggggtactcggtggccgtgggcgagttcgacggggatctcaacactacagaatatgtcgtcggtgcccccacttggagctggaccctgggagcggaggcatgatctgctggtgggcgctccactgtatatggagagccgggcagaccgaaaactggccgaagtggggcgtgtgtatttgttcctgcagccgcgaggcccccacgcgctgggtgcccccagcctcctgctgactggcacacagctctatgggcgattcggctctgccatcgcacccctgggcgacctcgaccgggatggctacaatgacattgcagtggctgccccctacgggggtcccagtggccggggccaagtgctggtgttcctgggtcagagtgaggggctgaggtcacgtccctcccaggtcctggacagccccttccccacaggctctgcctttggcttctcccttcgaggtgccgtagacatcgatgacaacggatacccagacctgatcgtgggagcttacggggccaaccaggtggctgtgtacagagctcagccagtggtgaaggcctctgtccagctactggtgcaagattcactgaatcctgctgtgaagagctgtgtcctacctcagaccaagacacccgtgagctgcttcaacatccagatgtgtgttggagccactgggcacaacattcctcagaagctatccctaaatgccgagctgcagctggaccggcagaagccccgccagggccggcgggtgctgctgctgggctctcaacaggcaggcaccaccctgaacctggatctgggcggaaagcacagccccatctgccacaccaccatggccttccttcgagatgaggcagacttccgggacaagctgagccccattgtgctcagcctcaatgtgtccctaccgcccacggaggctggaatggcccctgctgtcgtgctgcatggagacacccatgtgcaggagcagacacgaatcgtcctggactgtggggaagatgacgtatgtgtgccccagcttcagctcactgccagcgtgacgggctccccgctcctagttggggcagataatgtcctggagctgcagatggacgcagccaacgagggcgagggggcctatgaagcagagctggccgtgcacctgccccagggcgcccactacatgcgggccctaagcaatgtcgagggctttgagagactcatctgtaatcagaagaaggagaatgagaccagggtggtgctgtgtgagctgggcaaccccatgaagaagaacgcccagataggaatcgcgatgttggtgagcgtggggaatctggaagaggctggggagtctgtgtccttccagctgcagatacggagcaagaacagccagaatccaaacagcaagattgtgctgctggacgtgccggtccgggcagaggcccaagtggagctgcgagggaactcctttccagcctccctggtggtggcagcagaagaaggtgagagggagcagaacagcttggacagctggggacccaaagtggagcacacctatgagctccacaacaatggccctgggactgtgaatggtcttcacctcagcatccaccttccgggacagtcccagccctccgacctgctctacatcctggatatacagccccaggggggccttcagtgcttcccacagcctcctgtcaaccctctcaaggtggactgggggctgcccatccccagcccctcccccattcacccggcccatcacaagcgggatcgcagacagatcttcctgccagagcccgagcagccctcgaggcttcaggatccagttctcgtaagctgcgactcggcgccctgtactgtggtgcagtgtgacctgcaggagatggcgcgcgggcagcgggccatggtcacggtgctggccttcctgtggctgcccagcctctaccagaggcctctggatcagtttgtgctgcagtcgcacgcatggttcaacgtgtcctccctcccctatgcggtgcccccgctcagcctgccccgaggggaagctcaggtgtggacacagctgctccgggccttggaggagagggccattccaatctggtgggtgctggtgggtgtgctgggtggcctgctgctgctcaccatcctggtcctggccatgtggaaggtcggcttcttcaagcggaaccggccacccctggaagaagatgatgaagagggggagtgatggtgcagcctacactattctagcaggagggttgggcgtgctacctgcaccgccccttctccaacaagttgcctccaagctttgggttggagctgttccattgggtcctcttggtgtcgtttccctcccaacagagctgggctaccccccctcctgctgcctaataaagagactgagccctgat

SEQ ID NO: 450069 - DNA, 3511 bp, Homo sapiens
tgctctgcccgttgctcagcaagttacttggggttccagtttgataagaaaagacttcctgtggaggaatctgaagggaaggaggaggagctggcccattcctgcctgggaggttgtggaagaaggaagatggccagagctttgtgtccactgcaagccctctggcttctggagtgggtgctgctgctcttgggaccttgtgctgcccctccagcctgggccttgaacctggacccagtgcagctcaccttctatgcaggccccaatggcagccagtttggattttcactggacttccacaaggacagccatgggagagtggccatcgtggtgggcgccccgcggaccctgggccccagccaggaggagacgggcggcgtgttcctgtgcccctggagggccgagggcggccagtgcccctcgctgctctttgacctccgtgagtcccaggcaaggagagcaaggttggggtcagagggacgtggactgccgggcttcagcgccccaccccttcttgtgccttccaggtgatgagacccgaaatgtaggctcccaaactttacaaaccttcaaggcccgccaaggactgggggcgtcggtcgtcagctggagcgacgtcattgtggtgggccccgcggtacagggcacagggaacaatcgggggcagggacacctggggccaggaggagcccaagtctcgcgcccgtccccactcctgtggcctttctccaggcctgcgccccctggcagcactggaacgtcctagaaaagactgaggaggctgagaagacgcccgtaggtagctgctttttggctcagccagagagcggccgccgcgccgagtactccccctgtcgcgggaacaccctgagccgcatttacgtggaaaatgattttagctgggacaagcgttactgtgaagcgggcttcagctccgtggtcactcaggccggagagctggtgcttggggctcctggcggctattatttcttaggtctcctggcccaggctccagttgcggatattttctcgagttaccgcccaggcatccttttgtggcacgtgtcctcccagagcctctcctttgactccagcaacccagagtacttcgacggctactgggggtactcggtggccgtgggcgagttcgacggggatctcaacactacagaatatgtcgtcggtgcccccacttggagctggaccctgggagcggtggaaattttggattcctactaccagaggctgcatcggctgcgcgcagagcagatggcgtcgtattttgggcattcagtggctgtcactgacgtcaacggggatgggaggcatgatctgctggtgggcgctccactgtatatggagagccgggcagaccgaaaactggccgaagtggggcgtgtgtatttgttcctgcagccgcgaggcccccacgcgctgggtgcccccagcctcctgctgactggcacacagctctatgggcgattcggctctgccatcgcacccctgggcgacctcgaccgggatggctacaatgacattgcagtggctgccccctacgggggtcccagtggccggggccaagtgctggtgttcctgggtcagagtgaggggctgaggtcacgtccctcccaggtcctggacagccccttccccacaggctctgcctttggcttctcccttcgaggtgccgtagacatcgatgacaacggatacccagacctgatcgtgggagcttacggggccaaccaggtggctgtgtacagagctcagccagtggtgaaggcctctgtccagctactggtgcaagattcactgaatcctgctgtgaagagctgtgtcctacctcagaccaagacacccgtgagctgcttcaacatccagatgtgtgttggagccactgggcacaacattcctcagaagctatccctaaatgccgagctgcagctggaccggcagaagccccgccagggccggcgggtgctgctgctgggctctcaacaggcaggcaccaccctgaacctggatctgggcggaaagcacagccccatctgccacaccaccatggccttccttcgagatgaggcagacttccgggacaagctgagccccattgtgctcagcctcaatgtgtccctaccgcccacggaggctggaatggcccctgctgtcgtgctgcatggagacacccatgtgcaggagcagacacgaatcgtcctggactgtggggaagatgacgtatgtgtgccccagcttcagctcactgccagcgtgacgggctccccgctcctagttggggcagataatgtcctggagctgcagatggacgcagccaacgagggcgagggggcctatgaagcagagctggccgtgcacctgccccagggcgcccactacatgcgggccctaagcaatgtcgagggctttgagagactcatctgtaatcagaagaaggagaatgagaccagggtggtgctgtgtgagctgggcaaccccatgaagaagaacgcccagataggaatcgcgatgttggtgagcgtggggaatctggaagaggctggggagtctgtgtccttccagctgcagatacggagcaagaacagccagaatccaaacagcaagattgtgctgctggacgtgccggtccgggcagaggcccaagtggagctgcgagggaactcctttccagcctccctggtggtggcagcagaagaaggtgagagggagcagaacagcttggacagctggggacccaaagtggagcacacctatgagctccacaacaatggccctgggactgtgaatggtcttcacctcagcatccaccttccgggacagtcccagccctccgacctgctctacatcctggatatacagccccaggggggccttcagtgcttcccacagcctcctgtcaaccctctcaaggtggactgggggctgcccatccccagcccctcccccattcacccggcccatcacaagcgggatcgcagacagatcttcctgccagagcccgagcagccctcgaggcttcaggatccagttctcgtaagctgcgactcggcgccctgtactgtggtgcagtgtgacctgcaggagatggcgcgcgggcagcgggccatggtcacggtgctggccttcctgtggctgcccagcctctaccagaggcctctggatcagtttgtgctgcagtcgcacgcatggttcaacgtgtcctccctcccctatgcggtgcccccgctcagcctgccccgaggggaagctcaggtcggcttcttcaagcggaaccggccacccctggaagaagatgatgaagagggggagtgatggtgcagcctacactattctagcaggagggttgggcgtgctacctgcaccgccccttctccaacaagttgcctccaagctttgggttggagctgttccattgggtcctcttggtgtcgtttccctcccaacagagctgggctaccccccctcctgctgcctaataaagagactgagccctgat

SEQ ID NO: 450070 - DNA, 313 bp, Homo sapiens
ctctaatgttttgtgttttttatttccaaaatgaaaatgcctaaaaagtagtagtgctacagcaatacacacactagcatgtgacagtcccttgagaccccaccccaagaaacccccccctccctaccttggcacacaaatctttccagaccttccaagggagcttaaatatatatatatgatgctctgtaatttctttcttggaactgccttcctgaagggctttgagagactcatctgtaatcagaagaaggagaatgagaccagggtggtgctgtgtgagctgggcaaccccatgaagaagaacgcccag

SEQ ID NO: 450071 - DNA, 3628 bp, Homo sapiens
tgctctgcccgttgctcagcaagttacttggggttccagtttgataagaaaagacttcctgtggaggaatctgaagggaaggaggaggagctggcccattcctgcctgggaggttgtggaagaaggaagatggccagagctttgtgtccactgcaagccctctggcttctggagtgggtgctgctgctcttgggaccttgtgctgcccctccagcctgggccttgaacctggacccagtgcagctcaccttctatgcaggccccaatggcagccagtttggattttcactggacttccacaaggacagccatgggagagtggccatcgtggtgggcgccccgcggaccctgggccccagccaggaggagacgggcggcgtgttcctgtgcccctggagggccgagggcggccagtgcccctcgctgctctttgacctccgtgagtcccaggcaaggagagcaaggttggggtcagagggacgtggactgccgggcttcagcgccccaccccttcttgtgccttccaggtgatgagacccgaaatgtaggctcccaaactttacaaaccttcaaggcccgccaaggactgggggcgtcggtcgtcagctggagcgacgtcattgtggtgggccccgcggtacagggcacagggaacaatcgggggcagggacacctggggccaggaggagcccaagtctcgcgcccgtccccactcctgtggcctttctccaggcctgcgccccctggcagcactggaacgtcctagaaaagactgaggaggctgagaagacgcccgtaggtagctgctttttggctcagccagagagcggccgccgcgccgagtactccccctgtcgcgggaacaccctgagccgcatttacgtggaaaatgattttagctgggacaagcgttactgtgaagcgggcttcagctccgtggtcactcaggccggagagctggtgcttggggctcctggcggctattatttcttaggtctcctggcccaggctccagttgcggatattttctcgagttaccgcccaggcatccttttgtggcacgtgtcctcccagagcctctcctttgactccagcaacccagagtacttcgacggctactgggggtactcggtggccgtgggcgagttcgacggggatctcaacactacagaatatgtcgtcggtgcccccacttggagctggaccctgggagcggtggaaattttggattcctactaccagaggctgcatcggctgcgcgcagagcagatggcgtcgtattttgggcattcagtggctgtcactgacgtcaacggggatgggaggcatgatctgctggtgggcgctccactgtatatggagagccgggcagaccgaaaactggccgaagtggggcgtgtgtatttgttcctgcagccgcgaggcccccacgcgctgggtgcccccagcctcctgctgactggcacacagctctatgggcgattcggctctgccatcgcacccctgggcgacctcgaccgggatggctacaatgacattgcagtggctgccccctacgggggtcccagtggccggggccaagtgctggtgttcctgggtcagagtgaggggctgaggtcacgtccctcccaggtcctggacagccccttccccacaggctctgcctttggcttctcccttcgaggtgccgtagacatcgatgacaacggatacccagacctgatcgtgggagcttacggggccaaccaggtggctgtgtacagagctcagccagtggtgaaggcctctgtccagctactggtgcaagattcactgaatcctgctgtgaagagctgtgtcctacctcagaccaagacacccgtgagctgcttcaacatccagatgtgtgttggagccactgggcacaacattcctcagaagctatccctaaatgccgagctgcagctggaccggcagaagccccgccagggccggcgggtgctgctgctgggctctcaacaggcaggcaccaccctgaacctggatctgggcggaaagcacagccccatctgccacaccaccatggccttccttcgagatgaggcagacttccgggacaagctgagccccattgtgctcagcctcaatgtgtccctaccgcccacggaggctggaatggcccctgctgtcgtgctgcatggagacacccatgtgcaggagcagacacgaatcgtcctggactgtggggaagatgacgtatgtgtgccccagcttcagctcactgccagcgtgacgggctccccgctcctagttggggcagataatgtcctggagctgcagatggacgcagccaacgagggcgagggggcctatgaagcagagctggccgtgcacctgccccagggcgcccactacatgcgggccctaagcaatgtcgagggctttgagagactcatctgtaatcagaagaaggagaatgagaccagggtggtgctgtgtgagctgggcaaccccatgaagaagaacgcccagataggaatcgcgatgttggtgagcgtggggaatctggaagaggctggggagtctgtgtccttccagctgcagatacggagcaagaacagccagaatccaaacagcaagattgtgctgctggacgtgccggtccgggcagaggcccaagtggagctgcgagggaactcctttccagcctccctggtggtggcagcagaagaaggtgagagggagcagaacagcttggacagctggggacccaaagtggagcacacctatgagctccacaacaatggccctgggactgtgaatggtcttcacctcagcatccaccttccgggacagtcccagccctccgacctgctctacatcctggatatacagccccaggggggccttcagtgcttcccacagcctcctgtcaaccctctcaaggtggactgggggctgcccatccccagcccctcccccattcacccggcccatcacaagcgggatcgcagacagatcttcctgccagagcccgagcagccctcgaggcttcaggatccagttctcgtaagctgcgactcggcgccctgtactgtggtgcagtgtgacctgcaggagatggcgcgcgggcagcgggccatggtcacggtgctggccttcctgtggctgcccagcctctaccagaggcctctggatcagtttgtgctgcagtcgcacgcatggttcaacgtgtcctccctcccctatgcggtgcccccgctcagcctgccccgaggggaagctcaggtgtggacacagctgctccgggccttggaggagagggccattccaatctggtgggtgctggtgggtgtgctgggtggcctgctgctgctcaccatcctggtcctggccatgtggaaggtcggcttcttcaagcggaaccggccacccctggaagaagatgatgaagagggggagtgatggtgcagcctacactattctagcaggagggttgggcgtgctacctgcaccgccccttctccaacaagttgcctccaagctttgggttggagctgttccattgggtcctcttggtgtcgtttccctcccaacagagctgggctaccccccctcctgctgcctaataaagagactgagccctgat

SEQ ID NO: 450072 - DNA, 3294 bp, Homo sapiens
tgctctgcccgttgctcagcaagttacttggggttccagtttgataagaaaagacttcctgtggaggaatctgaagggaaggaggaggagctggcccattcctgcctgggaggttgtggaagaaggaagatggccagagctttgtgtccactgcaagccctctggcttctggagtgggtgctgctgctcttgggaccttgtgctgcccctccagcctgggccttgaacctggacccagtgcagctcaccttctatgcaggccccaatggcagccagtttggattttcactggacttccacaaggacagccatgggagagtggccatcgtggtgggcgccccgcggaccctgggccccagccaggaggagacgggcggcgtgttcctgtgcccctggagggccgagggcggccagtgcccctcgctgctctttgacctccgtgagtcccaggcaaggagagcaaggttggggtcagagggacgtggactgccgggcttcagcgccccaccccttcttgtgccttccaggtgatgagacccgaaatgtaggctcccaaactttacaaaccttcaaggcccgccaaggactgggggcgtcggtcgtcagctggagcgacgtcattgtggtgggccccgcggtacagggcacagggaacaatcgggggcagggacacctggggccaggaggagcccaagtctcgcgcccgtccccactcctgtggcctttctccaggcctgcgccccctggcagcactggaacgtcctagaaaagactgaggaggctgagaagacgcccgtaggtagctgctttttggctcagccagagagcggccgccgcgccgagtactccccctgtcgcgggaacaccctgagccgcatttacgtggaaaatgattttagctgggacaagcgttactgtgaagcgggcttcagctccgtggtcactcaggccggagagctggtgcttggggctcctggcggctattatttcttaggtctcctggcccaggctccagttgcggatattttctcgagttaccgcccaggcatccttttgtggcacgtgtcctcccagagcctctcctttgactccagcaacccagagtacttcgacggctactgggggtactcggtggccgtgggcgagttcgacggggatctcaacactacagaatatgtcgtcggtgcccccacttggagctggaccctgggagcggtggaaattttggattcctactaccagaggctgcatcggctgcgcgcagagcagatggcgtcgtattttgggcattcagtggctgtcactgacgtcaacggggatgggaggcatgatctgctggtgggcgctccactgtatatggagagccgggcagaccgaaaactggccgaagtggggcgtgtgtatttgttcctgcagccgcgaggcccccacgcgctgggtgcccccagcctcctgctgactggcacacagctctatgggcgattcggctctgccatcgcacccctgggcgacctcgaccgggatggctacaatgacattgcagtggctgccccctacgggggtcccagtggccggggccaagtgctggtgttcctgggtcagagtgaggggctgaggtcacgtccctcccaggtcctggacagccccttccccacaggctctgcctttggcttctcccttcgaggtgccgtagacatcgatgacaacggatacccagacctgatcgtgggagcttacggggccaaccaggtggctgtgtacagagctcagccagtggtgaaggcctctgtccagctactggtgcaagattcactgaatcctgctgtgaagagctgtgtcctacctcagaccaagacacccgtgagctgcttcaacatccagatgtgtgttggagccactgggcacaacattcctcagaagctatccctaaatgccgagctgcagctggaccggcagaagccccgccagggccggcgggtgctgctgctgggctctcaacaggcaggcaccaccctgaacctggatctgggcggaaagcacagccccatctgccacaccaccatggccttccttcgagatgaggcagacttccgggacaagctgagccccattgtgctcagcctcaatgtgtccctaccgcccacggaggctggaatggcccctgctgtcgtgctgcatggagacacccatgtgcaggagcagacacgaatcgtcctggactgtggggaagatgacgtatgtgtgccccagcttcagctcactgccagcgtgacgggctccccgctcctagttggggcagataatgtcctggagctgcagatggacgcagccaacgagggcgagggggcctatgaagcagagctggccgtgcacctgccccagggcgcccactacatgcgggccctaagcaatgtcgagggctttgagagactcatctgtaatcagaagaaggagaatgagaccagggtggtgctgtgtgagctgggcaaccccatgaagaagaacgcccagataggaatcgcgatgttggtgagcgtggggaatctggaagaggctggggagtctgtgtccttccagctgcagatacggagcaagaacagccagaatccaaacagcaagattgtgctgctggacgtgccggtccgggcagaggcccaagtggagctgcgagggaactcctttccagcctccctggtggtggcagcagaagaaggtgagagggagcagaacagcttggacagctggggacccaaagtggagcacacctatgagctccacaacaatggccctgggactgtgaatggtcttcacctcagcatccaccttccgggacagtcccagccctccgacctgctctacatcctggatatacagccccaggggggccttcagtgcttcccacagcctcctgtcaaccctctcaaggtggactgggggctgcccatccccagcccctcccccattcacccggcccatcacaagcgggatcgcagacagatcttcctgccagagcccgagcagccctcgaggcttcaggatccagttctcgtagtgagcaggctctctggtctctggcccggcctccccgggacccacggggcagaggggatgggaggagggagaggggtccgggtgtgctgtgggcctctgtgggccacgcttggtccctgggagcacttcaagtgaacatggaggagcatgctggcttgtgtctggggtgagctgaaagacacttgcactttttaaaagcttcccagtacgttaaggagcataaaacaatgccaaagcaaggtt

SEQ ID NO: 450073 - DNA, 514 bp, Homo sapiens
ggatacgctggaatctgcgcggcgctcacccagctttcctatgcagagtggccatcgtggtgggcgccccgcggaccctgggccccagccaggaggagacgggcggcgtgttcctgtgcccctggagggccgagggcggccagtgcccctcgctgctctttgacctccgtgagtcccaggcaaggagagcaaggttggggtcagagggacgtggactgccgggcttcagcgccccaccccttcttgtgccttccaggtgatgagacccgaaatgtaggctcccaaactttacaaaccttcaaggcccgccaaggactgggggcgtcggtcgtcagctggagcgacgtcattgtggtgggccccgcggtacagggcacagggaacaatcgggggcagggacacctggggccaggaggagcccaagtctcgcgcccgtccccactcctgtggcctttctccaggcctgcgccccctggcagcactggaacgtcctagaaaagactgaggaggctga

SEQ ID NO: 450074 - DNA, 1337 bp, Homo sapiens
ggaaaagaggtgggatcgtttgtcgcgatgtggagtggccgtaagctgggctcctccgggggttggtttttaagagtgctggggcctggaggctgtaatacaaaagctgcgcgtcccttaatttcctcggcggtttatgtgaagaaccagctcagtgggactctacagattaaaccaggggttttcaatgaatacagaaccatatggttcaaatcctacaggacgatcttttcctgtttgaacagaataaagagtttcaggtacccttgggcgagactgtacagtacttcccaaaccactgtcgacagcggtgaggtaaaaaccttcttggccctggctcacaaatggtgggatgaacaaggagtatatgcacctcttcattccatgaatgacctgagggtgccatttattagggacaatcttctgaaaacaattcctaatcaccagccaggaaaacctttgttggggatgaagattcttgacgttggctgtggtggtgggctgttaactgaacctctagggcggcttggggcttcagttattggaatcgaccctgtggatgagaacattaaaacagcacaatgccataaatcatttgatccagtcctggataagagaatagagtacagagtgtgttccctggaagagattgtggaagagactgcagaaacatttgatgctgttgtagcttctgaagttgtagaacatgtgattgatctagaaacatttttacagtgctgctgtcaagtgttaaaacccggtggttctttattcattactacaatcaacaaaacacaactttcctatgccttgggaattgttttttcagagcaaattgcaggtattgtaccaaaaggtactcatacatgggagaagtttgtttcacctgaaacactagagagcattctggaatcaaatggtctgtcagttcaaacagtggtaggaatgctctataaccccttctcaggttactggcattggagtgaaaataccagccttaactatgcagctcatgctgtgaaatccagggtccaggaacacccagcctctgctgagtttgttttaaagggagaaacagaagagctccaagctaatgcctgcaccaatccagctgtgcatgaaaagctgaagaaatgaattgtttctgagaactatagtaatatggcttggatatctgatgttttcaaatacaagaaatgtacaatttatcctttgagagagaatcatgaagaaaagaaggtcaataaaaagggctaaaaccttggacaaaagtttttgttatttcgtctaatagctactttcaagggattctgtgaataaaaagttttgtcaagata

SEQ ID NO: 450075 - DNA, 1460 bp, Homo sapiens
ggaaaagaggtgggatcgtttgtcgcgatgtggagtggccgtaagctgggctcctccgggggttggtttttaagagtgctggggcctggaggctgtaatacaaaagctgcgcgtcccttaatttcctcggcggtttatgtgaagaaccagctcagtgggactctacagattaaaccaggggttttcaatgaatacagaaccatatggttcaaatcctacaggacgatcttttcctgtttgaacagaataaagagtttcaggtggagtttcacttctgttgcccaggctggagtacaatggtgcgatcttggctcactgcaacctccacctcccgggttcaagcgattctcctgcctgagcctcctgagtcattgggattacaggtacccttgggcgagactgtacagtacttcccaaaccactgtcgacagcggtgaggtaaaaaccttcttggccctggctcacaaatggtgggatgaacaaggagtatatgcacctcttcattccatgaatgacctgagggtgccatttattagggacaatcttctgaaaacaattcctaatcaccagccaggaaaacctttgttggggatgaagattcttgacgttggctgtggtggtgggctgttaactgaacctctagggcggcttggggcttcagttattggaatcgaccctgtggatgagaacattaaaacagcacaatgccataaatcatttgatccagtcctggataagagaatagagtacagagtgtgttccctggaagagattgtggaagagactgcagaaacatttgatgctgttgtagcttctgaagttgtagaacatgtgattgatctagaaacatttttacagtgctgctgtcaagtgttaaaacccggtggttctttattcattactacaatcaacaaaacacaactttcctatgccttgggaattgttttttcagagcaaattgcaggtattgtaccaaaaggtactcatacatgggagaagtttgtttcacctgaaacactagagagcattctggaatcaaatggtctgtcagttcaaacagtggtaggaatgctctataaccccttctcaggttactggcattggagtgaaaataccagccttaactatgcagctcatgctgtgaaatccagggtccaggaacacccagcctctgctgagtttgttttaaagggagaaacagaagagctccaagctaatgcctgcaccaatccagctgtgcatgaaaagctgaagaaatgaattgtttctgagaactatagtaatatggcttggatatctgatgttttcaaatacaagaaatgtacaatttatcctttgagagagaatcatgaagaaaagaaggtcaataaaaagggctaaaaccttggacaaaagtttttgttatttcgtctaatagctactttcaagggattctgtgaataaaaagttttgtcaagata

SEQ ID NO: 450076 - DNA, 651 bp, Homo sapiens
  misc_feature (23)..(23): n is a, c, g, or t
tgttttatttgttttttaatttntttcccatctttggtcgtatatatcttttttattttattagtgatttcccggtggttctttattcattactacaatcaacaaaacacaactttcctatgccttgggaattgttttttcagagcaaattgcaggtattgtaccaaaaggtactcatacatgggagaagtttgtttcacctgaaacactagagagcattctggaatcaaatggtctgtcagttcaaacagtggtaggaatgctctataaccccttctcaggttactggcattggagtgaaaataccagccttaactatgcagctcatgctgtgaaatccagggtccaggaacacccagcctctgctgagtttgttttaaagggagaaacagaagagctccaagctaatgcctgcaccaatccagctgtgcatgaaaagctgaagaaatgaattgtttctgagaactatagtaatatggcttggatatctgatgttttcaaatacaagaaatgtacaatttatcctttgagagagaatcatgaagaaaagaaggtcaataaaaagggctaaaaccttggacaaaagtttttgttatttcgtctaatagctactttcaagggattctgtgaataaaaagttttgtcaagata

SEQ ID NO: 450077 - DNA, 657 bp, Homo sapiens
  misc_feature (10)..(10): n is a, c, g, or t
  misc_feature (21)..(21): n is a, c, g, or t
  misc_feature (27)..(27): n is a, c, g, or t
  misc_feature (63)..(63): n is a, c, g, or t
tttttatggnggcatttcccntttttnctggcccgtttttcccgatacccctccccacataanaattacccactttcccggtggttctttattcattactacaatcaacaaaacacaactttcctatgccttgggaattgttttttcagagcaaattgcaggtattgtaccaaaaggtactcatacatgggagaagtttgtttcacctgaaacactagagagcattctggaatcaaatggtctgtcagttcaaacagtggtaggaatgctctataaccccttctcaggttactggcattggagtgaaaataccagccttaactatgcagctcatgctgtgaaatccagggtccaggaacacccagcctctgctgagtttgttttaaagggagaaacagaagagctccaagctaatgcctgcaccaatccagctgtgcatgaaaagctgaagaaatgaattgtttctgagaactatagtaatatggcttggatatctgatgttttcaaatacaagaaatgtacaatttatcctttgagagagaatcatgaagaaaagaaggtcaataaaaagggctaaaaccttggacaaaagtttttgttatttcgtctaatagctactttcaagggattctgtgaataaaaagttttgtcaagata

SEQ ID NO: 450078 - DNA, 1334 bp, Homo sapiens
ggaaaagaggtgggatcgtttgtcgcgatgtggagtggccgtaagctgggctcctccgggggttggtttttaagagtgctggggcctggaggctgtaatacaaaagctgcgcgtcccttaatttcctcggcggtttatgtgaagaaccagctcagtgggactctacagattaaaccaggggttttcaatgaatacagaaccatatggttcaaatcctacaggacgatcttttcctgtttgaacagaataaagagtttcaggtacccttgggcgagactgtacagtacttcccaaaccactgtcgacagcggtgaggtaaaaaccttcttggccctggctcacaaatggtgggatgaacaaggagtatatgcacctcttcattccatgaatgacctgagggtgccatttattagggacaatcttctgaaaacaattcctaatcaccagccaggaaaacctttgttggggatgaagattcttgacgttggctgtggtggtgggctgttaactgaacctctagggcggcttggggcttcagttattggaatcgaccctgtggatgagaacattaaaacagcacaatgccataaatcatttgatccagtcctggataagagaatagagtacagagtgtgttccctggaagagattgtggaagagactgcagaaacatttgatgctgttgtagcttctgaagttgtagaacatgtgattgatctagaaacatttttacagtgctgctgtcaagtgttaaaacccggtggttctttattcattactacaatcaacaaaacacaactttcctatgccttgggaattgttttttcagagcaaattgcaggtattgtaccaaaaggtactcatacatgggagaagtttgtttcacctgaaacactagagagcattctggaatcaaatggtctgtcagttcaaacagtggtaggaatgctctataaccccttctcaggttactggcattggagtgaaaataccagccttaactatgcagctcatgctgtgaaatccagggtccaggaacacccagcctctgctgagtttgttttaaagggagaaacagaagagctccaagctaatgcctgcaccaatccagctgtgcatgaaaagctgaagaaatgaattgtttctgagaactatagtaatatggcttggatatctgatgttttcaaatacaagaaatgtacaatttatcctttgagagagaatcatgaagaaaagaaggggcccctcagaatgatatttggcctcacgggaggacatagcccctggaggtgctgttgctatagttgcaagcaggaggataatgccggaattcc

SEQ ID NO: 450079 - DNA, 1210 bp, Homo sapiens
ggaaaagaggtgggatcgtttgtcgcgatgtggagtggccgtaagctgggctcctccgggggttggtttttaagagtgctggggcctggaggctgtaatacaaaagctgcgcgtcccttaatttcctcggcgggtacccttgggcgagactgtacagtacttcccaaaccactgtcgacagcggtgaggtaaaaaccttcttggccctggctcacaaatggtgggatgaacaaggagtatatgcacctcttcattccatgaatgacctgagggtgccatttattagggacaatcttctgaaaacaattcctaatcaccagccaggaaaacctttgttggggatgaagattcttgacgttggctgtggtggtgggctgttaactgaacctctagggcggcttggggcttcagttattggaatcgaccctgtggatgagaacattaaaacagcacaatgccataaatcatttgatccagtcctggataagagaatagagtacagagtgtgttccctggaagagattgtggaagagactgcagaaacatttgatgctgttgtagcttctgaagttgtagaacatgtgattgatctagaaacatttttacagtgctgctgtcaagtgttaaaacccggtggttctttattcattactacaatcaacaaaacacaactttcctatgccttgggaattgttttttcagagcaaattgcaggtattgtaccaaaaggtactcatacatgggagaagtttgtttcacctgaaacactagagagcattctggaatcaaatggtctgtcagttcaaacagtggtaggaatgctctataaccccttctcaggttactggcattggagtgaaaataccagccttaactatgcagctcatgctgtgaaatccagggtccaggaacacccagcctctgctgagtttgttttaaagggagaaacagaagagctccaagctaatgcctgcaccaatccagctgtgcatgaaaagctgaagaaatgaattgtttctgagaactatagtaatatggcttggatatctgatgttttcaaatacaagaaatgtacaatttatcctttgagagagaatcatgaagaaaagaaggtcaataaaaagggctaaaaccttggacaaaagtttttgttatttcgtctaatagctactttcaagggattctgtgaataaaaagttttgtcaagata

SEQ ID NO: 450080 - DNA, 1324 bp, Homo sapiens
tggctgctgggtgccgcacgccttcccatcctcctcctctcccctcccccatccctccccgccccctcggccgctccgctccctggcgtgactcggcactgagagtcccgggagaagactcggcggtcgccacctcttctgtccaggcctcggccttcctgagcatctctccttcctctcccagatcgtcttctccttcagtttcaaagccagtggcgtcgcggccaccctgccgggctctctgtgaggatggtgggggtgaagcccgtcgggagcgacccggatttccagccagagctgagcggcgcgggctccagactcgccgtggtcaagttcaccatgagagggtgtgggccatgtttgaggattgccccagcattcagttctatgagtaataaatatccacaggctgttttcttggaagtcgatgtacatcagtgtcagggaacagctgccaccaacaatatatcagcaacacctacatttttgttttttcgaaacaaagtgagaattgatcaatatcaaggagcagatgctgtgggattagaagaaaaaatcaagcagcacttagaaaatgaccctggaagcaatgaggacacagatattccaaaaggctatatggatttaatgccttttattaacaaagctggttgtgaatgtcttaatgaaagtgatgagcatggatttgacaactgtttacgaaaagacacaaccttcttggaatctgactgtgatgaacagctgcttattactgtggcattcaatcaacctgttaagctttattccatgaaatttcaagggccagataatggtcagggccctaaatatgtaaaaatttttatcaacctaccccgatctatggattttgaagaggcagaaagaagtgaaccaactcaagctctggaactgacagaggatgatattaaagaagatggcattgttccacttcgttatgttaagtttcagaatgttaacagtgtaactatatttgttcagtcgaatcaaggtgaagaggaaacaacaagaatttcatattttacttttattggtactccagtccaggcaacaaatatgaatgacttcaaacgagtagttggcaaaaaaggagaaagccactaaggtacaaaagacactggacaaccatattgcaatcagatctacagctcctggataattgcttgattctcgccagagactgtcaatgtttcattcattgccattaccaataaatcattgcttttgttcagatggtatcactagtgtttccattgtaatcttgacacatgcaattgtaaataaaagtcaccacttttgccaagcttaa

SEQ ID NO: 450081 - DNA, 1502 bp, Homo sapiens
tacaatgatcaataatgctctcagtgtttatcagcacaaaatttacttgtgatagagataatgccagttccccttctagtggctcttaaaacctgaatttcttactcttatccacattcttttatatgaaactgcctttttatcatcttgctaccttgtgagctttctaacatggtgtctttggaccaaaggggagttcttttaaggtactagaagtgagttttcttagggtgggaaaaacatttctaggattgtgtgattgggatttcagtggaaagctttcaggtctctcatgaatgatgttgtcccagctatgttatattttagaccagacatgtactgatgacctttatgagttttgctggtatagatactgccatttagaatagaatcaatgtaaaatacgaaaattaaatatataaatgtacacagaaatctttctacacaaacatacattcagtattttgcaagtaggtttctttcaaggcatttttgccctaagaatacattatctaatgataaactgtaagttgtcagtacatttctcaattagaacatagttttcaaactctcctgcagagaatttgttttctagatttgttggtagagaacaaatttttattcttcacatttttatgctgccacatatatagcaaccagaatgttttttataatcctccagtagaggatttttctaatcattgacagaaacaaggtttattcatttcatttttaatagtactcttaaagtaaccaggatctttttcttaaaccagaaaaaattagtcacttttaatctgttttcattgcatgtcagtgtattgagggggaaagtctggaaatttgctatattgggcatgaaggacatgagtttaacatacgcttctaattccagattcttttgtgatcgacatttgatttctaactatctaaaaatagtatgtcaaatatgttttactcatatagcatcatttttttaaattaacttctctaaactttcaaccttgtttttaaaaattgctatttaaaaaaaaaaaaaaaactgtgtgaaaccaaaaatagcctgcatgtgttttatttttaattccttgtggctgggattggaggggaggtcacagtttgcttcaacagtgaaaatacattgcatgccagaaaagatccaaggataaaaattaataccaaggttttaaactgattattagtatttttaataactcatatttaaaatcaataggatgtacatataaacttatttttgtttttctaggtagttggcaaaaaaggagaaagccactaaggtacaaaagacactggacaaccatattgcaatcagatctacagctcctggataattgcttgattctcgccagagactgtcaatgtttcattcattgccattaccaataaatcattgcttttgttcagatggtatcactagtgtttccattgtaatcttgacacatgcaattgtaaataaaagtcaccacttttgccaagcttaa

SEQ ID NO: 450082 - DNA, 1424 bp, Homo sapiens
tacaatgatcaataatgctctcagtgtttatcagcacaaaatttacttgtgatagagataatgccagttccccttctagtggctcttaaaacctgaatttcttactcttatccacattcttttatatgaaactgcctttttatcatcttgctaccttgtgagctttctaacatggtgtctttggaccaaaggggagttcttttaaggtactagaagtgagttttcttagggtgggaaaaacatttctaggattgtgtgattgggatttcagtggaaagctttcaggtctctcatgaatgatgttgtcccagctatgttatattttagaccagacatgtactgatgacctttatgagttttgctggtatagatactgccatttagaatagaatcaatgtaaaatacgaaaattaaatatataaatgtacacagaaatctttctacacaaacatacattcagtattttgcaagtaggtttctttcaaggcatttttgccctaagaatacattatctaatgataaactgtaagttgtcagtacatttctcaattagaacatagttttcaaactctcctgcagagaatttgttttctagatttgttggtagagaacaaatttttattcttcacatttttatgctgccacatatatagcaaccagaatgttttttataatcctccagtagaggatttttctaatcattgacagaaacaaggtttattcatttcatttttaatagtactcttaaagtaaccaggatctttttcttaaaccagaaaaaattagtcacttttaatctgttttcattgcatgtcagtgtattgagggggaaagtctggaaatttgctatattgggcatgaaggacatgagtttaacatacgcttctaattccagattcttttgtgatcgacatttgatttctaactatctaaaaatagtatgtcaaatatgttttactcatatagcatcatttttttaaattaacttctctaaactttcaaccttgtttttaaaaattgctatttaaaaaaaaaaaaaaaactgtgtgaaaccaaaaatagcctgcatgtgttttatttttaattccttgtggctgggattggaggggaggtcacagtttgcttcaacagtgaaaatacattgcatgccagaaaagatccaaggataaaaattaataccaaggttttaaactgattattagtatttttaataactcatatttaaaatcaataggatgtacatataaacttatttttgtttttctaggtagttggcaaaaaaggagaaagccactaaggtacaaaagacactggacaaccatattgcaatcagatctacagctcctggataattgcttgattctcgccagagactgtcaatgtttcattcattgccattaccaataaatcattgcttttgttca

SEQ ID NO: 450083 - DNA, 788 bp, Homo sapiens
tggctgctgggtgccgcacgccttcccatcctcctcctctcccctcccccatccctccccgccccctcggccgctccgctccctggcgtgactcggcactgagagtcccgggagaagactcggcggtcgccacctcttctgtccaggcctcggccttcctgagcatctctccttcctctcccagatcgtcttctccttcagtttcaaagccagtggcgtcgcggccaccctgccgggctctctgtgaggatggtgggggtgaagcccgtcgggagcgacccggatttccagccagagctgagcggcgcgggctccagactcgccgtggtcaagttcaccatgagagggtgtgggccatgtttgaggattgccccagcattcagttctatgagtaataaatatccacaggctgttttcttggaagtcgatgtacatcagtgtcagggaacagctgccaccaacaatatatcagcaacacctacatttttgttttttcgaaacaaagtgagaattgatcaatatcaaggagcagatgctgtgggattagaagaaaaaatcaagcagcacttagaaaatgaccctggaagcaatgaggacacagatattccaaaaggctatatggatttaatgccttttattaacaaagctggttgtgaatgtcttaatgaaagtgatgagcatggatttgacaactgtttacgctgcttattactgtggcattcaatcaacctgttaagctttattccatgaaatttcaagggccagataatggtgagtaaaggatagct

SEQ ID NO: 450084 - DNA, 2129 bp, Homo sapiens
tacaatgatcaataatgctctcagtgtttatcagcacaaaatttacttgtgatagagataatgccagttccccttctagtggctcttaaaacctgaatttcttactcttatccacattcttttatatgaaactgcctttttatcatcttgctaccttgtgagctttctaacatggtgtctttggaccaaaggggagttcttttaaggtactagaagtgagttttcttagggtgggaaaaacatttctaggattgtgtgattgggatttcagtggaaagctttcaggtctctcatgaatgatgttgtcccagctatgttatattttagaccagacatgtactgatgacctttatgagttttgctggtatagatactgccatttagaatagaatcaatgtaaaatacgaaaattaaatatataaatgtacacagaaatctttctacacaaacatacattcagtattttgcaagtaggtttctttcaaggcatttttgccctaagaatacattatctaatgataaactgtaagttgtcagtacatttctcaattagaacatagttttcaaactctcctgcagagaatttgttttctagatttgttggtagagaacaaatttttattcttcacatttttatgctgccacatatatagcaaccagaatgttttttataatcctccagtagaggatttttctaatcattgacagaaacaaggtttattcatttcatttttaatagtactcttaaagtaaccaggatctttttcttaaaccagaaaaaattagtcacttttaatctgttttcattgcatgtcagtgtattgagggggaaagtctggaaatttgctatattgggcatgaaggacatgagtttaacatacgcttctaattccagattcttttgtgatcgacatttgatttctaactatctaaaaatagtatgtcaaatatgttttactcatatagcatcatttttttaaattaacttctctaaactttcaaccttgtttttaaaaattgctatttaaaaaaaaaaaaaaaactgtgtgaaaccaaaaatagcctgcatgtgttttatttttaattccttgtggctgggattggaggggaggtcacagtttgcttcaacagtgaaaatacattgcatgccagaaaagatccaaggataaaaattaataccaaggttttaaactgattattagtatttttaataactcatatttaaaatcaataggatgtacatataaacttatttttgtttttctaggtagttggcaaaaaaggagaaagccactaaggtacaaaagacactggacaaccatattgcaatcagatctacagctcctggataattgcttgattctcgccagagactgtcaatgtttcattcattgccattaccaataaatcattgcttttgttcagatggtatcactagtgtttccattgtaatcttgacacatgcaattgtaaataaaagtcaccacttttgccaagcttaaaaaacacacagaaaaacaccttacactcacacacatacaccttcatacacacactttttacccccgcccctcctcccccctactaccaaagactattacataaaccacatatctctataataaaaacaactagatcaccacaaaacagtgtataacagagtaccaacagagagagcagtatacacgaggacatcacacggagagacaacactaacggagataatcgcgtacaaagcgaatatgcacatttctacacgacaaaaaaaaacaaagccccgggcgagaaaaaaacaaaaaagagagctctatcctgaaaaaaacacactctcgcaagcttgggcaggcatatctcggggcccacatcacgaagtggaacacatcaataccgaacaccgggaggctaccccaagaggagaaagcatccacgcaaaataatcatagagaataaaaagaagccccacgagagcagacaagtgtgaagcaaacaatcagaagcacaaggatcaacgcaggcgacaggcgacgcacgcatcagagcgagcagggagcaacgaaaggcgcagcaaccagaacgagagaaaaggcgcaggagtgaagagcaacaagggcggagaagcgcaggggagc

SEQ ID NO: 450085 - DNA, 1145 bp, Homo sapiens
ggattttttgtgttgcagcatgaaaagcttgccattgccatcttaattggaagtagatgtttttgctaaaatatgctctttatatggattgctttattttaatacagaatttttaattacaattttataaaaatacaaaaatgagaaaattataggggcttctgcttcttaggaaatgaggtgcatgtgaaaagatttttatcactataataaaaatagacttttctaaactggccattcaccgtatcagctatttttgtaacatttctgtctgtttatttttcagcttttttaatccaactcaaatgaactaaaaacagaagatattttaaaatgaagtaatataaagattgaccttgtctcactctactcccctccttgcttctctgctcatctagcacctgtctgctctcacccttcccatgttctcgccattgttggtgcaagatttctacagcttctatcatctggatcagccttgttacctaggtttcctcaatcatctctttcttcagatctcatcctagttgtgtttcttaattggccttttattttgttttggcttttgttttgggcttgcaactaggtgctttaattttttaccataccgtgttgctcactagcctttttttttttttactttctactgtttcatatttaattttgtattacattttgaggcataacatcacaataaaattaaattgttataaaatgttttagatttaactagttgaatagttttaatccattctaaactttaaattttatttcctaggaactatagaattcttttggaaaacaaatatagcagttgcatcaagttcttttatgtttgtgctagtttaatatattgattacatttcagttgaggggtgttggttttcttttcctcgttggaatgttagccccaaagtccttttgatgattgattggggcatgtcctctgcttttgcccaagtgagctcaaaaccagttgaaggacttatggactgaatattaggttgggttaacatattaatatagaagatcaatggactctttactgaataaatattttttacacctaatttttatgtacctaaattttggtttgtctgaggtgtaatataaagacttaagaatgaataaaagagctttacgtt

SEQ ID NO: 450086 - DNA, 1246 bp, Homo sapiens
tggctgctgggtgccgcacgccttcccatcctcctcctctcccctcccccatccctccccgccccctcggccgctccgctccctggcgtgactcggcactgagagtcccgggagaagactcggcggtcgccacctcttctgtccaggcctcggccttcctgagcatctctccttcctctcccagatcgtcttctccttcagtttcaaagccagtggcgtcgcggccaccctgccgggctctctgtgaggatggtgggggtgaagcccgtcgggagcgacccggatttccagccagagctgagcggcgcgggctccagactcgccgtggtcaagttcaccatgagagggtgtgggccatgtttgaggattgccccagcattcagttctatgagtaataaatatccacaggctgttttcttggaagtcgatgtacatcagtgtcagggaacagctgccaccaacaatatatcagcaacacctacatttttgttttttcgaaacaaagtgagaattgatcaatatcaaggagcagatgctgtgggattagaagaaaaaatcaagcagcacttagaaaatgaccctggaagcaatgaggacacagatattccaaaaggctatatggatttaatgccttttattaacaaagctggttgtgaatgtcttaatgaaagtgatgagcatggatttgacaactgtttacgaaaagacacaaccttcttggaatctgactgtgatgaacagctgcttattactgtggcattcaatcaacctgttaagctttattccatgaaatttcaagggccagataatggtcagggccctaaatatgtaaaaatttttatcaacctaccccgatctatggattttgaagaggcagaaagaagtgaaccaactcaagctctggaactgacagaggatgatattaaagaagatggcattgttccacttcgttatgttaagtttcagaatgttaacagtgtaactatatttgttcagtcgaatcaaggtgaagaggaaacaacaagaatttcatattttacttttattggtactccagtccaggcaacaaatatgaatgacttcaaacgagtagttggcaaaaaaggagaaagccactaaggtacaaaagacactggacaaccatattgcaatcagatctacagctcctggataattgcttgattctcgccagagactgtcaatgtttcattcattgccattaccaataaatcattgcttttgttca

SEQ ID NO: 450087 - DNA, 1633 bp, Homo sapiens
tggctgctgggtgccgcacgccttcccatcctcctcctctcccctcccccatccctccccgccccctcggccgctccgctccctggcgtgactcggcactgagagtcccgggagaagactcggcggtcgccacctcttctgtccaggcctcggccttcctgagcatctctccttcctctcccagatcgtcttctccttcagtttcaaagccagtggcgtcgcggccaccctgccgggctctctgtgaggatggtgggggtgaagcccgtcgggagcgacccggatttccagccagagctgagcggcgcgggctccagactcgccgtggtcaagttcaccatgagagggtgtgggccatgtttgaggattgccccagcattcagttctatgagtaataaatatccacaggctgttttcttggaagtcgatgtacatcagtgtcagggaacagctgccaccaacaatatatcagcaacacctacatttttgttttttcgaaacaaagtgagaattgatcaatatcaaggagcagatgctgtgggattagaagaaaaaatcaagcagcacttagaaaatgaccctggaagcaatgaggacacagatattccaaaaggctatatggatttaatgccttttattaacaaagctggttgtgaatgtcttaatgaaagtgatgagcatggatttgacaactgtttacgaaaagacacaaccttcttggaatctgactgtgatgaacagctgcttattactgtggcattcaatcaacctgttaagctttattccatgaaatttcaagggccagataatggtcagggccctaaatatgtaaaaatttttatcaacctaccccgatctatggattttgaagaggcagaaagaagtgaaccaactcaagctctggaactgacagaggatgatattaaagaagatggcattgttccacttcgttatgttaagtttcagaatgttaacagtgtaactatatttgttcagtcgaatcaaggtgaagaggaaacaacaagaatttcatattttacttttattggtactccagtccaggcaacaaatatgaatgacttcaaacgagtagttggcaaaaaaggagaaagccactaaggtacaaaagacactggacaaccatattgcaatcagatctacagctcctggataattgcttgattctcgccagagactgtcaatgtttcattcattgccattaccaataaatcattgcttttgttcagatggtatcactagtgtttccattgtaatcttgacacatgcaattgtaaataaaagtcaccacttttgccaagcttaatttttgtctttctaaatcagtattttctctttccatgtatttgaaaactggttaacttctgattttagtagagacttaagtgtctggtagtatattgattgaaagccagtttctttagaaaaggagaaactgttctagggaattaagaagtacatgtgtacacattcatggcaagttattttgataagtgaacctggaacagctaaccatgttaaattattactgcatttttattaaaggacatttgtatatctgagctatggaaattactcaaattataaattagaagaaataaacaggtttaatgag

SEQ ID NO: 450088 - DNA, 1238 bp, Homo sapiens
tggctgctgggtgccgcacgccttcccatcctcctcctctcccctcccccatccctccccgccccctcggccgctccgctccctggcgtgactcggcactgagagtcccgggagaagactcggcggtcgccacctcttctgtccaggcctcggccttcctgagcatctctccttcctctcccagatcgtcttctccttcagtttcaaagccagtggcgtcgcggccaccctgccgggctctctgtgaggatggtgggggtgaagcccgtcgggagcgacccggatttccagccagagctgagcggcgcgggctccagactcgccgtggtcaagttcaccatgagagggtgtgggccatgtttgaggattgccccagcattcagttctatgagtaataaatatccacaggctgttttcttggaagtcgatgtacatcagtgtcagggaacagctgccaccaacaatatatcagcaacacctacatttttgttttttcgaaacaaagtgagaattgatcaatatcaaggagcagatgctgtgggattagaagaaaaaatcaagcagcacttagaaaatgaccctggaagcaatgaggacacagatattccaaaaggctatatggatttaatgccttttattaacaaagctggttgtgaatgtcttaatgaaagtgatgagcatggatttgacaactgtttacgaaaagacacaaccttcttggaatctgactgtgatgaacagctgcttattactgtggcattcaatcaacctgttaagctttattccatgaaatttcaagggccagataatggtcagggccctaaatatgtaaaaatttttatcaacctaccccgatctatggattttgaagaggcagaaagaagtgaaccaactcaagctctggaactgacagaggatgatattaaagaagatggcattgttccacttcgttatgttaagtttcagaatgttaacagtgtaactatatttgttcagtcgaatcaaggtgaagaggaaacaacaagaatttcatattttacttttattggtactccagtccaggcaacaaatatgaatgacttcaaacgagtagttggcaaaaaaggagaaagccactaaggtacaaaagacactggacaaccatattgcaatcagatctacagctcctggataattgcttgattctcgccagagactgtcaatgaatgaaacattgacaggtcgacgcggccgcgaat

SEQ ID NO: 450089 - DNA, 1836 bp, Homo sapiens
tggctgctgggtgccgcacgccttcccatcctcctcctctcccctcccccatccctccccgccccctcggccgctccgctccctggcgtgactcggcactgagagtcccgggagaagactcggcggtcgccacctcttctgtccaggcctcggccttcctgagcatctctccttcctctcccagatcgtcttctccttcagtttcaaagccagtggcgtcgcggccaccctgccgggctctctgtgaggatggtgggggtgaagcccgtcgggagcgacccggatttccagccagagctgagcggcgcgggctccagactcgccgtggtcaagttcaccatgagagggtgtgggccatgtttgaggattgccccagcattcagttctatgagtaataaatatccacaggctgttttcttggaagtcgatgtacatcagtgtcagggaacagctgccaccaacaatatatcagcaacacctacatttttgttttttcgaaacaaagtgagaattgatcaatatcaaggagcagatgctgtgggattagaagaaaaaatcaagcagcacttagaaaatgaccctggaagcaatgaggacacagatattccaaaaggctatatggatttaatgccttttattaacaaagctggttgtgaatgtcttaatgaaagtgatgagcatggatttgacaactgtttacgaaaagacacaaccttcttggaatctgactgtgatgaacagctgcttattactgtggcattcaatcaacctgttaagctttattccatgaaatttcaagggccagataatggtcagggccctaaatatgtaaaaatttttatcaacctaccccgatctatggattttgaagaggcagaaagaagtgaaccaactcaagctctggaactgacagaggatgatattaaagaagatggcattgttccacttcgttatgttaagtttcagaatgttaacagtgtaactatatttgttcagtcgaatcaaggtgaagaggaaacaacaagaatttcatattttacttttattggtactccagtccaggcaacaaatatgaatgacttcaaacgacacctgtctgctctcacccttcccatgttctcgccattgttggtgcaagatttctacagcttctatcatctggatcagccttgttacctaggtttcctcaatcatctctttcttcagatctcatcctagttgtgtttcttaattggccttttattttgttttggcttttgttttgggcttgcaactaggtgctttaattttttaccataccgtgttgctcactagcctttttttttttttactttctactgtttcatatttaattttgtattacattttgaggcataacatcacaataaaattaaattgttataaaatgttttagatttaactagttgaatagttttaatccattctaaactttaaattttatttcctaggaactatagaattcttttggaaaacaaatatagcagttgcatcaagttcttttatgtttgtgctagtttaatatattgattacatttcagttgaggggtgttggttttcttttcctcgttggaatgttagccccaaagtccttttgatgattgattggggcatgtcctctgcttttgcccaagtgagctcaaaaccagttgaaggacttatggactgaatattaggttgggttaacatattaatatagaagatcaatggactctttactgaataaatattttttacacctaatttttatgtacctaaattttggtttgtctgaggtgtaatataaagacttaagaatgaataaaagagctttacgtt

SEQ ID NO: 450090 - DNA, 1128 bp, Homo sapiens
tggctgctgggtgccgcacgccttcccatcctcctcctctcccctcccccatccctccccgccccctcggccgctccgctccctggcgtgactcggcactgagagtcccgggagaagactcggcggtcgccacctcttctgtccaggcctcggccttcctgagcatctctccttcctctcccagatcgtcttctccttcagtttcaaagccagtggcgtcgcggccaccctgccgggctctctgtgaggatggtgggggtgaagcccgtcgggagcgacccggatttccagccagagctgagcggcgcgggctccagactcgccgtggtcaagttcaccatgagagggtgtgggccatgtttgaggattgccccagcattcagttctatgagtaataaatatccacaggctgttttcttggaagtcgatgtacatcagtgtcagggaacagctgccaccaacaatatatcagcaacacctacatttttgttttttcgaaacaaagtgagaattgatcaatatcaaggagcagatgctgtgggattagaagaaaaaatcaagcagcacttagaaaatgaccctggaagcaatgaggacacagatattccaaaaggctatatggatttaatgccttttattaacaaagctggttgtgaatgtcttaatgaaagtgatgagcatggatttgacaactgtttacgaaaagacacaaccttcttggaatctgactgtgatgaacagctgcttattactgtggcattcaatcaacctgttaagctttattccatgaaatttcaagggccagataatggtcagggccctaaatatgtaaaaatttttatcaacctaccccgatctatggattttgaagaggcagaaagaagtgaaccaactcaagctctggaactgacagaggatgatattaaagaagatggcattgttccacttcgttatgttaagtttcagaatgttaacagtgtaactatatttgttcagtcgaatcaaggtgaagaggaaacaacaagaatttcatattttactcagcaatccctttactgggtgtatattataaatcattctactataaagacacatgcacacatatattcattgcaacacggtctctca

SEQ ID NO: 450091 - DNA, 941 bp, Homo sapiens
cctttactcatttttgggccatcacaggctgtttcttggagtcgatgtacatcagtgtcagggaacagctgccaccaacaatatatcagcaacacctacatttttgttttttcgaaacaaagtgagaattgatcaatatcaaggagcagatgctgtgggattagaagaaaaaatcaagcagcacttagaaaatgaccctggaagcaatgaggacacagatattccaaaaggctatatggatttaatgccttttattaacaaagctggttgtgaatgtcttaatgaaagtgatgagcatggatttgacaactgtttacgaaaagacacaaccttcttggaatctgactgtgatgaacagctgcttattactgtggcattcaatcaacctgttaagctttattccatgaaatttcaagggccagataatggtcagggccctaaatatgtaaaaatttttatcaacctaccccgatctatggattttgaagaggcagaaagaagtgaaccaactcaagctctggaactgacagaggatgatattaaagaagatggcattgttccacttcgttatgttaagtttcagaatgttaacagtgtaactatatttgttcagtcgaatcaaggtgaagaggaaacaacaagaatttcatattttacttttattggtactccagtccaggcaacaaatatgaatgacttcaaacgagtagttggcaaaaaaggagaaagccactaaggtacaaaagacactggacaaccatattgcaatcagatctacagctcctggataattgcttgattctcgccagagactgtcaatgtttcattcattgccattaccaataaatcattgcttttgttcagatggtatcactagtgtttccattgtaatcttgacacatgcaattgtaaataaaagtcaccacttttgccaagcttaa

SEQ ID NO: 450092 - DNA, 1264 bp, Homo sapiens
tggctgctgggtgccgcacgccttcccatcctcctcctctcccctcccccatccctccccgccccctcggccgctccgctccctggcgtgactcggcactgagagtcccgggagaagactcggcggtcgccacctcttctgtccaggcctcggccttcctgagcatctctccttcctctcccagatcgtcttctccttcagtttcaaagccagtggcgtcgcggccaccctgccgggctctctgtgaggatggtgggggtgaagcccgtcgggagcgacccggatttccagccagagctgagcggcgcgggctccagactcgccgtggtcaagttcaccatgagagggtgtgggccatgtttgaggattgccccagcattcagttctatgagtaataaatatccacaggctgttttcttggaagtcgatgtacatcagtgtcagggaacagctgccaccaacaatatatcagcaacacctacatttttgttttttcgaaacaaagtgagaattgatcaatatcaaggagcagatgctgtgggattagaagaaaaaatcaagcagcacttagaaaatgaccctggaagcaatgaggacacagatattccaaaaggctatatggatttaatgccttttattaacaaagctggttgtgaatgtcttaatgaaagtgatgagcatggatttgacaactgtttacgaaaagacacaaccttcttggaatctgactgtgatgaacagctgcttattactgtggcattcaatcaacctgttaagctttattccatgaaatttcaagggccagataatgaggcagaaagaagtgaaccaactcaagctctggaactgacagaggatgatattaaagaagatggcattgttccacttcgttatgttaagtttcagaatgttaacagtgtaactatatttgttcagtcgaatcaaggtgaagaggaaacaacaagaatttcatattttacttttattggtactccagtccaggcaacaaatatgaatgacttcaaacgagtagttggcaaaaaaggagaaagccactaaggtacaaaagacactggacaaccatattgcaatcagatctacagctcctggataattgcttgattctcgccagagactgtcaatgtttcattcattgccattaccaataaatcattgcttttgttcagatggtatcactagtgtttccattgtaatcttgacacatgcaattgtaaataaaagtcaccacttttgccaagcttaa

SEQ ID NO: 450093 - DNA, 283 bp, Homo sapiens
ctgcacccagcctagattaatttttacaaagaatggagaatatttatgttattaatttaaggaaattgattaaacttaaagcatgtttgtgaagaaggattgtaattataaatgcaaacttttttttggtagatatttgttcagtcgaatcaaggtgaagaggaaacaacaagaatttcatattttacttttattggtactccagtccaggcaacaaatatgaatgacttcaaacgagtaagtttgcttaaatgatacttcgggatagtaaaaatataatttt

SEQ ID NO: 450094 - DNA, 829 bp, Homo sapiens
tggctgctgggtgccgcacgccttcccatcctcctcctctcccctcccccatccctccccgccccctcggccgctccgctccctggcgtgactcggcactgagagtcccgggagaagactcggcggtcgccacctcttctgtccaggcctcggccttcctgagcatctctccttcctctcccagatcgtcttctccttcagtttcaaagccagtggcgtcgcggccaccctgccgggctctctgtgaggatggtgggggtgaagcccgtcgggagcgacccggatttccagccagagctgagcggcgcgggctccagactcgccgtggtcaagttcaccatgagagggtgtgggccatgtttgaggattgccccagcattcagttctatgagtaataaatatccacaggctgttttcttggaagtcgatgtacatcagtgtcagggaacagctgccaccaacaatatatcagcaacacctacatttttgttttttcgaaacaaagtgagaattgatcaatatcaaggagcagatgctgtgggattagaagaaaaaatcaagcagcacttagaaaatgaccctggaagcaatgaggacacagatattccaaaaggctatatggatttaatgccttttattaacaaagctggttgtgaatgtcttaatgaaagtgatgagcatggatttgacaactgtttacgaaaagacacaaccttcttggaatctgactgtgatgaacagacttgctattactattacattcaatcaaacctctaacttgtatcccataaatttcaaggccacataattttcaataccctaaattata

SEQ ID NO: 450095 - DNA, 1951 bp, Homo sapiens
tggctgctgggtgccgcacgccttcccatcctcctcctctcccctcccccatccctccccgccccctcggccgctccgctccctggcgtgactcggcactgagagtcccgggagaagactcggcggtcgccacctcttctgtccaggcctcggccttcctgagcatctctccttcctctcccagatcgtcttctccttcagtttcaaagccagtggcgtcgcggccaccctgccgggctctctgtgaggatggtgggggtgaagcccgtcgggagcgacccggatttccagccagagctgagcggcgcgggctccagactcgccgtggtcaagttcaccatgagagggtgtgggccatgtttgaggattgccccagcattcagttctatgagtaataaatatccacaggctgttttcttggaagtcgatgtacatcagtgtcagggaacagctgccaccaacaatatatcagcaacacctacatttttgttttttcgaaacaaagtgagaattgatcaatatcaaggagcagatgctgtgggattagaagaaaaaatcaagcagcacttagaaaatgaccctggaagcaatgaggacacagatattccaaaaggctatatggatttaatgccttttattaacaaagctggttgtgaatgtcttaatgaaagtgatgagcatggatttgacaactgtttacgaaaagacacaaccttcttggaatctgactgtgatgaacagctgcttattactgtggcattcaatcaacctgttaagctttattccatgaaatttcaagggccagataatggtcagggccctaaatatgtaaaaatttttatcaacctaccccgatctatggattttgaagaggcagaaagaagtgaaccaactcaagctctggaactgacagaggatgatattaaagaagatggcattgttccacttcgttatgttaagtttcagaatgttaacagtgtaactatatttgttcagtcgaatcaaggtgaagaggaaacaacaagaatttcatattttacttttattggtactccagtccaggcaacaaatatgaatgacttcaaacgagtagttggcaaaaaaggagaaagccactaaggtacaaaagacactggacaaccatattgcaatcagatctacagctcctggataattgcttgattctcgccagagactgtcaatgtttcattcattgccattaccaataaatcattgcttttgttcagatggtatcactagtgtttccattgtaatcttgacacatgcaattgtaaataaaagtcaccacttttgccaagcttaaaaaacacacagaaaaacaccttacactcacacacatacaccttcatacacacactttttacccccgcccctcctcccccctactaccaaagactattacataaaccacatatctctataataaaaacaactagatcaccacaaaacagtgtataacagagtaccaacagagagagcagtatacacgaggacatcacacggagagacaacactaacggagataatcgcgtacaaagcgaatatgcacatttctacacgacaaaaaaaaacaaagccccgggcgagaaaaaaacaaaaaagagagctctatcctgaaaaaaacacactctcgcaagcttgggcaggcatatctcggggcccacatcacgaagtggaacacatcaataccgaacaccgggaggctaccccaagaggagaaagcatccacgcaaaataatcatagagaataaaaagaagccccacgagagcagacaagtgtgaagcaaacaatcagaagcacaaggatcaacgcaggcgacaggcgacgcacgcatcagagcgagcagggagcaacgaaaggcgcagcaaccagaacgagagaaaaggcgcaggagtgaagagcaacaagggcggagaagcgcaggggagc

SEQ ID NO: 450096 - DNA, 1709 bp, Homo sapiens
tggctgctgggtgccgcacgccttcccatcctcctcctctcccctcccccatccctccccgccccctcggccgctccgctccctggcgtgactcggcactgagagtcccgggagaagactcggcggtcgccacctcttctgtccaggcctcggccttcctgagcatctctccttcctctcccagatcgtcttctccttcagtttcaaagccagtggcgtcgcggccaccctgccgggctctctgtgaggatggtgggggtgaagcccgtcgggagcgacccggatttccagccagagctgagcggcgcgggctccagactcgccgtggtcaagttcaccatgagagggtgtgggccatgtttgaggattgccccagcattcagttctatgagtaataaatatccacaggctgttttcttggaagtcgatgtacatcagtgtcagggaacagctgccaccaacaatatatcagcaacacctacatttttgttttttcgaaacaaagtgagaattgatcaatatcaaggagcagatgctgtgggattagaagaaaaaatcaagcagcacttagaaaatgaccctggaagcaatgaggacacagatattccaaaaggctatatggatttaatgccttttattaacaaagctggttgtgaatgtcttaatgaaagtgatgagcatggatttgacaactgtttacgaaaagacacaaccttcttggaatctgactgtgatgaacagctgcttattactgtggcattcaatcaacctgttaagctttattccatgaaatttcaagggccagataatggtcagggccctaaatatgtaaaaatttttatcaacctaccccgatctatggattttgaagaggcagaaagaagtgaaccaactcaagctctggaactgacagaggatgatattaaagaagatggcattgttccacttcgttatgttaagtttcagaatgttaacagtgtaactatatttgttcagtcgaatcaaggtgaagaggaaacaacaagaatttcatattttacttttattggtactccagtccaggcaacaaatatgaatgacttcaaacgagtagttggcaaaaaaggagaaagccactaaggtacaaaagacactggacaaccatattgcaatcagatctacagctcctggataattgcttgattctcgccagagactgtcaatgtttcattcattgccattaccaataaatcattgcttttgttcaaaaaaaaaaaaaaaaaaaaaaaaaaaaaaaaaaaaaaaaaaaaaaaaaagggggggggggcaaaaaaaacccccggggggggccaaatgggccaccattttttggaaagagggggcgaccccaaaaaaggaagcgcgtggaattaaaataagaaaagcacggacggccgccggcgatataaacaacacagcgatcgcgagcgtgggagaaaaaaagcgataaaagcgggacacattgcgggaaagacaaccaccacaacatcggcggggggcgcgacaactaatggggggaaaccacccacccagagaaaagattaaaccgcccacggagagcgaaaaactcaaaccagtcagggaggtcatacgggggtgcacacgaagagtaataatcgtggaccggaaagaagattagcgcacaggacgacaaattatcagagaacatctatacccggggccagatgtag

SEQ ID NO: 450097 - DNA, 1380 bp, Homo sapiens
tggctgctgggtgccgcacgccttcccatcctcctcctctcccctcccccatccctccccgccccctcggccgctccgctccctggcgtgactcggcactgagagtcccgggagaagactcggcggtcgccacctcttctgtccaggcctcggccttcctgagcatctctccttcctctcccagatcgtcttctccttcagtttcaaagccagtggcgtcgcggccaccctgccgggctctctgtgaggatggtgggggtgaagcccgtcgggagcgacccggatttccagccagagctgagcggcgcgggctccagactcgccgtggtcaagttcaccatgagagggtgtgggccatgtttgaggattgccccagcattcagttctatgagtaataaatatccacaggctgttttcttggaagtcgatgtacatcagtgtcagggaacagctgccaccaacaatatatcagcaacacctacatttttgttttttcgaaacaaagtgagaattgatcaatatcaaggagcagatgctgtgggattagaagaaaaaatcaagcagcacttagaaaatgaccctggaagcaatgaggacacagatattccaaaaggctatatggatttaatgccttttattaacaaagctggttgtgaatgtcttaatgaaagtgatgagcatggatttgacaactgtttacgaaaagacacaaccttcttggaatctgactgtgatgaacagctgcttattactgtggcattcaatcaacctgttaagctttattccatgaaatttcaagggccagataatggtcagggccctaaatatgtaaaaatttttatcaacctaccccgatctatggattttgaagaggcagaaagaagtgaaccaactcaagctctggaactgacagaggatgatattaaagaagatggcattgttccacttcgttatgttaagtttcagaatgttaacagtgtaactatatttgttcagtcgaatcaaggtgaagaggaaacaacaagaatttcatattttacttttattggtactccagtccaggcaacaaatatgaatgacttcaaacgacacctgtctgctctcacccttcccatgttctcgccattgttggtgcaagatttctacagcttctatcatctggatcagccttgttacctagaaaatacacattggcaagttgagagttatcaacctgtgaaacagtagttggcaaaaaaggagaaagccactaaggtacaaaagacactggacaaccatattgcaatcagatctacagctcctggataattgcttgattctcgccagagactgtcaatgtttcattcattgccattaccaataaatcattgcttttgttca

SEQ ID NO: 450098 - DNA, 1429 bp, Homo sapiens
tggctgctgggtgccgcacgccttcccatcctcctcctctcccctcccccatccctccccgccccctcggccgctccgctccctggcgtgactcggcactgagagtcccgggagaagactcggcggtcgccacctcttctgtccaggcctcggccttcctgagcatctctccttcctctcccagatcgtcttctccttcagtttcaaagccagtggcgtcgcggccaccctgccgggctctctgtgaggatggtgggggtgaagcccgtcgggagcgacccggatttccagccagagctgagcggcgcgggctccagactcgccgtggtcaagttcaccatgagagggtgtgggccatgtttgaggattgccccagcattcagttctatgagtaataaatatccacaggctgttttcttggaagtcgatgtacatcagtgtcagtacttattcctttgaagataggaagatgttatgttgatgtcattattacagatgtcattatggctgcattagttaagaagagtagcacattattaattgcttcagggaacagctgccaccaacaatatatcagcaacacctacatttttgttttttcgaaacaaagtgagaattgatcaatatcaaggagcagatgctgtgggattagaagaaaaaatcaagcagcacttagaaaatgaccctggaagcaatgaggacacagatattccaaaaggctatatggatttaatgccttttattaacaaagctggttgtgaatgtcttaatgaaagtgatgagcatggatttgacaactgtttacgaaaagacacaaccttcttggaatctgactgtgatgaacagctgcttattactgtggcattcaatcaacctgttaagctttattccatgaaatttcaagggccagataatggtcagggccctaaatatgtaaaaatttttatcaacctaccccgatctatggattttgaagaggcagaaagaagtgaaccaactcaagctctggaactgacagaggatgatattaaagaagatggcattgttccacttcgttatgttaagtttcagaatgttaacagtgtaactatatttgttcagtcgaatcaaggtgaagaggaaacaacaagaatttcatattttacttttattggtactccagtccaggcaacaaatatgaatgacttcaaacgagtagttggcaaaaaaggagaaagccactaaggtacaaaagacactggacaaccatattgcaatcagatctacagctcctggataattgcttgattctcgccagagactgtcaatgtttcattcattgccattaccaataaatcattgcttttgttcagatggtatcactagtgtttccattgtaatcttgacacatgcaattgtaaataaaagtcaccacttttgccaagcttaa

SEQ ID NO: 450099 - DNA, 1284 bp, Homo sapiens
tggctgctgggtgccgcacgccttcccatcctcctcctctcccctcccccatccctccccgccccctcggccgctccgctccctggcgtgactcggcactgagagtcccgggagaagactcggcggtcgccacctcttctgtccaggcctcggccttcctgagcatctctccttcctctcccagatcgtcttctccttcagtttcaaagccagtggcgtcgcggccaccctgccgggctctctgtgaggatggtgggggtgaagcccgtcgggagcgacccggatttccagccagagctgagcggcgcgggctccagactcgccgtggtcaagttcaccatgagagggtgtgggccatgtttgaggattgccccagcattcagttctatgagtaataaatatccacaggctgttttcttggaagtcgatgtacatcagtgtcagggaacagctgccaccaacaatatatcagcaacacctacatttttgttttttcgaaacaaagtgagaattgatcaatatcaaggagcagatgctgtgggattagaagaaaaaatcaagcagcacttagaaaatgaccctggaagcaatgaggacacagatattccaaaaggctatatggatttaatgccttttattaacaaagctggttgtgaatgtcttaatgaaagtgatgagcatggatttgacaactgtttacgctgcttattactgtggcattcaatcaacctgttaagctttattccatgaaatttcaagggccagataatggtcagggccctaaatatgtaaaaatttttatcaacctaccccgatctatggattttgaagaggcagaaagaagtgaaccaactcaagctctggaactgacagaggatgatattaaagaagatggcattgttccacttcgttatgttaagtttcagaatgttaacagtgtaactatatttgttcagtcgaatcaaggtgaagaggaaacaacaagaatttcatattttacttttattggtactccagtccaggcaacaaatatgaatgacttcaaacgagtagttggcaaaaaaggagaaagccactaaggtacaaaagacactggacaaccatattgcaatcagatctacagctcctggataattgcttgattctcgccagagactgtcaatgtttcattcattgccattaccaataaatcattgcttttgttcagatggtatcactagtgtttccattgtaatcttgacacatgcaattgtaaataaaagtcaccacttttgccaagcttaa

SEQ ID NO: 450100 - DNA, 612 bp, Homo sapiens
aaaatgaaactcttatcttcacagctgctctgcttattactgtggcattcaatcaacctgttaagctttattccatgaaatttcaagggccagataatggtcagggccctaaatatgtaaaaatttttatcaacctaccccgatctatggattttgaagaggcagaaagaagtgaaccaactcaagctctggaactgacagaggatgatattaaagaagatggcattgttccacttcgttatgttaagtttcagaatgttaacagtgtaactatatttgttcagtcgaatcaaggtgaagaggaaacaacaagaatttcatattttacttttattggtactccagtccaggcaacaaatatgaatgacttcaaacgagtagttggcaaaaaaggagaaagccactaaggtacaaaagacactggacaaccatattgcaatcagatctacagctcctggataattgcttgattctcgccagagactgtcaatgtttcattcattgccattaccaataaatcattgcttttgttcagatggtatcactagtgtttccattgtaatcttgacacatgcaattgtaaataaaagtcaccacttttgccaagcttaa

SEQ ID NO: 450101 - DNA, 372 bp, Homo sapiens
tcgaacgaacgtggagctcagcatcccccccacaccacgacccgccgtcacaggaacaggatttggccttagcttctgggcctatcggctgccttccctctacttcctaccacctcttctgccttcctttgagctctgttgggcttggggatcttagttttcttttgtttatttcccagctcatttttttcttctggtcagtttttttaagggggggtgttgtggttttttgtttttgttttgcttctgagaaagcatttgcctttcttcctctcccaacataacaatcgtggtaacagaatgcgactgctgatttaccgatgtatttaatgtaagtaaaaaaaggaaaaaaagaaaagggcaaaaaaatgt

SEQ ID NO: 450102 - DNA, 514 bp, Homo sapiens
cctagttttagaagtttcaatagcagaagtgcaagtcgatcgaggtcaagaacacgatcacgttctagatcacatactccaagaagacactataataataggcggagtcgatctggaacatacagctcgagatcaagaagcaggtcccgcagtcacagtgaaagccctcgaagacatcataatcatggttctcctcaccttaaggccaagcataccagagatgatttaaaaagactgtggctctgtaactcttcaaaggcccagtttcccctcacgcagcctcttaggtagcgtttcccctaatcgtgggggttggaccccagagtcttccaaagaattttcactggttgcctgcatctttggctctgctgtgatctgattggaggagggacagtttctggtacccatcctctgatttatacatatgcattttttcccctctggcctttagatggcctcagccccagccaccatgtgctattaaacttctagaactagggggatcctctatgat

SEQ ID NO: 450103 - DNA, 3451 bp, Homo sapiens
agggcgaggaggagaaggaggggcaggagggtttggttgagctgcagctgtttgtctgttcgacacaggcttggggccgacgggggagacggagccccaggtaacactggatcaacaaaatgaagagctgagccaagtggtagaactctcatttcaagattttggtgacttgggtttaaacagagttggagagggagatgaaggagtgttgaagcctggaaatcccctccccttccccctcccccctttacagtatccccctccctccaccctttcccattctgataatctggccatgactagcagaagcacagctaggcccaatgggcaaccccaggccagcaaaatttgccagttcaaattggtcctgctgggagaatctgcagtgggaaagtcaagcctggtattacgttttgtcaaagggcagttccatgagtaccaggagagcaccattggagcggccttcctcacccagtccgtttgtctagatgacacaacagtgaagtttgagatctgggacacagctgggcaggagcgatatcacagcttagcccccatgtactacaggggtgcccaagctgcaatcgtggtttacgacattactaatcaggaaacctttgcccgagcaaagacatgggtgaaggaactacagcgacaggccagtcctagcatcgttattgccctggcagggaacaaagctgacctggccaacaaacgtatggtggagtatgaagaggcccaggcatatgcagatgacaacagcttattgttcatggagacttcagccaagacagctatgaacgtgaatgatctcttcctggcaatagctaagaagttgccaaagagtgaaccccagaatctgggaggtgcagcaggccgaagccggggtgtggatctccatgaacagtcccagcagaacaagagccagtgttgtagcaactgagggggtggctagcagcaaacaagtatggagctagcacaagagctaagaaataacctccatccctacccctcagcacacaacccctacggtaacagcacactgagccctggctcccaagggctgcctcctgacagctccgtcatggcactttttaacgcttcagcaacaaacaccaggcagctgttgccactggcctcctaccccctactctggggcttgggggtcaactccccccaggacttaccttccaaaacaaactttcttcactttgtattataggtacaagacagcgacttacgtatcttttctcctcctccctagtgttcctccccattttttcagaaaacacttctgactcctgtcccttccccttctgcttttggtcagtccctgttcttgagcctcttttctcctctccccaggatgcagaaagtggtgaacccaggaactgaggaaggaggtttccagttcatttacattaagggccctgggggagaataaagctcagagcaggagggagtaaggaaacatttcctttttgtttttatttggttggagtttctcatatttgaaaacattgcggtatccatgatttggccttgtggagggtgttcctaggtagaggtgagaatggggaggcaagatctcaggcaccaggcaggaggtgccttgtaagctaactgggcggaggtggaggtgcagtgtcaactgtggctctgtaactcttcaaaggcccagtttcccctcacgcagcctcttaggtagcgtttcccctaatcgtgggggttggaccccagagtcttccaaagaattttcactggttgcctgcatctttggctctgctgtgatctgattggaggagggacagtttctggtacccatcctctgatttatacatatgcattttttcccctctggcctttagatggcctcagccccagccaccatatacccctgcagtttgcactttaattgatggtagttcagttggggtacttgttttatggaagttttgattgatttacttgccctcccaccttctttttaattcaatgaaatctgaggttaatgcgaggttcgaggagaggttatagataaaactaccagtggcagctactcaagtcctatctccactgttagcttcctccaactctaattattaacctatattcttgccaagctaactattgactataggtttgcctttcctggagaattaattgagcaattgaggagtgtctcaggatagcacaggccaaggtaggggagtaaaaaggaggtcaggcaaaagggaggagttttctgtcctttcccaggtttcacactcaatttgatatccattaccatgtcttttctacttccttgtaaataggtatgatctttattcccactgtacagtctgttctatcctctgcctcccatcaggccctgtttctttgttcctttgttaatatcttgaatttagtccctccatccttaatccccccatccctccccatcatgcaaccagtggtttaatccatgtaccaataggggctagtaccacagaggcctcctgtggtgccctcgtatcataccacctgttcctgtggagagggaatgaccggcactgaaggtaccttacaactggctcatattatcagaggaccttggtcctttctaaatctctagtctctcttcatatccttcatcaggtgttttaagatgtctctgagaagccatcaaggcaaaagagaactttaagttccttgttccagcccggagttttgggaaagaaagaaaggaaaggtcacagtgacctaggattggaaccttcctgcccttttggcttgcagactgccttctatcccagaacagctgagaaatctatgaagctgagattctgaaggacccagcttaggttcttccacttaggcctcaattcccttccttttccaggggcagccttagttcccatggccctgaaacacacacatttcccccttcctttcccagaagccactggccccccatagcacccagtgcatcctttttacaagtggaagaactaggatggctttccaaagtcttctagaaatgaagttctttctctgtgcagctttcccccttggagcaggagtgaagatgtttcattatcttgggcctgggaaaccacttccccaggcttctccctccccccacccccataggaacaggatttggccttagcttctgggcctatcggctgccttccctctacttcctaccacctcttctgccttcctttgagctctgttgggcttggggatcttagttttcttttgtttatttcccagctcatttttttcttctggtcagtttttttaagggggggtgttgtggttttttgtttttgttttgcttctgagaaagcatttgcctttcttcctctcccaacataacaatcgtggtaacagaatgcgactgctgatttaccgatgtatttaatgtaagtaaaaaaaggaaaaaaagaaaagggcaaaaaaatgt

SEQ ID NO: 450104 - DNA, 2945 bp, Homo sapiens
gggaagaccacctagaagaggtgaattttgagactcattttaaaaggtgatggatatggattggcagtcattccagcctactcattctcttcatgttttcctaggaaacctttgcccgagcaaagacatgggtgaaggaactacagcgacaggccagtcctagcatcgttattgccctggcagggaacaaagctgacctggccaacaaacgtatggtggagtatgaagaggcccaggcatatgcagatgacaacagcttattgttcatggagacttcagccaagacagctatgaacgtgaatgatctcttcctggcaatagctaagaagttgccaaagagtgaaccccagaatctgggaggtgcagcaggccgaagccggggtgtggatctccatgaacagtcccagcagaacaagagccagtgttgtagcaactgagggggtggctagcagcaaacaagtatggagctagcacaagagctaagaaataacctccatccctacccctcagcacacaacccctacggtaacagcacactgagccctggctcccaagggctgcctcctgacagctccgtcatggcactttttaacgcttcagcaacaaacaccaggcagctgttgccactggcctcctaccccctactctggggcttgggggtcaactccccccaggacttaccttccaaaacaaactttcttcactttgtattataggtacaagacagcgacttacgtatcttttctcctcctccctagtgttcctccccattttttcagaaaacacttctgactcctgtcccttccccttctgcttttggtcagtccctgttcttgagcctcttttctcctctccccaggatgcagaaagtggtgaacccaggaactgaggaaggaggtttccagttcatttacattaagggccctgggggagaataaagctcagagcaggagggagtaaggaaacatttcctttttgtttttatttggttggagtttctcatatttgaaaacattgcggtatccatgatttggccttgtggagggtgttcctaggtagaggtgagaatggggaggcaagatctcaggcaccaggcaggaggtgccttgtaagctaactgggcggaggtggaggtgcagtgtcaactgtggctctgtaactcttcaaaggcccagtttcccctcacgcagcctcttaggtagcgtttcccctaatcgtgggggttggaccccagagtcttccaaagaattttcactggttgcctgcatctttggctctgctgtgatctgattggaggagggacagtttctggtacccatcctctgatttatacatatgcattttttcccctctggcctttagatggcctcagccccagccaccatatacccctgcagtttgcactttaattgatggtagttcagttggggtacttgttttatggaagttttgattgatttacttgccctcccaccttctttttaattcaatgaaatctgaggttaatgcgaggttcgaggagaggttatagataaaactaccagtggcagctactcaagtcctatctccactgttagcttcctccaactctaattattaacctatattcttgccaagctaactattgactataggtttgcctttcctggagaattaattgagcaattgaggagtgtctcaggatagcacaggccaaggtaggggagtaaaaaggaggtcaggcaaaagggaggagttttctgtcctttcccaggtttcacactcaatttgatatccattaccatgtcttttctacttccttgtaaataggtatgatctttattcccactgtacagtctgttctatcctctgcctcccatcaggccctgtttctttgttcctttgttaatatcttgaatttagtccctccatccttaatccccccatccctccccatcatgcaaccagtggtttaatccatgtaccaataggggctagtaccacagaggcctcctgtggtgccctcgtatcataccacctgttcctgtggagagggaatgaccggcactgaaggtaccttacaactggctcatattatcagaggaccttggtcctttctaaatctctagtctctcttcatatccttcatcaggtgttttaagatgtctctgagaagccatcaaggcaaaagagaactttaagttccttgttccagcccggagttttgggaaagaaagaaaggaaaggtcacagtgacctaggattggaaccttcctgcccttttggcttgcagactgccttctatcccagaacagctgagaaatctatgaagctgagattctgaaggacccagcttaggttcttccacttaggcctcaattcccttccttttccaggggcagccttagttcccatggccctgaaacacacacatttcccccttcctttcccagaagccactggccccccatagcacccagtgcatcctttttacaagtggaagaactaggatggctttccaaagtcttctagaaatgaagttctttctctgtgcagctttcccccttggagcaggagtgaagatgtttcattatcttgggcctgggaaaccacttccccaggcttctccctccccccacccccataggaacaggatttggccttagcttctgggcctatcggctgccttccctctacttcctaccacctcttctgccttcctttgagctctgttgggcttggggatcttagttttcttttgtttatttcccagctcatttttttcttctggtcagtttttttaagggggggtgttgtggttttttgtttttgttttgcttctgagaaagcatttgcctttcttcctctcccaacataacaatcgtggtaacagaatgcgactgctgatttaccgatgtatttaatgtaagtaaaaaaaggaaaaaaagaaaagggcaaaaaaatgt

SEQ ID NO: 450105 - DNA, 2642 bp, Homo sapiens
agcgggttcgacacaggcttgcgggccgacgggggagacggagccccaggagtgttgaagcctggaaatcccctccgcttccgccaaccggtgtgatctccatgacagcccacggccagtgttgtagcaactgagggggtggctagcagcaaacaagtatggagctagcacaagagctaagaaataacctccatccctacccctcagcacacaacccctacggtaacagcacactgagccctggctcccaagggctgcctcctgacagctccgtcatggcactttttaacgcttcagcaacaaacaccaggcagctgttgccactggcctcctaccccctactctggggcttgggggtcaactccccccaggacttaccttccaaaacaaactttcttcactttgtattataggtacaagacagcgacttacgtatcttttctcctcctccctagtgttcctccccattttttcagaaaacacttctgactcctgtcccttccccttctgcttttggtcagtccctgttcttgagcctcttttctcctctccccaggatgcagaaagtggtgaacccaggaactgaggaaggaggtttccagttcatttacattaagggccctgggggagaataaagctcagagcaggagggagtaaggaaacatttcctttttgtttttatttggttggagtttctcatatttgaaaacattgcggtatccatgatttggccttgtggagggtgttcctaggtagaggtgagaatggggaggcaagatctcaggcaccaggcaggaggtgccttgtaagctaactgggcggaggtggaggtgcagtgtcaactgtggctctgtaactcttcaaaggcccagtttcccctcacgcagcctcttaggtagcgtttcccctaatcgtgggggttggaccccagagtcttccaaagaattttcactggttgcctgcatctttggctctgctgtgatctgattggaggagggacagtttctggtacccatcctctgatttatacatatgcattttttcccctctggcctttagatggcctcagccccagccaccatatacccctgcagtttgcactttaattgatggtagttcagttggggtacttgttttatggaagttttgattgatttacttgccctcccaccttctttttaattcaatgaaatctgaggttaatgcgaggttcgaggagaggttatagataaaactaccagtggcagctactcaagtcctatctccactgttagcttcctccaactctaattattaacctatattcttgccaagctaactattgactataggtttgcctttcctggagaattaattgagcaattgaggagtgtctcaggatagcacaggccaaggtaggggagtaaaaaggaggtcaggcaaaagggaggagttttctgtcctttcccaggtttcacactcaatttgatatccattaccatgtcttttctacttccttgtaaataggtatgatctttattcccactgtacagtctgttctatcctctgcctcccatcaggccctgtttctttgttcctttgttaatatcttgaatttagtccctccatccttaatccccccatccctccccatcatgcaaccagtggtttaatccatgtaccaataggggctagtaccacagaggcctcctgtggtgccctcgtatcataccacctgttcctgtggagagggaatgaccggcactgaaggtaccttacaactggctcatattatcagaggaccttggtcctttctaaatctctagtctctcttcatatccttcatcaggtgttttaagatgtctctgagaagccatcaaggcaaaagagaactttaagttccttgttccagcccggagttttgggaaagaaagaaaggaaaggtcacagtgacctaggattggaaccttcctgcccttttggcttgcagactgccttctatcccagaacagctgagaaatctatgaagctgagattctgaaggacccagcttaggttcttccacttaggcctcaattcccttccttttccaggggcagccttagttcccatggccctgaaacacacacatttcccccttcctttcccagaagccactggccccccatagcacccagtgcatcctttttacaagtggaagaactaggatggctttccaaagtcttctagaaatgaagttctttctctgtgcagctttcccccttggagcaggagtgaagatgtttcattatcttgggcctgggaaaccacttccccaggcttctccctccccccacccccataggaacaggatttggccttagcttctgggcctatcggctgccttccctctacttcctaccacctcttctgccttcctttgagctctgttgggcttggggatcttagttttcttttgtttatttcccagctcatttttttcttctggtcagtttttttaagggggggtgttgtggttttttgtttttgttttgcttctgagaaagcatttgcctttcttcctctcccaacataacaatcgtggtaacagaatgcgactgctgatttaccgatgtatttaatgtaagtaaaaaaaggaaaaaaagaaaagggcaaaaaaatgt

SEQ ID NO: 450106 - DNA, 2597 bp, Homo sapiens
ctcttctctttttatctctagctaagaagttgccaaagagtgaaccccagaatctgggaggtgcagcaggccagtgttgtagcaactgagggggtggctagcagcaaacaagtatggagctagcacaagagctaagaaataacctccatccctacccctcagcacacaacccctacggtaacagcacactgagccctggctcccaagggctgcctcctgacagctccgtcatggcactttttaacgcttcagcaacaaacaccaggcagctgttgccactggcctcctaccccctactctggggcttgggggtcaactccccccaggacttaccttccaaaacaaactttcttcactttgtattataggtacaagacagcgacttacgtatcttttctcctcctccctagtgttcctccccattttttcagaaaacacttctgactcctgtcccttccccttctgcttttggtcagtccctgttcttgagcctcttttctcctctccccaggatgcagaaagtggtgaacccaggaactgaggaaggaggtttccagttcatttacattaagggccctgggggagaataaagctcagagcaggagggagtaaggaaacatttcctttttgtttttatttggttggagtttctcatatttgaaaacattgcggtatccatgatttggccttgtggagggtgttcctaggtagaggtgagaatggggaggcaagatctcaggcaccaggcaggaggtgccttgtaagctaactgggcggaggtggaggtgcagtgtcaactgtggctctgtaactcttcaaaggcccagtttcccctcacgcagcctcttaggtagcgtttcccctaatcgtgggggttggaccccagagtcttccaaagaattttcactggttgcctgcatctttggctctgctgtgatctgattggaggagggacagtttctggtacccatcctctgatttatacatatgcattttttcccctctggcctttagatggcctcagccccagccaccatatacccctgcagtttgcactttaattgatggtagttcagttggggtacttgttttatggaagttttgattgatttacttgccctcccaccttctttttaattcaatgaaatctgaggttaatgcgaggttcgaggagaggttatagataaaactaccagtggcagctactcaagtcctatctccactgttagcttcctccaactctaattattaacctatattcttgccaagctaactattgactataggtttgcctttcctggagaattaattgagcaattgaggagtgtctcaggatagcacaggccaaggtaggggagtaaaaaggaggtcaggcaaaagggaggagttttctgtcctttcccaggtttcacactcaatttgatatccattaccatgtcttttctacttccttgtaaataggtatgatctttattcccactgtacagtctgttctatcctctgcctcccatcaggccctgtttctttgttcctttgttaatatcttgaatttagtccctccatccttaatccccccatccctccccatcatgcaaccagtggtttaatccatgtaccaataggggctagtaccacagaggcctcctgtggtgccctcgtatcataccacctgttcctgtggagagggaatgaccggcactgaaggtaccttacaactggctcatattatcagaggaccttggtcctttctaaatctctagtctctcttcatatccttcatcaggtgttttaagatgtctctgagaagccatcaaggcaaaagagaactttaagttccttgttccagcccggagttttgggaaagaaagaaaggaaaggtcacagtgacctaggattggaaccttcctgcccttttggcttgcagactgccttctatcccagaacagctgagaaatctatgaagctgagattctgaaggacccagcttaggttcttccacttaggcctcaattcccttccttttccaggggcagccttagttcccatggccctgaaacacacacatttcccccttcctttcccagaagccactggccccccatagcacccagtgcatcctttttacaagtggaagaactaggatggctttccaaagtcttctagaaatgaagttctttctctgtgcagctttcccccttggagcaggagtgaagatgtttcattatcttgggcctgggaaaccacttccccaggcttctccctccccccacccccataggaacaggatttggccttagcttctgggcctatcggctgccttccctctacttcctaccacctcttctgccttcctttgagctctgttgggcttggggatcttagttttcttttgtttatttcccagctcatttttttcttctggtcagtttttttaagggggggtgttgtggttttttgtttttgttttgcttctgagaaagcatttgcctttcttcctctcccaacataacaatcgtggtaacagaatgcgactgctgatttaccgatgtatttaatgtaagtaaaaaaaggaaaaaaagaaaagggcaaaaaaatgt

SEQ ID NO: 450107 - DNA, 3293 bp, Homo sapiens
agggcgaggaggagaaggaggggcaggagggtttggttgagctgcagctgtttgtctgttcgacacaggcttggggccgacgggggagacggagccccaggagtgttgaagcctggaaatcccctccccttccccctcccccctttacagtatccccctccctccaccctttcccattctgataatctggccatgactagcagaagcacagctaggcccaatgggcaaccccaggccagcaaaatttgccagttcaaattggtcctgctgggagaatctgcagtgggaaagtcaagcctggtattacgttttgtcaaagggcagttccatgagtaccaggagagcaccattggagcggccttcctcacccagtccgtttgtctagatgacacaacagtgaagtttgagatctgggacacagctgggcaggagcgatatcacagcttagcccccatgtactacaggggtgcccaagctgcaatcgtggtttacgacattactaatcaggaaacctttgcccgagcaaagacatgggtgaaggaactacagcgacaggccagtcctagcatcgttattgccctggcagggaacaaagctgacctggccaacaaacgtatggtggagtatgaagaggcccaggcatatgcagatgacaacagcttattgttcatggagacttcagccaagacagctatgaacgtgaatgatctcttcctggcaatagctaagaagttgccaaagagtgaaccccagaatctgggaggtgcagcaggccgaagccggggtgtggatctccatgaacagtcccagcagaacaagagccagtgttgtagcaactgagggggtggctagcagcaaacaagtatggagctagcacaagagctaagaaataacctccatccctacccctcagcacacaacccctacggtaacagcacactgagccctggctcccaagggctgcctcctgacagctccgtcatggcactttttaacgcttcagcaacaaacaccaggcagctgttgccactggcctcctaccccctactctggggcttgggggtcaactccccccaggacttaccttccaaaacaaactttcttcactttgtattataggtacaagacagcgacttacgtatcttttctcctcctccctagtgttcctccccattttttcagaaaacacttctgactcctgtcccttccccttctgcttttggtcagtccctgttcttgagcctcttttctcctctccccaggatgcagaaagtggtgaacccaggaactgaggaaggaggtttccagttcatttacattaagggccctgggggagaataaagctcagagcaggagggagtaaggaaacatttcctttttgtttttatttggttggagtttctcatatttgaaaacattgcggtatccatgatttggccttgtggagggtgttcctaggtagaggtgagaatggggaggcaagatctcaggcaccaggcaggaggtgccttgtaagctaactgggcggaggtggaggtgcagtgtcaactgtggctctgtaactcttcaaaggcccagtttcccctcacgcagcctcttaggtagcgtttcccctaatcgtgggggttggaccccagagtcttccaaagaattttcactggttgcctgcatctttggctctgctgtgatctgattggaggagggacagtttctggtacccatcctctgatttatacatatgcattttttcccctctggcctttagatggcctcagccccagccaccatatacccctgcagtttgcactttaattgatggtagttcagttggggtacttgttttatggaagttttgattgatttacttgccctcccaccttctttttaattcaatgaaatctgaggttaatgcgaggttcgaggagaggttatagataaaactaccagtggcagctactcaagtcctatctccactgttagcttcctccaactctaattattaacctatattcttgccaagctaactattgactataggtttgcctttcctggagaattaattgagcaattgaggagtgtctcaggatagcacaggccaaggtaggggagtaaaaaggaggtcaggcaaaagggaggagttttctgtcctttcccaggtttcacactcaatttgatatccattaccatgtcttttctacttccttgtaaataggtatgatctttattcccactgtacagtctgttctatcctctgcctcccatcaggccctgtttctttgttcctttgttaatatcttgaatttagtccctccatccttaatccccccatccctccccatcatgcaaccagtggtttaatccatgtaccaataggggctagtaccacagaggcctcctgtggtgccctcgtatcataccacctgttcctgtggagagggaatgaccggcactgaaggtaccttacaactggctcatattatcagaggaccttggtcctttctaaatctctagtctctcttcatatccttcatcaggtgttttaagatgtctctgagaagccatcaaggcgaaaggtcacagtgacctaggattggaaccttcctgcccttttggcttgcagactgccttctatcccagaacagctgagaaatctatgaagctgagattctgaaggacccagcttaggttcttccacttaggcctcaattcccttccttttccaggggcagccttagttcccatggccctgaaacacacacatttcccccttcctttcccagaagccactggccccccatagcacccagtgcatcctttttacaagtggaagaactaggatggctttccaaagtcttctagaaatgaagttctttctctgtgcagctttcccccttggagcaggagtgaagatgtttcattatcttgggcctgggaaaccacttccccaggcttctccctccccccacccccataggaacaggatttggccttagcttctgggcctatcggctgccttccctctacttcctaccacctcttctgccttcctttgagctctgttgggcttggggatcttagttttcttttgtttatttcccagctcatttttttcttctggtcagtttttttaagggggggtgttgtggttttttgtttttgttttgcttctgagaaagcatttgcctttcttcctctcccaacataacaatcgtggtaacagaatgcgactgctgatttaccgatgtatttaatgtaagtaaaaaaaggaaaaaaagaaaagggcaaaaaaatgt

SEQ ID NO: 450108 - DNA, 1962 bp, Homo sapiens
gccgcctcccaaatcgcatccttcaccgtccccccgttggaagaaagctacggtacgaggctgggatatgaattggcagagggaatggggaggcaagatctcaggcaccaggcaggaggtgccttgtaagctaactgggcggaggtggaggtgcagtgtcaactgtggctctgtaactcttcaaaggcccagtttcccctcacgcagcctcttaggtagcgtttcccctaatcgtgggggttggaccccagagtcttccaaagaattttcactggttgcctgcatctttggctctgctgtgatctgattggaggagggacagtttctggtacccatcctctgatttatacatatgcattttttcccctctggcctttagatggcctcagccccagccaccatatacccctgcagtttgcactttaattgatggtagttcagttggggtacttgttttatggaagttttgattgatttacttgccctcccaccttctttttaattcaatgaaatctgaggttaatgcgaggttcgaggagaggttatagataaaactaccagtggcagctactcaagtcctatctccactgttagcttcctccaactctaattattaacctatattcttgccaagctaactattgactataggtttgcctttcctggagaattaattgagcaattgaggagtgtctcaggatagcacaggccaaggtaggggagtaaaaaggaggtcaggcaaaagggaggagttttctgtcctttcccaggtttcacactcaatttgatatccattaccatgtcttttctacttccttgtaaataggtatgatctttattcccactgtacagtctgttctatcctctgcctcccatcaggccctgtttctttgttcctttgttaatatcttgaatttagtccctccatccttaatccccccatccctccccatcatgcaaccagtggtttaatccatgtaccaataggggctagtaccacagaggcctcctgtggtgccctcgtatcataccacctgttcctgtggagagggaatgaccggcactgaaggtaccttacaactggctcatattatcagaggaccttggtcctttctaaatctctagtctctcttcatatccttcatcaggtgttttaagatgtctctgagaagccatcaaggcaaaagagaactttaagttccttgttccagcccggagttttgggaaagaaagaaaggaaaggtcacagtgacctaggattggaaccttcctgcccttttggcttgcagactgccttctatcccagaacagctgagaaatctatgaagctgagattctgaaggacccagcttaggttcttccacttaggcctcaattcccttccttttccaggggcagccttagttcccatggccctgaaacacacacatttcccccttcctttcccagaagccactggccccccatagcacccagtgcatcctttttacaagtggaagaactaggatggctttccaaagtcttctagaaatgaagttctttctctgtgcagctttcccccttggagcaggagtgaagatgtttcattatcttgggcctgggaaaccacttccccaggcttctccctccccccacccccataggaacaggatttggccttagcttctgggcctatcggctgccttccctctacttcctaccacctcttctgccttcctttgagctctgttgggcttggggatcttagttttcttttgtttatttcccagctcatttttttcttctggtcagtttttttaagggggggtgttgtggttttttgtttttgttttgcttctgagaaagcatttgcctttcttcctctcccaacataacaatcgtggtaacagaatgcgactgctgatttaccgatgtatttaatgtaagtaaaaaaaggaaaaaaagaaaagggcaaaaaaatgt

SEQ ID NO: 450109 - DNA, 1072 bp, Homo sapiens
tactctgatcaagttaaggtaccttcagtgccggtcattccctctccacaggaacaggtggtatgatacgagggcaccacaggaggcctctgtggtactagcccctattggtacatggattaaaccactggttgcatgatggggagggatggggggattaaggatggagggactaaattcaagatattaacaaaggaacaaagaaacaggaccttggtcctttctaaatctctagtctctcttcatatccttcatcaggtgttttaagatgtctctgagaagccatcaaggcaaaagagaactttaagttccttgttccagcccggagttttgggaaagaaagaaaggaaaggtcacagtgacctaggattggaaccttcctgcccttttggcttgcagactgccttctatcccagaacagctgagaaatctatgaagctgagattctgaaggacccagcttaggttcttccacttaggcctcaattcccttccttttccaggggcagccttagttcccatggccctgaaacacacacatttcccccttcctttcccagaagccactggccccccatagcacccagtgcatcctttttacaagtggaagaactaggatggctttccaaagtcttctagaaatgaagttctttctctgtgcagctttcccccttggagcaggagtgaagatgtttcattatcttgggcctgggaaaccacttccccaggcttctccctccccccacccccataggaacaggatttggccttagcttctgggcctatcggctgccttccctctacttcctaccacctcttctgccttcctttgagctctgttgggcttggggatcttagttttcttttgtttatttcccagctcatttttttcttctggtcagtttttttaagggggggtgttgtggttttttgtttttgttttgcttctgagaaagcatttgcctttcttcctctcccaacataacaatcgtggtaacagaatgcgactgctgatttaccgatgtatttaatgtaagtaaaaaaaggaaaaaaagaaaagggcaaaaaaatgt

SEQ ID NO: 450110 - DNA, 2139 bp, Homo sapiens
  misc_feature (2123)..(2123): n is a, c, g, or t
agggcgaggaggagaaggaggggcaggagggtttggttgagctgcagctgtttgtctgttcgacacaggcttggggccgacgggggagacggagccccaggagtgttgaagcctggaaatcccctccccttccccctcccccctttacagtatccccctccctccaccctttcccattctgataatctggccatgactagcagaagcacagctaggcccaatgggcaaccccaggccagcaaaatttgccagttcaaattggtcctgctgggagaatctgcagtgggaaagtcaagcctggtattacgttttgtcaaagggcagttccatgagtaccaggagagcaccattggagcggccttcctcacccagtccgtttgtctagatgacacaacagtgaagtttgagatctgggacacagctgggcaggagcgatatcacagcttagcccccatgtactacaggggtgcccaagctgcaatcgtggtttacgacattactaatcaggaaacctttgcccgagcaaagacatgggtgaaggaactacagcgacaggccagtcctagcatcgttattgccctggcagggaacaaagctgacctggccaacaaacgtatggtggagtatgaagaggcccaggcatatgcagatgacaacagcttattgttcatggagacttcagccaagacagctatgaacgtgaatgatctcttcctggcaatagctaagaagttgccaaagagtgaaccccagaatctgggaggtgcagcaggccgaagccggggtgtggatctccatgaacagtcccagcagaacaagagccagtgttgtagcaactgagggggtggctagcagcaaacaagtatggagctagcacaagagctaagaaataacctccatccctacccctcagcacacaacccctacggtaacagcacactgagccctggctcccaagggctgcctcctgacagctccgtcatggcactttttaacgcttcagcaacaaacaccaggcagctgttgccactggcctcctaccccctactctggggcttgggggtcaactccccccaggacttaccttccaaaacaaactttcttcactttgtattataggtacaagacagcgacttacgtatcttttctcctcctccctagtgttcctccccattttttcagaaaacacttctgactcctgtcccttccccttctgcttttggtcagtccctgttcttgagcctcttttctcctctccccaggatgcagaaagtggtgaacccaggaactgaggaaggaggtttccagttcatttacattaagggccctgggggagaataaagctcagagcaggagggagtaaggaaacatttcctttttgtttttatttggttggagtttctcatatttgaaaacattgcggtatccatgatttggccttgtggagggtgttcctaggtagaggtgagaatggggaggcaagatctcaggcaccaggcaggaggtgccttgtaagctaactgggcggaggtggaggtgcagtgtcaactgtggctctgtaactcttcaaaggcccagtttcccctcacgcagcctcttaggtagcgtttcccctaatcgtgggggttggaccccagagtcttccaaagaattttcactggttgcctgcatctttggctctgctgtgatctgattggaggagggacagtttctggtacccatcctctgatttatacatatgcattttttcccctctggcctttagatggcctcagccccagccaccatatacccctgcagtttgcactttaattgatggtagttcagttggggtacttgttttatggaagttttgattgatttacttgccctcccaccttctttttaattcaatgaaatctgaggttaatgcgaggttcgaggagaggttatagataaaactaccagtggcagctactcaagtcctatctccactgttagcttcctccaactctaattattaacctatattcttgccaagctaactattgactataggtttgcctttcctggagaattaattgagcaattgaggagtgtctcaggatagcacaggccaaggtaggggatcctctagagcgacngcaggcagggagacaa

SEQ ID NO: 450111 - DNA, 726 bp, Homo sapiens
agggcgaggaggagaaggaggggcaggagggtttggttgagctgcagctgtttgtctgttcgacacaggcttggggccgacgggggagacggagccccaggagtgttgaagcctggaaatcccctccccttccccctcccccctttacagtatccccctccctccaccctttcccattctgataatctggccatgactagcagaagcacagctaggcccaatgggcaaccccaggccagcaaaatttgccagttcaaattggtcctgctgggagaatctgcagtgggaaagtcaagcctggtattacgttttgtcaaagggcagttccatgagtaccaggagagcaccattggagcggccttcctcacccagtccgtttgtctagatgacacaacagtgaagtttgagatctgggacacagctgggcaggagcgatatcacagcttagcccccatgtactacaggggtgcccaagctgcaatcgtggtttacgacattactaatcaggaaacctttgcccgagcaaagacatgggtgaaggaactacagcgacaggccagtcctagcatcgttattgccctggcagggaacaaagctgacctggccaacaaacgtatggtggagtatgaagtaaggtggcccgtggagttcctctctaacacttcctctgttcctgggacctctttttttccaaaccagcccggcccggcccccagcccggcccgg

SEQ ID NO: 450112 - DNA, 3348 bp, Homo sapiens
agggcgaggaggagaaggaggggcaggagggtttggttgagctgcagctgtttgtctgttcgacacaggcttggggccgacgggggagacggagccccaggagtgttgaagcctggaaatcccctccccttccccctcccccctttacagtatccccctccctccaccctttcccattctgataatctggccatgactagcagaagcacagctaggcccaatgggcaaccccaggccagcaaaatttgccagttcaaattggtcctgctgggagaatctgcagtgggaaagtcaagcctggtattacgttttgtcaaagggcagttccatgagtaccaggagagcaccattggagcggccttcctcacccagtccgtttgtctagatgacacaacagtgaagtttgagatctgggacacagctgggcaggagcgatatcacagcttagcccccatgtactacaggggtgcccaagctgcaatcgtggtttacgacattactaatcaggaaacctttgcccgagcaaagacatgggtgaaggaactacagcgacaggccagtcctagcatcgttattgccctggcagggaacaaagctgacctggccaacaaacgtatggtggagtatgaagaggcccaggcatatgcagatgacaacagcttattgttcatggagacttcagccaagacagctatgaacgtgaatgatctcttcctggcaatagctaagaagttgccaaagagtgaaccccagaatctgggaggtgcagcaggccgaagccggggtgtggatctccatgaacagtcccagcagaacaagagccagtgttgtagcaactgagggggtggctagcagcaaacaagtatggagctagcacaagagctaagaaataacctccatccctacccctcagcacacaacccctacggtaacagcacactgagccctggctcccaagggctgcctcctgacagctccgtcatggcactttttaacgcttcagcaacaaacaccaggcagctgttgccactggcctcctaccccctactctggggcttgggggtcaactccccccaggacttaccttccaaaacaaactttcttcactttgtattataggtacaagacagcgacttacgtatcttttctcctcctccctagtgttcctccccattttttcagaaaacacttctgactcctgtcccttccccttctgcttttggtcagtccctgttcttgagcctcttttctcctctccccaggatgcagaaagtggtgaacccaggaactgaggaaggaggtttccagttcatttacattaagggccctgggggagaataaagctcagagcaggagggagtaaggaaacatttcctttttgtttttatttggttggagtttctcatatttgaaaacattgcggtatccatgatttggccttgtggagggtgttcctaggtagaggtgagaatggggaggcaagatctcaggcaccaggcaggaggtgccttgtaagctaactgggcggaggtggaggtgcagtgtcaactgtggctctgtaactcttcaaaggcccagtttcccctcacgcagcctcttaggtagcgtttcccctaatcgtgggggttggaccccagagtcttccaaagaattttcactggttgcctgcatctttggctctgctgtgatctgattggaggagggacagtttctggtacccatcctctgatttatacatatgcattttttcccctctggcctttagatggcctcagccccagccaccatatacccctgcagtttgcactttaattgatggtagttcagttggggtacttgttttatggaagttttgattgatttacttgccctcccaccttctttttaattcaatgaaatctgaggttaatgcgaggttcgaggagaggttatagataaaactaccagtggcagctactcaagtcctatctccactgttagcttcctccaactctaattattaacctatattcttgccaagctaactattgactataggtttgcctttcctggagaattaattgagcaattgaggagtgtctcaggatagcacaggccaaggtaggggagtaaaaaggaggtcaggcaaaagggaggagttttctgtcctttcccaggtttcacactcaatttgatatccattaccatgtcttttctacttccttgtaaataggtatgatctttattcccactgtacagtctgttctatcctctgcctcccatcaggccctgtttctttgttcctttgttaatatcttgaatttagtccctccatccttaatccccccatccctccccatcatgcaaccagtggtttaatccatgtaccaataggggctagtaccacagaggcctcctgtggtgccctcgtatcataccacctgttcctgtggagagggaatgaccggcactgaaggtaccttacaactggctcatattatcagaggaccttggtcctttctaaatctctagtctctcttcatatccttcatcaggtgttttaagatgtctctgagaagccatcaaggcaaaagagaactttaagttccttgttccagcccggagttttgggaaagaaagaaaggaaaggtcacagtgacctaggattggaaccttcctgcccttttggcttgcagactgccttctatcccagaacagctgagaaatctatgaagctgagattctgaaggacccagcttaggttcttccacttaggcctcaattcccttccttttccaggggcagccttagttcccatggccctgaaacacacacatttcccccttcctttcccagaagccactggccccccatagcacccagtgcatcctttttacaagtggaagaactaggatggctttccaaagtcttctagaaatgaagttctttctctgtgcagctttcccccttggagcaggagtgaagatgtttcattatcttgggcctgggaaaccacttccccaggcttctccctccccccacccccataggaacaggatttggccttagcttctgggcctatcggctgccttccctctacttcctaccacctcttctgccttcctttgagctctgttgggcttggggatcttagttttcttttgtttatttcccagctcatttttttcttctggtcagtttttttaagggggggtgttgtggttttttgtttttgttttgcttctgagaaagcatttgcctttcttcctctcccaacataacaatcgtggtaacagaatgcgactgctgatttaccgatgtatttaatgtaagtaaaaaaaggaaaaaaagaaaagggcaaaaaaatgt

SEQ ID NO: 450113 - DNA, 3394 bp, Homo sapiens
agggcgaggaggagaaggaggggcaggagggtttggttgagctgcagctgtttgtctgttcgacacaggcttggggccgacgggggagacggagccccaggagtgttgaagcctggaaatcccctccccttccccctcccccctttacagtatccccctccctccaccctttcccattctgataatctggccatgactagcagaagcacagctaggcccaatgggcaaccccaggccagcaaaatttgccagttcaaattggtcctgctgggagaatctgcagtgggaaagtcaagcctggtattacgttttgtcaaagggcagttccatgagtaccaggagagcaccattggagcggccttcctcacccagtccgtttgtctagatgacacaacagtgaagtttgagatctgggacacagctgggcaggagcgatatcacagcttagcccccatgtactacaggggtgcccaagctgcaatcgtggtttacgacattactaatcaggaaacctttgcccgagcaaagacatgggtgaaggaactacagcgacaggccagtcctagcatcgttattgccctggcagggaacaaagctgacctggccaacaaacgtatggtggagtatgaagaggcccaggcatatgcagatgacaacagcttattgttcatggagacttcagccaagacagctatgaacgtgaatgatctcttcctggcaatagctaagaagttgccaaagagtgaaccccagaatctgggaggtgcagcaggccgaagccggggtgtggatctccatgaacagtcccagcagaacaagaacgggtaaaaaccaaaaagaatgcccaccaagggctttgggcttttgccagtgttgtagcaactgagggggtggctagcagcaaacaagtatggagctagcacaagagctaagaaataacctccatccctacccctcagcacacaacccctacggtaacagcacactgagccctggctcccaagggctgcctcctgacagctccgtcatggcactttttaacgcttcagcaacaaacaccaggcagctgttgccactggcctcctaccccctactctggggcttgggggtcaactccccccaggacttaccttccaaaacaaactttcttcactttgtattataggtacaagacagcgacttacgtatcttttctcctcctccctagtgttcctccccattttttcagaaaacacttctgactcctgtcccttccccttctgcttttggtcagtccctgttcttgagcctcttttctcctctccccaggatgcagaaagtggtgaacccaggaactgaggaaggaggtttccagttcatttacattaagggccctgggggagaataaagctcagagcaggagggagtaaggaaacatttcctttttgtttttatttggttggagtttctcatatttgaaaacattgcggtatccatgatttggccttgtggagggtgttcctaggtagaggtgagaatggggaggcaagatctcaggcaccaggcaggaggtgccttgtaagctaactgggcggaggtggaggtgcagtgtcaactgtggctctgtaactcttcaaaggcccagtttcccctcacgcagcctcttaggtagcgtttcccctaatcgtgggggttggaccccagagtcttccaaagaattttcactggttgcctgcatctttggctctgctgtgatctgattggaggagggacagtttctggtacccatcctctgatttatacatatgcattttttcccctctggcctttagatggcctcagccccagccaccatatacccctgcagtttgcactttaattgatggtagttcagttggggtacttgttttatggaagttttgattgatttacttgccctcccaccttctttttaattcaatgaaatctgaggttaatgcgaggttcgaggagaggttatagataaaactaccagtggcagctactcaagtcctatctccactgttagcttcctccaactctaattattaacctatattcttgccaagctaactattgactataggtttgcctttcctggagaattaattgagcaattgaggagtgtctcaggatagcacaggccaaggtaggggagtaaaaaggaggtcaggcaaaagggaggagttttctgtcctttcccaggtttcacactcaatttgatatccattaccatgtcttttctacttccttgtaaataggtatgatctttattcccactgtacagtctgttctatcctctgcctcccatcaggccctgtttctttgttcctttgttaatatcttgaatttagtccctccatccttaatccccccatccctccccatcatgcaaccagtggtttaatccatgtaccaataggggctagtaccacagaggcctcctgtggtgccctcgtatcataccacctgttcctgtggagagggaatgaccggcactgaaggtaccttacaactggctcatattatcagaggaccttggtcctttctaaatctctagtctctcttcatatccttcatcaggtgttttaagatgtctctgagaagccatcaaggcaaaagagaactttaagttccttgttccagcccggagttttgggaaagaaagaaaggaaaggtcacagtgacctaggattggaaccttcctgcccttttggcttgcagactgccttctatcccagaacagctgagaaatctatgaagctgagattctgaaggacccagcttaggttcttccacttaggcctcaattcccttccttttccaggggcagccttagttcccatggccctgaaacacacacatttcccccttcctttcccagaagccactggccccccatagcacccagtgcatcctttttacaagtggaagaactaggatggctttccaaagtcttctagaaatgaagttctttctctgtgcagctttcccccttggagcaggagtgaagatgtttcattatcttgggcctgggaaaccacttccccaggcttctccctccccccacccccataggaacaggatttggccttagcttctgggcctatcggctgccttccctctacttcctaccacctcttctgccttcctttgagctctgttgggcttggggatcttagttttcttttgtttatttcccagctcatttttttcttctggtcagtttttttaagggggggtgttgtggttttttgtttttgttttgcttctgagaaagcatttgcctttcttcctctcccaacataacaatcgtggtaacagaatgcgactgctgatttaccgatgtatttaatgtaagtaaaaaaaggaaaaaaagaaaagggcaaaaaaatgt

SEQ ID NO: 450114 - DNA, 3302 bp, Homo sapiens
agggcgaggaggagaaggaggggcaggagggtttggttgagctgcagctgtttgtctgttcgacacaggcttggggccgacgggggagacggagccccaggagtgttgaagcctggaaatcccctccccttccccctcccccctttacagtatccccctccctccaccctttcccattctgataatctggccatgactagcagaagcacagctaggcccaatgggcaaccccaggccagcaaaatttgccagttcaaattggtcctgctgggagaatctgcagtgggaaagtcaagcctggtattacgttttgtcaaagggcagttccatgagtaccaggagagcaccattggagcggccttcctcacccagtccgtttgtctagatgacacaacagtgaagtttgagatctgggacacagctgggcaggagcgatatcacagcttagcccccatgtactacaggggtgcccaagctgcaatcgtggtttacgacattactaatcaggaaacctttgcccgagcaaagacatgggtgaaggaactacagcgacaggccagtcctagcatcgttattgccctggcagggaacaaagctgacctggccaacaaacgtatggtggagtatgaagaggcccaggcatatgcagatgacaacagcttattgttcatggagacttcagccaagacagctatgaacgtgaatgatctcttcctggcaatagctaagaagttgccaaagagtgaaccccagaatctgggaggtgcagcaggccgaagccggggtgtggatctccatgaacagtcccagcagaacaagagccagtgttgtagcaactgagggggtggctagcagcaaacaagtatggagctagcacaagagctaagaaataacctccatccctacccctcagcacacaacccctacggtaacagcacactgagccctggctcccaagggctgcctcctgacagctccgtcatggcactttttaacgcttcagcaacaaacaccaggcagctgttgccactggcctcctaccccctactctggggcttgggggtcaactccccccaggacttaccttccaaaacaaactttcttcactttgtattataggtacaagacagcgacttacgtatcttttctcctcctccctagtgttcctccccattttttcagaaaacacttctgactcctgtcccttccccttctgcttttggtcagtccctgttcttgagcctcttttctcctctccccaggatgcagaaagtggtgaacccaggaactgaggaaggaggtttccagttcatttacattaagggccctgggggagaataaagctcagagcaggagggagtaaggaaacatttcctttttgtttttatttggttggagtttctcatatttgaaaacattgcggtatccatgatttggccttgtggagggtgttcctaggtagaggtgagaatggggaggcaagatctcaggcaccaggcaggaggtgccttgtaagctaactgggcggaggtggaggtgcagtgtcaactgtggctctgtaactcttcaaaggcccagtttcccctcacgcagcctcttaggtagcgtttcccctaatcgtgggggttggaccccagagtcttccaaagaattttcactggttgcctgcatctttggctctgatttatacatatgcattttttcccctctggcctttagatggcctcagccccagccaccatatacccctgcagtttgcactttaattgatggtagttcagttggggtacttgttttatggaagttttgattgatttacttgccctcccaccttctttttaattcaatgaaatctgaggttaatgcgaggttcgaggagaggttatagataaaactaccagtggcagctactcaagtcctatctccactgttagcttcctccaactctaattattaacctatattcttgccaagctaactattgactataggtttgcctttcctggagaattaattgagcaattgaggagtgtctcaggatagcacaggccaaggtaggggagtaaaaaggaggtcaggcaaaagggaggagttttctgtcctttcccaggtttcacactcaatttgatatccattaccatgtcttttctacttccttgtaaataggtatgatctttattcccactgtacagtctgttctatcctctgcctcccatcaggccctgtttctttgttcctttgttaatatcttgaatttagtccctccatccttaatccccccatccctccccatcatgcaaccagtggtttaatccatgtaccaataggggctagtaccacagaggcctcctgtggtgccctcgtatcataccacctgttcctgtggagagggaatgaccggcactgaaggtaccttacaactggctcatattatcagaggaccttggtcctttctaaatctctagtctctcttcatatccttcatcaggtgttttaagatgtctctgagaagccatcaaggcaaaagagaactttaagttccttgttccagcccggagttttgggaaagaaagaaaggaaaggtcacagtgacctaggattggaaccttcctgcccttttggcttgcagactgccttctatcccagaacagctgagaaatctatgaagctgagattctgaaggacccagcttaggttcttccacttaggcctcaattcccttccttttccaggggcagccttagttcccatggccctgaaacacacacatttcccccttcctttcccagaagccactggccccccatagcacccagtgcatcctttttacaagtggaagaactaggatggctttccaaagtcttctagaaatgaagttctttctctgtgcagctttcccccttggagcaggagtgaagatgtttcattatcttgggcctgggaaaccacttccccaggcttctccctccccccacccccataggaacaggatttggccttagcttctgggcctatcggctgccttccctctacttcctaccacctcttctgccttcctttgagctctgttgggcttggggatcttagttttcttttgtttatttcccagctcatttttttcttctggtcagtttttttaagggggggtgttgtggttttttgtttttgttttgcttctgagaaagcatttgcctttcttcctctcccaacataacaatcgtggtaacagaatgcgactgctgatttaccgatgtatttaatgtaagtaaaaaaaggaaaaaaagaaaagggcaaaaaaatgt

SEQ ID NO: 450115 - DNA, 1366 bp, Homo sapiens
agggcgaggaggagaaggaggggcaggagggtttggttgagctgcagctgtttgtctgttcgacacaggcttggggccgacgggggagacggagccccaggagtgttgaagcctggaaatcccctccccttccccctcccccctttacagtatccccctccctccaccctttcccattctgataatctggccatgactagcagaagcacagctaggcccaatgggcaaccccaggccagcaaaatttgccagttcaaattggtcctgctgggagaatctgcagtgggaaagtcaagcctggtattacgttttgtcaaagggcagttccatgagtaccaggagagcaccattggagcggccttcctcacccagtccgtttgtctagatgacacaacagtgaagtttgagatctgggacacagctgggcaggagcgatatcacagcttagcccccatgtactacaggggtgcccaagctgcaatcgtggtttacgacattactaatcaggaaacctttgcccgagcaaagacatgggtgaaggaactacagcgacaggccagtcctagcatcgttattgccctggcagggaacaaagctgacctggccaacaaacgtatggtggagtatgaagaggcccaggcatatgcagatgacaacagcttattgttcatggagacttcagccaagacagctatgaacgtgaatgatctcttcctggcaatagctaagaagttgccaaagagtgaaccccagaatctgggaggtgcagcaggccgaagccggggtgtggatctccatgaacagtcccagcagaacaagagccagtgttgtagcaactgagggggtggctagcagcaaacaagtatggagctagcacaagagctaagaaataacctccatccctacccctcagcacacaacccctacggtaacagcacactgagccctggctcccaagggctgcctcctgacagctccgtcatggcactttttaacgcttcagcaacaaacaccaggcagctgttgccactggcctcctaccccctactctggggcttgggggtcaactccccccaggacttaccttccaaaacaaactttcttcactttgtattataggtacaagacagcgacttacgtatcttttctcctcctccctagtgttcctccccattttttcagaaaacacttctgactcctgtcccttccccttctgcttttggtcagtccctgttcttgagcctcttttctcctctccccaggatgcagaaagtggtgaacccaggaactgaggaaggaggtttccagttcatttacattaagggccctgggggagaataaagctcagagcaggagggagtaagga

SEQ ID NO: 450116 - DNA, 577 bp, Homo sapiens
agggcgaggaggagaaggaggggcaggagggtttggttgagctgcagctgtttgtctgttcgacacaggcttggggccgacgggggagacggagccccaggagtgttgaagcctggaaatcccctccccttccccctcccccctttacagtatccccctccctccaccctttcccattctgataatctggccatgactagcagaagcacagctaggcccaatgggcaaccccaggccagcaaaatttgccagttcaaattggtcctgctgggagaatctgcagtgggaaagtcaagcctggtattacgttttgtcaaagggcagttccatgagtaccaggagagcaccattggagcggccttcctcacccagtccgtttgtctagatgacacaacagtgaagtttgagatctgggacacagctgggcaggagcgatatcacagcttagcacacaatgataactacatggggctacaccacaagcattttccaattacgacattttgtaatccgacacactgtgcacgacctgacaaaacaggatcgaacgaacaccagagacacacctgtcgataca

SEQ ID NO: 450117 - DNA, 2988 bp, Homo sapiens
tgctgcttggtttctcacacaaaccctgctgtggctgcttaccatcctcagcaagggtgcggaggaatggaaacttttgccaccaacagcatttgctagcaacttccctctctgtggtttttctgtcattcccttgataaaagaacttgagctgcgcaaaagtaaccaatcttcaccaatctcatcttcacatataaacagccgcctttcaagaagcaagctgccagaaaaatgatgcacgatgctctctaaactgggtcattctccacttggagggctcagggcacggttgactttccccgtctgtctcctataccacaggctctgggcatcaccagcggccccagggaaaaagaaagaaatgggaaacagcatgaaatccacccctgcgcctgccgagaggcccctgcccaacccggagggactggatagcgacttccttgccgtgctaagtgactacccgtctcctgacatcagccccccgatattccgccgaggggagaaactgcgtgtgatttctgatgaagggggctggtggaaagctatttctcttagcactggtcgagagagttacatccctggaatatgtgtggccagagtttaccatggctggctgtttgagggcctgggcagagacaaggccgaggagctgctgcagctgccagacacaaaggtcggctccttcatgatcagagagagtgagaccaagaaagggttttactcactgtcggtgagacacaggcaggtaaagcattaccgcattttccgtctgcccaacaactggtactacatttccccgaggctcaccttccagtgcctggaggacctggtgaaccactattctgaggtggctgatggcctgtgctgtgtgctcaccacgccctgcctgacacaaagcacggctgccccagcagtgagggcctccagctcacctgtcaccttgcgtcagaagactgtggactggaggagagtgtccagactgcaggaggaccccgagggaacagagaacccgcttggggtagacgagtcccttttcagctatggccttcgagagagcattgcctcttacctgtccctgaccagtgaggacaacacctcctttgatcgaaagaagaaaagcatctccctgatgtatggtggcagcaagagaaagagctcattcttctcatcaccaccttactttgaggactagccaagaacagacacaatggttcatgcccaaaaggaacagaagttccaactattgcctgggatcttgcgaaaagcgaggttccctgatccctgggagcctcacgtattttagaagccaagagaagccacatggagactcaaattcgcatcttctctatccacatcatgaccaaaggaacccctccctggtgtctgatcagggctgtggcatcacgaaacattggatcatgacatgtcgggcgatgcttggaagagcccagcatgtatgtatgcacacattgtgtgtgtgggaaggacaaagccactctcacaagaaagggcaccaggactgctctccaaggaactggacctgtccagacagttacactccaaggtcattggagagaacttctgtatgggcaagcctgagagggagaggaaacaaaagctgtgtcctggcagaaggtctgggtttgcagatgggtgccctgaatggaactactttaactaatccatagggacttctggtatgctttcctctctttttaaaggaacttcgtgacactaaacattagcccaaaggacttcttagccttcaattgggagatacctttggtctgctcctgcaccaaagccatatgggtggaagtcagttggcctccctggttctgcagagggccagaagaatgagagagaggaagactgctggcagggaaatcgaggaggcgagactagaactgcaccagcttccctgatgtctgcagccatggctttgcagcgcagacagagcttctctgggatgctgggattcttgcctgtatgaatgcatcaagtattcatttattgcccgaataggcattgcattaagtcctctgtaaggtgtcaggcaagccaaaaaaaaaaaaaagatgcgtaagtcctaacccccaacagaggtgttcacagtgtagacagggaaaaaatgtataaacaaatgtgtaaaaagagaaatcagctcatggcttaggatggaattagagacaggtgagggacactcaggagctcattttccagctgctcttcagagtggaagggctggctggatcgggtaggtaagaatagctggattttttagaaaagaaatggatacagtctaaagaattaactcacccggtactttattctaagaagggtctggcatccatatgaggaaaaatgctcagctccaggaaagatggggagtccaagtggattaatgatgtcatgcataattttaagagacaagggagaaaacacaatgtatagccagagaaggagaagctcccatccaaatcctactaggaagagagtgggctgcagatgaatctgtgactcatgtttccctgtttcaaagggatcctggggaaggaggggaacatgcttgcagtatctctccctgtctgtctgctcacataagcattccgtccatctgagctcatcgtgctactggtatgtgtatgtgcagttacacagttttctgtatcatagattctagtgtgtttatacaaggagacatctgtggtttccccaaccgttccaaaaggctatttcaaaggaaccagccaacgtatgagaaatgaatgtaacactgtggacattgacttcccgcataaggcagggtgaccccctgaactccagatgtctgcacagtatcttatgtgttgttttccgttgtgacgaatgtgattggaacatttggggagcacccagagggatttctcagtgggaagcattacactttgctaaatcatgtatttattcctgattaaaacaaacctaataaatatttaacccttggca

SEQ ID NO: 450118 - DNA, 1136 bp, Homo sapiens
tgctgcttggtttctcacacaaaccctgctgtggctgcttaccatcctcagcaagggtgcggaggaatggaaacttttgccaccaacagcatttgctagcaacttccctctctgtggtttttctgtcattcccttgataaaagaacttgagctgcgcaaaagtaaccaatcttcaccaatctcatcttcacatataaacagccgcctttcaagaagcaagctgccagaaaaatgatgcacgatgctctctaaactgggtcattctccacttggagggctcagggcacggttgactttccccgtctgtctcctataccacaggctctgggcatcaccagcggccccagggaaaaagaaagaaatgggaaacagcatgaaatccacccctgcgcctgccgagaggcccctgcccaacccggagggactggatagcgacttccttgccgtgctaagtgactacccgtctcctgacatcagccccccgatattccgccgaggggagaaactgcgtgtgatttctgagtgagtcagctctccaaaacttgtgcaatcttcaaagcaggataaacttggtttgggagaaaagtatttgattgttagctagagtggtctagttccacatgagtcctggtcctattatgaggtgagaaatttgacccatactgcaaccttcctctttaatgtggccagtgctctagaaccttccatagctccccactgcctggtagatcaaatttaaattccttaacttggcttttgagatcctttatgatccagcctcttctcatattcttcttatctcccaccacatgtgcagtgttgatgctatgtaggaatgaagaccgggaaggcagcccccagggtctggaaatccttcggatgagaaaaaacaaaaatttgccttctctcctcttacctctgcagtctgattcaatatgggctatagaacatgacagaagttctaagccccttttatttagatcttcactgattcagatatatgaaactatctttggctatactgcagagcataaatcaacatagtaaacatttatttttaaaaagcctccaacagttgggaacattagctgctaatccctgaaaagcagctatttctagcacatgggagggtttac

SEQ ID NO: 450119 - DNA, 4626 bp, Homo sapiens
tcatgaaatacaatattttaatattttgggggggacaagtcagtccttctgatcctcagctttctctgaaccataatcccagctcacagggcccctggggagaattagacaacgtgacgtgtaagcgtcagctgtgaggggtaatgtggggctatagctccagggtggagggtttacagtgtgcaagggcatcctagagccatgagacctacagggctctctgggtgttgggagatacctctttcgcttcttataacactgcaagagacagacagggtggctctcactgtgtccatttgaaggctaaagaaactgcagctcagaccagttcagcaactctcctacatcgtgtggctaaagctaagaattgtgacccatttttctgaatccaggtccccgcgatgccctgggttcagaccctaacaccctcccgtccctgagtgctggggatttaaggcagcagtgcctcctttcaggaaatcacacacacactggaaactcctgcatactcctcttactataatctgtcaccaaagactggatattcctgtgctggggctcgtgccagcgcctcgggctgccaggtgctgctttccaactcccacatgggctgccctccccctactgctacccacagggcccccactccacctgctcccagacgaggccaactcctggccaagcttaggggcacagcggaggcgctctgtttctgatttttctcgccttccttggagatgcctgtgcttggaagggaaggcagaacattgcatcttggaacaaatctgcttttgatcatgcaaatgaatgcctggataatgtaggcagactgtcaatttcaccagttagaaagaaagagaaaagggggagaaattccccatgacagcgactgatgaagaatttcaatagaaagctgctacttcagaaaataagatcatttgctgcgaatggagaacatctcaggcagccctgatgctccaccggctctgggcatcaccagcggccccagggaaaaagaaagaaatgggaaacagcatgaaatccacccctgcgcctgccgagaggcccctgcccaacccggagggactggatagcgacttccttgccgtgctaagtgactacccgtctcctgacatcagccccccgatattccgccgaggggagaaactgcgtgtgatttctgatgaagggggctggtggaaagctatttctcttagcactggtcgagagagttacatccctggaatatgtgtggccagagtttaccatggctggctgtttgagggcctgggcagagacaaggccgaggagctgctgcagctgccagacacaaaggtcggctccttcatgatcagagagagtgagaccaagaaagggttttactcactgtcggtgagacacaggcaggtaaagcattaccgcattttccgtctgcccaacaactggtactacatttccccgaggctcaccttccagtgcctggaggacctggtgaaccactattctgaggtggctgatggcctgtgctgtgtgctcaccacgccctgcctgacacaaagcacggctgccccagcagtgagggcctccagctcacctgtcaccttgcgtcagaagactgtggactggaggagagtgtccagactgcaggaggaccccgagggaacagagaacccgcttggggtagacgagtcccttttcagctatggccttcgagagagcattgcctcttacctgtccctgaccagtgaggacaacacctcctttgatcgaaagaagaaaagcatctccctgatgtatggtggcagcaagagaaagagctcattcttctcatcaccaccttactttgaggactagccaagaacagacacaatggttcatgcccaaaaggaacagaagttccaactattgcctgggatcttgcgaaaagcgaggttccctgatccctgggagcctcacgtattttagaagccaagagaagccacatggagactcaaattcgcatcttctctatccacatcatgaccaaaggaacccctccctggtgtctgatcagggctgtggcatcacgaaacattggatcatgacatgtcgggcgatgcttggaagagcccagcatgtatgtatgcacacattgtgtgtgtgggaaggacaaagccactctcacaagaaagggcaccaggactgctctccaaggaactggacctgtccagacagttacactccaaggtcattggagagaacttctgtatgggcaagcctgagagggagaggaaacaaaagctgtgtcctggcagaaggtctgggtttgcagatgggtgccctgaatggaactactttaactaatccatagggacttctggtatgctttcctctctttttaaaggaacttcgtgacactaaacattagcccaaaggacttcttagccttcaattgggagatacctttggtctgctcctgcaccaaagccatatgggtggaagtcagttggcctccctggttctgcagagggccagaagaatgagagagaggaagactgctggcagggaaatcgaggaggcgagactagaactgcaccagcttccctgatgtctgcagccatggctttgcagcgcagacagagcttctctgggatgctgggattcttgcctgtatgaatgcatcaagtattcatttattgcccgaataggcattgcattaagtcctctgtaaggtgtcaggcaagccaaaaaaaaaaaaaagatgcgtaagtcctaacccccaacagaggtgttcacagtgtagacagggaaaaaatgtataaacaaatgtgtaaaaagagaaatcagctcatggcttaggatggaattagagacaggtgagggacactcaggagctcattttccagctgctcttcagagtggaagggctggctggatcgggtaggtaagaatagctggattttttagaaaagaaatggatacagtctaaagaattaactcacccggtactttattctaagaagggtctggcatccatatgaggaaaaatgctcagctccaggaaagatggggagtccaagtggattaatgatgtcatgcataattttaagagacaagggagaaaacacaatgtatagccagagaaggagaagctcccatccaaatcctactaggaagagagtgggctgcagatgaatctgtgactcatgtttccctgtttcaaagggatcctggggaaggaggggaacatgcttgcagtatctctccctgtctgtctgctcacataagcattccgtccatctgagctcatcgtgctactggtatgtgtatgtgcagttacacagttttctgtatcatagattctagtgtgtttatacaaggagacatctgtggtttccccaaccgttccaaaaggctatttcaaaggaaccagccaacgtatgagaaatgaatgtaacactgtggacattgacttcccgcataaggcagggtgaccccctgaactccagatgtctgcacagtatcttatgtgttgttttccgttgtgacgaatgtgattggaacatttggggagcacccagagggatttctcagtgggaagcattacactttgctaaatcatgtatttattcctgattaaaacaaacctaataaatatttaacccttggcaaaaagggagagtttctgggttgaggaggatgggtggttcattcagaagctcagtgggtttcaaattttcaaataaacgtgcaactagagagagaggagtaaagatcacccagagaaacctggtgccagttagcagctcagcatcttctttaggtgtgaccttaagaaaaagcagattgtatgactctggggggtgtcttacgaaacttgaagatgggcctaagggattgaaggaaacaccaaattctgaacgattgttataaaaacgtcctgcctagattttctgcacgttacttgtgatagctgcgctatttgttcttccaagaatttctttctgcagatatttctggacacctactaaatagacactgctcaggtactggggctatagcaatgaaaaccagatgaggtctctgatatcatggagcttgacatcataaataaacaagatgcttggtaatgatggtgatgaggatgagggcaggctccaagcagtcacctggcaggcaggacatccttcaggtccaggcttaggaaaggcctccaagcagaggcaatgtttgggctgaggcctgaaagatgagcagcaaacagccttgtaaagatctaggaagtgtatggagtcagcaggaataatggggcaattcctgcaggcaggaagagcaagactgcatgctgaaggagctaaaaggaggcagggtggccagactgagggagctagggaaggagggagtgtgcttaggaggtatcaggaaggtcctgcagggccctagagggtaggggatggcatagggtccattccaggagacatgaggagccattgaaaggatccaagtagggggtaagaccatttcactgatatgtttaaaagatcatgctgtgtggaggacaaatctttaaaattccagcattgtattgtctattgacacacaaagtttgaaaataaaggggcaaaaaattttaatgcaaaaatgaac

SEQ ID NO: 450120 - DNA, 3319 bp, Homo sapiens
tcatgaaatacaatattttaatattttgggggggacaagtcagtccttctgatcctcagctttctctgaaccataatcccagctcacagggcccctggggagaattagacaacgtgacgtgtaagcgtcagctgtgaggggtaatgtggggctatagctccagggtggagggtttacagtgtgcaagggcatcctagagccatgagacctacagggctctctgggtgttgggagatacctctttcgcttcttataacactgcaagagacagacagggtggctctcactgtgtccatttgaaggctaaagaaactgcagctcagaccagttcagcaactctcctacatcgtgtggctaaagctaagaattgtgacccatttttctgaatccaggtccccgcgatgccctgggttcagaccctaacaccctcccgtccctgagtgctggggatttaaggcagcagtgcctcctttcaggaaatcacacacacactggaaactcctgcatactcctcttactataatctgtcaccaaagactggatattcctgtgctggggctcgtgccagcgcctcgggctgccaggtgctgctttccaactcccacatgggctgccctccccctactgctacccacagggcccccactccacctgctcccagacgaggccaactcctggccaagcttaggggcacagcggaggcgctctgtttctgatttttctcgccttccttggagatgcctgtgcttggaagggaaggcagaacattgcatcttggaacaaatctgcttttgatcatgcaaatgaatgcctggataatgtaggcagactgtcaatttcaccagttagaaagaaagagaaaagggggagaaattccccatgacagcgactgatgaagaatttcaatagaaagctgctacttcagaaaataagatcatttgctgcgaatggagaacatctcaggcagccctgatgctccaccggctctgggcatcaccagcggccccagggaaaaagaaagaaatgggaaacagcatgaaatccacccctgcgcctgccgagaggcccctgcccaacccggagggactggatagcgacttccttgccgtgctaagtgactacccgtctcctgacatcagccccccgatattccgccgaggggagaaactgcgtgtgatttctgatgaagggggctggtggaaagctatttctcttagcactggtcgagagagttacatccctggaatatgtgtggccagagtttaccatggctggctgtttgagggcctgggcagagacaaggccgaggagctgctgcagctgccagacacaaaggtcggctccttcatgatcagagagagtgagaccaagaaagggttttactcactgtcggtgagacacaggcaggtaaagcattaccgcattttccgtctgcccaacaactggtactacatttccccgaggctcaccttccagtgcctggaggacctggtgaaccactattctgaggtggctgatggcctgtgctgtgtgctcaccacgccctgcctgacacaaagcacggctgccccagcagtgagggcctccagctcacctgtcaccttgcgtcagaagactgtggactggaggagagtgtccagactgcaggaggaccccgagggaacagagaacccgcttggggtagacgagtcccttttcagctatggccttcgagagagcattgcctcttacctgtccctgaccagtgaggacaacacctcctttgatcgaaagaagaaaagcatctccctgatgtatggtggcagcaagagaaagagctcattcttctcatcaccaccttactttgaggactagccaagaacagacacaatggttcatgcccaaaaggaacagaagttccaactattgcctgggatcttgcgaaaagcgaggttccctgatccctgggagcctcacgtattttagaagccaagagaagccacatggagactcaaattcgcatcttctctatccacatcatgaccaaaggaacccctccctggtgtctgatcagggctgtggcatcacgaaacattggatcatgacatgtcgggcgatgcttggaagagcccagcatgtatgtatgcacacattgtgtgtgtgggaaggacaaagccactctcacaagaaagggcaccaggactgctctccaaggaactggacctgtccagacagttacactccaaggtcattggagagaacttctgtatgggcaagcctgagagggagaggaaacaaaagctgtgtcctggcagaaggtctgggtttgcagatgggtgccctgaatggaactactttaactaatccatagggacttctggtatgctttcctctctttttaaaggaacttcgtgacactaaacattagcccaaaggacttcttagccttcaattgggagatacctttggtctgctcctgcaccaaagccatatgggtggaagtcagttggcctccctggttctgcagagggccagaagaatgagagagaggaagactgctggcagggaaatcgaggaggcgagactagaactgcaccagcttccctgatgtctgcagccatggctttgcagcgcagacagagcttctctgggatgctgggattcttgcctgtatgaatgcatcaagtattcatttattgcccgaataggcattgcattaagtcctctgtaaggtgtcaggcaagccaaaaaaaaaaaaaagatgcgtaagtcctaacccccaacagaggtgttcacagtgtagacagggaaaaaatgtataaacaaatgtgtaaaaagagaaatcagctcatggcttaggatggaattagagacaggtgagggacactcaggagctcattttccagctgctcttcagagtggaagggctggctggatcgggtaggtaagaatagctggattttttagaaaagaaatggatacagtctaaagaattaactcacccggtactttattctaagaagggtctggcatccatatgaggaaaaatgctcagctccaggaaagatggggagtccaagtggattaatgatgtcatgcataattttaagagacaagggagaaaacacaatgtatagccagagaaggagaagctcccatccaaatcctactaggaagagagtgggctgcagatgaatctgtgactcatgtttccctgtttcaaagggatcctggggaaggaggggaacattgcctggaggtttttttttcttgtttggcctgttcacttaaatcattccgttcatattgaatccaatctgtctactagatttgggtttgg

SEQ ID NO: 450121 - DNA, 515 bp, Homo sapiens
gtaatcccagctacttgggaggctgaggcaggagaatcacttgaacctggaaggtggaggatgcagtgaaccaaggtcgcgccactgttctctagtctgggtgatagagcagggatccatttccaaaaaaaaaattacataaataaaaggaagagcagcagtgaagtgaggtggttatggaattggatgtcccagaaaaatgcattctaattttaactctatcaactgctgacatggtttcctgagcaaactacttaatcactggaaccctcagtattctcatctgtggaagagagatgatgcttcctgtctcagtgggttgaggtgaggattaggtttcaggtgcttagtacggtgggtggcgcattcctgcctttcctgggggagggcttgttccggatcctaatggctgtcttcctccttcccagctggctgtttgagggcctgggcagagacaaggccgaggagctgctgcagctgccagacacaaaggtcggctccttcatgatcagaga

SEQ ID NO: 450122 - DNA, 359 bp, Homo sapiens
aagtcattgtgtctctttagtctcctttaatctcaaagcattgctctggggtccattcggcagtaacagaaggaagctgcaaaaattgggaaaccgaaatcagagaagctgcagctcttagccacagccttcgtgggcccagagagttctggggatgtacaagagcaaattcacagccccattgatttgccttttaattagagaaagaagaccaagcttctgaaattccagaatccagagttaagctggccatattctcaaatgctttgtaaaaaaattaataacccatctatcttcccagtccttgcagagagaagcttgctcagagtggttactgaaaacaggaacctgcccttctg

SEQ ID NO: 450123 - DNA, 489 bp, Homo sapiens
gcatttgctagcaacttccctctctgtggtttttctgtcattcccttgataaaagaacttgagctgcgcaaaagtaaccaatcttcaccaatctcatcttcacatataaacagccgcctttcaagaagcaagctgccagaaaaatgatgcacgatgctctctaaactgggtcattctccacttggagggctcagggcacggttgactttccccgtctgtctcctataccacaggctctgggcatcaccagcggccccagggaaaaagaaagaaatgggaaacagcatgaaatccacccctgcgcctgccgagaggcccctgcccaacccggagggtaagtctggcttctctggtgagatgcttgagtctgtgctacaagagcctgtggtaaagactgggcggtggtggatgccggtaactacttaaatggggcaatgggtaccgaagggctcattatatctgtctctctagttttgtttgtggttcaaa

SEQ ID NO: 450124 - DNA, 3650 bp, Homo sapiens
tcatgaaatacaatattttaatattttgggggggacaagtcagtccttctgatcctcagctttctctgaaccataatcccagctcacagggcccctggggagaattagacaacgtgacgtgtaagcgtcagctgtgaggggtaatgtggggctatagctccagggtggagggtttacagtgtgcaagggcatcctagagccatgagacctacagggctctctgggtgttgggagatacctctttcgcttcttataacactgcaagagacagacagggtggctctcactgtgtccatttgaaggctaaagaaactgcagctcagaccagttcagcaactctcctacatcgtgtggctaaagctaagaattgtgacccatttttctgaatccaggtccccgcgatgccctgggttcagaccctaacaccctcccgtccctgagtgctggggatttaaggcagcagtgcctcctttcaggaaatcacacacacactggaaactcctgcatactcctcttactataatctgtcaccaaagactggatattcctgtgctggggctcgtgccagcgcctcgggctgccaggtgctgctttccaactcccacatgggctgccctccccctactgctacccacagggcccccactccacctgctcccagacgaggccaactcctggccaagcttaggggcacagcggaggcgctctgtttctgatttttctcgccttccttggagatgcctgtgcttggaagggaaggcagaacattgcatcttggaacaaatctgcttttgatcatgcaaatgaatgcctggataatgtaggcagactgtcaatttcaccagttagaaagaaagagaaaagggggagaaattccccatgacagcgactgatgaagaatttcaatagaaagctgctacttcagaaaataagatcatttgctgcgaatggagaacatctcaggcagccctgatgctccaccggctctgggcatcaccagcggccccagggaaaaagaaagaaatgggaaacagcatgaaatccacccctgcgcctgccgagaggcccctgcccaacccggagggactggatagcgacttccttgccgtgctaagtgactacccgtctcctgacatcagccccccgatattccgccgaggggagaaactgcgtgtgatttctgatgaagggggctggtggaaagctatttctcttagcactggtcgagagagttacatccctggaatatgtgtggccagagtttaccatggctggctgtttgagggcctgggcagagacaaggccgaggagctgctgcagctgccagacacaaaggtcggctccttcatgatcagagagagtgagaccaagaaagggttttactcactgtcggtgagacacaggcaggtaaagcattaccgcattttccgtctgcccaacaactggtactacatttccccgaggctcaccttccagtgcctggaggacctggtgaaccactattctgaggtggctgatggcctgtgctgtgtgctcaccacgccctgcctgacacaaagcacggctgccccagcagtgagggcctccagctcacctgtcaccttgcgtcagaagactgtggactggaggagagtgtccagactgcaggaggaccccgagggaacagagaacccgcttggggtagacgagtcccttttcagctatggccttcgagagagcattgcctcttacctgtccctgaccagtgaggacaacacctcctttgatcgaaagaagaaaagcatctccctgatgtatggtggcagcaagagaaagagctcattcttctcatcaccaccttactttgaggactagccaagaacagacacaatggttcatgcccaaaaggaacagaagttccaactattgcctgggatcttgcgaaaagcgaggttccctgatccctgggagcctcacgtattttagaagccaagagaagccacatggagactcaaattcgcatcttctctatccacatcatgaccaaaggaacccctccctggtgtctgatcagggctgtggcatcacgaaacattggatcatgacatgtcgggcgatgcttggaagagcccagcatgtatgtatgcacacattgtgtgtgtgggaaggacaaagccactctcacaagaaagggcaccaggactgctctccaaggaactggacctgtccagacagttacactccaaggtcattggagagaacttctgtatgggcaagcctgagagggagaggaaacaaaagctgtgtcctggcagaaggtctgggtttgcagatgggtgccctgaatggaactactttaactaatccatagggacttctggtatgctttcctctctttttaaaggaacttcgtgacactaaacattagcccaaaggacttcttagccttcaattgggagatacctttggtctgctcctgcaccaaagccatatgggtggaagtcagttggcctccctggttctgcagagggccagaagaatgagagagaggaagactgctggcagggaaatcgaggaggcgagactagaactgcaccagcttccctgatgtctgcagccatggctttgcagcgcagacagagcttctctgggatgctgggattcttgcctgtatgaatgcatcaagtattcatttattgcccgaataggcattgcattaagtcctctgtaaggtgtcaggcaagccaaaaaaaaaaaaaagatgcgtaagtcctaacccccaacagaggtgttcacagtgtagacagggaaaaaatgtataaacaaatgtgtaaaaagagaaatcagctcatggcttaggatggaattagagacaggtgagggacactcaggagctcattttccagctgctcttcagagtggaagggctggctggatcgggtaggtaagaatagctggattttttagaaaagaaatggatacagtctaaagaattaactcacccggtactttattctaagaagggtctggcatccatatgaggaaaaatgctcagctccaggaaagatggggagtccaagtggattaatgatgtcatgcataattttaagagacaagggagaaaacacaatgtatagccagagaaggagaagctcccatccaaatcctactaggaagagagtgggctgcagatgaatctgtgactcatgtttccctgtttcaaagggatcctggggaaggaggggaacatgcttgcagtatctctccctgtctgtctgctcacataagcattccgtccatctgagctcatcgtgctactggtatgtgtatgtgcagttacacagttttctgtatcatagattctagtgtgtttatacaaggagacatctgtggtttccccaaccgttccaaaaggctatttcaaaggaaccagccaacgtatgagaaatgaatgtaacactgtggacattgacttcccgcataaggcagggtgaccccctgaactccagatgtctgcacagtatcttatgtgttgttttccgttgtgacgaatgtgattggaacatttggggagcacccagagggatttctcagtgggaagcattacactttgctaaatcatgtatttattcctgattaaaacaaacctaataaatatttaacccttggca

SEQ ID NO: 450125 - DNA, 3928 bp, Homo sapiens
tcatgaaatacaatattttaatattttgggggggacaagtcagtccttctgatcctcagctttctctgaaccataatcccagctcacagggcccctggggagaattagacaacgtgacgtgtaagcgtcagctgtgaggggtaatgtggggctatagctccagggtggagggtttacagtgtgcaagggcatcctagagccatgagacctacagggctctctgggtgttgggagatacctctttcgcttcttataacactgcaagagacagacagggtggctctcactgtgtccatttgaaggctaaagaaactgcagctcagaccagttcagcaactctcctacatcgtgtggctaaagctaagaattgtgacccatttttctgaatccaggtccccgcgatgccctgggttcagaccctaacaccctcccgtccctgagtgctggggatttaaggcagcagtgcctcctttcaggaaatcacacacacactggaaactcctgcatactcctcttactataatctgtcaccaaagactggatattcctgtgctggggctcgtgccagcgcctcgggctgccaggtgctgctttccaactcccacatgggctgccctccccctactgctacccacagggcccccactccacctgctcccagacgaggccaactcctggccaagcttaggggcacagcggaggcgctctgtttctgatttttctcgccttccttggagatgcctgtgcttggaagggaaggcagaacattgcatcttggaacaaatctgcttttgatcatgcaaatgaatgcctggataatgtaggcagactgtcaatttcaccagttagaaagaaagagaaaagggggagaaattccccatgacagcgactgatgaagaatttcaatagaaagctgctacttcagaaaataagatcatttgctgcgaatggagaacatctcaggcagccctgatgctccaccgtccttgcagagagaagcttgctcagagtggttactgaaaacaggaacctgcccttctgcaagccctgtgccttcctcgttcctagcagaggaagtatgcggccagtttagcaactgcagttcttctgtgtagcatgggctgcttctccacaaccgcgagaggcccggctgcctgtttattctggagcagcagcagttgacagacggagaggcagtgactctgcacccagcaatccctctgcagacagctcccacaggagtcatgcccagtgtgtgaaggctctgggcatcaccagcggccccagggaaaaagaaagaaatgggaaacagcatgaaatccacccctgcgcctgccgagaggcccctgcccaacccggagggactggatagcgacttccttgccgtgctaagtgactacccgtctcctgacatcagccccccgatattccgccgaggggagaaactgcgtgtgatttctgatgaagggggctggtggaaagctatttctcttagcactggtcgagagagttacatccctggaatatgtgtggccagagtttaccatggctggctgtttgagggcctgggcagagacaaggccgaggagctgctgcagctgccagacacaaaggtcggctccttcatgatcagagagagtgagaccaagaaagggttttactcactgtcggtgagacacaggcaggtaaagcattaccgcattttccgtctgcccaacaactggtactacatttccccgaggctcaccttccagtgcctggaggacctggtgaaccactattctgaggtggctgatggcctgtgctgtgtgctcaccacgccctgcctgacacaaagcacggctgccccagcagtgagggcctccagctcacctgtcaccttgcgtcagaagactgtggactggaggagagtgtccagactgcaggaggaccccgagggaacagagaacccgcttggggtagacgagtcccttttcagctatggccttcgagagagcattgcctcttacctgtccctgaccagtgaggacaacacctcctttgatcgaaagaagaaaagcatctccctgatgtatggtggcagcaagagaaagagctcattcttctcatcaccaccttactttgaggactagccaagaacagacacaatggttcatgcccaaaaggaacagaagttccaactattgcctgggatcttgcgaaaagcgaggttccctgatccctgggagcctcacgtattttagaagccaagagaagccacatggagactcaaattcgcatcttctctatccacatcatgaccaaaggaacccctccctggtgtctgatcagggctgtggcatcacgaaacattggatcatgacatgtcgggcgatgcttggaagagcccagcatgtatgtatgcacacattgtgtgtgtgggaaggacaaagccactctcacaagaaagggcaccaggactgctctccaaggaactggacctgtccagacagttacactccaaggtcattggagagaacttctgtatgggcaagcctgagagggagaggaaacaaaagctgtgtcctggcagaaggtctgggtttgcagatgggtgccctgaatggaactactttaactaatccatagggacttctggtatgctttcctctctttttaaaggaacttcgtgacactaaacattagcccaaaggacttcttagccttcaattgggagatacctttggtctgctcctgcaccaaagccatatgggtggaagtcagttggcctccctggttctgcagagggccagaagaatgagagagaggaagactgctggcagggaaatcgaggaggcgagactagaactgcaccagcttccctgatgtctgcagccatggctttgcagcgcagacagagcttctctgggatgctgggattcttgcctgtatgaatgcatcaagtattcatttattgcccgaataggcattgcattaagtcctctgtaaggtgtcaggcaagccaaaaaaaaaaaaaagatgcgtaagtcctaacccccaacagaggtgttcacagtgtagacagggaaaaaatgtataaacaaatgtgtaaaaagagaaatcagctcatggcttaggatggaattagagacaggtgagggacactcaggagctcattttccagctgctcttcagagtggaagggctggctggatcgggtaggtaagaatagctggattttttagaaaagaaatggatacagtctaaagaattaactcacccggtactttattctaagaagggtctggcatccatatgaggaaaaatgctcagctccaggaaagatggggagtccaagtggattaatgatgtcatgcataattttaagagacaagggagaaaacacaatgtatagccagagaaggagaagctcccatccaaatcctactaggaagagagtgggctgcagatgaatctgtgactcatgtttccctgtttcaaagggatcctggggaaggaggggaacatgcttgcagtatctctccctgtctgtctgctcacataagcattccgtccatctgagctcatcgtgctactggtatgtgtatgtgcagttacacagttttctgtatcatagattctagtgtgtttatacaaggagacatctgtggtttccccaaccgttccaaaaggctatttcaaaggaaccagccaacgtatgagaaatgaatgtaacactgtggacattgacttcccgcataaggcagggtgaccccctgaactccagatgtctgcacagtatcttatgtgttgttttccgttgtgacgaatgtgattggaacatttggggagcacccagagggatttctcagtgggaagcattacactttgctaaatcatgtatttattcctgattaaaacaaacctaataaatatttaacccttggca

SEQ ID NO: 450126 - DNA, 1529 bp, Homo sapiens
cgctggagtcccgccccgccaggatcccgggagctgtccggccgcctcggtgctgatcccgccaccgcccacgggccgctagcagcgcagcgggcactatgagcgggggcgtctacggcggagatgaggtgggggcgctggtctttgacattggctccttctcagtccgcgctgggtacgctggggaggactgtcccaaggctgacttccccaccacagtggggctgctggccgcggaggaggggggcgggctggagctggagggggacaaagagaagaaagggaagatcttccacatcgacaccaatgccctgcacgtgcctcgggatggagcggaggtcatgtcgcccctcaagaatggcatgatcgaggactgggagtgcttccgagccatcctggatcacacctacagcaaacacgtcaagtctgagccaaacctgcacccagtgctcatgtccgaggctccgtggaacacacgggccaagcgggagaagctgacagagctgatgttcgagcagtacaacattcctgccttcttcttatgcaagacggctgtgctcaccgcctttgcaaacgggcggtccactggcctcgtgctggacagtggagccacccacaccacggccattccagtacatgacggctacgttctgcagcaaggcatcgtcaagtcccctctggcaggggacttcatctccatgcagtgccgggagctgttccaggagatggccattgacatcatcccaccttacatgatcgcagccaaggagcctgtccgggagggtgcccccccaaactggaagaagaaggagaagctaccccaggtctccaagtcctggcataactacatgtgtaatgaggtgatccaggacttccaggcctccgtgctgcaggtctcagactccccctacgatgaacaggtggctgcacaaatgcccacagtgcactacgagatgcccaatggctacaatacagactacggcgccgagcgactccgcatccctgagggcctgtttgatccctcgaacgtcaagggcctgtcggggaacaccatgttgggtgtgggccacgtggtgaccaccagcatcggcatgtgtgacattgatattcgcccgggcctgtacgggagtgtcattgtcaccggcgggaacacactgctgcagggcttcactgacaggctcaatcgagagctttcccagaagaccccaccgagcatgcgactgaaactcattgccagcaacagcaccatggagcgcaagttcagcccctggatcgggggttccatcctggcctcactgggcactttccagcagatgtggatctccaagcaggaatatgaggagggcgggaagcagtgcgtggagcgaaagtgcccctgatggcactcctccccacacacctgctcccaagctcagatggaagtcccttaacccccatgccacattgcccccctcctcctttccctcttgtcctcataaatggtgatgtttctgggttgaaagaagtaaaaatgttttaagaaaaaaaag

SEQ ID NO: 450127 - DNA, 1185 bp, Homo sapiens
cgctggagtcccgccccgccaggatcccgggagctgtccggccgcctcggtgctgatcccgccaccgcccacgggccgctagcagcgcagcgggcactatgagcgggggcgtctacggcggagtggaacacacgggccaagcgggagaagctgacagagctgatgttcgagcagtacaacattcctgccttcttcttatgcaagacggctgtgctcaccgcctttgcaaacgggcggtccactggcctcgtgctggacagtggagccacccacaccacggccattccagtacatgacggctacgttctgcagcaaggcatcgtcaagtcccctctggcaggggacttcatctccatgcagtgccgggagctgttccaggagatggccattgacatcatcccaccttacatgatcgcagccaaggagcctgtccgggagggtgcccccccaaactggaagaagaaggagaagctaccccaggtctccaagtcctggcataactacatgtgtaatgaggtgatccaggacttccaggcctccgtgctgcaggtctcagactccccctacgatgaacaggtggctgcacaaatgcccacagtgcactacgagatgcccaatggctacaatacagactacggcgccgagcgactccgcatccctgagggcctgtttgatccctcgaacgtcaagggcctgtcggggaacaccatgttgggtgtgggccacgtggtgaccaccagcatcggcatgtgtgacattgatattcgcccgggcctgtacgggagtgtcattgtcaccggcgggaacacactgctgcagggcttcactgacaggctcaatcgagagctttcccagaagaccccaccgagcatgcgactgaaactcattgccagcaacagcaccatggagcgcaagttcagcccctggatcgggggttccatcctggcctcactgggcactttccagcagatgtggatctccaagcaggaatatgaggagggcgggaagcagtgcgtggagcgaaagtgcccctgatggcactcctccccacacacctgctcccaagctcagatggaagtcccttaacccccatgccacattgcccccctcctcctttccctcttgtcctcataaatggtgatgtttctgggttgaaagaagtaaaaatgttttaagaaaaaaaag

SEQ ID NO: 450128 - DNA, 984 bp, Homo sapiens
acttacccatccgatgccagctttgcaaacgggcggtccactggcctcgtgctggacagtggagccacccacaccacggccattccagtacatgacggctacgttctgcagcaaggcatcgtcaagtcccctctggcaggggacttcatctccatgcagtgccgggagctgttccaggagatggccattgacatcatcccaccttacatgatcgcagccaaggagcctgtccgggagggtgcccccccaaactggaagaagaaggagaagctaccccaggtctccaagtcctggcataactacatgtgtaatgaggtgatccaggacttccaggcctccgtgctgcaggtctcagactccccctacgatgaacaggtggctgcacaaatgcccacagtgcactacgagatgcccaatggctacaatacagactacggcgccgagcgactccgcatccctgagggcctgtttgatccctcgaacgtcaagggcctgtcggggaacaccatgttgggtgtgggccacgtggtgaccaccagcatcggcatgtgtgacattgatattcgcccgggcctgtacgggagtgtcattgtcaccggcgggaacacactgctgcagggcttcactgacaggctcaatcgagagctttcccagaagaccccaccgagcatgcgactgaaactcattgccagcaacagcaccatggagcgcaagttcagcccctggatcgggggttccatcctggcctcactgggcactttccagcagatgtggatctccaagcaggaatatgaggagggcgggaagcagtgcgtggagcgaaagtgcccctgatggcactcctccccacacacctgctcccaagctcagatggaagtcccttaacccccatgccacattgcccccctcctcctttccctcttgtcctcataaatggtgatgtttctgggttgaaagaagtaaaaatgttttaagaaaaaaaag

SEQ ID NO: 450129 - DNA, 642 bp, Homo sapiens
cgctggagtcccgccccgccaggatcccgggagctgtccggccgcctcggtgctgatcccgccaccgcccacgggccgctagcagcgcagcgggcactatgagcgggggcgtctacggcggagatgaggtgggggcgctggtctttgacattggctccttctcagtccgcgctgggtacgctggggaggactgtcccaaggctgacttccccaccacagtggggctgctggccgcggaggaggggggcgggctggagctggagggggacaaagagaagaaagggaagatcttccacatcgacaccaatgccctgcacgtgcctcgggatggagcggaggtcatgtcgcccctcaagaatggcatgatcgaggactgggagtgcttccgagccatcctggatcacacctacagcaaacacgtcaagtctgagccaaacctgcacccagtgctcatgtccgaggctccgtggaacacacgggccaagcgggagaagctgacagagctgatgttcgagcagtacaacattcctgccttcttcttatgcaagacggctgtgctcaccgcgtatcctctggactgagctgctctgactgggtggagggctggggtggggcctgtgctgagctcagctgtgatgagct

SEQ ID NO: 450130 - DNA, 189 bp, Homo sapiens
atgaggtgggggcgctggtctttgacattggctccttctcagtccgcgctgggtacgctggggaggactgtcccaaggtgagccttccagtctcctctccaaatcctaggggcttcggacccttcttcaggctttccagtgacccagggctctcccagatcgcccagaagctctgctgagcgggaatat

SEQ ID NO: 450131 - DNA, 951 bp, Homo sapiens
cgctggagtcccgccccgccaggatcccgggagctgtccggccgcctcggtgctgatcccgccaccgcccacgggccgctagcagcgcagcgggcactatgagcgggggcgtctacggcggagatgaggtgggggcgctggtctttgacattggctccttctcagtccgcgctgggtacgctggggaggactgtcccaaggctgacttccccaccacagtggggctgctggccgcggaggaggggggcgggctggagctggagggggacaaagagaagaaagggaagatcttccacatcgacaccaatgccctgcacgtgcctcgggatggagcggaggtcatgtcgcccctcaagaatggcatgatcgaggactgggagtgcttccgagccatcctggatcacacctacagcaaacacgtcaagtctgagccaaacctgcacccagtgctcatgtccgaggctccgtggaacacacgggccaagcgggagaagctgacagagctgatgttcgagcagtacaacattcctgccttcttcttatgcaagacggctgtgctcaccgcctttgcaaacgggcggtccactggcctcgtgctggacagtggagccacccacaccacggccattccagtacatgacggctacgttctgcagcaaggcatcgtcaagtcccctctggcaggggacttcatctccatgcagtgccgggagctgttccaggagatggccattgacatcatcccaccttacatgatcgcagccaaggtggggcctctggggacatggagctgccactagagtcctggccactcgccccatggccgtcaaccctctgacacatgagatatcagagcagagagcagcaggctccccagtgggtcctggctccagttcctccttttataatcgaggcatccgaaatccagacaggctgagggatatgctgagg

SEQ ID NO: 450132 - DNA, 916 bp, Homo sapiens
cccctcttgcaggcagcacagcagagcctgcagcgccaggtagctgcagagctgggaacagtgccaggaaggtgggggtgggggtcaggtgggctaggaaagggtgttcctacactgtgcccccacaggagcctgtccgggagggtgcccccccaaactggaagaagaaggagaagctaccccaggtctccaagtcctggcataactacatgtgtaatgaggtgatccaggacttccaggcctccgtgctgcaggtctcagactccccctacgatgaacagcagagtcctgctcccttctgggtagggtggctgcacaaatgcccacagtgcactacgagatgcccaatggctacaatacagactacggcgccgagcgactccgcatccctgagggcctgtttgatccctcgaacgtcaagggcctgtcggggaacaccatgttgggtgtgggccacgtggtgaccaccagcatcggcatgtgtgacattgatattcgcccgggcctgtacgggagtgtcattgtcaccggcgggaacacactgctgcagggcttcactgacaggctcaatcgagagctttcccagaagaccccaccgagcatgcgactgaaactcattgccagcaacagcaccatggagcgcaagttcagcccctggatcgggggttccatcctggcctcactgggcactttccagcagatgtggatctccaagcaggaatatgaggagggcgggaagcagtgcgtggagcgaaagtgcccctgatggcactcctccccacacacctgctcccaagctcagatggaagtcccttaacccccatgccacattgcccccctcctcctttccctcttgtcctcataaatggtgatgtttctgggttgaaagaagtaaaaatgttttaagaaaaaaaag

SEQ ID NO: 450133 - DNA, 912 bp, Homo sapiens
tccgcctcccgcggcgtccacactcgccgcgcgcgcggcggcgggctggaccttgctggcccgcggcgccatgagccgcagcctggactcggcgcggagcttcctggagcggctggaagcgcggggcggccgggagggggcagtcctcgccggcgagttcagcgtgagtggcacacggggtccgcgagcggcgcgccccggccctggccctgcgtacgcctgtcctccgcgcacggcgggctctgcctttctgtctcggtgtccccggtgtctccccgcctcggggggtctctccgtgtttctctccccagcacttctctgtcgctcttgctgtctccgtcttcactctctgccccccggccccggagcgcgacgtccacggccaggccgggacggaccgtgcacaccctcgttcccggtgtcctcgtcgcgctcccggaacaacctggctgcgggcgggacaggtggggcgggcgccgcaggggagggcgggcggccctgctgcgctggacagccccggccccgccgcttctggcgacctgactgtcccctgtgaccacaggaaggaaggggctgcagcagggcgaagaggaacacggaggctgtggcgtggtgagggtgtgaacgccgggctcgaatccgcgtccgggcccgaatccgcttcccgtcccgaatccgcgtcccggccatccgcgtgtggtccaggcggtctacctggcccctctgacctcggcttctcccttggtgaaatggggacatgaatgaccaaactggtctaaggattaaatgatgtgggtgaaaagcacttagtacatattgggcgcacacttcgtaggggcgttcgtcactgcctataaagattctaaacgtgggccaggtgcggtggctcacacctgtaatcccagcactttg

SEQ ID NO: 450134 - DNA, 465 bp, Homo sapiens
ataaaaagacctccagataggcagacagacagatggaccaccaacctggacagacagccaaagcttcagagatacagtccacaggtggccgaagggtccccgggacccgcctgctgagtggacccgggtgtaagtctaacgccagttcctgcctgttgcctcttgtgagctcggactgctgatgccccggtgctgctgagcgccgtgcgcagaatggaaacagtgggcctggatcaaagttaaagtttctcagggtgggaaatgtgggggctttgccccaatgactgtagcattcaagcaatcctcctgcctcagcctcccaaagtgctgagattacaggtgtgagccaccaggctcagccccctaagatttgaaacactttaaatggcccatggtagggttcctgctaggataaaacattaagcggctgttaaaagaaataaaaggaggacacgtctctgtgca

SEQ ID NO: 450135 - DNA, 4456 bp, Homo sapiens
tccgcctcccgcggcgtccacactcgccgcgcgcgcggcggcgggctggaccttgctggcccgcggcgccatgagccgcagcctggactcggcgcggagcttcctggagcggctggaagcgcggggcggccgggagggggcagtcctcgccggcgagttcagcgacatccaggcctgctcggccgcctggaaggctgacggcgtgtgctccaccgtggccggcagtcggccagagaacgtgaggaagaaccgctacaaagacgtgctgccttatgatcagacgcgagtaatcctctccctgctccaggaagagggacacagcgactacattaatggcaacttcatccggggcgtggatggaagcctggcctacattgccacgcaaggacccttgcctcacaccctgctagacttctggagactggtctgggagtttggggtcaaggtcagcacttgggggtgcggcacaatggtggggtcaacatctaagtaccccctcggcagtttccctggccccctcacccaaatcaccttcctctcccctgaccctccttgtctaggtgatcctgatggcctgtcgagagatagagaatgggcggaaaaggtgtgagcggtactgggcccaggagcaggagccactgcagactgggcttttctgcatcactctgataaaggagaagtggctgaatgaggacatcatgctcaggaccctcaaggtcacattccagaaggagtcccgttctgtgtaccagctacagtatatgtcctggccagaccgtggggtccccagcagtcctgaccacatgctcgccatggtggaggaagcccgtcgcctccagggatctggccctgaacccctctgtgtccactgcaggttttggaaatgggcttcaggagggtctggtgaggcagaggggacagagcatggaggggagtacagggcatggggctagtcttgtagtctgagtgcctattttgagaacccttgctcaccctccatggactgtaattgtgagcacttgttcagcacagactcagctggggaataagcacacagctcttgctcaacaaaatgtaagtgattaaaaaggttttccttgttcagatataatctgaagattctgggaatcaagaggctctgcaggggatccatcaggaccctcacccccatccccaaatgccccatctaaaaggggttgtggtcaggacctgaccaggcacactctgattctcttgtcagtgcgggttgtgggcgaacaggcgtcctgtgcaccgtggattatgtgaggcagctgctcctgacccaggtacgatacaggcatcctgtgtgtgcagtgtgctgcccatgaccacgtgtcctgctcaagtgccttgtctgtctgccccagatgatcccacctgacttcagtctctttgatgtggtccttaagatgaggaagcagcggcctgcggccgtgcagacagaggtgaaccctgggtctcctaatcttcagggacagtggcccactgctgtcatttgcccctgccttcccttcttgatggtccctcaccccaacaggagcagtacaggttcctgtaccacacggtggctcagatgttctgctccacactccagaatgccagcccccactaccagaacatcaaagagaattgtgccccactctacgacgatgccctcttcctccggactccccaggcacttctcgccataccccgcccaccaggaggggtcctcagggcgctagggacacagaagcgaggcctccaacccaaggagccctccctcccatctagcgcaccgcctcggcgggaaggaagcccgtggtttgcgcgctgagcagcctccccactcccgccctgcccagcgccgccgtttcacttcctcccggccctccctgcctgcaggagcatctctgtgcccgggtccccgggccacgccatggctgacacctacgcggtggtgcagaagcgcggggctccagcgggcgccgggagtgggacgcagacggggacggggacggggacgggggcgcgcagcgcggaggaggcgccgctctacagcaaggtgacgccgcgcgcccagcgacccggggcgcacgcggaggacgcgagggggacgctgcctggccgcgttcctgctgaccaaagtcctgccggatctggcgcctacgaggacgtggcgggtggagctcagaccggtgggctaggtttcaacctgcgcattgggaggccgaagggtccccgggacccgcctgctgagtggacccgggtgtaagtctaacgccagttcctgcctgttgcctcttgtgagctcggactgctgatgccccggtgctgctgagcgccgtgcgcagaatggaaacagtgggcctggatcaaagttaaagtttctcagggtgggaaatgtgggggctttgccccaatgactgtagcattcaaggcttgaggctggaggaggtagctagggtatagtggctggtgaggctgcacagagcagattcaagaaagaagatcaggaaggggcatgacccctgagttatgaaggggagaagggacagatgagcttccggagactgctctcctcaccacacagcactagtccatcctcagcacctgagcctccctcacttggacactcaggggaccacacagagaagtggatggacacttcgccatccaggcagaactaagccaggcataaccacagccaagcagattaaccccaggcagaccgataaaaagacctccagataggcagacagacagatggaccaccaacctggacagacagccaaagcttcagagatacagtccacaggtggacaaagggatccccagccagagagagagagaccagccaacagcttgatagaccagtgcagccagagagaccaccaaacagagcccccaaaagacagacatctctgctagctggacagccaggtggaccccctaagttagattactagacagatataaacagatcccctgctgaacagatacacagagttctcagaccccacccccaccctcaggtgggctggctggctgacagaccttctggccagacagactcctaaccaaccagatggactgccagacaggcagacatcagccacatggaatcctgacatcccagccagccggccagactctcatcttgatgtcttgatggatggaccccagctagtcagacatgatcctccagattgacagacaagtcccccaaatgagtacacatctccagctattcagacagatggacccccagcaaatcaggacctatctaggcagaccccagccagacccccgccagacagactcccaaccagactgaccccttactattcacacagcctgccgagtagctgggactacaggtctaattttttttttttttaagaaatgagtttttgccatgttgcccagactggtcttgaactcccaacctcaagcaatcctcctgcctcagcctcccaaagtgctgagattacaggtgtgagccaccaggctcagccccctaagatttgaaacactttaaatggcccatggtagggttcctgctaggataaaacattaagcggctgttaaaagaaataaaaggaggacacgtctctgtgcactggtgtggacaaatctccaagtcactgcaaaatggaaaaagtataagatgctctttccctgaacctcaagggtcccgcccctctcactttcaggtctctggacctctgactgacactgtgcctgcccaggtccctgtatgcactgccacagtgccctgggccccatgtccacccctgtcctgcccttctctgggatagggctggccttcctctgcctctgcctggctgcatccatggtcgatctcaagtgccttggcatgaactccactctcctgcagccttcaatcaaggaatgatggggatgtgtacataccccaccccaccccttggcagggtgatgctgaggtgtggatttttaacagttcccagactttcccaggaggcttgggtttgggtgcccacagtgggagctggtgtgatatcataccttcgccggccgcctttccttcctgttctctgtgcccctactcccactctagagctgccccgtttctctgttttcgtgaaagagctgaccctgtgctgcctcccactctcccaatgcccctgccactcctgtgagcctgctgctggtgaggtcggtgctgacctctgtgttgctggataatgagtcatctatctctggaggagaagaaaggcaggtcctccacagccctgataaaatctccaagtctcccagtttcgggtccctctcctgggatgcagacccactgcctgcccagctggtacgatccacatgccctcttcttgggaataggggcatgggaaagtgactaaagatactgttctggctgctgtgttcactgtgagtaataaactgtccatttctccga

SEQ ID NO: 450136 - DNA, 4375 bp, Homo sapiens
tccgcctcccgcggcgtccacactcgccgcgcgcgcggcggcgggctggaccttgctggcccgcggcgccatgagccgcagcctggactcggcgcggagcttcctggagcggctggaagcgcggggcggccgggagggggcagtcctcgccggcgagttcagcgacatccaggcctgctcggccgcctggaaggctgacggcgtgtgctccaccgtggccggcagtcggccagagaacgtgaggaagaaccgctacaaagacgtgctgccttatgatcagacgcgagtaatcctctccctgctccaggaagagggacacagcgactacattaatggcaacttcatccggggcgtggatggaagcctggcctacattgccacgcaaggacccttgcctcacaccctgctagacttctggagactggtctgggagtttggggtcaaggtcagcacttgggggtgcggcacaatggtggggtcaacatctaagtaccccctcggcagtttccctggccccctcacccaaatcaccttcctctcccctgaccctccttgtctaggtgatcctgatggcctgtcgagagatagagaatgggcggaaaaggtgtgagcggtactgggcccaggagcaggagccactgcagactgggcttttctgcatcactctgataaaggagaagtggctgaatgaggacatcatgctcaggaccctcaaggtcacattccagaaggagtcccgttctgtgtaccagctacagtatatgtcctggccagaccgtggggtccccagcagtcctgaccacatgctcgccatggtggaggaagcccgtcgcctccagggatctggccctgaacccctctgtgtccactgcaggttttggaaatgggcttcaggagggtctggtgaggcagaggggacagagcatggaggggagtacagggcatggggctagtcttgtagtctgagtgcctattttgagaacccttgctcaccctccatggactgtaattgtgagcacttgttcagcacagactcagctggggaataagcacacagctcttgctcaacaaaatgtaagtgattaaaaaggttttccttgttcagatataatctgaagattctgggaatcaagaggctctgcaggggatccatcaggaccctcacccccatccccaaatgccccatctaaaaggggttgtggtcaggacctgaccaggcacactctgattctcttgtcagtgcgggttgtgggcgaacaggcgtcctgtgcaccgtggattatgtgaggcagctgctcctgacccagatgatcccacctgacttcagtctctttgatgtggtccttaagatgaggaagcagcggcctgcggccgtgcagacagaggtgaaccctgggtctcctaatcttcagggacagtggcccactgctgtcatttgcccctgccttcccttcttgatggtccctcaccccaacaggagcagtacaggttcctgtaccacacggtggctcagatgttctgctccacactccagaatgccagcccccactaccagaacatcaaagagaattgtgccccactctacgacgatgccctcttcctccggactccccaggcacttctcgccataccccgcccaccaggaggggtcctcagggcgctagggacacagaagcgaggcctccaacccaaggagccctccctcccatctagcgcaccgcctcggcgggaaggaagcccgtggtttgcgcgctgagcagcctccccactcccgccctgcccagcgccgccgtttcacttcctcccggccctccctgcctgcaggagcatctctgtgcccgggtccccgggccacgccatggctgacacctacgcggtggtgcagaagcgcggggctccagcgggcgccgggagtgggacgcagacggggacggggacggggacgggggcgcgcagcgcggaggaggcgccgctctacagcaaggtgacgccgcgcgcccagcgacccggggcgcacgcggaggacgcgagggggacgctgcctggccgcgttcctgctgaccaaagtcctgccggatctggcgcctacgaggacgtggcgggtggagctcagaccggtgggctaggtttcaacctgcgcattgggaggccgaagggtccccgggacccgcctgctgagtggacccgggtgtaagtctaacgccagttcctgcctgttgcctcttgtgagctcggactgctgatgccccggtgctgctgagcgccgtgcgcagaatggaaacagtgggcctggatcaaagttaaagtttctcagggtgggaaatgtgggggctttgccccaatgactgtagcattcaaggcttgaggctggaggaggtagctagggtatagtggctggtgaggctgcacagagcagattcaagaaagaagatcaggaaggggcatgacccctgagttatgaaggggagaagggacagatgagcttccggagactgctctcctcaccacacagcactagtccatcctcagcacctgagcctccctcacttggacactcaggggaccacacagagaagtggatggacacttcgccatccaggcagaactaagccaggcataaccacagccaagcagattaaccccaggcagaccgataaaaagacctccagataggcagacagacagatggaccaccaacctggacagacagccaaagcttcagagatacagtccacaggtggacaaagggatccccagccagagagagagagaccagccaacagcttgatagaccagtgcagccagagagaccaccaaacagagcccccaaaagacagacatctctgctagctggacagccaggtggaccccctaagttagattactagacagatataaacagatcccctgctgaacagatacacagagttctcagaccccacccccaccctcaggtgggctggctggctgacagaccttctggccagacagactcctaaccaaccagatggactgccagacaggcagacatcagccacatggaatcctgacatcccagccagccggccagactctcatcttgatgtcttgatggatggaccccagctagtcagacatgatcctccagattgacagacaagtcccccaaatgagtacacatctccagctattcagacagatggacccccagcaaatcaggacctatctaggcagaccccagccagacccccgccagacagactcccaaccagactgaccccttactattcacacagcctgccgagtagctgggactacaggtctaattttttttttttttaagaaatgagtttttgccatgttgcccagactggtcttgaactcccaacctcaagcaatcctcctgcctcagcctcccaaagtgctgagattacaggtgtgagccaccaggctcagccccctaagatttgaaacactttaaatggcccatggtagggttcctgctaggataaaacattaagcggctgttaaaagaaataaaaggaggacacgtctctgtgcactggtgtggacaaatctccaagtcactgcaaaatggaaaaagtataagatgctctttccctgaacctcaagggtcccgcccctctcactttcaggtctctggacctctgactgacactgtgcctgcccaggtccctgtatgcactgccacagtgccctgggccccatgtccacccctgtcctgcccttctctgggatagggctggccttcctctgcctctgcctggctgcatccatggtcgatctcaagtgccttggcatgaactccactctcctgcagccttcaatcaaggaatgatggggatgtgtacataccccaccccaccccttggcagggtgatgctgaggtgtggatttttaacagttcccagactttcccaggaggcttgggtttgggtgcccacagtgggagctggtgtgatatcataccttcgccggccgcctttccttcctgttctctgtgcccctactcccactctagagctgccccgtttctctgttttcgtgaaagagctgaccctgtgctgcctcccactctcccaatgcccctgccactcctgtgagcctgctgctggtgaggtcggtgctgacctctgtgttgctggataatgagtcatctatctctggaggagaagaaaggcaggtcctccacagccctgataaaatctccaagtctcccagtttcgggtccctctcctgggatgcagacccactgcctgcccagctggtacgatccacatgccctcttcttgggaataggggcatgggaaagtgactaaagatactgttctggctgctgtgttcactgtgagtaataaactgtccatttctccga

SEQ ID NO: 450137 - DNA, 3634 bp, Homo sapiens
tccgcctcccgcggcgtccacactcgccgcgcgcgcggcggcgggctggaccttgctggcccgcggcgccatgagccgcagcctggactcggcgcggagcttcctggagcggctggaagcgcggggcggccgggagggggcagtcctcgccggcgagttcagcgacatccaggcctgctcggccgcctggaaggctgacggcgtgtgctccaccgtggccggcagtcggccagagaacgtgaggaagaaccgctacaaagacgtgctgccttatgatcagacgcgagtaatcctctccctgctccaggaagagggacacagcgactacattaatggcaacttcatccggggcgtggatggaagcctggcctacattgccacgcaaggacccttgcctcacaccctgctagacttctggagactggtctgggagtttggggtcaaggtgatcctgatggcctgtcgagagatagagaatgggcggaaaaggtgtgagcggtactgggcccaggagcaggagccactgcagactgggcttttctgcatcactctgataaaggagaagtggctgaatgaggacatcatgctcaggaccctcaaggtcacattccagaaggagtcccgttctgtgtaccagctacagtatatgtcctggccagaccgtggggtccccagcagtcctgaccacatgctcgccatggtggaggaagcccgtcgcctccagggatctggccctgaacccctctgtgtccactgcagtgcgggttgtgggcgaacaggcgtcctgtgcaccgtggattatgtgaggcagctgctcctgacccagatgatcccacctgacttcagtctctttgatgtggtccttaagatgaggaagcagcggcctgcggccgtgcagacagaggagcagtacaggttcctgtaccacacggtggctcagatgttctgctccacactccagaatgccagcccccactaccagaacatcaaagagaattgtgccccactctacgacgatgccctcttcctccggactccccaggcacttctcgccataccccgcccaccaggaggggtcctcaggagcatctctgtgcccgggtccccgggccacgccatggctgacacctacgcggtggtgcagaagcgcggggctccagcgggcgccgggagtgggacgcagacggggacggggacggggacgggggcgcgcagcgcggaggaggcgccgctctacagcaaggtgacgccgcgcgcccagcgacccggggcgcacgcggaggacgcgagggggacgctgcctggccgcgttcctgctgaccaaagtcctgccggatctggcgcctacgaggacgtggcgggtggagctcagaccggtgggctaggtttcaacctgcgcattgggaggccgaagggtccccgggacccgcctgctgagtggacccgggtgtaagtctaacgccagttcctgcctgttgcctcttgtgagctcggactgctgatgccccggtgctgctgagcgccgtgcgcagaatggaaacagtgggcctggatcaaagttaaagtttctcagggtgggaaatgtgggggctttgccccaatgactgtagcattcaaggcttgaggctggaggaggtagctagggtatagtggctggtgaggctgcacagagcagattcaagaaagaagatcaggaaggggcatgacccctgagttatgaaggggagaagggacagatgagcttccggagactgctctcctcaccacacagcactagtccatcctcagcacctgagcctccctcacttggacactcaggggaccacacagagaagtggatggacacttcgccatccaggcagaactaagccaggcataaccacagccaagcagattaaccccaggcagaccgataaaaagacctccagataggcagacagacagatggaccaccaacctggacagacagccaaagcttcagagatacagtccacaggtggacaaagggatccccagccagagagagagagaccagccaacagcttgatagaccagtgcagccagagagaccaccaaacagagcccccaaaagacagacatctctgctagctggacagccaggtggaccccctaagttagattactagacagatataaacagatcccctgctgaacagatacacagagttctcagaccccacccccaccctcaggtgggctggctggctgacagaccttctggccagacagactcctaaccaaccagatggactgccagacaggcagacatcagccacatggaatcctgacatcccagccagccggccagactctcatcttgatgtcttgatggatggaccccagctagtcagacatgatcctccagattgacagacaagtcccccaaatgagtacacatctccagctattcagacagatggacccccagcaaatcaggacctatctaggcagaccccagccagacccccgccagacagactcccaaccagactgaccccttactattcacacagcctgccgagtagctgggactacaggtctaattttttttttttttaagaaatgagtttttgccatgttgcccagactggtcttgaactcccaacctcaagcaatcctcctgcctcagcctcccaaagtgctgagattacaggtgtgagccaccaggctcagccccctaagatttgaaacactttaaatggcccatggtagggttcctgctaggataaaacattaagcggctgttaaaagaaataaaaggaggacacgtctctgtgcactggtgtggacaaatctccaagtcactgcaaaatggaaaaagtataagatgctctttccctgaacctcaagggtcccgcccctctcactttcaggtctctggacctctgactgacactgtgcctgcccaggtccctgtatgcactgccacagtgccctgggccccatgtccacccctgtcctgcccttctctgggatagggctggccttcctctgcctctgcctggctgcatccatggtcgatctcaagtgccttggcatgaactccactctcctgcagccttcaatcaaggaatgatggggatgtgtacataccccaccccaccccttggcagggtgatgctgaggtgtggatttttaacagttcccagactttcccaggaggcttgggtttgggtgcccacagtgggagctggtgtgatatcataccttcgccggccgcctttccttcctgttctctgtgcccctactcccactctagagctgccccgtttctctgttttcgtgaaagagctgaccctgtgctgcctcccactctcccaatgcccctgccactcctgtgagcctgctgctggtgaggtcggtgctgacctctgtgttgctggataatgagtcatctatctctggaggagaagaaaggcaggtcctccacagccctgataaaatctccaagtctcccagtttcgggtccctctcctgggatgcagacccactgcctgcccagctggtacgatccacatgccctcttcttgggaataggggcatgggaaagtgactaaagatactgttctggctgctgtgttcactgtgagtaataaactgtccatttctccga

SEQ ID NO: 450138 - DNA, 4265 bp, Homo sapiens
tccgcctcccgcggcgtccacactcgccgcgcgcgcggcggcgggctggaccttgctggcccgcggcgccatgagccgcagcctggactcggcgcggagcttcctggagcggctggaagcgcggggcggccgggagggggcagtcctcgccggcgagttcagcgacatccaggcctgctcggccgcctggaaggctgacggcgtgtgctccaccgtggccggcagtcggccagagaacgtgaggaagaaccgctacaaagacgtgctgccttatgatcagacgcgagtaatcctctccctgctccaggaagagggacacagcgactacattaatggcaacttcatccggggcgtggatggaagcctggcctacattgccacgcaaggacccttgcctcacaccctgctagacttctggagactggtctgggagtttggggtcaaggtcagcacttgggggtgcggcacaatggtggggtcaacatctaagtaccccctcggcagtttccctggccccctcacccaaatcaccttcctctcccctgaccctccttgtctaggtgatcctgatggcctgtcgagagatagagaatgggcggaaaaggtgtgagcggtactgggcccaggagcaggagccactgcagactgggcttttctgcatcactctgataaaggagaagtggctgaatgaggacatcatgctcaggaccctcaaggtcacattccagaaggagtcccgttctgtgtaccagctacagtatatgtcctggccagaccgtggggtccccagcagtcctgaccacatgctcgccatggtggaggaagcccgtcgcctccagggatctggccctgaacccctctgtgtccactgcaggttttggaaatgggcttcaggagggtctggtgaggcagaggggacagagcatggaggggagtacagggcatggggctagtcttgtagtctgagtgcctattttgagaacccttgctcaccctccatggactgtaattgtgagcacttgttcagcacagactcagctggggaataagcacacagctcttgctcaacaaaatgtaagtgattaaaaaggttttccttgttcagatataatctgaagattctgggaatcaagaggctctgcaggggatccatcaggaccctcacccccatccccaaatgccccatctaaaaggggttgtggtcaggacctgaccaggcacactctgattctcttgtcagtgcgggttgtgggcgaacaggcgtcctgtgcaccgtggattatgtgaggcagctgctcctgacccaggtacgatacaggcatcctgtgtgtgcagtgtgctgcccatgaccacgtgtcctgctcaagtgccttgtctgtctgccccagatgatcccacctgacttcagtctctttgatgtggtccttaagatgaggaagcagcggcctgcggccgtgcagacagaggtgaaccctgggtctcctaatcttcagggacagtggcccactgctgtcatttgcccctgccttcccttcttgatggtccctcaccccaacaggagcagtacaggttcctgtaccacacggtggctcagatgttctgctccacactccagaatgccagcccccactaccagaacatcaaagagaattgtgccccactctacgacgatgccctcttcctccggactccccaggcacttctcgccataccccgcccaccaggaggggtcctcagggcgctagggacacagaagcgaggcctccaacccaaggagccctccctcccatctagcgcaccgcctcggcgggaaggaagcccgtggtttgcgcgctgagcagcctccccactcccgccctgcccagcgccgccgtttcacttcctcccggccctccctgcctgcaggagcatctctgtgcccgggtccccgggccacgccatggctgacacctacgcggtggtgcagaagcgcggggctccagcgggcgccgggagtgggacgcagacggggacggggacggggacgggggcgcgcagcgcggaggaggcgccgctctacagcaaggtgacgccgcgcgcccagcgacccggggcgcacgcggaggacgcgagggggacgctgcctggccgcgttcctgctgaccaaagtcctgccggatctggcgcctacgaggacgtggcgggtggagctcagaccggtgggctaggtttcaacctgcgcattgggaggccgaagggtccccgggacccgcctgctgagtggacccgggtgtaagtctaacgccagttcctgctgcacagagcagattcaagaaagaagatcaggaaggggcatgacccctgagttatgaaggggagaagggacagatgagcttccggagactgctctcctcaccacacagcactagtccatcctcagcacctgagcctccctcacttggacactcaggggaccacacagagaagtggatggacacttcgccatccaggcagaactaagccaggcataaccacagccaagcagattaaccccaggcagaccgataaaaagacctccagataggcagacagacagatggaccaccaacctggacagacagccaaagcttcagagatacagtccacaggtggacaaagggatccccagccagagagagagagaccagccaacagcttgatagaccagtgcagccagagagaccaccaaacagagcccccaaaagacagacatctctgctagctggacagccaggtggaccccctaagttagattactagacagatataaacagatcccctgctgaacagatacacagagttctcagaccccacccccaccctcaggtgggctggctggctgacagaccttctggccagacagactcctaaccaaccagatggactgccagacaggcagacatcagccacatggaatcctgacatcccagccagccggccagactctcatcttgatgtcttgatggatggaccccagctagtcagacatgatcctccagattgacagacaagtcccccaaatgagtacacatctccagctattcagacagatggacccccagcaaatcaggacctatctaggcagaccccagccagacccccgccagacagactcccaaccagactgaccccttactattcacacagcctgccgagtagctgggactacaggtctaattttttttttttttaagaaatgagtttttgccatgttgcccagactggtcttgaactcccaacctcaagcaatcctcctgcctcagcctcccaaagtgctgagattacaggtgtgagccaccaggctcagccccctaagatttgaaacactttaaatggcccatggtagggttcctgctaggataaaacattaagcggctgttaaaagaaataaaaggaggacacgtctctgtgcactggtgtggacaaatctccaagtcactgcaaaatggaaaaagtataagatgctctttccctgaacctcaagggtcccgcccctctcactttcaggtctctggacctctgactgacactgtgcctgcccaggtccctgtatgcactgccacagtgccctgggccccatgtccacccctgtcctgcccttctctgggatagggctggccttcctctgcctctgcctggctgcatccatggtcgatctcaagtgccttggcatgaactccactctcctgcagccttcaatcaaggaatgatggggatgtgtacataccccaccccaccccttggcagggtgatgctgaggtgtggatttttaacagttcccagactttcccaggaggcttgggtttgggtgcccacagtgggagctggtgtgatatcataccttcgccggccgcctttccttcctgttctctgtgcccctactcccactctagagctgccccgtttctctgttttcgtgaaagagctgaccctgtgctgcctcccactctcccaatgcccctgccactcctgtgagcctgctgctggtgaggtcggtgctgacctctgtgttgctggataatgagtcatctatctctggaggagaagaaaggcaggtcctccacagccctgataaaatctccaagtctcccagtttcgggtccctctcctgggatgcagacccactgcctgcccagctggtacgatccacatgccctcttcttgggaataggggcatgggaaagtgactaaagatactgttctggctgctgtgttcactgtgagtaataaactgtccatttctccga

SEQ ID NO: 450139 - DNA, 4397 bp, Homo sapiens
tccgcctcccgcggcgtccacactcgccgcgcgcgcggcggcgggctggaccttgctggcccgcggcgccatgagccgcagcctggactcggcgcggagcttcctggagcggctggaagcgcggggcggccgggagggggcagtcctcgccggcgagttcagcgacatccaggcctgctcggccgcctggaaggctgacggcgtgtgctccaccgtggccggcagtcggccagagaacgtgaggaagaaccgctacaaagacgtgctgccttatgatcagacgcgagtaatcctctccctgctccaggaagagggacacagcgactacattaatggcaacttcatccggggcgtggatggaagcctggcctacattgccacgcaaggacccttgcctcacaccctgctagacttctggagactggtctgggagtttggggtcaaggtcagcacttgggggtgcggcacaatggtggggtcaacatctaagtaccccctcggcagtttccctggccccctcacccaaatcaccttcctctcccctgaccctccttgtctaggtgatcctgatggcctgtcgagagatagagaatgggcggaaaaggtgtgagcggtactgggcccaggagcaggagccactgcagactgggcttttctgcatcactctgataaaggagaagtggctgaatgaggacatcatgctcaggaccctcaaggtcacattccagaaggagtcccgttctgtgtaccagctacagtatatgtcctggccagaccgtggggtccccagcagtcctgaccacatgctcgccatggtggaggaagcccgtcgcctccagggatctggccctgaacccctctgtgtccactgcaggttttggaaatgggcttcaggagggtctggtgaggcagaggggacagagcatggaggggagtacagggcatggggctagtcttgtagtctgagtgcctattttgagaacccttgctcaccctccatggactgtaattgtgagcacttgttcagcacagactcagctggggaataagcacacagctcttgctcaacaaaatgtaagtgattaaaaaggttttccttgttcagatataatctgaagattctgggaatcaagaggctctgcaggggatccatcaggaccctcacccccatccccaaatgccccatctaaaaggggttgtggtcaggacctgaccaggcacactctgattctcttgtcagtgcgggttgtgggcgaacaggcgtcctgtgcaccgtggattatgtgaggcagctgctcctgacccaggtacgatacaggcatcctgtgtgtgcagtgtgctgcccatgaccacgtgtcctgctcaagtgccttgtctgtctgccccagatgatcccacctgacttcagtctctttgatgtggtccttaagatgaggaagcagcggcctgcggccgtgcagacagaggtgaaccctgggtctcctaatcttcagggacagtggcccactgctgtcatttgcccctgccttcccttcttgatggtccctcaccccaacaggagcagtacaggttcctgtaccacacggtggctcagatgttctgctccacactccagaatgccagcccccactaccagaacatcaaagagaattgtgccccactctacgacgatgccctcttcctccggactccccaggcacttctcgccataccccgcccaccaggaggggtcctcagggcgctagggacacagaagcgaggcctccaacccaaggagccctccctcccatctagcgcaccgcctcggcgggaaggaagcccgtggtttgcgcgctgagcagcctccccactcccgccctgcccagcgccgccgtttcacttcctcccggccctccctgcctgcaggagcatctctgtgcccgggtccccgggccacgccatggctgacacctacgcggtggtgcagaagcgcggggctccagcgggcgccgggagtgggacgcagacggggacggggacggggacgggggcgcgcagcgcggaggaggcgccgctctacagcaaggtgacgccgcgcgcccagcgacccggggcgcacgcggaggacgcgagggggacgctgcctggccgcgttcctgctgaccaaagtcctgccggatctggcgcctacgaggacgtggcgggtggagctcagaccggtgggctaggtttcaacctgcgcattgggaggccgaagggtccccgggacccgcctgctgagtggacccgggtgtaagtctaacgccagttcctgcctgttgcctcttgtgagctcggactgctgatgccccggtgctgctgagcgccgtgcgcagaatggaaacagtgggcctggatcaaagttaaagtttctcagggtgggaaatgtgggggctttgccccaatgactgtagcattcaaggcttgaggctggaggaggtagctagggtatagtggctggtgaggctgcacagagcagattcaagaaagaagatcaggaaggggcatgacccctgagttatgaaggggagaagggacagatgagcttccggagactgctctcctcaccacacagcactagtccatcctcagcacctgagcctccctcacttggacactcaggggaccacacagagaagtggatggacacttcgccatccaggcagaactaagccaggcataaccacagccaagcagattaaccccaggcagacccaaagcttcagagatacagtccacaggtggacaaagggatccccagccagagagagagagaccagccaacagcttgatagaccagtgcagccagagagaccaccaaacagagcccccaaaagacagacatctctgctagctggacagccaggtggaccccctaagttagattactagacagatataaacagatcccctgctgaacagatacacagagttctcagaccccacccccaccctcaggtgggctggctggctgacagaccttctggccagacagactcctaaccaaccagatggactgccagacaggcagacatcagccacatggaatcctgacatcccagccagccggccagactctcatcttgatgtcttgatggatggaccccagctagtcagacatgatcctccagattgacagacaagtcccccaaatgagtacacatctccagctattcagacagatggacccccagcaaatcaggacctatctaggcagaccccagccagacccccgccagacagactcccaaccagactgaccccttactattcacacagcctgccgagtagctgggactacaggtctaattttttttttttttaagaaatgagtttttgccatgttgcccagactggtcttgaactcccaacctcaagcaatcctcctgcctcagcctcccaaagtgctgagattacaggtgtgagccaccaggctcagccccctaagatttgaaacactttaaatggcccatggtagggttcctgctaggataaaacattaagcggctgttaaaagaaataaaaggaggacacgtctctgtgcactggtgtggacaaatctccaagtcactgcaaaatggaaaaagtataagatgctctttccctgaacctcaagggtcccgcccctctcactttcaggtctctggacctctgactgacactgtgcctgcccaggtccctgtatgcactgccacagtgccctgggccccatgtccacccctgtcctgcccttctctgggatagggctggccttcctctgcctctgcctggctgcatccatggtcgatctcaagtgccttggcatgaactccactctcctgcagccttcaatcaaggaatgatggggatgtgtacataccccaccccaccccttggcagggtgatgctgaggtgtggatttttaacagttcccagactttcccaggaggcttgggtttgggtgcccacagtgggagctggtgtgatatcataccttcgccggccgcctttccttcctgttctctgtgcccctactcccactctagagctgccccgtttctctgttttcgtgaaagagctgaccctgtgctgcctcccactctcccaatgcccctgccactcctgtgagcctgctgctggtgaggtcggtgctgacctctgtgttgctggataatgagtcatctatctctggaggagaagaaaggcaggtcctccacagccctgataaaatctccaagtctcccagtttcgggtccctctcctgggatgcagacccactgcctgcccagctggtacgatccacatgccctcttcttgggaataggggcatgggaaagtgactaaagatactgttctggctgctgtgttcactgtgagtaataaactgtccatttctccga

SEQ ID NO: 450140 - DNA, 3846 bp, Homo sapiens
tccgcctcccgcggcgtccacactcgccgcgcgcgcggcggcgggctggaccttgctggcccgcggcgccatgagccgcagcctggactcggcgcggagcttcctggagcggctggaagcgcggggcggccgggagggggcagtcctcgccggcgagttcagcgacatccaggcctgctcggccgcctggaaggctgacggcgtgtgctccaccgtggccggcagtcggccagagaacgtgaggaagaaccgctacaaagacgtgctgccttatgatcagacgcgagtaatcctctccctgctccaggaagagggacacagcgactacattaatggcaacttcatccggggcgtggatggaagcctggcctacattgccacgcaaggacccttgcctcacaccctgctagacttctggagactggtctgggagtttggggtcaaggtcagcacttgggggtgcggcacaatggtggggtcaacatctaagtaccccctcggcagtttccctggccccctcacccaaatcaccttcctctcccctgaccctccttgtctaggtgatcctgatggcctgtcgagagatagagaatgggcggaaaaggtgtgagcggtactgggcccaggagcaggagccactgcagactgggcttttctgcatcactctgataaaggagaagtggctgaatgaggacatcatgctcaggaccctcaaggtcacattccagaaggagtcccgttctgtgtaccagctacagtatatgtcctggccagaccgtggggtccccagcagtcctgaccacatgctcgccatggtggaggaagcccgtcgcctccagggatctggccctgaacccctctgtgtccactgcaggttttggaaatgggcttcaggagggtctggtgaggcagaggggacagagcatggaggggagtacagggcatggggctagtcttgtagtctgagtgcctattttgagaacccttgctcaccctccatggactgtaattgtgagcacttgttcagcacagactcagctggggaataagcacacagctcttgctcaacaaaatgtaagtgattaaaaaggttttccttgttcagatataatctgaagattctgggaatcaagaggctctgcaggggatccatcaggaccctcacccccatccccaaatgccccatctaaaaggggttgtggtcaggacctgaccaggcacactctgattctcttgtcagtgcgggttgtgggcgaacaggcgtcctgtgcaccgtggattatgtgaggcagctgctcctgacccaggtacgatacaggcatcctgtgtgtgcagtgtgctgcccatgaccacgtgtcctgctcaagtgccttgtctgtctgccccagatgatcccacctgacttcagtctctttgatgtggtccttaagatgaggaagcagcggcctgcggccgtgcagacagaggtgaaccctgggtctcctaatcttcagggacagtggcccactgctgtcatttgcccctgccttcccttcttgatggtccctcaccccaacaggagcagtacaggttcctgtaccacacggtggctcagatgttctgctccacactccagaatgccagcccccactaccagaacatcaaagagaattgtgccccactctacgacgatgccctcttcctccggactccccaggcacttctcgccataccccgcccaccaggaggggtcctcagggcgctagggacacagaagcgaggcctccaacccaaggagccctccctcccatctagcgcaccgcctcggcgggaaggaagcccgtggtttgcgcgctgagcagcctccccactcccgccctgcccagcgccgccgtttcacttcctcccggccctccctgcctgcaggagcatctctgtgcccgggtccccgggccacgccatggctgacacctacgcggtggtgcagaagcgcggggctccagcgggcgccgggagtgggacgcagacggggacggggacggggacgggggcgcgcagcgcggaggaggcgccgctctacagcaaggtgacgccgcgcgcccagcgacccggggcgcacgcggaggacgcgagggggacgctgcctggccgcgttcctgctgaccaaagtcctgccggatctggcgcctacgaggacgtggcgggtggagctcagaccggtgggctaggtttcaacctgcgcattgggaggccgaagggtccccgggacccgcctgctgagtggacccgggtgtaagtctaacgccagttcctgcctgttgcctcttgtgagctcggactgctgatgccccggtgctgctgagcgccgtgcgcagaatggaaacagtgggcctggatcaaagttaaagtttctcagggtgggaaatgtgggggctttgccccaatgactgtagcattcaaggcttgaggctggaggaggtagctagggtatagtggctggtgaggctgcacagagcagattcaagaaagaagatcaggaaggggcatgacccctgagttatgaaggggagaagggacagatgagcttccggagactgctctcctcaccacacagcactagtccatcctcagcacctgagcctccctcacttggacactcaggggaccacacagagaagtggatggacacttcgccatccaggcagaactaagccaggcataaccacagccaagcagattaaccccaggcagaccgataaaaagacctccagataggcagacagacagatggaccaccaacctggacagacagccaaagcttcagagatacagtccacaggtggacaaagggatccccagccagagagagagagaccagccaacagcttgatagaccagtgcagccagagagaccccaccaggctcagccccctaagatttgaaacactttaaatggcccatggtagggttcctgctaggataaaacattaagcggctgttaaaagaaataaaaggaggacacgtctctgtgcactggtgtggacaaatctccaagtcactgcaaaatggaaaaagtataagatgctctttccctgaacctcaagggtcccgcccctctcactttcaggtctctggacctctgactgacactgtgcctgcccaggtccctgtatgcactgccacagtgccctgggccccatgtccacccctgtcctgcccttctctgggatagggctggccttcctctgcctctgcctggctgcatccatggtcgatctcaagtgccttggcatgaactccactctcctgcagccttcaatcaaggaatgatggggatgtgtacataccccaccccaccccttggcagggtgatgctgaggtgtggatttttaacagttcccagactttcccaggaggcttgggtttgggtgcccacagtgggagctggtgtgatatcataccttcgccggccgcctttccttcctgttctctgtgcccctactcccactctagagctgccccgtttctctgttttcgtgaaagagctgaccctgtgctgcctcccactctcccaatgcccctgccactcctgtgagcctgctgctggtgaggtcggtgctgacctctgtgttgctggataatgagtcatctatctctggaggagaagaaaggcaggtcctccacagccctgataaaatctccaagtctcccagtttcgggtccctctcctgggatgcagacccactgcctgcccagctggtacgatccacatgccctcttcttgggaataggggcatgggaaagtgactaaagatactgttctggctgctgtgttcactgtgagtaataaactgtccatttctccga

SEQ ID NO: 450141 - DNA, 4340 bp, Homo sapiens
tccgcctcccgcggcgtccacactcgccgcgcgcgcggcggcgggctggaccttgctggcccgcggcgccatgagccgcagcctggactcggcgcggagcttcctggagcggctggaagcgcggggcggccgggagggggcagtcctcgccggcgagttcagcgacatccaggcctgctcggccgcctggaaggctgacggcgtgtgctccaccgtggccggcagtcggccagagaacgtgaggaagaaccgctacaaagacgtgctgccttatgatcagacgcgagtaatcctctccctgctccaggaagagggacacagcgactacattaatggcaacttcatccggggcgtggatggaagcctggcctacattgccacgcaaggacccttgcctcacaccctgctagacttctggagactggtctgggagtttggggtcaaggtcagcacttgggggtgcggcacaatggtggggtcaacatctaagtaccccctcggcagtttccctggccccctcacccaaatcaccttcctctcccctgaccctccttgtctaggtgatcctgatggcctgtcgagagatagagaatgggcggaaaaggtgtgagcggtactgggcccaggagcaggagccactgcagactgggcttttctgcatcactctgataaaggagaagtggctgaatgaggacatcatgctcaggaccctcaaggtcacattccagaaggagtcccgttctgtgtaccagctacagtatatgtcctggccagaccgtggggtccccagcagtcctgaccacatgctcgccatggtggaggaagcccgtcgcctccagggatctggccctgaacccctctgtgtccactgcaggttttggaaatgggcttcaggagggtctggtgaggcagaggggacagagcatggaggggagtacagggcatggggctagtcttgtagtctgagtgcctattttgagaacccttgctcaccctccatggactgtaattgtgagcacttgttcagcacagactcagctggggaataagcacacagctcttgctcaacaaaatgtaagtgattaaaaaggttttccttgttcagatataatctgaagattctgggaatcaagaggctctgcaggggatccatcaggaccctcacccccatccccaaatgccccatctaaaaggggttgtggtcaggacctgaccaggcacactctgattctcttgtcagtgcgggttgtgggcgaacaggcgtcctgtgcaccgtggattatgtgaggcagctgctcctgacccaggtacgatacaggcatcctgtgtgtgcagtgtgctgcccatgaccacgtgtcctgctcaagtgccttgtctgtctgccccagatgatcccacctgacttcagtctctttgatgtggtccttaagatgaggaagcagcggcctgcggccgtgcagacagaggtgaaccctgggtctcctaatcttcagggacagtggcccactgctgtcatttgcccctgccttcccttcttgatggtccctcaccccaacaggagcagtacaggttcctgtaccacacggtggctcagatgttctgctccacactccagaatgccagcccccactaccagaacatcaaagagaattgtgccccactctacgacgatgccctcttcctccggactccccaggcacttctcgccataccccgcccaccaggaggggtcctcagggcgctagggacacagaagcgaggcctccaacccaaggagccctccctcccatctagcgcaccgcctcggcgggaaggaagcccgtggtttgcgcgctgagcagcctccccactcccgccctgcccagcgccgccgtttcacttcctcccggccctccctgcctgcaggagcatctctgtgcccgggtccccgggccacgccatggctgacacctacgcggtggtgcagaagcgcggggctccagcgggcgccgggagtgggacgcagacggggacggggacggggacgggggcgcgcagcgcggaggaggcgccgctctacagcaaggtgacgccgcgcgcccagcgacccggggcgcacgcggaggacgcgagggggacgctgcctggccgcgttcctgctgaccaaagtcctgccggatctggcgcctacgaggacgtggcgggtggagctcagaccggtgggctaggtttcaacctgcgcattgggaggccgaagggtccccgggacccgcctgctgagtggacccgggtgtaagtctaacgccagttcctgcctgttgcctcttgtgagctcggactgctgatgccccggtgctgctgagcgccgtgcgcagaatggaaacagtgggcctggatcaaagttaaagtttctcagggtgggaaatgtgggggctttgccccaatgactgtagcattcaaggcttgaggctggaggaggtagctagggtatagtggctggtgaggctgcacagagcagattcaagaaagaagatcaggaaggggcatgacccctgagttatgaaggggagaagggacagatgagcttccggagactgctctcctcaccacacagcactagtccatcctcagcacctgagcctccctcacttggacactcaggggaccacacagagaagtggatggacacttcgccatccaggcagaactaagccaggcataaccacagccaagcagattaaccccaggcagaccgataaaaagacctccagataggcagacagacagatggaccaccaacctggacagacagccaaagcttcagagatacagtccacaggtggacaaagggatccccagccagagagagagagaccagccaacagcttgatagaccagtgcagccagagagaccaccaaacagagcccccaaaagacagacatctctgctagctggacagccaggtggaccccctaagttagattactagacagatataaacagatcccctgctgaacagatacacagagttctcagaccccacccccaccctcaggtgggctggctggctgacagaccttctggccagacagactcctaaccaaccagatggactgccagacaggcagacatcagccacatggaatcctgacatcccagccagccggccagactctcatcttgatgtcttgatggatggaccccagctagtcagacatgatcctccagattgacagacaagtcccccaaatgagtacacatctccagctattcagacagatggacccccagcaaatcaggacctatctaggcagaccccagccagacccccgccagacagactcccaaccagactgaccccttactattcacacagcctgccgagtagctgggactacaggtctaattttttttttttttaagaaatgagtttttgccatgttgcccagactggtcttgaactcccaacctcaagcaatcctcctgcctcagcctcccaaagtgctgagattacaggtgtgagccaccaggctcagccccctaagatttgaaacactttaaatggcccatggtagggttcctgctaggataaaacattaagcggctgttaaaagaaataaaaggaggacacgtctctgtgcactggtgtggacaaatctccaagtcactgcaaaatggaaaaagtataagatgctctttccctgaacctcaagggtcccgcccctctcactttcaggtctctggacctctgactgacactgtgcctgcccaggtccctgtatgcactgccacagtgccctgggccccatgtccacccctgtcctgcccttctctgggatagggctggccttcctctgcctctgcctggctgcatccatggtcgatctcaagtgccttggcatgaactccactctcctgcagccttcaatcaaggaatgatggggatgtgtacataccccaccccaccccttggcagggtgatgctgaggtgtggatttttaacagttcccagactttcccaggaggcttgggtttgggtgcccacagtgggagctggtgtgatatcataccttcgccggccgcctttccttcctgttctctggaccccctaagttagattactagacagatataaacagatcccctgctgaacagatacacagagttctcagaccccacccccaccctcaggtgggctggctggctgacagaccttctggccagacagactcctaaccaaccagatggactgccagacaggcagacatcagccacatggaatcctgacatcccagccagccggccagactctcatcttgatgtcttgatggatggacccccccctaagttagttacctgg

SEQ ID NO: 450142 - DNA, 1484 bp, Homo sapiens
accgggtatttgtcacgataaccctgcctcctctcccgcctctcctcagcacacagatccagaaccacaaatatcgatatttgtgcttctggccagacagactcctaaccaaccagatggactgccagacaggcagacatcagccacatggaatcctgacatcccagccagccggccagactctcatcttgatgtcttgatggatggaccccagctagtcagacatgatcctccagattgacagacaagtcccccaaatgagtacacatctccagctattcagacagatggacccccagcaaatcaggacctatctaggcagaccccagccagacccccgccagacagactcccaaccagactgaccccttactattcacacagcctgccgagtagctgggactacaggtctaattttttttttttttaagaaatgagtttttgccatgttgcccagactggtcttgaactcccaacctcaagcaatcctcctgcctcagcctcccaaagtgctgagattacaggtgtgagccaccaggctcagccccctaagatttgaaacactttaaatggcccatggtagggttcctgctaggataaaacattaagcggctgttaaaagaaataaaaggaggacacgtctctgtgcactggtgtggacaaatctccaagtcactgcaaaatggaaaaagtataagatgctctttccctgaacctcaagggtcccgcccctctcactttcaggtctctggacctctgactgacactgtgcctgcccaggtccctgtatgcactgccacagtgccctgggccccatgtccacccctgtcctgcccttctctgggatagggctggccttcctctgcctctgcctggctgcatccatggtcgatctcaagtgccttggcatgaactccactctcctgcagccttcaatcaaggaatgatggggatgtgtacataccccaccccaccccttggcagggtgatgctgaggtgtggatttttaacagttcccagactttcccaggaggcttgggtttgggtgcccacagtgggagctggtgtgatatcataccttcgccggccgcctttccttcctgttctctgtgcccctactcccactctagagctgccccgtttctctgttttcgtgaaagagctgaccctgtgctgcctcccactctcccaatgcccctgccactcctgtgagcctgctgctggtgaggtcggtgctgacctctgtgttgctggataatgagtcatctatctctggaggagaagaaaggcaggtcctccacagccctgataaaatctccaagtctcccagtttcgggtccctctcctgggatgcagacccactgcctgcccagctggtacgatccacatgccctcttcttgggaataggggcatgggaaagtgactaaagatactgttctggctgctgtgttcactgtgagtaataaactgtccatttctccga

SEQ ID NO: 450143 - DNA, 2843 bp, Homo sapiens
tccgcctcccgcggcgtccacactcgccgcgcgcgcggcggcgggctggaccttgctggcccgcggcgccatgagccgcagcctggactcggcgcggagcttcctggagcggctggaagcgcggggcggccgggagggggcagtcctcgccggcgagttcagcgacatccaggcctgctcggccgcctggaaggctgacggcgtgtgctccaccgtggccggcagtcggccagagaacgtgaggaagaaccgctacaaagacgtgctgccttatgatcagacgcgagtaatcctctccctgctccaggaagagggacacagcgactacattaatggcaacttcatccggggcgtggatggaagcctggcctacattgccacgcaaggacccttgcctcacaccctgctagacttctggagactggtctgggagtttggggtcaaggtcagcacttgggggtgcggcacaatggtggggtcaacatctaagtaccccctcggcagtttccctggccccctcacccaaatcaccttcctctcccctgaccctccttgtctaggtgatcctgatggcctgtcgagagatagagaatgggcggaaaaggtgtgagcggtactgggcccaggagcaggagccactgcagactgggcttttctgcatcactctgataaaggagaagtggctgaatgaggacatcatgctcaggaccctcaaggtcacattccagaaggagtcccgttctgtgtaccagctacagtatatgtcctggccagaccgtggggtccccagcagtcctgaccacatgctcgccatggtggaggaagcccgtcgcctccagggatctggccctgaacccctctgtgtccactgcaggttttggaaatgggcttcaggagggtctggtgaggcagaggggacagagcatggaggggagtacagggcatggggctagtcttgtagtctgagtgcctattttgagaacccttgctcaccctccatggactgtaattgtgagcacttgttcagcacagactcagctggggaataagcacacagctcttgctcaacaaaatgtaagtgattaaaaaggttttccttgttcagatataatctgaagattctgggaatcaagaggctctgcaggggatccatcaggaccctcacccccatccccaaatgccccatctaaaaggggttgtggtcaggacctgaccaggcacactctgattctcttgtcagtgcgggttgtgggcgaacaggcgtcctgtgcaccgtggattatgtgaggcagctgctcctgacccaggtacgatacaggcatcctgtgtgtgcagtgtgctgcccatgaccacgtgtcctgctcaagtgccttgtctgtctgccccagatgatcccacctgacttcagtctctttgatgtggtccttaagatgaggaagcagcggcctgcggccgtgcagacagaggtgaaccctgggtctcctaatcttcagggacagtggcccactgctgtcatttgcccctgccttcccttcttgatggtccctcaccccaacaggagcagtacaggttcctgtaccacacggtggctcagatgttctgctccacactccagaatgccagcccccactaccagaacatcaaagagaattgtgccccactctacgacgatgccctcttcctccggactccccaggcacttctcgccataccccgcccaccaggaggggtcctcaggagcatctctgtgcccgggtccccgggccacgccatggctgacacctacgcggtggtgcagaagcgcggggctccagcgggcgccgggagtgggacgcagacggggacggggacggggacgggggcgcgcagcgcggaggaggcgccgctctacagcaaggtgacgccgcgcgcccagcgacccggggcgcacgcggaggacgcgagggggacgctgcctggccgcgttcctgctgaccaaagtcctgccggatctggcgcctacgaggacgtggcgggtggagctcagaccggtgggctaggtttcaacctgcgcattgggaggccgaagggtccccgggacccgcctgctgagtggacccgggtgtctctggacctctgactgacactgtgcctgcccaggtccctgtatgcactgccacagtgccctgggccccatgtccacccctgtcctgcccttctctgggatagggctggccttcctctgcctctgcctggctgcatccatggtcgatctcaagtgccttggcatgaactccactctcctgcagccttcaatcaaggaatgatggggatgtgtacataccccaccccaccccttggcagggtgatgctgaggtgtggatttttaacagttcccagactttcccaggaggcttgggtttgggtgcccacagtgggagctggtgtgatatcataccttcgccggccgcctttccttcctgttctctgtgcccctactcccactctagagctgccccgtttctctgttttcgtgaaagagctgaccctgtgctgcctcccactctcccaatgcccctgccactcctgtgagcctgctgctggtgaggtcggtgctgacctctgtgttgctggataatgagtcatctatctctggaggagaagaaaggcaggtcctccacagccctgataaaatctccaagtctcccagtttcgggtccctctcctgggatgcagacccactgcctgcccagctggtacgatccacatgccctcttcttgggaataggggcatgggaaagtgactaaagatactgttctggctgctgtgttcactgtgagtaataaactgtccatttctccga

SEQ ID NO: 450144 - DNA, 2938 bp, Homo sapiens
tccgcctcccgcggcgtccacactcgccgcgcgcgcggcggcgggctggaccttgctggcccgcggcgccatgagccgcagcctggactcggcgcggagcttcctggagcggctggaagcgcggggcggccgggagggggcagtcctcgccggcgagttcagcgacatccaggcctgctcggccgcctggaaggctgacggcgtgtgctccaccgtggccggcagtcggccagagaacgtgaggaagaaccgctacaaagacgtgctgccttatgatcagacgcgagtaatcctctccctgctccaggaagagggacacagcgactacattaatggcaacttcatccggggcgtggatggaagcctggcctacattgccacgcaaggacccttgcctcacaccctgctagacttctggagactggtctgggagtttggggtcaaggtcagcacttgggggtgcggcacaatggtggggtcaacatctaagtaccccctcggcagtttccctggccccctcacccaaatcaccttcctctcccctgaccctccttgtctaggtgatcctgatggcctgtcgagagatagagaatgggcggaaaaggtgtgagcggtactgggcccaggagcaggagccactgcagactgggcttttctgcatcactctgataaaggagaagtggctgaatgaggacatcatgctcaggaccctcaaggtcacattccagaaggagtcccgttctgtgtaccagctacagtatatgtcctggccagaccgtggggtccccagcagtcctgaccacatgctcgccatggtggaggaagcccgtcgcctccagggatctggccctgaacccctctgtgtccactgcaggttttggaaatgggcttcaggagggtctggtgaggcagaggggacagagcatggaggggagtacagggcatggggctagtcttgtagtctgagtgcctattttgagaacccttgctcaccctccatggactgtaattgtgagcacttgttcagcacagactcagctggggaataagcacacagctcttgctcaacaaaatgtaagtgattaaaaaggttttccttgttcagatataatctgaagattctgggaatcaagaggctctgcaggggatccatcaggaccctcacccccatccccaaatgccccatctaaaaggggttgtggtcaggacctgaccaggcacactctgattctcttgtcagtgcgggttgtgggcgaacaggcgtcctgtgcaccgtggattatgtgaggcagctgctcctgacccaggtacgatacaggcatcctgtgtgtgcagtgtgctgcccatgaccacgtgtcctgctcaagtgccttgtctgtctgccccagatgatcccacctgacttcagtctctttgatgtggtccttaagatgaggaagcagcggcctgcggccgtgcagacagaggtgaaccctgggtctcctaatcttcagggacagtggcccactgctgtcatttgcccctgccttcccttcttgatggtccctcaccccaacaggagcagtacaggttcctgtaccacacggtggctcagatgttctgctccacactccagaatgccagcccccactaccagaacatcaaagagaattgtgccccactctacgacgatgccctcttcctccggactccccaggcacttctcgccataccccgcccaccaggaggggtcctcagggcgctagggacacagaagcgaggcctccaacccaaggagccctccctcccatctagcgcaccgcctcggcgggaaggaagcccgtggtttgcgcgctgagcagcctccccactcccgccctgcccagcgccgccgtttcacttcctcccggccctccctgcctgcaggagcatctctgtgcccgggtccccgggccacgccatggctgacacctacgcggtggtgcagaagcgcggggctccagcgggcgccgggagtgggacgcagacggggacggggacggggacgggggcgcgcagcgcggaggaggcgccgctctacagcaaggtgacgccgcgcgcccagcgacccggggcgcacgcggaggacgcgagggggacgctgcctggccgcgttcctgctgaccaaagtcctgccggatctggcgcctacgaggacgtggcgggtggagctcagaccggtgggctaggtttcaacctgcgcattgggaggccgaagggtccccgggacccgcctgctgagtggacccgggtgtaagtctaacgccagttcctgcctgttgcctcttgtgagctcggactgctgatgccccggtgctgctgagcgccgtgcgcagaatggaaacagtgggcctggatcaaagttaaagtttctcagggtgggaaatgtgggggctttgccccaatgactgtagcattcaaggcttgaggctggaggaggtagctagggtatagtggctggtgaggctgcacagagcagattcaagaaagaagatcaggaaggggcatgacccctgagttatgaaggggagaagggacagatgagcttccggagactgctctcctcaccacacagcactagtccatcctcagcacctgagcctccctcacttggacactcaggggaccacacagagaagtggatggacacttcgccatccaggcagaactaagccaggcataaccacagccaagcagattaaccccaggcagacgagaagaaaggcaggtcctccacagccctgataaaatctccaagtctcccagtttcgggtccctctcctgggatgcagacccactgcctgcccagctggtacgatccacatgccctcttcttgggaataggggcatgggaaagtgactaaagatactgttctggctgctgtgttcactgtgagtaataaactgtccatttctccga

SEQ ID NO: 450145 - DNA, 1528 bp, Homo sapiens
tccgcctcccgcggcgtccacactcgccgcgcgcgcggcggcgggctggaccttgctggcccgcggcgccatgagccgcagcctggactcggcgcggagcttcctggagcggctggaagcgcggggcggccgggagggggcagtcctcgccggcgagttcagcgacatccaggcctgctcggccgcctggaaggctgacggcgtgtgctccaccgtggccggcagtcggccagagaacgtgaggaagaaccgctacaaagacgtgctgccttatgatcagacgcgagtaatcctctccctgctccaggaagagggacacagcgactacattaatggcaacttcatccggggcgtggatggaagcctggcctacattgccacgcaaggacccttgcctcacaccctgctagacttctggagactggtctgggagtttggggtcaaggtcagcacttgggggtgcggcacaatggtggggtcaacatctaagtaccccctcggcagtttccctggccccctcacccaaatcaccttcctctcccctgaccctccttgtctaggtgatcctgatggcctgtcgagagatagagaatgggcggaaaaggtgtgagcggtactgggcccaggagcaggagccactgcagactgggcttttctgcatcactctgataaaggagaagtggctgaatgaggacatcatgctcaggaccctcaaggtcacattccagaaggagtcccgttctgtgtaccagctacagtatatgtcctggccagaccgtggggtccccagcagtcctgaccacatgctcgccatggtggaggaagcccgtcgcctccagggatctggccctgaacccctctgtgtccactgcaggttttggaaatgggcttcaggagggtctggtgaggcagaggggacagagcatggaggggagtacagggcatggggctagtcttgtagtctgagtgcctattttgagaacccttgctcaccctccatggactgtaattgtgagcacttgttcagcacagactcagctggggaataagcacacagctcttgctcaacaaaatgtaagtgattaaaaaggttttccttgttcagatataatctgaagattctgggaatcaagaggctctgcaggggatccatcaggaccctcacccccatccccaaatgccccatctaaaaggggttgtggtcaggacctgaccaggcacactctgattctcttgtcagtgcgggttgtgggcgaacaggcgtcctgtgcaccgtggattatgtgaggcagctgctcctgacccaggtacgatacaggcatcctgtgtgtgcagtgtgctgcccatgaccacgtgtcctgctcaagtgccttgtctgtctgccccagatgatcccacctgacttcagtctctttgatgtggtccttaagatgaggatcctacgcgttctgcggcctgtgctagatcatgaggagcagtacaggttaatgtgactacgcggtggttcagatttctcattatacccaat

SEQ ID NO: 450146 - DNA, 1317 bp, Homo sapiens
ggctccgtcaccctatcctacccaaactccacgtttctcaccttatctgctgacagatgatcagacgcgagtaatcctctccctgctccaggaagagggacacagcgactacattaatggcaacttcatccggggcgtggatggaagcctggcctacattgccacgcaaggacccttgcctcacaccctgctagacttctggagactggtctgggagtttggggtcaaggtcagcacttgggggtgcggcacaatggtggggtcaacatctaagtaccccctcggcagtttccctggccccctcacccaaatcaccttcctctcccctgaccctccttgtctaggtgatcctgatggcctgtcgagagatagagaatgggcgggtaggtgccctctgcccccaggtttcatgtccttgtgggaggagggaggagggatcttgctagctcctccttgaccccaggacccgagggtccagctcttggagtgaccttattgtagctctgtgggaagccccattgttcctctaagtttttgttgatatgttattcatcccccagtgttggcaacccctctcctgctgggcttcccagccatttcacaccttagaccataaggccctattctgactgcttcccctgtaggctctgatctctctttccacctctcttccctttattcactccactctaacaactctggtctctgctgttcccatgttccagggatggctctgcctcagggtctgtgccttggctattccttcagcctaggacatccttccctgtggcttgctctatcacctccttcaggtctttgctcaaatggtaattcctcaatgagaccttccggggtgggtcttcacaccattttaaactctcagcacttccattctccctcccttgtcctacttttccttctttcttcacagttcttatgaactcctaacacactggataatctacaaatgtattatgtacattgtttatgcttaatctccctgatttagaaggtaagatccacaaggccagggatttttgttttgcctgttaacataaattagttactaaataaataaatgcatgtcaatattgaaggctgaaggcacatagcttcatgtggtttctacattcttgcctactccatggatggggtaggggttccctggggtgactagctgatggtggaggctgtatgatctgtagtcttgtctctttctcattcctgattttggtaatttgtgttctctctctctctctgtctcatctctctatttcgctatctcttttttcatgctcctgcctgttttttgtaaac

SEQ ID NO: 450147 - DNA, 258 bp, Homo sapiens
gtgagggttggggtcacggaaggaggtggactgggagtggccaggggtgggccgcagaatctcagtcgtgaattcggccttcaccagggcgtggatggaagcctggcctacattgccacgcaaggacccttgcctcacaccctgctagacttctggagactggtctgggagtttggggtcaaggtcagcacttgggggtgcggcacaatggtggggtcaacatctaagtaccccctcggcagtttccctggccccctc

SEQ ID NO: 450148 - DNA, 392 bp, Homo sapiens
ggagacttaaggcccttgtccttgcggccatcccttcctgtcttctatgccacttccgcattcttttgttcagtagacgttgacacagaaatgaccacccctcaaaccaacactctgccccaaattaccctccaggctgaccccgttcctccttcatccccctaacttgcagggcgctagggacacagaagcgaggcctccaacccaaggagccctccctcccatctagcgcaccgcctcggcgggaaggaagcccgtggtttgcgcgctgagcagcctccccactcccgccctgcccagcgccgccgtttcacttcctcccggccctccctgcctgcaggagcatctctgtgcccgggtccccgggccacgccatggctgacacctacgcg

SEQ ID NO: 450149 - DNA, 2800 bp, Homo sapiens
tccgcctcccgcggcgtccacactcgccgcgcgcgcggcggcgggctggaccttgctggcccgcggcgccatgagccgcagcctggactcggcgcggagcttcctggagcggctggaagcgcggggcggccgggagggggcagtcctcgccggcgagttcagcgacatccaggcctgctcggccgcctggaaggctgacggcgtgtgctccaccgtggccggcagtcggccagagaacgtgaggaagaaccgctacaaagacgtgctgccttatgatcagacgcgagtaatcctctccctgctccaggaagagggacacagcgactacattaatggcaacttcatccggggcgtggatggaagcctggcctacattgccacgcaaggacccttgcctcacaccctgctagacttctggagactggtctgggagtttggggtcaaggtgatcctgatggcctgtcgagagatagagaatgggcggaaaaggtgtgagcggtactgggcccaggagcaggagccactgcagactgggcttttctgcatcactctgataaaggagaagtggctgaatgaggacatcatgctcaggaccctcaaggtcacattccagaaggagtcccgttctgtgtaccagctacagtatatgtcctggccagaccgtggggtccccagcagtcctgaccacatgctcgccatggtggaggaagcccgtcgcctccagggatctggccctgaacccctctgtgtccactgcagtgcgggttgtgggcgaacaggcgtcctgtgcaccgtggattatgtgaggcagctgctcctgacccagatgatcccacctgacttcagtctctttgatgtggtccttaagatgaggaagcagcggcctgcggccgtgcagacagaggagcagtacaggttcctgtaccacacggtggctcagatgttctgctccacactccagaatgccagcccccactaccagaacatcaaagagaattgtgccccactctacgacgatgccctcttcctccggactccccaggcacttctcgccataccccgcccaccaggaggggtcctcaggagcatctctgtgcccgggtccccgggccacgccatggctgacacctacgcggtggtgcagaagcgcggggctccagcgggcgccgggagtgggacgcagacggggacggggacggggacgggggcgcgcagcgcggaggaggcgccgctctacagcaaggtgacgccgcgcgcccagcgacccggggcgcacgcggaggacgcgagggggacgctgcctggccgcgttcctgctgaccaaagtcctgccggatctggcgcctacgaggacgtggcgggtggagctcagaccggtgggctaggtttcaacctgcgcattgggaggccgaagggtccccgggacccgcctgctgagtggacccgggtgtaagtctaacgccagttcctgcctgttgcctcttgtgagctcggactgctgatgccccggtgctgctgagcgccgtgcgcagaatggaaacagtgggcctggatcaaagttaaagtttctcagggtgggaaatgtgggggctttgccccaatgactgtagcattcaaggcttgaggctggaggaggtagctagggtatagtggctggtgaggctgcacagagcagattcaagaaagaagatcaggaaggggcatgacccctgagttatgaaggggagaagggacagatgagcttccggagactgctctcctcaccacacagcactagtccatcctcagcacctgagcctccctcacttggacactcaggggaccacacagagaagtggatggacacttcgccatccaggcagaactaagccaggcataaccacagccaagcagattaaccccaggcagaccgataaaaagacctccagataggcagacagacagatggaccaccaacctggacagacagccaaagcttcagagatacagtccacaggtggacaaagggatccccagccagagagagagagaccagccaacagcttgatagaccagtgcagccagagagaccaccaaacagagcccccaaaagacagacatctctgctagctggacagccaggtggaccccctaagttagattactagacagatataaacagatcccctgctgaacagatacacagagttctcagaccccacccccaccctcaggtgggctggctggctgacagaccttctggccagacagactcctaaccaaccagatggactgccagacaggcagacatcagccacatggaatcctgacatcccagccagccggccagactctcatcttgatgtcttgatggatggaccccagctagtcagacatgatcctccagattgacagacaagtcccccaaatgagtacacatctccagctattcagacagatggacccccagcaaatcaggacctatctaggcagaccccagccagacccccgccagacagactcccaaccagactgaccccttactattcacacagcctgccgagtagctgggactacaggtctaattttttttttttttaagaaatgagtttttgccatgttgcccagactggtcttgaactcccaacctcaagcaatcctcctgcctcagcctcccaaagtgctgagattacaggtgtgagccaccaggctcagccccctaagatttgaaacactttaaatggcccatggtagggttcctgctaggataaaacattaagcggctgttaaaagaaataaaaggaggacacgtctctgtgca

SEQ ID NO: 450150 - DNA, 4288 bp, Homo sapiens
tccgcctcccgcggcgtccacactcgccgcgcgcgcggcggcgggctggaccttgctggcccgcggcgccatgagccgcagcctggactcggcgcggagcttcctggagcggctggaagcgcggggcggccgggagggggcagtcctcgccggcgagttcagcgacatccaggcctgctcggccgcctggaaggctgacggcgtgtgctccaccgtggccggcagtcggccagagaacgtgaggaagaaccgctacaaagacgtgctgccttatgatcagacgcgagtaatcctctccctgctccaggaagagggacacagcgactacattaatggcaacttcatccggggcgtggatggaagcctggcctacattgccacgcaaggacccttgcctcacaccctgctagacttctggagactggtctgggagtttggggtcaaggtcagcacttgggggtgcggcacaatggtggggtcaacatctaagtaccccctcggcagtttccctggccccctcacccaaatcaccttcctctcccctgaccctccttgtctaggtgatcctgatggcctgtcgagagatagagaatgggcggaaaaggtgtgagcggtactgggcccaggagcaggagccactgcagactgggcttttctgcatcactctgataaaggagaagtggctgaatgaggacatcatgctcaggaccctcaaggtcacattccagaaggagtcccgttctgtgtaccagctacagtatatgtcctggccagaccgtggggtccccagcagtcctgaccacatgctcgccatggtggaggaagcccgtcgcctccagggatctggccctgaacccctctgtgtccactgcaggttttggaaatgggcttcaggagggtctggtgaggcagaggggacagagcatggaggggagtacagggcatggggctagtcttgtagtctgagtgcctattttgagaacccttgctcaccctccatggactgtaattgtgagcacttgttcagcacagactcagctggggaataagcacacagctcttgctcaacaaaatgtaagtgattaaaaaggttttccttgttcagatataatctgaagattctgggaatcaagaggctctgcaggggatccatcaggaccctcacccccatccccaaatgccccatctaaaaggggttgtggtcaggacctgaccaggcacactctgattctcttgtcagtgcgggttgtgggcgaacaggcgtcctgtgcaccgtggattatgtgaggcagctgctcctgacccaggtacgatacaggcatcctgtgtgtgcagtgtgctgcccatgaccacgtgtcctgctcaagtgccttgtctgtctgccccagatgatcccacctgacttcagtctctttgatgtggtccttaagatgaggaagcagcggcctgcggccgtgcagacagaggtgaaccctgggtctcctaatcttcagggacagtggcccactgctgtcatttgcccctgccttcccttcttgatggtccctcaccccaacaggagcagtacaggttcctgtaccacacggtggctcagatgttctgctccacactccagaatgccagcccccactaccagaacatcaaagagaattgtgccccactctacgacgatgccctcttcctccggactccccaggcacttctcgccataccccgcccaccaggaggggtcctcaggagcatctctgtgcccgggtccccgggccacgccatggctgacacctacgcggtggtgcagaagcgcggggctccagcgggcgccgggagtgggacgcagacggggacggggacggggacgggggcgcgcagcgcggaggaggcgccgctctacagcaaggtgacgccgcgcgcccagcgacccggggcgcacgcggaggacgcgagggggacgctgcctggccgcgttcctgctgaccaaagtcctgccggatctggcgcctacgaggacgtggcgggtggagctcagaccggtgggctaggtttcaacctgcgcattgggaggccgaagggtccccgggacccgcctgctgagtggacccgggtgtaagtctaacgccagttcctgcctgttgcctcttgtgagctcggactgctgatgccccggtgctgctgagcgccgtgcgcagaatggaaacagtgggcctggatcaaagttaaagtttctcagggtgggaaatgtgggggctttgccccaatgactgtagcattcaaggcttgaggctggaggaggtagctagggtatagtggctggtgaggctgcacagagcagattcaagaaagaagatcaggaaggggcatgacccctgagttatgaaggggagaagggacagatgagcttccggagactgctctcctcaccacacagcactagtccatcctcagcacctgagcctccctcacttggacactcaggggaccacacagagaagtggatggacacttcgccatccaggcagaactaagccaggcataaccacagccaagcagattaaccccaggcagaccgataaaaagacctccagataggcagacagacagatggaccaccaacctggacagacagccaaagcttcagagatacagtccacaggtggacaaagggatccccagccagagagagagagaccagccaacagcttgatagaccagtgcagccagagagaccaccaaacagagcccccaaaagacagacatctctgctagctggacagccaggtggaccccctaagttagattactagacagatataaacagatcccctgctgaacagatacacagagttctcagaccccacccccaccctcaggtgggctggctggctgacagaccttctggccagacagactcctaaccaaccagatggactgccagacaggcagacatcagccacatggaatcctgacatcccagccagccggccagactctcatcttgatgtcttgatggatggaccccagctagtcagacatgatcctccagattgacagacaagtcccccaaatgagtacacatctccagctattcagacagatggacccccagcaaatcaggacctatctaggcagaccccagccagacccccgccagacagactcccaaccagactgaccccttactattcacacagcctgccgagtagctgggactacaggtctaattttttttttttttaagaaatgagtttttgccatgttgcccagactggtcttgaactcccaacctcaagcaatcctcctgcctcagcctcccaaagtgctgagattacaggtgtgagccaccaggctcagccccctaagatttgaaacactttaaatggcccatggtagggttcctgctaggataaaacattaagcggctgttaaaagaaataaaaggaggacacgtctctgtgcactggtgtggacaaatctccaagtcactgcaaaatggaaaaagtataagatgctctttccctgaacctcaagggtcccgcccctctcactttcaggtctctggacctctgactgacactgtgcctgcccaggtccctgtatgcactgccacagtgccctgggccccatgtccacccctgtcctgcccttctctgggatagggctggccttcctctgcctctgcctggctgcatccatggtcgatctcaagtgccttggcatgaactccactctcctgcagccttcaatcaaggaatgatggggatgtgtacataccccaccccaccccttggcagggtgatgctgaggtgtggatttttaacagttcccagactttcccaggaggcttgggtttgggtgcccacagtgggagctggtgtgatatcataccttcgccggccgcctttccttcctgttctctgtgcccctactcccactctagagctgccccgtttctctgttttcgtgaaagagctgaccctgtgctgcctcccactctcccaatgcccctgccactcctgtgagcctgctgctggtgaggtcggtgctgacctctgtgttgctggataatgagtcatctatctctggaggagaagaaaggcaggtcctccacagccctgataaaatctccaagtctcccagtttcgggtccctctcctgggatgcagacccactgcctgcccagctggtacgatccacatgccctcttcttgggaataggggcatgggaaagtgactaaagatactgttctggctgctgtgttcactgtgagtaataaactgtccatttctccga

SEQ ID NO: 450151 - DNA, 3313 bp, Homo sapiens
tccgcctcccgcggcgtccacactcgccgcgcgcgcggcggcgggctggaccttgctggcccgcggcgccatgagccgcagcctggactcggcgcggagcttcctggagcggctggaagcgcggggcggccgggagggggcagtcctcgccggcgagttcagcaaaaggtgtgagcggtactgggcccaggagcaggagccactgcagactgggcttttctgcatcactctgataaaggagaagtggctgaatgaggacatcatgctcaggaccctcaaggtcacattccagaaggagtcccgttctgtgtaccagctacagtatatgtcctggccagaccgtggggtccccagcagtcctgaccacatgctcgccatggtggaggaagcccgtcgcctccagggatctggccctgaacccctctgtgtccactgcagtgcgggttgtgggcgaacaggcgtcctgtgcaccgtggattatgtgaggcagctgctcctgacccagatgatcccacctgacttcagtctctttgatgtggtccttaagatgaggaagcagcggcctgcggccgtgcagacagaggagcagtacaggttcctgtaccacacggtggctcagatgttctgctccacactccagaatgccagcccccactaccagaacatcaaagagaattgtgccccactctacgacgatgccctcttcctccggactccccaggcacttctcgccataccccgcccaccaggaggggtcctcaggagcatctctgtgcccgggtccccgggccacgccatggctgacacctacgcggtggtgcagaagcgcggggctccagcgggcgccgggagtgggacgcagacggggacggggacggggacgggggcgcgcagcgcggaggaggcgccgctctacagcaaggtgacgccgcgcgcccagcgacccggggcgcacgcggaggacgcgagggggacgctgcctggccgcgttcctgctgaccaaagtcctgccggatctggcgcctacgaggacgtggcgggtggagctcagaccggtgggctaggtttcaacctgcgcattgggaggccgaagggtccccgggacccgcctgctgagtggacccgggtgtaagtctaacgccagttcctgcctgttgcctcttgtgagctcggactgctgatgccccggtgctgctgagcgccgtgcgcagaatggaaacagtgggcctggatcaaagttaaagtttctcagggtgggaaatgtgggggctttgccccaatgactgtagcattcaaggcttgaggctggaggaggtagctagggtatagtggctggtgaggctgcacagagcagattcaagaaagaagatcaggaaggggcatgacccctgagttatgaaggggagaagggacagatgagcttccggagactgctctcctcaccacacagcactagtccatcctcagcacctgagcctccctcacttggacactcaggggaccacacagagaagtggatggacacttcgccatccaggcagaactaagccaggcataaccacagccaagcagattaaccccaggcagaccgataaaaagacctccagataggcagacagacagatggaccaccaacctggacagacagccaaagcttcagagatacagtccacaggtggacaaagggatccccagccagagagagagagaccagccaacagcttgatagaccagtgcagccagagagaccaccaaacagagcccccaaaagacagacatctctgctagctggacagccaggtggaccccctaagttagattactagacagatataaacagatcccctgctgaacagatacacagagttctcagaccccacccccaccctcaggtgggctggctggctgacagaccttctggccagacagactcctaaccaaccagatggactgccagacaggcagacatcagccacatggaatcctgacatcccagccagccggccagactctcatcttgatgtcttgatggatggaccccagctagtcagacatgatcctccagattgacagacaagtcccccaaatgagtacacatctccagctattcagacagatggacccccagcaaatcaggacctatctaggcagaccccagccagacccccgccagacagactcccaaccagactgaccccttactattcacacagcctgccgagtagctgggactacaggtctaattttttttttttttaagaaatgagtttttgccatgttgcccagactggtcttgaactcccaacctcaagcaatcctcctgcctcagcctcccaaagtgctgagattacaggtgtgagccaccaggctcagccccctaagatttgaaacactttaaatggcccatggtagggttcctgctaggataaaacattaagcggctgttaaaagaaataaaaggaggacacgtctctgtgcactggtgtggacaaatctccaagtcactgcaaaatggaaaaagtataagatgctctttccctgaacctcaagggtcccgcccctctcactttcaggtctctggacctctgactgacactgtgcctgcccaggtccctgtatgcactgccacagtgccctgggccccatgtccacccctgtcctgcccttctctgggatagggctggccttcctctgcctctgcctggctgcatccatggtcgatctcaagtgccttggcatgaactccactctcctgcagccttcaatcaaggaatgatggggatgtgtacataccccaccccaccccttggcagggtgatgctgaggtgtggatttttaacagttcccagactttcccaggaggcttgggtttgggtgcccacagtgggagctggtgtgatatcataccttcgccggccgcctttccttcctgttctctgtgcccctactcccactctagagctgccccgtttctctgttttcgtgaaagagctgaccctgtgctgcctcccactctcccaatgcccctgccactcctgtgagcctgctgctggtgaggtcggtgctgacctctgtgttgctggataatgagtcatctatctctggaggagaagaaaggcaggtcctccacagccctgataaaatctccaagtctcccagtttcgggtccctctcctgggatgcagacccactgcctgcccagctggtacgatccacatgccctcttcttgggaataggggcatgggaaagtgactaaagatactgttctggctgctgtgttcactgtgagtaataaactgtccatttctccga

SEQ ID NO: 450152 - DNA, 3883 bp, Homo sapiens
tccgcctcccgcggcgtccacactcgccgcgcgcgcggcggcgggctggaccttgctggcccgcggcgccatgagccgcagcctggactcggcgcggagcttcctggagcggctggaagcgcggggcggccgggagggggcagtcctcgccggcgagttcagcgacatccaggcctgctcggccgcctggaaggctgacggcgtgtgctccaccgtggccggcagtcggccagagaacgtgaggaagaaccgctacaaagacgtgctgccttatgatcagacgcgagtaatcctctccctgctccaggaagagggacacagcgactacattaatggcaacttcatccggggcgtggatggaagcctggcctacattgccacgcaaggacccttgcctcacaccctgctagacttctggagactggtctgggagtttggggtcaaggtgatcctgatggcctgtcgagagatagagaatgggcggaaaaggtgtgagcggtactgggcccaggagcaggagccactgcagactgggcttttctgcatcactctgataaaggagaagtggctgaatgaggacatcatgctcaggaccctcaaggtcacattccagaaggagtcccgttctgtgtaccagctacagtatatgtcctggccagaccgtggggtccccagcagtcctgaccacatgctcgccatggtggaggaagcccgtcgcctccagggatctggccctgaacccctctgtgtccactgcagtgcgggttgtgggcgaacaggcgtcctgtgcaccgtggattatgtgaggcagctgctcctgacccaggtacgatacaggcatcctgtgtgtgcagtgtgctgcccatgaccacgtgtcctgctcaagtgccttgtctgtctgccccagatgatcccacctgacttcagtctctttgatgtggtccttaagatgaggaagcagcggcctgcggccgtgcagacagaggagcagtacaggttcctgtaccacacggtggctcagatgttctgctccacactccagaatgccagcccccactaccagaacatcaaagagaattgtgccccactctacgacgatgccctcttcctccggactccccaggcacttctcgccataccccgcccaccaggaggggtcctcagggcgctagggacacagaagcgaggcctccaacccaaggagccctccctcccatctagcgcaccgcctcggcgggaaggaagcccgtggtttgcgcgctgagcagcctccccactcccgccctgcccagcgccgccgtttcacttcctcccggccctccctgcctgcaggagcatctctgtgcccgggtccccgggccacgccatggctgacacctacgcggtggtgcagaagcgcggggctccagcgggcgccgggagtgggacgcagacggggacggggacggggacgggggcgcgcagcgcggaggaggcgccgctctacagcaaggtgacgccgcgcgcccagcgacccggggcgcacgcggaggacgcgagggggacgctgcctggccgcgttcctgctgaccaaagtcctgccggatctggcgcctacgaggacgtggcgggtggagctcagaccggtgggctaggtttcaacctgcgcattgggaggccgaagggtccccgggacccgcctgctgagtggacccgggtgtaagtctaacgccagttcctgcctgttgcctcttgtgagctcggactgctgatgccccggtgctgctgagcgccgtgcgcagaatggaaacagtgggcctggatcaaagttaaagtttctcagggtgggaaatgtgggggctttgccccaatgactgtagcattcaaggcttgaggctggaggaggtagctagggtatagtggctggtgaggctgcacagagcagattcaagaaagaagatcaggaaggggcatgacccctgagttatgaaggggagaagggacagatgagcttccggagactgctctcctcaccacacagcactagtccatcctcagcacctgagcctccctcacttggacactcaggggaccacacagagaagtggatggacacttcgccatccaggcagaactaagccaggcataaccacagccaagcagattaaccccaggcagaccgataaaaagacctccagataggcagacagacagatggaccaccaacctggacagacagccaaagcttcagagatacagtccacaggtggacaaagggatccccagccagagagagagagaccagccaacagcttgatagaccagtgcagccagagagaccaccaaacagagcccccaaaagacagacatctctgctagctggacagccaggtggaccccctaagttagattactagacagatataaacagatcccctgctgaacagatacacagagttctcagaccccacccccaccctcaggtgggctggctggctgacagaccttctggccagacagactcctaaccaaccagatggactgccagacaggcagacatcagccacatggaatcctgacatcccagccagccggccagactctcatcttgatgtcttgatggatggaccccagctagtcagacatgatcctccagattgacagacaagtcccccaaatgagtacacatctccagctattcagacagatggacccccagcaaatcaggacctatctaggcagaccccagccagacccccgccagacagactcccaaccagactgaccccttactattcacacagcctgccgagtagctgggactacaggtctaattttttttttttttaagaaatgagtttttgccatgttgcccagactggtcttgaactcccaacctcaagcaatcctcctgcctcagcctcccaaagtgctgagattacaggtgtgagccaccaggctcagccccctaagatttgaaacactttaaatggcccatggtagggttcctgctaggataaaacattaagcggctgttaaaagaaataaaaggaggacacgtctctgtgcactggtgtggacaaatctccaagtcactgcaaaatggaaaaagtataagatgctctttccctgaacctcaagggtcccgcccctctcactttcaggtctctggacctctgactgacactgtgcctgcccaggtccctgtatgcactgccacagtgccctgggccccatgtccacccctgtcctgcccttctctgggatagggctggccttcctctgcctctgcctggctgcatccatggtcgatctcaagtgccttggcatgaactccactctcctgcagccttcaatcaaggaatgatggggatgtgtacataccccaccccaccccttggcagggtgatgctgaggtgtggatttttaacagttcccagactttcccaggaggcttgggtttgggtgcccacagtgggagctggtgtgatatcataccttcgccggccgcctttccttcctgttctctgtgcccctactcccactctagagctgccccgtttctctgttttcgtgaaagagctgaccctgtgctgcctcccactctcccaatgcccctgccactcctgtgagcctgctgctggtgaggtcggtgctgacctctgtgttgctggataatgagtcatctatctctggaggagaagaaaggcaggtcctccacagccctgataaaatctccaagtctcccagtttcgggtccctctcctgggatgcagacccactgcctgcccagctggtacgatccacatgccctcttcttgggaataggggcatgggaaagtgactaaagatactgttctggctgctgtgttcactgtgagtaataaactgtccatttctccga

SEQ ID NO: 450153 - DNA, 4271 bp, Homo sapiens
tccgcctcccgcggcgtccacactcgccgcgcgcgcggcggcgggctggaccttgctggcccgcggcgccatgagccgcagcctggactcggcgcggagcttcctggagcggctggaagcgcggggcggccgggagggggcagtcctcgccggcgagttcagcgacatccaggcctgctcggccgcctggaaggctgacggcgtgtgctccaccgtggccggcagtcggccagagaacgtgaggaagaaccgctacaaagacgtgctgccttatgatcagacgcgagtaatcctctccctgctccaggaagagggacacagcgactacattaatggcaacttcatccggggcgtggatggaagcctggcctacattgccacgcaaggacccttgcctcacaccctgctagacttctggagactggtctgggagtttggggtcaaggtcagcacttgggggtgcggcacaatggtggggtcaacatctaagtaccccctcggcagtttccctggccccctcacccaaatcaccttcctctcccctgaccctccttgtctaggtgatcctgatggcctgtcgagagatagagaatgggcggaaaaggtgtgagcggtactgggcccaggagcaggagccactgcagactgggcttttctgcatcactctgataaaggagaagtggctgaatgaggacatcatgctcaggaccctcaaggtcacattccagaaggagtcccgttctgtgtaccagctacagtatatgtcctggccagaccgtggggtccccagcagtcctgaccacatgctcgccatggtggaggaagcccgtcgcctccagggatctggccctgaacccctctgtgtccactgcaggttttggaaatgggcttcaggagggtctggtgaggcagaggggacagagcatggaggggagtacagggcatggggctagtcttgtagtctgagtgcctattttgagaacccttgctcaccctccatggactgtaattgtgagcacttgttcagcacagactcagctggggaataagcacacagctcttgctcaacaaaatgtaagtgattaaaaaggttttccttgttcagatataatctgaagattctgggaatcaagaggctctgcaggggatccatcaggaccctcacccccatccccaaatgccccatctaaaaggggttgtggtcaggacctgaccaggcacactctgattctcttgtcagtgcgggttgtgggcgaacaggcgtcctgtgcaccgtggattatgtgaggcagctgctcctgacccaggtacgatacaggcatcctgtgtgtgcagtgtgctgcccatgaccacgtgtcctgctcaagtgccttgtctgtctgccccagatgatcccacctgacttcagtctctttgatgtggtccttaagatgaggaagcagcggcctgcggccgtgcagacagaggtgaaccctgggtctcctaatcttcagggacagtggcccactgctgtcatttgcccctgccttcccttcttgatggtccctcaccccaacaggagcagtacaggttcctgtaccacacggtggctcagatgttctgctccacactccagaatgccagcccccactaccagaacatcaaagagaattgtgccccactctacgacgatgccctcttcctccggactccccaggcacttctcgccataccccgcccaccaggaggggtcctcagggcgctagggacacagaagcgaggcctccaacccaaggagccctccctcccatctagcgcaccgcctcggcgggaaggaagcccgtggtttgcgcgctgagcagcctccccactcccgccctgcccagcgccgccgtttcacttcctcccggccctccctgcctgcaggagcatctctgtgcccgggtccccgggccacgccatggctgacacctacgcggtggtgcagaagcgcggggctccagcgggcgccgggagtgggacgcagacggggacggggacggggacgggggcgcgcagcgcggaggaggcgccgctctacagcaaggtgacgccgcgcgcccagcgacccggggcgcacgcggaggacgcgagggggacgctgcctggccgcgttcctgctgaccaaagtcctgccggatctggcgcctacgaggacgtggcgggtggagctcagaccggtgggctaggtttcaacctgcgcattgggaggccgaagggtccccgggacccgcctgctgagtggacccgggtgtaagtctaacgccagttcctgcctgttgcctcttgtgagctcggactgctgatgccccggtgctgctgagcgccgtgcgcagaatggaaacagtgggcctggatcaaagttaaagtttctcagggtgggaaatgtgggggctttgccccaatgactgtagcattcaaggcttgaggctggaggaggtagctagggtatagtggctggtgaggctgcacagagcagattcaagaaagaagatcaggaaggggcatgacccctgagttatgaaggggagaagggacagatgagcttccggagactgctctcctcaccacacagcactagtccatcctcagcacctgagcctccctcacttggacactcaggggaccacacagagaagtggatggacacttcgccatccaggcagaactaagccaggcataaccacagcaccaaacagagcccccaaaagacagacatctctgctagctggacagccaggtggaccccctaagttagattactagacagatataaacagatcccctgctgaacagatacacagagttctcagaccccacccccaccctcaggtgggctggctggctgacagaccttctggccagacagactcctaaccaaccagatggactgccagacaggcagacatcagccacatggaatcctgacatcccagccagccggccagactctcatcttgatgtcttgatggatggaccccagctagtcagacatgatcctccagattgacagacaagtcccccaaatgagtacacatctccagctattcagacagatggacccccagcaaatcaggacctatctaggcagaccccagccagacccccgccagacagactcccaaccagactgaccccttactattcacacagcctgccgagtagctgggactacaggtctaattttttttttttttaagaaatgagtttttgccatgttgcccagactggtcttgaactcccaacctcaagcaatcctcctgcctcagcctcccaaagtgctgagattacaggtgtgagccaccaggctcagccccctaagatttgaaacactttaaatggcccatggtagggttcctgctaggataaaacattaagcggctgttaaaagaaataaaaggaggacacgtctctgtgcactggtgtggacaaatctccaagtcactgcaaaatggaaaaagtataagatgctctttccctgaacctcaagggtcccgcccctctcactttcaggtctctggacctctgactgacactgtgcctgcccaggtccctgtatgcactgccacagtgccctgggccccatgtccacccctgtcctgcccttctctgggatagggctggccttcctctgcctctgcctggctgcatccatggtcgatctcaagtgccttggcatgaactccactctcctgcagccttcaatcaaggaatgatggggatgtgtacataccccaccccaccccttggcagggtgatgctgaggtgtggatttttaacagttcccagactttcccaggaggcttgggtttgggtgcccacagtgggagctggtgtgatatcataccttcgccggccgcctttccttcctgttctctgtgcccctactcccactctagagctgccccgtttctctgttttcgtgaaagagctgaccctgtgctgcctcccactctcccaatgcccctgccactcctgtgagcctgctgctggtgaggtcggtgctgacctctgtgttgctggataatgagtcatctatctctggaggagaagaaaggcaggtcctccacagccctgataaaatctccaagtctcccagtttcgggtccctctcctgggatgcagacccactgcctgcccagctggtacgatccacatgccctcttcttgggaataggggcatgggaaagtgactaaagatactgttctggctgctgtgttcactgtgagtaataaactgtccatttctccga

SEQ ID NO: 450154 - DNA, 4708 bp, Homo sapiens
tccgcctcccgcggcgtccacactcgccgcgcgcgcggcggcgggctggaccttgctggcccgcggcgccatgagccgcagcctggactcggcgcggagcttcctggagcggctggaagcgcggggcggccgggagggggcagtcctcgccggcgagttcagcgacatccaggcctgctcggccgcctggaaggctgacggcgtgtgctccaccgtggccggcagtcggccagagaacgtgaggaagaaccgctacaaagacgtgctgccttatgatcagacgcgagtaatcctctccctgctccaggaagagggacacagcgactacattaatggcaacttcatccggggcgtggatggaagcctggcctacattgccacgcaaggacccttgcctcacaccctgctagacttctggagactggtctgggagtttggggtcaaggtcagcacttgggggtgcggcacaatggtggggtcaacatctaagtaccccctcggcagtttccctggccccctcacccaaatcaccttcctctcccctgaccctccttgtctaggtgatcctgatggcctgtcgagagatagagaatgggcggaaaaggtgtgagcggtactgggcccaggagcaggagccactgcagactgggcttttctgcatcactctgataaaggagaagtggctgaatgaggacatcatgctcaggaccctcaaggtcacattccagaaggagtcccgttctgtgtaccagctacagtatatgtcctggccagaccgtggggtccccagcagtcctgaccacatgctcgccatggtggaggaagcccgtcgcctccagggatctggccctgaacccctctgtgtccactgcaggttttggaaatgggcttcaggagggtctggtgaggcagaggggacagagcatggaggggagtacagggcatggggctagtcttgtagtctgagtgcctattttgagaacccttgctcaccctccatggactgtaattgtgagcacttgttcagcacagactcagctggggaataagcacacagctcttgctcaacaaaatgtaagtgattaaaaaggttttccttgttcagatataatctgaagattctgggaatcaagaggctctgcaggggatccatcaggaccctcacccccatccccaaatgccccatctaaaaggggttgtggtcaggacctgaccaggcacactctgattctcttgtcagtgcgggttgtgggcgaacaggcgtcctgtgcaccgtggattatgtgaggcagctgctcctgacccaggtacgatacaggcatcctgtgtgtgcagtgtgctgcccatgaccacgtgtcctgctcaagtgccttgtctgtctgccccagatgatcccacctgacttcagtctctttgatgtggtccttaagatgaggaagcagcggcctgcggccgtgcagacagaggtgaaccctgggtctcctaatcttcagggacagtggcccactgctgtcatttgcccctgccttcccttcttgatggtccctcaccccaacaggagcagtacaggttcctgtaccacacggtggctcagatgttctgctccacactccagaatgccagcccccactaccagaacatcaaagagaattgtgccccactctacgacgatgccctcttcctccggactccccaggcacttctcgccataccccgcccaccaggaggggtcctcagggcgctagggacacagaagcgaggcctccaacccaaggagccctccctcccatctagcgcaccgcctcggcgggaaggaagcccgtggtttgcgcgctgagcagcctccccactcccgccctgcccagcgccgccgtttcacttcctcccggccctccctgcctgcaggagcatctctgtgcccgggtccccgggccacgccatggctgacacctacgcggtggtgcagaagcgcggggctccagcgggcgccgggagtgggacgcagacggggacggggacggggacgggggcgcgcagcgcggaggaggcgccgctctacagcaaggtgacgccgcgcgcccagcgacccggggcgcacgcggaggacgcgagggggacgctgcctggccgcgttcctgctgaccaaagtcctgccggatctggcgcctacgaggacgtggcgggtggagctcagaccggtgggctaggtttcaacctgcgcattgggaggccgaagggtccccgggacccgcctgctgagtggacccgggtgtaagtctaacgccagttcctgcctgttgcctcttgtgagctcggactgctgatgccccggtgctgctgagcgccgtgcgcagaatggaaacagtgggcctggatcaaagttaaagtttctcagggtgggaaatgtgggggctttgccccaatgactgtagcattcaaggcttgaggctggaggaggtagctagggtatagtggctggtgaggctgcacagagcagattcaagaaagaagatcaggaaggggcatgacccctgagttatgaaggggagaagggacagatgagcttccggagactgctctcctcaccacacagcactagtccatcctcagcacctgagcctccctcacttggacactcaggggaccacacagagaagtggatggacacttcgccatccaggcagaactaagccaggcataaccacagccaagcagattaaccccaggcagaccgataaaaagacctccagataggcagacagacagatggaccaccaacctggacagacagccaaagcttcagagatacagtccacaggtggacaaagggatccccagccagagagagagagaccagccaacagcttgatagaccagtgcagccagagagaccaccaaacagagcccccaaaagacagacatctctgctagctggacagccaggtggaccccctaagttagattactagacagatataaacagatcccctgctgaacagatacacagagttctcagaccccacccccaccctcaggtgggctggctggctgacagaccttctggccagacagactcctaaccaaccagatggactgccagacaggcagacatcagccacatggaatcctgacatcccagccagccggccagactctcatcttgatgtcttgatggatggaccccagctagtcagacatgatcctccagattgacagacaagtcccccaaatgagtacacatctccagctattcagacagatggacccccagcaaatcaggacctatctaggcagaccccagccagacccccgccagacagactcccaaccagactgaccccttactattcacacagcctgccgagtagctgggactacaggtctaattttttttttttttaagaaatgagtttttgccatgttgcccagactggtcttgaactcccaacctcaagcaatcctcctgcctcagcctcccaaagtgctgagattacaggtgtgagccaccaggctcagccccctaagatttgaaacactttaaatggcccatggtagggttcctgctaggataaaacattaagcggctgttaaaagaaataaaaggaggacacgtctctgtgcactggtgtggacaaatctccaagtcactgcaaaatggaaaaagtataagatgctctttccctgaacctcaagggtcccgcccctctcactttcaggtctctggacctctgactgacactgtgcctgcccaggtccctgtatgcactgccacagtgccctgggccccatgtccacccctgtcctgcccttctctgggatagggctggccttcctctgcctctgcctggctgcatccatggtcgatctcaagtgccttggcatgaactccactctcctgcagccttcaatcaaggaatgatggggatgtgtacataccccaccccaccccttggcagggtgatgctgaggtgtggatttttaacagttcccagactttcccaggaggcttgggtttgggtgcccacagtgggagctggtgtgatatcataccttcgccggccgcctttccttcctgttctctgtgcccctactcccactctagagctgccccgtttctctgttttcgtgaaagagctgaccctgtgctgcctcccactctcccaatgcccctgccactcctgtgagcctgctgctggtgaggtcggtgctgacctctgtgttgctggataatgagtcatctatctctggaggagaagaaaggcaggtcctccacagccctgataaaatctccaagtctcccagtttcgggtccctctcctgggatgcagacccactgcctgcccagctggtacgatccacatgccctcttcttgggaataggggcatgggaaagtgactaaagatactgttctggctgctgtgttcactgtgagtaataaactgtccatttctccgatccagagatagatgactcattatccagcaacacagaggtcagcaccgacctcaccagcagcaggctcacaggagtggcaggggcattgggagagtgggaggcagcacagggtcagctctttcacgaaaacagattttttttttttggcgacccgcgtttattttattaggaaggaaacaaccaagcaccccatgctcctgcccggcactcccggtgggaacatgccaaacagccgggcgatcgcacccagcc

SEQ ID NO: 450155 - DNA, 3011 bp, Homo sapiens
tccgcctcccgcggcgtccacactcgccgcgcgcgcggcggcgggctggaccttgctggcccgcggcgccatgagccgcagcctggactcggcgcggagcttcctggagcggctggaagcgcggggcggccgggagggggcagtcctcgccggcgagttcagcgacatccaggcctgctcggccgcctggaaggctgacggcgtgtgctccaccgtggccggcagtcggccagagaacgtgaggaagaaccgctacaaagacgtgctgccttatgatcagacgcgagtaatcctctccctgctccaggaagagggacacagcgactacattaatggcaacttcatccggggcgtggatggaagcctggcctacattgccacgcaaggacccttgcctcacaccctgctagacttctggagactggtctgggagtttggggtcaaggtcagcacttgggggtgcggcacaatggtggggtcaacatctaagtaccccctcggcagtttccctggccccctcacccaaatcaccttcctctcccctgaccctccttgtctaggtgatcctgatggcctgtcgagagatagagaatgggcggaaaaggtgtgagcggtactgggcccaggagcaggagccactgcagactgggcttttctgcatcactctgataaaggagaagtggctgaatgaggacatcatgctcaggaccctcaaggtcacattccagaaggagtcccgttctgtgtaccagctacagtatatgtcctggccagaccgtggggtccccagcagtcctgaccacatgctcgccatggtggaggaagcccgtcgcctccagggatctggccctgaacccctctgtgtccactgcaggttttggaaatgggcttcaggagggtctggtgaggcagaggggacagagcatggaggggagtacagggcatggggctagtcttgtagtctgagtgcctattttgagaacccttgctcaccctccatggactgtaattgtgagcacttgttcagcacagactcagctggggaataagcacacagctcttgctcaacaaaatgtaagtgattaaaaaggttttccttgttcagatataatctgaagattctgggaatcaagaggctctgcaggggatccatcaggaccctcacccccatccccaaatgccccatctaaaaggggttgtggtcaggacctgaccaggcacactctgattctcttgtcagtgcgggttgtgggcgaacaggcgtcctgtgcaccgtggattatgtgaggcagctgctcctgacccaggtacgatacaggcatcctgtgtgtgcagtgtgctgcccatgaccacgtgtcctgctcaagtgccttgtctgtctgccccagatgatcccacctgacttcagtctctttgatgtggtccttaagatgaggaagcagcggcctgcggccgtgcagacagaggtgaaccctgggtctcctaatcttcagggacagtggcccactgctgtcatttgcccctgccttcccttcttgatggtccctcaccccaacaggagcagtacaggttcctgtaccacacggtggctcagatgttctgctccacactccagaatgccagcccccactaccagaacatcaaagagaattgtgccccactctacgacgatgccctcttcctccggactccccaggcacttctcgccataccccgcccaccaggaggggtcctcagggcgctagggacacagaagcgaggcctccaacccaaggagccctccctcccatctagcgcaccgcctcggcgggaaggaagcccgtggtttgcgcgctgagcagcctccccactcccgccctgcccagcgccgccgtttcacttcctcccggccctccctgcctgcaggagcatctctgtgcccgggtccccgggccacgccatggctgacacctacgcggtggtgcagaagcgcggggctccagcgggcgccgggagtgggacgcagacggggacggggacggggacgggggcgcgcagcgcggaggaggcgccgctctacagcaaggtgacgccgcgcgcccagcgacccggggcgcacgcggaggacgcgagggggacgctgcctggccgcgttcctgctgaccaaagtcctgccggatctggcgcctacgaggacgtggcgggtggagctcagaccggtgggctaggtttcaacctgcgcattgggaggccgaagggtccccgggacccgcctgctgagtggacccgggtgtctctggacctctgactgacactgtgcctgcccaggtccctgtatgcactgccacagtgccctgggccccatgtccacccctgtcctgcccttctctgggatagggctggccttcctctgcctctgcctggctgcatccatggtcgatctcaagtgccttggcatgaactccactctcctgcagccttcaatcaaggaatgatggggatgtgtacataccccaccccaccccttggcagggtgatgctgaggtgtggatttttaacagttcccagactttcccaggaggcttgggtttgggtgcccacagtgggagctggtgtgatatcataccttcgccggccgcctttccttcctgttctctgtgcccctactcccactctagagctgccccgtttctctgttttcgtgaaagagctgaccctgtgctgcctcccactctcccaatgcccctgccactcctgtgagcctgctgctggtgaggtcggtgctgacctctgtgttgctggataatgagtcatctatctctggaggagaagaaaggcaggtcctccacagccctgataaaatctccaagtctcccagtttcgggtccctctcctgggatgcagacccactgcctgcccagctggtacgatccacatgccctcttcttgggaataggggcatgggaaagtgactaaagatactgttctggctgctgtgttcactgtgagtaataaactgtccatttctccga

SEQ ID NO: 450156 - DNA, 2979 bp, Homo sapiens
tccgcctcccgcggcgtccacactcgccgcgcgcgcggcggcgggctggaccttgctggcccgcggcgccatgagccgcagcctggactcggcgcggagcttcctggagcggctggaagcgcggggcggccgggagggggcagtcctcgccggcgagttcagcgacatccaggcctgctcggccgcctggaaggctgacggcgtgtgctccaccgtggccggcagtcggccagagaacgtgaggaagaaccgctacaaagacgtgctgccttatgatcagacgcgagtaatcctctccctgctccaggaagagggacacagcgactacattaatggcaacttcatccggggcgtggatggaagcctggcctacattgccacgcaaggacccttgcctcacaccctgctagacttctggagactggtctgggagtttggggtcaaggtcagcacttgggggtgcggcacaatggtggggtcaacatctaagtaccccctcggcagtttccctggccccctcacccaaatcaccttcctctcccctgaccctccttgtctaggtgatcctgatggcctgtcgagagatagagaatgggcggaaaaggtgtgagcggtactgggcccaggagcaggagccactgcagactgggcttttctgcatcactctgataaaggagaagtggctgaatgaggacatcatgctcaggaccctcaaggtcacattccagaaggagtcccgttctgtgtaccagctacagtatatgtcctggccagaccgtggggtccccagcagtcctgaccacatgctcgccatggtggaggaagcccgtcgcctccagggatctggccctgaacccctctgtgtccactgcaggttttggaaatgggcttcaggagggtctggtgaggcagaggggacagagcatggaggggagtacagggcatggggctagtcttgtagtctgagtgcctattttgagaacccttgctcaccctccatggactgtaattgtgagcacttgttcagcacagactcagctggggaataagcacacagctcttgctcaacaaaatgtaagtgattaaaaaggttttccttgttcagatataatctgaagattctgggaatcaagaggctctgcaggggatccatcaggaccctcacccccatccccaaatgccccatctaaaaggggttgtggtcaggacctgaccaggcacactctgattctcttgtcagtgcgggttgtgggcgaacaggcgtcctgtgcaccgtggattatgtgaggcagctgctcctgacccaggtacgatacaggcatcctgtgtgtgcagtgtgctgcccatgaccacgtgtcctgctcaagtgccttgtctgtctgccccagatgatcccacctgacttcagtctctttgatgtggtccttaagatgaggaagcagcggcctgcggccgtgcagacagaggtgaaccctgggtctcctaatcttcagggacagtggcccactgctgtcatttgcccctgccttcccttcttgatggtccctcaccccaacaggagcagtacaggttcctgtaccacacggtggctcagatgttctgctccacactccagaatgccagcccccactaccagaacatcaaagagaattgtgccccactctacgacgatgccctcttcctccggactccccaggcacttctcgccataccccgcccaccaggaggggtcctcagggcgctagggacacagaagcgaggcctccaacccaaggagccctccctcccatctagcgcaccgcctcggcgggaaggaagcccgtggtttgcgcgctgagcagcctccccactcccgccctgcccagcgccgccgtttcacttcctcccggccctccctgcctgcaggagcatctctgtgcccgggtccccgggccacgccatggctgacacctacgcggtggtgcagaagcgcggggctccagcgggcgccgggagtgggacgcagacggggacggggacggggacgggggcgcgcagcgcggaggaggcgccgctctacagcaaggtgacgccgcgcgcccagcgacccggggcgcacgcggaggacgcgagggggacgctgcctggccgcgttcctgctgaccaaagtcctgccggatctggcgcctacgaggacgtggcgggtggagctcagaccggtgggctaggtttcaacctgcgcattgggaggccgaagggtccccgggacccgcctgctgagtggacccgggtgtaagtctaacgccagttcctgcctgttgcctcttgtgagctcggactgctgatgccccggtgctgctgagcgccgtgcgcagaatggaaacagtgggcctggatcaaagttaaagtttctcagggtgggaaatgtgggggctttgccccaatgactgtagcattcaaggcttgaggctggaggaggtagctagggtatagtggctggtgaggctgcacagagcagattcaagaaagaagatcaggaaggggcatgacccctgagttatgaaggggagaagggacagatgagcttccggagactgctctcctcaccacacagcactagtccatcctcagcacctgagcctccctcacttggacactcaggggaccacacagagaagtggatggacacttcgccatccaggcagaactaagccaggcataaccacagccaagcagattaaccccaggcagacgacctctgtgttgctggataatgagtcatctatctctggaggagaagaaaggcaggtcctccacagccctgataaaatctccaagtctcccagtttcgggtccctctcctgggatgcagacccactgcctgcccagctggtacgatccacatgccctcttcttgggaataggggcatgggaaagtgactaaagatactgttctggctgctgtgttcactgtgagtaataaactgtccatttctccga

SEQ ID NO: 450157 - DNA, 2765 bp, Homo sapiens
tccgcctcccgcggcgtccacactcgccgcgcgcgcggcggcgggctggaccttgctggcccgcggcgccatgagccgcagcctggactcggcgcggagcttcctggagcggctggaagcgcggggcggccgggagggggcagtcctcgccggcgagttcagcgacatccaggcctgctcggccgcctggaaggctgacggcgtgtgctccaccgtggccggcagtcggccagagaacgtgaggaagaaccgctacaaagacgtgctgccttatgatcagacgcgagtaatcctctccctgctccaggaagagggacacagcgactacattaatggcaacttcatccggggcgtggatggaagcctggcctacattgccacgcaaggacccttgcctcacaccctgctagacttctggagactggtctgggagtttggggtcaaggtcagcacttgggggtgcggcacaatggtggggtcaacatctaagtaccccctcggcagtttccctggccccctcacccaaatcaccttcctctcccctgaccctccttgtctaggtgatcctgatggcctgtcgagagatagagaatgggcggaaaaggtgtgagcggtactgggcccaggagcaggagccactgcagactgggcttttctgcatcactctgataaaggagaagtggctgaatgaggacatcatgctcaggaccctcaaggtcacattccagaaggagtcccgttctgtgtaccagctacagtatatgtcctggccagaccgtggggtccccagcagtcctgaccacatgctcgccatggtggaggaagcccgtcgcctccagggatctggccctgaacccctctgtgtccactgcaggttttggaaatgggcttcaggagggtctggtgaggcagaggggacagagcatggaggggagtacagggcatggggctagtcttgtagtctgagtgcctattttgagaacccttgctcaccctccatggactgtaattgtgagcacttgttcagcacagactcagctggggaataagcacacagctcttgctcaacaaaatgtaagtgattaaaaaggttttccttgttcagatataatctgaagattctgggaatcaagaggctctgcaggggatccatcaggaccctcacccccatccccaaatgccccatctaaaaggggttgtggtcaggacctgaccaggcacactctgattctcttgtcagtgcgggttgtgggcgaacaggcgtcctgtgcaccgtggattatgtgaggcagctgctcctgacccaggtacgatacaggcatcctgtgtgtgcagtgtgctgcccatgaccacgtgtcctgctcaagtgccttgtctgtctgccccagatgatcccacctgacttcagtctctttgatgtggtccttaagatgaggaagcagcggcctgcggccgtgcagacagaggtgaaccctgggtctcctaatcttcagggacagtggcccactgctgtcatttgcccctgccttcccttcttgatggtccctcaccccaacaggagcagtacaggttcctgtaccacacggtggctcagatgttctgctccacactccagaatgccagcccccactaccagaacatcaaagagaattgtgccccactctacgacgatgccctcttcctccggactccccaggcacttctcgccataccccgcccaccaggaggggtcctcagggcgctagggacacagaagcgaggcctccaacccaaggagccctccctcccatctagcgcaccgcctcggcgggaaggaagcccgtggtttgcgcgctgagcagcctccccactcccgccctgcccagcgccgccgtttcacttcctcccggccctccctgcctgcaggagcatctctgtgcccgggtccccgggccacgccatggctgacacctacgcggtggtgcagaagcgcggggctccagcgggcgccgggagtgggacgcagacggggacggggacggggacgggggcgcgcagcgcggaggaggcgccgctctacagcaaggtgacgccgcgcgcccagcgacccggggcgcacgcggaggacgcgagggggacgctgcctggccgcgttcctgctgaccaaagtcctgccggatctggcgcctacgaggacgtggcgggtggagctcagaccggtgggctaggtttcaacctgcgcattgggaggccgaagggtccccgggacccgcctgctgagtggacccgggtgtaagtctaacgccagttcctgcctgttgcctcttgtgagctcggactgctgatgccccggtgctgctgagcgccgtgcgcagaatggaaacagtgggcctggatcaaagttaaagtttctcagggtgggaaatgtgggggctttgccccaatgactgtagcattcaaggcttgaggctggaggaggtagctagggtatagtggctggtgaggctgcacagagcagattcaagaaagaagatcaggaaggggcatgacccctgagttatgaaggggagaagggacagatgagcttccggagactgctctcctcaccacacagcactagtccatcctcagcacctgagcctccctcacttggacactcaggggaccacacagagaagtggatggacacttcgccatccaggcagaactaagccaggcataaccacagccaagcagattaaccccaggcagactttttaagatacattcagggacggatcccccct

SEQ ID NO: 450158 - DNA, 1418 bp, Homo sapiens
tccgcctcccgcggcgtccacactcgccgcgcgcgcggcggcgggctggaccttgctggcccgcggcgccatgagccgcagcctggactcggcgcggagcttcctggagcggctggaagcgcggggcggccgggagggggcagtcctcgccggcgagttcagcgacatccaggcctgctcggccgcctggaaggctgacggcgtgtgctccaccgtggccggcagtcggccagagaacgtgaggaagaaccgctacaaagacgtgctgccttatgatcagacgcgagtaatcctctccctgctccaggaagagggacacagcgactacattaatggcaacttcatccggggcgtggatggaagcctggcctacattgccacgcaaggacccttgcctcacaccctgctagacttctggagactggtctgggagtttggggtcaaggtgatcctgatggcctgtcgagagatagagaatgggcgggtaggtgccctctgcccccaggtttcatgtccttgtgggaggagggaggagggatcttgctagctcctccttgaccccaggacccgagggtccagctcttggagtgaccttattgtagctctgtgggaagccccattgttcctctaagtttttgttgatatgttattcatcccccagtgttggcaacccctctcctgctgggcttcccagccatttcacaccttagaccataaggccctattctgactgcttcccctgtaggctctgatctctctttccacctctcttccctttattcactccactctaacaactctggtctctgctgttcccatgttccagggatggctctgcctcagggtctgtgccttggctattccttcagcctaggacatccttccctgtggcttgctctatcacctccttcaggtctttgctcaaatggtaattcctcaatgagaccttccggggtgggtcttcacaccattttaaactctcagcacttccattctccctcccttgtcctacttttccttctttcttcacagttcttatgaactcctaacacactggataatctacaaatgtattatgtacattgtttatgcttaatctccctgatttagaaggtaagatccacaaggccagggatttttgttttgcctgttaacataaattagttactaaataaataaatgcatgtcaatattgaaggctgaaggcacatagcttcatgtggtttctacattcttgcctactccatggatggggtaggggttccctggggtgactagctgatggtggaggctgtatgatctgtagtcttgtctctttctcattcctgattttggtaatttgtgttctctctctctctctgtctcatctctctatttcgctatctcttttttcatgctcctgcctgttttttgtaaac

SEQ ID NO: 450159 - DNA, 648 bp, Homo sapiens
ggctccgtcaccctatcctacccaaactccacgtttctcaccttatctgctgacagatgatcagacgcgagtaatcctctccctgctccaggaagagggacacagcgactacattaatggcaacttcatccggggcgtggatggaagcctggcctacattgccacgcaaggacccttgcctcacaccctgctagacttctggagactggtctgggagtttggggtcaaggtcagcacttgggggtgcggcacaatggtggggtcaacatctaagtaccccctcggcagtttccctggccccctcacccaaatcaccttcctctcccctgaccctccttgtctaggtgatcctgatggcctgtcgagagatagagaatgggcgggtaggtgccctctgcccccaggtttcatgtccttgtgggaggagggaggagggatcttgctagctcctccttgaccccaggacccgagggtccagctcttggagtgaccttattgtagctctgtgggaagccccattgttcctctaagtttttgttgatatgttattcatcccccagtgttaagggctcccggagggttaagggctcccggagggttaagggctcccggagggttaagggctcccggagggttaagggctcccgg

SEQ ID NO: 450160 - DNA, 759 bp, Homo sapiens
  misc_feature (17)..(17): n is a, c, g, or t
  misc_feature (21)..(21): n is a, c, g, or t
  misc_feature (30)..(30): n is a, c, g, or t
agaattaggcttaggtngagnctgggtgantcggccgaggaaaccgtgtactattagccatggtcaaccccaccgtgttcttcgacattgccgtcgacggcgagcccttgggccgcgtctcctttgagctgtttgcagacaaggtcccaaagacagcagaaaattttcgtgctctgagcactggagagaaaggatttggttataagggttcctgctttcacagaattattccagggtttatgtgtcagggtggtgacttcacacgccataatggcactggtggcaagtccatctatggggagaaatttgaagatgagaacttcatcctaaagcatacgggtcctggcatcttgtccatggcaaatgctggacccaacacaaatggttcccagtttttcatctgcactgccaagactgagtggttggatggcaagcatgtggtgtttggcaaagtgaaagaaggcatgaatattgtggaggccatggagcgctttgggtccaggaatggcaagaccagcaagaagatcaccattgctgactgtggacaactcgaataagtttgacttgtgttttatcttaaccaccagatcattccttctgtagctcaggagagcacccctccaccccatttgctcgcagtatcctagaatctttgtgctctcgctgcagttccctttgggttccatgttttccttgttccctcccatgcctagctggattgcagagttaagtttatgattatgaaataaaaactaaata

SEQ ID NO: 450161 - DNA, 779 bp, Homo sapiens
ttacgtggttttgcagacgccaccgccgaggaaaaccgtgtactattagccatggtcaaccccaccgtgttcttcgacattgccgtcgacggcgagcccttgggccgcgtctcctttgagctgtttgcagacaaggtcccaaagacagcagaaaattttcgtgctctgagcactggagagaaaggatttggttataagggttcctgctttcacagaattattccagggtttatgtgtcagggtggtgacttcacacgccataatggcactggtggcaagtccatctatggggagaaatttgaagatgagaacttcatcctaaagcatacgggtcctggcatcttgtccatggcaaatgctggacccaacacaaatggttcccagtttttcatctgcactgccaagactgagtggttggatggcaagcatgtggtgtttggcaaagtgaaagaaggcatgaatattgtggaggccatggagcgctttgggtccaggaatggcaagaccagcaagaagatcaccattgctgactgtggacaactcgaataagtttgacttgtgttttatcttaaccaccagatcattccttctgtagctcaggagagcacccctccaccccatttgctcgcagtatcctagaatctttgtgctctcgctgcagttccctttgggttccatgttttccttgttccctcccatgcctagctggattgcagagttaagtttatgattatgaaataaaaactaaatacaattgtctcgttgaaaaaaaaaacggg

SEQ ID NO: 450162 - DNA, 819 bp, Homo sapiens
  misc_feature (25)..(25): n is a, c, g, or t
  misc_feature (747)..(747): n is a, c, g, or t
gggctaggtacgaggctgggtgggnaaaccgtgtactattagccatggtcaaccccaccgtgttcttcgacattgccgtcgacggcgagcccttgggccgcgtctcctttgagctgtttgcagacaaggtcccaaagacagcagaaaattttcgtgctctgagcactggagagaaaggatttggttataagggttcctgctttcacagaattattccagggtttatgtgtcagggtggtgacttcacacgccataatggcactggtggcaagtccatctatggggagaaatttgaagatgagaacttcatcctaaagcatacgggtcctggcatcttgtccatggcaaatgctggacccaacacaaatggttcccagtttttcatctgcactgccaagactgagtggttggatggcaagcatgtggtgtttggcaaagtgaaagaaggcatgaatattgtggaggccatggagcgctttgggtccaggaatggcaagaccagcaagaagatcaccattgctgactgtggacaactcgaataagtttgacttgtgttttatcttaaccaccagatcattccttctgtagctcaggagagcacccctccaccccatttgctcgcagtatcctagaatctttgtgctctcgctgcagttccctttgggttccatgttttccttgttccctcccatgcctagctggattgcagagttaagtttatgattatgaaataaaaactaaataccngggctctttcggggcggaaagttgaatggcatgtctagttctgcccttttgtcaagggatgcgccaagagaa

SEQ ID NO: 450163 - DNA, 968 bp, Homo sapiens
ttacgtggttttgcagacgccaccgccgaggaaaaccgtgtactattagccatggtcaaccccaccgtgttcttcgacattgccgtcgacggcgagcccttgggccgcgtctcctttgagctgtttgcagacaaggtcccaaagacagcagaaaattttcgtgctctgagcactggagagaaaggatttggttataagggttcctgctttcacagaattattccagggtttatgtgtcagggtggtgacttcacacgccataatggcactggtggcaagtccatctatggggagaaatttgaagatgagaacttcatcctaaagcatacgggtcctggcatcttgtccatggcaaatgctggacccaacacaaatggttcccagtttttcatctgcactgccaagactgagtggttggatggcaagcatgtggtgtttggcaaagtgaaagaaggcatgaatattgtggaggccatggagcgctttgggtccaggaatggcaagaccagcaagaagatcaccattgctgactgtggacaactcgaataagtttgacttgtgttttatcttaaccaccagatcattccttctgtagctcaggagagcacccctccaccccatttgctcgcagtatcctagaatctttgtgctctcgctgcagttccctttgggttccatgttttccttgttccctcccatgcctagctggattgcagagttaagtttatgattatgaaataaaaactaaataaaaaaaactcggggctcttagccggcgcgcaaacacgttcgacgggcctggcctaggggtcccgcccgctttttgcacaaggggaacggcggcccagggggggtaatcgaaaccgtcactctctagaaggcggaaaggaagggaggcacagaaaaaaaaacggggaaacaacaaaaaaaaacaacaagaaaaagagaacgcacgagccaactgataa

SEQ ID NO: 450164 - DNA, 826 bp, Homo sapiens
  misc_feature (754)..(754): n is a, c, g, or t
ttacgtggttttgcagacgccaccgccgaggaaaaccgtgtactattagccatggtcaaccccaccgtgttcttcgacattgccgtcgacggcgagcccttgggccgcgtctcctttgagctgtttgcagacaaggtcccaaagacagcagaaaattttcgtgctctgagcactggagagaaaggatttggttataagggttcctgctttcacagaattattccagggtttatgtgtcagggtggtgacttcacacgccataatggcactggtggcaagtccatctatggggagaaatttgaagatgagaacttcatcctaaagcatacgggtcctggcatcttgtccatggcaaatgctggacccaacacaaatggttcccagtttttcatctgcactgccaagactgagtggttggatggcaagcatgtggtgtttggcaaagtgaaagaaggcatgaatattgtggaggccatggagcgctttgggtccaggaatggcaagaccagcaagaagatcaccattgctgactgtggacaactcgaataagtttgacttgtgttttatcttaaccaccagatcattccttctgtagctcaggagagcacccctccaccccatttgctcgcagtatcctagaatctttgtgctctcgctgcagttccctttgggttccatgttttccttgttccctcccatgcctagctggattgcagagttaagtttatgattatgaaataaaaactaaataccngggctctttcggggcggaaagttgaatggcatgtctagttctgcccttttgtcaagggatgcgccaagagaa

SEQ ID NO: 450165 - DNA, 697 bp, Homo sapiens
ttacgtggttttgcagacgccaccgccgaggaaaaccgtgtactattagccatggtcaaccccaccgtgttcttcgacattgccgtcgacggcgagcccttgggccgcgtctcctttgagctgtttgcagacaaggtcccaaagacagcaggctttcacagaattattccagggtttatgtgtcagggtggtgacttcacacgccataatggcactggtggcaagtccatctatggggagaaatttgaagatgagaacttcatcctaaagcatacgggtcctggcatcttgtccatggcaaatgctggacccaacacaaatggttcccagtttttcatctgcactgccaagactgagtggttggatggcaagcatgtggtgtttggcaaagtgaaagaaggcatgaatattgtggaggccatggagcgctttgggtccaggaatggcaagaccagcaagaagatcaccattgctgactgtggacaactcgaataagtttgacttgtgttttatcttaaccaccagatcattccttctgtagctcaggagagcacccctccaccccatttgctcgcagtatcctagaatctttgtgctctcgctgcagttccctttgggttccatgttttccttgttccctcccatgcctagctggattgcagagttaagtttatgattatgaaataaaaactaaata

SEQ ID NO: 450166 - DNA, 833 bp, Homo sapiens
tttttttgttatttagtttttatttcataatcataaacttaactctgcaatccagctaggcatgggagggaacaaggaaaacatggaacccaaagggaactgcagcgagagcacaaagattctaggatactgcgagcaaatggggtggaggggtgctctcctgagctacagaaggaatgatctggtggttaagataaaacacaagtcaaacttattcgagttgtccacagtcagcaatggtgatcttcttgctggtcttgccattcctggacccaaagcgctccatggctttcacagaattattccagggtttatgtgtcagggtggtgacttcacacgccataatggcactggtggcaagtccatctatggggagaaatttgaagatgagaacttcatcctaaagcatacgggtcctggcatcttgtccatggcaaatgctggacccaacacaaatggttcccagtttttcatctgcactgccaagactgagtggttggatggcaagcatgtggtgtttggcaaagtgaaagaaggcatgaatattgtggaggccatggagcgctttgggtccaggaatggcaagaccagcaagaagatcaccattgctgactgtggacaactcgaataagtttgacttgtgttttatcttaaccaccagatcattccttctgtagctcaggagagcacccctccaccccatttgctcgcagtatcctagaatctttgtgctctcgctgcagttccctttgggttccatgttttccttgttccctcccatgcctagctggattgcagagttaagtttatgattatgaaataaaaactaaata

SEQ ID NO: 450167 - DNA, 751 bp, Homo sapiens
ttacgtggttttgcagacgccaccgccgaggaaaaccgtgtactattagccatggtcaaccccaccgtgttcttcgacattgccgtcgacggcgagcccttgggccgcgtctcctttgagctgtttgcagacaaggtcccaaagacagcagaaaattttcgtgctctgagcactggagagaaaggatttggttataagggttcctgctttcacagaattattccagggtttatgtgtcagggtggtgacttcacacgccataatggcactggtggcaagtccatctatggggagaaatttgaagatgagaacttcatcctaaagcatacgggtcctggcatcttgtccatggcaaatgctggacccaacacaaatggttcccagtttttcatctgcactgccaagactgagtggttggatggcaagcatgtggtgtttggcaaagtgaaagaaggcatgaatattgtggaggccatggagcgctttgggtccaggaatggcaagaccagcaagaagatcaccattgctgactgtggacaactcgaataagtttgacttgtgttttatcttaaccaccagatcattccttctgtagctcaggagagcacccctccaccccatttgctcgcagtatcctagaatctttgtgctctcgctgcagttccctttgggttccatgttttccttgttccctcccatgcctagctggattgcagagttaagtttatgattatgaaataaaaactaaata

SEQ ID NO: 450168 - DNA, 744 bp, Homo sapiens
  misc_feature (25)..(25): n is a, c, g, or t
gggctaggtacgaggctgggtgggnaaaccgtgtactattagccatggtcaaccccaccgtgttcttcgacattgccgtcgacggcgagcccttgggccgcgtctcctttgagctgtttgcagacaaggtcccaaagacagcagaaaattttcgtgctctgagcactggagagaaaggatttggttataagggttcctgctttcacagaattattccagggtttatgtgtcagggtggtgacttcacacgccataatggcactggtggcaagtccatctatggggagaaatttgaagatgagaacttcatcctaaagcatacgggtcctggcatcttgtccatggcaaatgctggacccaacacaaatggttcccagtttttcatctgcactgccaagactgagtggttggatggcaagcatgtggtgtttggcaaagtgaaagaaggcatgaatattgtggaggccatggagcgctttgggtccaggaatggcaagaccagcaagaagatcaccattgctgactgtggacaactcgaataagtttgacttgtgttttatcttaaccaccagatcattccttctgtagctcaggagagcacccctccaccccatttgctcgcagtatcctagaatctttgtgctctcgctgcagttccctttgggttccatgttttccttgttccctcccatgcctagctggattgcagagttaagtttatgattatgaaataaaaactaaata

SEQ ID NO: 450169 - DNA, 872 bp, Homo sapiens
ttacgtggttttgcagacgccaccgccgaggaaaaccgtgtactattagccatggtcaaccccaccgtgttcttcgacattgccgtcgacggcgagcccttgggccgcgtctcctttgagctgtttgcagacaaggtcccaaagacagcagaaaattttcgtgctctgagcactggagagaaaggatttggttataagggttcctgctttcacagaattattccagggtttatgtgtcagggtggtgacttcacacgccataatggcactggtggcaagtccatctatggggagaaatttgaagatgagaacttcatcctaaagcatacgggtcctggcatcttgtccatggcaaatgctggacccaacacaaatggttcccagtttttcatctgcactgccaagactgagtggttggatggcaagcatgtggtgtttggcaaagtgaaagaaggcatgaatattgtggaggccatggagcgctttgggtccaggaatggcaagaccagcaagaagatcaccattgctgactgtggacaactcgaataagtttgacttgtgttttatcttaaccaccagatcattccttctgtagctcaggagagcacccctccaccccatttgctcgcagtatcctagaatctttgtgctctcgctgcagttccctttgggttccatgttttccttgttccctcccatgcctagctggattgcagagttaagtttatgattatgaaataaaaactaaatatgtcagatgacacaataaaactcggacatcatgtgggggcaaacaacggctttcaagtgcatgcccaagcggtccggaccggtttggtaaacggggaatctgcggccctagggcgtattca

SEQ ID NO: 450170 - DNA, 862 bp, Homo sapiens
ttacgtggttttgcagacgccaccgccgaggaaaaccgtgtactattagccatggtcaaccccaccgtgttcttcgacattgccgtcgacggcgagcccttgggccgcgtctcctttgagctgtttgcagacaaggtcccaaagacagcagaaaattttcgtgctctgagcactggagagaaaggatttggttataagggttcctgctttcacagaattattccagggtttatgtgtcagggtggtgacttcacacgccataatggcactggtggcaagtccatctatggggagaaatttgaagatgagaacttcatcctaaagcatacgggtcctggcatcttgtccatggcaaatgctggacccaacacaaatggttcccagtttttcatctgcactgccaagactgagtggttggatggcaagcatgtggtgtttggcaaagtgaaagaaggcatgaatattgtggaggccatggagcgctttgggtccaggaatggcaagaccagcaagaagatcaccattgctgactgtggacaactcgaataagtttgacttgtgttttatcttaaccaccagatcattccttctgtagctcaggagagcacccctccaccccatttgctcgcagtatcctagaatctttgtgctctcgctgcagttccctttgggttccatgttttccttgttccctcccatgcctagctggattgcagagttaagtttatgattatgaaataaaaactaaatatacaatgtcacacgaaaaaaaacccgggcttaatcccggggcggaaacagggttcttaaggccttgtccttgctgttcctggcccttttctgtcacacgggaaactgcggg

SEQ ID NO: 450171 - DNA, 605 bp, Homo sapiens
ttacgtggttttgcagacgccaccgccgaggaaaaccgtgtactattagccatggtcaaccccaccgtgttcttcgacattgccgtcgacggcgagcccttgggccgcgtctcctttgagctgtttgcagacaaggtcccaaagacagcagaaaattttcgtgctctgagcactggagagaaaggatttggttataagggttcctgctttcacagaattattccagggtttatgtgtcagggtggtgacttcacacgccataatggcactggtggcaagtccatctatggggagaaatttgaagatgagaacttcatcctaaagcatacgggtcctggcatcttgtccatggcaaatgctggacccaacacaaatggttcccagtttttcatctgcactgccaagactgagtggttggatggcaagcatgtggtgtttggcaaagtgaaagaaggcatgaatattgtggaggccatggagcgctttgggtcacacgcaacttggcctccctgtacgaaaggacaagagaaataaggcctacttcacaaagcgccttcccccgtaaatgatatcatctcaactatattatagccacacccaaccac

SEQ ID NO: 450172 - DNA, 593 bp, Homo sapiens
ttacgtggttttgcagacgccaccgccgaggaaaaccgtgtactattagccatggtcaaccccaccgtgttcttcgacattgccgtcgacggcgagcccttgggccgcgtctcctttgagctgtttgcagacaaggtcccaaagacagcagaaaattttcgtgctctgagcactggagagaaaggatttggttataagggttcctgctttcacagaattattccagggtttatgtgtcagggtggtgacttcacacgccataatggcactggtggcaagtccatctatggggagaaatttgaatattgtggaggccatggagcgctttgggtccaggaatggcaagaccagcaagaagatcaccattgctgactgtggacaactcgaataagtttgacttgtgttttatcttaaccaccagatcattccttctgtagctcaggagagcacccctccaccccatttgctcgcagtatcctagaatctttgtgctctcgctgcagttccctttgggttccatgttttccttgttccctcccatgcctagctggattgcagagttaagtttatgattatgaaataaaaactaaata

SEQ ID NO: 450173 - DNA, 2526 bp, Homo sapiens
ccaggcgctgcgcggctgctctggcgtccagtcctacccgcaacccgcttctccgactttcctgctcctctgctgccttcgtttctggtcctcggccgtcctcgccgcccgcccagaggagtccccgcgcccgccaagaagccgctttccgctggcccgcagccgccgcgacttcggcacagtttctccctctggctagtctcccaaacggccgctcctcgcccgcgggaagaccaggctgcgaccgcgaacgcccgatcctctccaggagccgcagcgagcgcccggcggccacgccccgcgaccacaccccggcggctctcggcccagcgcgcctgccttcgccgcccgccgtcgctcctcgcccgctgcacgacgacgcgacgcccctgctgcaggcggcggacccgaccggacccagacccagacgcaagatggcgacggccgcgtgactgcctcagcgtccccgagctcggctccgagtgcacctacggactgactgtgggggcagagaagggcgagatcaggactctgtctttgttaatcgtgactgcatgaaggtcgcctccctcgggcctacttggtgggagtgtctggtattgttctaaggccaggagcacggtgagccacagtctgttggtagaatttggcgtcttgatagttgagaaaatggcgatgacactgttggaagactggtgccgggggatggatgtgaactcccagagagctctgttagtctggggcatcccagtgaactgtgatgaggctgaaatcgaagagaccctccaggctgcgatgccccaggtctcctaccgaatgcttgggagaatgttctggagggaagaaaatgcgaaagcagccttattagagctcactggcgctgtagattacgccgcgatccccagggagatgccgggcaaaggaggggtctggaaagtgttatttaagcccccaacttctgatgctgaatttttagaaagattgcacctcttcctagctagagaggggtggaccgtgcaagatgttgcccgtgtccttgggtttcagaaccctactccgaccccgggcccagagatgccagcagagatgctaaactatattttggataatgttattcagcctcttgttgagtccatatggtacaagaggctgacacttttctcggggagggacatcccagggcctggagaggaaacctttgatccctggctggagcacactaatgaggtcctagaggagtggcaggtgtccgatgtagaaaagaggcggcggttgatggagagtcttagaggccccgccgctgatgttattcgcatccttaagtccaacaaccccgcgataaccactgccgaatgcctgaaggcgcttgagcaggtgtttgggagcgttgagagctctagggatgcccagatcaaatttctgaacacttatcagaacccgggagaaaaattgtctgcttatgtcattcgtctggagcctctgctacagaaggtggtagagaagggggccattgataaagataatgtgaaccaggcccgcctagagcaggtcattgccggggccaaccacagcggggccatccgaaggcagctgtggcttaccggggctggggaagggccagccccaaacctctttcagttgctggtgcagatccgtgaggaggaagccaaggaggaggaggaggaggctgaggccacccttctgcagttaggcctggaagggcacttctgagtgccaggaaaggcagctttagtgcagacctagatcacagctacttttcttgtccctgtggggtcttacagatgtgtctctgagtagtaaaggcttagccttgttctgttttgttgttttttggaggggaaggttagtcaggcctgagtattcatgtaacattctaaaattgtgccagcgagcaccgtgaacgactgcaatgcaagcgggtcttgctggctaaaatgccaggtaaagggttggttggacacagcgcttagtgcacgctgtcatcatggacatcataatcagttgtgaaaaacacgcgaacctatgacacttcttattccacactgaatgtgaaattgcatgttcagatgtttactacgaggcctggctcacaggaagtgttcagtaaaagtatgcactgttagattactgataacgcggatagatttttgtttaccataaattgttccagatttatattaatggaaggaagtgtgcatttattagctattactcaactttacaatgcaaacatcttatttctcatctttaaacatgtcgaccagtttaattgaaaagtattctgagactgcaaaatggggtgttaaaaaatactgcagttacggagctgtgtaaaccagtttctcattgcataagatacagatgtaaattgcatggagaggttgatatgcacctgtacagtaattcactcccccatttcacatctttgtcagagaatagttcttgttcatactgagtgttctaaatttgaagttatatatacaaattaaaatattttaaaaattc

SEQ ID NO: 450174 - DNA, 781 bp, Homo sapiens
tgggaagtttgatcccagacagactgctgttaagaggggccagcccgttgggctcagctgtcctgaggactcgcatcccgcctgggagatgcagctgtcactgggtttctccctctctgttgtcctggcctcgtccctggcagttggcggggccttgtacgcgtacagccccgccgctgatgttattcgcatccttaagtccaacaaccccgcgataaccactgccgaatgcctgaaggcgcttgagcaggtgtttgggagcgttgagagctctagggatgcccagatcaaatttctgaacacttatcagaacccgggagaaaaattgtctgcttatgtcattcgtctggagcctctgctacagaaggtggtagagaagggggccattgataaagataatgtgaaccaggcccgcctagagcaggtcattgccggggccaaccacagcggggccatccgaaggcagctgtggcttaccggggctggggaagggccagccccaaacctctttcagttgctggtgcagatccgtgaggaggaagccaaggaggaggaggaggaggctgaggccacccttctgcagttaggcctggaagggcacttctgagtgccaggaaaggcagctttagtgcagacctagatcacagctacttttcttgtccctgtgggccttgtacgcgtacaaggccccgtgggagactggtcttcactctcaatgcagccgccacatagatctcggccagcgtcgccacagacacggcatcccctgcacactctgcca

SEQ ID NO: 450175 - DNA, 2266 bp, Homo sapiens
ccgagcccctcgctggctccacggcaaccgctcgacccccgcgagccgccggagcaggcgtgcctcgcgccggctgggacaccgttgccatggagacgcccgagcagctccgccgcgggggcgggacggggcggggcggggcggacgccgctcgccggctggccccatcctccactgcagcagtaacgtcgcggcgggttgcgggtaggactggacgccagggcagccgcgcagcgcctgaaccgctgcgggccgccgcggccgccccttcccaccctcgcctctgctgtctccagcctcgtcgcctccctcgggcctacttggtgggagtgtctggtattgttctaaggccaggagcacggtgagccacagtctgttggtagaatttggcgtcttgatagttgagaaaatggcgatgacactgttggaagactggtgccgggggatggatgtgaactcccagagagctctgttagtctggggcatcccagtgaactgtgatgaggctgaaatcgaagagaccctccaggctgcgatgccccaggtctcctaccgaatgcttgggagaatgttctggagggaagaaaatgcgaaagcagccttattagagctcactggcgctgtagattacgccgcgatccccagggagatgccgggcaaaggaggggtctggaaagtgttatttaagcccccaacttctgatgctgaatttttagaaagattgcacctcttcctagctagagaggggtggaccgtgcaagatgttgcccgtgtccttgggtttcagaaccctactccgaccccgggcccagagatgccagcagagatgctaaactatattttggataatgttattcagcctcttgttgagtccatatggtacaagaggctgacacttttctcggggagggacatcccagggcctggagaggaaacctttgatccctggctggagcacactaatgaggtcctagaggagtggcaggtgtccgatgtagaaaagaggcggcggttgatggagagtcttagaggccccgccgctgatgttattcgcatccttaagtccaacaaccccgcgataaccactgccgaatgcctgaaggcgcttgagcaggtgtttgggagcgttgagagctctagggatgcccagatcaaatttctgaacacttatcagaacccgggagaaaaattgtctgcttatgtcattcgtctggagcctctgctacagaaggtggtagagaagggggccattgataaagataatgtgaaccaggcccgcctagagcaggtcattgccggggccaaccacagcggggccatccgaaggcagctgtggcttaccggggctggggaagggccagccccaaacctctttcagttgctggtgcagatccgtgaggaggaagccaaggaggaggaggaggaggctgaggccacccttctgcagttaggcctggaagggcacttctgagtgccaggaaaggcagctttagtgcagacctagatcacagctacttttcttgtccctgtggggtcttacagatgtgtctctgagtagtaaaggcttagccttgttctgttttgttgttttttggaggggaaggttagtcaggcctgagtattcatgtaacattctaaaattgtgccagcgagcaccgtgaacgactgcaatgcaagcgggtcttgctggctaaaatgccaggtaaagggttggttggacacagcgcttagtgcacgctgtcatcatggacatcataatcagttgtgaaaaacacgcgaacctatgacacttcttattccacactgaatgtgaaattgcatgttcagatgtttactacgaggcctggctcacaggaagtgttcagtaaaagtatgcactgttagattactgataacgcggatagatttttgtttaccataaattgttccagatttatattaatggaaggaagtgtgcatttattagctattactcaactttacaatgcaaacatcttatttctcatctttaaacatgtcgaccagtttaattgaaaagtattctgagactgcaaaatggggtgttaaaaaatactgcagttacggagctgtgtaaaccagtttctcattgcataagatacagatgtaaattgcatggagaggttgatatgcacctgtacagtaattcactcccccatttcacatctttgtcagagaatagttcttgttcatactgagtgttctaaatttgaagttatatatacaaattaaaatattttaaaaattc

SEQ ID NO: 450176 - DNA, 2735 bp, Homo sapiens
ccgagcccctcgctggctccacggcaaccgctcgacccccgcgagccgccggagcaggcgtgcctcgcgccggctgggacaccgttgccatggagacgcccgagcagctccgccgcgggggcgggacggggcggggcggggcggacgccgctcgccggctggccccatcctccactgcagcagtaacgtcgcggcgggttgcgggtaggactggacgccagggcagccgcgcagcgcctgaaccgctgcgggccgccgcggccgccccttcccaccctcgcctctgctgtctccagcctcgcttctccgactttcctgctcctctgctgccttcgtttctggtcctcggccgtcctcgccgcccgcccagaggagtccccgcgcccgccaagaagccgctttccgctggcccgcagccgccgcgacttcggcacagtttctccctctggctagtctcccaaacggccgctcctcgcccgcgggaagaccaggctgcgaccgcgaacgcccgatcctctccaggagccgcagcgagcgcccggcggccacgccccgcgaccacaccccggcggctctcggcccagcgcgcctgccttcgccgcccgccgtcgctcctcgcccgctgcacgacgacgcgacgcccctgctgcaggcggcggacccgaccggacccagacccagacgcaagatggcgacggccgcgtgactgcctcagcgtccccgagctcggctccgagtgcacctacggactgactgtgggggcagagaagggcgagatcaggactctgtctttgttaatcgtgactgcatgaaggtcgcctccctcgggcctacttggtgggagtgtctggtattgttctaaggccaggagcacggtgagccacagtctgttggtagaatttggcgtcttgatagttgagaaaatggcgatgacactgttggaagactggtgccgggggatggatgtgaactcccagagagctctgttagtctggggcatcccagtgaactgtgatgaggctgaaatcgaagagaccctccaggctgcgatgccccaggtctcctaccgaatgcttgggagaatgttctggagggaagaaaatgcgaaagcagccttattagagctcactggcgctgtagattacgccgcgatccccagggagatgccgggcaaaggaggggtctggaaagtgttatttaagcccccaacttctgatgctgaatttttagaaagattgcacctcttcctagctagagaggggtggaccgtgcaagatgttgcccgtgtccttgggtttcagaaccctactccgaccccgggcccagagatgccagcagagatgctaaactatattttggataatgttattcagcctcttgttgagtccatatggtacaagaggctgacacttttctcggggagggacatcccagggcctggagaggaaacctttgatccctggctggagcacactaatgaggtcctagaggagtggcaggtgtccgatgtagaaaagaggcggcggttgatggagagtcttagaggccccgccgctgatgttattcgcatccttaagtccaacaaccccgcgataaccactgccgaatgcctgaaggcgcttgagcaggtgtttgggagcgttgagagctctagggatgcccagatcaaatttctgaacacttatcagaacccgggagaaaaattgtctgcttatgtcattcgtctggagcctctgctacagaaggtggtagagaagggggccattgataaagataatgtgaaccaggcccgcctagagcaggtcattgccggggccaaccacagcggggccatccgaaggcagctgtggcttaccggggctggggaagggccagccccaaacctctttcagttgctggtgcagatccgtgaggaggaagccaaggaggaggaggaggaggctgaggccacccttctgcagttaggcctggaagggcacttctgagtgccaggaaaggcagctttagtgcagacctagatcacagctacttttcttgtccctgtggggtcttacagatgtgtctctgagtagtaaaggcttagccttgttctgttttgttgttttttggaggggaaggttagtcaggcctgagtattcatgtaacattctaaaattgtgccagcgagcaccgtgaacgactgcaatgcaagcgggtcttgctggctaaaatgccaggtaaagggttggttggacacagcgcttagtgcacgctgtcatcatggacatcataatcagttgtgaaaaacacgcgaacctatgacacttcttattccacactgaatgtgatgttcagtaaaagtatgcactgttagattactgataacgcggatagatttttgtttaccataaattgttccagatttatattaatggaaggaagtgtgcatttattagctattactcaactttacaatgcaaacatcttatttctcatctttaaacatgtcgaccagtttaattgaaaagtattctgagactgcaaaatggggtgttaaaaaatactgcagttacggagctgtgtaaaccagtttctcattgcataagatacagatgtaaattgcatggagaggttgatatgcacctgtacagtaattcactcccccatttcacatctttgtcagagaatagttcttgttcatactgagtgttctaaatttgaagttatatatacaaattaaaatattttaaaaattc

SEQ ID NO: 450177 - DNA, 2797 bp, Homo sapiens
ccgagcccctcgctggctccacggcaaccgctcgacccccgcgagccgccggagcaggcgtgcctcgcgccggctgggacaccgttgccatggagacgcccgagcagctccgccgcgggggcgggacggggcggggcggggcggacgccgctcgccggctggccccatcctccactgcagcagtaacgtcgcggcgggttgcgggtaggactggacgccagggcagccgcgcagcgcctgaaccgctgcgggccgccgcggccgccccttcccaccctcgcctctgctgtctccagcctcgcttctccgactttcctgctcctctgctgccttcgtttctggtcctcggccgtcctcgccgcccgcccagaggagtccccgcgcccgccaagaagccgctttccgctggcccgcagccgccgcgacttcggcacagtttctccctctggctagtctcccaaacggccgctcctcgcccgcgggaagaccaggctgcgaccgcgaacgcccgatcctctccaggagccgcagcgagcgcccggcggccacgccccgcgaccacaccccggcggctctcggcccagcgcgcctgccttcgccgcccgccgtcgctcctcgcccgctgcacgacgacgcgacgcccctgctgcaggcggcggacccgaccggacccagacccagacgcaagatggcgacggccgcgtgactgcctcagcgtccccgagctcggctccgagtgcacctacggactgactgtgggggcagagaagggcgagatcaggactctgtctttgttaatcgtgactgcatgaaggtcgcctccctcgggcctacttggtgggagtgtctggtattgttctaaggccaggagcacggtgagccacagtctgttggtagaatttggcgtcttgatagttgagaaaatggcgatgacactgttggaagactggtgccgggggatggatgtgaactcccagagagctctgttagtctggggcatcccagtgaactgtgatgaggctgaaatcgaagagaccctccaggctgcgatgccccaggtctcctaccgaatgcttgggagaatgttctggagggaagaaaatgcgaaagcagccttattagagctcactggcgctgtagattacgccgcgatccccagggagatgccgggcaaaggaggggtctggaaagtgttatttaagcccccaacttctgatgctgaatttttagaaagattgcacctcttcctagctagagaggggtggaccgtgcaagatgttgcccgtgtccttgggtttcagaaccctactccgaccccgggcccagagatgccagcagagatgctaaactatattttggataatgttattcagcctcttgttgagtccatatggtacaagaggctgacacttttctcggggagggacatcccagggcctggagaggaaacctttgatccctggctggagcacactaatgaggtcctagaggagtggcaggtgtccgatgtagaaaagaggcggcggttgatggagagtcttagaggccccgccgctgatgttattcgcatccttaagtccaacaaccccgcgataaccactgccgaatgcctgaaggcgcttgagcaggtgtttgggagcgttgagagctctagggatgcccagatcaaatttctgaacacttatcagaacccgggagaaaaattgtctgcttatgtcattcgtctggagcctctgctacagaaggtggtagagaagggggccattgataaagataatgtgaaccaggcccgcctagagcaggtcattgccggggccaaccacagcggggccatccgaaggcagctgtggcttaccggggctggggaagggccagccccaaacctctttcagttgctggtgcagatccgtgaggaggaagccaaggaggaggaggaggaggctgaggccacccttctgcagttaggcctggaagggcacttctgagtgccaggaaaggcagctttagtgcagacctagatcacagctacttttcttgtccctgtggggtcttacagatgtgtctctgagtagtaaaggcttagccttgttctgttttgttgttttttggaggggaaggttagtcaggcctgagtattcatgtaacattctaaaattgtgccagcgagcaccgtgaacgactgcaatgcaagcgggtcttgctggctaaaatgccaggtaaagggttggttggacacagcgcttagtgcacgctgtcatcatggacatcataatcagttgtgaaaaacacgcgaacctatgacacttcttattccacactgaatgtgaaattgcatgttcagatgtttactacgaggcctggctcacaggaagtgttcagtaaaagtatgcactgttagattactgataacgcggatagatttttgtttaccataaattgttccagatttatattaatggaaggaagtgtgcatttattagctattactcaactttacaatgcaaacatcttatttctcatctttaaacatgtcgaccagtttaattgaaaagtattctgagactgcaaaatggggtgttaaaaaatactgcagttacggagctgtgtaaaccagtttctcattgcataagatacagatgtaaattgcatggagaggttgatatgcacctgtacagtaattcactcccccatttcacatctttgtcagagaatagttcttgttcatactgagtgttctaaataaccgtatataacagactgaacagctcggccaccggcgcgcgcggccgagccgggg

SEQ ID NO: 450178 - DNA, 4471 bp, Homo sapiens
gtggttatggagcagctgccgggggtgccaccaggccccccccaccccgttcgaccgccacccccgcctccaccacccatgcccctgcagctcgaggcccacctccgcagccatggcctggagcccgcggcccccagcccccgcctgcgacccgaggagagcctggatccgccaggcgccatgcaggaattgctcggggctctggagccgctgcccccggcgcctggggatactggcgtaggcccaccaaactcggagggcaaggatcccgcaggcgcctaccgcagccccagcccgcaaggcaccaaggcgccgcgtttcgtgccgctcacctccatctgcttccctgactccttgctccaagacgaggagcgcagcttcttccccaccatggaggagatgttcggtggaggggccgcggacgactacggcaaggccgggccacctgaggacgagggggaccccaaggctggcgctgggccaccccccggcccccctgcttatgatccctatgggccctactgtcctggccgggcgtcgggagccgggcccgagacaccgggcctgggcctggaccccaacaaaccgcctgaactgccctccacggtcaacgccgagccgctgggcctgatccagagtggcccccaccaggcggcgccaccacccccgcctccgccaccgccgcctcccgcgccggcctccgaacccaagggtggcctcacctcgcccatcttctgctctaccaagccaaagaagctgctcaagacatcctccttccacctgctgcggcgccgcgacccacccttccagacccccaagaagctgtacgcccaggagtacgagttcgaggcggacgaggacaaggccgatgttcccgccgacatccgcctcaacccccggcgcttgcctgacctggtctccagctgccgctcccgtccggccctctcgccactgggggacatcgacttctgcccacccaacccaggacccgatggcccccggcgccgtggccgcaagcccacgaaggcgaaacgtgatgggccaccccggccacgggggaggccccggatccgccccctggaggtcccgaccactgcggggcccgcctcggcctccacgcccaccgatggcgccaagaaaccccggggccggggccgaggccggggtcgaaaggctgaggaggcagggggcacccggttggagcccctgaagccacttaagatcaagctgtctgtgcccaaggctggcgagggtctgggaacctcatcgggtgatgccatatcaggcactgaccacaacagcctggactcgagcctgactcgggagaagatcgaggccaagattaaggaggtggaggagaagcagccggagatgaagtcgggtttcatggcctccttcttggacttcctcaagtcaggcaagcgccacccaccactctaccaggcgggcctgacgcctccgctcagccctcccaagagtgtgccaccctctgtgccagcccgaggcctgcagccccagccccctgccacccctgctgtgccacatcccccaccttccggagcctttgggcttgggggcgccctggaggctgcagagagtgagggtctggggcttggctgcccttcaccctgcaagcggcttgatgaggagctgaagcggaacctcgagacgctgccctccttctcctcggatgaggaagactctgtcgccaagaaccgagacctgcaggagagcatctcctccgccatctctgccctcgatgacccaccccttgctgggccaaaagacacttccaccccagatgggccgcccttggcccccgcggctgcagttccagggccaccccctcttccggggctccccagtgccaacagcaatggcactcccgagcccccgctgctggaggagaaacccccacccactccacctcctgccccgactcctcagcctcagcctccgccaccccctccgccgccacagccagccctgccctcgccacccccgctggtggcccccacgcccagctcaccaccgccaccgccgctgccgccgccacctccaccagccatgccctcgcctccaccaccacccccaccagccgctgccccactggctgctcctcctgaggagcccgccgccccgtctcccgaagaccccgagctgccggacacccggcccctgcatctggccaaaaagcaggagacggcggcagtgtgtggggagacggacgaggaggccggcgagagtggcggagagggcatcttccgggaacgggacgagttcgtcatccgtgctgaggacatcccttccctcaagctggcgttgcagacggggcgtgaacccccacccatctggcgagtccagaaggcccttctgcagaaattcactccggagatcaaggacggccagaggcagttttgtgccaccagtaattatttggggtattttggggatgcaaaaaatcggtaccagcgcctctatgtaaagttcctggaaaatgtcaataagaaggactacgtgagggtctgtgctcggaaaccctggcatcggcccccagtgccagtcagacgctctgggcaggccaagaaccccgtatctgctgggggtagctctgcacctccccctaaggccccagcaccacctcccaagcctgagacccctgaaaagacgacatctgagaagcccccagagcagactcctgagacggccatgcctgagccccctgcccccgagaagccctccctcctgcggcctgttgagaaggaaaaggagaaggagaaggtgacacgtggagagcggccattgcggggtgagcgggccaccagcggacggcagacacggccagagcggagtctcgccacgggacaacctgccacatcccggctgcccaaagcccggcctaccaaggtgaaggctgaaccgccccctaagaagaggaagaaatggctgaaggaggcaggcggcaacgctacagcaggcgggggcccaccaggcagctcctcggactcggagtcctcccctggagcccccagcgaggacgagcgggcagtacctgggcgtctgctcaaaaccagggcgatgcgggagatgtaccggagctacgtggagatgttggtgagcacagcacttgacccagacatgatccaggccctggaggacacgcatgacgagctgtacctgccccccatgcggaagatagacggcctgctgaatgagcacaagaagaaagtcctgaagcggctgtcgctaagcccagccctgcaggatgctctgcacacgttcccacagctgcaagtggagcagagtggggagggctctccggaagagggggctgtgcggctgcggcctgctggggaaccctacaaccgcaagacgctcagcaagctcaagaggagcgtggtcagagcccaggagttcaaggttgagctggaaaagtcgggatactatacactctaccattcgctccaccactataaataccacaccttcctgcgctgccgggaccagaccctggccatcgagggcggcgccgaggacctgggccaggaggaggtggtccagcagtgcatgcggaaccagccgtggctggaacagctctttgactccttcagtgacctgctggcccaagcacaggcccacagccgctgcgggtgaccccgccccagcttgtgaggggggcgcctcctccatgaaccgagaattgggacagaaccgtgtcctcaggagctaacacctgggctccatcgccggggaaagggggtcatgggtcagggtgtgtctgtgctgccccctccagggcagggttcaaagtccgactccccgcgcccgccaagaagccgctttccgctggcccgcagccgccgcgacttcggcacagtttctccctctggctagtctcccaaacggtttccctctccccttgccccgaccccccctccacagccacagcccccgccccctccaccttgtacataatgtataggaaaagtctatgtatggctggggggggtggggtggcttcagagagctgggggaccccttccccccaagtcccccctgcaggccaagatctttgctaaaggccattccctccgcagggcatttggcgtcgggtgggaggggaaaacgcatcttgttaattatttttaatcttatttattgtacatacctggggcaggggcttggggaggtggaggggggagaagggtcccctctctctgcccctcccactccttttctacggcgatttgtctgtgtctggcccccacccactgcccatcccccattgttgtctggatgtggttctattttttatcggtctcctttcccctcctccccgttctcgcccccgccccaccccctgctcccactaccctttgtctcttgctctttcttgggcttctgtacaactcaacttgtatacactgtgtacacacaaccagccaaacgaaaacccaacggcaaacacttt

SEQ ID NO: 450179 - DNA, 2780 bp, Homo sapiens
ccgagcccctcgctggctccacggcaaccgctcgacccccgcgagccgccggagcaggcgtgcctcgcgccggctgggacaccgttgccatggagacgcccgagcagctccgccgcgggggcgggacggggcggggcggggcggacgccgctcgccggctggccccatcctccactgcagcagtaacgtcgcggcgggttgcgggtaggactggacgccagggcagccgcgcagcgcctgaaccgctgcgggccgccgcggccgccccttcccaccctcgcctctgctgtctccagcctcgcttctccgactttcctgctcctctgctgccttcgtttctggtcctcggccgtcctcgccgcccgcccagaggagtccccgcgcccgccaagaagccgctttccgctggcccgcagccgccgcgacttcggcacagtttctccctctggctagtctcccaaacggccgctcctcgcccgcgggaagaccaggctgcgaccgcgaacgcccgatcctctccaggagccgcagcgagcgcccggcggccacgccccgcgaccacaccccggcggctctcggcccagcgcgcctgccttcgccgcccgccgtcgctcctcgcccgctgcacgacgacgcgacgcccctgctgcaggcggcggacccgaccggacccagacccagacgcaagatggcgacggccgcgtgactgcctcagcgtccccgagctcggctccgagtgcacctacggactgactgtgggggcagagaagggcgagatcaggactctgtctttgttaatcgtgactgcatgaaggtcgcctccctcgggcctacttggtgggagtgtctggtattgttctaaggccaggagcacggtgagccacagtctgttggtagaatttggcgtcttgatagttgagaaaatggcgatgacactgttggaagactggtgccgggggatggatgtgaactcccagagagctctgttagtctggggcatcccagtgaactgtgatgaggctgaaatcgaagagaccctccaggctgcgatgccccaggtctcctaccgaatgcttgggagaatgttctggagggaagaaaatgcgaaagcagccttattagagctcactggcgctgtagattacgccgcgatccccagggagatgccgggcaaaggaggggtctggaaagtgttatttaagcccccaacttctgatgctgaatttttagaaagattgcacctcttcctagctagagaggggtggaccgtgcaagatgttgcccgtgtccttgggtttcagaaccctactccgaccccgggcccagagatgccagcagagatgctaaactatattttggataatgttattcagcctcttgttgagtccatatggtacaagaggctgacacttttctcggggagggacatcccagggcctggagaggaaacctttgatccctggctggagcacactaatgaggtcctagaggagtggcaggtgtccgatgtagaaaagaggcggcggttgatggagagtcttagaggccccgccgctgatgttattcgcatccttaagtccaacaaccccgcgataaccactgccgaatgcctgaaggcgcttgagcaggtgtttgggagcgttgagagctctagggatgcccagatcaaatttctgaacacttatcagaacccgggagaaaaattgtctgcttatgtcattcgtctggagcctctgctacagaaggtggtagagaagggggccattgataaagataatgtgaaccaggcccgcctagagcaggtcattgccggggccaaccacagcggggccatccgaaggcagctgtggcttaccggggctggggaagggccagccccaaacctctttcagttgctggtgcagatccgtgaggaggaagccaaggaggaggaggaggaggctgaggccacccttctgcagttaggcctggaagggcacttctgagtgccaggaaaggcagctttagtgcagacctagatcacagctacttttcttgtccctgtggggtcttacagatgtgtctctgagtagtaaaggcttagccttgttctgttttgttgttttttggaggggaaggttagtcaggcctgagtattcatgtaacattctaaaattgtgccagcgagcaccgtgaacgactgcaatgcaagcgggtcttgctggctaaaatgccaggtaaagggttggttggacacagcgcttagtgcacgctgtcatcatggacatcataatcagttgtgaaaaacacgcgaacctatgacacttcttattccacactgaatgtgaaattgcatgttcagatgtttactacgaggcctggctcacaggaagtgttcagtaaaagtatgcactgttagattactgataacgcggatagatttttgtttaccataaattgttccagatttatattaatggaaggaagtgtgcatttattagctattactcaactttacaatgcaaacatcttatttctcatctttaaacatgtcgaccagtttaattgaaaagtattctgagactgcaaaatggggtgttaaaaaatactgcagttacggagctgtgtaaaccagtttctcattgcataagatacagatgtaaattgcatggagaggttgatatgcacctgtacagtaattcactcccccatttcacatctttgtcagagaatagttcttgttcatactgagtgttctaaatttgaagttatatatacaaattaaaatattttaaaaattc

SEQ ID NO: 450180 - DNA, 2883 bp, Homo sapiens
ccgagcccctcgctggctccacggcaaccgctcgacccccgcgagccgccggagcaggcgtgcctcgcgccggctgggacaccgttgccatggagacgcccgagcagctccgccgcgggggcgggacggggcggggcggggcggacgccgctcgccggctggccccatcctccactgcagcagtaacgtcgcggcgggttgcgggtaggactggacgccagggcagccgcgcagcgcctgaaccgctgcgggccgccgcggccgccccttcccaccctcgcctctgctgtctccagcctcgcttctccgactttcctgctcctctgctgccttcgtttctggtcctcggccgtcctcgccgcccgcccagaggagtccccgcgcccgccaagaagccgctttccgctggcccgcagccgccgcgacttcggcacagtttctccctctggctagtctcccaaacggccgctcctcgcccgcgggaagaccaggctgcgaccgcgaacgcccgatcctctccaggagccgcagcgagcgcccggcggccacgccccgcgaccacaccccggcggctctcggcccagcgcgcctgccttcgccgcccgccgtcgctcctcgcccgctgcacgacgacgcgacgcccctgctgcaggcggcggacccgaccggacccagacccagacgcaagatggcgacggccgcgtgactgcctcagcgtccccgagctcggctccgagtgcacctacggactgactgtgggggcagagaagggcgagatcaggactctgtctttgttaatcgtgactgcatgaaggtcgcctccctcgggcctacttggtgggagtgtctggtattgttctaaggccaggagcacggtgagccacagtctgttggtagaatttggcgtcttgatagttgagaaaatggcgatgacactgttggaagactggtgccgggggatggatgtgaactcccagagagctctgttagtctggggcatcccagtgaactgtgatgaggctgaaatcgaagagaccctccaggctgcgatgccccaggtctcctaccgaatgcttgggagaatgttctggagggaagaaaatgcgaaagcagccttattagagctcactggcgctgtagattacgccgcgatccccagggagatgccgggcaaaggaggggtctggaaagtgttatttaagcccccaacttctgatgctgaatttttagaaagattgcacctcttcctagctagagaggggtggaccgtgcaagatgttgcccgtgtccttgggtttcagaaccctactccgaccccgggcccagagatgccagcagagatgctaaactatattttggataatgttattcagcctcttgttgagtccatatggtacaagaggctgacacttttctcggggagggacatcccagggcctggagaggaaacctttgatccctggctggagcacactaatgaggtcctagaggagtggcaggtgtccgatgtagaaaagaggcggcggttgatggagagtcttagaggccccgccgctgatgttattcgcatccttaagtccaacaaccccgcgataaccactgccgaatgcctgaaggcgcttgagcaggtgtttgggagcgttgagagctctagggatgcccagatcaaatttctgaacacttatcagaacccgggagaaaaattgtctgcttatgtcattcgtctggagcctctgctacagaaggtggtagagaagggggccattgataaagataatgtgaaccaggcccgcctagagcaggtcattgccggggccaaccacagcggggccatccgaaggcagctgtggcttaccggggctggggaagggccagccccaaacctctttcagttgctggtgcagatccgtgaggaggaagccaaggaggaggaggaggaggctgaggccacccttctgcagttaggcctggaagggcacttctgagtgccaggaaaggcagctttagtgcagacctagatcacagctacttttcttgtccctgtggggtcttacagatgtgtctctgagtagtaaaggcttagccttgttctgttttgttgttttttggaggggaaggttagtcaggcctgagtattcatgtaacattctaaaattgtgccagcgagcaccgtgaacgactgcaatgcaagcgggtcttgctggctaaaatgccaggtaaagggttggttggacacagcgcttagtgcacgctgtcatcatggacatcataatcagttgtgaaaaacacgcgaacctatgacacttcttattccacactgaatgtgaaattgcatgttcagatgtttactacgaggcctggctcacaggaagtgttcagtaaaagtatgcactgttagattactgataacgcggatagatttttgtttaccataaattgttccagatttatattaatggaaggaagtgtgcatttattagctattactcaactttacaatgcaaacatcttatttctcatctttaaacatgtcgaccagtttaattgaaaagtattctgagactgcaaaatggggtgttaaaaaatactgcagttacggagctgtgtaaaccagtttctcattgcataagatacagatgtaaattgcatggagaggttgatatgcacctgtacagtaattcactcccccatttcacatctttgtcagagaatagttcttgttcatactgagtgttctaaatttgaagttatatatacaaattaaaatattttaaaaattctgttgtcttctcatttttctggcatgtataaacatttttagcctaagtaaactgtccttttttcttatgaagactttgtcattaaatcaaaccatttatttta

SEQ ID NO: 450181 - DNA, 1333 bp, Homo sapiens
gatcagtgggcaccagctcatgagtctgtctactgccgatgccaagaaggaccccagctgcaagacctgcaacatcagcggggccttgtacgcgtacagccccgccgctgatgttattcgcatccttaagtccaacaaccccgcgataaccactgccgaatgcctgaaggcgcttgagcaggtgtttgggagcgttgagagctctagggatgcccagatcaaatttctgaacacttatcagaacccgggagaaaaattgtctgcttatgtcattcgtctggagcctctgctacagaaggtggtagagaagggggccattgataaagataatgtgaaccaggcccgcctagagcaggtcattgccggggccaaccacagcggggccatccgaaggcagctgtggcttaccggggctggggaagggccagccccaaacctctttcagttgctggtgcagatccgtgaggaggaagccaaggaggaggaggaggaggctgaggccacccttctgcagttaggcctggaagggcacttctgagtgccaggaaaggcagctttagtgcagacctagatcacagctacttttcttgtccctgtggggtcttacagatgtgtctctgagtagtaaaggcttagccttgttctgttttgttgttttttggaggggaaggttagtcaggcctgagtattcatgtaacattctaaaattgtgccagcgagcaccgtgaacgactgcaatgcaagcgggtcttgctggctaaaatgccaggtaaagggttggttggacacagcgcttagtgcacgctgtcatcatggacatcataatcagttgtgaaaaacacgcgaacctatgacacttcttattccacactgaatgtgaaattgcatgttcagatgtttactacgaggcctggctcacaggaagtgttcagtaaaagtatgcactgttagattactgataacgcggatagatttttgtttaccataaattgttccagatttatattaatggaaggaagtgtgcatttattagctattactcaactttacaatgcaaacatcttatttctcatctttaaacatgtcgaccagtttaattgaaaagtattctgagactgcaaaatggggtgttaaaaaatactgcagttacggagctgtgtaaaccagtttctcattgcataagatacagatgtaaattgcatggagaggttgatatgcacctgtacagtaattcactcccccatttcacatctttgtcagagaatagttcttgttcatactgagtgttctaaatttgaagttatatatacaaattaaaatattttaaaaattc

SEQ ID NO: 450182 - DNA, 3225 bp, Homo sapiens
cccgggaggagcagtctctccgcgcgtctcccggagctttctccattgtctctgcctttacaacagagggagacgatggactgagctgatccgcaccatggagtctcgggtcttactgagaacattctgtttgatcttcggtctcggagcagtttgggggcttggtgtggacccttccctacagattgacgtcttaacagagttagaacttggggagtccacgaccggagtgcgtcaggtcccggggctgcataatgggacgaaagcctttctctttcaagatactcccagaagcataaaagcatccactgctacagctgaacagttttttcagaagctgagaaataaacatgaatttactattttggtgaccctaaaacagacccacttaaattcaggagttattctctcaattcaccacttggatcacaggtacctggaactggaaagtagtggccatcggaatgaagtcagactgcattaccgctcaggcagtcaccgccctcacacagaagtgtttccttacattttggctgatgacaagtggcacaagctctccttagccatcagtgcttcccatttgattttacacattgactgcaataaaatttatgaaagggtagtagaaaagccctccacagacttgcctctaggcacaacattttggctaggacagagaaataatgcgcatggatattttaagggtataatgcaagatgtccaattacttgtcatgccccagggatttattgctcagtgcccagatcttaatcgcacctgtccaacttgcaatgacttccatggacttgtgcagaaaatcatggagctacaggatattttagccaaaacatcagccaagctgtctcgagctgaacagcgaatgaatagattggatcagtgctattgtgaaaggacttgcaccatgaagggaaccacctaccgagaatttgagtcctggatagacggctgtaagaactgcacatgcctgaatggaaccatccagtgtgaaactctaatctgcccaaatcctgactgcccacttaagtcggctcttgcgtatgtggatggcaaatgctgtaaggaatgcaaatcgatatgccaatttcaaggacgaacctactttgaaggagaaagaaatacagtctattcctcttctggagtatgtgttctctatgagtgcaaggaccagaccatgaaacttgttgagagttcaggctgtccagctttggattgtccagagtctcatcagataaccttgtctcacagctgttgcaaagtttgtaaaggttatgacttttgttctgaaaggcataactgcatggagaattccatctgcagaaatctgaatgacagggctgtttgtagctgtcgagatggttttagggctcttcgagaggataatgcctactgtgaagacatcgatgagtgtgctgaagggcgccattactgtcgtgaaaatacaatgtgtgtcaacaccccgggttcttttatgtgcatctgcaaaactggatacatcagaattgatgattattcatgtacagaacatgatgagtgtatcacaaatcagcacaactgtgatgaaaatgctttatgcttcaacactgttggaggacacaactgtgtttgcaagccgggctatacagggaatggaacgacatgcaaagcattttgcaaagatggctgtaggaatggaggagcctgtattgccgctaatgtgtgtgcctgcccacaaggcttcactggacccagctgtgaaacggacattgatgaatgctctgatggttttgttcaatgtgacagtcgtgctaattgcattaacctgcctggatggtaccactgtgagtgcagagatggctaccatgacaatgggatgttttcaccaagtggagaatcgtgtgaagatattgatgagtgtgggaccgggaggcacagctgtgccaatgataccatttgcttcaatttggatggcggatatgattgtcgatgtcctcatggaaagaattgcacaggggactgcatccatgatggaaaagttaagcacaatggtcagatttgggtgttggaaaatgacaggtgctctgtgtgctcatgtcagaatggattcgttatgtgtcgacggatggtctgtgactgtgagaatcccacagttgatcttttttgctgccctgaatgtgacccaaggcttagtagtcagtgcctccatcaaaatggggaaactttgtataacagtggtgacacctgggtccagaattgtcaacagtgccgctgcttgcaaggggaagttgattgttggcccctgccttgcccagatgtggagtgtgaattcagcattctcccagagaatgagtgctgcccgcgctgtgtcacagacccttgccaggctgacaccatccgcaatgacatcaccaagacttgcctggacgaaatgaatgtggttcgcttcaccgggtcctcttggatcaaacatggcactgagtgtactctctgccagtgcaagaatggccacatctgttgctcagtggatccacagtgccttcaggaactgtgaagttaactgtctcatgggagatttctgttaaaagaatgttctttcattaaaagaccaaaaagaagttaaaacttaaattgggtgatttgtgggcagctaaatgcagctttgttaatagctgagtgaactttcaattatgaaatttgtggagcttgacaaaatcacaaaaggaaaattactggggcaaaattagacctcaagtctgcctctactgtgtctcacatcaccatgtagaagaatgggcgtacagtatataccgtgacatcctgaaccctggatagaaagcctgagcccattggatctgtgaaagcctctagcttcactggtgcagaaaattttcctctagatcagaatcttcaagaatcagttaggttcctcactgcaagaaataaaatgtcaggcagtgaatgaattatattttcagaagtaaagcaaagaagctataacatgttatgtacagtacactctgaaaagaaatctgaaacaagttattgtaatgataaaaataatgcacaggcatggttacttaatattttctaacaggaaaagtcatccctatttccttgttttactgcacttaatattatttggttgaatttgttcagtataagctcgttcttgtgcaaaattaaataaatatttctcttaccttataaaaaaaaagtctgagtatcttg

SEQ ID NO: 450183 - DNA, 3125 bp, Homo sapiens
atggaaacgggactgggtgctccgctatttaaagcttggctgctgatctcagtttgggggcttggtgtggacccttccctacagattgacgtcttaacagagttagaacttggggagtccacgaccggagtgcgtcaggtcccggggctgcataatgggacgaaagcctttctctttcaagatactcccagaagcataaaagcatccactgctacagctgaacagttttttcagaagctgagaaataaacatgaatttactattttggtgaccctaaaacagacccacttaaattcaggagttattctctcaattcaccacttggatcacaggtacctggaactggaaagtagtggccatcggaatgaagtcagactgcattaccgctcaggcagtcaccgccctcacacagaagtgtttccttacattttggctgatgacaagtggcacaagctctccttagccatcagtgcttcccatttgattttacacattgactgcaataaaatttatgaaagggtagtagaaaagccctccacagacttgcctctaggcacaacattttggctaggacagagaaataatgcgcatggatattttaagggtataatgcaagatgtccaattacttgtcatgccccagggatttattgctcagtgcccagatcttaatcgcacctgtccaacttgcaatgacttccatggacttgtgcagaaaatcatggagctacaggatattttagccaaaacatcagccaagctgtctcgagctgaacagcgaatgaatagattggatcagtgctattgtgaaaggacttgcaccatgaagggaaccacctaccgagaatttgagtcctggatagacggctgtaagaactgcacatgcctgaatggaaccatccagtgtgaaactctaatctgcccaaatcctgactgcccacttaagtcggctcttgcgtatgtggatggcaaatgctgtaaggaatgcaaatcgatatgccaatttcaaggacgaacctactttgaaggagaaagaaatacagtctattcctcttctggagtatgtgttctctatgagtgcaaggaccagaccatgaaacttgttgagagttcaggctgtccagctttggattgtccagagtctcatcagataaccttgtctcacagctgttgcaaagtttgtaaaggttatgacttttgttctgaaaggcataactgcatggagaattccatctgcagaaatctgaatgacagggctgtttgtagctgtcgagatggttttagggctcttcgagaggataatgcctactgtgaagacatcgatgagtgtgctgaagggcgccattactgtcgtgaaaatacaatgtgtgtcaacaccccgggttcttttatgtgcatctgcaaaactggatacatcagaattgatgattattcatgtacagaacatgatgagtgtatcacaaatcagcacaactgtgatgaaaatgctttatgcttcaacactgttggaggacacaactgtgtttgcaagccgggctatacagggaatggaacgacatgcaaagcattttgcaaagatggctgtaggaatggaggagcctgtattgccgctaatgtgtgtgcctgcccacaaggcttcactggacccagctgtgaaacggacattgatgaatgctctgatggttttgttcaatgtgacagtcgtgctaattgcattaacctgcctggatggtaccactgtgagtgcagagatggctaccatgacaatgggatgttttcaccaagtggagaatcgtgtgaagatattgatgagtgtgggaccgggaggcacagctgtgccaatgataccatttgcttcaatttggatggcggatatgattgtcgatgtcctcatggaaagaattgcacaggggactgcatccatgatggaaaagttaagcacaatggtcagatttgggtgttggaaaatgacaggtgctctgtgtgctcatgtcagaatggattcgttatgtgtcgacggatggtctgtgactgtgagaatcccacagttgatcttttttgctgccctgaatgtgacccaaggcttagtagtcagtgcctccatcaaaatggggaaactttgtataacagtggtgacacctgggtccagaattgtcaacagtgccgctgcttgcaaggggaagttgattgttggcccctgccttgcccagatgtggagtgtgaattcagcattctcccagagaatgagtgctgcccgcgctgtgtcacagacccttgccaggctgacaccatccgcaatgacatcaccaagacttgcctggacgaaatgaatgtggttcgcttcaccgggtcctcttggatcaaacatggcactgagtgtactctctgccagtgcaagaatggccacatctgttgctcagtggatccacagtgccttcaggaactgtgaagttaactgtctcatgggagatttctgttaaaagaatgttctttcattaaaagaccaaaaagaagttaaaacttaaattgggtgatttgtgggcagctaaatgcagctttgttaatagctgagtgaactttcaattatgaaatttgtggagcttgacaaaatcacaaaaggaaaattactggggcaaaattagacctcaagtctgcctctactgtgtctcacatcaccatgtagaagaatgggcgtacagtatataccgtgacatcctgaaccctggatagaaagcctgagcccattggatctgtgaaagcctctagcttcactggtgcagaaaattttcctctagatcagaatcttcaagaatcagttaggttcctcactgcaagaaataaaatgtcaggcagtgaatgaattatattttcagaagtaaagcaaagaagctataacatgttatgtacagtacactctgaaaagaaatctgaaacaagttattgtaatgataaaaataatgcacaggcatggttacttaatattttctaacaggaaaagtcatccctatttccttgttttactgcacttaatattatttggttgaatttgttcagtataagctcgttcttgtgcaaaattaaataaatatttctcttaccttataaaaaaaaagtctgagtatcttg

SEQ ID NO: 450184 - DNA, 2964 bp, Homo sapiens
  misc_feature (19)..(19): n is a, c, g, or t
ggctgacttagaggatccngatactcccagaagcataaaagcatccactgctacagctgaacagttttttcagaagctgagaaataaacatgaatttactattttggtgaccctaaaacagacccacttaaattcaggagttattctctcaattcaccacttggatcacaggtacctggaactggaaagtagtggccatcggaatgaagtcagactgcattaccgctcaggcagtcaccgccctcacacagaagtgtttccttacattttggctgatgacaagtggcacaagctctccttagccatcagtgcttcccatttgattttacacattgactgcaataaaatttatgaaagggtagtagaaaagccctccacagacttgcctctaggcacaacattttggctaggacagagaaataatgcgcatggatattttaagggtataatgcaagatgtccaattacttgtcatgccccagggatttattgctcagtgcccagatcttaatcgcacctgtccaacttgcaatgacttccatggacttgtgcagaaaatcatggagctacaggatattttagccaaaacatcagccaagctgtctcgagctgaacagcgaatgaatagattggatcagtgctattgtgaaaggacttgcaccatgaagggaaccacctaccgagaatttgagtcctggatagacggctgtaagaactgcacatgcctgaatggaaccatccagtgtgaaactctaatctgcccaaatcctgactgcccacttaagtcggctcttgcgtatgtggatggcaaatgctgtaaggaatgcaaatcgatatgccaatttcaaggacgaacctactttgaaggagaaagaaatacagtctattcctcttctggagtatgtgttctctatgagtgcaaggaccagaccatgaaacttgttgagagttcaggctgtccagctttggattgtccagagtctcatcagataaccttgtctcacagctgttgcaaagtttgtaaaggttatgacttttgttctgaaaggcataactgcatggagaattccatctgcagaaatctgaatgacagggctgtttgtagctgtcgagatggttttagggctcttcgagaggataatgcctactgtgaagacatcgatgagtgtgctgaagggcgccattactgtcgtgaaaatacaatgtgtgtcaacaccccgggttcttttatgtgcatctgcaaaactggatacatcagaattgatgattattcatgtacagaacatgatgagtgtatcacaaatcagcacaactgtgatgaaaatgctttatgcttcaacactgttggaggacacaactgtgtttgcaagccgggctatacagggaatggaacgacatgcaaagcattttgcaaagatggctgtaggaatggaggagcctgtattgccgctaatgtgtgtgcctgcccacaaggcttcactggacccagctgtgaaacggacattgatgaatgctctgatggttttgttcaatgtgacagtcgtgctaattgcattaacctgcctggatggtaccactgtgagtgcagagatggctaccatgacaatgggatgttttcaccaagtggagaatcgtgtgaagatattgatgagtgtgggaccgggaggcacagctgtgccaatgataccatttgcttcaatttggatggcggatatgattgtcgatgtcctcatggaaagaattgcacaggggactgcatccatgatggaaaagttaagcacaatggtcagatttgggtgttggaaaatgacaggtgctctgtgtgctcatgtcagaatggattcgttatgtgtcgacggatggtctgtgactgtgagaatcccacagttgatcttttttgctgccctgaatgtgacccaaggcttagtagtcagtgcctccatcaaaatggggaaactttgtataacagtggtgacacctgggtccagaattgtcaacagtgccgctgcttgcaaggggaagttgattgttggcccctgccttgcccagatgtggagtgtgaattcagcattctcccagagaatgagtgctgcccgcgctgtgtcacagacccttgccaggctgacaccatccgcaatgacatcaccaagacttgcctggacgaaatgaatgtggttcgcttcaccgggtcctcttggatcaaacatggcactgagtgtactctctgccagtgcaagaatggccacatctgttgctcagtggatccacagtgccttcaggaactgtgaagttaactgtctcatgggagatttctgttaaaagaatgttctttcattaaaagaccaaaaagaagttaaaacttaaattgggtgatttgtgggcagctaaatgcagctttgttaatagctgagtgaactttcaattatgaaatttgtggagcttgacaaaatcacaaaaggaaaattactggggcaaaattagacctcaagtctgcctctactgtgtctcacatcaccatgtagaagaatgggcgtacagtatataccgtgacatcctgaaccctggatagaaagcctgagcccattggatctgtgaaagcctctagcttcactggtgcagaaaattttcctctagatcagaatcttcaagaatcagttaggttcctcactgcaagaaataaaatgtcaggcagtgaatgaattatattttcagaagtaaagcaaagaagctataacatgttatgtacagtacactctgaaaagaaatctgaaacaagttattgtaatgataaaaataatgcacaggcatggttacttaatattttctaacaggaaaagtcatccctatttccttgttttactgcacttaatattatttggttgaatttgttcagtataagctcgttcttgtgcaaaattaaataaatatttctcttaccttataaaaaaaaagtctgagtatcttg

SEQ ID NO: 450185 - DNA, 1348 bp, Homo sapiens
agtgctgctttttcttgtctatagatattgatgagtgtgggaccgggaggcacagctgtgccaatgataccatttgcttcaatttggatggcggatatgattgtcgatgtcctcatggaaagaattgcacaggggactgcatccatgatggaaaagttaagcacaatggtcagatttgggtgttggaaaatgacaggtgctctgtgtgctcatgtcagaatggattcgttatgtgtcgacggatggtctgtgactgtgagaatcccacagttgatcttttttgctgccctgaatgtgacccaaggcttagtagtcagtgcctccatcaaaatggggaaactttgtataacagtggtgacacctgggtccagaattgtcaacagtgccgctgcttgcaaggggaagttgattgttggcccctgccttgcccagatgtggagtgtgaattcagcattctcccagagaatgagtgctgcccgcgctgtgtcacagacccttgccaggctgacaccatccgcaatgacatcaccaagacttgcctggacgaaatgaatgtggttcgcttcaccgggtcctcttggatcaaacatggcactgagtgtactctctgccagtgcaagaatggccacatctgttgctcagtggatccacagtgccttcaggaactgtgaagttaactgtctcatgggagatttctgttaaaagaatgttctttcattaaaagaccaaaaagaagttaaaacttaaattgggtgatttgtgggcagctaaatgcagctttgttaatagctgagtgaactttcaattatgaaatttgtggagcttgacaaaatcacaaaaggaaaattactggggcaaaattagacctcaagtctgcctctactgtgtctcacatcaccatgtagaagaatgggcgtacagtatataccgtgacatcctgaaccctggatagaaagcctgagcccattggatctgtgaaagcctctagcttcactggtgcagaaaattttcctctagatcagaatcttcaagaatcagttaggttcctcactgcaagaaataaaatgtcaggcagtgaatgaattatattttcagaagtaaagcaaagaagctataacatgttatgtacagtacactctgaaaagaaatctgaaacaagttattgtaatgataaaaataatgcacaggcatggttacttaatattttctaacaggaaaagtcatccctatttccttgttttactgcacttaatattatttggttgaatttgttcagtataagctcgttcttgtgcaaaattaaataaatatttctcttaccttataaaaaaaaagtctgagtatcttg

SEQ ID NO: 450186 - DNA, 3009 bp, Homo sapiens
cccgggaggagcagtctctccgcgcgtctcccggagctttctccattgtctctgcctttacaacaggttcgggcggcggggaagacgggggggtgcggggccgccccagcccgggctttcttggggccgccccccttctaccgggtgtgcgagtctttggctgcttttattcggctcgggagctaattccccgacggagccgcgccggggcgagtccgacccctccctccgggccccctccgggccgcgctgccgcctcggccctgcgtgtgggaatgatgtgcgcattggagggtctaagttcttcacgcgcctggggaggcctcccttttctttcttaggcaaccaaagcgtattaatcctactgatcagtaaatccgaggcagcagcaggagagacaaacgttattttcccgcttgattccaagaacctcttcgatttttatttttatttttaaagagggagacgatggactgagctgatccgcaccatggagtctcgggtcttactgagaacattctgtttgatcttcggtctcggagcagtttgggggcttggtgtggacccttccctacagattgacgtcttaacagagttagaacttggggagtccacgaccggagtgcgtcaggtcccggggctgcataatgggacgaaagcctttctctttcaagatactcccagaagcataaaagcatccactgctacagctgaacagttttttcagaagctgagaaataaacatgaatttactattttggtgaccctaaaacagacccacttaaattcaggagttattctctcaattcaccacttggatcacaggtacctggaactggaaagtagtggccatcggaatgaagtcagactgcattaccgctcaggcagtcaccgccctcacacagaagtgtttccttacattttggctgatgacaagtggcacaagctctccttagccatcagtgcttcccatttgattttacacattgactgcaataaaatttatgaaagggtagtagaaaagccctccacagacttgcctctaggcacaacattttggctaggacagagaaataatgcgcatggatattttaagggtataatgcaagatgtccaattacttgtcatgccccagggatttattgctcagtgcccagatcttaatcgcacctgtccaacttgcaatgacttccatggacttgtgcagaaaatcatggagctacaggatattttagccaaaacatcagccaagctgtctcgagctgaacagcgaatgaatagattggatcagtgctattgtgaaaggacttgcaccatgaagggaaccacctaccgagaatttgagtcctggatagacggctgtaagaactgcacatgcctgaatggaaccatccagtgtgaaactctaatctgcccaaatcctgactgcccacttaagtcggctcttgcgtatgtggatggcaaatgctgtaaggaatgcaaatcgatatgccaatttcaaggacgaacctactttgaaggagaaagaaatacagtctattcctcttctggagtatgtgttctctatgagtgcaaggaccagaccatgaaacttgttgagagttcaggctgtccagctttggattgtccagagtctcatcagataaccttgtctcacagctgttgcaaagtttgtaaaggttatgacttttgttctgaaaggcataactgcatggagaattccatctgcagaaatctgaatgacagggctgtttgtagctgtcgagatggttttagggctcttcgagaggataatgcctactgtgaagacatcgatgagtgtgctgaagggcgccattactgtcgtgaaaatacaatgtgtgtcaacaccccgggttcttttatgtgcatctgcaaaactggatacatcagaattgatgattattcatgtacagaacatgatgagtgtatcacaaatcagcacaactgtgatgaaaatgctttatgcttcaacactgttggaggacacaactgtgtttgcaagccgggctatacagggaatggaacgacatgcaaagcattttgcaaagatggctgtaggaatggaggagcctgtattgccgctaatgtgtgtgcctgcccacaaggcttcactggacccagctgtgaaacggacattgatgaatgctctgatggttttgttcaatgtgacagtcgtgctaattgcattaacctgcctggatggtaccactgtgagtgcagagatggctaccatgacaatgggatgttttcaccaagtggagaatcgtgtgaagatattgatgagtgtgggaccgggaggcacagctgtgccaatgataccatttgcttcaatttggatggcggatatgattgtcgatgtcctcatggaaagaattgcacaggggactgcatccatgatggaaaagttaagcacaatggtcagatttgggtgttggaaaatgacaggtgctctgtgtgctcatgtcaggttggtataaatgaaaaactttaattaattttattcagttgtaatttgcatatgttttaagtgtgtatatggcttgatgagttttgacaatgtgtacatccacttacctaccatcacaattaatataacagaacacttccattatcccaaatgttgcctatgttctttcctagttagtcccacaaccttagatccaggcaaaaactgcatccagtccctattgattaaatttgtattttctagagcctcatataaatggagttttatagtatatactatattgtgtctgacttcattctctcaacattatgtttttgagattcaatcctattgtacctatatctctaatccatttctttttaataccgaataatatttcattgtatggatataccaatgtatttatctatccacatgttgataaaattttattactaaccatgctaattttttcctagtcacagtatcatgtttgaatgactgcataaataaagtcagaatgaacatgctgtgatccaaga

SEQ ID NO: 450187 - DNA, 1591 bp, Homo sapiens
cccgggaggagcagtctctccgcgcgtctcccggagctttctccattgtctctgcctttacaacaggttcgggcggcggggaagacgggggggtgcggggccgccccagcccgggctttcttggggccgccccccttctaccgggtgtgcgagtctttggctgcttttattcggctcgggagctaattccccgacggagccgcgccggggcgagtccgacccctccctccgggccccctccgggccgcgctgccgcctcggccctgcgtgtgggaatgatgtgcgcattggagggtctaagttcttcacgcgcctggggaggcctcccttttctttcttaggcaaccaaagcgtattaatcctactgatcagtaaatccgaggcagcagcaggagagacaaacgttattttcccgcttgattccaagaacctcttcgatttttatttttatttttaaagagggagacgatggactgagctgatccgcaccatggagtctcgggtcttactgagaacattctgtttgatcttcggtctcggagcagtttgggggcttggtgtggacccttccctacagattgacgtcttaacagagttagaacttggggagtccacgaccggagtgcgtcaggtcccggggctgcataatgggacgaaagcctttctctttcaagatactcccagaagcataaaagcatccactgctacagctgaacagttttttcagaagctgagaaataaacatgaatttactattttggtgaccctaaaacagacccacttaaattcaggagttattctctcaattcaccacttggatcacaggtacctggaactggaaagtagtggccatcggaatgaagtcagactgcattaccgctcaggcagtcaccgccctcacacagaagtgtttccttacattttggctgatgacaagtggcacaagctctccttagccatcagtgcttcccatttgattttacacattgactgcaataaaatttatgaaagggtagtagaaaagccctccacagacttgcctctaggcacaacattttggctaggacagagaaataatgcgcatggatattttaagggtataatgcaagatgtccaattacttgtcatgccccagggatttattgctcagtgcccagatcttaatcgcacctgtccaacttgcaatgacttccatggacttgtgcagaaaatcatggagctacaggatattttagccaaaacatcagccaagctgtctcgagctgaacagcgaatgaatagattggatcagtgctattgtgaaaggacttgcaccatgaagggaaccacctaccgagaatttgagtcctggatagacggctgtaagaactgcacatgcctgaatggaaccatccagtgtgaaactctaatctgcccaaatcctgactgcccacttaagtcggctcttgcgtatgtggatggcaaatgctgtaaggaatgcaaatgtgagcataacttttatgatgaatactttctttggaaaaataaagcacgatcggccggaacaaacaacataaccataaatcaattcatagactaatttgtcaaccca

SEQ ID NO: 450188 - DNA, 1021 bp, Homo sapiens
  misc_feature (1020)..(1020): n is a, c, g, or t
cccgggaggagcagtctctccgcgcgtctcccggagctttctccattgtctctgcctttacaacaggttcgggcggcggggaagacgggggggtgcggggccgccccagcccgggctttcttggggccgccccccttctaccgggtgtgcgagtctttggctgcttttattcggctcgggagctaattccccgacggagccgcgccggggcgagtccgacccctccctccgggccccctccgggccgcgctgccgcctcggccctgcgtgtgggaatgatgtgcgcattggagggtctaagttcttcacgcgcctggggaggcctcccttttctttcttaggcaaccaaagcgtattaatcctactgatcagtaaatccgaggcagcagcaggagagacaaacgttattttcccgcttgattccaagaacctcttcgatttttatttttatttttaaagagggagacgatggactgagctgatccgcaccatggagtctcgggtcttactgagaacattctgtttgatcttcggtctcggagcagtttgggggcttggtgtggacccttccctacagattgacgtcttaacagagttagaacttggggagtccacgaccggagtgcgtcaggtcccggggctgcataatgggacgaaagcctttctctttcaagatactcccagaagcataaaagcatccactgctacagctgaacagttttttcagaagctgagaaataaacatgaatttactattttggtgaccctaaaacagacccacttaaattcaggagttattctctcaattcaccacttggatcacaggtacctggaactggaaagtagtggccatcggaatgaagtcagactgcattaccgctcaggcagtcaccgccctcacacagaagtgtttccttacattttggctgatgacaagtggcacaagctctccttagccatcagtgcttcccatttgattttacacattgactgcaataatgtttcctcaagagtcggcgnt

SEQ ID NO: 450189 - DNA, 596 bp, Homo sapiens
gccttccacagtttaaatgactaaccgagtcagtgattctgacccaccaattctagaactttaaactgcaagaacttttctttatttacccacccgtccagggtataatgcaagatgtccaattacttgtcatgccccagggatttattgctcagtgcccagatcttaatcgcacctgtccaacttgcaatgacttccatggacttgtgcagaaaatcatggagctacaggatattttagccaaaacatcagccaagctgtctcgagctgaacagcgaatgaatagattggatcagtgctattgtgaaaggacttgcaccatgaagggaaccacctaccgagaatttgagtcctggatagacggctgtaagaactgcacatgcctgaatggaaccatccagtgtgaaactctaatctgcccaaatcctgactgcccacttaagtcggctcttgcgtatgtggatggcaaatgctgtaaggaatgcaaatgtgagcataacttttatgatgaatactttctttggaaaaataaagcacgatcggccggaacaaacaacataaccataaatcaattcatagactaatttgtcaaccca

SEQ ID NO: 450190 - DNA, 3618 bp, Homo sapiens
cccgggaggagcagtctctccgcgcgtctcccggagctttctccattgtctctgcctttacaacaggttcgggcggcggggaagacgggggggtgcggggccgccccagcccgggctttcttggggccgccccccttctaccgggtgtgcgagtctttggctgcttttattcggctcgggagctaattccccgacggagccgcgccggggcgagtccgacccctccctccgggccccctccgggccgcgctgccgcctcggccctgcgtgtgggaatgatgtgcgcattggagggtctaagttcttcacgcgcctggggaggcctcccttttctttcttaggcaaccaaagcgtattaatcctactgatcagtaaatccgaggcagcagcaggagagacaaacgttattttcccgcttgattccaagaacctcttcgatttttatttttatttttaaagagggagacgatggactgagctgatccgcaccatggagtctcgggtcttactgagaacattctgtttgatcttcggtctcggagcagtttgggggcttggtgtggacccttccctacagattgacgtcttaacagagttagaacttggggagtccacgaccggagtgcgtcaggtcccggggctgcataatgggacgaaagcctttctctttcaagatactcccagaagcataaaagcatccactgctacagctgaacagttttttcagaagctgagaaataaacatgaatttactattttggtgaccctaaaacagacccacttaaattcaggagttattctctcaattcaccacttggatcacaggtacctggaactggaaagtagtggccatcggaatgaagtcagactgcattaccgctcaggcagtcaccgccctcacacagaagtgtttccttacattttggctgatgacaagtggcacaagctctccttagccatcagtgcttcccatttgattttacacattgactgcaataaaatttatgaaagggtagtagaaaagccctccacagacttgcctctaggcacaacattttggctaggacagagaaataatgcgcatggatattttaagggtataatgcaagatgtccaattacttgtcatgccccagggatttattgctcagtgcccagatcttaatcgcacctgtccaacttgcaatgacttccatggacttgtgcagaaaatcatggagctacaggatattttagccaaaacatcagccaagctgtctcgagctgaacagcgaatgaatagattggatcagtgctattgtgaaaggacttgcaccatgaagggaaccacctaccgagaatttgagtcctggatagacggctgtaagaactgcacatgcctgaatggaaccatccagtgtgaaactctaatctgcccaaatcctgactgcccacttaagtcggctcttgcgtatgtggatggcaaatgctgtaaggaatgcaaatcgatatgccaatttcaaggacgaacctactttgaaggagaaagaaatacagtctattcctcttctggagtatgtgttctctatgagtgcaaggaccagaccatgaaacttgttgagagttcaggctgtccagctttggattgtccagagtctcatcagataaccttgtctcacagctgttgcaaagtttgtaaaggttatgacttttgttctgaaaggcataactgcatggagaattccatctgcagaaatctgaatgacagggctgtttgtagctgtcgagatggttttagggctcttcgagaggataatgcctactgtgaagacatcgatgagtgtgctgaagggcgccattactgtcgtgaaaatacaatgtgtgtcaacaccccgggttcttttatgtgcatctgcaaaactggatacatcagaattgatgattattcatgtacagaacatgatgagtgtatcacaaatcagcacaactgtgatgaaaatgctttatgcttcaacactgttggaggacacaactgtgtttgcaagccgggctatacagggaatggaacgacatgcaaagcattttgcaaagatggctgtaggaatggaggagcctgtattgccgctaatgtgtgtgcctgcccacaaggcttcactggacccagctgtgaaacggacattgatgaatgctctgatggttttgttcaatgtgacagtcgtgctaattgcattaacctgcctggatggtaccactgtgagtgcagagatggctaccatgacaatgggatgttttcaccaagtggagaatcgtgtgaagatattgatgagtgtgggaccgggaggcacagctgtgccaatgataccatttgcttcaatttggatggcggatatgattgtcgatgtcctcatggaaagaattgcacaggggactgcatccatgatggaaaagttaagcacaatggtcagatttgggtgttggaaaatgacaggtgctctgtgtgctcatgtcagaatggattcgttatgtgtcgacggatggtctgtgactgtgagaatcccacagttgatcttttttgctgccctgaatgtgacccaaggcttagtagtcagtgcctccatcaaaatggggaaactttgtataacagtggtgacacctgggtccagaattgtcaacagtgccgctgcttgcaaggggaagttgattgttggcccctgccttgcccagatgtggagtgtgaattcagcattctcccagagaatgagtgctgcccgcgctgtgtcacagacccttgccaggctgacaccatccgcaatgacatcaccaagacttgcctggacgaaatgaatgtggttcgcttcaccgggtcctcttggatcaaacatggcactgagtgtactctctgccagtgcaagaatggccacatctgttgctcagtggatccacagtgccttcaggaactgtgaagttaactgtctcatgggagatttctgttaaaagaatgttctttcattaaaagaccaaaaagaagttaaaacttaaattgggtgatttgtgggcagctaaatgcagctttgttaatagctgagtgaactttcaattatgaaatttgtggagcttgacaaaatcacaaaaggaaaattactggggcaaaattagacctcaagtctgcctctactgtgtctcacatcaccatgtagaagaatgggcgtacagtatataccgtgacatcctgaaccctggatagaaagcctgagcccattggatctgtgaaagcctctagcttcactggtgcagaaaattttcctctagatcagaatcttcaagaatcagttaggttcctcactgcaagaaataaaatgtcaggcagtgaatgaattatattttcagaagtaaagcaaagaagctataacatgttatgtacagtacactctgaaaagaaatctgaaacaagttattgtaatgataaaaataatgcacaggcatggttacttaatattttctaacaggaaaagtcatccctatttccttgttttactgcacttaatattatttggttgaatttgttcagtataagctcgttcttgtgcaaaattaaataaatatttctcttaccttataaaaaaaaagtctgagtatcttg

SEQ ID NO: 450191 - DNA, 1535 bp, Homo sapiens
tgatatagctgttctagaggatccctcacgccatgtccacaaggcttcactggacccagctgtgaaacggacattgatgaatgctctgatggttttgttcaatgtgacagtcgtgctaattgcattaacctgcctggatggtaccactgtgagtgcagagatggctaccatgacaatgggatgttttcaccaagtggagaatcgtgtgaagatattgatgagtgtgggaccgggaggcacagctgtgccaatgataccatttgcttcaatttggatggcggatatgattgtcgatgtcctcatggaaagaattgcacaggggactgcatccatgatggaaaagttaagcacaatggtcagatttgggtgttggaaaatgacaggtgctctgtgtgctcatgtcagaatggattcgttatgtgtcgacggatggtctgtgactgtgagaatcccacagttgatcttttttgctgccctgaatgtgacccaaggcttagtagtcagtgcctccatcaaaatggggaaactttgtataacagtggtgacacctgggtccagaattgtcaacagtgccgctgcttgcaaggggaagttgattgttggcccctgccttgcccagatgtggagtgtgaattcagcattctcccagagaatgagtgctgcccgcgctgtgtcacagacccttgccaggctgacaccatccgcaatgacatcaccaagacttgcctggacgaaatgaatgtggttcgcttcaccgggtcctcttggatcaaacatggcactgagtgtactctctgccagtgcaagaatggccacatctgttgctcagtggatccacagtgccttcaggaactgtgaagttaactgtctcatgggagatttctgttaaaagaatgttctttcattaaaagaccaaaaagaagttaaaacttaaattgggtgatttgtgggcagctaaatgcagctttgttaatagctgagtgaactttcaattatgaaatttgtggagcttgacaaaatcacaaaaggaaaattactggggcaaaattagacctcaagtctgcctctactgtgtctcacatcaccatgtagaagaatgggcgtacagtatataccgtgacatcctgaaccctggatagaaagcctgagcccattggatctgtgaaagcctctagcttcactggtgcagaaaattttcctctagatcagaatcttcaagaatcagttaggttcctcactgcaagaaataaaatgtcaggcagtgaatgaattatattttcagaagtaaagcaaagaagctataacatgttatgtacagtacactctgaaaagaaatctgaaacaagttattgtaatgataaaaataatgcacaggcatggttacttaatattttctaacaggaaaagtcatccctatttccttgttttactgcacttaatattatttggttgaatttgttcagtataagctcgttcttgtgcaaaattaaataaatatttctcttaccttataaaaaaaaagtctgagtatcttg

SEQ ID NO: 450192 - DNA, 1805 bp, Homo sapiens
cccgggaggagcagtctctccgcgcgtctcccggagctttctccattgtctctgcctttacaacaggttcgggcggcggggaagacgggggggtgcggggccgccccagcccgggctttcttggggccgccccccttctaccgggtgtgcgagtctttggctgcttttattcggctcgggagctaattccccgacggagccgcgccggggcgagtccgacccctccctccgggccccctccgggccgcgctgccgcctcggccctgcgtgtgggaatgatgtgcgcattggagggtctaagttcttcacgcgcctggggaggcctcccttttctttcttaggcaaccaaagcgtattaatcctactgatcagtaaatccgaggcagcagcaggagagacaaacgttattttcccgcttgattccaagaacctcttcgatttttatttttatttttaaagagggagacgatggactgagctgatccgcaccatggagtctcgggtcttactgagaacattctgtttgatcttcggtctcggagcagtttgggggcttggtgtggacccttccctacagattgacgtcttaacagagttagaacttggggagtccacgaccggagtgcgtcaggtcccggggctgcataatgggacgaaagcctttctctttcaagatactcccagaagcataaaagcatccactgctacagctgaacagttttttcagaagctgagaaataaacatgaatttactattttggtgaccctaaaacagacccacttaaattcaggagttattctctcaattcaccacttggatcacaggtacctggaactggaaagtagtggccatcggaatgaagtcagactgcattaccgctcaggcagtcaccgccctcacacagaagtgtttccttacattttggctgatgacaagtggcacaagctctccttagccatcagtgcttcccatttgattttacacattgactgcaataaaatttatgaaagggtagtagaaaagccctccacagacttgcctctaggcacaacattttggctaggacagagaaataatgcgcatggatattttaagggtataatgcaagatgtccaattacttgtcatgccccagggatttattgctcagtgcccagatcttaatcgcacctgtccaacttgcaatgacttccatggacttgtgcagaaaatcatggagctacaggatattttagccaaaacatcagccaagctgtctcgagctgaacagcgaatgaatagattggatcagtgctattgtgaaaggacttgcaccatgaagggaaccacctaccgagaatttgagtcctggatagacggctgtaagaactgcacatgcctgaatggaaccatccagtgtgaaactctaatctgcccaaatcctgactgcccacttaagtcggctcttgcgtatgtggatggcaaatgctgtaaggaatgcaaatgtgagcataacttttatgatgaatactttctttggaaaaataaagcactgtattaataagtattcacccatcattggtttaatctgggcaagctaaatagctttcagaagtgatggaataaaggaagaatactttctctgttttggttgattagttcttttccattttaaaatgctatgcccctattccagtaggacaattttttcttggagtaatctattccatatagtgatagtagtaggaaacatgtgtaagaaacttactggaagttatttcactaattgtactatttattgtaagtgtctcccaaataggttaaga

SEQ ID NO: 450193 - DNA, 1352 bp, Homo sapiens
cccgggaggagcagtctctccgcgcgtctcccggagctttctccattgtctctgcctttacaacaggttcgggcggcggggaagacgggggggtgcggggccgccccagcccgggctttcttggggccgccccccttctaccgggtgtgcgagtctttggctgcttttattcggctcgggagctaattccccgacggagccgcgccggggcgagtccgacccctccctccgggccccctccgggccgcgctgccgcctcggccctgcgtgtgggaatgatgtgcgcattggagggtctaagttcttcacgcgcctggggaggcctcccttttctttcttaggcaaccaaagcgtattaatcctactgatcagtaaatccgaggcagcagcaggagagacaaacgttattttcccgcttgattccaagaacctcttcgatttttatttttatttttaaagagggagacgatggactgagctgatccgcaccatggagtctcgggtcttactgagaacattctgtttgatcttcggtctcggagcagtttgggggcttggtgtggacccttccctacagattgacgtcttaacagagttagaacttggggagtccacgaccggagtgcgtcaggtcccggggctgcataatgggacgaaagcctttctctttcaagatactcccagaagcataaaagcatccactgctacagctgaacagttttttcagaagctgagaaataaacatgaatttactattttggtgaccctaaaacagacccacttaaattcaggagttattctctcaattcaccacttggatcacaggtacctggaactggaaagtagtggccatcggaatgaagtcagactgcattaccgctcaggcagtcaccgccctcacacagaagtgtttccttacattttggctgatgacaagtggcacaagctctccttagccatcagtgcttcccatttgattttacacattgactgcaataaaatttatgaaagggtagtagaaaagccctccacagacttgcctctaggcacaacattttggctaggacagagaaataatgcgcatggatattttaagggtataatgcaagatgtccaattacttgtcatgccccagggatttattgctcagtgcccagatcttaatcgcaccagtagcaactagcaatgacttaccatgaactagtgcagaaaatcacaatgggaagcactgatggctaaaggagagcttgtgccacttgtcatcacccaaaatgtaaggaaacacttctgtgtgaggacggtgactgcctgagacgtaatgcagtctgacttcattccgtactccacatcca

SEQ ID NO: 450194 - DNA, 900 bp, Homo sapiens
cccgggaggagcagtctctccgcgcgtctcccggagctttctccattgtctctgcctttacaacaggttcgggcggcggggaagacgggggggtgcggggccgccccagcccgggctttcttggggccgccccccttctaccgggtgtgcgagtctttggctgcttttattcggctcgggagctaattccccgacggagccgcgccggggcgagtccgacccctccctccgggccccctccgggccgcgctgccgcctcggccctgcgtgtgggaatgatgtgcgcattggagggtctaagttcttcacgcgcctggggaggcctcccttttctttcttaggcaaccaaagcgtattaatcctactgatcagtaaatccgaggcagcagcaggagagacaaacgttattttcccgcttgattccaagaacctcttcgatttttatttttatttttaaagagggagacgatggactgagctgatccgcaccatggagtctcgggtcttactgagaacattctgtttgatcttcggtctcggagcagtttgggggcttggtgtggacccttccctacagattgacgtcttaacagagttagaacttggggagtccacgaccggagtgcgtcaggtcccggggctgcataatgggacgaaagcctttctctttcaaggtatgcccggcgtgctgcatccccactgtgatttcagttccgataaccccggcaggagttgctcttgccgcttgtcctaactttgtattgcctcatggatgacagtactttagctgaggtgtagaagggccagtgtgagacacatatccctatctcttttaagtggttttttctcccctgcctcacccttctccttcgtactttgtactcttgccagttctaatgg

SEQ ID NO: 450195 - DNA, 1207 bp, Homo sapiens
cgggggcggcaccgagaagctgaaacggaagtggcgtacggcatgcgccggtggcgtgatggagcggcagcagcagcagcaacagcaactgcgaaacctgcgtgacttcctgttggtctacaatcggatgacagaactctgcttccagcgctgtgtgcccagcttgcaccaccgagctctggacgctgaggaggaggcctgtctgcacagctgtgctgggaagctgatccattccaaccaccgcctcatggccgcttacgtgcagctcatgcctgccctggtacagcgccgcatcgcagactacgaggctgcctcggctgtgccaggcgttgctgctgaacagcctggggtctctccatcaggcagctagccatacccaaccccaggaaggaaggccttggatggaccctcagattgaaggacccggtggaccttggggttggtgaatcctaaacagagagaattcgaggttgcctgaaagctgggtgtccttgctccttttcctggagccaatatacccagtttttactcagtttgatttatattctgggcaaggaagctttgcctactttattggcacaatccgttgttctgtcgtttagtgcatatctgctggcttcagccctggcagctgagaaattgttttctatatgtagaaggaaaacctgagcatttgcaggcatctggttaaagcagggtctgtgtgtacaattttaaaacgggtaatatgtcatgctcttagttcatcttcacaacaaaactatgagtaagcggtattagcctcacttaacagatgaggaagcaagattccagaaagtaccagaaggtcattttatacaacaggagattggttcctgcccagatgacagaaaatgggagctctgtctagttgtccttaagtctgactgacttcagtggctcataaccgtgagccaagtatttgttggttcataactgttgttttgtgaactatgtcttacatgtctagagttctgctggatctagggaaaggaggagctatcgaagtacaacggatcaaaaaaccacagggcttttgggcactgcctccttgggaagttagtggccacagaagagagatgaaacctgtaagaagtctggagtcttttggaacttcagccatttccccaggttgttactttcttagtatgtacagtcttctcaggatgagcagtaaaacctttgaaca

SEQ ID NO: 450196 - DNA, 575 bp, Homo sapiens
agaaggatgtggaaagggtgggtggagtttaaagctggcccttcctccttcagtggaagttcagcaaaatgacaaaccagataggtggctaaatttccttctcttgatgggaggcctgtctgcacagctgtgctgggaagctgatccattccaaccaccgcctcatggccgcttacgtgcagctcatgcctgccctggtacagcgccgcatcgcagactacgaggctgcctcggctgtgccaggcgttgctgctgaacagcctggggtctctccatcaggcagctagccatacccaaccccaggaaggaaggccttggatggaccctcagattgaaggacccggtggaccttggggagttctgctggatctagggaaaggaggagctatcgaagtacaacggatcaaaaaaccacagggcttttgggcactgcctccttgggaagttagtggccacagaagagagatgaaacctgtaagaagtctggagtcttttggaacttcagccatttccccaggttgttactttcttagtatgtacagtcttctcaggatgagcagtaaaacctttgaaca

SEQ ID NO: 450197 - DNA, 562 bp, Homo sapiens
cgggggcggcaccgagaagctgaaacggaagtggcgtacggcatgcgccggtggcgtgatggagcggcagcagcagcagcaacagcaactgcgaaacgaggcctgtctgcacagctgtgctgggaagctgatccattccaaccaccgcctcatggccgcttacgtgcagctcatgcctgccctggtacagcgccgcatcgcagactacgaggctgcctcggctgtgccaggcgttgctgctgaacagcctggggtctctccatcaggcagctagccatacccaaccccaggaaggaaggccttggatggaccctcagattgaaggacccggtggaccttggggagttctgctggatctagggaaaggaggagctatcgaagtacaacggatcaaaaaaccacagggcttttgggcactgcctccttgggaagttagtggccacagaagagagatgaaacctgtaagaagtctggagtcttttggaacttcagccatttccccaggttgttactttcttagtatgtacagtcttctcaggatgagcagtaaaacctttgaaca

SEQ ID NO: 450198 - DNA, 2837 bp, Homo sapiens
cgggggcggcaccgagaagctgaaacggaagtggcgtacggcatgcgccggtggcgtgatggagcggcagcagcagcagcaacagcaactgcgaaacctgcgtgacttcctgttggtctacaatcggatgacagaactctgcttccagcgctgtgtgcccagcttgcaccaccgagctctggacgctgaggaggaggcctgtctgcacagctgtgctgggaagctgatccattccaaccaccgcctcatggccgcttacgtgcagctcatgcctgccctggtacagcgccgcatcgcagactacgaggctgcctcggctgtgccaggcgttgctgctgaacagcctggggtctctccatcaggcagctagccatacccaaccccaggaaggaaggccttggatggaccctcagattgaaggacccggtggaccttggggttggtgaatcctaaacagagagaattcgaggttgcctgaaagctgggtgtccttgctccttttcctggagccaatatacccagtttttactcagtttgatttatattctgggcaaggaagctttgcctactttattggcacaatccgttgttctgtcgtttagtgcatatctgctggcttcagccctggcagctgagaaattgttttctatatgtagaaggaaaacctgagcatttgcaggcatctggttaaagcagggtctgtgtgtacaattttaaaacgggtaatatgtcatgctcttagttcatcttcacaacaaaactatgagtaagcggtattagcctcacttaacagatgaggaagcaagattccagaaagtaccagaaggtcattttatacaacaggagattggttcctgcccagatgacagaaaatgggagctctgtctagttgtccttaagtctgactgacttcagtggctcataaccgtgagccaagtatttgttggttcataactgttgttttgtgaactatgtcttacatgtctagagttctgctggatctagggaaaggaggagctatcgaagtacaacggatcaaaaaaccacagggcttttgggcactgcctccttgggaagttagtggccacagaagagagatgaaacctgtaagaagtctggagtcttttggaacttcagccatttccccaggttgttactttcttagtatgtacagtcttctcaggatgagcagtaaaacctttgaacaaaggtctgtgtggttgtcttcacgggcaatcaggaagggagagagctggggaccatattctgcaatgcagccaaatccgaggaagagaaactgaagggagaagtagatggcaatggttatgataaaaagggataaaactaaatcttcgggacttctttaatgctacgttaatgtttcactgctcgtctagaaactcctaaatccagctttctatcatctgccccacattggtcccattgagtacattctgtgatttctaattccagcctctccattcttttctcattattgcctcccccgccccccaactttgtgtaatttacttctgtattcagcagcctggatagcatatcattccatcaccccattttcttgccaccattggccatctttttgtatcattccacttattctgtcttttccattccttcattcaaactgctagagaaaaacagttgtgtaatgaatgccactaaatattcaaggcctccaacctcagccaagtcctcacaccaacacgcagtcacaccaacacacacctttatgggttcctggtccatttccttctctaattaccatggcagttattttacacctctactgctgtccttaatcccataccccaccctcatcaggtgaccctgtttccttttttagagaaattgaagctcttagacattggtttccacagtaataattttaaaacttcttacaactacctacaaagcagatgttctatcctatctacagagcagaaaattgaaattctcaagtagcagacccggtattaaagtgcagatctgactttaaagtccatgttcattttacacagcaggctgcctcttaagatagtatttattgagcacacactttgtgtaggttctgattttggtagatgtcatgctttatattaatctttacaacaactataagtaagaggtattaacctcacttaacagatgaggaagcaagaatccagaatgtgccagaaggcacattctgcagatttcgtgcaaacatttatacacagcttcttttttttttttttgagacagagtctcgctctgtcacccaggctggagtgcagtggagcgatctaggctcactgcaacctccgccacccgggttcaagcagttctcctgcctcagcctctcgagtagctgggattacaggcatgcgccaccacgcccagctaattttgtttttgtattttaagtagagacggggtttcactatattggtcaggctggtcttgaactcctgaccttgtgatccgcccgcctcggcctccaaaagtgctgggattacaggtgtgagccaccacggccggcctatacaaagtttcttattgagaaaagtggttccaatcatgttttttgccccctttagctgctatctcttgaacagaaaagtttgttaggaaggtaaaagttgctgactaggaccttacccacagggtggcactctgtccttgggaaatataaatgcaagtaaaacaggtttgaacttcttaacttccagaagataggaggatgggacctgtgatactgtgctgctggtgggaggacccttccacatcaacatttgtgtgtatccttgcaataaacttccattgtgaattaaaaaagc

SEQ ID NO: 450199 - DNA, 2754 bp, Homo sapiens
agaaggatgtggaaagggtgggtggagtttaaagctggcccttcctccttcagtggaagttcagcaaaatgacaaaccagataggtggctaaatttccttctcttgatgggaggcctgtctgcacagctgtgctgggaagctgatccattccaaccaccgcctcatggccgcttacgtgcagctcatgcctgccctggtacagcgccgcatcgcagactacgaggctgcctcggctgtgccaggcgttgctgctgaacagcctggggtctctccatcaggcagctagccatacccaaccccaggaaggaaggccttggatggaccctcagattgaaggacccggtggaccttggggttggtgaatcctaaacagagagaattcgaggttgcctgaaagctgggtgtccttgctccttttcctggagccaatatacccagtttttactcagtttgatttatattctgggcaaggaagctttgcctactttattggcacaatccgttgttctgtcgtttagtgcatatctgctggcttcagccctggcagctgagaaattgttttctatatgtagaaggaaaacctgagcatttgcaggcatctggttaaagcagggtctgtgtgtacaattttaaaacgggtaatatgtcatgctcttagttcatcttcacaacaaaactatgagtaagcggtattagcctcacttaacagatgaggaagcaagattccagaaagtaccagaaggtcattttatacaacaggagattggttcctgcccagatgacagaaaatgggagctctgtctagttgtccttaagtctgactgacttcagtggctcataaccgtgagccaagtatttgttggttcataactgttgttttgtgaactatgtcttacatgtctagagttctgctggatctagggaaaggaggagctatcgaagtacaacggatcaaaaaaccacagggcttttgggcactgcctccttgggaagttagtggccacagaagagagatgaaacctgtaagaagtctggagtcttttggaacttcagccatttccccaggttgttactttcttagtatgtacagtcttctcaggatgagcagtaaaacctttgaacaaaggtctgtgtggttgtcttcacgggcaatcaggaagggagagagctggggaccatattctgcaatgcagccaaatccgaggaagagaaactgaagggagaagtagatggcaatggttatgataaaaagggataaaactaaatcttcgggacttctttaatgctacgttaatgtttcactgctcgtctagaaactcctaaatccagctttctatcatctgccccacattggtcccattgagtacattctgtgatttctaattccagcctctccattcttttctcattattgcctcccccgccccccaactttgtgtaatttacttctgtattcagcagcctggatagcatatcattccatcaccccattttcttgccaccattggccatctttttgtatcattccacttattctgtcttttccattccttcattcaaactgctagagaaaaacagttgtgtaatgaatgccactaaatattcaaggcctccaacctcagccaagtcctcacaccaacacgcagtcacaccaacacacacctttatgggttcctggtccatttccttctctaattaccatggcagttattttacacctctactgctgtccttaatcccataccccaccctcatcaggtgaccctgtttccttttttagagaaattgaagctcttagacattggtttccacagtaataattttaaaacttcttacaactacctacaaagcagatgttctatcctatctacagagcagaaaattgaaattctcaagtagcagacccggtattaaagtgcagatctgactttaaagtccatgttcattttacacagcaggctgcctcttaagatagtatttattgagcacacactttgtgtaggttctgattttggtagatgtcatgctttatattaatctttacaacaactataagtaagaggtattaacctcacttaacagatgaggaagcaagaatccagaatgtgccagaaggcacattctgcagatttcgtgcaaacatttatacacagcttcttttttttttttttgagacagagtctcgctctgtcacccaggctggagtgcagtggagcgatctaggctcactgcaacctccgccacccgggttcaagcagttctcctgcctcagcctctcgagtagctgggattacaggcatgcgccaccacgcccagctaattttgtttttgtattttaagtagagacggggtttcactatattggtcaggctggtcttgaactcctgaccttgtgatccgcccgcctcggcctccaaaagtgctgggattacaggtgtgagccaccacggccggcctatacaaagtttcttattgagaaaagtggttccaatcatgttttttgccccctttagctgctatctcttgaacagaaaagtttgttaggaaggtaaaagttgctgactaggaccttacccacagggtggcactctgtccttgggaaatataaatgcaagtaaaacaggtttgaacttcttaacttccagaagataggaggatgggacctgtgatactgtgctgctggtgggaggacccttccacatcaacatttgtgtgtatccttgcaataaacttccattgtgaattaaaaaagc

SEQ ID NO: 450200 - DNA, 1691 bp, Homo sapiens
ctacttagtttgttcagtcgtctcgatggatcagccatacaacttttgatctaaggacattctggctttattgcactgacactcacgaatggtcacagtcgttccgaccatactatctgctttgcagtctatactccgactgaccagatgtctgaagggagaagtagatggcaatggttatgataaaaagggataaaactaaatcttcgggacttctttaatgctacgttaatgtttcactgctcgtctagaaactcctaaatccagctttctatcatctgccccacattggtcccattgagtacattctgtgatttctaattccagcctctccattcttttctcattattgcctcccccgccccccaactttgtgtaatttacttctgtattcagcagcctggatagcatatcattccatcaccccattttcttgccaccattggccatctttttgtatcattccacttattctgtcttttccattccttcattcaaactgctagagaaaaacagttgtgtaatgaatgccactaaatattcaaggcctccaacctcagccaagtcctcacaccaacacgcagtcacaccaacacacacctttatgggttcctggtccatttccttctctaattaccatggcagttattttacacctctactgctgtccttaatcccataccccaccctcatcaggtgaccctgtttccttttttagagaaattgaagctcttagacattggtttccacagtaataattttaaaacttcttacaactacctacaaagcagatgttctatcctatctacagagcagaaaattgaaattctcaagtagcagacccggtattaaagtgcagatctgactttaaagtccatgttcattttacacagcaggctgcctcttaagatagtatttattgagcacacactttgtgtaggttctgattttggtagatgtcatgctttatattaatctttacaacaactataagtaagaggtattaacctcacttaacagatgaggaagcaagaatccagaatgtgccagaaggcacattctgcagatttcgtgcaaacatttatacacagcttcttttttttttttttgagacagagtctcgctctgtcacccaggctggagtgcagtggagcgatctaggctcactgcaacctccgccacccgggttcaagcagttctcctgcctcagcctctcgagtagctgggattacaggcatgcgccaccacgcccagctaattttgtttttgtattttaagtagagacggggtttcactatattggtcaggctggtcttgaactcctgaccttgtgatccgcccgcctcggcctccaaaagtgctgggattacaggtgtgagccaccacggccggcctatacaaagtttcttattgagaaaagtggttccaatcatgttttttgccccctttagctgctatctcttgaacagaaaagtttgttaggaaggtaaaagttgctgactaggaccttacccacagggtggcactctgtccttgggaaatataaatgcaagtaaaacaggtttgaacttcttaacttccagaagataggaggatgggacctgtgatactgtgctgctggtgggaggacccttccacatcaacatttgtgtgtatccttgcaataaacttccattgtgaattaaaaaagc

SEQ ID NO: 450201 - DNA, 730 bp, Homo sapiens
cgggggcggcaccgagaagctgaaacggaagtggcgtacggcatgcgccggtggcgtgatggagcggcagcagcagcagcaacagcaactgcgaaacctgcgtgacttcctgttggtctacaatcggatgacagaactctgcttccagcgctgtgtgcccagcttgcaccaccgagctctggacgctgaggaggaggcctgtctgcacagctgtgctgggaagctgatccattccaaccaccgcctcatggccgcttacgtgcagctcatgcctgccctggtacagcgccgcatcgcagactacgaggctgcctcggctgtgccaggcgttgctgctgaacagcctggggtctctccatcaggcagctagccatacccaaccccaggaaggaaggccttggatggaccctcagattgaaggacccggtggaccttggggttggtgaatcctaaacagagagaattcgaggttgcctgaaagctgggtgtccttgctccttttcctggagccaatatacccagtttttactcagtttgatttatattctgggcaacggatcaaaaaaccacagggcttttgggcactgcctccttgggaagttagtggccacagaagagagatgaaacctgtaagaagtctggagtcttttggaacttcagccatttccccaggttgttactttcttagtatgtacagtcttctcaggatgagcagtaaaacctttgaaca

SEQ ID NO: 450202 - DNA, 454 bp, Homo sapiens
gagattgtttctgtttcacatatcttgaaaaacaccgactgaaaaaaatagtgtctaaactcctttgtatgacaccaagactctcctgaccttgtgatccgcccgcctcggcctccaaaagtgctgggattacaggtgtgagccaccacggccggcctatacaaagtttcttattgagaaaagtggttccaatcatgttttttgccccctttagctgctatctcttgaacagaaaagtttgttaggaaggtaaaagttgctgactaggaccttacccacagggtggcactctgtccttgggaaatataaatgcaagtaaaacaggtttgaacttcttaacttccagaagataggaggatgggacctgtgatactgtgctgctggtgggaggacccttccacatcaacatttgtgtgtatccttgcaataaacttccattgtgaattaaaaaagc

SEQ ID NO: 450203 - DNA, 588 bp, Homo sapiens
cagcagcagcaacagcaactgcgaaacctgcgtgacttcctgttggtctacaatcggatgacagaactctgcttccagcgctgtgtgcccagcttgcaccaccgagctctggacgctgaggaggaggcctgtctgcacagctgtgctgggaagctgatccattccaaccaccgcctcatggccgcttacgtgcagctcatgcctgccctggtacagcgccgcatcgcagactacgaggctgcctcggctgtgccaggcgttgctgctgaacagcctggggtctctccatcaggcagctagccatacccaaccccaggaaggaaggccttggatggaccctcagattgaaggacccggtggaccttggggagttctgctggatctagggaaaggaggagctatcgaagtacaacggatcaaaaaaccacagggcttttgggcactgcctccttgggaagttagtggccacagaagagagatgaaacctgtaagaagtctggagtcttttggaacttcagccatttccccaggttgttactttcttagtatgtacagtcttctcaggatgagcagtaaaacctttgaaca

SEQ ID NO: 450204 - DNA, 1145 bp, Homo sapiens
cgggggcggcaccgagaagctgaaacggaagtggcgtacggcatgcgccggtggcgtgatggagcggcagcagcagcagcaacagcaactgcgaaacctgcgtgacttcctgttggtctacaatcggatgacagaactctgcttccagcgctgtgtgcccagcttgcaccaccgagctctggacgctgaggaggaggcctgtctgcacagctgtgctgggaagctgatccattccaaccaccgcctcatggccgcttacgtgcagctcatgcctgccctggtacagcgccgcatcgcagactacgaggctgcctcggctgtgccaggcgttgctgctgaacagcctggggtctctccatcaggcagctagccatacccaaccccaggaaggaaggccttggatggaccctcagattgaaggacccggtggaccttggggtcctggagccaatatacccagtttttactcagtttgatttatattctgggcaaggaagctttgcctactttattggcacaatccgttgttctgtcgtttagtgcatatctgctggcttcagccctggcagctgagaaattgttttctatatgtagaaggaaaacctgagcatttgcaggcatctggttaaagcagggtctgtgtgtacaattttaaaacgggtaatatgtcatgctcttagttcatcttcacaacaaaactatgagtaagcggtattagcctcacttaacagatgaggaagcaagattccagaaagtaccagaaggtcattttatacaacaggagattggttcctgcccagatgacagaaaatgggagctctgtctagttgtccttaagtctgactgacttcagtggctcataaccgtgagccaagtatttgttggttcataactgttgttttgtgaactatgtcttacatgtctagagttctgctggatctagggaaaggaggagctatcgaagtacaacggatcaaaaaaccacagggcttttgggcactgcctccttgggaagttagtggccacagaagagagatgaaacctgtaagaagtctggagtcttttggaacttcagccatttccccaggttgttactttcttagtatgtacagtcttctcaggatgagcagtaaaacctttgaaca

SEQ ID NO: 450205 - DNA, 658 bp, Homo sapiens
cgggggcggcaccgagaagctgaaacggaagtggcgtacggcatgcgccggtggcgtgatggagcggcagcagcagcagcaacagcaactgcgaaacctgcgtgacttcctgttggtctacaatcggatgacagaactctgcttccagcgctgtgtgcccagcttgcaccaccgagctctggacgctgaggaggaggcctgtctgcacagctgtgctgggaagctgatccattccaaccaccgcctcatggccgcttacgtgcagctcatgcctgccctggtacagcgccgcatcgcagactacgaggctgcctcggctgtgccaggcgttgctgctgaacagcctggggtctctccatcaggcagctagccatacccaaccccaggaaggaaggccttggatggaccctcagattgaaggacccggtggaccttggggagttctgctggatctagggaaaggaggagctatcgaagtacaacggatcaaaaaaccacagggcttttgggcactgcctccttgggaagttagtggccacagaagagagatgaaacctgtaagaagtctggagtcttttggaacttcagccatttccccaggttgttactttcttagtatgtacagtcttctcaggatgagcagtaaaacctttgaaca

SEQ ID NO: 450206 - DNA, 1923 bp, Homo sapiens
aacgcccttgtcgcgagacattatacgcgaggcgtgaactcattggtcaacccaaatgacaactcgccaactgattggctactctcacttcacctttgctccgcccctttccctggcactctcttccgcctccttcctgcctccctgtcgcgtgcgcgtgaccaggagcctagcacctccctttcctctgcttccgccacttccgccctggagaacatttctcacccaggattggtagaaacctaagagcgcatgcgcactgagaggataccgctaaaaatcgccttcaaaattgcttaaaaggcaaactttaacaatgcgatctaagagtcgtagtgactggccaaaaaaaaccgcaattttggggtctaattcgattgtgacgcagttgaaattagcttctcccccatgccttccctttcacgcttccgtcctgacgcaaacgtggggccgccttccgcactgcgggcttgtccttggccctgccctactcagtttcctgaagcatgcgcagttgcctttccgtcaattcctgtcctgggcgtacgtcaagatggcggcgtctgtattaaacaccgtgctgaggcggcttcctatgctatctctcttccgaggttctcacagagttcaggttcccctccagactctttgcaccaaagctccctctgaggaagattctttgtcctcagttcccatttctccttataaggatgagccctggaaatatctggaatcagaagaataccaggagcgatatggttctcgccccgtctgggctgactaccgccgcaaccacaagggtggtgtacccccacagcggactcggaagacatgtattcgtcggaataaagttgttgggaatccctgccccatctgtcgagatcacaagttgcatgttgactttaggaacgtgaagctcttggagcaatttgtctgcgcccacacgggtatcatcttctatgctccatacacaggagtctgtgtgaagcagcacaagcggttgacccaggccatccagaaagccagggatcatggtctcctcatttaccacatcccccaggttgaaccacgggaccttgacttcagtacctctcatggggctgtgagtgctactccgccagcccccaccctggtctcaggtgacccctggtacccatggtacaactggaaacagccaccggagagagaactgtctcgccttcgccggctttaccagggtcatctccaagaagagagtggccccccacctgagtcaatgcccaagatgccccctagaacaccagcggaagcctcctccactgggcagacaggccctcagagtgctctgtaggagctgtagactgggaagagaggccaggcgtggtggctcactcctgtaatcccagcactttgggaagccaaggtgggctgatcacttgatcccaggagtttgagaccagcctgggcaccatggtgaaacctcgtctttaccaaaaaatacaaaaattagctgggtgtggtggtgcacacctgtagtctcaactattggggaggctaaggtaggatcacttgatcccaggaggcggaggttgcagtgagttgcagtcacacccctgcactccagcctgggtgacagctagaccctgtctcaaaaaaaaaaaaaaagactgggaagagagctagagggactaggagataatgtgtatgtaggtttatgtgatgggatatcaccctgaagagttgtgtcttttgtggccagtgacaaatccaggaaatgaatgttgctgatagggataaatcttgaggctgagggcgggtggtacagatgtgtatgggaaaccccaacccctatatattgtaaatagatgggctgggctaaacattgttgccgtttcatacttctaccaactcagcttttacacaataaagctctactgtctctgg

SEQ ID NO: 450207 - DNA, 518 bp, Homo sapiens
atgaatgtgctgttatgccttaaatgtgtgcaccaggaaatgcaaactagaaagggtggctctgaagggtcctcaggtgaggaagacccccagggctgagaatccaccaccttcatccttcaaaagagtacctcagttgtctgcttacgcttcagccagcatgtgtgagcttggtcatttcctgcaagccaggcaaccacaccagtgtataagcctcaagcaaatgtcactcccaagccccaaatgggactaaggcctctgctgggctaggcgtggtgtaaatcccaggcctggaagctcctacccaaccctcatttgtttcaactcactttcaatatgtgcatagtttcataaagcagacatttccatgaggaaaagaggatggtggtgaaaggggagatgtgtatgggaaaccccaacccctatatattgtaaatagatgggctgggctaaacattgttgccgtttcatacttctaccaactcagcttttacacaataaagctctactgtctctgg

SEQ ID NO: 450208 - DNA, 1873 bp, Homo sapiens
aacgcccttgtcgcgagacattatacgcgaggcgtgaactcattggtcaacccaaatgacaactcgccaactgattggctactctcacttcacctttgctccgcccctttccctggcactctcttccgcctccttcctgcctccctgtcgcgtgcgcgtgaccaggagcctagcacctccctttcctctgcttccgccacttccgccctggagaacatttctcacccaggattggtagaaacctaagagcgcatgcgcactgagaggataccgctaaaaatcgccttcaaaattgcttaaaaggcaaactttaacaatgcgatctaagagtcgtagtgactggccaaaaaaaaccgcaattttggggtctaattcgattgtgacgcagttgaaattagcttctcccccatgccttccctttcacgcttccgtcctgacgcaaacgtggggccgccttccgcactgcgggcttgtccttggccctgccctactcagtttcctgaagcatgcgcagttgcctttccgtcaattcctgtcctgggcgtacgtcaagatggcggcgtctgtattaaacaccgtgctgaggcggcttcctatgctatctctcttccgaggttctcacagagttcaggttcccctccagactctttgcaccaaagctccctctgaggaagattctttgtcctcagttcccatttctccttataaggatgagccctggaaatatctggaatcagaagaataccaggagcgatatggttctcgccccgtctgggctgactaccgccgcaaccacaagggtggtgtacccccacagcggactcggaagacatgtattcgtcggaataaagttgttgggaatccctgccccatctgtcgagatcacaagttgcatgttgactttaggaacgtgaagctcttggagcaatttgtctgcgcccacacgggtatcatcttctatgctccatacacaggagtctgtgtgaagcagcacaagcggttgacccaggccatccagaaagccagggatcatggtctcctcatttaccacatcccccaggttgaaccacgggaccttgacttcagtacctctcatggggctgtgagtgctactccgccagcccccaccctggtctcaggtgacccctggtacccatggtacaactggaaacagccaccggagagagaactgtctcgccttcgccggctttaccagggtcatctccaagaagagagtggccccccacctgagtcaatgcccaagatgccccctagaacaccagcggaagcctcctccactgggcagacaggccctcagagtgctctgtaggagctgtagactgggaagagaggccaggcgtggtggctcactcctgtaatcccagcactttgggaagccaaggtgggctgatcacttgatcccaggagtttgagaccagcctgggcaccatggtgaaacctcgtctttaccaaaaaatacaaaaattagctgggtgtggtggtgcacacctgtagtctcaactattggggaggctaaggtaggatcacttgatcccaggaggcggaggttgcagtgagttgcagtcacacccctgcactccagcctgggtgacagctagaccctgtctcaaaaaaaaaaaaaaatgtgatgggatatcaccctgaagagttgtgtcttttgtggccagtgacaaatccaggaaatgaatgttgctgatagggataaatcttgaggctgagggcgggtggtacagatgtgtatgggaaaccccaacccctatatattgtaaatagatgggctgggctaaacattgttgccgtttcatacttctaccaactcagcttttacacaataaagctctactgtctctgg

SEQ ID NO: 450209 - DNA, 1856 bp, Homo sapiens
aacgcccttgtcgcgagacattatacgcgaggcgtgaactcattggtcaacccaaatgacaactcgccaactgattggctactctcacttcacctttgctccgcccctttccctggcactctcttccgcctccttcctgcctccctgtcgcgtgcgcgtgaccaggagcctagcacctccctttcctctgcttccgccacttccgccctggagaacatttctcacccaggattggtagaaacctaagagcgcatgcgcactgagaggataccgctaaaaatcgccttcaaaattgcttaaaaggcaaactttaacaatgcgatctaagagtcgtagtgactggccaaaaaaaaccgcaattttggggtctaattcgattgtgacgcagttgaaattagcttctcccccatgccttccctttcacgcttccgtcctgacgcaaacgtggggccgccttccgcactgcgggcttgtccttggccctgccctactcagtttcctgaagcatgcgcagttgcctttccgtcaattcctgtcctgggcgtacgtcaagatggcggcgtctgtattaaacaccgtgctgaggcggcttcctatgctatctctcttccgaggttctcacagagttcaggttcccctccagactctttgcaccaaagctccctctgaggaagattctttgtcctcagttcccatttctccttataaggatgagccctggaaatatctggaatcagaagaataccaggagcgatatggttctcgccccgtctgggctgactaccgccgcaaccacaagggtggtgtacccccacagcggactcggaagacatgtattcgtcggaataaagttgttgggaatccctgccccatctgtcgagatcacaagttgcatgttgactttagggagtctgtgtgaagcagcacaagcggttgacccaggccatccagaaagccagggatcatggtctcctcatttaccacatcccccaggttgaaccacgggaccttgacttcagtacctctcatggggctgtgagtgctactccgccagcccccaccctggtctcaggtgacccctggtacccatggtacaactggaaacagccaccggagagagaactgtctcgccttcgccggctttaccagggtcatctccaagaagagagtggccccccacctgagtcaatgcccaagatgccccctagaacaccagcggaagcctcctccactgggcagacaggccctcagagtgctctgtaggagctgtagactgggaagagaggccaggcgtggtggctcactcctgtaatcccagcactttgggaagccaaggtgggctgatcacttgatcccaggagtttgagaccagcctgggcaccatggtgaaacctcgtctttaccaaaaaatacaaaaattagctgggtgtggtggtgcacacctgtagtctcaactattggggaggctaaggtaggatcacttgatcccaggaggcggaggttgcagtgagttgcagtcacacccctgcactccagcctgggtgacagctagaccctgtctcaaaaaaaaaaaaaaagactgggaagagagctagagggactaggagataatgtgtatgtaggtttatgtgatgggatatcaccctgaagagttgtgtcttttgtggccagtgacaaatccaggaaatgaatgttgctgatagggataaatcttgaggctgagggcgggtggtacagatgtgtatgggaaaccccaacccctatatattgtaaatagatgggctgggctaaacattgttgccgtttcatacttctaccaactcagcttttacacaataaagctctactgtctctgg

SEQ ID NO: 450210 - DNA, 1041 bp, Homo sapiens
  misc_feature (143)..(143): n is a, c, g, or t
  misc_feature (146)..(146): n is a, c, g, or t
ttcctagatcatctgtcggtcatatgggtagagtatcccataatagtactagcatttgacctagttcgagggctaaatgtactccagttatcaaagtcatcatcgctgtgagagccaggtcttgcaggccatccagaaagccnggnatcatggtctcctcatttaccacatcccccaggttgaaccacgggaccttgacttcagtacctctcatggggctgtgagtgctactccgccagcccccaccctggtctcaggtgacccctggtacccatggtacaactggaaacagccaccggagagagaactgtctcgccttcgccggctttaccagggtcatctccaagaagagagtggccccccacctgagtcaatgcccaagatgccccctagaacaccagcggaagcctcctccactgggcagacaggccctcagagtgctctgtaggagctgtagactgggaagagaggccaggcgtggtggctcactcctgtaatcccagcactttgggaagccaaggtgggctgatcacttgatcccaggagtttgagaccagcctgggcaccatggtgaaacctcgtctttaccaaaaaatacaaaaattagctgggtgtggtggtgcacacctgtagtctcaactattggggaggctaaggtaggatcacttgatcccaggaggcggaggttgcagtgagttgcagtcacacccctgcactccagcctgggtgacagctagaccctgtctcaaaaaaaaaaaaaaagactgggaagagagctagagggactaggagataatgtgtatgtaggtttatgtgatgggatatcaccctgaagagttgtgtcttttgtggccagtgacaaatccaggaaatgaatgttgctgatagggataaatcttgaggctgagggcgggtggtacagatgtgtatgggaaaccccaacccctatatattgtaaatagatgggctgggctaaacattgttgccgtttcatacttctaccaactcagcttttacacaataaagctctactgtctctgg

SEQ ID NO: 450211 - DNA, 719 bp, Homo sapiens
  misc_feature (101)..(101): n is a, c, g, or t
gatcgagctgctgtgacacccttgggatctgggcttaacctcctgggctttacgagggccttgatagcctcggcacgtgcactcatggcttggattgtggnctgcatcttctttaggccctttttgttgtgcttcttggcaaagcgcatgttcctcaggaacttggggtccacccccttaagagattcgtattctttgtcctcagttcccatttctccttataaggatgagccctggaaatatctggaatcagaagaataccaggagcgatatggttctcgccccgtctgggctgactaccgccgcaaccacaagggtggtgtacccccacagcggactcggaagacatgtattgaggcggaggttgcagtgagttgcagtcacacccctgcactccagcctgggtgacagctagaccctgtctcaaaaaaaaaaaaaaagactgggaagagagctagagggactaggagataatgtgtatgtaggtttatgtgatgggatatcaccctgaagagttgtgtcttttgtggccagtgacaaatccaggaaatgaatgttgctgatagggataaatcttgaggctgagggcgggtggtacagatgtgtatgggaaaccccaacccctatatattgtaaatagatgggctgggctaaacattgttgccgtttcatacttctaccaactcagcttttacacaataaagctctactgtctctgg

SEQ ID NO: 450212 - DNA, 1159 bp, Homo sapiens
aacgcccttgtcgcgagacattatacgcgaggcgtgaactcattggtcaacccaaatgacaactcgccaactgattggctactctcacttcacctttgctccgcccctttccctggcactctcttccgcctccttcctgcctccctgtcgcgtgcgcgtgaccaggagcctagcacctccctttcctctgcttccgccacttccgccctggagaacatttctcacccaggattggtagaaacctaagagcgcatgcgcactgagaggataccgctaaaaatcgccttcaaaattgcttaaaaggcaaactttaacaatgcgatctaagagtcgtagtgactggccaaaaaaaaccgcaattttggggtctaattcgattgtgacgcagttgaaattagcttctcccccatgccttccctttcacgcttccgtcctgacgcaaacgtggggccgccttccgcactgcgggcttgtccttggccctgccctactcagtttcctgaagcatgcgcagttgcctttccgtcaattcctgtcctgggcgtacgtcaagatggcggcgtctgtattaaacaccgtgctgaggcggcttcctatgctatctctcttccgaggttctcacagagttcaggttcccctccagactctttgcaccaaagctccctctgaggaagattctttgtcctcagttcccatttctccttataaggatgagccctggaaatatctggaatcagaagaataccaggagcgatatggttctcgccccgtctgggctgactaccgccgcaaccacaagggtggtgtacccccacagcggactcggaagacatgtattcgtcggaataaagttgttgggaatccctgccccatctgtcgagactgggaagagagctagagggactaggagataatgtgtatgtaggtttatgtgatgggatatcaccctgaagagttgtgtcttttgtggccagtgacaaatccaggaaatgaatgttgctgatagggataaatcttgaggctgagggcgggtggtacagatgtgtatgggaaaccccaacccctatatattgtaaatagatgggctgggctaaacattgttgccgtttcatacttctaccaactcagcttttacacaataaagctctactgtctctgg

SEQ ID NO: 450213 - DNA, 298 bp, Homo sapiens
aataaagttgttgggaatccctgccccatctgtcgagatcacaagttgcatgttgactttagggtaaggagagtcttttctttttagggtaagaaaaataaagattaggggctgggcgcggtggctcacgcctgtaatcccagcactttgggaggccaaggcaggtggatcatgaggtcaggagatcaagaccatcctggctaacacggtgaaaccccgtctctactaaaaatacaaaaaattagccggttgtggtggcgggcgcctgtagtcccagctactcaggaggctgaggcag

SEQ ID NO: 450214 - DNA, 2144 bp, Homo sapiens
aacgcccttgtcgcgagacattatacgcgaggcgtgaactcattggtcaacccaaatgacaactcgccaactgattggctactctcacttcacctttgctccgcccctttccctggcactctcttccgcctccttcctgcctccctgtcgcgtgcgcgtgaccaggagcctagcacctccctttcctctgcttccgccacttccgccctggagaacatttctcacccaggattggtagaaacctaagagcgcatgcgcactgagaggataccgctaaaaatcgccttcaaaattgcttaaaaggcaaactttaacaatgcgatctaagagtcgtagtgactggccaaaaaaaaccgcaattttggggtctaattcgattgtgacgcagttgaaattagcttctcccccatgccttccctttcacgcttccgtcctgacgcaaacgtggggccgccttccgcactgcgggcttgtccttggccctgccctactcagtttcctgaagcatgcgcagttgcctttccgtcaattcctgtcctgggcgtacgtcaagatggcggcgtctgtattaaacaccgtgctgaggcggcttcctatgctatctctcttccgaggttctcacagagttcaggttcccctccagactctttgcaccaaagctccctctgaggaagattctttgtcctcagttcccatttctccttataaggatgagccctggaaatatctggaatcagaaggtacctctaaagggggaaagggagggtcagataggatttgagataagtggacagagccacccactacactcccacccaggaataacttgtatgatctttcatttcagaataccaggagcgatatggttctcgccccgtctgggctgactaccgccgcaaccacaagggtggtgtacccccacagcggactcggaagacatgtattgtgagtttctgagagtgggatgtggagtgcggggaggccacaagtaacagtaacagcagcactttttctgacgtgtttgaacatccttaactgctgttttttttctctctacagcgtcggaataaagttgttgggaatccctgccccatctgtcgagatcacaagttgcatgttgactttaggaacgtgaagctcttggagcaatttgtctgcgcccacacgggtatcatcttctatgctccatacacaggagtctgtgtgaagcagcacaagcggttgacccaggccatccagaaagccagggatcatggtctcctcatttaccacatcccccaggttgaaccacgggaccttgacttcagtacctctcatggggctgtgagtgctactccgccagcccccaccctggtctcaggtgacccctggtacccatggtacaactggaaacagccaccggagagagaactgtctcgccttcgccggctttaccagggtcatctccaagaagagagtggccccccacctgagtcaatgcccaagatgccccctagaacaccagcggaagcctcctccactgggcagacaggccctcagagtgctctgtaggagctgtagactgggaagagaggccaggcgtggtggctcactcctgtaatcccagcactttgggaagccaaggtgggctgatcacttgatcccaggagtttgagaccagcctgggcaccatggtgaaacctcgtctttaccaaaaaatacaaaaattagctgggtgtggtggtgcacacctgtagtctcaactattggggaggctaaggtaggatcacttgatcccaggaggcggaggttgcagtgagttgcagtcacacccctgcactccagcctgggtgacagctagaccctgtctcaaaaaaaaaaaaaaagactgggaagagagctagagggactaggagataatgtgtatgtaggtttatgtgatgggatatcaccctgaagagttgtgtcttttgtggccagtgacaaatccaggaaatgaatgttgctgatagggataaatcttgaggctgagggcgggtggtacagatgtgtatgggaaaccccaacccctatatattgtaaatagatgggctgggctaaacattgttgccgtttcatacttctaccaactcagcttttacacaataaagctctactgtctctgg

SEQ ID NO: 450215 - DNA, 973 bp, Homo sapiens
aacaagatatttttctccccacaggagtctgtgtgaagcagcacaagcggttgacccaggccatccagaaagccagggatcatggtctcctcatttaccacatcccccaggttgaaccacgggaccttgacttcagtacctctcatggggctgtgagtgctactccgccagcccccaccctggtctcaggtgacccctggtacccatggtacaactggaaacagccaccggagagagaactgtctcgccttcgccggctttaccagggtcatctccaagaagagagtggccccccacctgagtcaatgcccaagatgccccctagaacaccagcggaagcctcctccactgggcagacaggccctcagagtgctctgtaggagctgtagactgggaagagaggccaggcgtggtggctcactcctgtaatcccagcactttgggaagccaaggtgggctgatcacttgatcccaggagtttgagaccagcctgggcaccatggtgaaacctcgtctttaccaaaaaatacaaaaattagctgggtgtggtggtgcacacctgtagtctcaactattggggaggctaaggtaggatcacttgatcccaggaggcggaggttgcagtgagttgcagtcacacccctgcactccagcctgggtgacagctagaccctgtctcaaaaaaaaaaaaaaagactgggaagagagctagagggactaggagataatgtgtatgtaggtttatgtgatgggatatcaccctgaagagttgtgtcttttgtggccagtgacaaatccaggaaatgaatgttgctgatagggataaatcttgaggctgagggcgggtggtacagatgtgtatgggaaaccccaacccctatatattgtaaatagatgggctgggctaaacattgttgccgtttcatacttctaccaactcagcttttacacaataaagctctactgtctctgg

SEQ ID NO: 450216 - DNA, 1203 bp, Homo sapiens
aacgcccttgtcgcgagacattatacgcgaggcgtgaactcattggtcaacccaaatgacaactcgccaactgattggctactctcacttcacctttgctccgcccctttccctggcactctcttccgcctccttcctgcctccctgtcgcgtgcgcgtgaccaggagcctagcacctccctttcctctgcttccgccacttccgccctggagaacatttctcacccaggattggtagaaacctaagagcgcatgcgcactgagaggataccgctaaaaatcgccttcaaaattgcttaaaaggcaaactttaacaatgcgatctaagagtcgtagtgactggccaaaaaaaaccgcaattttggggtctaattcgattgtgacgcagttgaaattagcttctcccccatgccttccctttcacgcttccgtcctgacgcaaacgtggggccgccttccgcactgcgggcttgtccttggccctgccctactcagtttcctgaagcatgcgcagttgcctttccgtcaattcctgtcctgggcgtacgtcaagatggcggcgtctgtattaaacaccgtgctgaggcggcttcctatgctatctctcttccgaggttctcacagagttcaggttcccctccagactctttgcaccaaagctccctctgaggaagattctttgtcctcagttcccatttctccttataaggatgagccctggaaatatctggaatcagaagaataccaggagcgatatggttctcgccccgtctgggctgactaccgccgcaaccacaagggtggtgtacccccacagcggactcggaagacatgtattgaggcggaggttgcagtgagttgcagtcacacccctgcactccagcctgggtgacagctagaccctgtctcaaaaaaaaaaaaaaagactgggaagagagctagagggactaggagataatgtgtatgtaggtttatgtgatgggatatcaccctgaagagttgtgtcttttgtggccagtgacaaatccaggaaatgaatgttgctgatagggataaatcttgaggctgagggcgggtggtacagatgtgtatgggaaaccccaacccctatatattgtaaatagatgggctgggctaaacattgttgccgtttcatacttctaccaactcagcttttacacaataaagctctactgtctctgg

SEQ ID NO: 450217 - DNA, 1885 bp, Homo sapiens
agctacgagcgcggagcttgcgcagaagacccccatcagggtgcggggtgcagttgcggctccagggccatggcggaggagcagggccgggaacgggactcggttcccaagccgtcggtgctgttcctccacccagacctgggcgtgggcggcgctgagcggctggtgttggacgcggcgctggcgctgcaggcgcgcgggtgtagcgtgaagatctggacagcgcactacgacccgggccactgtttcgccgagagccgcgagctaccggtgcgctgtgccggggactggctgccgcgaggcctgggctggggcggccgcggcgccgccgtctgcgcctacgtgcgcatggttttcctggcgctctacgtgctgttcctcgccgacgaggagttcgacgtggtagtgtgcgaccaggtgtctgcctgtatcccagtgttcaggctggctagacggcggaagaagatcctattttactgtcacttcccagatctgcttctcaccaagagagattcttttcttaaacgactatacagggccccaattgactggatagaggaatacaccacaggcatggcagactgcatcttagtcaacagccagttcacagctgctgtttttaaggaaacattcaagtccctgtctcacatagaccctgatgtcctctatccatctctaaatgtcaccagctttgactcagttgttcctgaaaagctggatgacctagtccccaaggggaaaaaattcctgctgctctccatcaacagatacgaaaggaagaaaaatctgactttggcactggaagccctagtacagctgcgtggaagattgacatcccaagattgggagagggttcatctgatcgtggcaggtggttatgacgagagagtcctggagaatgtggaacattatcaggaattgaagaaaatggtccaacagtccgaccttggccagtatgtgaccttcttgaggtctttctcagacaaacagaaaatctccctcctccacagctgcacgtgtgtgctttacacaccaagcaatgagcactttggcattgtccctctggaagccatgtacatgcagtgcccagtcattgctgttaattcgggtggacccttggagtccattgaccacagtgtcacagggtttctgtgtgagcctgacccggtgcacttctcagaagcaatagaaaagttcatccgtgaaccttccttaaaagccaccatgggcctggctggaagagccagagtgaaggaaaaattttcccctgaagcatttacagaacagctctaccgatatgttaccaaactgctggtataatcagattgtttttaagatctccattaatgtcatttttatggattgtagacccagttttgaaaccaaaaaagaaacctagaatctaatgcagaagagatcttttaaaaaataaacttgagtcttgaatgtgagccactttcctatataccacacctccctgtccacttttcagaaaaaccatgtcttttatgctataatcattccaaattttgccagtgttaagttacaaatgtggtgtcattccatgttcagcagagtattttaattatattttctcgggattattgctcttctgtctataaattttgaatgatactgtgccttaattggttttcatagtttaagtgtgtatcattatcaaagttgattaatttggcttcatagtataatgagagcagggctattgtagttcccagattcaatccaccgaagtgttcactgtcatctgttagggaatttttgtttgtcctgtctttgcctggatccatagcgagagtgctctgtattttttttaagataatttgtatttttgcacactgagatataataaaaggtgtttatcata

SEQ ID NO: 450218 - DNA, 2851 bp, Homo sapiens
  misc_feature (1286)..(1286): n is a, c, g, or t
ttttttaaaatatttttgtacttctgcaaatatgtcgtttgaggaaattcctaaagttggtgggtctaagagttgttcattttaaatatcaatagctactgccaagtttgcctaccaaggaggctgtgtcactttactcccccacaatgtatgatagagcctcttactccatgcttttgtccgccttggatattaaccattttaaactttgccaaactgataggtgcagatggcatcacatttgtatttgtgtttctttaattatgactcctgagttacttttgatcatccttgcttgcatggaagctttctttttaagtaacgtggacatttaccaaacatcctgcatgtgtcagtagacatgaggcagctgagactatagtgggtagaggaaaaattattggcttggaaataggcatcttggattcaagttccgtatctactgctttaattaagtggctttgaataaattgcacattatccctaaagttaccttcttcaggttttaagttagctgagactaaaatgacttgtaaagattacccaacaagaaagtctgtagtaatgccagcatgtagttcatgctcaatgatgactagctttaatatttattgagcacatactgtgtgctaaactccatgtgttttgcatatatcagtgcatttaataatcacaaaaagtatatgggttttttgaactataatttgtcaccatgttacagaagaggaaactaaggcccagagtgggataaattacttgatcgtggccagttagtagagctgagattcaaaccctggcagtcttgaatctagagcttgtgctctaaactactatagttcattcattcagttccttagaaggagaaagatcctagagcggcactgttcagtatggtagccactagccacatgtggctgttgagcacttgaaatgtggctagtctaaactgagatgtgctaaagttaaaatacaaaccgattttgaagatgtaatgtgaaatatatgtatatataaagtatctcattaatactgtttagtattggttacattttgaaatgataatgttttcggtaaataatatgttaaaattaatttcacccttaaaaacatttttaatattactagatttctattagacagcactatacaagaggaaatcactggacttgaagctttaaatgtttagcacacatctagcaaacgtctgtagccttctgtacaccaggcatatggtactgggtgagagtcttggggaataaaacagaatcagacattgcccatgaggngcccacagactagccagacggggtgggtgtctgtgtttttggtttggttgaagttgagttgaccactttatccgctgttgatttttgctttggctaggtgtctgcctgtatcccagtgttcaggctggctagacggcggaagaagatcctattttactgtcacttcccagatctgcttctcaccaagagagattcttttcttaaacgactatacagggccccaattgactggatagaggaatacaccacaggcatggcagactgcatcttagtcaacagccagttcacagctgctgtttttaaggaaacattcaagtccctgtctcacatagaccctgatgtcctctatccatctctaaatgtcaccagctttgactcagttgttcctgaaaagctggatgacctagtccccaaggggaaaaaattcctgctgctctccatcaacagatacgaaaggaagaaaaatctgactttggcactggaagccctagtacagctgcgtggaagattgacatcccaagattgggagagggttcatctgatcgtggcaggtggttatgacgagagagtcctggagaatgtggaacattatcaggaattgaagaaaatggtccaacagtccgaccttggccagtatgtgaccttcttgaggtctttctcagacaaacagaaaatctccctcctccacagctgcacgtgtgtgctttacacaccaagcaatgagcactttggcattgtccctctggaagccatgtacatgcagtgcccagtcattgctgttaattcgggtggacccttggagtccattgaccacagtgtcacagggtttctgtgtgagcctgacccggtgcacttctcagaagcaatagaaaagttcatccgtgaaccttccttaaaagccaccatgggcctggctggaagagccagagtgaaggaaaaattttcccctgaagcatttacagaacagctctaccgatatgttaccaaactgctggtataatcagattgtttttaagatctccattaatgtcatttttatggattgtagacccagttttgaaaccaaaaaagaaacctagaatctaatgcagaagagatcttttaaaaaataaacttgagtcttgaatgtgagccactttcctatataccacacctccctgtccacttttcagaaaaaccatgtcttttatgctataatcattccaaattttgccagtgttaagttacaaatgtggtgtcattccatgttcagcagagtattttaattatattttctcgggattattgctcttctgtctataaattttgaatgatactgtgccttaattggttttcatagtttaagtgtgtatcattatcaaagttgattaatttggcttcatagtataatgagagcagggctattgtagttcccagattcaatccaccgaagtgttcactgtcatctgttagggaatttttgtttgtcctgtctttgcctggatccatagcgagagtgctctgtattttttttaagataatttgtatttttgcacactgagatataataaaaggtgtttatcata

SEQ ID NO: 450219 - DNA, 2787 bp, Homo sapiens
agctacgagcgcggagcttgcgcagaagacccccatcagggtgcggggtgcagttgcggctccagggccatggcggaggagcagggccgggaacgggactcggttcccaagccgtcggtgctgttcctccacccagacctgggcgtgggcggcgctgagcggctggtgttggacgcggcgctggcgctgcaggcgcgcgggtgtagcgtgaagatctggacagcgcactacgacccgggccactgtttcgccgagagccgcgagctaccggtgcgctgtgccggggactggctgccgcgaggcctgggctggggcggccgcggcgccgccgtctgcgcctacgtgcgcatggttttcctggcgctctacgtgctgttcctcgccgacgaggagttcgacgtggtagtgtgcgaccaggtgtctgcctgtatcccagtgttcaggctggctagacggcggaagaagatcctattttactgtcacttcccagatctgcttctcaccaagagagattcttttcttaaacgactatacagggccccaattgactggatagaggaatacaccacaggcatggcagactgcatcttagtcaacagccagttcacagctgctgtttttaaggaaacattcaagtccctgtctcacatagaccctgatgtcctctatccatctctaaatgtcaccagctttgactcagttgttcctgaaaagctggatgacctagtccccaaggggaaaaaattcctgctgctctccatcaacagatacgaaaggaagaaaaatctgactttggcactggaagccctagtacagctgcgtggaagattgacatcccaagattgggagagggttcatctgatcgtggcaggtggttatgacgagagagtcctggagaatgtggaacattatcaggaattgaagaaaatggtccaacagtccgaccttggccagtatgtgaccttcttgaggtctttctcagacaaacagaaaatctccctcctccacagctgcacgtgtgtgctttacacaccaagcaatgagcactttggcattgtccctctggaagccatgtacatgcagtgcccagtcattgctgttaattcgggtggacccttggagtccattgaccacagtgtcacagggtttctgtgtgagcctgacccggtgcacttctcagaagcaatagaaaagttcatccgtgaaccttccttaaaagccaccatgggcctggctggaagagccagagtgaaggaaaaattttcccctgaagcatttacagaacagctctaccgatatgttaccaaactgctggtataatcagattgtttttaagatctccattaatgtcatttttatggattgtagacccagttttgaaaccaaaaaagaaacctagaatctaatgcagaagagatcttttaaaaaataaacttgagtcttgaatgtgagccactttcctatataccacacctccctgtccacttttcagaaaatgtggtgtcattccatgttcagcagagtattttaattatattttctcgggattattgctcttctgtctataaattttgaatgatactgtgccttaattggttttcatagtttaagtgtgtatcattatcaaagttgattaatttggcttcatagtataatgagagcagggctattgtagttcccagattcaatccaccgaagtgttcactgtcatctgttagggaatttttgtttgtcctgtctttgcctggatccatagcgagagtgctctgtattttttttaagataatttgtatttttgcacactgagatataataaaaggtgtttatcataaaaaagaaacagtattagattttggtctccataatctattttggtattgttacgaacatggatatgacaaccaaactggaaatcagaacactagggtaaagtggatattgaaatgaagcaagaatattgtcacacatgtgttgtgcatcttgtttagggtatatttcttaatgtcatctaggtcattagttttgttaatatttgtgttgtcttgaccaagctcctactaagtataggacacaaatgttttttatcttccaaggcctggctcaaatgccactgctgcaaagcttttctttgaccctctggccacctcccaagccagaagttatcttccccctccatgtactctagcccttttcatgacactggatattttcgtggacactgacttatagttcactgtttacctgttggtctaacagcaaatcataaacagtagttttcaacatactttctaaggctaaattcatttccagaagtagcaaagcttactagccaaaggctccacatttatcaactcttaagagctagacttgagagcctaacagcctatatgattttgtgtaaattgatctctatacctcagcttcttcatctgcaaagtgagataattgtactattctactttcctcatagtgcggttataacagattatgataatattacaaagtacttaatacttggcatatagtatatatattagctattagtattttgcaatttggggatattgaaaattagaaattgcatgttagttcatgctgcactaccatattgttcttttggggctcttcaatgggtgaaattccattttacagtttatcatgtgcatctgtatcacaggagtattttggcaaaatgattctgtaccaaaaaggagtactataaaatgagggtgccaaatatattgagtcttttatgggattaaaagttctgttgcattccaaaaactt

SEQ ID NO: 450220 - DNA, 2044 bp, Homo sapiens
agctacgagcgcggagcttgcgcagaagacccccatcagggtgcggggtgcagttgcggctccagggccatggcggaggagcagggccgggaacgggactcggttcccaagccgtcggtgctgttcctccacccagacctgggcgtgggcggcgctgagcggctggtgttggacgcggcgctggcgctgcaggcgcgcgggtgtagcgtgaagatctggacagcgcactacgacccgggccactgtttcgccgagagccgcgagctaccggtgcgctgtgccggggactggctgccgcgaggcctgggctggggcggccgcggcgccgccgtctgcgcctacgtgcgcatggttttcctggcgctctacgtgctgttcctcgccgacgaggagttcgacgtggtagtgtgcgaccaggccatttgcatcccactgtccttgtgttcggagccaggccacaccgtcctcagcagtgtcatgtgttaaaaacgccaagctgaatatatcatgcccctattaaaacttgtacatggctccccattggtttttggagaaaagttcaagctttttaccttggtgtctgcctgtatcccagtgttcaggctggctagacggcggaagaagatcctattttactgtcacttcccagatctgcttctcaccaagagagattcttttcttaaacgactatacagggccccaattgactggatagaggaatacaccacaggcatggcagactgcatcttagtcaacagccagttcacagctgctgtttttaaggaaacattcaagtccctgtctcacatagaccctgatgtcctctatccatctctaaatgtcaccagctttgactcagttgttcctgaaaagctggatgacctagtccccaaggggaaaaaattcctgctgctctccatcaacagatacgaaaggaagaaaaatctgactttggcactggaagccctagtacagctgcgtggaagattgacatcccaagattgggagagggttcatctgatcgtggcaggtggttatgacgagagagtcctggagaatgtggaacattatcaggaattgaagaaaatggtccaacagtccgaccttggccagtatgtgaccttcttgaggtctttctcagacaaacagaaaatctccctcctccacagctgcacgtgtgtgctttacacaccaagcaatgagcactttggcattgtccctctggaagccatgtacatgcagtgcccagtcattgctgttaattcgggtggacccttggagtccattgaccacagtgtcacagggtttctgtgtgagcctgacccggtgcacttctcagaagcaatagaaaagttcatccgtgaaccttccttaaaagccaccatgggcctggctggaagagccagagtgaaggaaaaattttcccctgaagcatttacagaacagctctaccgatatgttaccaaactgctggtataatcagattgtttttaagatctccattaatgtcatttttatggattgtagacccagttttgaaaccaaaaaagaaacctagaatctaatgcagaagagatcttttaaaaaataaacttgagtcttgaatgtgagccactttcctatataccacacctccctgtccacttttcagaaaaaccatgtcttttatgctataatcattccaaattttgccagtgttaagttacaaatgtggtgtcattccatgttcagcagagtattttaattatattttctcgggattattgctcttctgtctataaattttgaatgatactgtgccttaattggttttcatagtttaagtgtgtatcattatcaaagttgattaatttggcttcatagtataatgagagcagggctattgtagttcccagattcaatccaccgaagtgttcactgtcatctgttagggaatttttgtttgtcctgtctttgcctggatccatagcgagagtgctctgtattttttttaagataatttgtatttttgcacactgagatataataaaaggtgtttatcata

SEQ ID NO: 450221 - DNA, 2007 bp, Homo sapiens
agctacgagcgcggagcttgcgcagaagacccccatcagggtgcggggtgcagttgcggctccagggccatggcggaggagcagggccgggaacgggactcggttcccaagccgtcggtgctgttcctccacccagacctgggcgtgggcggcgctgagcggctggtgttggacgcggcgctggcgctgcaggcgcgcgggtgtagcgtgaagatctggacagcgcactacgacccgggccactgtttcgccgagagccgcgagctaccggtgcgctgtgccggggactggctgccgcgaggcctgggctggggcggccgcggcgccgccgtctgcgcctacgtgcgcatggttttcctggcgctctacgtgctgttcctcgccgacgaggagttcgacgtggtagtgtgcgaccaggccacaccgtcctcagcagtgtcatgtgttaaaaacgccaagctgaatatatcatgcccctattaaaacttgtacatggctccccattggtttttggagaaaagttcaagctttttaccttggtgtctgcctgtatcccagtgttcaggctggctagacggcggaagaagatcctattttactgtcacttcccagatctgcttctcaccaagagagattcttttcttaaacgactatacagggccccaattgactggatagaggaatacaccacaggcatggcagactgcatcttagtcaacagccagttcacagctgctgtttttaaggaaacattcaagtccctgtctcacatagaccctgatgtcctctatccatctctaaatgtcaccagctttgactcagttgttcctgaaaagctggatgacctagtccccaaggggaaaaaattcctgctgctctccatcaacagatacgaaaggaagaaaaatctgactttggcactggaagccctagtacagctgcgtggaagattgacatcccaagattgggagagggttcatctgatcgtggcaggtggttatgacgagagagtcctggagaatgtggaacattatcaggaattgaagaaaatggtccaacagtccgaccttggccagtatgtgaccttcttgaggtctttctcagacaaacagaaaatctccctcctccacagctgcacgtgtgtgctttacacaccaagcaatgagcactttggcattgtccctctggaagccatgtacatgcagtgcccagtcattgctgttaattcgggtggacccttggagtccattgaccacagtgtcacagggtttctgtgtgagcctgacccggtgcacttctcagaagcaatagaaaagttcatccgtgaaccttccttaaaagccaccatgggcctggctggaagagccagagtgaaggaaaaattttcccctgaagcatttacagaacagctctaccgatatgttaccaaactgctggtataatcagattgtttttaagatctccattaatgtcatttttatggattgtagacccagttttgaaaccaaaaaagaaacctagaatctaatgcagaagagatcttttaaaaaataaacttgagtcttgaatgtgagccactttcctatataccacacctccctgtccacttttcagaaaaaccatgtcttttatgctataatcattccaaattttgccagtgttaagttacaaatgtggtgtcattccatgttcagcagagtattttaattatattttctcgggattattgctcttctgtctataaattttgaatgatactgtgccttaattggttttcatagtttaagtgtgtatcattatcaaagttgattaatttggcttcatagtataatgagagcagggctattgtagttcccagattcaatccaccgaagtgttcactgtcatctgttagggaatttttgtttgtcctgtctttgcctggatccatagcgagagtgctctgtattttttttaagataatttgtatttttgcacactgagatataataaaaggtgtttatcata

SEQ ID NO: 450222 - DNA, 1594 bp, Homo sapiens
ccttctacgtccttctacgtctcatcactgccttctacgtccttctacgtctcatcactgccttctacgtccttctacgtctcatcactgccttctacgtctcatcactgatggattgtagacccagttttgaaaccaaaaaagaaacctagaatctaatgcagaagagatcttttaaaaaataaacttgagtcttgaatgtgagccactttcctatataccacacctccctgtccacttttcagaaaaaccatgtcttttatgctataatcattccaaattttgccagtgttaagttacaaatgtggtgtcattccatgttcagcagagtattttaattatattttctcgggattattgctcttctgtctataaattttgaatgatactgtgccttaattggttttcatagtttaagtgtgtatcattatcaaagttgattaatttggcttcatagtataatgagagcagggctattgtagttcccagattcaatccaccgaagtgttcactgtcatctgttagggaatttttgtttgtcctgtctttgcctggatccatagcgagagtgctctgtattttttttaagataatttgtatttttgcacactgagatataataaaaggtgtttatcataaaaaagaaacagtattagattttggtctccataatctattttggtattgttacgaacatggatatgacaaccaaactggaaatcagaacactagggtaaagtggatattgaaatgaagcaagaatattgtcacacatgtgttgtgcatcttgtttagggtatatttcttaatgtcatctaggtcattagttttgttaatatttgtgttgtcttgaccaagctcctactaagtataggacacaaatgttttttatcttccaaggcctggctcaaatgccactgctgcaaagcttttctttgaccctctggccacctcccaagccagaagttatcttccccctccatgtactctagcccttttcatgacactggatattttcgtggacactgacttatagttcactgtttacctgttggtctaacagcaaatcataaacagtagttttcaacatactttctaaggctaaattcatttccagaagtagcaaagcttactagccaaaggctccacatttatcaactcttaagagctagacttgagagcctaacagcctatatgattttgtgtaaattgatctctatacctcagcttcttcatctgcaaagtgagataattgtactattctactttcctcatagtgcggttataacagattatgataatattacaaagtacttaatacttggcatatagtatatatattagctattagtattttgcaatttggggatattgaaaattagaaattgcatgttagttcatgctgcactaccatattgttcttttggggctcttcaatgggtgaaattccattttacagtttatcatgtgcatctgtatcacaggagtattttggcaaaatgattctgtaccaaaaaggagtactataaaatgagggtgccaaatatattgagtcttttatgggattaaaagttctgttgcattccaaaaactt

SEQ ID NO: 450223 - DNA, 2841 bp, Homo sapiens
agctacgagcgcggagcttgcgcagaagacccccatcagggtgcggggtgcagttgcggctccagggccatggcggaggagcagggccgggaacgggactcggttcccaagccgtcggtgctgttcctccacccagacctgggcgtgggcggcgctgagcggctggtgttggacgcggcgctggcgctgcaggcgcgcgggtgtagcgtgaagatctggacagcgcactacgacccgggccactgtttcgccgagagccgcgagctaccggtgcgctgtgccggggactggctgccgcgaggcctgggctggggcggccgcggcgccgccgtctgcgcctacgtgcgcatggttttcctggcgctctacgtgctgttcctcgccgacgaggagttcgacgtggtagtgtgcgaccaggtgtctgcctgtatcccagtgttcaggctggctagacggcggaagaagatcctattttactgtcacttcccagatctgcttctcaccaagagagattcttttcttaaacgactatacagggccccaattgactggatagaggaatacaccacaggcatggcagactgcatcttagtcaacagccagttcacagctgctgtttttaaggaaacattcaagtccctgtctcacatagaccctgatgtcctctatccatctctaaatgtcaccagctttgactcagttgttcctgaaaagctggatgacctagtccccaaggggaaaaaattcctgctgctctccatcaacagatacgaaaggaagaaaaatctgactttggcactggaagccctagtacagctgcgtggaagattgacatcccaagattgggagagggttcatctgatcgtggcaggtggttatgacgagagagtcctggagaatgtggaacattatcaggaattgaagaaaatggtccaacagtccgaccttggccagtatgtgaccttcttgaggtctttctcagacaaacagaaaatctccctcctccacagctgcacgtgtgtgctttacacaccaagcaatgagcactttggcattgtccctctggaagccatgtacatgcagtgcccagtcattgctgttaattcgggtggacccttggagtccattgaccacagtgtcacagggtttctgtgtgagcctgacccggtgcacttctcagaagcaatagaaaagttcatccgtgaaccttccttaaaagccaccatgggcctggctggaagagccagagtgaaggaaaaattttcccctgaagcatttacagaacagctctaccgatatgttaccaaactgctggtataatcagattgtttttaagatctccattaatgtcatttttatggattgtagacccagttttgaaaccaaaaaagaaacctagaatctaatgcagaagagatcttttaaaaaataaacttgagtcttgaatgtgagccactttcctatataccacacctccctgtccacttttcagaaaaaccatgtcttttatgctataatcattccaaattttgccagtgttaagttacaaatgtggtgtcattccatgttcagcagagtattttaattatattttctcgggattattgctcttctgtctataaattttgaatgatactgtgccttaattggttttcatagtttaagtgtgtatcattatcaaagttgattaatttggcttcatagtataatgagagcagggctattgtagttcccagattcaatccaccgaagtgttcactgtcatctgttagggaatttttgtttgtcctgtctttgcctggatccatagcgagagtgctctgtattttttttaagataatttgtatttttgcacactgagatataataaaaggtgtttatcataaaaaagaaacagtattagattttggtctccataatctattttggtattgttacgaacatggatatgacaaccaaactggaaatcagaacactagggtaaagtggatattgaaatgaagcaagaatattgtcacacatgtgttgtgcatcttgtttagggtatatttcttaatgtcatctaggtcattagttttgttaatatttgtgttgtcttgaccaagctcctactaagtataggacacaaatgttttttatcttccaaggcctggctcaaatgccactgctgcaaagcttttctttgaccctctggccacctcccaagccagaagttatcttccccctccatgtactctagcccttttcatgacactggatattttcgtggacactgacttatagttcactgtttacctgttggtctaacagcaaatcataaacagtagttttcaacatactttctaaggctaaattcatttccagaagtagcaaagcttactagccaaaggctccacatttatcaactcttaagagctagacttgagagcctaacagcctatatgattttgtgtaaattgatctctatacctcagcttcttcatctgcaaagtgagataattgtactattctactttcctcatagtgcggttataacagattatgataatattacaaagtacttaatacttggcatatagtatatatattagctattagtattttgcaatttggggatattgaaaattagaaattgcatgttagttcatgctgcactaccatattgttcttttggggctcttcaatgggtgaaattccattttacagtttatcatgtgcatctgtatcacaggagtattttggcaaaatgattctgtaccaaaaaggagtactataaaatgagggtgccaaatatattgagtcttttatgggattaaaagttctgttgcattccaaaaactt

SEQ ID NO: 450224 - DNA, 2453 bp, Homo sapiens
agctacgagcgcggagcttgcgcagaagacccccatcagggtgcggggtgcagttgcggctccagggccatggcggaggagcagggccgggaacgggactcggttcccaagccgtcggtgctgttcctccacccagacctgggcgtgggcggcgctgagcggctggtgttggacgcggcgctggcgctgcaggcgcgcgggtgtagcgtgaagatctggacagcgcactacgacccgggccactgtttcgccgagagccgcgagctaccggtgcgctgtgccggggactggctgccgcgaggcctgggctggggcggccgcggcgccgccgtctgcgcctacgtgcgcatggttttcctggcgctctacgtgctgttcctcgccgacgaggagttcgacgtggtagtgtgcgaccaggtgaggcggccgcggggccggctgcgcgagtgcggacctcgccgtggagggcggccgcgggcatgacccctgagagaagaccttccctgtctgcggttcgcaaagatcggaactgacatggagaagtcagggttgtgagcgagcctgtggttctctaactttagtgtgggcccatttaaagttgcagattgctggggttccatcctccaggaagttttcatccaggtgccctgaggtggggcccagacatctgcattttaactgggtcatagggtgattccgaggtagatagtctttggggctctgagaaacgctggtattagaagtcagcttcagtcaccttttactaatgagtaactcgcgtgttgtcttcccgcttacctgttatttttgttgactctcctttcaggccatttgcatcccactgtccttgtgttcggagccaggccacaccgtcctcagcagtgtcatgtgttaaaaacgccaagctgaatatatcatgcccctattaaaacttgtacatggctccccattggtttttggagaaaagttcaagctttttaccttggtgtctgcctgtatcccagtgttcaggctggctagacggcggaagaagatcctattttactgtcacttcccagatctgcttctcaccaagagagattcttttcttaaacgactatacagggccccaattgactggatagaggaatacaccacaggcatggcagactgcatcttagtcaacagccagttcacagctgctgtttttaaggaaacattcaagtccctgtctcacatagaccctgatgtcctctatccatctctaaatgtcaccagctttgactcagttgttcctgaaaagctggatgacctagtccccaaggggaaaaaattcctgctgctctccatcaacagatacgaaaggaagaaaaatctgactttggcactggaagccctagtacagctgcgtggaagattgacatcccaagattgggagagggttcatctgatcgtggcaggtggttatgacgagagagtcctggagaatgtggaacattatcaggaattgaagaaaatggtccaacagtccgaccttggccagtatgtgaccttcttgaggtctttctcagacaaacagaaaatctccctcctccacagctgcacgtgtgtgctttacacaccaagcaatgagcactttggcattgtccctctggaagccatgtacatgcagtgcccagtcattgctgttaattcgggtggacccttggagtccattgaccacagtgtcacagggtttctgtgtgagcctgacccggtgcacttctcagaagcaatagaaaagttcatccgtgaaccttccttaaaagccaccatgggcctggctggaagagccagagtgaaggaaaaattttcccctgaagcatttacagaacagctctaccgatatgttaccaaactgctggtataatcagattgtttttaagatctccattaatgtcatttttatggattgtagacccagttttgaaaccaaaaaagaaacctagaatctaatgcagaagagatcttttaaaaaataaacttgagtcttgaatgtgagccactttcctatataccacacctccctgtccacttttcagaaaaaccatgtcttttatgctataatcattccaaattttgccagtgttaagttacaaatgtggtgtcattccatgttcagcagagtattttaattatattttctcgggattattgctcttctgtctataaattttgaatgatactgtgccttaattggttttcatagtttaagtgtgtatcattatcaaagttgattaatttggcttcatagtataatgagagcagggctattgtagttcccagattcaatccaccgaagtgttcactgtcatctgttagggaatttttgtttgtcctgtctttgcctggatccatagcgagagtgctctgtattttttttaagataatttgtatttttgcacactgagatataataaaaggtgtttatcata

SEQ ID NO: 450225 - DNA, 2279 bp, Homo sapiens
agctacgagcgcggagcttgcgcagaagacccccatcagggtgcggggtgcagttgcggctccagggccatggcggaggagcagggccgggaacgggactcggttcccaagccgtcggtgctgttcctccacccagacctgggcgtgggcggcgctgagcggctggtgttggacgcggcgctggcgctgcaggcgcgcgggtgtagcgtgaagatctggacagcgcactacgacccgggccactgtttcgccgagagccgcgagctaccggtgcgctgtgccggggactggctgccgcgaggcctgggctggggcggccgcggcgccgccgtctgcgcctacgtgcgcatggttttcctggcgctctacgtgctgttcctcgccgacgaggagttcgacgtggtagtgtgcgaccaggtgaggcggccgcggggccggctgcgcgagtgcggacctcgccgtggagggcggccgcgggcatgacccctgagagaagaccttccctgtctgcggttcgcaaagatcggaactgacatggagaagtcagggttgtgagcgagcctgtggttctctaactttagtgtgggcccatttaaagttgcagattgctggggttccatcctccaggaagttttcatccaggtgccctgaggccatttgcatcccactgtccttgtgttcggagccaggccacaccgtcctcagcagtgtcatgtgttaaaaacgccaagctgaatatatcatgcccctattaaaacttgtacatggctccccattggtttttggagaaaagttcaagctttttaccttggtgtctgcctgtatcccagtgttcaggctggctagacggcggaagaagatcctattttactgtcacttcccagatctgcttctcaccaagagagattcttttcttaaacgactatacagggccccaattgactggatagaggaatacaccacaggcatggcagactgcatcttagtcaacagccagttcacagctgctgtttttaaggaaacattcaagtccctgtctcacatagaccctgatgtcctctatccatctctaaatgtcaccagctttgactcagttgttcctgaaaagctggatgacctagtccccaaggggaaaaaattcctgctgctctccatcaacagatacgaaaggaagaaaaatctgactttggcactggaagccctagtacagctgcgtggaagattgacatcccaagattgggagagggttcatctgatcgtggcaggtggttatgacgagagagtcctggagaatgtggaacattatcaggaattgaagaaaatggtccaacagtccgaccttggccagtatgtgaccttcttgaggtctttctcagacaaacagaaaatctccctcctccacagctgcacgtgtgtgctttacacaccaagcaatgagcactttggcattgtccctctggaagccatgtacatgcagtgcccagtcattgctgttaattcgggtggacccttggagtccattgaccacagtgtcacagggtttctgtgtgagcctgacccggtgcacttctcagaagcaatagaaaagttcatccgtgaaccttccttaaaagccaccatgggcctggctggaagagccagagtgaaggaaaaattttcccctgaagcatttacagaacagctctaccgatatgttaccaaactgctggtataatcagattgtttttaagatctccattaatgtcatttttatggattgtagacccagttttgaaaccaaaaaagaaacctagaatctaatgcagaagagatcttttaaaaaataaacttgagtcttgaatgtgagccactttcctatataccacacctccctgtccacttttcagaaaaaccatgtcttttatgctataatcattccaaattttgccagtgttaagttacaaatgtggtgtcattccatgttcagcagagtattttaattatattttctcgggattattgctcttctgtctataaattttgaatgatactgtgccttaattggttttcatagtttaagtgtgtatcattatcaaagttgattaatttggcttcatagtataatgagagcagggctattgtagttcccagattcaatccaccgaagtgttcactgtcatctgttagggaatttttgtttgtcctgtctttgcctggatccatagcgagagtgctctgtattttttttaagataatttgtatttttgcacactgagatataataaaaggtgtttatcata

SEQ ID NO: 450226 - DNA, 3192 bp, Homo sapiens
  misc_feature (3)..(3): n is a, c, g, or t
  misc_feature (6)..(7): n is a, c, g, or t
ggnacnngcggaaacccgaatgtgaggaccttaagggatccacagctgccgccccccgcagccatccagagcgcggtcacagtccgactggcggcacggaggcggcggcggcggcggcggcggcagcggcggcggcagcggcggcggcagctgtagctgcagcagcaggtaaagagagcgttttcccaaagaaaataacatagcacagaaggaaaaataaaaagaaattgctgcagattttactttatgtgagaaaatctacaatttcttcgagacactcatataaagatattggtgaatgaactttgctaagtatggattcaggcggtggaagtcttggattgcacacgccagactctagaatggcccataccatgattatgcaagattttgtggctggaatggctggtactgcacatatcgatggagaccatattgttgtttcagttcctgaagctgttttagtttctgatgttgtcacagatgatgggataactcttgatcatggccttgcagctgaagttgtccatggacctgatatcatcacagagactgatgtagtaacagaaggtgtgattgttcctgaagcggtacttgaagctgatgttgccattgaagaggatttagaggaagatgatggtgatcacatcttgacttctgaactaattacagaaaccgttagggtaccagagcaggttttcgtggctgaccttgttactggtcctaatggacacttagaacatgtggtccaagattgtgtttcaggagtcgactctcccacaatggtatcagaggaggttcttgtaactaattcagatacagaaactgtgattcaagcagctggaggtgttcctggttctacagttactataaaaaccgaagatgatgatgatgatgatgtcaagagcacttctgaagactacttaatgatatctttggatgatgttggagaaaaattagagcatatggggaatacaccattaaaaattggcagtgatggttcacaagaagatgctaaagaagatgggtttggttctgaagttataaaagtgtatatatttaaagcggaggctgaagatgatgttgaaataggtggaacagaaattgtcacagagagtgagtacaccagtggacattcagtagctggagtgcttgaccagagccgaatgcagcgggagaagatggtttacatggcagttaaagattcttctcaagaagaagatgatatcagagatgaaagaagagtttcccgaaggtatgaagattgtcaagcatcaggaaatactttggactcagcattagaaagcagaagtagtacagcagcacagtaccttcaaatttgtgacggcattaatacaaataaagtacttaaacaaaaagccaaaaagaggagaaggggagaaaccaggcagtggcaaacagctgttataataggtcctgatggacagcccctcacagtgtacccttgccatatttgcacaaaaaagtttaaatccaggggattcttaaaaagacacatgaagaatcatcctgatcatttaatgagaaaaaaatatcagtgtacagattgtgactttacaactaacaagaaagtgagtttccataaccacttagaaagccataagctcataaacaaagtcgacaaaacccatgaatttacagaatacacacgaagatacagagaggctagtccactgagttccaataaacttattttaagagacaaggagccgaagatgcacaagtgcaaatactgtgactatgaaactgcagaacaaggactgttaaacaggcatttgttggccgttcacagcaagaattttcctcatgtttgtgttgagtgtgggaagggttttcgacatccttctgaactcaagaaacatatgagaacccatactggtgagaagccatatcagtgtcagtattgtattttcaggtgtgcagatcaatcaaatctgaaaactcacattaagtctaaacatggtaacaatttgccatataaatgtgagcattgtccccaagcatttggtgatgagagggagcttcaacgccatctggatttgtttcaaggacataagacacaccagtgtcctcattgtgaccataagagcaccaattcaagtgaccttaagcggcacatcatatctgtccatactaaggattttcctcacaaatgtgaggtctgtgataaaggttttcatcgtccttctgagctcaaaaagcatagtgatatccataagggtaggaagattcatcagtgcaggcactgtgactttaaaacatccgatccatttattcttagtggccatatcctttcagttcatactaaagatcagccattgaaatgtaaaaggtgcaagagaggattcagacaacaaaatgagctaaaaaaacatatgaagacccatactggaaggaagatttaccaatgtgagtattgtgaatacagcactacagatgcatctggctttaaacgacatgtgatatcaatacatacaaaagactatccacacaggtgtgaattctgcaagaagggattccgaagaccatcagaaaaaaatcagcatattatgaggcaccacaaagaggctcttatgtaataagatcaatataaagaaagaagctatttaggagatatgatatgctacttgggagaaaactctcactaactgtctcaccgggtttcaaagcttgatactaaaccatgactttacattctttgtattaaagatcttaaaatatttgaattcacaggggatcccatagccctttgaaaattacttaaagaatttaagaagcactatagaatggttacagaaaaacttcttaagtatctgtgtaatagtattatatgcatacttaaactacagaggggaaaagcaaagacaaatactttatttggctgattatgttagatacaaatgtttctgagaagagaatacataattgagtttagtgatgctttgctatagcaagcaaacccacttttatgcaattttagaaatggggcagggaaacaaaatgtggtcattcatcagtcacttagtcattgagccttttatattgtacctggaaattaaattccagcaatgacaaaagtttgtgtattcattaaaagaaaactaactggaaaacaggttagattaattcagtactattaaaaaagaattcagagctgttaatattttatca

SEQ ID NO: 450227 - DNA, 3330 bp, Homo sapiens
  misc_feature (3)..(3): n is a, c, g, or t
  misc_feature (6)..(7): n is a, c, g, or t
ggnacnngcggaaacccgaatgtgaggaccttaagggatccacagctgccgccccccgcagccatccagagcgcggtcacagtccgactggcggcacggaggcggcggcggcggcggcggcggcagcggcggcggcagcggcggcggcagctgtagctgcagcagcaggtaaagagagcgttttcccaaagaaaataacatagcacagaaggaaaaataaaaagaaattgctgcagattttactttatgtgagaaaatctacaatttcttcgagacactcatataaagatattggtgaatgaactttgctaagtatggattcaggcggtggaagtcttggattgcacacgccagactctagaatggcccataccatgattatgcaagattttgtggctggaatggctggtactgcacatatcgatggagaccatattgttgtttcagttcctgaagctgttttagtttctgatgttgtcacagatgatgggataactcttgatcatggccttgcagctgaagttgtccatggacctgatatcatcacagagactgatgtagtaacagaaggtgtgattgttcctgaagcggtacttgaagctgatgttgccattgaagaggatttagaggaagatgatggtgatcacatcttgacttctgaactaattacagaaaccgttagggtaccagagcaggttttcgtggctgaccttgttactggtcctaatggacacttagaacatgtggtccaagattgtgtttcaggagtcgactctcccacaatggtatcagaggaggttcttgtaactaattcagatacagaaactgtgattcaagcagctggaggtgttcctggttctacagttactataaaaaccgaagatgatgatgatgatgatgtcaagagcacttctgaagactacttaatgatatctttggatgatgttggagaaaaattagagcatatggggaatacaccattaaaaattggcagtgatggttcacaagaagatgctaaagaagatgggtttggttctgaagttataaaagtgtatatatttaaagcggaggctgaagatgatgttgaaataggtggaacagaaattgtcacagagagtgagtacaccagtggacattcagtagctggagtgcttgaccagagccgaatgcagcgggagaagatggtttacatggcagttaaagattcttctcaagaagaagatgatatcagttgcgctgaaatagcagatgaagtttacatggaagtcattgtaggggaagaggaaggaacttctctccctgagattcagcttgaggactctgatgttaataaaacagttgtccctgttgtctgggctgcggcatatggagatgaaagaagagtttcccgaaggtatgaagattgtcaagcatcaggaaatactttggactcagcattagaaagcagaagtagtacagcagcacagtaccttcaaatttgtgacggcattaatacaaataaagtacttaaacaaaaagccaaaaagaggagaaggggagaaaccaggcagtggcaaacagctgttataataggtcctgatggacagcccctcacagtgtacccttgccatatttgcacaaaaaagtttaaatccaggggattcttaaaaagacacatgaagaatcatcctgatcatttaatgagaaaaaaatatcagtgtacagattgtgactttacaactaacaagaaagtgagtttccataaccacttagaaagccataagctcataaacaaagtcgacaaaacccatgaatttacagaatacacacgaagatacagagaggctagtccactgagttccaataaacttattttaagagacaaggagccgaagatgcacaagtgcaaatactgtgactatgaaactgcagaacaaggactgttaaacaggcatttgttggccgttcacagcaagaattttcctcatgtttgtgttgagtgtgggaagggttttcgacatccttctgaactcaagaaacatatgagaacccatactggtgagaagccatatcagtgtcagtattgtattttcaggtgtgcagatcaatcaaatctgaaaactcacattaagtctaaacatggtaacaatttgccatataaatgtgagcattgtccccaagcatttggtgatgagagggagcttcaacgccatctggatttgtttcaaggacataagacacaccagtgtcctcattgtgaccataagagcaccaattcaagtgaccttaagcggcacatcatatctgtccatactaaggattttcctcacaaatgtgaggtctgtgataaaggttttcatcgtccttctgagctcaaaaagcatagtgatatccataagggtaggaagattcatcagtgcaggcactgtgactttaaaacatccgatccatttattcttagtggccatatcctttcagttcatactaaagatcagccattgaaatgtaaaaggtgcaagagaggattcagacaacaaaatgagctaaaaaaacatatgaagacccatactggaaggaagatttaccaatgtgagtattgtgaatacagcactacagatgcatctggctttaaacgacatgtgatatcaatacatacaaaagactatccacacaggtgtgaattctgcaagaagggattccgaagaccatcagaaaaaaatcagcatattatgaggcaccacaaagaggctcttatgtaataagatcaatataaagaaagaagctatttaggagatatgatatgctacttgggagaaaactctcactaactgtctcaccgggtttcaaagcttgatactaaaccatgactttacattctttgtattaaagatcttaaaatatttgaattcacaggggatcccatagccctttgaaaattacttaaagaatttaagaagcactatagaatggttacagaaaaacttcttaagtatctgtgtaatagtattatatgcatacttaaactacagaggggaaaagcaaagacaaatactttatttggctgattatgttagatacaaatgtttctgagaagagaatacataattgagtttagtgatgctttgctatagcaagcaaacccacttttatgcaattttagaaatggggcagggaaacaaaatgtggtcattcatcagtcacttagtcattgagccttttatattgtacctggaaattaaattccagcaatgacaaaagtttgtgtattcattaaaagaaaactaactggaaaacaggttagattaattcagtactattaaaaaagaattcagagctgttaatattttatca

SEQ ID NO: 450228 - DNA, 392 bp, Homo sapiens
cttggcactttgaaatttattttggaatttattttttttctaagaaatatttctatatattcttcttattaatttaggtggttattccatgatacttctctattttaatgcgtgttttaatttttaaggtggaacagaaattgtcacagagagtgagtacaccagtggacattcagtagctggagtgcttgaccagagccgaatgcagcgggagaagatggtttacatggcagttaaagattcttctcaagaagaagatgatatcagtaagaaaataagggcactgtagtgacttatcagtagccatcatgcattatttttaaaaaatctcagagatacaagcactgtataggaacaaagttcaataaaataagcctgatcctttgaccctt

SEQ ID NO: 450229 - DNA, 601 bp, Homo sapiens
gatattgcattttggcatgtgagtggttcatagtagagtgctgctcattactttttagtgagctactttgccataaattgcttttattatgtattttttatattacaggatttcattcaactagtattgttttcacatagtgaatgccaactagttttggcacctttgttataaaatcctttaaaacagtctgaccaaatgtcacaactttctcttttctttatctagctgttataataggtcctgatggacagcccctcacagtgtacccttgccatatttgcacaaaaaagtttaaatccaggggattcttaaaaagacacatgaagaatcatcctgatcatttaatgagaaaaaaatatcagtgtacagattgtgactttacaactaacaagaaagtgagtttccataaccacttagaaagccataagctcataaacaaagtcgacaaaacccatgaatttacagaatacacacgaagatacagagaggctagtccactgagttccaataaacttattttaagagacaaggagccgaagatgcacaagtgcaaatactgtgactatgaaactgcagaacaaggactgttaaacaggca

SEQ ID NO: 450230 - DNA, 648 bp, Homo sapiens
cgtgtcacctttctgaaactttcattaaggttgcagctttatctgttgtgcaatatggtacaatttattaagcagtcctacgtgaaaaggagataagtgccttataaaattgacaggtttttgttgatttacttagaatcttatgtttgaagagaaaatgcacatatatgtgtctaagaaatacattgagtgacagcatctgactttatgttccatactatcaaatggtcgtaaatataggataagtcatttgaaatgaaatagattgagcccttgctttcaaaaccaccttgaagctagcataattttattaatcactaataaaaagtcagttgtacaattacaagtaaatgaaatgctgagataaataatttgctaaatgtttgtatgtgatcgatcttatttttaccatatttaggaagcagtcatgtttcatgagtcctcaaaactgagacaagagaatgtagtagagtgaggccagaagtccttactggttcaaagaactccggggaaactgggatagaacattttacattataagtagaaccctgggagccagaggtgaatacaagtttatctgcagagctccgctgcagggctgatctgggtctggaagaaatggatgagagccagtggatgaaattcact

SEQ ID NO: 450231 - DNA, 3958 bp, Homo sapiens
tctcaattatgaaatcttgcagagaagttatttttctttctcaaaatccaggtgatgacaatattccttactccagatctggcattttttcatcatcactgtcttgtgaatcatcatctgctccatctacttctggtaaatctacatcctcatcaccacccatgttgttcatcatctcagagaaacgatcaaaattagacatgtcttcatctgaatcatcttcccagtctttccaattattgaagtcgacactaagccaattaagctttgccctttcttttgttaccttggccatgactggaagattctccttttcgtaaacaacataaaattgatctgtccgttcttttatgcttggaatcatttggatcaatacagtgaaaaagatcaatttcatttaaatgcttaaaattatcatcttcctccgagacaactgaatgtaagttttggatttttcaaaatttacattaactccttactgtcttcaacacaaaattcaatgaagacattagtcccttcgatcgtaccactttgcagaagcaggctgcattgtgaacggggcaggggacggggccatccagagcgcggtcacagtccgactggcggcacggaggcggcggcggcggcggcggcggcagcggcggcggcagcggcggcggcagctgtagctgcagcagcaggtaaagagagcgttttcccaaagaaaataacatagcacagaaggaaaaataaaaagaaattgctgcagattttactttatgtgagaaaatctacaatttcttcgagacactcatataaaggaagcagtcatgtttcatgagtcctcaaaactgagacaagagaatgtagtagagtgaggccagaagtccttactggttcaaagaactccggggaaactgggatagaacattttacattataagtagaaccctgggagccagaggtgaatacaagtttatctgcagagctccgctgcagggctgatctgggtctggaagaaatggatgagagccagtggatgaaattcactaatactagacatctgagtcctctaatattggtgaatgaactttgctaagtatggattcaggcggtggaagtcttggattgcacacgccagactctagaatggcccataccatgattatgcaagattttgtggctggaatggctggtactgcacatatcgatggagaccatattgttgtttcagttcctgaagctgttttagtttctgatgttgtcacagatgatgggataactcttgatcatggccttgcagctgaagttgtccatggacctgatatcatcacagagactgatgtagtaacagaaggtgtgattgttcctgaagcggtacttgaagctgatgttgccattgaagaggatttagaggaagatgatggtgatcacatcttgacttctgaactaattacagaaaccgttagggtaccagagcaggttttcgtggctgaccttgttactggtcctaatggacacttagaacatgtggtccaagattgtgtttcaggagtcgactctcccacaatggtatcagaggaggttcttgtaactaattcagatacagaaactgtgattcaagcagctggaggtgttcctggttctacagttactataaaaaccgaagatgatgatgatgatgatgtcaagagcacttctgaagactacttaatgatatctttggatgatgttggagaaaaattagagcatatggggaatacaccattaaaaattggcagtgatggttcacaagaagatgctaaagaagatgggtttggttctgaagttataaaagtgtatatatttaaagcggaggctgaagatgatgttgaaataggtggaacagaaattgtcacagagagtgagtacaccagtggacattcagtagctggagtgcttgaccagagccgaatgcagcgggagaagatggtttacatggcagttaaagattcttctcaagaagaagatgatatcagagatgaaagaagagtttcccgaaggtatgaagattgtcaagcatcaggaaatactttggactcagcattagaaagcagaagtagtacagcagcacagtaccttcaaatttgtgacggcattaatacaaataaagtacttaaacaaaaagccaaaaagaggagaaggggagaaaccaggcagtggcaaacagctgttataataggtcctgatggacagcccctcacagtgtacccttgccatatttgcacaaaaaagtttaaatccaggggattcttaaaaagacacatgaagaatcatcctgatcatttaatgagaaaaaaatatcagtgtacagattgtgactttacaactaacaagaaagtgagtttccataaccacttagaaagccataagctcataaacaaagtcgacaaaacccatgaatttacagaatacacacgaagatacagagaggctagtccactgagttccaataaacttattttaagagacaaggagccgaagatgcacaagtgcaaatactgtgactatgaaactgcagaacaaggactgttaaacaggcatttgttggccgttcacagcaagaattttcctcatgtttgtgttgagtgtgggaagggttttcgacatccttctgaactcaagaaacatatgagaacccatactggtgagaagccatatcagtgtcagtattgtattttcaggtgtgcagatcaatcaaatctgaaaactcacattaagtctaaacatggtaacaatttgccatataaatgtgagcattgtccccaagcatttggtgatgagagggagcttcaacgccatctggatttgtttcaaggacataagacacaccagtgtcctcattgtgaccataagagcaccaattcaagtgaccttaagcggcacatcatatctgtccatactaaggattttcctcacaaatgtgaggtctgtgataaaggttttcatcgtccttctgagctcaaaaagcatagtgatatccataagggtaggaagattcatcagtgcaggcactgtgactttaaaacatccgatccatttattcttagtggccatatcctttcagttcatactaaagatcagccattgaaatgtaaaaggtgcaagagaggattcagacaacaaaatgagctaaaaaaacatatgaagacccatactggaaggaagatttaccaatgtgagtattgtgaatacagcactacagatgcatctggctttaaacgacatgtgatatcaatacatacaaaagactatccacacaggtgtgaattctgcaagaagggattccgaagaccatcagaaaaaaatcagcatattatgaggcaccacaaagaggctcttatgtaataagatcaatataaagaaagaagctatttaggagatatgatatgctacttgggagaaaactctcactaactgtctcaccgggtttcaaagcttgatactaaaccatgactttacattctttgtattaaagatcttaaaatatttgaattcacaggggatcccatagccctttgaaaattacttaaagaatttaagaagcactatagaatggttacagaaaaacttcttaagtatctgtgtaatagtattatatgcatacttaaactacagaggggaaaagcaaagacaaatactttatttggctgattatgttagatacaaatgtttctgagaagagaatacataattgagtttagtgatgctttgctatagcaagcaaacccacttttatgcaattttagaaatggggcagggaaacaaaatgtggtcattcatcagtcacttagtcattgagccttttatattgtacctggaaattaaattccagcaatgacaaaagtttgtgtattcattaaaagaaaactaactggaaaacaggttagattaattcagtactattaaaaaagaattcagagctgttaatattttatca

SEQ ID NO: 450232 - DNA, 4048 bp, Homo sapiens
tctcaattatgaaatcttgcagagaagttatttttctttctcaaaatccaggtgatgacaatattccttactccagatctggcattttttcatcatcactgtcttgtgaatcatcatctgctccatctacttctggtaaatctacatcctcatcaccacccatgttgttcatcatctcagagaaacgatcaaaattagacatgtcttcatctgaatcatcttcccagtctttccaattattgaagtcgacactaagccaattaagctttgccctttcttttgttaccttggccatgactggaagattctccttttcgtaaacaacataaaattgatctgtccgttcttttatgcttggaatcatttggatcaatacagtgaaaaagatcaatttcatttaaatgcttaaaattatcatcttcctccgagacaactgaatgtaagttttggatttttcaaaatttacattaactccttactgtcttcaacacaaaattcaatgaagacattagtcccttcgatcgtaccactttgcagaagcaggctgcattgtgaacggggcaggggacggggccatccagagcgcggtcacagtccgactggcggcacggaggcggcggcggcggcggcggcggcagcggcggcggcagcggcggcggcagctgtagctgcagcagcaggtaaagagagcgttttcccaaagaaaataacatagcacagaaggaaaaataaaaagaaattgctgcagattttactttatgtgagaaaatctacaatttcttcgagacactcatataaaggaagcagtcatgtttcatgagtcctcaaaactgagacaagagaatgtagtagagtgaggccagaagtccttactggttcaaagaactccggggaaactgggatagaacattttacattataagtagaaccctgggagccagaggtgaatacaagtttatctgcagagctccgctgcagggctgatctgggtctggaagaaatggatgagagccagtggatgaaattcactaatactagacatctgagtcctctaatattggtgaatgaactttgctaagtatggattcaggcggtggaagtcttggattgcacacgccagactctagaatggcccataccatgattatgcaagattttgtggctggaatggctggtactgcacatatcgatggagaccatattgttgtttcagttcctgaagctgttttagtttctgatgttgtcacagatgatgggataactcttgatcatggccttgcagctgaagttgtccatggacctgatatcatcacagagactgatgtagtaacagaaggtgtgattgttcctgaagcggtacttgaagctgatgttgccattgaagaggatttagaggaagatgatggtgatcacatcttgacttctgaactaattacagaaaccgttagggtaccagagcaggttttcgtggctgaccttgttactggtcctaatggacacttagaacatgtggtccaagattgtgtttcaggagtcgactctcccacaatggtatcagaggaggttcttgtaactaattcagatacagaaactgtgattcaagcagctggaggtgttcctggttctacagttactataaaaaccgaagatgatgatgatgatgatgtcaagagcacttctgaagactacttaatgatatctttggatgatgttggagaaaaattagagcatatggggaatacaccattaaaaattggcagtgatggttcacaagaagatgctaaagaagatgggtttggttctgaagttataaaagtgtatatatttaaagcggaggctgaagatgatgttgaaataggtggaacagaaattgtcacagagagtgagtacaccagtggacattcagtagctggagtgcttgaccagagccgaatgcagcgggagaagatggtttacatggcagttaaagattcttctcaagaagaagatgatatcagttgcgctgaaatagcagatgaagtttacatggaagtcattgtaggggaagaggaaggaacttctctccctgagattcagcttgaggactctgatgttaataaaacagttgtccctgttgtctgggctgcggcatatggaaatactttggactcagcattagaaagcagaagtagtacagcagcacagtaccttcaaatttgtgacggcattaatacaaataaagtacttaaacaaaaagccaaaaagaggagaaggggagaaaccaggcagtggcaaacagctgttataataggtcctgatggacagcccctcacagtgtacccttgccatatttgcacaaaaaagtttaaatccaggggattcttaaaaagacacatgaagaatcatcctgatcatttaatgagaaaaaaatatcagtgtacagattgtgactttacaactaacaagaaagtgagtttccataaccacttagaaagccataagctcataaacaaagtcgacaaaacccatgaatttacagaatacacacgaagatacagagaggctagtccactgagttccaataaacttattttaagagacaaggagccgaagatgcacaagtgcaaatactgtgactatgaaactgcagaacaaggactgttaaacaggcatttgttggccgttcacagcaagaattttcctcatgtttgtgttgagtgtgggaagggttttcgacatccttctgaactcaagaaacatatgagaacccatactggtgagaagccatatcagtgtcagtattgtattttcaggtgtgcagatcaatcaaatctgaaaactcacattaagtctaaacatggtaacaatttgccatataaatgtgagcattgtccccaagcatttggtgatgagagggagcttcaacgccatctggatttgtttcaaggacataagacacaccagtgtcctcattgtgaccataagagcaccaattcaagtgaccttaagcggcacatcatatctgtccatactaaggattttcctcacaaatgtgaggtctgtgataaaggttttcatcgtccttctgagctcaaaaagcatagtgatatccataagggtaggaagattcatcagtgcaggcactgtgactttaaaacatccgatccatttattcttagtggccatatcctttcagttcatactaaagatcagccattgaaatgtaaaaggtgcaagagaggattcagacaacaaaatgagctaaaaaaacatatgaagacccatactggaaggaagatttaccaatgtgagtattgtgaatacagcactacagatgcatctggctttaaacgacatgtgatatcaatacatacaaaagactatccacacaggtgtgaattctgcaagaagggattccgaagaccatcagaaaaaaatcagcatattatgaggcaccacaaagaggctcttatgtaataagatcaatataaagaaagaagctatttaggagatatgatatgctacttgggagaaaactctcactaactgtctcaccgggtttcaaagcttgatactaaaccatgactttacattctttgtattaaagatcttaaaatatttgaattcacaggggatcccatagccctttgaaaattacttaaagaatttaagaagcactatagaatggttacagaaaaacttcttaagtatctgtgtaatagtattatatgcatacttaaactacagaggggaaaagcaaagacaaatactttatttggctgattatgttagatacaaatgtttctgagaagagaatacataattgagtttagtgatgctttgctatagcaagcaaacccacttttatgcaattttagaaatggggcagggaaacaaaatgtggtcattcatcagtcacttagtcattgagccttttatattgtacctggaaattaaattccagcaatgacaaaagtttgtgtattcattaaaagaaaactaactggaaaacaggttagattaattcagtactattaaaaaagaattcagagctgttaatattttatca

SEQ ID NO: 450233 - DNA, 421 bp, Homo sapiens
tgcgtctgtcaactgcggtttcgcttgcgtctttcaactgcggttaagaagctgccttgtcagatcaccagctacctggtggcgcacaccctagggcgccggatgctgtatccaggctctgtgtacctgctgcagaaggccctcatgcctgtgctgctgcagggccaggcccgactggtggaagagtgtaatgggcgccgggcaaagctgctggcctgtgatggcaatgagattgacaccatgtttgtggaccggcgggggacagctgagccccagggacagaagctggtaagagggagcagagagcccagaggtggggtgagtgtgaggaaggcagtagaggtctggggaccccaatgctatagcacctccctgaaggaaccactactggggataatctcatgtcctagctccacgctaa

SEQ ID NO: 450234 - DNA, 191 bp, Homo sapiens
cgcctgcaatccatttgaaactaggctgtggaaaaggagcaaaaatcgtccaatgctgctttcacttttgcttccaaatccagctccctgtgtttgttcccatggtcaggggtgggaaattaggttcagagtgagggtgaggaagaggagtttctgtgggggccagggatgtttcaagagagatagtcaac

SEQ ID NO: 450235 - DNA, 3098 bp, Homo sapiens
  misc_feature (76)..(76): n is a, c, g, or t
  misc_feature (756)..(756): n is a, c, g, or t
cttttcctgaattatgtctgtttccctctggtcagccattggagggaggagaggggctgtggatttcttgaaggcntcccactcacctgagggctggggtctaggaggttgtgaaggcagcattgggagccatgcccccatccccacagtgcggggctagcaggagaggaggaggtagatctcattgtacacatccgtcttctggagagaacaacctctcctaccatcccttccttctacaccttctctgcctgtcataggtggctgcaggaggggtccacgttgggagggacaggtgagctggcctttggtgctgacacactcctgactttgccctttctcctgcagggggtgccattcccgcagaatgaggctaatgccatggatgtggtggtccagtttgccatccaccgccctgggcttccagccccaggacatcatcatctacgcctggtccatcggcggcttcactggtaccagcctccctcccatcccccactgtagacacattcatgaccacccagccccacccgggagaggtggggaaatggggtggggtggaggctcaaggaagaagagagaggaagtagaatctctgagtgggcctggaagaagctatcctatttgcatacacttcacctttccttcccctcttgtgcccagtcattaaaaggaaaagcagacccaggtcctgggtggggagatcagggaaagtgaatgtttcctgcccattatcttcagtgcactatctccagngttctatccccatcctctccagatagttccctaaccaagtgaagtaggttaagaaaaaaacaagggataacatagggggaatggggttggcctatagggtcagtgggatgagagcatgggtggtggggagaaaggagcctttctcagttcttactcttcttccctgccctggtaccagccacgtgggcagccatgtcctacccagatgttagtgccatgatcctggatgcctcctttgatgacctggtgcccttggccttgaaggtcatgccagacagctggagtgagtgcagctcccaggcctgcccttcctgggaaggggtgggctggaactgggaactgttctgagatggctcccttttcttgggtggggagtaagtcgccccattgttggaagcaggaggactcctttgtctgggggcctcagttttctttctccgtgaatagtgaggacctttatgttgggcaagggctttgtctctgccatcccttcacctttatcccactctagggggcctggtgaccaggaccgtgaggcagcatctcaatctaaacaacgcggagcagctgtgcaggtgagggccggccagcgtccggcattgaacacctgccccccatacagctctgctgggcgctcaaaccctgaaactagtactaaagtgcaagttggtaaaaggccactggctcacatcctgagtgaccctgccaccacctcaactggcctaacccctcccaggtcccctgggactctggaccacctcaggatctggcaaccaaagggttaaggcctggcacggcaggggtctcccagcagggccagactgaaccatgccccttaaataatcccctctcacccctgagtgaagggctaggtcaagggctgtgctatagcaaggggagggtaagaatgctaccagtgcagggataggggtgggccagttgtcacccgtctccctctgagctctcccttcccactgctctgttctctgaagataccagggtcctgtactgctgatccggagaaccaaggatgagatcatcaccaccacgtgagtgcgtgggaatctcggccctcaggaaccccagagatggccaggaacttgtcccttctacctctgcccaccagaaacctgggtatctagacccttcctcctaacctccagcccctccagggtacattcttctcacccccagggttcctgaggacatcatgtccaaccgaggcaatgacctcctgctgaagctcctgcagcatcggtgagagccagggtgtgtgcgcgctgggggcagtgtacacacacagatactgataccagcacagggaaggagggaggaaggttcagggatggtgaatgaaaaaaaatcagccctgacctgtcctggcacttcctccgtaggtatccccgggtgatggcagaggagggtcttcgagtggtgaggcagtggttggaggcctcctcacagctggaggaaggtgagaagggatccagtgaggcttggggcgggggcccagcaaggtcaggttgctgactggctgtcatctctctccctgaccagcctcaatttatagccgatgggaggtggaagaggactggtgtctgtctgtcctccgctcctaccaggcagaacacgggcccgacttcccctggagcgtgggtaaggagctcctggggcaggagagagggtgggaagggcctaggaaggggatgaatacccagatgtgtggcctattttgagcgcctcctctctgcaggggaggacatgagtgcagatggacggcggcagctggctttgtttctggtgagctaaggagtgggaagtgggaagggttcttgaatggccagggctcacatagggggactggggataccctataagcattggaagtggcagcttttgtagagtgggtggtggatgcggaagtggagggtggggagggagtccagtggctgcccctcccaacagtgctctgtaccccacctgtcccacctcctttcctcaggctcggaagcatctgcacaactttgaggccactcactgcaccccactcccagcccagaacttccagatgccctggcacctctagggaccaactgggactcattatggaagaatggggtgagaggagacatgaggaaagaccctcttatttgtgattctctgtgttcatgttgctgtttatagtttgtggaaagtgggggaccatcccccttctcaccactgttcctcttgcacgtttcccctcattcatgtggctgtacttaaccttctccaacatacatcctgcattacatgaatggattattcctaataattaataaaaaggtattttttctactatc

SEQ ID NO: 450236 - DNA, 2480 bp, Homo sapiens
ctgaaaatgtcgcaactcgcccggaggcggagccggtacgggctgacgtcaagggcacacaacacctcagaggcagggagggcggggccggcagggggacctgctgctggaagagcagcggcccgagccggggccatggcgaagctgctgagctgcgtcctaggcccccggctctacaaaatctaccgggagagggactctgaaagggccccggccagcgtccctgagacgccaacggcagtcactgccccccattccagctcctgggatacgtactatcagccccgtgccctggagaaacatgctgacagcatcctggcactggcttcagtattctggtccatctcttattactcctctcccttcgccttcttctacttgtacaggaaaggttacttgagtttgtccaaagtggtgccgttttctcactatgctgggacattgctgctacttctggcaggtgtggcctgcctccgaggcattggccgctggaccaacccccagtaccggcagttcatcaccatcttggaagcaacacatcggaaccagtcttcagaaaacaagaggcagcttgccaactacaactttgacttccggagctggccagtcgacttccactgggaagaacccagcagccggaaggagtctcgagggggcccttcccgccggggtgtggccctgcttcgcccagagcccctgcaccgggggacagcagacaccctcctcaaccgggttaagaagctgccttgtcagatcaccagctacctggtggcgcacaccctagggcgccggatgctgtatccaggctctgtgtacctgctgcagaaggccctcatgcctgtgctgctgcagggccaggcccgactggtggaagagtgtaatgggcgccgggcaaagctgctggcctgtgatggcaatgagattgacaccatgtttgtggaccggcgggggacagctgagccccagggacagaagctggtgatctgctgtgaggggaatgctgggttttatgaggtgggctgcgtctccacgcccctggaaggtaggacggtgactcagcctccttatctccgccctttgaaagggaatgtccctgcctcccacactgacctgacctcccctggcctctgctttctctgggtgaggttttgagtctctcagctttagggaaaagtccactcgccatttgctttgataaccttacatccctcccctggcctgtgtccctagctattatgcttttcattctgttccattcccccaccacacaccccacacaatcacatgctgctccctgtgctgcctcagaacctctggtgtcatctcctatttctgggaaggcttggagttatttgcatctaagctggggggtacttctgctcttccttcccccagggatggagaaagggctgtgggccacaaggtctcagtccttcctccccctgtgttacagctggatattcagtcctgggctggaatcatccaggctttgctggaagcacgggggtgccattcccgcagaatgaggctaatgccatggatgtggtggtccagtttgccatccaccgccctgggcttccagccccaggacatcatcatctacgcctggtccatcggcggcttcactgccacgtgggcagccatgtcctacccagatgttagtgccatgatcctggatgcctcctttgatgacctggtgcccttggccttgaaggtcatgccagacagctggaggggcctggtgaccaggaccgtgaggcagcatctcaatctaaacaacgcggagcagctgtgcagataccagggtcctgtactgctgatccggagaaccaaggatgagatcatcaccaccacggttcctgaggacatcatgtccaaccgaggcaatgacctcctgctgaagctcctgcagcatcggtatccccgggtgatggcagaggagggtcttcgagtggtgaggcagtggttggaggcctcctcacagctggaggaagcctcaatttatagccgatgggaggtggaagaggactggtgtctgtctgtcctccgctcctaccaggcagaacacgggcccgacttcccctggagcgtgggggaggacatgagtgcagatggacggcggcagctggctttgtttctggctcggaagcatctgcacaactttgaggccactcactgcaccccactcccagcccagaacttccagatgccctggcacctctagggaccaactgggactcattatggaagaatggggtgagaggagacatgaggaaagaccctcttatttgtgattctctgtgttcatgttgctgtttatagtttgtggaaagtgggggaccatcccccttctcaccactgttcctcttgcacgtttcccctcattcatgtggctgtacttaaccttctccaacatacatcctgcattacatgaatggattattcctaataattaataaaaaggtattttttctactatc

SEQ ID NO: 450237 - DNA, 2297 bp, Homo sapiens
ctgaaaatgtcgcaactcgcccggaggcggagccggtacgggctgacgtcaagggcacacaacacctcagaggcagggagggcggggccggcagggggacctgctgctggaagagcagcggcccgagccggggccatggcgaagctgctgagctgcgtcctaggcccccggctctacaaaatctaccgggagagggactctgaaagggccccggccagcgtccctgagacgccaacggcagtcactgccccccattccagctcctgggatacgtactatcagccccgtgccctggagaaacatgctgacagcatcctggcactggcttcagtattctggtccatctcttattactcctctcccttcgccttcttctacttgtacaggaaaggttacttgagtttgtccaaagtggtgccgttttctcactatgctgggacattgctgctacttctggcaggtgtggcctgcctccgaggcattggccgctggaccaacccccagtaccggcagttcatcaccatcttggaagcaacacatcggaaccagtcttcagaaaacaagaggcagcttgccaactacaactttgacttccggagctggccagtcgacttccactgggaagaacccagcagccggaaggagtctcgagggggcccttcccgccggggtgtggccctgcttcgcccagagcccctgcaccgggggacagcagacaccctcctcaaccgggttaagaagctgccttgtcagatcaccagctacctggtggcgcacaccctagggcgccggatgctgtatccaggctctgtgtacctgctgcagaaggccctcatgcctgtgctgctgcagggccaggcccgactggtggaagagtgtaatgggcgccgggcaaagctgctggcctgtgatggcaatgagattgacaccatgtttgtggaccggcgggggacagctgagccccagggacagaagctggtgatctgctgtgaggggaatgctgggttttatgaggtgggctgcgtctccacgcccctggaagctggatattcagtcctgggctggaatcatccaggctttgctggaagcacgggggtgccattcccgcagaatgaggctaatgccatggatgtggtggtccagtttgccatccaccgccctgggcttccagccccaggacatcatcatctacgcctggtccatcggcggcttcactgccacgtgggcagccatgtcctacccagatgttagtgccatgatcctggatgcctcctttgatgacctggtgcccttggccttgaaggtcatgccagacagctggagtgagtgcagctcccaggcctgcccttcctgggaaggggtgggctggaactgggaactgttctgagatggctcccttttcttgggtggggagtaagtcgccccattgttggaagcaggaggactcctttgtctgggggcctcagttttctttctccgtgaatagtgaggacctttatgttgggcaagggctttgtctctgccatcccttcacctttatcccactctagggggcctggtgaccaggaccgtgaggcagcatctcaatctaaacaacgcggagcagctgtgcagataccagggtcctgtactgctgatccggagaaccaaggatgagatcatcaccaccacggttcctgaggacatcatgtccaaccgaggcaatgacctcctgctgaagctcctgcagcatcggtatccccgggtgatggcagaggagggtcttcgagtggtgaggcagtggttggaggcctcctcacagctggaggaagcctcaatttatagccgatgggaggtggaagaggactggtgtctgtctgtcctccgctcctaccaggcagaacacgggcccgacttcccctggagcgtgggggaggacatgagtgcagatggacggcggcagctggctttgtttctggctcggaagcatctgcacaactttgaggccactcactgcaccccactcccagcccagaacttccagatgccctggcacctctagggaccaactgggactcattatggaagaatggggtgagaggagacatgaggaaagaccctcttatttgtgattctctgtgttcatgttgctgtttatagtttgtggaaagtgggggaccatcccccttctcaccactgttcctcttgcacgtttcccctcattcatgtggctgtacttaaccttctccaacatacatcctgcattacatgaatggattattcctaataattaataaaaaggtattttttctactatc

SEQ ID NO: 450238 - DNA, 2214 bp, Homo sapiens
ctgaaaatgtcgcaactcgcccggaggcggagccggtacgggctgacgtcaagggcacacaacacctcagaggcagggagggcggggccggcagggggacctgctgctggaagagcagcggcccgagccggggccatggcgaagctgctgagctgcgtcctaggcccccggctctacaaaatctaccgggagagggactctgaaagggccccggccagcgtccctgagacgccaacggcagtcactgccccccattccagctcctgggatacgtactatcagccccgtgccctggagaaacatgctgacagcatcctggcactggcttcagtattctggtccatctcttattactcctctcccttcgccttcttctacttgtacaggaaaggttacttgagtttgtccaaagtggtgccgttttctcactatgctgggacattgctgctacttctggcaggtgtggcctgcctccgaggcattggccgctggaccaacccccagtaccggcagttcatcaccatcttggaagcaacacatcggaaccagtcttcagaaaacaagaggcagcttgccaactacaactttgacttccggagctggccagtcgacttccactgggaagaacccagcagccggaaggagtctcgagggggcccttcccgccggggtgtggccctgcttcgcccagagcccctgcaccgggggacagcagacaccctcctcaaccgggttaagaagctgccttgtcagatcaccagctacctggtggcgcacaccctagggcgccggatgctgtatccaggctctgtgtacctgctgcagaaggccctcatgcctgtgctgctgcagggccaggcccgactggtggaagagtgtaatgggcgccgggcaaagctgctggcctgtgatggcaatgagattgacaccatgtttgtggaccggcgggggacagctgagccccagggacagaagctggtgatctgctgtgaggggaatgctgggttttatgaggtgggctgcgtctccacgcccctggaagctggatattcagtcctgggctggaatcatccaggctttgctggaagcacgggggtgccattcccgcagaatgaggctaatgccatggatgtggtggtccagtttgccatccaccgccctgggcttccagccccaggacatcatcatctacgcctggtccatcggcggcttcactgccacgtgggcagccatgtcctacccagatgttagtgccatgatcctggatgcctcctttgatgacctggtgcccttggccttgaaggtcatgccagacagctggaggggcctggtgaccaggaccgtgaggcagcatctcaatctaaacaacgcggagcagctgtgcagataccagggtcctgtactgctgatccggagaaccaaggatgagatcatcaccaccacgtgagtgcgtgggaatctcggccctcaggaaccccagagatggccaggaacttgtcccttctacctctgcccaccagaaacctgggtatctagacccttcctcctaacctccagcccctccagggtacattcttctcacccccagggttcctgaggacatcatgtccaaccgaggcaatgacctcctgctgaagctcctgcagcatcggtatccccgggtgatggcagaggagggtcttcgagtggtgaggcagtggttggaggcctcctcacagctggaggaagcctcaatttatagccgatgggaggtggaagaggactggtgtctgtctgtcctccgctcctaccaggcagaacacgggcccgacttcccctggagcgtgggggaggacatgagtgcagatggacggcggcagctggctttgtttctggctcggaagcatctgcacaactttgaggccactcactgcaccccactcccagcccagaacttccagatgccctggcacctctagggaccaactgggactcattatggaagaatggggtgagaggagacatgaggaaagaccctcttatttgtgattctctgtgttcatgttgctgtttatagtttgtggaaagtgggggaccatcccccttctcaccactgttcctcttgcacgtttcccctcattcatgtggctgtacttaaccttctccaacatacatcctgcattacatgaatggattattcctaataattaataaaaaggtattttttctactatc

SEQ ID NO: 450239 - DNA, 2354 bp, Homo sapiens
ctgaaaatgtcgcaactcgcccggaggcggagccggtacgggctgacgtcaagggcacacaacacctcagaggcagggagggcggggccggcagggggacctgctgctggaagagcagcggcccgagccggggccatggcgaagctgctgagctgcgtcctaggcccccggctctacaaaatctaccgggagagggactctgaaagggccccggccagcgtccctgagacgccaacggcagtcactgccccccattccagctcctgggatacgtactatcagccccgtgccctggagaaacatgctgacagcatcctggcactggcttcagtattctggtccatctcttattactcctctcccttcgccttcttctacttgtacaggaaaggttacttgagtttgtccaaagtggtgccgttttctcactatgctgggacattgctgctacttctggcaggtgtggcctgcctccgaggcattggccgctggaccaacccccagtaccggcagttcatcaccatcttggaagcaacacatcggaaccagtcttcagaaaacaagaggcagcttgccaactacaactttgacttccggagctggccagtcgacttccactgggaagaacccagcagccggaaggagtctcgagggggcccttcccgccggggtgtggccctgcttcgcccagagcccctgcaccgggggacagcagacaccctcctcaaccgggttaagaagctgccttgtcagatcaccagctacctggtggcgcacaccctagggcgccggatgctgtatccaggctctgtgtacctgctgcagaaggccctcatgcctgtgctgctgcagggccaggcccgactggtggaagagtgtaatgggcgccgggcaaagctgctggcctgtgatggcaatgagattgacaccatgtttgtggaccggcgggggacagctgagccccagggacagaagctggtgatctgctgtgaggggaatgctgggttttatgaggtgggctgcgtctccacgcccctggaagctggatattcagtcctgggctggaatcatccaggctttgctggaagcacgggggtgccattcccgcagaatgaggctaatgccatggatgtggtggtccagtttgccatccaccgccctgggcttccagccccaggacatcatcatctacgcctggtccatcggcggcttcactgccacgtgggcagccatgtcctacccagatgttagtgccatgatcctggatgcctcctttgatgacctggtgcccttggccttgaaggtcatgccagacagctggaggggcctggtgaccaggaccgtgaggcagcatctcaatctaaacaacgcggagcagctgtgcagataccagggtcctgtactgctgatccggagaaccaaggatgagatcatcaccaccacgtgagtgcgtgggaatctcggccctcaggaaccccagagatggccaggaacttgtcccttctacctctgcccaccagaaacctgggtatctagacccttcctcctaacctccagcccctccagggtacattcttctcacccccagggttcctgaggacatcatgtccaaccgaggcaatgacctcctgctgaagctcctgcagcatcggtgagagccagggtgtgtgcgcgctgggggcagtgtacacacacagatactgataccagcacagggaaggagggaggaaggttcagggatggtgaatgaaaaaaaatcagccctgacctgtcctggcacttcctccgtaggtatccccgggtgatggcagaggagggtcttcgagtggtgaggcagtggttggaggcctcctcacagctggaggaagcctcaatttatagccgatgggaggtggaagaggactggtgtctgtctgtcctccgctcctaccaggcagaacacgggcccgacttcccctggagcgtgggggaggacatgagtgcagatggacggcggcagctggctttgtttctggctcggaagcatctgcacaactttgaggccactcactgcaccccactcccagcccagaacttccagatgccctggcacctctagggaccaactgggactcattatggaagaatggggtgagaggagacatgaggaaagaccctcttatttgtgattctctgtgttcatgttgctgtttatagtttgtggaaagtgggggaccatcccccttctcaccactgttcctcttgcacgtttcccctcattcatgtggctgtacttaaccttctccaacatacatcctgcattacatgaatggattattcctaataattaataaaaaggtattttttctactatc

SEQ ID NO: 450240 - DNA, 2167 bp, Homo sapiens
ccgcctcctttctttttcgctctttaccgctttctcattccgactgccactctttgttctttcctctccgcgtccccccgaccctgtgtgtcgtggttcgtgccggtcccagttgagtcttgagtcccgggaagagaccctgcgcggactggggagccgttgaattttgctgtcagactcccagtttcctcttcttcagtgcctcttcatgcctcccccggctctgtttttatcttccctttaccctcgccttgaatttcagaatgacttttacagatcctgtatccgtcggtcctcccctcaacccccgcccaacctagcctggagacccgagtcattgtattctggagagctggcgggtggtggatacgtactatcagccccgtgccctggagaaacatgctgacagcatcctggcactggcttcagtattctggtccatctcttattactcctctcccttcgccttcttctacttgtacaggaaaggttacttgagtttgtccaaagtggtgccgttttctcactatgctgggacattgctgctacttctggcaggtgtggcctgcctccgaggcattggccgctggaccaacccccagtaccggcagttcatcaccatcttggaagcaacacatcggaaccagtcttcagaaaacaagaggcagcttgccaactacaactttgacttccggagctggccagtcgacttccactgggaagaacccagcagccggaaggagtctcgagggggcccttcccgccggggtgtggccctgcttcgcccagagcccctgcaccgggggacagcagacaccctcctcaaccgggttaagaagctgccttgtcagatcaccagctacctggtggcgcacaccctagggcgccggatgctgtatccaggctctgtgtacctgctgcagaaggccctcatgcctgtgctgctgcagggccaggcccgactggtggaagagtgtaatgggcgccgggcaaagctgctggcctgtgatggcaatgagattgacaccatgtttgtggaccggcgggggacagctgagccccagggacagaagctggtgatctgctgtgaggggaatgctgggttttatgaggtgggctgcgtctccacgcccctggaagctggatattcagtcctgggctggaatcatccaggctttgctggaagcacgggggtgccattcccgcagaatgaggctaatgccatggatgtggtggtccagtttgccatccaccgccctgggcttccagccccaggacatcatcatctacgcctggtccatcggcggcttcactgccacgtgggcagccatgtcctacccagatgttagtgccatgatcctggatgcctcctttgatgacctggtgcccttggccttgaaggtcatgccagacagctggaggggcctggtgaccaggaccgtgaggcagcatctcaatctaaacaacgcggagcagctgtgcagataccagggtcctgtactgctgatccggagaaccaaggatgagatcatcaccaccacggttcctgaggacatcatgtccaaccgaggcaatgacctcctgctgaagctcctgcagcatcggtatccccgggtgatggcagaggagggtcttcgagtggtgaggcagtggttggaggcctcctcacagctggaggaagcctcaatttatagccgatgggaggtggaagaggactggtgtctgtctgtcctccgctcctaccaggcagaacacgggcccgacttcccctggagcgtgggggaggacatgagtgcagatggacggcggcagctggctttgtttctggctcggaagcatctgcacaactttgaggccactcactgcaccccactcccagcccagaacttccagatgccctggcacctctagggaccaactgggactcattatggaagaatggggtgagaggagacatgaggaaagaccctcttatttgtgattctctgtgttcatgttgctgtttatagtttgtggaaagtgggggaccatcccccttctcaccactgttcctcttgcacgtttcccctcattcatgtggctgtacttaaccttctccaacatacatcctgcattacatgaatggattattcctaataattaataaaaaggtattttttctactatc

SEQ ID NO: 450241 - DNA, 2002 bp, Homo sapiens
ctgaaaatgtcgcaactcgcccggaggcggagccggtacgggctgacgtcaagggcacacaacacctcagaggcagggagggcggggccggcagggggacctgctgctggaagagcagcggcccgagccggggccatggcgaagctgctgagctgcgtcctaggcccccggctctacaaaatctaccgggagagggactctgaaagggccccggccagcgtccctgagacgccaacggcagtcactgccccccattccagctcctgggatacgtactatcagccccgtgccctggagaaacatgctgacagcatcctggcactggttacttgagtttgtccaaagtggtgccgttttctcactatgctgggacattgctgctacttctggcaggtgtggcctgcctccgaggcattggccgctggaccaacccccagtaccggcagttcatcaccatcttggaagcaacacatcggaaccagtcttcagaaaacaagaggcagcttgccaactacaactttgacttccggagctggccagtcgacttccactgggaagaacccagcagccggaaggagtctcgagggggcccttcccgccggggtgtggccctgcttcgcccagagcccctgcaccgggggacagcagacaccctcctcaaccgggttaagaagctgccttgtcagatcaccagctacctggtggcgcacaccctagggcgccggatgctgtatccaggctctgtgtacctgctgcagaaggccctcatgcctgtgctgctgcagggccaggcccgactggtggaagagtgtaatgggcgccgggcaaagctgctggcctgtgatggcaatgagattgacaccatgtttgtggaccggcgggggacagctgagccccagggacagaagctggtgatctgctgtgaggggaatgctgggttttatgaggtgggctgcgtctccacgcccctggaagctggatattcagtcctgggctggaatcatccaggctttgctggaagcacgggggtgccattcccgcagaatgaggctaatgccatggatgtggtggtccagtttgccatccaccgccctgggcttccagccccaggacatcatcatctacgcctggtccatcggcggcttcactgccacgtgggcagccatgtcctacccagatgttagtgccatgatcctggatgcctcctttgatgacctggtgcccttggccttgaaggtcatgccagacagctggaggggcctggtgaccaggaccgtgaggcagcatctcaatctaaacaacgcggagcagctgtgcagataccagggtcctgtactgctgatccggagaaccaaggatgagatcatcaccaccacggttcctgaggacatcatgtccaaccgaggcaatgacctcctgctgaagctcctgcagcatcggtatccccgggtgatggcagaggagggtcttcgagtggtgaggcagtggttggaggcctcctcacagctggaggaagcctcaatttatagccgatgggaggtggaagaggactggtgtctgtctgtcctccgctcctaccaggcagaacacgggcccgacttcccctggagcgtgggggaggacatgagtgcagatggacggcggcagctggctttgtttctggctcggaagcatctgcacaactttgaggccactcactgcaccccactcccagcccagaacttccagatgccctggcacctctagggaccaactgggactcattatggaagaatggggtgagaggagacatgaggaaagaccctcttatttgtgattctctgtgttcatgttgctgtttatagtttgtggaaagtgggggaccatcccccttctcaccactgttcctcttgcacgtttcccctcattcatgtggctgtacttaaccttctccaacatacatcctgcattacatgaatggattattcctaataattaataaaaaggtattttttctactatc

SEQ ID NO: 450242 - DNA, 2661 bp, Homo sapiens
ctgaaaatgtcgcaactcgcccggaggcggagccggtacgggctgacgtcaagggcacacaacacctcagaggcagggagggcggggccggcagggggacctgctgctggaagagcagcggcccgagccggggccatggcgaagctgctgagctgcgtcctaggcccccggctctacaaaatctaccgggagagggactctgaaagggccccggccagcgtccctgagacgccaacggcagtcactgccccccattccagctcctgggatacgtactatcagccccgtgccctggagaaacatgctgacagcatcctggcactggcttcagtattctggtccatctcttattactcctctcccttcgccttcttctacttgtacaggaaaggttacttgagtttgtccaaagtggtgccgttttctcactatgctgggacattgctgctacttctggcaggtgtggcctgcctccgaggcattggccgctggaccaacccccagtaccggcagttcatcaccatcttggaagcaacacatcggaaccagtcttcagaaaacaagaggcagcttgccaactacaactttgacttccggagctggccagtcgacttccactgggaagaacccagcagccggaaggagtctcgagggggcccttcccgccggggtgtggccctgcttcgcccagagcccctgcaccgggggacagcagacaccctcctcaaccgggttaagaagctgccttgtcagatcaccagctacctggtggcgcacaccctagggcgccggatgctgtatccaggctctgtgtacctgctgcagaaggccctcatgcctgtgctgctgcagggccaggcccgactggtggaagagtgtaatgggcgccgggcaaagctgctggcctgtgatggcaatgagattgacaccatgtttgtggaccggcgggggacagctgagccccagggacagaagctggtgatctgctgtgaggggaatgctgggttttatgaggtgggctgcgtctccacgcccctggaagctggatattcagtcctgggctggaatcatccaggctttgctggaagcacgggggtgccattcccgcagaatgaggctaatgccatggatgtggtggtccagtttgccatccaccgccctgggcttccagccccaggacatcatcatctacgcctggtccatcggcggcttcactgccacgtgggcagccatgtcctacccagatgttagtgccatgatcctggatgcctcctttgatgacctggtgcccttggccttgaaggtcatgccagacagctggaggggcctggtgaccaggaccgtgaggcagcatctcaatctaaacaacgcggagcagctgtgcagataccagggtcctgtactgctgatccggagaaccaaggatgagatcatcaccaccacggttcctgaggacatcatgtccaaccgaggcaatgacctcctgctgaagctcctgcagcatcggtatccccgggtgatggcagaggagggtcttcgagtggtgaggcagtggttggaggcctcctcacagctggaggaagcctcaatttatagccgatgggaggtggaagaggactggtgtctgtctgtcctccgctcctaccaggcagaacacgggcccgacttcccctggagcgtgggggaggacatgagtgcagatggacggcggcagctggctttgtttctggctcggaagcatctgcacaactttgaggccactcactgcaccccactcccagcccagaacttccagatgccctggcacctctagggaccaactgggactcattatggaagaatggggtgagaggagacatgaggaaagaccctcttatttgtgattctctgtgttcatgttgctgtttatagtttgtggaaagtgggggaccatcccccttctcaccactgttcctcttgcacgtttcccctcattcatgtggctgtacttaaccttctccaacatacatcctgcattacatgaatggattattcctaataattaataaaaaggtattttttctactatcaaaaaaaaaaaaaaaaaaaaaaaaaaaaaaaaaaaaaaaaaaaaaaaaaaaaacgaaacaaaaaaaaaaaaaaaaaaaaaagagagggccgcgagacgcgacaaagaataatatcctgggggaggaagcacggaaaatagatgagagcccacctgcattgttgtagaacagagcgggcgcccacattgagaaggaggttatcataagcagcgcgcgcgcgcccggttacaacaccgcggcggagtgaaaacactaaccgccattacgagcagttcacttcttggcgaaggcacccccccccatcttctgtgggggggcgaccaacaaattatgaggcgagcccacccaatacacgaaggtatatttataacctccccatgggcaggaatatacatactactaagacagcatatcactagtgtcaacacccaccaacccatattatttgtccgccaccaacaaaaaaattattcgccacacacagcttcatataatcagccgcaaacataatttcacccaccgacgacgaaaaaaaacacagaacgtcatcatagatcccaacaacacacacactcgatctcgcttctgtggc

SEQ ID NO: 450243 - DNA, 2280 bp, Homo sapiens
  misc_feature (1250)..(1250): n is a, c, g, or t
aagataacagacccgaaaacgagaaaggaaaaacatctccatagtccccttcctgaaagagatccagctggtaatcttccaaggaaaagacatggctgggtggtcgagcaggtcagcctctgaggagtatttgtaatccctttgcttctcctcttatggaccctgtggaatgagaagcttccattccccttggagaaaacagaaacctgccctttcctcttccctgcaaagctcttcatgggctgccctccctgcccaaagggagtttttcagtcccaacttggccccccagcccttccttcctgcctccttcctaggtgatctgctgtgaggggaatgctgggttttatgaggtgggctgcgtctccacgcccctggaaggtaggacggtgactcagcctccttatctccgccctttgaaagggaatgtccctgcctcccacactgacctgacctcccctggcctctgctttctctgggtgaggttttgagtctctcagctttagggaaaagtccactcgccatttgctttgataaccttacatccctcccctggcctgtgtccctagctattatgcttttcattctgttccattcccccaccacacaccccacacaatcacatgctgctccctgtgctgcctcagaacctctggtgtcatctcctatttctgggaaggcttggagttatttgcatctaagctggggggtacttctgctcttccttcccccagggatggagaaagggctgtgggccacaaggtctcagtccttcctccccctgtgttacagctggatattcagtcctgggctggaatcatccaggctttgctggaagcacgggggtgccattcccgcagaatgaggctaatgccatggatgtggtggtccagtttgccatccaccgccctgggcttccagccccaggacatcatcatctacgcctggtccatcggcggcttcactggtaccagcctccctcccatcccccactgtagacacattcatgaccacccagccccacccgggagaggtggggaaatggggtggggtggaggctcaaggaagaagagagaggaagtagaatctctgagtgggcctggaagaagctatcctatttgcatacacttcacctttccttcccctcttgtgcccagtcattaaaaggaaaagcagacccaggtcctgggtggggagatcagggaaagtgaatgtttcctgcccattatcttcagtgcactatctccagngttctatccccatcctctccagatagttccctaaccaagtgaagtaggttaagaaaaaaacaagggataacatagggggaatggggttggcctatagggtcagtgggatgagagcatgggtggtggggagaaaggagcctttctcagttcttactcttcttccctgccctggtaccagccacgtgggcagccatgtcctacccagatgttagtgccatgatcctggatgcctcctttgatgacctggtgcccttggccttgaaggtcatgccagacagctggaggggcctggtgaccaggaccgtgaggcagcatctcaatctaaacaacgcggagcagctgtgcagataccagggtcctgtactgctgatccggagaaccaaggatgagatcatcaccaccacggttcctgaggacatcatgtccaaccgaggcaatgacctcctgctgaagctcctgcagcatcggtatccccgggtgatggcagaggagggtcttcgagtggtgaggcagtggttggaggcctcctcacagctggaggaagcctcaatttatagccgatgggaggtggaagaggactggtgtctgtctgtcctccgctcctaccaggcagaacacgggcccgacttcccctggagcgtgggggaggacatgagtgcagatggacggcggcagctggctttgtttctggctcggaagcatctgcacaactttgaggccactcactgcaccccactcccagcccagaacttccagatgccctggcacctctagggaccaactgggactcattatggaagaatggggtgagaggagacatgaggaaagaccctcttatttgtgattctctgtgttcatgttgctgtttatagtttgtggaaagtgggggaccatcccccttctcaccactgttcctcttgcacgtttcccctcattcatgtggctgtacttaaccttctccaacatacatcctgcattacatgaatggattattcctaataattaataaaaaggtattttttctactatc

SEQ ID NO: 450244 - DNA, 1704 bp, Homo sapiens
  misc_feature (1656)..(1656): n is a, c, g, or t
  misc_feature (1666)..(1666): n is a, c, g, or t
ctgaaaatgtcgcaactcgcccggaggcggagccggtacgggctgacgtcaagggcacacaacacctcagaggcagggagggcggggccggcagggggacctgctgctggaagagcagcggcccgagccggggccatggcgaagctgctgagctgcgtcctaggcccccggctctacaaaatctaccgggagagggactctgaaagggccccggccagcgtccctgagacgccaacggcagtcactgccccccattccagctcctgggatacgtactatcagccccgtgccctggagaaacatgctgacagcatcctggcactggcttcagtattctggtccatctcttattactcctctcccttcgccttcttctacttgtacaggaaaggttacttgagtttgtccaaagtggtgccgttttctcactatgctgggacattgctgctacttctggcaggtgtggcctgcctccgaggcattggccgctggaccaacccccagtaccggcagttcatcaccatcttggaagcaacacatcggaaccagtcttcagaaaacaagaggcagcttgccaactacaactttgacttccggagctggccagtcgacttccactgggaagaacccagcagccggaaggagtctcgagggggcccttcccgccggggtgtggccctgcttcgcccagagcccctgcaccgggggacagcagacaccctcctcaaccgggttaagaagctgccttgtcagatcaccagctacctggtggcgcacaccctagggcgccggatgctgtatccaggctctgtgtacctgctgcagaaggccctcatgcctgtgctgctgcagggccaggcccgactggtggaagagtgtaatgggcgccgggcaaagctgctggcctgtgatggcaatgagattgacaccatgtttgtggaccggcgggggacagctgagccccagggacagaagctggtgatctgctgtgaggggaatgctgggttttatgaggtgggctgcgtctccacgcccctggaagctggatattcagtcctgggctggaatcatccaggctttgctggaagcacgggggtgccattcccgcagaatgaggctaatgccatggatgtggtggtccagtttgccatccaccgccctgggcttccagccccaggacatcatcatctacgcctggtccatcggcggcttcactgccacgtgggcagccatgtcctacccagatgttagtgccatgatcctggatgcctcctttgatgacctggtgcccttggccttgaaggtcatgccagacagctggaggggcctggtgaccaggaccgtgaggcagcatctcaatctaaacaacgcggagcagctgtgcagataccagggtcctgtactgctgatccggagaaccaaggatgagatcatcaccaccacgtgagtgcgtgggaatctcggccctcaggaaccccagagatggccaggaacttgtcccttctacctctgcccaccagaaacctgggtatctagacccttcctcctaacctccagcccctccagggtacattcttctcacccccagggttcctgaggacatcatgtccaaccgaggcaatgacctcctgctgaagctcctgcagcatcggtatnccccgggttnatgggcagagggagggttttcgagttgttgaggcagtt

SEQ ID NO: 450245 - DNA, 688 bp, Homo sapiens
ccgggtgatggcagaggataccgatgctgcaggagcttcagcaggaggtcattgcctcggttggacatgatgtcctcaggaaccgtggtggtgatgatctcatccttggttctcctgcagcatcggtatccccgggtgatggcagaggagggtcttcgagtggtgaggcagtggttggaggcctcctcacagctggaggaagcctcaatttatagccgatgggaggtggaagaggactggtgtctgtctgtcctccgctcctaccaggcagaacacgggcccgacttcccctggagcgtgggggaggacatgagtgcagatggacggcggcagctggctttgtttctggctcggaagcatctgcacaactttgaggccactcactgcaccccactcccagcccagaacttccagatgccctggcacctctagggaccaactgggactcattatggaagaatggggtgagaggagacatgaggaaagaccctcttatttgtgattctctgtgttcatgttgctgtttatagtttgtggaaagtgggggaccatcccccttctcaccactgttcctcttgcacgtttcccctcattcatgtggctgtacttaaccttctccaacatacatcctgcattacatgaatggattattcctaataattaataaaaaggtattttttctactatc

SEQ ID NO: 450246 - DNA, 406 bp, Homo sapiens
tcattttttaaagcattatttatttggggacctttaatatgttgtacttatattttaacagaatcataatctgatgataactttgcatttacttattatgtatagacagttacatcataaaactctcagaattctgtacatacaggatatgtgtgcactgagccacaatataaaatgtttatcttacaaaggttgcagtaagaaaagtttgcaaaacactagcctggtacatatttcattaaggcttgaaagaggaaagtaaagctgtgaaggtcaggggtaaagcaggccttacagtctgtgagtgctagggctgggatggtccccagcacagtccccaggcctcaccagggttggggtttgttaacctgtgttccccacagctacctggtggcgcacaccctag

SEQ ID NO: 450247 - DNA, 467 bp, Homo sapiens
gattgtctaggtgtcttttctttcttctcaaactaacccttctccccacatgcacgcgcctgcaatccatttgaaactaggctgtggaaaaggagcaaaaatcgtccaatgctgctttcacttttgcttccaaatccagctccctgtgtttgttcccatggtcaggggtgggaaattaggttcagagtgagggtgaggaagaggagtttctgtgggggccagggatgtttcaagagagatagtcaacgagactagaaccagaggacacacagcagggcttctgaaagggaagggaaaggacctgccagtgggcagggtccttaaggaggccatctgttttggcaggatacgtactatcagccccgtgccctggagaaacatgctgacagcatcctggcactggtatgtctaccctggcatctgggactctgcatctttcagacccacctgtcctcttgaacttagcc

SEQ ID NO: 450248 - DNA, 2069 bp, Homo sapiens
ctgaaaatgtcgcaactcgcccggaggcggagccggtacgggctgacgtcaagggcacacaacacctcagaggcagggagggcggggccggcagggggacctgctgctggaagagcagcggcccgagccggggccatggcgaagctgctgagctgcgtcctaggcccccggctctacaaaatctaccgggagagggactctgaaagggccccggccagcgtccctgagacgccaacggcagtcactgccccccattccagctcctgggatacgtactatcagccccgtgccctggagaaacatgctgacagcatcctggcactggcttcagtattctggtccatctcttattactcctctcccttcgccttcttctacttgtacaggaaaggttacttgagtttgtccaaagtggtgccgttttctcactatgctgggacattgctgctacttctggcaggtgtggcctgcctccgaggcattggccgctggaccaacccccagtaccggcagttcatcaccatcttggaagcaacacatcggaaccagtcttcagaaaacaagaggcagcttgccaactacaactttgacttccggagctggccagtcgacttccactgggaagaacccagcagccggaaggagtctcgagggggcccttcccgccggggtgtggccctgcttcgcccagagcccctgcaccgggggacagcagacaccctcctcaaccgggttaagaagctgccttgtcagatcaccagctacctggtggcgcacaccctagggcgccggatgctgtatccaggctctgtgtacctgctgcagaaggccctcatgcctgtgctgctgcagggccaggcccgactggtggaagagtgtaatgggcgccgggcaaagctgctggcctgtgatggcaatgagattgacaccatgtttgtggaccggcgggggacagctgagccccagggacagaagctggtgatctgctgtgaggggaatgctgggttttatgaggtgggctgcgtctccacgcccctggaagctggatattcagtcctgggctggaatcatccaggctttgctggaagcacgggggtgccattcccgcagaatgaggctaatgccatggatgtggtggtccagtttgccatccaccgccctgggcttccagccccaggacatcatcatctacgcctggtccatcggcggcttcactgccacgtgggcagccatgtcctacccagatgttagtgccatgatcctggatgcctcctttgatgacctggtgcccttggccttgaaggtcatgccagacagctggaggggcctggtgaccaggaccgtgaggcagcatctcaatctaaacaacgcggagcagctgtgcagataccagggtcctgtactgctgatccggagaaccaaggatgagatcatcaccaccacggttcctgaggacatcatgtccaaccgaggcaatgacctcctgctgaagctcctgcagcatcggtatccccgggtgatggcagaggagggtcttcgagtggtgaggcagtggttggaggcctcctcacagctggaggaagcctcaatttatagccgatgggaggtggaagaggactggtgtctgtctgtcctccgctcctaccaggcagaacacgggcccgacttcccctggagcgtgggggaggacatgagtgcagatggacggcggcagctggctttgtttctggctcggaagcatctgcacaactttgaggccactcactgcaccccactcccagcccagaacttccagatgccctggcacctctagggaccaactgggactcattatggaagaatggggtgagaggagacatgaggaaagaccctcttatttgtgattctctgtgttcatgttgctgtttatagtttgtggaaagtgggggaccatcccccttctcaccactgttcctcttgcacgtttcccctcattcatgtggctgtacttaaccttctccaacatacatcctgcattacatgaatggattattcctaataattaataaaaaggtattttttctactatc

SEQ ID NO: 450249 - DNA, 2758 bp, Homo sapiens
  misc_feature (1500)..(1500): n is a, c, g, or t
ctgaaaatgtcgcaactcgcccggaggcggagccggtacgggctgacgtcaagggcacacaacacctcagaggcagggagggcggggccggcagggggacctgctgctggaagagcagcggcccgagccggggccatggcgaagctgctgagctgcgtcctaggcccccggctctacaaaatctaccgggagagggactctgaaagggccccggccagcgtccctgagacgccaacggcagtcactgccccccattccagctcctgggatacgtactatcagccccgtgccctggagaaacatgctgacagcatcctggcactggcttcagtattctggtccatctcttattactcctctcccttcgccttcttctacttgtacaggaaaggttacttgagtttgtccaaagtggtgccgttttctcactatgctgggacattgctgctacttctggcaggtgtggcctgcctccgaggcattggccgctggaccaacccccagtaccggcagttcatcaccatcttggaagcaacacatcggaaccagtcttcagaaaacaagaggcagcttgccaactacaactttgacttccggagctggccagtcgacttccactgggaagaacccagcagccggaaggagtctcgagggggcccttcccgccggggtgtggccctgcttcgcccagagcccctgcaccgggggacagcagacaccctcctcaaccgggttaagaagctgccttgtcagatcaccagctacctggtggcgcacaccctagggcgccggatgctgtatccaggctctgtgtacctgctgcagaaggccctcatgcctgtgctgctgcagggccaggcccgactggtggaagagtgtaatgggcgccgggcaaagctgctggcctgtgatggcaatgagattgacaccatgtttgtggaccggcgggggacagctgagccccagggacagaagctggtgatctgctgtgaggggaatgctgggttttatgaggtgggctgcgtctccacgcccctggaagctggatattcagtcctgggctggaatcatccaggctttgctggaagcacgggggtgccattcccgcagaatgaggctaatgccatggatgtggtggtccagtttgccatccaccgccctgggcttccagccccaggacatcatcatctacgcctggtccatcggcggcttcactggtaccagcctccctcccatcccccactgtagacacattcatgaccacccagccccacccgggagaggtggggaaatggggtggggtggaggctcaaggaagaagagagaggaagtagaatctctgagtgggcctggaagaagctatcctatttgcatacacttcacctttccttcccctcttgtgcccagtcattaaaaggaaaagcagacccaggtcctgggtggggagatcagggaaagtgaatgtttcctgcccattatcttcagtgcactatctccagngttctatccccatcctctccagatagttccctaaccaagtgaagtaggttaagaaaaaaacaagggataacatagggggaatggggttggcctatagggtcagtgggatgagagcatgggtggtggggagaaaggagcctttctcagttcttactcttcttccctgccctggtaccagccacgtgggcagccatgtcctacccagatgttagtgccatgatcctggatgcctcctttgatgacctggtgcccttggccttgaaggtcatgccagacagctggagtgagtgcagctcccaggcctgcccttcctgggaaggggtgggctggaactgggaactgttctgagatggctcccttttcttgggtggggagtaagtcgccccattgttggaagcaggaggactcctttgtctgggggcctcagttttctttctccgtgaatagtgaggacctttatgttgggcaagggctttgtctctgccatcccttcacctttatcccactctagggggcctggtgaccaggaccgtgaggcagcatctcaatctaaacaacgcggagcagctgtgcagataccagggtcctgtactgctgatccggagaaccaaggatgagatcatcaccaccacggttcctgaggacatcatgtccaaccgaggcaatgacctcctgctgaagctcctgcagcatcggtatccccgggtgatggcagaggagggtcttcgagtggtgaggcagtggttggaggcctcctcacagctggaggaagcctcaatttatagccgatgggaggtggaagaggactggtgtctgtctgtcctccgctcctaccaggcagaacacgggcccgacttcccctggagcgtgggggaggacatgagtgcagatggacggcggcagctggctttgtttctggctcggaagcatctgcacaactttgaggccactcactgcaccccactcccagcccagaacttccagatgccctggcacctctagggaccaactgggactcattatggaagaatggggtgagaggagacatgaggaaagaccctcttatttgtgattctctgtgttcatgttgctgtttatagtttgtggaaagtgggggaccatcccccttctcaccactgttcctcttgcacgtttcccctcattcatgtggctgtacttaaccttctccaacatacatcctgcattacatgaatggattattcctaataattaataaaaaggtattttttctactatc

SEQ ID NO: 450250 - DNA, 2859 bp, Homo sapiens
ctgaaaatgtcgcaactcgcccggaggcggagccggtacgggctgacgtcaagggcacacaacacctcagaggcagggagggcggggccggcagggggacctgctgctggaagagcagcggcccgagccggggccatggcgaagctgctgagctgcgtcctaggcccccggctctacaaaatctaccgggagagggactctgaaagggccccggccagcgtccctgagacgccaacggcagtcactgccccccattccagctcctgggatacgtactatcagccccgtgccctggagaaacatgctgacagcatcctggcactggcttcagtattctggtccatctcttattactcctctcccttcgccttcttctacttgtacaggaaaggttacttgagtttgtccaaagtggtgccgttttctcactatgctgggacattgctgctacttctggcaggtgtggcctgcctccgaggcattggccgctggaccaacccccagtaccggcagttcatcaccatcttggaagcaacacatcggaaccagtcttcagaaaacaagaggcagcttgccaactacaactttgacttccggagctggccagtcgacttccactgggaagaacccagcagccggaaggagtctcgagggggcccttcccgccggggtgtggccctgcttcgcccagagcccctgcaccgggggacagcagacaccctcctcaaccgggttaagaagctgccttgtcagatcaccagctacctggtggcgcacaccctagggcgccggatgctgtatccaggctctgtgtacctgctgcagaaggccctcatgcctgtgctgctgcagggccaggcccgactggtggaagagtgtaatgggcgccgggcaaagctgctggcctgtgatggcaatgagattgacaccatgtttgtggaccggcgggggacagctgagccccagggacagaagctggtgatctgctgtgaggggaatgctgggttttatgaggtgggctgcgtctccacgcccctggaagctggatattcagtcctgggctggaatcatccaggctttgctggaagcacgggggtgccattcccgcagaatgaggctaatgccatggatgtggtggtccagtttgccatccaccgccctgggcttccagccccaggacatcatcatctacgcctggtccatcggcggcttcactgccacgtgggcagccatgtcctacccagatgttagtgccatgatcctggatgcctcctttgatgacctggtgcccttggccttgaaggtcatgccagacagctggagtgagtgcagctcccaggcctgcccttcctgggaaggggtgggctggaactgggaactgttctgagatggctcccttttcttgggtggggagtaagtcgccccattgttggaagcaggaggactcctttgtctgggggcctcagttttctttctccgtgaatagtgaggacctttatgttgggcaagggctttgtctctgccatcccttcacctttatcccactctagggggcctggtgaccaggaccgtgaggcagcatctcaatctaaacaacgcggagcagctgtgcaggtgagggccggccagcgtccggcattgaacacctgccccccatacagctctgctgggcgctcaaaccctgaaactagtactaaagtgcaagttggtaaaaggccactggctcacatcctgagtgaccctgccaccacctcaactggcctaacccctcccaggtcccctgggactctggaccacctcaggatctggcaaccaaagggttaaggcctggcacggcaggggtctcccagcagggccagactgaaccatgccccttaaataatcccctctcacccctgagtgaagggctaggtcaagggctgtgctatagcaaggggagggtaagaatgctaccagtgcagggataggggtgggccagttgtcacccgtctccctctgagctctcccttcccactgctctgttctctgaagataccagggtcctgtactgctgatccggagaaccaaggatgagatcatcaccaccacgtgagtgcgtgggaatctcggccctcaggaaccccagagatggccaggaacttgtcccttctacctctgcccaccagaaacctgggtatctagacccttcctcctaacctccagcccctccagggtacattcttctcacccccagggttcctgaggacatcatgtccaaccgaggcaatgacctcctgctgaagctcctgcagcatcggtatccccgggtgatggcagaggagggtcttcgagtggtgaggcagtggttggaggcctcctcacagctggaggaagcctcaatttatagccgatgggaggtggaagaggactggtgtctgtctgtcctccgctcctaccaggcagaacacgggcccgacttcccctggagcgtgggggaggacatgagtgcagatggacggcggcagctggctttgtttctggctcggaagcatctgcacaactttgaggccactcactgcaccccactcccagcccagaacttccagatgccctggcacctctagggaccaactgggactcattatggaagaatggggtgagaggagacatgaggaaagaccctcttatttgtgattctctgtgttcatgttgctgtttatagtttgtggaaagtgggggaccatcccccttctcaccactgttcctcttgcacgtttcccctcattcatgtggctgtacttaaccttctccaacatacatcctgcattacatgaatggattattcctaataattaataaaaaggtattttttctactatc

SEQ ID NO: 450251 - DNA, 2136 bp, Homo sapiens
ctgaaaatgtcgcaactcgcccggaggcggagccggtacgggctgacgtcaagggcacacaacacctcagaggcagggagggcggggccggcagggggacctgctgctggaagagcagcggcccgagccggggccatggcgaagctgctgagctgcgtcctaggcccccggctctacaaaatctaccgggagagggactctgaaagggccccggccagcgtccctgagacgccaacggcagtcactgccccccattccagctcctgggatacgtactatcagccccgtgccctggagaaacatgctgacagcatcctggcactggcttcagtattctggtccatctcttattactcctctcccttcgccttcttctacttgtacaggaaaggttacttgagtttgtccaaagtggtgccgttttctcactatgctgggacattgctgctacttctggcaggtgtggcctgcctccgaggcattggccgctggaccaacccccagtaccggcagttcatcaccatcttggaagcaacacatcggaaccagtcttcagaaaacaagaggcagcttgccaactacaactttgacttccggagctggccagtcgacttccactgggaagaacccagcagccggaaggagtctcgagggggcccttcccgccggggtgtggccctgcttcgcccagagcccctgcaccgggggacagcagacaccctcctcaaccgggttaagaagctgccttgtcagatcaccagctacctggtggcgcacaccctagggcgccggatgctgtatccaggctctgtgtacctgctgcagaaggccctcatgcctgtgctgctgcagggccaggcccgactggtggaagagtgtaatgggcgccgggcaaagctgctggcctgtgatggcaatgagattgacaccatgtttgtggaccggcgggggacagctgagccccagggacagaagctggtgatctgctgtgaggggaatgctgggttttatgaggtgggctgcgtctccacgcccctggaagctggatattcagtcctgggctggaatcatccaggctttgctggaagcacgggggtgccattcccgcagaatgaggctaatgccatggatgtggtggtccagtttgccatccaccgccctgggcttccagccccaggacatcatcatctacgcctggtccatcggcggcttcactgccacgtgggcagccatgtcctacccagatgttagtgccatgatcctggatgcctcctttgatgacctggtgcccttggccttgaaggtcatgccagacagctggaggggcctggtgaccaggaccgtgaggcagcatctcaatctaaacaacgcggagcagctgtgcagataccagggtcctgtactgctgatccggagaaccaaggatgagatcatcaccaccacggttcctgaggacatcatgtccaaccgaggcaatgacctcctgctgaagctcctgcagcatcggtatccccgggtgatggcagaggagggtcttcgagtggtgaggcagtggttggaggcctcctcacagctggaggaagcctcaatttatagccgatgggaggtggaagaggactggtgtctgtctgtcctccgctcctaccaggcagaacacgggcccgacttcccctggagcgtgggggaggacatgagtgcagatggacggcggcagctggctttgtttctggctcggaagcatctgcacaactttgaggccactcactgcaccccactcccagcccagaacttccagatgccctggcacctctagggaccaactgggactcattatggaagaatggggtgagaggagacatgaggaaagaccctcttatttgtgattctctgtgttcatgttgctgtttatagtttgtggaaagtgggggaccatcccccttctcaccactgttcctcttgcacgtttcccctcattcatgtggctgtacttaaccttctccaacatacatcctgcattacatgaatggattattcctaataattaataaaaaggtattttttctactatcaaaaaaaaaagaggggggcgtaaaaattcctcaggccagttgcgtcccttttggcaaagggccaagg

SEQ ID NO: 450252 - DNA, 1945 bp, Homo sapiens
ctgaaaatgtcgcaactcgcccggaggcggagccggtacgggctgacgtcaagggcacacaacacctcagaggcagggagggcggggccggcagggggacctgctgctggaagagcagcggcccgagccggggccatggcgaagctgctgagctgcgtcctaggcccccggctctacaaaatctaccgggagagggactctgaaagggccccggccagcgtccctgagacgccaacggcagtcactgccccccattccagctcctgggttacttgagtttgtccaaagtggtgccgttttctcactatgctgggacattgctgctacttctggcaggtgtggcctgcctccgaggcattggccgctggaccaacccccagtaccggcagttcatcaccatcttggaagcaacacatcggaaccagtcttcagaaaacaagaggcagcttgccaactacaactttgacttccggagctggccagtcgacttccactgggaagaacccagcagccggaaggagtctcgagggggcccttcccgccggggtgtggccctgcttcgcccagagcccctgcaccgggggacagcagacaccctcctcaaccgggttaagaagctgccttgtcagatcaccagctacctggtggcgcacaccctagggcgccggatgctgtatccaggctctgtgtacctgctgcagaaggccctcatgcctgtgctgctgcagggccaggcccgactggtggaagagtgtaatgggcgccgggcaaagctgctggcctgtgatggcaatgagattgacaccatgtttgtggaccggcgggggacagctgagccccagggacagaagctggtgatctgctgtgaggggaatgctgggttttatgaggtgggctgcgtctccacgcccctggaagctggatattcagtcctgggctggaatcatccaggctttgctggaagcacgggggtgccattcccgcagaatgaggctaatgccatggatgtggtggtccagtttgccatccaccgccctgggcttccagccccaggacatcatcatctacgcctggtccatcggcggcttcactgccacgtgggcagccatgtcctacccagatgttagtgccatgatcctggatgcctcctttgatgacctggtgcccttggccttgaaggtcatgccagacagctggaggggcctggtgaccaggaccgtgaggcagcatctcaatctaaacaacgcggagcagctgtgcagataccagggtcctgtactgctgatccggagaaccaaggatgagatcatcaccaccacggttcctgaggacatcatgtccaaccgaggcaatgacctcctgctgaagctcctgcagcatcggtatccccgggtgatggcagaggagggtcttcgagtggtgaggcagtggttggaggcctcctcacagctggaggaagcctcaatttatagccgatgggaggtggaagaggactggtgtctgtctgtcctccgctcctaccaggcagaacacgggcccgacttcccctggagcgtgggggaggacatgagtgcagatggacggcggcagctggctttgtttctggctcggaagcatctgcacaactttgaggccactcactgcaccccactcccagcccagaacttccagatgccctggcacctctagggaccaactgggactcattatggaagaatggggtgagaggagacatgaggaaagaccctcttatttgtgattctctgtgttcatgttgctgtttatagtttgtggaaagtgggggaccatcccccttctcaccactgttcctcttgcacgtttcccctcattcatgtggctgtacttaaccttctccaacatacatcctgcattacatgaatggattattcctaataattaataaaaaggtattttttctactatc

SEQ ID NO: 450253 - DNA, 2271 bp, Homo sapiens
ctgaaaatgtcgcaactcgcccggaggcggagccggtacgggctgacgtcaagggcacacaacacctcagaggcagggagggcggggccggcagggggacctgctgctggaagagcagcggcccgagccggggccatggcgaagctgctgagctgcgtcctaggcccccggctctacaaaatctaccgggagagggactctgaaagggccccggccagcgtccctgagacgccaacggcagtcactgccccccattccagctcctgggatacgtactatcagccccgtgccctggagaaacatgctgacagcatcctggcactggcttcagtattctggtccatctcttattactcctctcccttcgccttcttctacttgtacaggaaaggttacttgagtttgtccaaagtggtgccgttttctcactatgctgggacattgctgctacttctggcaggtgtggcctgcctccgaggcattggccgctggaccaacccccagtaccggcagttcatcaccatcttggaagcaacacatcggaaccagtcttcagaaaacaagaggcagcttgccaactacaactttgacttccggagctggccagtcgacttccactgggaagaacccagcagccggaaggagtctcgagggggcccttcccgccggggtgtggccctgcttcgcccagagcccctgcaccgggggacagcagacaccctcctcaaccgggttaagaagctgccttgtcagatcaccagctacctggtggcgcacaccctagggcgccggatgctgtatccaggctctgtgtacctgctgcagaaggccctcatgcctgtgctgctgcagggccaggcccgactggtggaagagtgtaatgggcgccgggcaaagctgctggcctgtgatggcaatgagattgacaccatgtttgtggaccggcgggggacagctgagccccagggacagaagctggtgatctgctgtgaggggaatgctgggttttatgaggtgggctgcgtctccacgcccctggaagctggatattcagtcctgggctggaatcatccaggctttgctggaagcacgggggtgccattcccgcagaatgaggctaatgccatggatgtggtggtccagtttgccatccaccgccctgggcttccagccccaggacatcatcatctacgcctggtccatcggcggcttcactgccacgtgggcagccatgtcctacccagatgttagtgccatgatcctggatgcctcctttgatgacctggtgcccttggccttgaaggtcatgccagacagctggaggggcctggtgaccaggaccgtgaggcagcatctcaatctaaacaacgcggagcagctgtgcagataccagggtcctgtactgctgatccggagaaccaaggatgagatcatcaccaccacggttcctgaggacatcatgtccaaccgaggcaatgacctcctgctgaagctcctgcagcatcggtatccccgggtgatggcagaggagggtcttcgagtggtgaggcagtggttggaggcctcctcacagctggaggaagcctcaatttatagccgatgggaggtggaagaggactggtgtctgtctgtcctccgctcctaccaggcagaacacgggcccgacttcccctggagcgtgggggaggacatgagtgcagatggacggcggcagctggctttgtttctggtgagctaaggagtgggaagtgggaagggttcttgaatggccagggctcacatagggggactggggataccctataagcattggaagtggcagcttttgtagagtgggtggtggatgcggaagtggagggtggggagggagtccagtggctgcccctcccaacagtgctctgtaccccacctgtcccacctcctttcctcaggctcggaagcatctgcacaactttgaggccactcactgcaccccactcccagcccagaacttccagatgccctggcacctctagggaccaactgggactcattatggaagaatggggtgagaggagacatgaggaaagaccctcttatttgtgattctctgtgttcatgttgctgtttatagtttgtggaaagtgggggaccatcccccttctcaccactgttcctcttgcacgtttcccctcattcatgtggctgtacttaaccttctccaacatacatcctgcattacatgaatggattattcctaataattaataaaaaggtattttttctactatc

SEQ ID NO: 450254 - DNA, 3061 bp, Homo sapiens
ctgaaaatgtcgcaactcgcccggaggcggagccggtacgggctgacgtcaagggcacacaacacctcagaggcagggagggcggggccggcagggggacctgctgctggaagagcagcggcccgagccggggccatggcgaagctgctgagctgcgtcctaggcccccggctctacaaaatctaccgggagagggactctgaaagggccccggccagcgtccctgagacgccaacggcagtcactgccccccattccagctcctgggatacgtactatcagccccgtgccctggagaaacatgctgacagcatcctggcactggcttcagtattctggtccatctcttattactcctctcccttcgccttcttctacttgtacaggaaaggttacttgagtttgtccaaagtggtgccgttttctcactatgctgggacattgctgctacttctggcaggtgtggcctgcctccgaggcattggccgctggaccaacccccagtaccggcagttcatcaccatcttggaagcaacacatcggaaccagtcttcagaaaacaagaggcagcttgccaactacaactttgacttccggagctggccagtcgacttccactgggaagaacccagcagccggaaggagtctcgagggggcccttcccgccggggtgtggccctgcttcgcccagagcccctgcaccgggggacagcagacaccctcctcaaccgggttaagaagctgccttgtcagatcaccagctacctggtggcgcacaccctagggcgccggatgctgtatccaggctctgtgtacctgctgcagaaggccctcatgcctgtgctgctgcagggccaggcccgactggtggaagagtgtaatgggcgccgggcaaagctgctggcctgtgatggcaatgagattgacaccatgtttgtggaccggcgggggacagctgagccccagggacagaagctggtgatctgctgtgaggggaatgctgggttttatgaggtgggctgcgtctccacgcccctggaagctggatattcagtcctgggctggaatcatccaggctttgctggaagcacgggggtgccattcccgcagaatgaggctaatgccatggatgtggtggtccagtttgccatccaccgccctgggcttccagccccaggacatcatcatctacgcctggtccatcggcggcttcactgccacgtgggcagccatgtcctacccagatgttagtgccatgatcctggatgcctcctttgatgacctggtgcccttggccttgaaggtcatgccagacagctggagtgagtgcagctcccaggcctgcccttcctgggaaggggtgggctggaactgggaactgttctgagatggctcccttttcttgggtggggagtaagtcgccccattgttggaagcaggaggactcctttgtctgggggcctcagttttctttctccgtgaatagtgaggacctttatgttgggcaagggctttgtctctgccatcccttcacctttatcccactctagggggcctggtgaccaggaccgtgaggcagcatctcaatctaaacaacgcggagcagctgtgcaggtgagggccggccagcgtccggcattgaacacctgccccccatacagctctgctgggcgctcaaaccctgaaactagtactaaagtgcaagttggtaaaaggccactggctcacatcctgagtgaccctgccaccacctcaactggcctaacccctcccaggtcccctgggactctggaccacctcaggatctggcaaccaaagggttaaggcctggcacggcaggggtctcccagcagggccagactgaaccatgccccttaaataatcccctctcacccctgagtgaagggctaggtcaagggctgtgctatagcaaggggagggtaagaatgctaccagtgcagggataggggtgggccagttgtcacccgtctccctctgagctctcccttcccactgctctgttctctgaagataccagggtcctgtactgctgatccggagaaccaaggatgagatcatcaccaccacgtgagtgcgtgggaatctcggccctcaggaaccccagagatggccaggaacttgtcccttctacctctgcccaccagaaacctgggtatctagacccttcctcctaacctccagcccctccagggtacattcttctcacccccagggttcctgaggacatcatgtccaaccgaggcaatgacctcctgctgaagctcctgcagcatcggtatccccgggtgatggcagaggagggtcttcgagtggtgaggcagtggttggaggcctcctcacagctggaggaagcctcaatttatagccgatgggaggtggaagaggactggtgtctgtctgtcctccgctcctaccaggcagaacacgggcccgacttcccctggagcgtgggggaggacatgagtgcagatggacggcggcagctggctttgtttctggtgagctaaggagtgggaagtgggaagggttcttgaatggccagggctcacatagggggactggggataccctataagcattggaagtggcagcttttgtagagtgggtggtggatgcggaagtggagggtggggagggagtccagtggctgcccctcccaacagtgctctgtaccccacctgtcccacctcctttcctcaggctcggaagcatctgcacaactttgaggccactcactgcaccccactcccagcccagaacttccagatgccctggcacctctagggaccaactgggactcattatggaagaatggggtgagaggagacatgaggaaagaccctcttatttgtgattctctgtgttcatgttgctgtttatagtttgtggaaagtgggggaccatcccccttctcaccactgttcctcttgcacgtttcccctcattcatgtggctgtacttaaccttctccaacatacatcctgcattacatgaatggattattcctaataattaataaaaaggtattttttctactatc

SEQ ID NO: 450255 - DNA, 618 bp, Homo sapiens
ctgaaaatgtcgcaactcgcccggaggcggagccggtacgggctgacgtcaagggcacacaacacctcagaggcagggagggcggggccggcagggggacctgctgctggaagagcagcggcccgagccggggccatggcgaagctgctgagctgcgtcctaggcccccggctctacaaaatctaccgggagagggactctgaaagggccccggccagcgtccctgagacgccaacggcagtcactgccccccattccagctcctgggatacgtactatcagccccgtgccctggagaaacatgctgacagcatcctggcactggtatgtctaccctggcatctgggactctgcatctctagggaccaactgggactcattatggaagaatggggtgagaggagacatgaggaaagaccctcttatttgtgattctctgtgttcatgttgctgtttatagtttgtggaaagtgggggaccatcccccttctcaccactgttcctcttgcacgtttcccctcattcatgtggctgtacttaaccttctccaacatacatcctgcattacatgaatggattattcctaataattaataaaaaggtattttttctactatc

SEQ ID NO: 450256 - DNA, 1205 bp, Homo sapiens
agttggtatttctcgcgagacttcaccgtctctgtcttttcctccttccagtgcccggcgttcctcccttccccctcgccgccgaccgagttcttccttttcagaccgggtcgccttgctgtcgtcgcggtgattttcctgctactgctactgctgctgctgccaccgccactaccactgggctcatttgccccgaccccttcccgccgccccgcccccagccccacacaagatgtcagaggatttagcaaagcagctggcaagctacaaagctcagctccagcaagttgaagctgcattatctggaaatggagaaaatgaagatttgctaaaattgaagaaagatttacaagaagttatagaactaaccaaagaccttctgtcaactcaaccttctgagacgcttgcaagttcagacagttttgcttctactcaacctactcattcatggaaagtaggagacaagtgtatggcagtctggagtgaagatggacagtgttatgaagcggagattgaggagatagatgaagaaaatggcaccgctgcaatcacctttgctggttatggcaatgctgaagtgactccactgttgaacctcaagcctgtagaagaaggaaggaaggcaaaggaggacagtggcaacaaacccatgtcaaaaaaagaaatgattgcccagcagcgtgaatataaaaagaagaaagctttgaaaaaagctcagagaataaaagaacttgagcaggaaagagaggaccagaaagtgaaatggcaacaattcaacaacagagcctattctaaaaacaaaaaaggccaggtaaagaggagtatttttgcttcacctgagagtgtgactggtaaagttggagtaggaacctgtggaattgctgataaacctatgacacaatatcaagatacctctaaatacaatgtcaggcatttgatgcctcaataatcagaaaaactgttggatttcatctctgcagggctttacatttacctttttatccttatatttttctaaaggtaaattatttgttagatgagtaagcaagataccattgtcgtcattggttggcttcagtagaatgaaacgtgaagaaattgcatttgataactgctattcatttaacttttctcattatcagtaccacggttccctcaaagtttgttgaataaagcaacttttgtagatgctgtttcatacagca

SEQ ID NO: 450257 - DNA, 3219 bp, Homo sapiens
agttggtatttctcgcgagacttcaccgtctctgtcttttcctccttccagtgcccggcgttcctcccttccccctcgccgccgaccgagttcttccttttcagaccgggtcgccttgctgtcgtcgcggtgattttcctgctactgctactgctgctgctgccaccgccactaccactgggctcatttgccccgaccccttcccgccgccccgcccccagccccacacaaggtaacaacccccctgagggagagagtaaggcctggccgggcccgggtccctcccgaggtgaagcggaggcccaaggctgaggagcccgcctcgccggagacgcccaggcgctggccctggatcccggagccacggccgtctctcagccagagctgagcctcggcggcccggccggcgctggcctccgtgcggcggcggcaaacacggcccgcaggggaccgggtcgggtggggctgggcgccgcgcggctccctgtggagcctgcctgttggagcgcggcggggctccggcggtggtcttggagctggcgtgtggatttccacgtccgaatgatcgagttgtggcgggctttgaggtgctgcgtggcggggaggagagcagtctgggtcgctgtaactcttagggggcctttgcaggctcccagcctttggttggacgggaattttacgaaggagaagggtcctcggaaacgtggtacatttgcttataaaccatcaaaaaaggttaattggtatcttattttcaggaaaatgactgagctggatttggcgaaaggcacattcgttagaatgcctaaatgggagagtacctgtgctgttctttttgctgaagataatgcaccgataaatatttaagcgactgggcgaaagatttttgttttggagaggcacttttaaatacactcttaattgaatagttcaagtaaagatcgtagtttgtgtagttaatttaaaaacgcacttgtttggctttggaagcatactgtagtgcttaaaaataagtatttggattgtttttgaaagtttcgacttttccaacagagtagtgctttttaaaaagataacactgattattgagccgaattcagcacctaccctgtggataggagttaaaagaaaattagaaatttctttgtatctgtatgcttttttaaagtatggaatgtatctcaagtttataatcctcagaatctgttgcctttaagtttgtggtttagctgaagtctaaactgagagtaaaggtaatggtggtaaattaagctgcagtgttagaaggagttagaggcaaaaactggtaattcaggcagacaggggagttagttttttatgccttgatttttggtttagttttcatggtctaaccctttttattttccctagatgtcagaggatttagcaaagcagctggcaagctacaaagctcagctccagcaagttgaagctgcattatctggaaatggagaaaatgaagatttgctaaaattgaagaaagatttacaagaagttatagaactaaccaaagaccttctgtcaactcaaccttctgagacgcttgcaagttcagacagttttgcttctactcaacctactcattcatggaaagtaggagacaagtgtatggcagtctggagtgaagatggacagtgttatgaagcggagattgaggagatagatgaagaaaatggcaccgctgcaatcacctttgctggttatggcaatgctgaagtgactccactgttgaacctcaagcctgtagaagaaggaaggaaggcaaaggaggacagtggcaacaaacccatgtcaaaaaaagaaatgattgcccagcagcgtgaatataaaaagaagaaagctttgaaaaaagctcagagaataaaagaacttgagcaggaaagagaggaccagaaagtgaaatggcaacaattcaacaacagagcctattctaaaaacaaaaaaggccaggtaaagaggagtatttttgcttcacctgagagtgtgactggtaaagttggagtaggaacctgtggaattgctgataaacctatgacacaatatcaagatacctctaaatacaatgtcaggcatttgatgcctcaataatcagaaaaactgttggatttcatctctgcagggctttacatttacctttttatccttatatttttctaaaggtaaattatttgttagatgagtaagcaagataccattgtcgtcattggttggcttcagtagaatgaaacgtgaagaaattgcatttgataactgctattcatttaacttttctcattatcagtaccacggttccctcaaagtttgttgaataaagcaacttttgtagatgctgtttcatacagcacttagatgaattattgatcttcctaatatcaggcgcctacttaacctatggtgtgtactttttgtaagttgtaacttgaaattttcagatgctttgaacttgacacatactctagcaattcattggaacaccaaggcaaaaacaccaacctgctaaaagagatcttttcatttttcttattttcagctttaaaacttagctgtcgttcagttaagcttaaagataggttaatttgtaaatggcaaagtttgttttgaggtttttcctcaataacttgtttcccaggcctattaggccatctctaaaattgatctagctgttttatttttatgtactcttagttttatgtaagaaaccttaggatgagctcccttttctaaggtgtttttgttttttgtatgtttgcttttttcctgttttttgttttttccatttacggcagtggtaccatgttttggatgtgtgatgtttatatgggagaacaaaaagctgatgtatagccctgtatacagtgtagatactatttttgtaaaaacacaaggctaaattaatgaacaagaatactgaatatttcatcattaaaaatttcttgtatttcttgtgcattaatctgacgataatttccctgtatattatgttcatttagctgtttgtaatttttgttaattagatcaggttgtctgcatttgttggtgtaagtgaacatcatcacagttatcctgagttgagtttaagccaaatacatgcatagaaaagggtcttcctattaatggaagaaggtaatttttaggatgtgtattatttcagttttgtatgtttaacttttattaaataaagtgtttttaaaatctcca

SEQ ID NO: 450258 - DNA, 2414 bp, Homo sapiens
agttggtatttctcgcgagacttcaccgtctctgtcttttcctccttccagtgcccggcgttcctcccttccccctcgccgccgaccgagttcttccttttcagaccgggtcgccttgctgtcgtcgcggtgattttcctgctactgctactgctgctgctgccaccgccactaccactgggctcatttgccccgaccccttcccgccgccccgcccccagccccacacaaggtaacaacccccctgagggagagagtaaggcctggccgggcccgggtccctcccgaggtgaagcggaggcccaaggctgaggagcccgcctcgccggagacgcccaggcgctggccctggatcccggagccacggccgtctctcagccagagctgagcctcggcggcccggccggcgctggcctccgtgcggcggcggcaaacacggcccgcaggggaccgggtcgggtggggctgggcgccgcgcggctccctgtggagcctgcctgttggagcgcggcggggctccggcggtggtcttggagctggcgtgtggatttccacgtccgaatgatcgagttgtggcgggctttgagatgtcagaggatttagcaaagcagctggcaagctacaaagctcagctccagcaagttgaagctgcattatctggaaatggagaaaatgaagatttgctaaaattgaagaaagatttacaagaagttatagaactaaccaaagaccttctgtcaactcaaccttctgagacgcttgcaagttcagacagttttgcttctactcaacctactcattcatggaaagtaggagacaagtgtatggcagtctggagtgaagatggacagtgttatgaagcggagattgaggagatagatgaagaaaatggcaccgctgcaatcacctttgctggttatggcaatgctgaagtgactccactgttgaacctcaagcctgtagaagaaggaaggaaggcaaaggaggacagtggcaacaaacccatgtcaaaaaaagaaatgattgcccagcagcgtgaatataaaaagaagaaagctttgaaaaaagctcagagaataaaagaacttgagcaggaaagagaggaccagaaagtgaaatggcaacaattcaacaacagagcctattctaaaaacaaaaaaggccaggtaaagaggagtatttttgcttcacctgagagtgtgactggtaaagttggagtaggaacctgtggaattgctgataaacctatgacacaatatcaagatacctctaaatacaatgtcaggcatttgatgcctcaataatcagaaaaactgttggatttcatctctgcagggctttacatttacctttttatccttatatttttctaaaggtaaattatttgttagatgagtaagcaagataccattgtcgtcattggttggcttcagtagaatgaaacgtgaagaaattgcatttgataactgctattcatttaacttttctcattatcagtaccacggttccctcaaagtttgttgaataaagcaacttttgtagatgctgtttcatacagcacttagatgaattattgatcttcctaatatcaggcgcctacttaacctatggtgtgtactttttgtaagttgtaacttgaaattttcagatgctttgaacttgacacatactctagcaattcattggaacaccaaggcaaaaacaccaacctgctaaaagagatcttttcatttttcttattttcagctttaaaacttagctgtcgttcagttaagcttaaagataggttaatttgtaaatggcaaagtttgttttgaggtttttcctcaataacttgtttcccaggcctattaggccatctctaaaattgatctagctgttttatttttatgtactcttagttttatgtaagaaaccttaggatgagctcccttttctaaggtgtttttgttttttgtatgtttgcttttttcctgttttttgttttttccatttacggcagtggtaccatgttttggatgtgtgatgtttatatgggagaacaaaaagctgatgtatagccctgtatacagtgtagatactatttttgtaaaaacacaaggctaaattaatgaacaagaatactgaatatttcatcattaaaaatttcttgtatttcttgtgcattaatctgacgataatttccctgtatattatgttcatttagctgtttgtaatttttgttaattagatcaggttgtctgcatttgttggtgtaagtgaacatcatcacagttatcctgagttgagtttaagccaaatacatgcatagaaaagggtcttcctattaatggaagaaggtaatttttaggatgtgtattatttcagttttgtatgtttaacttttattaaataaagtgtttttaaaatctcca

SEQ ID NO: 450259 - DNA, 2269 bp, Homo sapiens
agttggtatttctcgcgagacttcaccgtctctgtcttttcctccttccagtgcccggcgttcctcccttccccctcgccgccgaccgagttcttccttttcagaccgggtcgccttgctgtcgtcgcggtgattttcctgctactgctactgctgctgctgccaccgccactaccactgggctcatttgccccgaccccttcccgccgccccgcccccagccccacacaagatgtcagaggatttagcaaagcagctggcaagctacaaagctcagctccagcaagttgaagctgcattatctggaaatggagaaaatgaagatttgctaaaattgaagaaagatttacaatggctctctgcatccccgaaacgccttccttcagtaagcagagtgcttgagtgcaccccatttgacctgctgatatgtagatcacaacacctgatgcttcctggaattgccgattactgtaactgctgcccatctgtcgatgaaggagcagtttcagaactcagacttgagggaggaaaagtaattaatgtttttgtttttcttttttaggaagttatagaactaaccaaagaccttctgtcaactcaaccttctgagacgcttgcaagttcagacagttttgcttctactcaacctactcattcatggaaagtaggagacaagtgtatggcagtctggagtgaagatggacagtgttatgaagcggagattgaggagatagatgaagaaaatggcaccgctgcaatcacctttgctggttatggcaatgctgaagtgactccactgttgaacctcaagcctgtagaagaaggaaggaaggcaaaggaggacagtggcaacaaacccatgtcaaaaaaagaaatgattgcccagcagcgtgaatataaaaagaagaaagctttgaaaaaagctcagagaataaaagaacttgagcaggaaagagaggaccagaaagtgaaatggcaacaattcaacaacagagcctattctaaaaacaaaaaaggccaggtaaagaggagtatttttgcttcacctgagagtgtgactggtaaagttggagtaggaacctgtggaattgctgataaacctatgacacaatatcaagatacctctaaatacaatgtcaggcatttgatgcctcaataatcagaaaaactgttggatttcatctctgcagggctttacatttacctttttatccttatatttttctaaaggtaaattatttgttagatgagtaagcaagataccattgtcgtcattggttggcttcagtagaatgaaacgtgaagaaattgcatttgataactgctattcatttaacttttctcattatcagtaccacggttccctcaaagtttgttgaataaagcaacttttgtagatgctgtttcatacagcacttagatgaattattgatcttcctaatatcaggcgcctacttaacctatggtgtgtactttttgtaagttgtaacttgaaattttcagatgctttgaacttgacacatactctagcaattcattggaacaccaaggcaaaaacaccaacctgctaaaagagatcttttcatttttcttattttcagctttaaaacttagctgtcgttcagttaagcttaaagataggttaatttgtaaatggcaaagtttgttttgaggtttttcctcaataacttgtttcccaggcctattaggccatctctaaaattgatctagctgttttatttttatgtactcttagttttatgtaagaaaccttaggatgagctcccttttctaaggtgtttttgttttttgtatgtttgcttttttcctgttttttgttttttccatttacggcagtggtaccatgttttggatgtgtgatgtttatatgggagaacaaaaagctgatgtatagccctgtatacagtgtagatactatttttgtaaaaacacaaggctaaattaatgaacaagaatactgaatatttcatcattaaaaatttcttgtatttcttgtgcattaatctgacgataatttccctgtatattatgttcatttagctgtttgtaatttttgttaattagatcaggttgtctgcatttgttggtgtaagtgaacatcatcacagttatcctgagttgagtttaagccaaatacatgcatagaaaagggtcttcctattaatggaagaaggtaatttttaggatgtgtattatttcagttttgtatgtttaacttttattaaataaagtgtttttaaaatctcca

SEQ ID NO: 450260 - DNA, 2854 bp, Homo sapiens
ctgaaatatgtctttaaccctaatgagatttcactggactcaagtcattttgtagtgagacattcacaatatgaccctattaacccagtctaggaagtctggggagccgaatgagtggccgcatcagacactctgaccaaaaatggtaaccagtttttgatctgaaaactcctcttaatttagctctgaacacatcaatcaagcttttgaaatgcatcctcctccttgcccctcatattttaaaccaactgttgttcacagtacagtttgcacgacatctttgttcaaacatagctcagttttgcttctactcaacctactcattcatggaaagtaggagacaagtgtatggcagtctggagtgaagatggacagtaagtgtagaaaaaaaaactctaactataacatgaaataataaaatacaatggtaagaagtttttattcagttttaactaccctattttaatcttgacttctattaggcagtatgatttatagagccaatttgattcttgggtggttgccattaatacagtttagttttagctttagattaagttttggggagaagaatggctgggattctggaggaaagaaaaacaggacaatgaatgggtgttttctaaaataatctaaattattttctctaattgaaaattgagtgaatggttggtttttctgagaattctgtgaagagcatacactgacatcattcctataagaaatatcttttcgctgggtgtggtggctcatgcctgtaatctcagcactttgggaggctgaggcaggcagatcgcttgaggtcaggagttggagagcagcctgaccaacatggtgaaaccccatctctactaaaaatacaaaaatcagttaggtgtggtggcgtgtgcctgtaatcccagctacttgggagactgaggcatgagaattgtttgaacctgggaggcggaggttgaagtgagctgagattgcactactgcactccagcctgggcgacagtgagactctgtcgcaaaaaagagaaaaaaagaaacctctattctcaaagacattaaatcacgttgagtaggtacatgtaagagacttgcccagcaatattatgattgggatgtccttttttgatagcagataactaacttcaaccactcttttgtattctctttgctgaaacaaccatttgattatagaagtttcattatagacacatgtaataattttatcactacagtataagtcttgtaggctgagtactaaacctttactcacctgcttacagccatgatatctttagtgttatgaagcggagattgaggagatagatgaagaaaatggcaccgctgcaatcacctttgctggttatggcaatgctgaagtgactccactgttgaacctcaagcctgtagaagaaggaaggaaggcaaaggaggacagtggcaacaaacccatgtcaaaaaaagaaatgattgcccagcagcgtgaatataaaaagaagaaagctttgaaaaaagctcagagaataaaagaacttgagcaggaaagagaggaccagaaagtgaaatggcaacaattcaacaacagagcctattctaaaaacaaaaaaggccaggtaaagaggagtatttttgcttcacctgagagtgtgactggtaaagttggagtaggaacctgtggaattgctgataaacctatgacacaatatcaagatacctctaaatacaatgtcaggcatttgatgcctcaataatcagaaaaactgttggatttcatctctgcagggctttacatttacctttttatccttatatttttctaaaggtaaattatttgttagatgagtaagcaagataccattgtcgtcattggttggcttcagtagaatgaaacgtgaagaaattgcatttgataactgctattcatttaacttttctcattatcagtaccacggttccctcaaagtttgttgaataaagcaacttttgtagatgctgtttcatacagcacttagatgaattattgatcttcctaatatcaggcgcctacttaacctatggtgtgtactttttgtaagttgtaacttgaaattttcagatgctttgaacttgacacatactctagcaattcattggaacaccaaggcaaaaacaccaacctgctaaaagagatcttttcatttttcttattttcagctttaaaacttagctgtcgttcagttaagcttaaagataggttaatttgtaaatggcaaagtttgttttgaggtttttcctcaataacttgtttcccaggcctattaggccatctctaaaattgatctagctgttttatttttatgtactcttagttttatgtaagaaaccttaggatgagctcccttttctaaggtgtttttgttttttgtatgtttgcttttttcctgttttttgttttttccatttacggcagtggtaccatgttttggatgtgtgatgtttatatgggagaacaaaaagctgatgtatagccctgtatacagtgtagatactatttttgtaaaaacacaaggctaaattaatgaacaagaatactgaatatttcatcattaaaaatttcttgtatttcttgtgcattaatctgacgataatttccctgtatattatgttcatttagctgtttgtaatttttgttaattagatcaggttgtctgcatttgttggtgtaagtgaacatcatcacagttatcctgagttgagtttaagccaaatacatgcatagaaaagggtcttcctattaatggaagaaggtaatttttaggatgtgtattatttcagttttgtatgtttaacttttattaaataaagtgtttttaaaatctcca

SEQ ID NO: 450261 - DNA, 1546 bp, Homo sapiens
agttggtatttctcgcgagacttcaccgtctctgtcttttcctccttccagtgcccggcgttcctcccttccccctcgccgccgaccgagttcttccttttcagaccgggtcgccttgctgtcgtcgcggtgattttcctgctactgctactgctgctgctgccaccgccactaccactgggctcatttgccccgaccccttcccgccgccccgcccccagccccacacaagatgtcagaggatttagcaaagcagctggcaagctacaaagctcagctccagcaagttgaagctgcattatctggaaatggagaaaatgaagatttgctaaaattgaagaaagatttacaagaagttatagaactaaccaaagaccttctgtcaactcaaccttctgagacgcttgcaagttcagacagttttgcttctactcaacctactcattcatggaaagtaggagacaagtgtatggcagtctggagtgaagatggacagtgttatgaagcggagattgaggagatagatgaagaaaatggcaccgctgcaatcacctttgctggttatggcaatgctgaagtgactccactgttgaacctcaagcctgtagaagaaggaaggaaggcaaaggaggacagtggcaacaaacccatgtcaaaaaaagaaatgattgcccagcagcgtgaatataaaaagaagaaagctttgaaaaaagctcagagaataaaagaacttgagcaggaaagagaggaccagaaagtgaaatggcaacaattcaacaacagagcctattctaaaaacaaaaaaggccaggtaaagaggagtatttttgcttcacctgagagtgtgactggtaaagttggagtaggaacctgtggaattgctgataaacctatgacacaatatcaagatacctctaaatacaatgtcaggcatttgatgcctcaataatcagaaaaactgttggatttcatctctgcagggctttacatttacctttttatccttatatttttctaaaggtaaattatttgttagatgagtaagcaagataccattgtcgtcattggttggcttcagtagaatgaaacgtgaagaaattgcatttgataactgctattcatttaacttttctcattatcagtaccacggttccctcaaagtttgttgaataaagcaacttttgtagatgctgtttcatacagcaaaaaaaaaaaaaaaaaaaaaaaaaaacaaaaaaaaaaagggggggggggaaaaaaagaatccccgggggggccaaaggttaaggcttaccccggtttttttgtcacaaggggggccctatgaaggagagcgaattaaaagagaaggcgggaggggttaaaaacggtcgggacgggggaacatgggtacgttgcaatttttgggaaggaaccctacttctggtggtgggcttagttggacaactactaagagattaagggtcagggaaataaatttacgtgtttatggtaccacgaatgtgcgcgaaatgggtcggtatatagatagagggtaaaaataagg

SEQ ID NO: 450262 - DNA, 542 bp, Homo sapiens
gcattaatctgacgataatttccctgtatattatgttcatttagctgtttgtaatttttgttaattagatcaggttgtctgcatttgttggtgtaagtgaacatcatcacagttatcctgagttgagtttaagccaaatacatgcatagaaaagggtcttcctattaatggaagaaggtaatttttaggatgtgtattatttcagttttgtatgtttaacttttattaaataaagtgtttttaaaatctccagggtgtgttaacaaaagggtaaagtctttagctgtcagcacttaaagcaattaaacctccaagtacttgcacacggcattcatgcaagagaatactgagtgtgtgagaggtttcagtaaatgcttaagtattccttccattagaagaaattggatcttaaagggcaaaccaggcctgtgtttataggatgtcctcattttaatgggtgtttgtagatttttggtggaaggggaaaataagtttttatttcatgaattttaattttttttataaattgaaacttaggacag

SEQ ID NO: 450263 - DNA, 2059 bp, Homo sapiens
agttggtatttctcgcgagacttcaccgtctctgtcttttcctccttccagtgcccggcgttcctcccttccccctcgccgccgaccgagttcttccttttcagaccgggtcgccttgctgtcgtcgcggtgattttcctgctactgctactgctgctgctgccaccgccactaccactgggctcatttgccccgaccccttcccgccgccccgcccccagccccacacaagatgtcagaggatttagcaaagcagctggcaagctacaaagctcagctccagcaagttgaagctgcattatctggaaatggagaaaatgaagatttgctaaaattgaagaaagatttacaagaagttatagaactaaccaaagaccttctgtcaactcaaccttctgagacgcttgcaagttcagacagttttgcttctactcaacctactcattcatggaaagtaggagacaagtgtatggcagtctggagtgaagatggacagtgttatgaagcggagattgaggagatagatgaagaaaatggcaccgctgcaatcacctttgctggttatggcaatgctgaagtgactccactgttgaacctcaagcctgtagaagaaggaaggaaggcaaaggaggacagtggcaacaaacccatgtcaaaaaaagaaatgattgcccagcagcgtgaatataaaaagaagaaagctttgaaaaaagctcagagaataaaagaacttgagcaggaaagagaggaccagaaagtgaaatggcaacaattcaacaacagagcctattctaaaaacaaaaaaggccaggtaaagaggagtatttttgcttcacctgagagtgtgactggtaaagttggagtaggaacctgtggaattgctgataaacctatgacacaatatcaagatacctctaaatacaatgtcaggcatttgatgcctcaataatcagaaaaactgttggatttcatctctgcagggctttacatttacctttttatccttatatttttctaaaggtaaattatttgttagatgagtaagcaagataccattgtcgtcattggttggcttcagtagaatgaaacgtgaagaaattgcatttgataactgctattcatttaacttttctcattatcagtaccacggttccctcaaagtttgttgaataaagcaacttttgtagatgctgtttcatacagcacttagatgaattattgatcttcctaatatcaggcgcctacttaacctatggtgtgtactttttgtaagttgtaacttgaaattttcagatgctttgaacttgacacatactctagcaattcattggaacaccaaggcaaaaacaccaacctgctaaaagagatcttttcatttttcttattttcagctttaaaacttagctgtcgttcagttaagcttaaagataggttaatttgtaaatggcaaagtttgttttgaggtttttcctcaataacttgtttcccaggcctattaggccatctctaaaattgatctagctgttttatttttatgtactcttagttttatgtaagaaaccttaggatgagctcccttttctaaggtgtttttgttttttgtatgtttgcttttttcctgttttttgttttttccatttacggcagtggtaccatgttttggatgtgtgatgtttatatgggagaacaaaaagctgatgtatagccctgtatacagtgtagatactatttttgtaaaaacacaaggctaaattaatgaacaagaatactgaatatttcatcattaaaaatttcttgtatttcttgtgcattaatctgacgataatttccctgtatattatgttcatttagctgtttgtaatttttgttaattagatcaggttgtctgcatttgttggtgtaagtgaacatcatcacagttatcctgagttgagtttaagccaaatacatgcatagaaaagggtcttcctattaatggaagaaggtaatttttaggatgtgtattatttcagttttgtatgtttaacttttattaaataaagtgtttttaaaatctcca

SEQ ID NO: 450264 - DNA, 2400 bp, Homo sapiens
agttggtatttctcgcgagacttcaccgtctctgtcttttcctccttccagtgcccggcgttcctcccttccccctcgccgccgaccgagttcttccttttcagaccgggtcgccttgctgtcgtcgcggtgattttcctgctactgctactgctgctgctgccaccgccactaccactgggctcatttgccccgaccccttcccgccgccccgcccccagccccacacaagatgtcagaggatttagcaaagcagctggcaagctacaaagctcagctccagcaagttgaagctgcattatctggaaatggagaaaatgaagatttgctaaaattgaagaaagatttacaagaagttatagaactaaccaaagaccttctgtcaactcaaccttctgagacgcttgcaagttcagacagttttgcttctactcaacctactcattcatggaaagtaggagacaagtgtatggcagtctggagtgaagatggacagtgttatgaagcggagattgaggagatagatgaagaaaatggcaccgctgcaatcacctttgctggttatggcaatgctgaagtgactccactgttgaacctcaagcctgtagaagaaggaaggaaggcaaaggaggacagtggcaacaaacccatgtcaaaaaaagaaatgattgcccagcagcgtgaatataaaaagaagaaagctttgaaaaaagctcagagaataaaagaacttgagcaggaaagagaggaccagaaagtgaaatggcaacaattcaacaacagagcctattctaaaaacaaaaaaggccaggtaaagaggagtatttttgcttcacctgagagtgtgactggtaaagttggagtaggaacctgtggaattgctgataaacctatgacacaatatcaagatacctctaaatacaatgtcaggcatttgatgcctcaataatcagaaaaactgttggatttcatctctgcagggctttacatttacctttttatccttatatttttctaaaggtaaattatttgttagatgagtaagcaagataccattgtcgtcattggttggcttcagtagaatgaaacgtgaagaaattgcatttgataactgctattcatttaacttttctcattatcagtaccacggttccctcaaagtttgttgaataaagcaacttttgtagatgctgtttcatacagcacttagatgaattattgatcttcctaatatcaggcgcctacttaacctatggtgtgtactttttgtaagttgtaacttgaaattttcagatgctttgaacttgacacatactctagcaattcattggaacaccaaggcaaaaacaccaacctgctaaaagagatcttttcatttttcttattttcagctttaaaacttagctgtcgttcagttaagcttaaagataggttaatttgtaaatggcaaagtttgttttgaggtttttcctcaataacttgtttcccaggcctattaggccatctctaaaattgatctagctgttttatttttatgtactcttagttttatgtaagaaaccttaggatgagctcccttttctaaggtgtttttgttttttgtatgtttgcttttttcctgttttttgttttttccatttacggcagtggtaccatgttttggatgtgtgatgtttatatgggagaacaaaaagctgatgtatagccctgtatacagtgtagatactatttttgtaaaaacacaaggctaaattaatgaacaagaatactgaatatttcatcattaaaaatttcttgtatttcttgtgcattaatctgacgataatttccctgtatattatgttcatttagctgtttgtaatttttgttaattagatcaggttgtctgcatttgttggtgtaagtgaacatcatcacagttatcctgagttgagtttaagccaaatacatgcatagaaaagggtcttcctattaatggaagaaggtaatttttaggatgtgtattatttcagttttgtatgtttaacttttattaaataaagtgtttttaaaatctccaaaaaaaaaaaaaaaaaaaaaaaaaaacaaaaaaaaaaagggggggggggaaaaaaagaatccccgggggggccaaaggttaaggcttaccccggtttttttgtcacaaggggggccctatgaaggagagcgaattaaaagagaaggcgggaggggttaaaaacggtcgggacgggggaacatgggtacgttgcaatttttgggaaggaaccctacttctggtggtgggcttagttggacaactactaagagattaagggtcagggaaataaatttacgtgtttatggtaccacgaatgtgcgcgaaatgggtcggtatatagatagagggtaaaaataagg

SEQ ID NO: 450265 - DNA, 2005 bp, Homo sapiens
agttggtatttctcgcgagacttcaccgtctctgtcttttcctccttccagtgcccggcgttcctcccttccccctcgccgccgaccgagttcttccttttcagaccgggtcgccttgctgtcgtcgcggtgattttcctgctactgctactgctgctgctgccaccgccactaccactgggctcatttgccccgaccccttcccgccgccccgcccccagccccacacaagatgtcagaggatttagcaaagcagctggcaagctacaaagctcagctccagcaagttgaagctgcattatctggaaatggagaaaatgaagatttgctaaaattgaagaaagatttacaagaagttatagaactaaccaaagaccttctgtcaactcaaccttctgagacgcttgcaagttcagacagttttgcttctactcaacctactcattcatggaaagtaggagacaagtgtatggcagtctggagtgaagatggacagtgttatgaagcggagattgaggagatagatgaagaaaatggcaccgctgcaatcacctttgctggttatggcaatgctgaagtgactccactgttgaacctcaagcctgtagaagaaggaaggaaggcaaaggaggacagtggcaacaaacccatgtcaaaaaaagaaatgattgcccagcagcgtgaatataaaaagaagaaagctttgaaaaaagctcagagaataaaagaacttgagcaggaaagagaggaccagaaagtgaaatggcaacaattcaacaacagagcctattctaaaaacaaaaaaggccaggtaaagaggagtatttttgcttcacctgagagtgtgactggtaaagttggagtaggaacctgtggaattgctgataaacctatgacacaatatcaagatacctctaaatacaatgtcaggcatttgatgcctcaataatcaatatttttctaaaggtaaattatttgttagatgagtaagcaagataccattgtcgtcattggttggcttcagtagaatgaaacgtgaagaaattgcatttgataactgctattcatttaacttttctcattatcagtaccacggttccctcaaagtttgttgaataaagcaacttttgtagatgctgtttcatacagcacttagatgaattattgatcttcctaatatcaggcgcctacttaacctatggtgtgtactttttgtaagttgtaacttgaaattttcagatgctttgaacttgacacatactctagcaattcattggaacaccaaggcaaaaacaccaacctgctaaaagagatcttttcatttttcttattttcagctttaaaacttagctgtcgttcagttaagcttaaagataggttaatttgtaaatggcaaagtttgttttgaggtttttcctcaataacttgtttcccaggcctattaggccatctctaaaattgatctagctgttttatttttatgtactcttagttttatgtaagaaaccttaggatgagctcccttttctaaggtgtttttgttttttgtatgtttgcttttttcctgttttttgttttttccatttacggcagtggtaccatgttttggatgtgtgatgtttatatgggagaacaaaaagctgatgtatagccctgtatacagtgtagatactatttttgtaaaaacacaaggctaaattaatgaacaagaatactgaatatttcatcattaaaaatttcttgtatttcttgtgcattaatctgacgataatttccctgtatattatgttcatttagctgtttgtaatttttgttaattagatcaggttgtctgcatttgttggtgtaagtgaacatcatcacagttatcctgagttgagtttaagccaaatacatgcatagaaaagggtcttcctattaatggaagaaggtaatttttaggatgtgtattatttcagttttgtatgtttaacttttattaaataaagtgtttttaaaatctcca

SEQ ID NO: 450266 - DNA, 2975 bp, Homo sapiens
agttggtatttctcgcgagacttcaccgtctctgtcttttcctccttccagtgcccggcgttcctcccttccccctcgccgccgaccgagttcttccttttcagaccgggtcgccttgctgtcgtcgcggtgattttcctgctactgctactgctgctgctgccaccgccactaccactgggctcatttgccccgaccccttcccgccgccccgcccccagccccacacaagatgtcagaggatttagcaaagcagctggcaagctacaaagctcagctccagcaagttgaagctgcattatctggaaatggagaaaatgaagatttgctaaaattgaagaaagatttacaagaagttatagaactaaccaaagaccttctgtcaactcaaccttctgagacgcttgcaagttcagacagttttgcttctactcaacctactcattcatggaaagtaggagacaagtgtatggcagtctggagtgaagatggacagtaagtgtagaaaaaaaaactctaactataacatgaaataataaaatacaatggtaagaagtttttattcagttttaactaccctattttaatcttgacttctattaggcagtatgatttatagagccaatttgattcttgggtggttgccattaatacagtttagttttagctttagattaagttttggggagaagaatggctgggattctggaggaaagaaaaacaggacaatgaatgggtgttttctaaaataatctaaattattttctctaattgaaaattgagtgaatggttggtttttctgagaattctgtgaagagcatacactgacatcattcctataagaaatatcttttcgctgggtgtggtggctcatgcctgtaatctcagcactttgggaggctgaggcaggcagatcgcttgaggtcaggagttggagagcagcctgaccaacatggtgaaaccccatctctactaaaaatacaaaaatcagttaggtgtggtggcgtgtgcctgtaatcccagctacttgggagactgaggcatgagaattgtttgaacctgggaggcggaggttgaagtgagctgagattgcactactgcactccagcctgggcgacagtgagactctgtcgcaaaaaagagaaaaaaagaaacctctattctcaaagacattaaatcacgttgagtaggtacatgtaagagacttgcccagcaatattatgattgggatgtccttttttgatagcagataactaacttcaaccactcttttgtattctctttgctgaaacaaccatttgattatagaagtttcattatagacacatgtaataattttatcactacagtataagtcttgtaggctgagtactaaacctttactcacctgcttacagccatgatatctttagtgttatgaagcggagattgaggagatagatgaagaaaatggcaccgctgcaatcacctttgctggttatggcaatgctgaagtgactccactgttgaacctcaagcctgtagaagaaggaaggaaggcaaaggaggacagtggcaacaaacccatgtcaaaaaaagaaatgattgcccagcagcgtgaatataaaaagaagaaagctttgaaaaaagctcagagaataaaagaacttgagcaggaaagagaggaccagaaagtgaaatggcaacaattcaacaacagagcctattctaaaaacaaaaaaggccaggtaaagaggagtatttttgcttcacctgagagtgtgactggtaaagttggagtaggaacctgtggaattgctgataaacctatgacacaatatcaagatacctctaaatacaatgtcaggcatttgatgcctcaataatcagaaaaactgttggatttcatctctgcagggctttacatttacctttttatccttatatttttctaaaggtaaattatttgttagatgagtaagcaagataccattgtcgtcattggttggcttcagtagaatgaaacgtgaagaaattgcatttgataactgctattcatttaacttttctcattatcagtaccacggttccctcaaagtttgttgaataaagcaacttttgtagatgctgtttcatacagcacttagatgaattattgatcttcctaatatcaggcgcctacttaacctatggtgtgtactttttgtaagttgtaacttgaaattttcagatgctttgaacttgacacatactctagcaattcattggaacaccaaggcaaaaacaccaacctgctaaaagagatcttttcatttttcttattttcagctttaaaacttagctgtcgttcagttaagcttaaagataggttaatttgtaaatggcaaagtttgttttgaggtttttcctcaataacttgtttcccaggcctattaggccatctctaaaattgatctagctgttttatttttatgtactcttagttttatgtaagaaaccttaggatgagctcccttttctaaggtgtttttgttttttgtatgtttgcttttttcctgttttttgttttttccatttacggcagtggtaccatgttttggatgtgtgatgtttatatgggagaacaaaaagctgatgtatagccctgtatacagtgtagatactatttttgtaaaaacacaaggctaaattaatgaacaagaatactgaatatttcatcattaaaaatttcttgtatttcttgtgcattaatctgacgataatttccctgtatattatgttcatttagctgtttgtaatttttgttaattagatcaggttgtctgcatttgttggtgtaagtgaacatcatcacagttatcctgagttgagtttaagccaaatacatgcatagaaaagggtcttcctattaatggaagaaggtaatttttaggatgtgtattatttcagttttgtatgtttaacttttattaaataaagtgtttttaaaatctcca

SEQ ID NO: 450267 - DNA, 2064 bp, Homo sapiens
gtgtctgggtggggcctgggagccacaggagatgcccaaagccaggcagagcccgggggcgaggggacggcaggcaggtgtggcgctgccctgggcgggcttgcacccccacacccaagtgagcggcctgctcactcctcagctgcaggagccagacgtgtggagtcccagcagaggccaacctgtgtctcttcatctccctgggaaaggtgcccccgaggtgaaagagatggcctggtggaaatcctggattgaacaggagggtgtcacagtgaagagcagctcccacttcaacccagaccctgatgcagagaccctctacaaagccatgaaggggatcgggaccaacgagcaggctatcatcgatgtgctcaccaagagaagcaacacgcagcggcagcagatcgccaagtccttcaaggctcagttcggcaaggacctcactgagaccttgaagtctgagctcagtggcaagtttgagaggctcattgtggcccttatgtacccgccatacagatacgaagccaaggagctgcatgacgccatgaagggcttaggaaccaaggagggtgtcatcattgagatcctggcctctcggaccaagaaccagctgcgggagataatgaaggcgtatgaggaagactatgggtccagcctggaggaggacatccaagcagacacaagtggctacctggagaggatcctggtgtgcctcctgcagggcagcagggatgatgtgagcagctttgtggacccaggactggccctccaagacgcacaggatctgtatgcggcaggcgagaagattcgtgggactgatgagatgaaattcatcaccatcctgtgcacgcgcagtgccactcacctgctgagagtgtttgaagagtatgagaaaattgccaacaagagcattgaggacagcatcaagagtgagacccatggctcactggaggaggccatgctcactgtggtgaaatgcacccaaaacctccacagctactttgcagagagactctactatgccatgaagggagcagggacgcgtgatgggaccctgataagaaacatcgtttcaaggagcgagattgacttaaatcttatcaaatgtcacttcaagaagatgtacggcaagaccctcagcagcatgatcatggaagacaccagcggtgactacaagaacgccctgctgagcctggtgggcagcgacccctgaggcacagaagaacaagagcaaagaccatgaagccagagtctccaggactcctcactcaacctcggccatggacgcaggttgggtgtgaggggggtcccagcctttcggtcttctatttccctatttccagtgctttccagccgggtttctgacccagagggtggaaccggcctggactcctcttcccaacttcctccaggtcatttcccagtgtgagcacaatgccaaccttagtgtttctccagccagacagatgcctcagcatgaagggcttggggacttgtggatcattccttcctccctgcaggagcttcccaagctggtcacagagtctcctgggcacaggttatacagaccccagccccattcccatctactgaaacagggtctccacaagaggggccagggaatatgggtttttaacaagcgtcttacaaaacacttctctatcatgcagccggagagctggctgggagcccttttgttttagaacacacatccttcagcagctgagaaacgaacacgaatccatcccaaccgagatgccattaacattcatctaaaaatgttaggctctaaatggacgaaaaattctctcgccatcttaataacaaaataaactacaaattcctgacccaaggacactgtgttataagaggcgtgggctcccctggtggctgaccaggtcagctgccctggccttgcacccctctgcatgcagcacagaagggtgtgaccatgccctcagcaccactcttgtccccactgaacggcaactgagactgggtacctggagattctgaagtgcctttgctgtggttttcaaaataataaagatttgtattcaactc

SEQ ID NO: 450268 - DNA, 1260 bp, Homo sapiens
cgcgcgggggcgggcgcgcggggccttgccggagaacctgactctccgcagcagcagtggaagccagagtgacgcgttgtgttgaacaccagttttctggagcgctgtgtgttctcatagctgagcagtctgtttctccaatcaggtttcaaagccacttcaactgcactggcccctgtgggtcactgctgcaccgccctggcccatgtgggtccctgaggagcgacctgccggggccacctggctggacgaaaaagacacaccttggacttaagccgtgagaaaaaaacttcatcagtaagaaacaagtcaatagacaagtaaaagactaggagaaaatatgcataaaacataaaaaagtgacttgattcctgattctggagtatttaagaattcctataactcaacaaaaagttcagttttttaaaatgagcaaaaggcttgggtaaactattcacaaaggaacgtagacaaatgccagtacacacatgagaagcgcatacacatccacaaacttcaaacaagcccacctcatgtatttctagtgagtaaggaaaagaacgcaaacacttttgaaaattgtttggttgtttcttgtaaatttaaacaaataccctattatattatccagcgagtccatccttaggtttttatccaaggataaagaggtgaaaactcatatctaacaaatagacttctgaaaagatgaaaatagaagctttattcataaaagacaaaaactggaaataacccaaatattcattcacaggagaatgaataaacagactaggttgaatccatacaatggaatggtagcagacaataaaaagaaaatgaactattgatgccccctactgcacagcagaagctctgaatcgtgttcctgaatgaaagaagtcaggtatgaaagaataaacattgtatgattccatttatatgaaaatgaatctgtgatttaaaaatcagactagtattaggttggtgcgaaagtaattgcggtttttgccttttttttttttttttaaatagttgctttggggtttatggatggagtggcatggtagaggttagctgaagggggcatgaaataactttttgggggtgctagagtgttgtaaatcttacagtgggggagggacaggagtgcaggcatttgacaaaacacattgaattgtgaaatttaagatttttgaatttctttgtatgtaaattacctgccaataaaaacatgacgaatagagcagttatgagcatttgtgt

SEQ ID NO: 450269 - DNA, 860 bp, Homo sapiens
  misc_feature (647)..(647): n is a, c, g, or t
gtgtctgggtggggcctgggagccacaggagatgcccaaagccaggcagagcccgggggcgaggggacggcaggcaggtgtggcgctgccctgggcgggcttgcacccccacacccaagtgagcggcctgctcactcctcagctgcaggagccagacgtgtggagtcccagcagaggccaacctgtgtctcttcatctccctgggaaaggtgcccccgaggtgaaagagatggcctggtggaaatcctgggagaatgaataaacagactaggttgaatccatacaatggaatggtagcagacaataaaaagaaaatgaactattgatgccccctactgcacagcagaagctctgaatcgtgttcctgaatgaaagaagtcagatggtgtcagagcagatctgaagtagagcttctaacgactcccaggagtgctgagtgaccgaagccaggtacctgcaggacctatttgtgttcgttgatctctcagagcagttggaagtcatggtggtgctgagtccctgggtacatggaggagcaaagacatgaacctttccctgctcctggcaactggctccatcctactccctatgggcttcatgaacttgcctgtggttggggatacttcctgcccttatgggccccaganaccctatctcttaaaaagggaaatttccctggacatctctcagttgctgtccaccctgtgaaatgaacccaggaagctactggttaggtaccctagcccggtctggccaaatcgcaagtgttctggcggtggaacacttagcatacggttggagagtccctctcggtgatgtgctagaagcaaccttatatggcaccacctcaccagggggga

SEQ ID NO: 450270 - DNA, 1964 bp, Homo sapiens
  misc_feature (3)..(3): n is a, c, g, or t
  misc_feature (11)..(11): n is a, c, g, or t
  misc_feature (24)..(24): n is a, c, g, or t
aantaggctangtacgggctgggnttgaatcggccgtgtggagtcccagcagaggccaacctgtgtctcttcatctccctgggaaaggtgcccccgaggtgaaagagatggcctggtggaaatcctggagcaggcctggttctcttgcagattgaacaggagggtgtcacagtgaagagcagctcccacttcaacccagaccctgatgcagagaccctctacaaagccatgaaggggatcgggaccaacgagcaggctatcatcgatgtgctcaccaagagaagcaacacgcagcggcagcagatcgccaagtccttcaaggctcagttcggcaaggacctcactgagaccttgaagtctgagctcagtggcaagtttgagaggctcattgtggcccttatgtacccgccatacagatacgaagccaaggagctgcatgacgccatgaagggcttaggaaccaaggagggtgtcatcattgagatcctggcctctcggaccaagaaccagctgcgggagataatgaaggcgtatgaggaagactatgggtccagcctggaggaggacatccaagcagacacaagtggctacctggagaggatcctggtgtgcctcctgcagggcagcagggatgatgtgagcagctttgtggacccaggactggccctccaagacgcacaggatctgtatgcggcaggcgagaagattcgtgggactgatgagatgaaattcatcaccatcctgtgcacgcgcagtgccactcacctgctgagagtgtttgaagagtatgagaaaattgccaacaagagcattgaggacagcatcaagagtgagacccatggctcactggaggaggccatgctcactgtggtgaaatgcacccaaaacctccacagctactttgcagagagactctactatgccatgaagggagcagggacgcgtgatgggaccctgataagaaacatcgtttcaaggagcgagattgacttaaatcttatcaaatgtcacttcaagaagatgtacggcaagaccctcagcagcatgatcatggaagacaccagcggtgactacaagaacgccctgctgagcctggtgggcagcgacccctgaggcacagaagaacaagagcaaagaccatgaagccagagtctccaggactcctcactcaacctcggccatggacgcaggttgggtgtgaggggggtcccagcctttcggtcttctatttccctatttccagtgctttccagccgggtttctgacccagagggtggaaccggcctggactcctcttcccaacttcctccaggtcatttcccagtgtgagcacaatgccaaccttagtgtttctccagccagacagatgcctcagcatgaagggcttggggacttgtggatcattccttcctccctgcaggagcttcccaagctggtcacagagtctcctgggcacaggttatacagaccccagccccattcccatctactgaaacagggtctccacaagaggggccagggaatatgggtttttaacaagcgtcttacaaaacacttctctatcatgcagccggagagctggctgggagcccttttgttttagaacacacatccttcagcagctgagaaacgaacacgaatccatcccaaccgagatgccattaacattcatctaaaaatgttaggctctaaatggacgaaaaattctctcgccatcttaataacaaaataaactacaaattcctgacccaaggacactgtgttataagaggcgtgggctcccctggtggctgaccaggtcagctgccctggccttgcacccctctgcatgcagcacagaagggtgtgaccatgccctcagcaccactcttgtccccactgaacggcaactgagactgggtacctggagattctgaagtgcctttgctgtggttttcaaaataataaagatttgtattcaactc

SEQ ID NO: 450271 - DNA, 1866 bp, Homo sapiens
atgcagctccaggaagcctttgcttcagtgttctttcccctcctaactttggattgaacaggagggtgtcacagtgaagagcagctcccacttcaacccagaccctgatgcagagaccctctacaaagccatgaaggggatcgggaccaacgagcaggctatcatcgatgtgctcaccaagagaagcaacacgcagcggcagcagatcgccaagtccttcaaggctcagttcggcaaggacctcactgagaccttgaagtctgagctcagtggcaagtttgagaggctcattgtggcccttatgtacccgccatacagatacgaagccaaggagctgcatgacgccatgaagggcttaggaaccaaggagggtgtcatcattgagatcctggcctctcggaccaagaaccagctgcgggagataatgaaggcgtatgaggaagactatgggtccagcctggaggaggacatccaagcagacacaagtggctacctggagaggatcctggtgtgcctcctgcagggcagcagggatgatgtgagcagctttgtggacccaggactggccctccaagacgcacaggatctgtatgcggcaggcgagaagattcgtgggactgatgagatgaaattcatcaccatcctgtgcacgcgcagtgccactcacctgctgagagtgtttgaagagtatgagaaaattgccaacaagagcattgaggacagcatcaagagtgagacccatggctcactggaggaggccatgctcactgtggtgaaatgcacccaaaacctccacagctactttgcagagagactctactatgccatgaagggagcagggacgcgtgatgggaccctgataagaaacatcgtttcaaggagcgagattgacttaaatcttatcaaatgtcacttcaagaagatgtacggcaagaccctcagcagcatgatcatggaagacaccagcggtgactacaagaacgccctgctgagcctggtgggcagcgacccctgaggcacagaagaacaagagcaaagaccatgaagccagagtctccaggactcctcactcaacctcggccatggacgcaggttgggtgtgaggggggtcccagcctttcggtcttctatttccctatttccagtgctttccagccgggtttctgacccagagggtggaaccggcctggactcctcttcccaacttcctccaggtcatttcccagtgtgagcacaatgccaaccttagtgtttctccagccagacagatgcctcagcatgaagggcttggggacttgtggatcattccttcctccctgcaggagcttcccaagctggtcacagagtctcctgggcacaggttatacagaccccagccccattcccatctactgaaacagggtctccacaagaggggccagggaatatgggtttttaacaagcgtcttacaaaacacttctctatcatgcagccggagagctggctgggagcccttttgttttagaacacacatccttcagcagctgagaaacgaacacgaatccatcccaaccgagatgccattaacattcatctaaaaatgttaggctctaaatggacgaaaaattctctcgccatcttaataacaaaataaactacaaattcctgacccaaggacactgtgttataagaggcgtgggctcccctggtggctgaccaggtcagctgccctggccttgcacccctctgcatgcagcacagaagggtgtgaccatgccctcagcaccactcttgtccccactgaacggcaactgagactgggtacctggagattctgaagtgcctttgctgtggttttcaaaataataaagatttgtattcaactc

SEQ ID NO: 450272 - DNA, 1449 bp, Homo sapiens
ccatgtggccccagctgacatgagactggtcagggatgaaggtgagcaggaaggccctgcctgtgaaattcctggctgagctgattgctgccattgctctagtaggaagtcttgttcctggagcagtgagtattttgtgtctagaatctgatgtggcaaaccaaacatactgcagtttggagcacttggcatcataaaggaagagttctgggcagtgggtgagaaggaattaagggagtggacaccctaagccaccaaagcttccctcctaatgcttccctggctgaagcacaggctccttcccacatctccctccctctaaaagccccagaacccaaccacacagatccgtccatcactcagagatggacaggaaaggtgaggcaggattgttgatggctgctgtcttgcccagggagcagggacgcgtgatgggaccctgataagaaacatcgtttcaaggagcgagattgacttaaatcttatcaaatgtcacttcaagaagatgtacggcaagaccctcagcagcatgatcatggaagacaccagcggtgactacaagaacgccctgctgagcctggtgggcagcgacccctgaggcacagaagaacaagagcaaagaccatgaagccagagtctccaggactcctcactcaacctcggccatggacgcaggttgggtgtgaggggggtcccagcctttcggtcttctatttccctatttccagtgctttccagccgggtttctgacccagagggtggaaccggcctggactcctcttcccaacttcctccaggtcatttcccagtgtgagcacaatgccaaccttagtgtttctccagccagacagatgcctcagcatgaagggcttggggacttgtggatcattccttcctccctgcaggagcttcccaagctggtcacagagtctcctgggcacaggttatacagaccccagccccattcccatctactgaaacagggtctccacaagaggggccagggaatatgggtttttaacaagcgtcttacaaaacacttctctatcatgcagccggagagctggctgggagcccttttgttttagaacacacatccttcagcagctgagaaacgaacacgaatccatcccaaccgagatgccattaacattcatctaaaaatgttaggctctaaatggacgaaaaattctctcgccatcttaataacaaaataaactacaaattcctgacccaaggacactgtgttataagaggcgtgggctcccctggtggctgaccaggtcagctgccctggccttgcacccctctgcatgcagcacagaagggtgtgaccatgccctcagcaccactcttgtccccactgaacggcaactgagactgggtacctggagattctgaagtgcctttgctgtggttttcaaaataataaagatttgtattcaactc

SEQ ID NO: 450273 - DNA, 960 bp, Homo sapiens
ccaggcacaagcaaaccccttctcacgcttatgcgcctcctgcccacaggaagacaccagcggtgactacaagaacgccctgctgagcctggtgggcagcgacccctgaggcacagaagaacaagagcaaagaccatgaagccagagtctccaggactcctcactcaacctcggccatggacgcaggttgggtgtgaggggggtcccagcctttcggtcttctatttccctatttccagtgctttccagccgggtttctgacccagagggtggaaccggcctggactcctcttcccaacttcctccaggtcatttcccagtgtgagcacaatgccaaccttagtgtttctccagccagacagatgcctcagcatgaagggcttggggacttgtggatcattccttcctccctgcaggagcttcccaagctggtcacagagtctcctgggcacaggttatacagaccccagccccattcccatctactgaaacagggtctccacaagaggggccagggaatatgggtttttaacaagcgtcttacaaaacacttctctatcatgcagccggagagctggctgggagcccttttgttttagaacacacatccttcagcagctgagaaacgaacacgaatccatcccaaccgagatgccattaacattcatctaaaaatgttaggctctaaatggacgaaaaattctctcgccatcttaataacaaaataaactacaaattcctgacccaaggacactgtgttataagaggcgtgggctcccctggtggctgaccaggtcagctgccctggccttgcacccctctgcatgcagcacagaagggtgtgaccatgccctcagcaccactcttgtccccactgaacggcaactgagactgggtacctggagattctgaagtgcctttgctgtggttttcaaaataataaagatttgtattcaactc

SEQ ID NO: 450274 - DNA, 932 bp, Homo sapiens
ttgggtatctagcaggatctcgaagacaccagcggtgactacaagaacgccctgctgagcctggtgggcagcgacccctgaggcacagaagaacaagagcaaagaccatgaagccagagtctccaggactcctcactcaacctcggccatggacgcaggttgggtgtgaggggggtcccagcctttcggtcttctatttccctatttccagtgctttccagccgggtttctgacccagagggtggaaccggcctggactcctcttcccaacttcctccaggtcatttcccagtgtgagcacaatgccaaccttagtgtttctccagccagacagatgcctcagcatgaagggcttggggacttgtggatcattccttcctccctgcaggagcttcccaagctggtcacagagtctcctgggcacaggttatacagaccccagccccattcccatctactgaaacagggtctccacaagaggggccagggaatatgggtttttaacaagcgtcttacaaaacacttctctatcatgcagccggagagctggctgggagcccttttgttttagaacacacatccttcagcagctgagaaacgaacacgaatccatcccaaccgagatgccattaacattcatctaaaaatgttaggctctaaatggacgaaaaattctctcgccatcttaataacaaaataaactacaaattcctgacccaaggacactgtgttataagaggcgtgggctcccctggtggctgaccaggtcagctgccctggccttgcacccctctgcatgcagcacagaagggtgtgaccatgccctcagcaccactcttgtccccactgaacggcaactgagactgggtacctggagattctgaagtgcctttgctgtggttttcaaaataataaagatttgtattcaactc

SEQ ID NO: 450275 - DNA, 906 bp, Homo sapiens
ggatgagctcggtacctgtttgagcctgctgagcctggtgggcagcgacccctgaggcacagaagaacaagagcaaagaccatgaagccagagtctccaggactcctcactcaacctcggccatggacgcaggttgggtgtgaggggggtcccagcctttcggtcttctatttccctatttccagtgctttccagccgggtttctgacccagagggtggaaccggcctggactcctcttcccaacttcctccaggtcatttcccagtgtgagcacaatgccaaccttagtgtttctccagccagacagatgcctcagcatgaagggcttggggacttgtggatcattccttcctccctgcaggagcttcccaagctggtcacagagtctcctgggcacaggttatacagaccccagccccattcccatctactgaaacagggtctccacaagaggggccagggaatatgggtttttaacaagcgtcttacaaaacacttctctatcatgcagccggagagctggctgggagcccttttgttttagaacacacatccttcagcagctgagaaacgaacacgaatccatcccaaccgagatgccattaacattcatctaaaaatgttaggctctaaatggacgaaaaattctctcgccatcttaataacaaaataaactacaaattcctgacccaaggacactgtgttataagaggcgtgggctcccctggtggctgaccaggtcagctgccctggccttgcacccctctgcatgcagcacagaagggtgtgaccatgccctcagcaccactcttgtccccactgaacggcaactgagactgggtacctggagattctgaagtgcctttgctgtggttttcaaaataataaagatttgtattcaactc

SEQ ID NO: 450276 - DNA, 1276 bp, Homo sapiens
gtgtctgggtggggcctgggagccacaggagatgcccaaagccaggcagagcccgggggcgaggggacggcaggcaggtgtggcgctgccctgggcgggcttgcacccccacacccaagtgagcggcctgctcactcctcagctgcaggagccagacgtgtggagtcccagcagaggccaacctgtgtctcttcatctccctgggaaaggtgcccccgaggtgaaagagatggcctggtggaaatcctggattgaacaggagggtgtcacagtgaagagcagctcccacttcaacccagaccctgatgcagagaccctctacaaagccatgaaggggatcgggaccaacgagcaggctatcatcgatgtgctcaccaagagaagcaacacgcagcggcagcagatcgccaagtccttcaaggctcagttcggcaaggacctcactgagaccttgaagtctgagctcagtggcaagtttgagaggctcattgtggcccttatgtacccgccatacagatacgaagccaaggagctgcatgacgccatgaagggcttaggaaccaaggagggtgtcatcattgagatcctggcctctcggaccaagaaccagctgcgggagataatgaaggcgtatgaggaagactatgggtccagcctggaggaggacatccaagcagacacaagtggctacctggagaggatcctggtgtgcctcctgcagggcagcagggatgatgtgagcagctttgtggacccaggactggccctccaagacgcacaggatctgtatgcggcaggcgagaagattcgtgggactgatgagatgaaattcatcaccatcctgtgcacgcgcagtgccactcacctgctgagagtgtttgaagagtatgagaaaattgccaacaagagcattgaggacagcatcaagagtgagacccatggctcactggaggaggccatgctcactgtggtgaaatgcacccaaaacctccacagctactttgcagagagactctactatgccatgaaggagcagggacgcgtgacggggacctggataacaacacatcgtcttccaggacccgaggatgacttagagtctgcagcacatggtcacctcccagcacgacgtccggacagaccctcagcagcatgagcacgcgacgaacaaccgcggcgcatacagaacgcccgccagaccaggcgggccggatcccgacggccgccagaaagccgacacacaaccccgacgccgagccccggaccccccagcaga

SEQ ID NO: 450277 - DNA, 1135 bp, Homo sapiens
  misc_feature (57)..(57): n is a, c, g, or t
ggcgcgtgcacaggatggtgatgaatttcatctcatcagtcccacgaatcttctcgncctgctgagagtgtttgaagagtatgagaaaattgccaacaagagcattgaggacagcatcaagagtgagacccatggctcactggaggaggccatgctcactgtggtgaaatgcacccaaaacctccacagctactttgcagagagactctactatgccatgaagggagcagggacgcgtgatgggaccctgataagaaacatcgtttcaaggagcgagattgacttaaatcttatcaaatgtcacttcaagaagatgtacggcaagaccctcagcagcatgatcatggaagacaccagcggtgactacaagaacgccctgctgagcctggtgggcagcgacccctgaggcacagaagaacaagagcaaagaccatgaagccagagtctccaggactcctcactcaacctcggccatggacgcaggtcatttcccagtgtgagcacaatgccaaccttagtgtttctccagccagacagatgcctcagcatgaagggcttggggacttgtggatcattccttcctccctgcaggagcttcccaagctggtcacagagtctcctgggcacaggttatacagaccccagccccattcccatctactgaaacagggtctccacaagaggggccagggaatatgggtttttaacaagcgtcttacaaaacacttctctatcatgcagccggagagctggctgggagcccttttgttttagaacacacatccttcagcagctgagaaacgaacacgaatccatcccaaccgagatgccattaacattcatctaaaaatgttaggctctaaatggacgaaaaattctctcgccatcttaataacaaaataaactacaaattcctgacccaaggacactgtgttataagaggcgtgggctcccctggtggctgaccaggtcagctgccctggccttgcacccctctgcatgcagcacagaagggtgtgaccatgccctcagcaccactcttgtccccactgaacggcaactgagactgggtacctggagattctgaagtgcctttgctgtggttttcaaaataataaagatttgtattcaactc

SEQ ID NO: 450278 - DNA, 1135 bp, Homo sapiens
  misc_feature (1093)..(1093): n is a, c, g, or t
cgcgcgggggcgggcgcgcggggccttgccggagaacctgactctccgcagcagcagtggaagccagagtgacgcgttgtgttgaacaccagttttctggagcgctgtgtgttctcatagctgagcagtctgtttctccaatcaggtttcaaagccacttcaactgcactggcccctgtgggtcactgctgcaccgccctggcccatgtgggtccctgaggagcgacctgccggggccacctggctggacgaaaaagacacaccttggacttaagccgtgagaaaaaaacttcatcagtaagaaacaagtcaatagacaagtaaaagactaggagaaaatatgcataaaacataaaaaagtgacttgattcctgattctggagtatttaagaattcctataactcaacaaaaagttcagttttttaaaatgagcaaaaggcttgggtaaactattcacaaaggaacgtagacaaatgccagtacacacatgagaagcgcatacacatccacaaacttcaaacaagcccacctcatgtatttctagtgagtaaggaaaagaacgcaaacacttttgaaaattgtttggttgtttcttgtaaatttaaacaaataccctattatattatccagcgagtccatccttaggtttttatccaaggataaagaggtgaaaactcatatctaacaaatagacttctgaaaagatgaaaatagaagctttattcataaaagacaaaaactggaaataacccaaatattcattcacaggagaatgaataaacagactaggttgaatccatacaatggaatggtagcagacaataaaaagaaaatgaactattgatgccccctactgcacagcagaagctctgaatcgtgttcctgaatgaaagaagtcagggcctcatagacattcactccacccaacaaccacagaatatacattcttcctatctgtacacagaacatattctcagatcaaccatatgctgagtcataaagcaagtctcaataaattttaaaaaattgaaattataccaaacacactcttgggaccacagtgcggttaaaaataggaaacttaatatccangaggatcttcttcaaaacttacacaaatacctgggatattta

SEQ ID NO: 450279 - DNA, 794 bp, Homo sapiens
cgcgcgggggcgggcgcgcggggccttgccggagaacctgactctccgcagcagcagtggaagccagagtgacgcgttgtgttgaacaccagttttctggagcgctgtgtgttctcatagctgagcagtctgtttctccaatcaggtttcaaagccacttcaactgcactggcccctgtgggtcactgctgcaccgccctggcccatgtgggtccctgaggagcgacctgccggggccacctggctggacgaaaaagacacaccttggacttaagccgtgagaaaaaaacttcatcagtaagagagaatgaataaacagactaggttgaatccatacaatggaatggtagcagacaataaaaagaaaatgaactattgatgccccctactgcacagcagaagctctgaatcgtgttcctgaatgaaagaagtcaggtatgaaagaataaacattgtatgattccatttatatgaaaatgaatctgtgatttaaaaatcagactagtattaggttggtgcgaaagtaattgcggtttttgccttttttttttttttttaaatagttgctttggggtttatggatggagtggcatggtagaggttagctgaagggggcatgaaataactttttgggggtgctagagtgttgtaaatcttacagtgggggagggacaggagtgcaggcatttgacaaaacacattgaattgtgaaatttaagatttttgaatttctttgtatgtaaattacctgccaataaaaacatgacgaatagagcagttatgagcatttgtgt

SEQ ID NO: 450280 - DNA, 1045 bp, Homo sapiens
  misc_feature (3)..(3): n is a, c, g, or t
  misc_feature (11)..(11): n is a, c, g, or t
  misc_feature (24)..(24): n is a, c, g, or t
  misc_feature (850)..(851): n is a, c, g, or t
  misc_feature (857)..(857): n is a, c, g, or t
  misc_feature (870)..(871): n is a, c, g, or t
  misc_feature (874)..(875): n is a, c, g, or t
  misc_feature (889)..(889): n is a, c, g, or t
  misc_feature (892)..(892): n is a, c, g, or t
aantaggctangtacgggctgggnttgaatcggccgtgtggagtcccagcagaggccaacctgtgtctcttcatctccctgggaaaggtgcccccgaggtgaaagagatggcctggtggaaatcctggattgaacaggagggtgtcacagtgaagagcagctcccacttcaacccagaccctgatgcagagaccctctacaaagccatgaaggggatcgggaccaacgagcaggctatcatcgatgtgctcaccaagagaagcaacacgcagcggcagcagatcgccaagtccttcaaggctcagttcggcaaggacctcactgagaccttgaagtctgagctcagtggcaagtttgagaggctcattgtggcccttatgtacccgccatacagatacgaagccaaggagctgcatgacgccatgaagggcttaggaaccaaggagggtgtcatcattgagatcctggcctctcggaccaagaaccagctgcgggagataatgaaggcgtatgaggaagactatgggtccagcctggaggaggacatccaagcagacacaagtggctacctggagaggatcctggtgtgcctcctgcagggcagcagggatgatgtgagcagctttgtggacccaggactggccctccaagacgcacaggatctgtatgcggcaggcgagaagattcgtgggactgatgagatgaaattcatcaccatcctgtgcacgcgcagtgccactcacctgctgagagtgtttgaagagtatgagaaaattgccaacaagagcattgaggacagcatcaagagtgagacccatggctcactggaggaggccatgctcactgtggnnggggtnaatgccaaactcnnggnnttggggaggaactntangccgaagggcgggcccttgcctgtttaaatgtcgggcggaggcatcttagtgtacaagttggacccccggtcgggacgcgttaacccctggtcgcccgaaaacgcccctcctcggggggcggcccgaggtcccgctcgtttacgtacttctgc

SEQ ID NO: 450281 - DNA, 2149 bp, Homo sapiens
gtgtctgggtggggcctgggagccacaggagatgcccaaagccaggcagagcccgggggcgaggggacggcaggcaggtgtggcgctgccctgggcgggcttgcacccccacacccaagtgagcggcctgctcactcctcagctgcaggagccagacgtgtggagtcccagcagaggccaacctgtgtctcttcatctccctgggaaaggtgcccccgaggtgaaagagatggcctggtggaaatcctggattgaacaggagggtgtcacagtgaagagcagctcccacttcaacccagaccctgatgcagagaccctctacaaagccatgaaggggatcgggaccaacgagcaggctatcatcgatgtgctcaccaagagaagcaacacgcagcggcagcagatcgccaagtccttcaaggctcagttcggcaaggacctcactgagaccttgaagtctgagctcagtggcaagtttgagaggctcattgtggcccttatgtacccgccatacagatacgaagccaaggagctgcatgacgccatgaagggcttaggaaccaaggagggtgtcatcattgagatcctggcctctcggaccaagaaccagctgcgggagataatgaaggcgtatgaggaagactatgggtccagcctggaggaggacatccaagcagacacaagtggctacctggagaggatcctggtgtgcctcctgcagggcagcagggatgatgtgagcagctttgtggacccaggactggccctccaagacgcacaggatctgtatgcggcaggcgagaagattcgtgggactgatgagatgaaattcatcaccatcctgtgcacgcgcagtgccactcacctgctgagagtgtttgaagagtatgagaaaattgccaacaagagcattgaggacagcatcaagagtgagacccatggctcactggaggaggccatgctcactgtggcaccaagtgcaaagccaaggagctcaaagccaccacgatcctccacacgggggagttatcttacccaaacctgtcgtggatcagaaaggttttagttctcggaggtgaaattgagtctgggaaagggacgctgcatctccagagggagcagggacgcgtgatgggaccctgataagaaacatcgtttcaaggagcgagattgacttaaatcttatcaaatgtcacttcaagaagatgtacggcaagaccctcagcagcatgatcatggaagacaccagcggtgactacaagaacgccctgctgagcctggtgggcagcgacccctgaggcacagaagaacaagagcaaagaccatgaagccagagtctccaggactcctcactcaacctcggccatggacgcaggttgggtgtgaggggggtcccagcctttcggtcttctatttccctatttccagtgctttccagccgggtttctgacccagagggtggaaccggcctggactcctcttcccaacttcctccaggtcatttcccagtgtgagcacaatgccaaccttagtgtttctccagccagacagatgcctcagcatgaagggcttggggacttgtggatcattccttcctccctgcaggagcttcccaagctggtcacagagtctcctgggcacaggttatacagaccccagccccattcccatctactgaaacagggtctccacaagaggggccagggaatatgggtttttaacaagcgtcttacaaaacacttctctatcatgcagccggagagctggctgggagcccttttgttttagaacacacatccttcagcagctgagaaacgaacacgaatccatcccaaccgagatgccattaacattcatctaaaaatgttaggctctaaatggacgaaaaattctctcgccatcttaataacaaaataaactacaaattcctgacccaaggacactgtgttataagaggcgtgggctcccctggtggctgaccaggtcagctgccctggccttgcacccctctgcatgcagcacagaagggtgtgaccatgccctcagcaccactcttgtccccactgaacggcaactgagactgggtacctggagattctgaagtgcctttgctgtggttttcaaaataataaagatttgtattcaactc

SEQ ID NO: 450282 - DNA, 1283 bp, Homo sapiens
  misc_feature (3)..(3): n is a, c, g, or t
  misc_feature (11)..(11): n is a, c, g, or t
  misc_feature (24)..(24): n is a, c, g, or t
aantaggctangtacgggctgggnttgaatcggcctgatgagatgaaattcatcaccatcctgtgcacgcgcagtgccactcacctgctgagagtgtttgaagagtatgagaaaattgccaacaagagcattgaggacagcatcaagagtgagacccatggctcactggaggaggccatgctcactgtggtgaaatgcacccaaaacctccacagctactttgcagagagactctactatgccatgaagggagcagggacgcgtgatgggaccctgataagaaacatcgtttcaaggagcgagattgacttaaatcttatcaaatgtcacttcaagaagatgtacggcaagaccctcagcagcatgatcatggaagacaccagcggtgactacaagaacgccctgctgagcctggtgggcagcgacccctgaggcacagaagaacaagagcaaagaccatgaagccagagtctccaggactcctcactcaacctcggccatggacgcaggttgggtgtgaggggggtcccagcctttcggtcttctatttccctatttccagtgctttccagccgggtttctgacccagagggtggaaccggcctggactcctcttcccaacttcctccaggtcatttcccagtgtgagcacaatgccaaccttagtgtttctccagccagacagatgcctcagcatgaagggcttggggacttgtggatcattccttcctccctgcaggagcttcccaagctggtcacagagtctcctgggcacaggttatacagaccccagccccattcccatctactgaaacagggtctccacaagaggggccagggaatatgggtttttaacaagcgtcttacaaaacacttctctatcatgcagccggagagctggctgggagcccttttgttttagaacacacatccttcagcagctgagaaacgaacacgaatccatcccaaccgagatgccattaacattcatctaaaaatgttaggctctaaatggacgaaaaattctctcgccatcttaataacaaaataaactacaaattcctgacccaaggacactgtgttataagaggcgtgggctcccctggtggctgaccaggtcagctgccctggccttgcacccctctgcatgcagcacagaagggtgtgaccatgccctcagcaccactcttgtccccactgaacggcaactgagactgggtacctggagattctgaagtgcctttgctgtggttttcaaaataataaagatttgtattcaactc

SEQ ID NO: 450283 - DNA, 1167 bp, Homo sapiens
  misc_feature (972)..(973): n is a, c, g, or t
  misc_feature (979)..(979): n is a, c, g, or t
  misc_feature (992)..(993): n is a, c, g, or t
  misc_feature (996)..(997): n is a, c, g, or t
  misc_feature (1011)..(1011): n is a, c, g, or t
  misc_feature (1014)..(1014): n is a, c, g, or t
gtgtctgggtggggcctgggagccacaggagatgcccaaagccaggcagagcccgggggcgaggggacggcaggcaggtgtggcgctgccctgggcgggcttgcacccccacacccaagtgagcggcctgctcactcctcagctgcaggagccagacgtgtggagtcccagcagaggccaacctgtgtctcttcatctccctgggaaaggtgcccccgaggtgaaagagatggcctggtggaaatcctggattgaacaggagggtgtcacagtgaagagcagctcccacttcaacccagaccctgatgcagagaccctctacaaagccatgaaggggatcgggaccaacgagcaggctatcatcgatgtgctcaccaagagaagcaacacgcagcggcagcagatcgccaagtccttcaaggctcagttcggcaaggacctcactgagaccttgaagtctgagctcagtggcaagtttgagaggctcattgtggcccttatgtacccgccatacagatacgaagccaaggagctgcatgacgccatgaagggcttaggaaccaaggagggtgtcatcattgagatcctggcctctcggaccaagaaccagctgcgggagataatgaaggcgtatgaggaagactatgggtccagcctggaggaggacatccaagcagacacaagtggctacctggagaggatcctggtgtgcctcctgcagggcagcagggatgatgtgagcagctttgtggacccaggactggccctccaagacgcacaggatctgtatgcggcaggcgagaagattcgtgggactgatgagatgaaattcatcaccatcctgtgcacgcgcagtgccactcacctgctgagagtgtttgaagagtatgagaaaattgccaacaagagcattgaggacagcatcaagagtgagacccatggctcactggaggaggccatgctcactgtggnnggggtnaatgccaaactcnnggnnttggggaggaactntangccgaagggcgggcccttgcctgtttaaatgtcgggcggaggcatcttagtgtacaagttggacccccggtcgggacgcgttaacccctggtcgcccgaaaacgcccctcctcggggggcggcccgaggtcccgctcgtttacgtacttctgc

SEQ ID NO: 450284 - DNA, 153 bp, Homo sapiens
ccacattcacaacaagtgtagggtttctctcctgtgtgcaacctctggtgggtgcgaagattagagccataactgaatcccttgccacactgatcacacgtatagggcttttttcccgtgtggactcgctgatgtttgtgaaggcttgatgtg

SEQ ID NO: 450285 - DNA, 2303 bp, Homo sapiens
  misc_feature (86)..(86): n is a, c, g, or t
  misc_feature (2303)..(2303): n is a, c, g, or t
ttgaaaagggtatcattcatgtggtttcagtttagaagagtccctcagagctttgcctcaagcaatttcaaattgtagtgataccntaaatcatgtattcaggatgccttctttagcatttagaaccccaactagacttatactttgactaaagtcagaggcagaccaatttagggaacagattttgttctttgcttttatgatacatttgtaactcacagctgttagcatgacctcacatcactgcgtaggacccggaaatcacatctcctggtcaggtcacgagaaagaacacaggcttgactattgtccagaagttactttccccttgactaaaggtttccccttagggtacacattgctatttaactttgcctcctacccttttttgttaccttccgcctgtctcctgttgattcgcagatgtaatatcgagtattcatcaactggtctcaatttcctgaacacattcactgtatccctcattgtaaccgttatccccctgcttcaaaatgtgccagttccacttggtaataacgttgggaaaatgcaggtttatgaatgatgtggacttttagaggatcaaatcaataaattggattttttattttttgagggcagctgcctcactgttttaaataaagaatcttacataagaatgttgacaacattcacagtaagccattggcagaaaattgatctgcatgtcctagaccaatgattacaaggtgtctgtgggtctgtggtttagggggcccagcccatcattccttttccccttggcactcatgagagagatgccaagttcagtgtggatttttcttggtgctctatggagaaatggagtctgtgtgcttactgaagagtcccaaaaaccagagaccattttcatttactgccatcataaatattctccaccattcaagatgcctgtgtacacggctatttgggaaacttaagtgttggaggaggcaggggctgaaggtgtcaaaacctcctcagtaggataacccctttctcccctttggaccatctgccatctttcatgagtgtttcccatggtgtttttgcatccagagttgacaacaactcaattttgccttgaatttactcagtcttataaattaaaaatgtgcattttatataaagatgcattttatataaaaatgcacacctttaatctctatatggcagcatatacatatatatatatatataaaatgcacacttttaatctctatatggcagcatttttgaggctttatatctgcccgtgtaccctcaactgcctcctttttgcagagaacgatccccacaggaactggtctaagaacactgtctgcacatgattgatgcttaaaatccaatataccaccacatatcaaaggttgggattttcagagtccttcttgatttctgagctgaaaccttaacaaatagggaatttggcagggaagacacctgggtttttaattcagaaccctatttatatactgttaaaatttgaggtactatagtttatataaaagtcggatgttaagatattatatttcagtactaggagcttctttgcagtcattaacatgacaaattaagtaataaatataaaagtgattgtccataaattatcattgaattttttgtttattttgtagtgttctgtatttatctgcactttgtgtatatatacacacatacatatgccaacatgtaaataacctcatgtttattcctaatctaaattgccacaatatttttaatgtatggttacactgtgttttaaattactttaaaaataaactttgtaagcagaaaaaaaaaaaaaaaaaaaaaaaaaaaaaaaaaaaaaaaaaaaaaaaaaaagaaaaaaaaaaaataaaagaaaaaaagactaagaacagaaaaaacgaaacaaaaagagagaggggggcgcgccgcgacaataaaatacccccgaggaggggccaccaaatcattaagaggcaacacccagctttgttaggtgaacagggggggcaccaccatagaggaagggaaggattaaaaagaacagagcagacgcggagcggcgggcgtataataaaacacagcggcgaggcagggggagaaaacaaccagctagcgagagtaatcatttggaggagaagacacccacaagcggtgggggggcaacaacagaggagaaacacacacaccagaaatataaaaacgccgggggatatataaacgcggggggtcaggggtaaacacggacgatatgctgcgggaaaaaatgcgaacgcgagatgtaggaaaatacagan

SEQ ID NO: 450286 - DNA, 2304 bp, Homo sapiens
  misc_feature (86)..(86): n is a, c, g, or t
  misc_feature (2304)..(2304): n is a, c, g, or t
ttgaaaagggtatcattcatgtggtttcagtttagaagagtccctcagagctttgcctcaagcaatttcaaattgtagtgataccntaaatcatgtattcaggatgccttctttagcatttagaaccccaactagacttatactttgactaaagtcagaggcagaccaatttagggaacagattttgttctttgcttttatgatacatttgtaactcacagctgttagcatgacctcacatcactgcgtaggacccggaaatcacatctcctggtcaggtcacgagaaagaacacaggcttgactattgtccagaagttactttccccttgactaaaggtttccccttagggtacacattgctatttaactttgcctcctacccttttttgttaccttccaaaatcaagacacttttaagaaacaaagatagttttctgaacattctgtgtcctgcctgtctcctgttgattcgcagatgtaatatcgagtattcatcaactggtctcaatttcctgaacacattcactgtatccctcattgtaaccgttatccccctgcttcaaaatgtgccagttccacttggtaataacgttgggggattttttattttttgagggcagctgcctcactgttttaaataaagaatcttacataagaatgttgacaacattcacagtaagccattggcagaaaattgatctgcatgtcctagaccaatgattacaaggtgtctgtgggtctgtggtttagggggcccagcccatcattccttttccccttggcactcatgagagagatgccaagttcagtgtggatttttcttggtgctctatggagaaatggagtctgtgtgcttactgaagagtcccaaaaaccagagaccattttcatttactgccatcataaatattctccaccattcaagatgcctgtgtacacggctatttgggaaacttaagtgttggaggaggcaggggctgaaggtgtcaaaacctcctcagtaggataacccctttctcccctttggaccatctgccatctttcatgagtgtttcccatggtgtttttgcatccagagttgacaacaactcaattttgccttgaatttactcagtcttataaattaaaaatgtgcattttatataaagatgcattttatataaaaatgcacacctttaatctctatatggcagcatatacatatatatatatatataaaatgcacacttttaatctctatatggcagcatttttgaggctttatatctgcccgtgtaccctcaactgcctcctttttgcagagaacgatccccacaggaactggtctaagaacactgtctgcacatgattgatgcttaaaatccaatataccaccacatatcaaaggttgggattttcagagtccttcttgatttctgagctgaaaccttaacaaatagggaatttggcagggaagacacctgggtttttaattcagaaccctatttatatactgttaaaatttgaggtactatagtttatataaaagtcggatgttaagatattatatttcagtactaggagcttctttgcagtcattaacatgacaaattaagtaataaatataaaagtgattgtccataaattatcattgaattttttgtttattttgtagtgttctgtatttatctgcactttgtgtatatatacacacatacatatgccaacatgtaaataacctcatgtttattcctaatctaaattgccacaatatttttaatgtatggttacactgtgttttaaattactttaaaaataaactttgtaagcagaaaaaaaaaaaaaaaaaaaaaaaaaaaaaaaaaaaaaaaaaaaaaaaaaaagaaaaaaaaaaaataaaagaaaaaaagactaagaacagaaaaaacgaaacaaaaagagagaggggggcgcgccgcgacaataaaatacccccgaggaggggccaccaaatcattaagaggcaacacccagctttgttaggtgaacagggggggcaccaccatagaggaagggaaggattaaaaagaacagagcagacgcggagcggcgggcgtataataaaacacagcggcgaggcagggggagaaaacaaccagctagcgagagtaatcatttggaggagaagacacccacaagcggtgggggggcaacaacagaggagaaacacacacaccagaaatataaaaacgccgggggatatataaacgcggggggtcaggggtaaacacggacgatatgctgcgggaaaaaatgcgaacgcgagatgtaggaaaatacagan

SEQ ID NO: 450287 - DNA, 2357 bp, Homo sapiens
  misc_feature (86)..(86): n is a, c, g, or t
  misc_feature (2357)..(2357): n is a, c, g, or t
ttgaaaagggtatcattcatgtggtttcagtttagaagagtccctcagagctttgcctcaagcaatttcaaattgtagtgataccntaaatcatgtattcaggatgccttctttagcatttagaaccccaactagacttatactttgactaaagtcagaggcagaccaatttagggaacagattttgttctttgcttttatgatacatttgtaactcacagctgttagcatgacctcacatcactgcgtaggacccggaaatcacatctcctggtcaggtcacgagaaagaacacaggcttgactattgtccagaagttactttccccttgactaaaggtttccccttagggtacacattgctatttaactttgcctcctacccttttttgttaccttccaaaatcaagacacttttaagaaacaaagatagttttctgaacattctgtgtcctgcctgtctcctgttgattcgcagatgtaatatcgagtattcatcaactggtctcaatttcctgaacacattcactgtatccctcattgtaaccgttatccccctgcttcaaaatgtgccagttccacttggtaataacgttgggaaaatgcaggtttatgaatgatgtggacttttagaggatcaaatcaataaattggattttttattttttgagggcagctgcctcactgttttaaataaagaatcttacataagaatgttgacaacattcacagtaagccattggcagaaaattgatctgcatgtcctagaccaatgattacaaggtgtctgtgggtctgtggtttagggggcccagcccatcattccttttccccttggcactcatgagagagatgccaagttcagtgtggatttttcttggtgctctatggagaaatggagtctgtgtgcttactgaagagtcccaaaaaccagagaccattttcatttactgccatcataaatattctccaccattcaagatgcctgtgtacacggctatttgggaaacttaagtgttggaggaggcaggggctgaaggtgtcaaaacctcctcagtaggataacccctttctcccctttggaccatctgccatctttcatgagtgtttcccatggtgtttttgcatccagagttgacaacaactcaattttgccttgaatttactcagtcttataaattaaaaatgtgcattttatataaagatgcattttatataaaaatgcacacctttaatctctatatggcagcatatacatatatatatatatataaaatgcacacttttaatctctatatggcagcatttttgaggctttatatctgcccgtgtaccctcaactgcctcctttttgcagagaacgatccccacaggaactggtctaagaacactgtctgcacatgattgatgcttaaaatccaatataccaccacatatcaaaggttgggattttcagagtccttcttgatttctgagctgaaaccttaacaaatagggaatttggcagggaagacacctgggtttttaattcagaaccctatttatatactgttaaaatttgaggtactatagtttatataaaagtcggatgttaagatattatatttcagtactaggagcttctttgcagtcattaacatgacaaattaagtaataaatataaaagtgattgtccataaattatcattgaattttttgtttattttgtagtgttctgtatttatctgcactttgtgtatatatacacacatacatatgccaacatgtaaataacctcatgtttattcctaatctaaattgccacaatatttttaatgtatggttacactgtgttttaaattactttaaaaataaactttgtaagcagaaaaaaaaaaaaaaaaaaaaaaaaaaaaaaaaaaaaaaaaaaaaaaaaaaagaaaaaaaaaaaataaaagaaaaaaagactaagaacagaaaaaacgaaacaaaaagagagaggggggcgcgccgcgacaataaaatacccccgaggaggggccaccaaatcattaagaggcaacacccagctttgttaggtgaacagggggggcaccaccatagaggaagggaaggattaaaaagaacagagcagacgcggagcggcgggcgtataataaaacacagcggcgaggcagggggagaaaacaaccagctagcgagagtaatcatttggaggagaagacacccacaagcggtgggggggcaacaacagaggagaaacacacacaccagaaatataaaaacgccgggggatatataaacgcggggggtcaggggtaaacacggacgatatgctgcgggaaaaaatgcgaacgcgagatgtaggaaaatacagan

SEQ ID NO: 450288 - DNA, 2202 bp, Homo sapiens
caagcgcagactgccataagatggcgtccgtggcggctgcacgagcagttcctgtgggcagtgggctcaggggcctgcaacggaccctacctcttgtagtgattctcggggccacgggcaccggcaaatccacgctggcgttgcagctaggccagcggctcggcggtgagatcgtcagcgctgactccatgcaggtctatgaaggcctagacatcatcaccaacaaggtttctgcccaagagcagagaatctgccggcaccacatgatcagctttgtggatcctcttgtgaccaattacacagtggtggacttcagaaatagagcaactgctctgattgaagatatatttgcccgagacaaaattcctattgttgtgggaggaaccaattattacattgaatctctgctctggaaagttcttgtcaataccaagccccaggagatgggcactgagaaagtgattgaccgaaaagtggagcttgaaaaggaggatggtcttgtacttcacaaacgcctaagccaggtggacccagaaatggctgccaagctgcatccacatgacaaacgcaaagtggccaggagcttgcaagtttttgaagaaacaggaatctctcatagtgaatttctccatcgtcaacatacggaagaaggtggtggtccccttggaggtcctctgaagttctctaacccttgcatcctttggcttcatgctgaccaggcagttctagatgagcgcttggataagagggtggatgacatgcttgctgctgggctcttggaggaactaagagattttcacagacgctataatcagaagaatgtttcggaaaatagatgaaatggctcaactaggtccatctccaaagcccctgctagcttttaggagcaatggcttatctgctgataccctcctgttcccagccaggactatcaacatggtatcttccaatcaattggcttcaaggaatttcacgagtacctgatcactgagggaaaatgcacactggagactagtaaccagcttctaaagaaaggtattgaggctctgaaacaagtaactaagagatatgcccggaaacaaaaccgatgggttaaaaaccgttttttgagcagacctggtcccattgtcccccctgtctatggcttagaggtatctgatgtctcgaagtgggaagagtctgttcttgaacctgctcttgaaatcgtgcaaagtttcatccagggccacaagcctacagccactccaataaagatgccatacaatgaagctgagaacaagagaagttatcacctgtgtgacctctgtgatcgaatcatcattggggatcgcgaatgggcagcgcacataaaatccaaatcccacttgaaccaactgaagaaaagaagaagattggactcagatgctgtcaacaccatagaaagtcagagtgtttccccagaccataacaaagaacctaaagagaagggatccccagggcagaatgatcaagagctgaaatgcagcgtttaagagacatgtccagtggcctttggaaaggtggtggggatccagttcaggagggaggggtatgtttgtctcccagtctgggcaaaggagtgctatgcggaattctctgcatagcagaaaagctcccaccattttcttttgatgtggttttaaagtctcacgttctctataatagaaacagcaggtcttgtcagctccttgtgtggctgatgtgtctggaaatgatgtagttcaggaaagcattttttttttctttgaaccttaaaggttctattattaaaagcagcacagattccacatttttatacatgaggatcttctttgtggtgaataccaggattgactgcatccctttaaagaagttttatgtccctgactctggctaaaattatctaatttccagatgcttttgtagatgactgaagtatttgtgagccacatattgggagttctagatttgagtgaatggcaggaaagggccatctccattgagatgattaagtgaaccaaactagttctcggaattctacagagaaggagggaatcagactgaggaagctgtgacataggacttgaagaccaaagactttgaaatttgcgagctgctcatgtgtgagttattatcactgctgtctttctattgagttacaaatctatatttttattgaagtttaaataaagaaaaaatttacaa

SEQ ID NO: 450289 - DNA, 442 bp, Homo sapiens
ggttgactctgaggatccccaacgatggtcctcagctacccaggccagtcctgagtagctgggactacagatgtgcacactgtcgtgactggctttcaagaaagaggctttctgtaataaacagcctttctccttgttttacttgagaatgaatattttctattggtttttatgggtgtgccccctccctccccttttaaattacttaggagcttgcaagtttttgaagaaacaggaatctctcatagtgaatttctccatcgtcaacatacggaagaaggtggtggtccccttggaggtcctctgaagttctctaacccttgcatcctttggcttcatgctgaccaggcaggtaacagccctttgatgccctagagtccatctgtgatggaacttggagtaataagttactgtatagaaaaagctgaggaccatcgttggc

SEQ ID NO: 450290 - DNA, 2115 bp, Homo sapiens
caagcgcagactgccataagatggcgtccgtggcggctgcacgagcagttcctgtgggcagtgggctcaggggcctgcaacggaccctacctcttgtagtgattctcggggccacgggcaccggcaaatccacgctggcgttgcagctaggccagcggctcggcggtgagatcgtcagcgctgactccatgcaggtctatgaaggcctagacatcatcaccaacaaggtttctgcccaagagcagagaatctgccggcaccacatgatcagctttgtggatcctcttgtgaccaattacacagtggtggacttcagaaatagagcaactgctctgattgaagatatatttgcccgagacaaaattcctattgttgtgggaggaaccaattattacattgaatctctgctctggaaagttcttgtcaataccaagccccaggagatgggcactgagaaagtgattgaccgaaaagtggagcttgaaaaggaggatggtcttgtacttcacaaacgcctaagccaggtggacccagaaatggctgccaagctgcatccacatgacaaacgcaaagtggccaggagcttgcaagtttttgaagaaacaggaatctctcatagtgaatttctccatcgtcaacatacggaagaaggtggtggtccccttggaggtcctctgaagttctctaacccttgcatcctttggcttcatgctgaccaggcagttctagatgagcgcttggataagagggtggatgacatgcttgctgctgggctcttggaggaactaagagattttcacagacgctataatcagaagaatgtttcggaaaatagccaggactatcaacatggtatcttccaatcaattggcttcaaggaatttcacgagtacctgatcactgagggaaaatgcacactggagactagtaaccagcttctaaagaaaggtattgaggctctgaaacaagtaactaagagatatgcccggaaacaaaaccgatgggttaaaaaccgttttttgagcagacctggtcccattgtcccccctgtctatggcttagaggtatctgatgtctcgaagtgggaagagtctgttcttgaacctgctcttgaaatcgtgcaaagtttcatccagggccacaagcctacagccactccaataaagatgccatacaatgaagctgagaacaagagaagttatcacctgtgtgacctctgtgatcgaatcatcattggggatcgcgaatgggcagcgcacataaaatccaaatcccacttgaaccaactgaagaaaagaagaagattggactcagatgctgtcaacaccatagaaagtcagagtgtttccccagaccataacaaagaacctaaagagaagggatccccagggcagaatgatcaagagctgaaatgcagcgtttaagagacatgtccagtggcctttggaaaggtggtggggatccagttcaggagggaggggtatgtttgtctcccagtctgggcaaaggagtgctatgcggaattctctgcatagcagaaaagctcccaccattttcttttgatgtggttttaaagtctcacgttctctataatagaaacagcaggtcttgtcagctccttgtgtggctgatgtgtctggaaatgatgtagttcaggaaagcattttttttttctttgaaccttaaaggttctattattaaaagcagcacagattccacatttttatacatgaggatcttctttgtggtgaataccaggattgactgcatccctttaaagaagttttatgtccctgactctggctaaaattatctaatttccagatgcttttgtagatgactgaagtatttgtgagccacatattgggagttctagatttgagtgaatggcaggaaagggccatctccattgagatgattaagtgaaccaaactagttctcggaattctacagagaaggagggaatcagactgaggaagctgtgacataggacttgaagaccaaagactttgaaatttgcgagctgctcatgtgtgagttattatcactgctgtctttctattgagttacaaatctatatttttattgaagtttaaataaagaaaaaatttacaa

SEQ ID NO: 450291 - DNA, 1969 bp, Homo sapiens
caagcgcagactgccataagatggcgtccgtggcggctgcacgagcagttcctgtgggcagtgggctcaggggcctgcaacggaccctacctcttgtagtgattctcggggccacgggcaccggcaaatccacgctggcgttgcagctaggccagcggctcggcggtgagatcgtcagcgctgactccatgcaggtctatgaaggcctagacatcatcaccaacaaggtttctgcccaagagcagagaatctgccggcaccacatgatcagctttgtggatcctcttgtgaccaattacacagtggtggacttcagaaatagagcaactgctctgattgaagatatatttgcccgagacaaaattcctattgttgtgggaggaaccaattattacattgaatctctgctctggaaagttcttgtcaataccaaggagcttgcaagtttttgaagaaacaggaatctctcatagtgaatttctccatcgtcaacatacggaagaaggtggtggtccccttggaggtcctctgaagttctctaacccttgcatcctttggcttcatgctgaccaggcagttctagatgagcgcttggataagagggtggatgacatgcttgctgctgggctcttggaggaactaagagattttcacagacgctataatcagaagaatgtttcggaaaatagccaggactatcaacatggtatcttccaatcaattggcttcaaggaatttcacgagtacctgatcactgagggaaaatgcacactggagactagtaaccagcttctaaagaaaggtattgaggctctgaaacaagtaactaagagatatgcccggaaacaaaaccgatgggttaaaaaccgttttttgagcagacctggtcccattgtcccccctgtctatggcttagaggtatctgatgtctcgaagtgggaagagtctgttcttgaacctgctcttgaaatcgtgcaaagtttcatccagggccacaagcctacagccactccaataaagatgccatacaatgaagctgagaacaagagaagttatcacctgtgtgacctctgtgatcgaatcatcattggggatcgcgaatgggcagcgcacataaaatccaaatcccacttgaaccaactgaagaaaagaagaagattggactcagatgctgtcaacaccatagaaagtcagagtgtttccccagaccataacaaagaacctaaagagaagggatccccagggcagaatgatcaagagctgaaatgcagcgtttaagagacatgtccagtggcctttggaaaggtggtggggatccagttcaggagggaggggtatgtttgtctcccagtctgggcaaaggagtgctatgcggaattctctgcatagcagaaaagctcccaccattttcttttgatgtggttttaaagtctcacgttctctataatagaaacagcaggtcttgtcagctccttgtgtggctgatgtgtctggaaatgatgtagttcaggaaagcattttttttttctttgaaccttaaaggttctattattaaaagcagcacagattccacatttttatacatgaggatcttctttgtggtgaataccaggattgactgcatccctttaaagaagttttatgtccctgactctggctaaaattatctaatttccagatgcttttgtagatgactgaagtatttgtgagccacatattgggagttctagatttgagtgaatggcaggaaagggccatctccattgagatgattaagtgaaccaaactagttctcggaattctacagagaaggagggaatcagactgaggaagctgtgacataggacttgaagaccaaagactttgaaatttgcgagctgctcatgtgtgagttattatcactgctgtctttctattgagttacaaatctatatttttattgaagtttaaataaagaaaaaatttacaa

SEQ ID NO: 450292 - DNA, 1230 bp, Homo sapiens
ctcatttaacttttttaatgggtctcaaaattctgtgacaaatttttggtcaagttgtttccattaaaaagtactgattttaaaaactaataacttaaaactgccacacgcaaaaaagaaaaccaaagtggtccacaaaacattctcctttccttctgaaggttttacgatgcattgttatcattaaccagtcttttactactaaacttaaatggccaattgaaacaaacagttctgagaccgttcttccaccactgattaagagtggggtggcaggtattagggataatattcatttagccttctgagctttctgggcagacttggtgaccttgccagctccagcagccttcttgtccactgctttgatgacacccaccgcaactgtctgtctcatatcacgaacagcaaagcgacccaaaggtggatagtctgtcaacaccatagaaagtcagagtgtttccccagaccataacaaagaacctaaagagaagggatccccagggcagaatgatcaagagctgaaatgcagcgtttaagagacatgtccagtggcctttggaaaggtggtggggatccagttcaggagggaggggtatgtttgtctcccagtctgggcaaaggagtgctatgcggaattctctgcatagcagaaaagctcccaccattttcttttgatgtggttttaaagtctcacgttctctataatagaaacagcaggtcttgtcagctccttgtgtggctgatgtgtctggaaatgatgtagttcaggaaagcattttttttttctttgaaccttaaaggttctattattaaaagcagcacagattccacatttttatacatgaggatcttctttgtggtgaataccaggattgactgcatccctttaaagaagttttatgtccctgactctggctaaaattatctaatttccagatgcttttgtagatgactgaagtatttgtgagccacatattgggagttctagatttgagtgaatggcaggaaagggccatctccattgagatgattaagtgaaccaaactagttctcggaattctacagagaaggagggaatcagactgaggaagctgtgacataggacttgaagaccaaagactttgaaatttgcgagctgctcatgtgtgagttattatcactgctgtctttctattgagttacaaatctatatttttattgaagtttaaataaagaaaaaatttacaa

SEQ ID NO: 450293 - DNA, 1883 bp, Homo sapiens
caagcgcagactgccataagatggcgtccgtggcggctgcacgagcagttcctgtgggcagtgggctcaggggcctgcaacggaccctacctcttgtagtgattctcggggccacgggcaccggcaaatccacgctggcgttgcagctaggccagcggctcggcggtgagatcgtcagcgctgactccatgcaggtctatgaaggcctagacatcatcaccaacaaggtttctgcccaagagcagagaatctgccggcaccacatgatcagctttgtggatcctcttgtgaccaattacacagtggtggacttcagaaatagagcaactgctctgattgaagatatatttgcccgagacaaaattcctattgttgtgggaggaaccaattattacattgaatctctgctctggaaagttcttgtcaataccaagccccaggagatgggcactgagaaagtgattgaccgaaaagtggagcttgaaaaggaggatggtcttgtacttcacaaacgcctaagccaggtggacccagaaatggctgccaagctgcatccacatgacaaacgcaaagtggccaggagcttgcaagtttttgaagaaacaggaatctctcatagtgaatttctccatcgtcaacatacggaagaaggtggtggtccccttggaggtcctctgaagttctctaacccttgcatcctttggcttcatgctgaccaggcagttctagatgagcgcttggataagagggtggatgacatgcttgctgctgggctcttggaggaactaagagattttcacagacgctataatcagaagaatgtttcggaaaatagccaggactatcaacatggtatcttccaatcaattggcttcaaggaatttcacgagtacctgatcactgagggaaaatgcacactggagactagtaaccagcttctaaagaaaggtattgaggctctgaaacaagtaactaagagatatgcccggaaacaaaaccgatgggttaaaaaccgttttttgagcagacctggtcccattgtcccccctgtctatggcttagaggtatctgatgtctcgaagtgggaagagtctgttcttgaacctgctcttgaaatcgtgcaaagtttcatccagggccacaagcctacagccactccaataaagatgccatacaatgaagctgagaacaagagaagttatcacctgtgtgacctctgtgatcgaatcatcattggggatcgcgaatgggcagcgcacataaaatccaaatcccacttgaaccaactgaagaaaagaagaagattggactcagatgccattttcttttgatgtggttttaaagtctcacgttctctataatagaaacagcaggtcttgtcagctccttgtgtggctgatgtgtctggaaatgatgtagttcaggaaagcattttttttttctttgaaccttaaaggttctattattaaaagcagcacagattccacatttttatacatgaggatcttctttgtggtgaataccaggattgactgcatccctttaaagaagttttatgtccctgactctggctaaaattatctaatttccagatgcttttgtagatgactgaagtatttgtgagccacatattgggagttctagatttgagtgaatggcaggaaagggccatctccattgagatgattaagtgaaccaaactagttctcggaattctacagagaaggagggaatcagactgaggaagctgtgacataggacttgaagaccaaagactttgaaatttgcgagctgctcatgtgtgagttattatcactgctgtctttctattgagttacaaatctatatttttattgaagtttaaataaagaaaaaatttacaa

SEQ ID NO: 450294 - DNA, 1051 bp, Homo sapiens
caagcgcagactgccataagatggcgtccgtggcggctgcacgagcagttcctgtgggcagtgggctcaggggcctgcaacggaccctacctcttgtagtgattctcggggccacgggcaccggcaaatccacgctggcgttgcagctaggccagcggctcggcggtgagatcgtcagcgctgactccatgcaggacctggtcccattgtcccccctgtctatggcttagaggtatctgatgtctcgaagtgggaagagtctgttcttgaacctgctcttgaaatcgtgcaaagtttcatccagggccacaagcctacagccactccaataaagatgccatacaatgaagctgagaacaagagaagttatcacctgtgtgacctctgtgatcgaatcatcattggggatcgcgaatgggcagcgcacataaaatccaaatcccacttgaaccaactgaagaaaagaagaagattggactcagatgccattttcttttgatgtggttttaaagtctcacgttctctataatagaaacagcaggtcttgtcagctccttgtgtggctgatgtgtctggaaatgatgtagttcaggaaagcattttttttttctttgaaccttaaaggttctattattaaaagcagcacagattccacatttttatacatgaggatcttctttgtggtgaataccaggattgactgcatccctttaaagaagttttatgtccctgactctggctaaaattatctaatttccagatgcttttgtagatgactgaagtatttgtgagccacatattgggagttctagatttgagtgaatggcaggaaagggccatctccattgagatgattaagtgaaccaaactagttctcggaattctacagagaaggagggaatcagactgaggaagctgtgacataggacttgaagaccaaagactttgaaatttgcgagctgctcatgtgtgagttattatcactgctgtctttctattgagttacaaatctatatttttattgaagtttaaataaagaaaaaatttacaa

SEQ ID NO: 450295 - DNA, 1289 bp, Homo sapiens
caagcgcagactgccataagatggcgtccgtggcggctgcacgagcagttcctgtgggcagtgggctcaggggcctgcaacggaccctacctcttgtagtgattctcggggccacgggcaccggcaaatccacgctggcgttgcagctaggccagcggctcggcggtgagatcgtcagcgctgactccatgcaggtctatgaaggcctagacatcatcaccaacaaggtttctgcccaagagcagagaatctgccggcaccacatgatcagctttgtggatcctcttgtgaccaattacacagtggtggacttcagaaatagagcaactgctctgattgaagatatatttgcccgagacaaaattcctattgttgtgggaggaaccaattattacattgaatctctgctctggaaagttcttgtcaataccaagccccaggagatgggcactgagaaagtgattgaccgaaaagtggagcttgaaaaggaggatggtcttgtacttcacaaacgcctaagccaggtggacccagaaatggctgccaagctgcatccacatgacaaacgcaaagtggccaggagcttgcaagtttttgaagaaacaggaatctctcatagtgaatttctccatcgtcaacatacggaagaaggtggtggtccccttggaggtcctctgaagttctctaacccttgcatcctttggcttcatgctgaccaggcagttctagatgagcgcttggataagagggtggatgacatgcttgctgctgggctcttggaggaactaagagattttcacagacgctataatcagaagaatgtttcggaaaatagatgaaatggctcaactaggtccatctccaaagcccctgctagcttttaggagcaatggcttatctgctgataccctcctgttcccagccaggactatcaacatggtatcttccaatcaattggcttcaaggaatttcacgagtacctgatcactgagggaaaatgcacactggagactagtaaccagcttctaaagaaaggtattgaggctctgaaacaagtaactaagagatatgcccggaaacaaaaccgatgggttaaaaaccgttttttgagcagtaagtctcatgtttttctttatcctatgggtctgttttcaatagaatatagatgtcctcagctcacccagaaaatgaattttagattctgggcctgttctaagattttggatctgacctaagggaagttctataacataaatgattatccagggatattttcttgggatgtcaca

SEQ ID NO: 450296 - DNA, 763 bp, Homo sapiens
caagcgcagactgccataagatggcgtccgtggcggctgcacgagcagttcctgtgggcagtgggctcaggggcctgcaacggaccctacctcttgtagtgattctcggggccacgggcaccggcaaatccacgctggcgttgcagctaggccagcggctcggcggtgagatcgtcagcgctgactccatgcaggtctatgaaggcctagacatcatcaccaacaaggtttctgcccaagagcagagaatctgccggcaccacatgatcagctttgtggatcctcttgtgaccaattacacagtggtggacttcagaaatagagcaactgctctgatatccttaggaaaggcagcagctgggtttggtgggtgaaagcagcccaagccaagagagaagtttctttctagtggcaatttcttctcagaaggggcacccaaggcctaaatactgatggatgccatccccatcagactatggactgaaagatacagtgtctttgtcacccaaattcttgtccttagactgtggcatcatcattctctgggaacttgttagaaatgctgattcttgggccccactccagacctactgaattagaatctgcattataacgggagtccccagtgatttatatacacattaaaatttgagaagcactgttttagtgataagaacaccaatttaagaatcagaaaatttgtgttacagtcctagaactgccttttttaccatgtgaattttactgggtaaagcatttcctt

SEQ ID NO: 450297 - DNA, 382 bp, Homo sapiens
cagtgggctcaggggcctgcaacggaccctacctcttgtagtgattctcggggccacgggcaccggcaaatccacgctggcgttgcagctaggccagcggctcggcggtgagatcgtcagcgctgactccatgcaggtatggcagtgcggctggcccgggcgcctggggaccccggaggccgcgtggacaccctgtggcaaaggtcttaaagggtgaaccccgaggcttgtaggggcggagggggtaggtaaagggagcccatacttactaagcacccgccgcatgccagacacagtgccagatgtttcccttatcatcgtctcatcaacttctcacgacgttactatttggtagatactattatctccttttatggagaaa

SEQ ID NO: 450298 - DNA, 1875 bp, Homo sapiens
caagcgcagactgccataagatggcgtccgtggcggctgcacgagcagttcctgtgggcagtgggctcaggggcctgcaacggaccctacctcttgtagtgattctcggggccacgggcaccggcaaatccacgctggcgttgcagctaggccagcggctcggcggtgagatcgtcagcgctgactccatgcagccccaggagatgggcactgagaaagtgattgaccgaaaagtggagcttgaaaaggaggatggtcttgtacttcacaaacgcctaagccaggtggacccagaaatggctgccaagctgcatccacatgacaaacgcaaagtggccaggagcttgcaagtttttgaagaaacaggaatctctcatagtgaatttctccatcgtcaacatacggaagaaggtggtggtccccttggaggtcctctgaagttctctaacccttgcatcctttggcttcatgctgaccaggcagttctagatgagcgcttggataagagggtggatgacatgcttgctgctgggctcttggaggaactaagagattttcacagacgctataatcagaagaatgtttcggaaaatagccaggactatcaacatggtatcttccaatcaattggcttcaaggaatttcacgagtacctgatcactgagggaaaatgcacactggagactagtaaccagcttctaaagaaaggtattgaggctctgaaacaagtaactaagagatatgcccggaaacaaaaccgatgggttaaaaaccgttttttgagcagacctggtcccattgtcccccctgtctatggcttagaggtatctgatgtctcgaagtgggaagagtctgttcttgaacctgctcttgaaatcgtgcaaagtttcatccagggccacaagcctacagccactccaataaagatgccatacaatgaagctgagaacaagagaagttatcacctgtgtgacctctgtgatcgaatcatcattggggatcgcgaatgggcagcgcacataaaatccaaatcccacttgaaccaactgaagaaaagaagaagattggactcagatgctgtcaacaccatagaaagtcagagtgtttccccagaccataacaaagaacctaaagagaagggatccccagggcagaatgatcaagagctgaaatgcagcgtttaagagacatgtccagtggcctttggaaaggtggtggggatccagttcaggagggaggggtatgtttgtctcccagtctgggcaaaggagtgctatgcggaattctctgcatagcagaaaagctcccaccattttcttttgatgtggttttaaagtctcacgttctctataatagaaacagcaggtcttgtcagctccttgtgtggctgatgtgtctggaaatgatgtagttcaggaaagcattttttttttctttgaaccttaaaggttctattattaaaagcagcacagattccacatttttatacatgaggatcttctttgtggtgaataccaggattgactgcatccctttaaagaagttttatgtccctgactctggctaaaattatctaatttccagatgcttttgtagatgactgaagtatttgtgagccacatattgggagttctagatttgagtgaatggcaggaaagggccatctccattgagatgattaagtgaaccaaactagttctcggaattctacagagaaggagggaatcagactgaggaagctgtgacataggacttgaagaccaaagactttgaaatttgcgagctgctcatgtgtgagttattatcactgctgtctttctattgagttacaaatctatatttttattgaagtttaaataaagaaaaaatttacaa

SEQ ID NO: 450299 - DNA, 2037 bp, Homo sapiens
caagcgcagactgccataagatggcgtccgtggcggctgcacgagcagttcctgtgggcagtgggctcaggggcctgcaacggaccctacctcttgtagtgattctcggggccacgggcaccggcaaatccacgctggcgttgcagctaggccagcggctcggcggtgagatcgtcagcgctgactccatgcaggtctatgaaggcctagacatcatcaccaacaaggtttctgcccaagagcagagaatctgccggcaccacatgatcagctttgtggatcctcttgtgaccaattacacagtggtggacttcagaaatagagcaactgctctgattgaagatatatttgcccgagacaaaattcctattgttgtgggaggaaccaattattacattgaatctctgctctggaaagttcttgtcaataccaagccccaggagatgggcactgagaaagtgattgaccgaaaagtggagcttgaaaaggaggatggtcttgtacttcacaaacgcctaagccaggtggacccagaaatggctgccaagctgcatccacatgacaaacgcaaagtggccaggagcttgcaagtttttgaagaaacaggaatctctcatagtgaatttctccatcgtcaacatacggaagaaggtggtggtccccttggaggtcctctgaagttctctaacccttgcatcctttggcttcatgctgaccaggcagttctagatgagcgcttggataagagggtggatgacatgcttgctgctgggctcttggaggaactaagagattttcacagacgctataatcagaagaatgtttcggaaaatagccaggactatcaacatggtatcttccaatcaattggcttcaaggaatttcacgagtacctgatcactgagggaaaatgcacactggagactagtaaccagcttctaaagaaaggacctggtcccattgtcccccctgtctatggcttagaggtatctgatgtctcgaagtgggaagagtctgttcttgaacctgctcttgaaatcgtgcaaagtttcatccagggccacaagcctacagccactccaataaagatgccatacaatgaagctgagaacaagagaagttatcacctgtgtgacctctgtgatcgaatcatcattggggatcgcgaatgggcagcgcacataaaatccaaatcccacttgaaccaactgaagaaaagaagaagattggactcagatgctgtcaacaccatagaaagtcagagtgtttccccagaccataacaaagaacctaaagagaagggatccccagggcagaatgatcaagagctgaaatgcagcgtttaagagacatgtccagtggcctttggaaaggtggtggggatccagttcaggagggaggggtatgtttgtctcccagtctgggcaaaggagtgctatgcggaattctctgcatagcagaaaagctcccaccattttcttttgatgtggttttaaagtctcacgttctctataatagaaacagcaggtcttgtcagctccttgtgtggctgatgtgtctggaaatgatgtagttcaggaaagcattttttttttctttgaaccttaaaggttctattattaaaagcagcacagattccacatttttatacatgaggatcttctttgtggtgaataccaggattgactgcatccctttaaagaagttttatgtccctgactctggctaaaattatctaatttccagatgcttttgtagatgactgaagtatttgtgagccacatattgggagttctagatttgagtgaatggcaggaaagggccatctccattgagatgattaagtgaaccaaactagttctcggaattctacagagaaggagggaatcagactgaggaagctgtgacataggacttgaagaccaaagactttgaaatttgcgagctgctcatgtgtgagttattatcactgctgtctttctattgagttacaaatctatatttttattgaagtttaaataaagaaaaaatttacaa

SEQ ID NO: 450300 - DNA, 1729 bp, Homo sapiens
caagcgcagactgccataagatggcgtccgtggcggctgcacgagcagttcctgtgggcagtgggctcaggggcctgcaacggaccctacctcttgtagtgattctcggggccacgggcaccggcaaatccacgctggcgttgcagctaggccagcggctcggcggtgagatcgtcagcgctgactccatgcaggagcttgcaagtttttgaagaaacaggaatctctcatagtgaatttctccatcgtcaacatacggaagaaggtggtggtccccttggaggtcctctgaagttctctaacccttgcatcctttggcttcatgctgaccaggcagttctagatgagcgcttggataagagggtggatgacatgcttgctgctgggctcttggaggaactaagagattttcacagacgctataatcagaagaatgtttcggaaaatagccaggactatcaacatggtatcttccaatcaattggcttcaaggaatttcacgagtacctgatcactgagggaaaatgcacactggagactagtaaccagcttctaaagaaaggtattgaggctctgaaacaagtaactaagagatatgcccggaaacaaaaccgatgggttaaaaaccgttttttgagcagacctggtcccattgtcccccctgtctatggcttagaggtatctgatgtctcgaagtgggaagagtctgttcttgaacctgctcttgaaatcgtgcaaagtttcatccagggccacaagcctacagccactccaataaagatgccatacaatgaagctgagaacaagagaagttatcacctgtgtgacctctgtgatcgaatcatcattggggatcgcgaatgggcagcgcacataaaatccaaatcccacttgaaccaactgaagaaaagaagaagattggactcagatgctgtcaacaccatagaaagtcagagtgtttccccagaccataacaaagaacctaaagagaagggatccccagggcagaatgatcaagagctgaaatgcagcgtttaagagacatgtccagtggcctttggaaaggtggtggggatccagttcaggagggaggggtatgtttgtctcccagtctgggcaaaggagtgctatgcggaattctctgcatagcagaaaagctcccaccattttcttttgatgtggttttaaagtctcacgttctctataatagaaacagcaggtcttgtcagctccttgtgtggctgatgtgtctggaaatgatgtagttcaggaaagcattttttttttctttgaaccttaaaggttctattattaaaagcagcacagattccacatttttatacatgaggatcttctttgtggtgaataccaggattgactgcatccctttaaagaagttttatgtccctgactctggctaaaattatctaatttccagatgcttttgtagatgactgaagtatttgtgagccacatattgggagttctagatttgagtgaatggcaggaaagggccatctccattgagatgattaagtgaaccaaactagttctcggaattctacagagaaggagggaatcagactgaggaagctgtgacataggacttgaagaccaaagactttgaaatttgcgagctgctcatgtgtgagttattatcactgctgtctttctattgagttacaaatctatatttttattgaagtttaaataaagaaaaaatttacaa

SEQ ID NO: 450301 - DNA, 1312 bp, Homo sapiens
caagcgcagactgccataagatggcgtccgtggcggctgcacgagcagttcctgtgggcagtgggctcaggggcctgcaacggaccctacctcttgtagtgattctcggggccacgggcaccggcaaatccacgctggcgttgcagctaggccagcggctcggcggtgagatcgtcagcgctgactccatgcaggtctatgaaggcctagacatcatcaccaacaaggtttctgcccaagagcagagaatctgccggcaccacatgatcagctttgtggatcctcttgtgaccaattacacagtggtggacttcagaaatagagcaactgctctgattgaagatatatttgcccgagacaaaattcctattgttgtgggaggaaccaattattacattgaatctctgctctggaaagttcttgtcaataccaagccccaggagatgggcactgagaaagtgattgaccgaaaagtggagcttgaaaaggaggatggtcttgtacttcacaaacgcctaagccaggtggacccagaaatggctgccaagctgcatccacatgacaaacgcaaagtggccaggagcttgcaagtttttgaagaaacaggaatctctcatagtgaatttctccatcgtcaacatacggaagaaggtggtggtccccttggaggtcctctgaagttctctaacccttgcatcctttggcttcatgctgaccaggcagttctagatgagcgcttggataagagggtggatgacatgcttgctgctgggctcttggaggaactaagagattttcacagacgctataatcagaagaatgtttcggaaaatagggaaatgatgtagttcaggaaagcattttttttttctttgaaccttaaaggttctattattaaaagcagcacagattccacatttttatacatgaggatcttctttgtggtgaataccaggattgactgcatccctttaaagaagttttatgtccctgactctggctaaaattatctaatttccagatgcttttgtagatgactgaagtatttgtgagccacatattgggagttctagatttgagtgaatggcaggaaagggccatctccattgagatgattaagtgaaccaaactagttctcggaattctacagagaaggagggaatcagactgaggaagctgtgacataggacttgaagaccaaagactttgaaatttgcgagctgctcatgtgtgagttattatcactgctgtctttctattgagttacaaatctatatttttattgaagtttaaataaagaaaaaatttacaa

SEQ ID NO: 450302 - DNA, 753 bp, Homo sapiens
caagcgcagactgccataagatggcgtccgtggcggctgcacgagcagttcctgtgggcagtgggctcaggggcctgcaacggaccctacctcttgtagtgattctcggggccacgggcaccggcaaatccacgctggcgttgcagctaggccagcggctcggcggtgagatcgtcagcgctgactccatgcaggtctatgaaggcctagacatcatcaccaacaaggtttctgcccaagagcagagaatctgccggcaccacatgatcagctttgtggatcctcttgtgaccaattacacagtggtggacttcagaaatagagcaactgctctgattgaagatatatttgcccgagacaaaattcctattgttgtgggaggaaccaattattacattgaatctctgctctggaaagttcttgtcaataccaagccccaggagatgggcactgagaaagtgattgaccgaaaagtggagcttgaaaaggaggatggtcttgtacttcacaaacgcctaagccaggtggacccagaaatggctgccaagctgcatccacatgacaaacgcaaagtggccaggtaagaaagcctggcgcgctgaccccaaattcctttacaactagagagcagtcagttcttcagtttgcccagatgatgagagagatttggtaatagcagttagtggagattgatgtgttgttctagctcagcaggttgggaggccctgagttattgcttcagttcaactccct

SEQ ID NO: 450303 - DNA, 1067 bp, Homo sapiens
aacttgcaaggacacacccacagcttacaccattggctgctgtttagctcccttatataacactgtcttggggtttaaacgtaactgaaaatccacaagacagaatagccagatctcagaggagcctggctaagcaaaaccctgcagaacggctgcctaatttacagcaaccatgagtacaaatggtgatgatcatcaggtcaaggatagtctggagcaattgagatgtcactttacatgggagttatccattgatgacgatgaaatgcctgatttagaaaacagagtcttggatcagattgaattcctagacaccaaatacagtgtgggaatacacaacctactagcctatgtgaaacacctgaaaggccagaatgagggcaaacgcctgaaagaggctttacacaagaaaggctagcaaaaacactctaactggccacggacacgcaacccaatgaccaaaaccgaagcccaaactggttgacaccgacgatcctgggagtggaaccctgggcgagccaacacactctatgcacctggcgacactgtcatcagaaacaccaacactcgagacccacgccacactcgcgacagccaagtaccccaagcagacttcaccctcggcgaaccaaagcgtcagggacagagaaaaacactactcgcacacaagcgaacaggccgtagaagccagacacttcccccctttcccgcgcctaataccgacaatgcaggacgatagatccccacaaccaactccccgacccatgggcgaaacgagaccagcggcatcgagaagcccacatgggatgacaaatgcccgtgcgaaccgcgaacaccagcaattcagtccaaaccagagcgccacacacgggcaccacgatgcgcgagaccaacgggcggagaagacagcggacccccacagaggacccatgagaacacaccaagcgcaccaccgcactcgccaaacgacctaagaccaccaccgcagacccggaaccgcggccccaacaacccaaagcacccacagaaaaaccaaccaagcgcaccccaatcgagcctgcgccaca

SEQ ID NO: 450304 - DNA, 1989 bp, Homo sapiens
aacttgcaaggacacacccacagcttacaccattggctgctgtttagctcccttatataacactgtcttggggtttaaacgtaactgaaaatccacaagacagaatagccagatctcagaggagcctggctaagcaaaaccctgcagaacggctgcctaatttacagcaaccatgaggccacttaaggatgcagcaagaaggagccatctgcaatccaggaagaaattccttgccaggaaccaaattggttgtcaccttcatctaggacttctagcctcgagaacttacaaatggtgatgatcatcaggtcaaggatagtctggagcaattgagatgtcactttacatgggagttatccattgatgacgatgaaatgcctgatttagaaaacagagtcttggatcagattgaattcctagacaccaaatacagtgtgggaatacacaacctactagcctatgtgaaacacctgaaaggccagaatgaggaagccctgaagagcttaaaagaagctgaaaacttaatgcaggaagaacatgacaaccaagcaaatgtgaggagtctggtgacctggggcaactttgcctggatgtattaccacatgggcagactggcagaagcccagacttacctggacaaggtggagaacatttgcaagaagctttcaaatcccttccgctatagaatggagtgtccagaaatagactgtgaggaaggatgggccttgctgaagtgtggaggaaagaattatgaacgggccaaggcctgctttgaaaaggtgcttgaagtggaccctgaaaaccctgaatccagcgctgggtatgcgatctctgcctatcgcctggatggctttaaattagccacaaaaaatcacaagccattttctttgcttcccctaaggcaggctgtccgcttaaatccagacaatggatatattaaggttctccttgccctgaagcttcaggatgaaggacaggaagctgaaggagaaaagtacattgaagaagctctagccaacatgtcctcacagacctatgtctttcgatatgcagccaagttttaccgaagaaaaggctctgtggataaagctcttgagttattaaaaaaggccttgcaggaaacacccacttctgtcttactgcatcaccagatagggctttgctacaaggcacaaatgatccaaatcaaggaggctacaaaagggcagcctagagggcagaacagagaaaagctagacaaaatgataagatcagccatatttcattttgaatctgcagtggaaaaaaagcccacatttgaggtggctcatctagacctggcaagaatgtatatagaagcaggcaatcacagaaaagctgaagagaattttcaaaaattgttatgcatgaaaccagtggtagaagaaacaatgcaagacatacatttccactatggtcggtttcaggaatttcaaaagaaatctgacgtcaatgcaattatccattatttaaaagctataaaaatagaacaggcatcattaacaagggataaaagtatcaattctttgaagaaattggttttaaggaaacttcggagaaaggcattagatctggaaagcttgagcctccttgggttcgtctacaaattggaaggaaatatgaatgaagccctggagtactatgagcgggccctgagactggctgctgactttgagaactctgtgagacaaggtccttaggcacccagatatcagccactttcacatttcatttcattttatgctaacatttactaatcatcttttctgcttactgttttcagaaacattataattcactgtaatgatgtaattcttgaataataaatctgacaaaatattagttgtgttcaacaattagtgaaacagaatgtgtgtatgcatgtaagaaagagaaatcatttgtatgagtgctatgtagtagagaaaaaatgttagttaactttgtaggaaataaaacattggacttaca

SEQ ID NO: 450305 - DNA, 610 bp, Homo sapiens
ggtgactcagaggattccgggagtagtcaaatgcaagacatacatttccactatggtcggtttcaggaatttcaaaagaaatctgacgtcaatgcaattatccattatttaaaagctataaaaatagaacaggcatcattaacaagggataaaagtatcaattctttgaagaaattggttttaaggaaacttcggagaaaggcattagatctggaaagcttgagcctccttgggttcgtctacaaattggaaggaaatatgaatgaagccctggagtactatgagcgggccctgagactggctgctgactttgagaactctgtgagacaaggtccttaggcacccagatatcagccactttcacatttcatttcattttatgctaacatttactaatcatcttttctgcttactgttttcagaaacattataattcactgtaatgatgtaattcttgaataataaatctgacaaaatattagttgtgttcaacaattagtgaaacagaatgtgtgtatgcatgtaagaaagagaaatcatttgtatgagtgctatgtagtagagaaaaaatgttagttaactttgtaggaaataaaacattggacttaca

SEQ ID NO: 450306 - DNA, 1751 bp, Homo sapiens
aacttgcaaggacacacccacagcttacaccattggctgctgtttagctcccttatataacactgtcttggggtttaaacgtaactgaaaatccacaagacagaatagccagatctcagaggagcctggctaagcaaaaccctgcagaacggctgcctaatttacagcaaccatgagtacaaatggtgatgatcatcaggtcaaggatagtctggagcaattgagatgtcactttacatgggagttatccattgatgacgatgaaatgcctgatttagaaaacagagtcttggatcagattgaattcctagacaccaaatacagtgtgggaatacacaacctactagcctatgtgaaacacctgaaaggccagaatgaggaagccctgaagagcttaaaagaagctgaaaacttaatgcaggaagaacatgacaaccaagcaaatgtgaggagtctggtgacctggggcaactttgcctggatgtattaccacatgggcagactggcagaagcccagacttacctggacaaggtggagaacatttgcaagaagctttcaaatcccttccgctatagaatggagtgtccagaaatagactgtgaggaaggatgggccttgctgaagtgtggaggaaagaattatgaacgggccaaggcctgctttgaaaaggtgcttgaagtggaccctgaaaaccctgaatccagcgctgggtatgcgatctctgcctatcgcctggatggctttaaattagccacaaaaaatcacaagccattttctttgcttcccctaaggcaggctgtccgcttaaatccagacaatggatatattaaggttctccttgccctgaagcttcaggatgaaggacaggaagctgaaggagaaaagtacattgaagaagctctagccaacatgtcctcacagacctatgtctttcgatatgcagccaagttttaccgaagaaaaggctctgtggataaagctcttgagttattaaaaaaggccttgcaggaaacacccacttctgtcttactgcatcaccagatagggctttgctacaaggcacaaatgatccaaatcaaggaggctacaaaagggcagcctagagggcagaacagagaaaagctagacaaaatgataagatcagccatatttcattttgaatctgcagtggaaaaaaagcccacatttgaggtggctcatctagacctggcaagaatgtatatagaagcaggcaatcacagaaaagctgaagagaattttcaaaaattgttatgcatgaaaccagtggtagaagaaacaatgcaagacatacatttccactatggtcggtttcaggaatttcaaaagaaatctgacgtcaatgcaattatccattatttaaaagctataaaaatagaacaggcatcattaacaagggataaaagtatcaattctttgaagaaattggttttaaggaaacttcggagaaaggcattagatctggaaagcttgagcctccttgggttcgtctacaaattggaaggaaatatgaatgaagccctggagtactatgagcgggccctgagactggctgctgactttgagaactctgtgagacaaggtccttaggcacccagatatcagccactttcacatttcatttcattttatgctaacatttactaatcatcttttctgcttactgttttcagaaacattataattcactgtaatgatgtaattcttgaataataaatctgacaaaatatta

SEQ ID NO: 450307 - DNA, 1880 bp, Homo sapiens
aacttgcaaggacacacccacagcttacaccattggctgctgtttagctcccttatataacactgtcttggggtttaaacgtaactgaaaatccacaagacagaatagccagatctcagaggagcctggctaagcaaaaccctgcagaacggctgcctaatttacagcaaccatgagtacaaatggtgatgatcatcaggtcaaggatagtctggagcaattgagatgtcactttacatgggagttatccattgatgacgatgaaatgcctgatttagaaaacagagtcttggatcagattgaattcctagacaccaaatacagtgtgggaatacacaacctactagcctatgtgaaacacctgaaaggccagaatgaggaagccctgaagagcttaaaagaagctgaaaacttaatgcaggaagaacatgacaaccaagcaaatgtgaggagtctggtgacctggggcaactttgcctggatgtattaccacatgggcagactggcagaagcccagacttacctggacaaggtggagaacatttgcaagaagctttcaaatcccttccgctatagaatggagtgtccagaaatagactgtgaggaaggatgggccttgctgaagtgtggaggaaagaattatgaacgggccaaggcctgctttgaaaaggtgcttgaagtggaccctgaaaaccctgaatccagcgctgggtatgcgatctctgcctatcgcctggatggctttaaattagccacaaaaaatcacaagccattttctttgcttcccctaaggcaggctgtccgcttaaatccagacaatggatatattaaggttctccttgccctgaagcttcaggatgaaggacaggaagctgaaggagaaaagtacattgaagaagctctagccaacatgtcctcacagacctatgtctttcgatatgcagccaagttttaccgaagaaaaggctctgtggataaagctcttgagttattaaaaaaggccttgcaggaaacacccacttctgtcttactgcatcaccagatagggctttgctacaaggcacaaatgatccaaatcaaggaggctacaaaagggcagcctagagggcagaacagagaaaagctagacaaaatgataagatcagccatatttcattttgaatctgcagtggaaaaaaagcccacatttgaggtggctcatctagacctggcaagaatgtatatagaagcaggcaatcacagaaaagctgaagagaattttcaaaaattgttatgcatgaaaccagtggtagaagaaacaatgcaagacatacatttccactatggtcggtttcaggaatttcaaaagaaatctgacgtcaatgcaattatccattatttaaaagctataaaaatagaacaggcatcattaacaagggataaaagtatcaattctttgaagaaattggttttaaggaaacttcggagaaaggcattagatctggaaagcttgagcctccttgggttcgtctacaaattggaaggaaatatgaatgaagccctggagtactatgagcgggccctgagactggctgctgactttgagaactctgtgagacaaggtccttaggcacccagatatcagccactttcacatttcatttcattttatgctaacatttactaatcatcttttctgcttactgttttcagaaacattataattcactgtaatgatgtaattcttgaataataaatctgacaaaatattagttgtgttcaacaattagtgaaacagaatgtgtgtatgcatgtaagaaagagaaatcatttgtatgagtgctatgtagtagagaaaaaatgttagttaactttgtaggaaataaaacattggacttaca

SEQ ID NO: 450308 - DNA, 2199 bp, Homo sapiens
aacttgcaaggacacacccacagcttacaccattggctgctgtttagctcccttatataacactgtcttggggtttaaacgtaactgaaaatccacaagacagaatagccagatctcagaggagcctggctaagcaaaaccctgcagaacggctgcctaatttacagcaaccatgagtacaaatggtgatgatcatcaggtcaaggatagtctggagcaattgagatgtcactttacatgggagttatccattgatgacgatgaaatgcctgatttagaaaacagagtcttggatcagattgaattcctagacaccaaatacagtgtgggaatacacaacctactagcctatgtgaaacacctgaaaggccagaatgaggaagccctgaagagcttaaaagaagctgaaaacttaatgcaggaagaacatgacaaccaagcaaatgtgaggagtctggtgacctggggcaactttgcctggatgtattaccacatgggcagactggcagaagcccagacttacctggacaaggtggagaacatttgcaagaagctttcaaatcccttccgctatagaatggagtgtccagaaatagactgtgaggaaggatgggccttgctgaagtgtggaggaaagaattatgaacgggccaaggcctgctttgaaaaggtgcttgaagtggaccctgaaaaccctgaatccagcgctgggtatgcgatctctgcctatcgcctggatggctttaaattagccacaaaaaatcacaagccattttctttgcttcccctaaggcaggctgtccgcttaaatccagacaatggatatattaaggttctccttgccctgaagcttcaggatgaaggacaggaagctgaaggagaaaagtacattgaagaagctctagccaacatgtcctcacagacctatgtctttcgatatgcagccaagttttaccgaagaaaaggctctgtggataaagctcttgagttattaaaaaaggccttgcaggaaacacccacttctgtcttactgcatcaccagatagggctttgctacaaggcacaaatgatccaaatcaaggaggctacaaaagggcagcctagagggcagaacagagaaaagctagacaaaatgataagatcagccatatttcattttgaatctgcagtggaaaaaaagcccacatttgaggtggctcatctagacctggcaagaatgtatatagaagcaggcaatcacagaaaagctgaagagaattttcaaaaattgttatgcatgaaaccagtggtagaagaaacaatgcaagacatacatttccactatggtcggtttcaggaatttcaaaagaaatctgacgtcaatgcaattatccattatttaaaagctataaaaatagaacaggcatcattaacaagggataaaagtatcaattctttgaagaaattggttttaaggaaacttcggagaaaggcattagatctggaaagcttgagcctccttgggttcgtctacaaattggaaggaaatatgaatgaagccctggagtactatgagcgggccctgagactggctgctgactttgagaactctgtgagacaaggtccttaggcacccagatatcagccactttcacatttcatttcattttatgctaacatttactaatcatcttttctgcttactgttttcagaaacattataattcactgtaatgatgtaattcttgaataataaatctgacaaaatattagttgtgttcaacaattagtgaaacagaatgtgtgtatgcatgtaagaaagagaaatcatttgtatgagtgctatgtagtagagaaaaaatgttagttaactttgtaggaaataaaacattggacttacactaaatgtttaattcattcattttattgtgaaataaaaataaaatccttagctcctccaccaactgaacagaccctcttggccaaggagaccccagaaaccttaaaaactaagtttcccaaccatgacaagatgagagatcattcacacctcattatattccctcccttgctaactgccattggactttttccactgagttaaacagaaacccatggaaaacaaagaacagaagactcactccttggctgacttcacctagctcactccacgtagcgccacagccagactcccctcccctctgcggtttccacatgaca

SEQ ID NO: 450309 - DNA, 419 bp, Homo sapiens
gagaattatcttgtgttttttgttttgttttgttttgagatggagtcttgttctgtcacccaggctggagcgcagtgacgtgatctcggctcactgcaaccttcacctcccgggttcaagagattctcctgtctcagcctcccgagtagctgggactacaggtacgtgccaccacacctggctaatttttgtatttttagtagagacaagagttaccatgtctttgtgcttctgggtgcttctgtgtttgtttctggccgcgtttctgtgttggacaggggtgactttgtgtgcttttgttttaatttttttgttgttttgtttttaactcttgagagtgtggcatcactcactcattatctgttgactggaatgcatgagattcaacatttcttcataccttatgatactctaagtac

SEQ ID NO: 450310 - DNA, 3557 bp, Homo sapiens
gagaattatcttgtgttttttgttttgttttgttttgagatggagtcttgttctgtcacccaggctggagcgcagtgacgtgatctcggctcactgcaaccttcacctcccgggttcaagagattctcctgtctcagcctcccgagtagctgggactacaggtacgtgccaccacacctggctaatttttgtatttttagtagagacaagagttacaccatattggccaggatcttttgctttctatagcttcaaaatgttcttaatgttaagacattcttaatactctgaaccatatgaatttgccattttggtaagtcacagacgccagatggtggcaatttcacatggcacaacccgaaagattaacaaactatccagcagatgaaaggattttttttagtttcattgggtttactgaagaaattgtttgaattctcattgcatctccagttcaacagataatgagtgagtgatgccacactctcaagagttaaaaacaaaacaacaaaaaaattaaaacaaaagcacacaactttctctctctgtcccaaaatacatacttgcatacccccgctccagataaaatccaaagggtaaaactgtcttcatgcctgcaaattcctaaggagggcacctaaagtacttgacagcgagtgtgctgaggaaatcggcagctgttgaagtcacctcctgtgctcttgccaaatgtttgaaagggaatacactgggttaccgggtgtatgttgggaggggagcattatcagtgctcgggtgaggcaagttcggagtacccagatggagacatccgtgtctgtgtcgctctggatgcctccaagccagcgtgtgtttactttctgtgtgtgtcaccatgtctttgtgcttctgggtgcttctgtgtttgtttctggccgcgtttctgtgttggacaggggtgactttgtgccggatggcttctgtgtgagagcgcgcgcgagtgtgcatgtcggtgagctgggagggtgtgtctcagtgtctatggctgtggttcggtataagtctgagcatgtctgccagggtgtatttgtgcctgtatgtgcgtgcctcggtgggcactctcgtttccttccgaatgtggggcagtgccggtgtgctgccctctgccttgagacctcaagccgcgcaggcgcccagggcaggcaggtagcggccacagaagagccaaaagctcccgggttggctggtaaggacaccacctccagctttagccctctggggccagccagggtagccgggaagcagtggtggcccgccctccagggagcagttgggccccgcccgggccagccccaggagaaggagggcgaggggaggggagggaaaggggaggagtgcctcgccccttcgcggctgccggcgtgccattggccgaaagttcccgtacgtcacggcgagggcagttcccctaaagtcctgtgcacataacgggcagaacgcactgcgaagcggcttcttcagagcacgggctggaactggcaggcaccgcgagcccctagcacccgacaagctgagtgtgcaggacgagtccccaccacacccacaccacagccgctgaatgaggcttccaggcgtccgctcgcggcccgcagagccccgccgtgggtccgcctgctgaggcgcccccagccagtgcgcttacctgccagactgcgcgccatggggcaacccgggaacggcagcgccttcttgctggcacccaatggaagccatgcgccggaccacgacgtcacgcagcaaagggacgaggtgtgggtggtgggcatgggcatcgtcatgtctctcatcgtcctggccatcgtgtttggcaatgtgctggtcatcacagccattgccaagttcgagcgtctgcagacggtcaccaactacttcatcacttcactggcctgtgctgatctggtcatgggcctggcagtggtgccctttggggccgcccatattcttatgaaaatgtggacttttggcaacttctggtgcgagttttggacttccattgatgtgctgtgcgtcacggccagcattgagaccctgtgcgtgatcgcagtggatcgctactttgccattacttcacctttcaagtaccagagcctgctgaccaagaataaggcccgggtgatcattctgatggtgtggattgtgtcaggccttacctccttcttgcccattcagatgcactggtaccgggccacccaccaggaagccatcaactgctatgccaatgagacctgctgtgacttcttcacgaaccaagcctatgccattgcctcttccatcgtgtccttctacgttcccctggtgatcatggtcttcgtctactccagggtctttcaggaggccaaaaggcagctccagaagattgacaaatctgagggccgcttccatgtccagaaccttagccaggtggagcaggatgggcggacggggcatggactccgcagatcttccaagttctgcttgaaggagcacaaagccctcaagacgttaggcatcatcatgggcactttcaccctctgctggctgcccttcttcatcgttaacattgtgcatgtgatccaggataacctcatccgtaaggaagtttacatcctcctaaattggataggctatgtcaattctggtttcaatccccttatctactgccggagcccagatttcaggattgccttccaggagcttctgtgcctgcgcaggtcttctttgaaggcctatgggaatggctactccagcaacggcaacacaggggagcagagtggatatcacgtggaacaggagaaagaaaataaactgctgtgtgaagacctcccaggcacggaagactttgtgggccatcaaggtactgtgcctagcgataacattgattcacaagggaggaattgtagtacaaatgactcactgctgtaaagcagtttttctacttttaaagacccccccccgcccaacagaacactaaacagactatttaacttgagggtaataaacttagaataaaattgtaaaattgtatagagatatgcagaaggaagggcatccttctgccttttttatttttttaagctgtaaaaagagagaaaacttatttgagtgattatttgttatttgtacagttcagttcctctttgcatggaatttgtaagtttatgtctaaagagctttagtcctagaggacctgagtctgctatattttcatgacttttccatgtatctacctcactattcaagtattaggggtaatatattgctgctggtaatttgtatctgaaggagattttccttcctacacccttggacttgaggattttgagtatctcggacctttcagctgtgaacatggactcttcccccactcctcttatttgctcacacggggtattttaggcagggatttgaggagcagcttcagttgttttcccgagcaaagtctaaagtttacagtaaataaattgtttgaccatgccttcattgcacctgtttgtccaaaaccccttgactggagtgctgttgcctcccccactggaaaccgc

SEQ ID NO: 450311 - DNA, 1157 bp, Homo sapiens
tggggggcggaagtcggttcccgtgacgcggcgcgccccaagggccggctccgttgagggaagggaagcccgcccggtggcggctggggtcggctgctgggaggaggtggtgggctggttcggacgtgggtcgaggctgtagcaggactccaggaagatgttaccgagtacttcagtgaattccttagtgcaggggaacggagtcttgaattccagggatgcggcaagacacacagccggagcgaaacgctacaaatatctgagaaggcttttccgctttcggcaaatggactttgaatttgctgcctggcagatgctctacctgttcacatccccacagagagtttacagaaattttcattatcgaaaacagacgaaggaccagtgggccagagatgaccctgctttcttggtcctgttaagtatctggctctgtgtgtccactataggatttggctttgtgctggacatgggattctttgagacaataaagcttctcctttgggttgtactcatagattgtgtaggcgttggtcttctgatagcaactttaatgtggttcatctctaacaagtatttagtgaaacgacagagcagagactatgatgtggaatggggctatgcttttgatgtgcatctcaatgctttttatccactcctggtcattttgcattttatccagctttttttcatcaaccatgttatcctgacagacacatttattggatatttagttggaaataccttatggttggttgcagttggctattatatctatgtaactttcctgggatacagtgcattgccatttttgaaaaatacagtaattcttctgtatccatttgcacctctgattctgctctacgggctttccctggcactgggatggaacttcacccatactctctgttctttctataagtacagagtgaaataaaaagtgagaagaagattcaatcgtaactgtgtcaacagtattgtgaagtgatcatttcttgtaaaacttgtaaataaactatcatctttgtagatatcttaaaggtgtaaagtttgcaaatttgaagaaatatatattaacactgtggtcaggtacattccttaaaactaattaaatgtacatttctataataaatattttttaaactaaaaaaaaaaaa

SEQ ID NO: 450312 - DNA, 779 bp, Homo sapiens
aaatctcaaatagctaaaagatgttttcctataacgccatccatctctgtactttaagttggactcctagaggtttctgaggcagtcacaagtttaaattcaccactgttttcatgaatatttgtgacatttctccctcattgttaacctctcttggtccagtgtatgatgtcccactcagcctctgtgctgaaataattcctctcctaggtttcttcccagccctagacaaggaggaaacagcacagaggggttgggaagagtagtctagttctgggcataaatagcatcatcttactgattcaaaatatgcattcccttccaccccacatgttgaagtaagctgtctttcaaaatgttcatttattagtcatttattttttttttttttttaaatcagtttggattcctttcttttccagcattgccatttttgaaaaatacagtaattcttctgtatccatttgcacctctgattctgctctacgggctttccctggcactgggatggaacttcacccatactctctgttctttctataagtacagagtgaaataaaaagtgagaagaagattcaatcgtaactgtgtcaacagtattgtgaagtgatcatttcttgtaaaacttgtaaataaactatcatctttgtagatatcttaaaggtgtaaagtttgcaaatttgaagaaatatatattaacactgtggtcaggtacattccttaaaactaattaaatgtacatttctataataaatattttttaaactaaaaaaaaaaaa

SEQ ID NO: 450313 - DNA, 711 bp, Homo sapiens
tggggggcggaagtcggttcccgtgacgcggcgcgccccaagggccggctccgttgagggaagggaagcccgcccggtggcggctggggtcggctgctgggaggaggtggtgggctggttcggacgtgggtcgaggctgtagcaggactccaggtgaggcctgaggaccactctgccctcccgcggcccgggctcgcgccgggggccatttaatcccgacagcttgcggcctgacgtcgctgcggcctggcagtgaccatgtcggcgtccggcccctcggccggcgatagagttgcggctaaaatgaaaggacgcccagttacatttgcatcgtagataaagaaagagcatttagtataagcatgtccgaaatgttgcgtgggatgtaggcatactaaaaccttattcgtggcctgtctgaaatccaaatggagctgggtattctgtgtttttatttgctaaatctggcagccgtacccgcggccccgggcagggagggagcagctgggctcggccagaccctgccggcgtctggggggcctgcgaagtggaggggagacgggcagccgggcagtggccggcgttccccggagctcggaccggttggattggactccgacgctaccgctccctctgctgaactattccggatgtaaaacactagggatcggagtttttcttggttttttaatctcattctagtgaccgaga

SEQ ID NO: 450314 - DNA, 1360 bp, Homo sapiens
gtggttaagagcacggaatttcgagtcagatttccaatcttggctctatcactatcctcggagtcatggggcagtcacatcatccctgtctctgtaatggtagctgcccctggataagtgttattaggtgattcagaagggtgggctgttgcccttgcctgaggttgcagtctgcggttcccaagccccaagacccgcctcagaactaactgcatttgcttttgactcctggcctttctctagggttgggaagaacatggaaagtgacctccctgccaaataactcagaagaggagtgtcggtagccaaaagtttcttcagaatacgtgtaaaagaaatgtttttcttccatctaggaagatgttaccgagtacttcagtgaattccttagtgcaggggaacggagtcttgaattccagggatgcggcaagacacacagccggagcgaaacgctacaaatatctgagaaggcttttccgctttcggcaaatggactttgaatttgctgcctggcagatgctctacctgttcacatccccacagagagtttacagaaattttcattatcgaaaacagacgaaggaccagtgggccagagatgaccctgctttcttggtcctgttaagtatctggctctgtgtgtccactataggatttggctttgtgctggacatgggattctttgagacaataaagcttctcctttgggttgtactcatagattgtgtaggcgttggtcttctgatagcaactttaatgtggttcatctctaacaagtatttagtgaaacgacagagcagagactatgatgtggaatggggctatgcttttgatgtgcatctcaatgctttttatccactcctggtcattttgcattttatccagctttttttcatcaaccatgttatcctgacagacacatttattggatatttagttggaaataccttatggttggttgcagttggctattatatctatgtaactttcctgggatacagtgcattgccatttttgaaaaatacagtaattcttctgtatccatttgcacctctgattctgctctacgggctttccctggcactgggatggaacttcacccatactctctgttctttctataagtacagagtgaaataaaaagtgagaagaagattcaatcgtaactgtgtcaacagtattgtgaagtgatcatttcttgtaaaacttgtaaataaactatcatctttgtagatatcttaaaggtgtaaagtttgcaaatttgaagaaatatatattaacactgtggtcaggtacattccttaaaactaattaaatgtacatttctataataaatattttttaaactaaaaaaaaaaaa

SEQ ID NO: 450315 - DNA, 1555 bp, Homo sapiens
tggggggcggaagtcggttcccgtgacgcggcgcgccccaagggccggctccgttgagggaagggaagcccgcccggtggcggctggggtcggctgctgggaggaggtggtgggctggttcggacgtgggtcgaggctgtagcaggactccaggtgaggcctgaggaccactctgccctcccgcggcccgggctcgcgccgggggccatttaatcccgacagcttgcggcctgacgtcgctgcggcctggcagtgaccatgtcggcgtccggcccctcggccggcgatagagttgcggctaaaatgaaaggacgcccagttacatttgcatcgtagataaagaaagagcatttagtataagcatgtccgaaatgttgcgtgggatgtaggcatactaaaaccttattcgtggcctgtctgaaatccaaatggagctggggttgggaagaacatggaaagtgacctccctgccaaataactcagaagaggagtgtcggtagccaaaagtttcttcagaatacgtgtaaaagaaatgtttttcttccatctaggaagatgttaccgagtacttcagtgaattccttagtgcaggggaacggagtcttgaattccagggatgcggcaagacacacagccggagcgaaacgctacaaatatctgagaaggcttttccgctttcggcaaatggactttgaatttgctgcctggcagatgctctacctgttcacatccccacagagagtttacagaaattttcattatcgaaaacagacgaaggaccagtgggccagagatgaccctgctttcttggtcctgttaagtatctggctctgtgtgtccactataggatttggctttgtgctggacatgggattctttgagacaataaagcttctcctttgggttgtactcatagattgtgtaggcgttggtcttctgatagcaactttaatgtggttcatctctaacaagtatttagtgaaacgacagagcagagactatgatgtggaatggggctatgcttttgatgtgcatctcaatgctttttatccactcctggtcattttgcattttatccagctttttttcatcaaccatgttatcctgacagacacatttattggatatttagttggaaataccttatggttggttgcagttggctattatatctatgtaactttcctgggatacagtgcattgccatttttgaaaaatacagtaattcttctgtatccatttgcacctctgattctgctctacgggctttccctggcactgggatggaacttcacccatactctctgttctttctataagtacagagtgaaataaaaagtgagaagaagattcaatcgtaactgtgtcaacagtattgtgaagtgatcatttcttgtaaaacttgtaaataaactatcatctttgtagatatcttaaaggtgtaaagtttgcaaatttgaagaaatatatattaacactgtggtcaggtacattccttaaaactaattaaatgtacatttctataataaatattttttaaactaaaaaaaaaaaa

SEQ ID NO: 450316 - DNA, 1099 bp, Homo sapiens
gccagtcttgtctctggagtctgttctcagatccgccaccagggaggctctgtcaaggcatttaagtcaaatacttttctcagaactccacagtggcttctcacgtcaccaggaatgccaaagattgtcaaccctgtttcttttctggcttcatttcttgctccttttctttcagacactggtcttttcaccattcctcaggcctgccaggcaccatcactatccttgggtctttaccctgttactttatgaccctcatatgtacaattgcatctcaagtttgtattctccacatttctctgctgctttctctctttccattaccatctgacataggtgtatcattgtcagccttccttcctagatggaaggcagggatttttgtctgttttgtttactggtatatctccagaatttagaatgtctgccgcatagaaagtcgtcagtaaacatttacagaattcattttattatgaaagaaattttaattttgctcttaggttcatctctaacaagtatttagtgaaacgacagagcagagactatgatgtggaatggggctatgcttttgatgtgcatctcaatgctttttatccactcctggtcattttgcattttatccagctttttttcatcaaccatgttatcctgacagacacatttattggatatttagttggaaataccttatggttggttgcagttggctattatatctatgtaactttcctgggatacagtgcattgccatttttgaaaaatacagtaattcttctgtatccatttgcacctctgattctgctctacgggctttccctggcactgggatggaacttcacccatactctctgttctttctataagtacagagtgaaataaaaagtgagaagaagattcaatcgtaactgtgtcaacagtattgtgaagtgatcatttcttgtaaaacttgtaaataaactatcatctttgtagatatcttaaaggtgtaaagtttgcaaatttgaagaaatatatattaacactgtggtcaggtacattccttaaaactaattaaatgtacatttctataataaatattttttaaactaaaaaaaaaaaa

SEQ ID NO: 450317 - DNA, 1153 bp, Homo sapiens
gccagtcttgtctctggagtctgttctcagatccgccaccagggaggctctgtcaaggcatttaagtcaaatacttttctcagaactccacagtggcttctcacgtcaccaggaatgccaaagattgtaaaacggccacaggcttcgtaagacatggagcctgtgtgacttgatgttgggcccaaccctgtttcttttctggcttcatttcttgctccttttctttcagacactggtcttttcaccattcctcaggcctgccaggcaccatcactatccttgggtctttaccctgttactttatgaccctcatatgtacaattgcatctcaagtttgtattctccacatttctctgctgctttctctctttccattaccatctgacataggtgtatcattgtcagccttccttcctagatggaaggcagggatttttgtctgttttgtttactggtatatctccagaatttagaatgtctgccgcatagaaagtcgtcagtaaacatttacagaattcattttattatgaaagaaattttaattttgctcttaggttcatctctaacaagtatttagtgaaacgacagagcagagactatgatgtggaatggggctatgcttttgatgtgcatctcaatgctttttatccactcctggtcattttgcattttatccagctttttttcatcaaccatgttatcctgacagacacatttattggatatttagttggaaataccttatggttggttgcagttggctattatatctatgtaactttcctgggatacagtgcattgccatttttgaaaaatacagtaattcttctgtatccatttgcacctctgattctgctctacgggctttccctggcactgggatggaacttcacccatactctctgttctttctataagtacagagtgaaataaaaagtgagaagaagattcaatcgtaactgtgtcaacagtattgtgaagtgatcatttcttgtaaaacttgtaaataaactatcatctttgtagatatcttaaaggtgtaaagtttgcaaatttgaagaaatatatattaacactgtggtcaggtacattccttaaaactaattaaatgtacatttctataataaatattttttaaactaaaaaaaaaaaa

SEQ ID NO: 450318 - DNA, 1179 bp, Homo sapiens
tggggggcggaagtcggttcccgtgacgcggcgcgccccaagggccggctccgttgagggaagggaagcccgcccggtggcggctggggtcggctgctgggaggaggtggtgggctggttcggacgtgggtcgaggctgtagcaggactccaggaagatgttaccgagtacttcagtgaattccttagtgcaggggaacggagtcttgaattccagggatgcggcaagacacacagccggagcgaaacgctacaaatatctgagaaggcttttccgctttcggcaaatggactttgaatttgctgcctggcagatgctctacctgttcacatccccacagagagtttacagaaattttcattatcgaaaacagacgaaggaccagtgggccagagatgaccctgctttcttggtcctgttaagtatctggctctgtgtgtccactataggatttggctttgtgctggacatgggattctttgagacaataaagcttctcctttgggttgtactcatagattgtgtaggcgttggtcttctgatagcaactttaatgtggttcatctctaacaagtatttagtgaaacgacagagcagagactatgatgtggaatggggctatgcttttgatgtgcatctcaatgctttttatccactcctggtcattttgcattttatccagctttttttcatcaaccatgttatcctgacagacacatttattggatatttagttggaaataccttatggttggttgcagttggctattatatctatgtaactttcctgggatacagtgtttggattcctttcttttccagcattgccatttttgaaaaatacagtaattcttctgtatccatttgcacctctgattctgctctacgggctttccctggcactgggatggaacttcacccatactctctgttctttctataagtacagagtgaaataaaaagtgagaagaagattcaatcgtaactgtgtcaacagtattgtgaagtgatcatttcttgtaaaacttgtaaataaactatcatctttgtagatatcttaaaggtgtaaagtttgcaaatttgaagaaatatatattaacactgtggtcaggtacattccttaaaactaattaaatgtacatttctataataaatattttttaaactaaaaaaaaaaaa

SEQ ID NO: 450319 - DNA, 2011 bp, Homo sapiens
tggggggcggaagtcggttcccgtgacgcggcgcgccccaagggccggctccgttgagggaagggaagcccgcccggtggcggctggggtcggctgctgggaggaggtggtgggctggttcggacgtgggtcgaggctgtagcaggactccaggaagatgttaccgagtacttcagtgaattccttagtgcaggggaacggagtcttgaattccagggatgcggcaagacacacagccggagcgaaacgctacaaatatctgagaaggcttttccgctttcggcaaatggactttgaatttgctgcctggcagatgctctacctgttcacatccccacagagagtttacagaaattttcattatcgaaaacagacgaaggaccagtgggccagagatgaccctgctttcttggtcctgttaagtatctggctctgtgtgtccactataggatttggctttgtgctggacatgggattctttgagacaataaagcttctcctttgggttgtactcatagattgtgtaggcgttggtcttctgatagcaactttaatgtggttcatctctaacaagtatttagtgaaacgacagagcagagactatgatgtggaatggggctatgcttttgatgtgcatctcaatgctttttatccactcctggtcattttgcattttatccagctttttttcatcaaccatgttatcctgacagacacatttattggatatttagttggaaataccttatggttggttgcagttggctattatatctatgtaactttcctgggatacagtggtaagtaatttttttaaatgtttttggttgagaacatagcaagagggggaaagttgtaacagtagtacaaacagctgcttttatggaacacttacaggcactatcctaagtattttatgtgcattatctcatttaatcttcatgacaattacacaggtttgtttctgttttcaaatgaggaaactgaggcagagagattaagcaacttacccatggtcatgcagctagaaaatggcctagctggtatataacagattttatactttcaaggaaacatgttaaaccatactggttatctccagatgacttgcaggaatccaagaccattcactcctcttctcccatgctttcaggttgtgggttaccagcaggagggtagagcgaagaaaggtggggcccagcatcttgttacataggtctatgaactgaagttctctaaagccttttgaatcataactttttgccccattcttagttttcatgattaccgtatggttctgtagacaatcacagaagatcgggcccaacatttattgtcctcaggacatgtttgcagatttactgttaaatcctgttgtcagttcatttttcttaatatgaatgaggaacatatattatttttcatttatgttaagaaatgatcccattaaataaagccaaataaaatctagagactgcgctgtacgtttcttaccccttcctttcctgttactgtagatgattagggcctaactgtaaatacagatggctctgactatgcctggctccggagttattcccaccccggttctctccccccttggctggtttgtcagggaacacttaaccccttcattgtaatgccttgtttggggagtgctttctctagtccaggggagatgtttgtgtcatttctaatgaattttgaaagtgttttgtgatgagaacactgcagcactgtggtttctctaagtggttatttgaacactcctggtaacgacctataccacttagaatagttggagtacagctcagtttgtttaagaacttcctatatgagaaatacttaggtcgggatgcatggggtagggtcccgctaactaagcagtgagcaagaaacatcaatatttggagccagacttttatatttaagagtttcagttcttttctgaagcctgggctactagttgagctcacaccctcttaaagtgggggtataatgctttacactg

SEQ ID NO: 450320 - DNA, 915 bp, Homo sapiens
tggggggcggaagtcggttcccgtgacgcggcgcgccccaagggccggctccgttgagggaagggaagcccgcccggtggcggctggggtcggctgctgggaggaggtggtgggctggttcggacgtgggtcgaggctgtagcaggactccaggaagatgttaccgagtacttcagtgaattccttagtgcaggggaacggagtcttgaattccagggatgcggcaagacacacagccggagcgaaacgctacaaatatctgagaaggcttttccgctttcggcaaatggactttgaatttgctgcctggcagatgctctacctgttcacatccccacagagagtttacagaaattttcattatcgaaaacagacgaaggaccagtgggccagagatgaccctgctttcttggtcctgttaagtatctggctctgtgtgtccactataggatttggctttgtgctggacatgggattctttgagacaataaagcttctcctttgggttgtactcatagattgtgtaggcgttggtcttctgatagcaactttaatgtgcattgccatttttgaaaaatacagtaattcttctgtatccatttgcacctctgattctgctctacgggctttccctggcactgggatggaacttcacccatactctctgttctttctataagtacagagtgaaataaaaagtgagaagaagattcaatcgtaactgtgtcaacagtattgtgaagtgatcatttcttgtaaaacttgtaaataaactatcatctttgtagatatcttaaaggtgtaaagtttgcaaatttgaagaaatatatattaacactgtggtcaggtacattccttaaaactaattaaatgtacatttctataataaatattttttaaactaaaaaaaaaaaa

SEQ ID NO: 450321 - DNA, 842 bp, Homo sapiens
tggggggcggaagtcggttcccgtgacgcggcgcgccccaagggccggctccgttgagggaagggaagcccgcccggtggcggctggggtcggctgctgggaggaggtggtgggctggttcggacgtgggtcgaggctgtagcaggactccaggaagatgttaccgagtacttcagtgaattccttagtgcaggggaacggagtcttgaattccagggatgcggcaagacacacagccggagcgaaacgctacaaatatctgagaaggcttttccgctttcggcaaatggactttgaatttgctgcctggcagatgctctacctgttcacatccccacagagagtttacagaaattttcattatcgaaaacagacgaaggaccagtgggccagagatgaccctgctttcttggtcctgttaagtatctggctctgtgtgtccactataggatttggctttgtgctggacatgggattctttgagacaataaagcttctcctttgggttgtactcatagattgtgtaggcgttggtcttctgatagcaactttaatgtgacgaagtcccactctgtcacccaggctggagtgcaatggtgtgatctcagctcactgcaacctccgcctcccgggttcaagcgaatctcctgcctcagccttctgagtagctgggattacaggcacacaccaccacacttggctaattttcatacttttagtagagacagggttttgccatttggccaggctggtctcaaactcctgacctcaggtgatcctcccgcctcagcctcccaaagtgctgggattacaggcgtgagccaccgcgcccagcaaatacc

SEQ ID NO: 450322 - DNA, 1270 bp, Homo sapiens
tggggggcggaagtcggttcccgtgacgcggcgcgccccaagggccggctccgttgagggaagggaagcccgcccggtggcggctggggtcggctgctgggaggaggtggtgggctggttcggacgtgggtcgaggctgtagcaggactccagggttgggaagaacatggaaagtgacctccctgccaaataactcagaagaggagtgtcggtagccaaaagtttcttcagaatacgtgtaaaagaaatgtttttcttccatctaggaagatgttaccgagtacttcagtgaattccttagtgcaggggaacggagtcttgaattccagggatgcggcaagacacacagccggagcgaaacgctacaaatatctgagaaggcttttccgctttcggcaaatggactttgaatttgctgcctggcagatgctctacctgttcacatccccacagagagtttacagaaattttcattatcgaaaacagacgaaggaccagtgggccagagatgaccctgctttcttggtcctgttaagtatctggctctgtgtgtccactataggatttggctttgtgctggacatgggattctttgagacaataaagcttctcctttgggttgtactcatagattgtgtaggcgttggtcttctgatagcaactttaatgtggttcatctctaacaagtatttagtgaaacgacagagcagagactatgatgtggaatggggctatgcttttgatgtgcatctcaatgctttttatccactcctggtcattttgcattttatccagctttttttcatcaaccatgttatcctgacagacacatttattggatatttagttggaaataccttatggttggttgcagttggctattatatctatgtaactttcctgggatacagtgcattgccatttttgaaaaatacagtaattcttctgtatccatttgcacctctgattctgctctacgggctttccctggcactgggatggaacttcacccatactctctgttctttctataagtacagagtgaaataaaaagtgagaagaagattcaatcgtaactgtgtcaacagtattgtgaagtgatcatttcttgtaaaacttgtaaataaactatcatctttgtagatatcttaaaggtgtaaagtttgcaaatttgaagaaatatatattaacactgtggtcaggtacattccttaaaactaattaaatgtacatttctataataaatattttttaaactaaaaaaaaaaaa

SEQ ID NO: 450323 - DNA, 1291 bp, Homo sapiens
gtggttaagagcacggaatttcgagtcagatttccaatcttggctctatcactatcctcggagtcatggggcagtcacatcatccctgtctctgtaatggtagctgcccctggataagtgttattaggtgattcagaagggtgggctgttgcccttgcctgaggttgcagtctgcggttcccaagccccaagacccgcctcagaactaactgcatttgcttttgactcctggcctttctctagggttgggaagaacatggaaagtgacctccctgccaaataactcagaagaggagtgtcggtagccaaaagtttcttcagaatacgtgtaaaagaaatgtttttcttccatctaggaagatgttaccgagtacttcagtgaattccttagtgcaggggaacggagtcttgaattccagggatgcggcaagacacacagccggagcgaaacgctacaaatatctgagaaggcttttccgctttcggcaaatggactttgaatttgctgcctggcagatgctctacctgttcacatccccacagagagtttacagaaattttcattatcgaatgtccactataggatttggctttgtgctggacatgggattctttgagacaataaagcttctcctttgggttgtactcatagattgtgtaggcgttggtcttctgatagcaactttaatgtggttcatctctaacaagtatttagtgaaacgacagagcagagactatgatgtggaatggggctatgcttttgatgtgcatctcaatgctttttatccactcctggtcattttgcattttatccagctttttttcatcaaccatgttatcctgacagacacatttattggatatttagttggaaataccttatggttggttgcagttggctattatatctatgtaactttcctgggatacagtgcattgccatttttgaaaaatacagtaattcttctgtatccatttgcacctctgattctgctctacgggctttccctggcactgggatggaacttcacccatactctctgttctttctataagtacagagtgaaataaaaagtgagaagaagattcaatcgtaactgtgtcaacagtattgtgaagtgatcatttcttgtaaaacttgtaaataaactatcatctttgtagatatcttaaaggtgtaaagtttgcaaatttgaagaaatatatattaacactgtggtcaggtacattccttaaaactaattaaatgtacatttctataataaatattttttaaactaaaaaaaaaaaa

SEQ ID NO: 450324 - DNA, 1184 bp, Homo sapiens
gccagtcttgtctctggagtctgttctcagatccgccaccagggaggctctgtcaaggcatttaagtcaaatacttttctcagaactccacagtggcttctcacgtcaccaggaatgccaaagattgtcaaccctgtttcttttctggcttcatttcttgctccttttctttcagacactggtcttttcaccattcctcaggcctgccaggcaccatcactatccttgggtctttaccctgttactttatgaccctcatatgtacaattgcatctcaagtttgtattctccacatttctctgctgctttctctctttccattaccatctgacataggtgtatcattgtcagccttccttcctagatggaaggcagggatttttgtctgttttgtttactggtatatctccagaatttagaatgtctgccgcatagaaagtcgtcagtaaacatttacagaattcattttattatgaaagaaattttaattttgctcttaggttcatctctaacaagtatttagtgaaacgacagagcagagactatgatgtggaatggggctatgcttttgatgtgcatctcaatgctttttatccactcctggtcattttgcattttatccagctttttttcatcaaccgtaagtagcagttaattagagtattatccaagtcttcattgcatgcattggtaaagggactcatggtctgcgtctcttctggcagatgttatcctgacagacacatttattggatatttagttggaaataccttatggttggttgcagttggctattatatctatgtaactttcctgggatacagtgcattgccatttttgaaaaatacagtaattcttctgtatccatttgcacctctgattctgctctacgggctttccctggcactgggatggaacttcacccatactctctgttctttctataagtacagagtgaaataaaaagtgagaagaagattcaatcgtaactgtgtcaacagtattgtgaagtgatcatttcttgtaaaacttgtaaataaactatcatctttgtagatatcttaaaggtgtaaagtttgcaaatttgaagaaatatatattaacactgtggtcaggtacattccttaaaactaattaaatgtacatttctataataaatattttttaaactaaaaaaaaaaaa

SEQ ID NO: 450325 - DNA, 2096 bp, Homo sapiens
tggggggcggaagtcggttcccgtgacgcggcgcgccccaagggccggctccgttgagggaagggaagcccgcccggtggcggctggggtcggctgctgggaggaggtggtgggctggttcggacgtgggtcgaggctgtagcaggactccaggaagatgttaccgagtacttcagtgaattccttagtgcaggggaacggagtcttgaattccagggatgcggcaagacacacagccggagcgaaacgctacaaatatctgagaaggcttttccgctttcggcaaatggactttgaatttgctgcctggcagatgctctacctgttcacatccccacagagagtttacagaaattttcattatcgaaaacagacgaaggaccagtgggccagagatgaccctgctttcttggtcctgttaagtatctggctctgtgtgtccactataggatttggctttgtgctggacatgggattctttgagacaataaagcttctcctttgggttgtactcatagattgtgtaggcgttggtcttctgatagcaactttaatgtggttcatctctaacaagtatttagtgaaacgacagagcagagactatgatgtggaatggggctatgcttttgatgtgcatctcaatgctttttatccactcctggtcattttgcattttatccagctttttttcatcaaccgtaagtagcagttaattagagtattatccaagtcttcattgcatgcattggtaaagggactcatggtctgcgtctcttctggcagatgttatcctgacagacacatttattggatatttagttggaaataccttatggttggttgcagttggctattatatctatgtaactttcctgggatacagtggtaagtaatttttttaaatgtttttggttgagaacatagcaagagggggaaagttgtaacagtagtacaaacagctgcttttatggaacacttacaggcactatcctaagtattttatgtgcattatctcatttaatcttcatgacaattacacaggtttgtttctgttttcaaatgaggaaactgaggcagagagattaagcaacttacccatggtcatgcagctagaaaatggcctagctggtatataacagattttatactttcaaggaaacatgttaaaccatactggttatctccagatgacttgcaggaatccaagaccattcactcctcttctcccatgctttcaggttgtgggttaccagcaggagggtagagcgaagaaaggtggggcccagcatcttgttacataggtctatgaactgaagttctctaaagccttttgaatcataactttttgccccattcttagttttcatgattaccgtatggttctgtagacaatcacagaagatcgggcccaacatttattgtcctcaggacatgtttgcagatttactgttaaatcctgttgtcagttcatttttcttaatatgaatgaggaacatatattatttttcatttatgttaagaaatgatcccattaaataaagccaaataaaatctagagactgcgctgtacgtttcttaccccttcctttcctgttactgtagatgattagggcctaactgtaaatacagatggctctgactatgcctggctccggagttattcccaccccggttctctccccccttggctggtttgtcagggaacacttaaccccttcattgtaatgccttgtttggggagtgctttctctagtccaggggagatgtttgtgtcatttctaatgaattttgaaagtgttttgtgatgagaacactgcagcactgtggtttctctaagtggttatttgaacactcctggtaacgacctataccacttagaatagttggagtacagctcagtttgtttaagaacttcctatatgagaaatacttaggtcgggatgcatggggtagggtcccgctaactaagcagtgagcaagaaacatcaatatttggagccagacttttatatttaagagtttcagttcttttctgaagcctgggctactagttgagctcacaccctcttaaagtgggggtataatgctttacactg

SEQ ID NO: 450326 - DNA, 340 bp, Homo sapiens
ccggagcgaaacgctacaaatatctgagaaggcttttccgctttcggcaaatggactttgaatttgctgcctggcagatgctctacctgttcacatccccacagagagtttacagaaattttcattatcgaaaacagacgaaggaccagtgggccagagatgaccctgctttcttggtcctgttaagtatctggctctgtggtaagtgtgtttatctgagatagaattgaacgctgagtgtttctgattagattttttgttataaatgtgttgtgggtcagaatctggaaatattggaaactatttctcctttttactgaagcctcaaaaaatctcacag

SEQ ID NO: 450327 - DNA, 444 bp, Homo sapiens
cctctaagcagccgtgactctcaaacgagagctttcgggagaaggccacctctgacagggtgcagcccagttggcatgtggtgtcggccaggcctgcagggtgggtgaccggacaggacagtgaggggtagagagggctgcagccgagggtccctgacgatgcccagggctgaccccaccctctgttctcctccacagccacctcctaagctgcccaacggtgtgttcacccccgacttccaggagtttgtcaataaatggtaggtggagccgggctgcccacacccctggccgggacccagatgtgccactccttccgggtcctgggtggggcccgtggcccagcctgcccatccagaatcccagtgcagcgttaggcaggactcagcccaacgggaagccagattccttttcccagagctgtggggctgcagctcccggctg

SEQ ID NO: 450328 - DNA, 1816 bp, Homo sapiens
tagcgggagaagccggtccgcgatcttgtggccgcccctcccctccccctgcctctcggactcgggctgcggcgtcagccttcttcgggcctcggcagcggtagcggctcgctcgcctcagccccagcgcccctcggctaccctcggcccaggcccgcagcgccgcccgccctcggccgccccgacgccggcctgggccgcggccgcagccccgggctcgcgtaggcgccgaccgctcccggcccgccccctatgggccccggctagaggcgccgccgccgccggcccgcggagccccgatgctggcccggaggaagccggtgctgccggcgctcaccatcaaccctaccatcgccgagggcccatcccctaccagcgagggcgcctccgaggcaaacctggtggacctgcagaagaagctggaggagctggaacttgacgagcagcagaagaagcggctggaagcctttctcacccagaaagccaaggtcggcgaactcaaagacgatgacttcgaaaggatctcagagctgggcgcgggcaacggcggggtggtcaccaaagtccagcacagaccctcgggcctcatcatggccaggaagctgatccaccttgagatcaagccggccatccggaaccagatcatccgcgagctgcaggtcctgcacgaatgcaactcgccgtacatcgtgggcttctacggggccttctacagtgacggggagatcagcatttgcatggaacacatggacggcggctccctggaccaggtgctgaaagaggccaagaggattcccgaggagatcctggggaaagtcagcatcgcggttctccggggcttggcgtacctccgagagaagcaccagatcatgcaccgagatgtgaagccctccaacatcctcgtgaactctagaggggagatcaagctgtgtgacttcggggtgagcggccagctcatcgactccatggccaactccttcgtgggcacgcgctcctacatggctccggagcggttgcagggcacacattactcggtgcagtcggacatctggagcatgggcctgtccctggtggagctggccgtcggaaggtaccccatccccccgcccgacgccaaagagctggaggccatctttggccggcccgtggtcgacggggaagaaggagagcctcacagcatctcgcctcggccgaggccccccgggcgccccgtcagcggtcacgggatggatagccggcctgccatggccatctttgaactcctggactatattgtgaacgagccacctcctaagctgcccaacggtgtgttcacccccgacttccaggagtttgtcaataaatgcctcatcaagaacccagcggagcgggcggacctgaagatgctcacaaaccacaccttcatcaagcggtccgaggtggaagaagtggattttgccggctggttgtgtaaaaccctgcggctgaaccagcccggcacacccacgcgcaccgccgtgtgacagtggccgggctccctgcgtcccgctggtgacctgcccaccgtccctgtccatgccccgcccttccagctgaggacaggctggcgcctccacccaccctcctgcctcacccctgcggagagcaccgtggcggggcgacagcgcatgcaggaacgggggtctcctctcctgcccgtcctggccggggtgcctctggggacgggcgacgctgctgtgtgtggtctcagaggctctgcttccttaggttacaaaacaaaacagggagagaaaaagcaaaaaaaaaacaaacaggcgcgcgcccctctaaagcaccc

SEQ ID NO: 450329 - DNA, 1968 bp, Homo sapiens
tagcgggagaagccggtccgcgatcttgtggccgcccctcccctccccctgcctctcggactcgggctgcggcgtcagccttcttcgggcctcggcagcggtagcggctcgctcgcctcagccccagcgcccctcggctaccctcggcccaggcccgcagcgccgcccgccctcggccgccccgacgccggcctgggccgcggccgcagccccgggctcgcgtaggcgccgaccgctcccggcccgccccctatgggccccggctagaggcgccgccgccgccggcccgcggagccccgatgctggcccggaggaagccggtgctgccggcgctcaccatcaaccctaccatcgccgagggcccatcccctaccagcgagggcgcctccgaggcaaacctggtggacctgcagaagaagctggaggagctggaacttgacgagcagcagaagaagcggctggaagcctttctcacccagaaagccaaggtcggcgaactcaaagacgatgacttcgaaaggatctcagagctgggcgcgggcaacggcggggtggtcaccaaagtccagcacagaccctcgggcctcatcatggccaggaagctgatccaccttgagatcaagccggccatccggaaccagatcatccgcgagctgcaggtcctgcacgaatgcaactcgccgtacatcgtgggcttctacggggccttctacagtgacggggagatcagcatttgcatggaacacatggacggcggctccctggaccaggtgctgaaagaggccaagaggattcccgaggagatcctggggaaagtcagcatcgcggttctccggggcttggcgtacctccgagagaagcaccagatcatgcaccgagatgtgaagccctccaacatcctcgtgaactctagaggggagatcaagctgtgtgacttcggggtgagcggccagctcatcgactccatggccaactccttcgtgggcacgcgctcctacatggctccggagcggttgcagggcacacattactcggtgcagtcggacatctggagcatgggcctgtccctggtggagctggccgtcggaaggtaccccatccccccgcccgacgccaaagagctggaggccatctttggccggcccgtggtcgacggggaagaaggagagcctcacagcatctcgcctcggccgaggccccccgggcgccccgtcagcggtcacgggatggatagccggcctgccatggccatctttgaactcctggactatattgtgaacgagccacctcctaagctgcccaacggtgtgttcacccccgacttccaggagtttgtcaataaatgcctcatcaagaacccagcggagcgggcggacctgaagatgctcacaaaccacaccttcatcaagcggtccgaggtggaagaagtggattttgccggctggttgtgtaaaaccctgcggctgaaccagcccggcacacccacgcgcaccgccgtgtgacagtggccgggctccctgcgtcccgctggtgacctgcccaccgtccctgtccatgccccgcccttccagctgaggacaggctggcgcctccacccaccctcctgcctcacccctgcggagagcaccgtggcggggcgacagcgcatgcaggaacgggggtctcctctcctgcccgtcctggccggggtgcctctggggacgggcgacgctgctgtgtgtggtctcagaggctctgcttccttaggttacaaaacaaaacagggagagaaaaagcaaaaaaaaaaaaaatacaaacaagaaaaccaactaaaaaaactcgcgggcacttataggggggggggggaaaaaggcttcactacaggcggccaggggcacacagttgttcccgcgccccagtttttcctcgcacgggggaacaacgcgggacccaaatgaggcgcggataatccaaagcccggtaccgtag

SEQ ID NO: 450330 - DNA, 2287 bp, Homo sapiens
tagcgggagaagccggtccgcgatcttgtggccgcccctcccctccccctgcctctcggactcgggctgcggcgtcagccttcttcgggcctcggcagcggtagcggctcgctcgcctcagccccagcgcccctcggctaccctcggcccaggcccgcagcgccgcccgccctcggccgccccgacgccggcctgggccgcggccgcagccccgggctcgcgtaggcgccgaccgctcccggcccgccccctatgggccccggctagaggcgccgccgccgccggcccgcggagccccgatgctggcccggaggaagccggtgctgccggcgctcaccatcaaccctaccatcgccgagggcccatcccctaccagcgagggcgcctccgaggcaaacctggtggacctgcagaagaagctggaggagctggaacttgacgagcagcagaagaagcggctggaagcctttctcacccagaaagccaaggtcggcgaactcaaagacgatgacttcgaaaggatctcagagctgggcgcgggcaacggcggggtggtcaccaaagtccagcacagaccctcgggcctcatcatggccaggaagctgatccaccttgagatcaagccggccatccggaaccagatcatccgcgagctgcaggtcctgcacgaatgcaactcgccgtacatcgtgggcttctacggggccttctacagtgacggggagatcagcatttgcatggaacacatggacggcggctccctggaccaggtgctgaaagaggccaagaggattcccgaggagatcctggggaaagtcagcatcgcggttctccggggcttggcgtacctccgagagaagcaccagatcatgcaccgagatgtgaagccctccaacatcctcgtgaactctagaggggagatcaagctgtgtgacttcggggtgagcggccagctcatcgactccatggccaactccttcgtgggcacgcgctcctacatggctccggagcggttgcagggcacacattactcggtgcagtcggacatctggagcatgggcctgtccctggtggagctggccgtcggaaggtaccccatccccccgcccgacgccaaagagctggaggccatctttggccggcccgtggtcgacggggaagaaggagagcctcacagcatctcgcctcggccgaggccccccgggcgccccgtcagcggtcacgggatggatagccggcctgccatggccatctttgaactcctggactatattgtgaacgagccacctcctaagctgcccaacggtgtgttcacccccgacttccaggagtttgtcaataaatgcctcatcaagaacccagcggagcgggcggacctgaagatgctcacaaaccacaccttcatcaagcggtccgaggtggaagaagtggattttgccggctggttgtgtaaaaccctgcggctgaaccagcccggcacacccacgcgcaccgccgtgtgacagtggccgggctccctgcgtcccgctggtgacctgcccaccgtccctgtccatgccccgcccttccagctgaggacaggctggcgcctccacccaccctcctgcctcacccctgcggagagcaccgtggcggggcgacagcgcatgcaggaacgggggtctcctctcctgcccgtcctggccggggtgcctctggggacgggcgacgctgctgtgtgtggtctcagaggctctgcttccttaggttacaaaacaaaacagggagagaaaaagcaaaagccaaaaaaaaaaagaaaaaaaaaataataataaacaacaaaaataaaaacacaataacaaaaaataaacaacacatttgttgcgcgcgcgcgcgccccgtcgggccccccagaaaaagactgtcttttaacacacccccgtgtgggtgtgggggggcgcgcgcgcgcgggcccccatggtgtgttatgtcacacaccgtgtggcgcatcacgtgtttcccctagagagggacacacctcgggggtcatacacaacaactaagagcggcgtgggggaatttttcgccaccatatataaaaaaaaaagcgcgggcgggggggaaaacaaaacgcgagagattgttgtttcgagacaaacaagcttgcaagagggtaggaggcgttttgcggaggagaataaatacagagggtggtgtctttctacaaaggggagagtatcacaacgaccgagagagcgtcggtatttatatcagatattttgagcgacgcaggtgtggggggtggtaa

SEQ ID NO: 450331 - DNA, 1786 bp, Homo sapiens
tagcgggagaagccggtccgcgatcttgtggccgcccctcccctccccctgcctctcggactcgggctgcggcgtcagccttcttcgggcctcggcagcggtagcggctcgctcgcctcagccccagcgcccctcggctaccctcggcccaggcccgcagcgccgcccgccctcggccgccccgacgccggcctgggccgcggccgcagccccgggctcgcgtaggcgccgaccgctcccggcccgccccctatgggccccggctagaggcgccgccgccgccggcccgcggagccccgatgctggcccggaggaagccggtgctgccggcgctcaccatcaaccctaccatcgccgagggcccatcccctaccagcgagggcgcctccgaggcaaacctggtggacctgcagaagaagctggaggagctggaacttgacgagcagcagaagaagcggctggaagcctttctcacccagaaagccaaggtcggcgaactcaaagacgatgacttcgaaaggatctcagagctgggcgcgggcaacggcggggtggtcaccaaagtccagcacagaccctcgggcctcatcatggccaggaagctgatccaccttgagatcaagccggccatccggaaccagatcatccgcgagctgcaggtcctgcacgaatgcaactcgccgtacatcgtgggcttctacggggccttctacagtgacggggagatcagcatttgcatggaacacatggacggcggctccctggaccaggtgctgaaagaggccaagaggattcccgaggagatcctggggaaagtcagcatcgcggttctccggggcttggcgtacctccgagagaagcaccagatcatgcaccgagatgtgaagccctccaacatcctcgtgaactctagaggggagatcaagctgtgtgacttcggggtgagcggccagctcatcgactccatggccaactccttcgtgggcacgcgctcctacatggctccggagcggttgcagggcacacattactcggtgcagtcggacatctggagcatgggcctgtccctggtggagctggccgtcggaaggtaccccatccccccgcccgacgccaaagagctggaggccatctttggccggcccgtggtcgacggggaagaaggagagcctcacagcatggccggggtgcctctggggacgggcgacgctgctgtgtgtggtctcagaggctctgcttccttaggttacaaaacaaaacagggagagaaaaagcaaaagccaaaaaaaaaaagaaaaaaaaaataataataaacaacaaaaataaaaacacaataacaaaaaataaacaacacatttgttgcgcgcgcgcgcgccccgtcgggccccccagaaaaagactgtcttttaacacacccccgtgtgggtgtgggggggcgcgcgcgcgcgggcccccatggtgtgttatgtcacacaccgtgtggcgcatcacgtgtttcccctagagagggacacacctcgggggtcatacacaacaactaagagcggcgtgggggaatttttcgccaccatatataaaaaaaaaagcgcgggcgggggggaaaacaaaacgcgagagattgttgtttcgagacaaacaagcttgcaagagggtaggaggcgttttgcggaggagaataaatacagagggtggtgtctttctacaaaggggagagtatcacaacgaccgagagagcgtcggtatttatatcagatattttgagcgacgcaggtgtggggggtggtaa

SEQ ID NO: 450332 - DNA, 1886 bp, Homo sapiens
tagcgggagaagccggtccgcgatcttgtggccgcccctcccctccccctgcctctcggactcgggctgcggcgtcagccttcttcgggcctcggcagcggtagcggctcgctcgcctcagccccagcgcccctcggctaccctcggcccaggcccgcagcgccgcccgccctcggccgccccgacgccggcctgggccgcggccgcagccccgggctcgcgtaggcgccgaccgctcccggcccgccccctatgggccccggctagaggcgccgccgccgccggcccgcggagccccgatgctggcccggaggaagccggtgctgccggcgctcaccatcaaccctaccatcgccgagggcccatcccctaccagcgagggcgcctccgaggcaaacctggtggacctgcagaagaagctggaggagctggaacttgacgagcagcagaagaagcggctggaagcctttctcacccagaaagccaaggtcggcgaactcaaagacgatgacttcgaaaggatctcagagctgggcgcgggcaacggcggggtggtcaccaaagtccagcacagaccctcgggcctcatcatggccaggaagctgatccaccttgagatcaagccggccatccggaaccagatcatccgcgagctgcaggtcctgcacgaatgcaactcgccgtacatcgtgggcttctacggggccttctacagtgacggggagatcagcatttgcatggaacacatggacggcggctccctggaccaggtgctgaaagaggccaagaggattcccgaggagatcctggggaaagtcagcatcgcggttctccggggcttggcgtacctccgagagaagcaccagatcatgcaccgagatgtgaagccctccaacatcctcgtgaactctagaggggagatcaagctgtgtgacttcggggtgagcggccagctcatcgactccatggccaactccttcgtgggcacgcgctcctacatggctccggagcggttgcagggcacacattactcggtgcagtcggacatctggagcatgggcctgtccctggtggagctggccgtcggaaggtaccccatccccccgcccgacgccaaagagctggaggccatctttggccggcccgtggtcgacggggaagaaggagagcctcacagcatgctggcgcctccacccaccctcctgcctcacccctgcggagagcaccgtggcggggcgacagcgcatgcaggaacgggggtctcctctcctgcccgtcctggccggggtgcctctggggacgggcgacgctgctgtgtgtggtctcagaggctctgcttccttaggttacaaaacaaaacagggagagaaaaagcaaaagccaaaaaaaaaaagaaaaaaaaaataataataaacaacaaaaataaaaacacaataacaaaaaataaacaacacatttgttgcgcgcgcgcgcgccccgtcgggccccccagaaaaagactgtcttttaacacacccccgtgtgggtgtgggggggcgcgcgcgcgcgggcccccatggtgtgttatgtcacacaccgtgtggcgcatcacgtgtttcccctagagagggacacacctcgggggtcatacacaacaactaagagcggcgtgggggaatttttcgccaccatatataaaaaaaaaagcgcgggcgggggggaaaacaaaacgcgagagattgttgtttcgagacaaacaagcttgcaagagggtaggaggcgttttgcggaggagaataaatacagagggtggtgtctttctacaaaggggagagtatcacaacgaccgagagagcgtcggtatttatatcagatattttgagcgacgcaggtgtggggggtggtaa

SEQ ID NO: 450333 - DNA, 1577 bp, Homo sapiens
tagcgggagaagccggtccgcgatcttgtggccgcccctcccctccccctgcctctcggactcgggctgcggcgtcagccttcttcgggcctcggcagcggtagcggctcgctcgcctcaggcccatcccctaccagcgagggcgcctccgaggcaaacctggtggacctgcagaagaagctggaggagctggaacttgacgagcagcagaagaagcggctggaagcctttctcacccagaaagccaaggtcggcgaactcaaagacgatgacttcgaaaggatctcagagctgggcgcgggcaacggcggggtggtcaccaaagtccagcacagaccctcgggcctcatcatggccaggaagctgatccaccttgagatcaagccggccatccggaaccagatcatccgcgagctgcaggtcctgcacgaatgcaactcgccgtacatcgtgggcttctacggggccttctacagtgacggggagatcagcatttgcatggaacacatggacggcggctccctggaccaggtgctgaaagaggccaagaggattcccgaggagatcctggggaaagtcagcatcgcggttctccggggcttggcgtacctccgagagaagcaccagatcatgcaccgagatgtgaagccctccaacatcctcgtgaactctagaggggagatcaagctgtgtgacttcggggtgagcggccagctcatcgactccatggccaactccttcgtgggcacgcgctcctacatggctccggagcggttgcagggcacacattactcggtgcagtcggacatctggagcatgggcctgtccctggtggagctggccgtcggaaggtaccccatccccccgcccgacgccaaagagctggaggccatctttggccggcccgtggtcgacggggaagaaggagagcctcacagcatctcgcctcggccgaggccccccgggcgccccgtcagcggtcacgggatggatagccggcctgccatggccatctttgaactcctggactatattgtgaacgagccacctcctaagctgcccaacggtgtgttcacccccgacttccaggagtttgtcaataaatgcctcatcaagaacccagcggagcgggcggacctgaagatgctcacaaaccacaccttcatcaagcggtccgaggtggaagaagtggattttgccggctggttgtgtaaaaccctgcggctgaaccagcccggcacacccacgcgcaccgccgtgtgacagtggccgggctccctgcgtcccgctggtgacctgcccaccgtccctgtccatgccccgcccttccagctgaggacaggctggcgcctccacccaccctcctgcctcacccctgcggagagcaccgtggcggggcgacagcgcatgcaggaacgggggtctcctctcctgcccgtcctggccggggtgcctctggggacgggcgacgctgctgtgtgtggtctcagaggctctgcttccttaggttacaaaacaaaacagggagagaaaaagcaaaaaaaaaacaaacaggcgcgcgcccctctaaagcaccc

SEQ ID NO: 450334 - DNA, 1500 bp, Homo sapiens
tagcgggagaagccggtccgcgatcttgtggccgcccctcccctccccctgcctctcggactcgggctgcggcgtcagccttcttcgggcctcggcagcggtagcggctcgctcgcctcagccccagcgcccctcggctaccctcggcccaggcccgcagcgccgcccgccctcggccgccccgacgccggcctgggccgcggccgcagccccgggctcgcgtaggcgccgaccgctcccggcccgccccctatgggccccggctagaggcgccgccgccgccggcccgcggagccccgatgctggcccggaggaagccggtgctgccggcgctcaccatcaaccctaccatcgccgagggcccatcccctaccagcgagggcgcctccgaggcaaacctggtggacctgcagaagaagctggaggagctggaacttgacgagcagcagaagaagcggctggaagcctttctcacccagaaagccaaggtcggcgaactcaaagacgatgagttctccggggcttggcgtacctccgagagaagcaccagatcatgcaccgagatgtgaagccctccaacatcctcgtgaactctagaggggagatcaagctgtgtgacttcggggtgagcggccagctcatcgactccatggccaactccttcgtgggcacgcgctcctacatggctccggagcggttgcagggcacacattactcggtgcagtcggacatctggagcatgggcctgtccctggtggagctggccgtcggaaggtaccccatccccccgcccgacgccaaagagctggaggccatctttggccggcccgtggtcgacggggaagaaggagagcctcacagcatctcgcctcggccgaggccccccgggcgccccgtcagcggtcacgggatggatagccggcctgccatggccatctttgaactcctggactatattgtgaacgagccacctcctaagctgcccaacggtgtgttcacccccgacttccaggagtttgtcaataaatgcctcatcaagaacccagcggagcgggcggacctgaagatgctcacaaaccacaccttcatcaagcggtccgaggtggaagaagtggattttgccggctggttgtgtaaaaccctgcggctgaaccagcccggcacacccacgcgcaccgccgtgtgacagtggccgggctccctgcgtcccgctggtgacctgcccaccgtccctgtccatgccccgcccttccagctgaggacaggctggcgcctccacccaccctcctgcctcacccctgcggagagcaccgtggcggggcgacagcgcatgcaggaacgggggtctcctctcctgcccgtcctggccggggtgcctctggggacgggcgacgctgctgtgtgtggtctcagaggctctgcttccttaggttacaaaacaaaacagggagagaaaaagcaaaaaaaaaacaaacaggcgcgcgcccctctaaagcaccc

SEQ ID NO: 450335 - DNA, 1332 bp, Homo sapiens
gggtttcaccatgtcagccaggatggtctcaatctgaccttgtgatccgcccgcctcaacctcccaaagtgctgggattacaggcatgggccactgcacccggcccttagttaatttctggaccaaggaattggaatctggggtctttcaggaaacgactggggattcagcaacctgccaaattgagccttggagcagcctctgagatgttagctgtggaggaggaggcccctgcttcctggggcccatcatccattcccaaaagtgctgagcattgcaggctcttcaagagctgcggtcaacaccagctccaggcctcgggctggaagcctcttcagcaagtgccgcagggaggccctgggtgggtgagccgggaggtagaattgcgtaacagctctctatccattgctgcggtcattagccatggagagggtgacgggggctgtaacggggcaagcctcccgggttccagctgccatcctcgcccctctgggctctttcctccctggctctgctgcagccggagcggttgcagggcacacattactcggtgcagtcggacatctggagcatgggcctgtccctggtggagctggccgtcggaaggtaccccatccccccgcccgacgccaaagagctggaggccatctttggccggcccgtggtcgacggggaagaaggagagcctcacagcatctcgcctcggccgaggccccccgggcgccccgtcagcggtcacgggatggatagccggcctgccatggccatctttgaactcctggactatattgtgaacgagccacctcctaagctgcccaacggtgtgttcacccccgacttccaggagtttgtcaataaatgcctcatcaagaacccagcggagcgggcggacctgaagatgctcacaaaccacaccttcatcaagcggtccgaggtggaagaagtggattttgccggctggttgtgtaaaaccctgcggctgaaccagcccggcacacccacgcgcaccgccgtgtgacagtggccgggctccctgcgtcccgctggtgacctgcccaccgtccctgtccatgccccgcccttccagctgaggacaggctggcgcctccacccaccctcctgcctcacccctgcggagagcaccgtggcggggcgacagcgcatgcaggaacgggggtctcctctcctgcccgtcctggccggggtgcctctggggacgggcgacgctgctgtgtgtggtctcagaggctctgcttccttaggttacaaaacaaaacagggagagaaaaagcaaaaaaaaaacaaacaggcgcgcgcccctctaaagcaccc

SEQ ID NO: 450336 - DNA, 777 bp, Homo sapiens
cagcccccgcaagacgggcaccccccaagacgccagttcgtccctttccaagtttacagtggcagcgcccgacgccaaagagctggaggccatctttggccggcccgtggtcgacggggaagaaggagagcctcacagcatctcgcctcggccgaggccccccgggcgccccgtcagcggtcacgggatggatagccggcctgccatggccatctttgaactcctggactatattgtgaacgagccacctcctaagctgcccaacggtgtgttcacccccgacttccaggagtttgtcaataaatgcctcatcaagaacccagcggagcgggcggacctgaagatgctcacaaaccacaccttcatcaagcggtccgaggtggaagaagtggattttgccggctggttgtgtaaaaccctgcggctgaaccagcccggcacacccacgcgcaccgccgtgtgacagtggccgggctccctgcgtcccgctggtgacctgcccaccgtccctgtccatgccccgcccttccagctgaggacaggctggcgcctccacccaccctcctgcctcacccctgcggagagcaccgtggcggggcgacagcgcatgcaggaacgggggtctcctctcctgcccgtcctggccggggtgcctctggggacgggcgacgctgctgtgtgtggtctcagaggctctgcttccttaggttacaaaacaaaacagggagagaaaaagcaaaaaaaaaacaaacaggcgcgcgcccctctaaagcaccc

SEQ ID NO: 450337 - DNA, 512 bp, Homo sapiens
ctcctccaccgcctcccggtcctgcctcttggaacccccagcctcatcaagaacccagcggagcgggcggacctgaagatgctcacaaaccacaccttcatcaagcggtccgaggtggaagaagtggattttgccggctggttgtgtaaaaccctgcggctgaaccagcccggcacacccacgcgcaccgccgtgtgacagtggccgggctccctgcgtcccgctggtgacctgcccaccgtccctgtccatgccccgcccttccagctgaggacaggctggcgcctccacccaccctcctgcctcacccctgcggagagcaccgtggcggggcgacagcgcatgcaggaacgggggtctcctctcctgcccgtcctggccggggtgcctctggggacgggcgacgctgctgtgtgtggtctcagaggctctgcttccttaggttacaaaacaaaacagggagagaaaaagcaaaaaaaaaacaaacaggcgcgcgcccctctaaagcaccc

SEQ ID NO: 450338 - DNA, 1398 bp, Homo sapiens
tagcgggagaagccggtccgcgatcttgtggccgcccctcccctccccctgcctctcggactcgggctgcggcgtcagccttcttcgggcctcggcagcggtagcggctcgctcgcctcagccccagcgcccctcggctaccctcggcccaggcccgcagcgccgcccgccctcggccgccccgacgccggcctgggccgcggccgcagccccgggctcgcgtaggcgccgaccgctcccggcccgccccctatgggccccggctagaggcgccgccgccgccggcccgcggagccccgatgctggcccggaggaagccggtgctgccggcgctcaccatcaaccctaccatcgccgagggcccatcccctaccagcgagggcgcctccgaggcaaacctggtggacctgcagaagaagctggaggagctggaacttgacgagcagcagaagaagcggctggaagcctttctcacccagaaagccaaggtcggcgaactcaaagacgatgagttctccggggcttggcgtacctccgagagaagcaccagatcatgcaccgagatgtgaagccctccaacatcctcgtgaactctagaggggagatcaagctgtgtgacttcggggtgagcggccagctcatcgactccatggccaactccttcgtgggcacgcgctcctacatggctccggagcggttgcagggcacacattactcggtgcagtcggacatctggagcatgggcctgtccctggtggagctggccgtcggaaggtaccccatccccccgcccgacgccaaagagctggaggccatctttggccggcccgtggtcgacggggaagaaggagagcctcacagcatctcgcctcggccgaggccccccgggcgccccgtcagcggtcacgggatggatagccggcctgccatggccatctttgaactcctggactatattgtgaacgagccacctcctaagctgcccaacggtgtgttcacccccgacttccaggagtttgtcaataaatgcctcatcaagaacccagcggagcgggcggacctgaagatgctcacaaaccacaccttcatcaagcggtccgaggtggaagaagtggattttgccggctggttgtgtaaaaccctgcggctgaaccagcccggcacacccacgcgcaccgccgtgtgacagtggccgggctccctgcgtcccgctggtgacctgcccaccgtccctgtccatgccccgcccttccagctgaggacaggctggcgcctccacccaccctcctgcctcacccctgcggagagcaccgtggcggggcgacagcgcatgcaggaacgggggtctcctctcctgcccgtcctatcaaacggaacttcgggaccgtaccagcctgc

SEQ ID NO: 450339 - DNA, 889 bp, Homo sapiens
cggcaagcctcaccgagccaaatgtgtgacttctcaaaaaatgttcttgttccttttgccttttttttaattcactagaggctcaggcaaggagtagctgtcccagggaatggaacccagagtcaggcaggggagctttgtccagtgcctctgcacacccgcctccaatttaggctggcatgtggaggagggcgcctggtggtgatcagccccctgggagcccaacccccagcagaagtgaggtggccatcggcccatctcacctccatctctctccctgtgcggccggggtgcctctggggacgggcgacgctgctgtgtgtggtctcagaggctctgcttccttaggttacaaaacaaaacagggagagaaaaagcaaaagccaaaaaaaaaaagaaaaaaaaaataataataaacaacaaaaataaaaacacaataacaaaaaataaacaacacatttgttgcgcgcgcgcgcgccccgtcgggccccccagaaaaagactgtcttttaacacacccccgtgtgggtgtgggggggcgcgcgcgcgcgggcccccatggtgtgttatgtcacacaccgtgtggcgcatcacgtgtttcccctagagagggacacacctcgggggtcatacacaacaactaagagcggcgtgggggaatttttcgccaccatatataaaaaaaaaagcgcgggcgggggggaaaacaaaacgcgagagattgttgtttcgagacaaacaagcttgcaagagggtaggaggcgttttgcggaggagaataaatacagagggtggtgtctttctacaaaggggagagtatcacaacgaccgagagagcgtcggtatttatatcagatattttgagcgacgcaggtgtggggggtggtaa

SEQ ID NO: 450340 - DNA, 194 bp, Homo sapiens
gaggagatcctggggaaagtcagcatcgcggtgagtccaccgcagacccacatcgcgcccccaccgcactctgcacggacctcttccacacggccagggttccgggagccactcacagtgtggtgggggttagggtggcccctgcagaaagagagtggccaaggctgtgcccacctgctgtggagcttgaacaa

SEQ ID NO: 450341 - DNA, 1821 bp, Homo sapiens
tagcgggagaagccggtccgcgatcttgtggccgcccctcccctccccctgcctctcggactcgggctgcggcgtcagccttcttcgggcctcggcagcggtagcggctcgctcgcctcagccccagcgcccctcggctaccctcggcccaggcccgcagcgccgcccgccctcggccgccccgacgccggcctgggccgcggccgcagccccgggctcgcgtaggcgccgaccgctcccggcccgccccctatgggccccggctagaggcgccgccgccgccggcccgcggagccccgatgctggcccggaggaagccggtgctgccggcgctcaccatcaaccctaccatcgccgagggcccatcccctaccagcgagggcgcctccgaggcaaacctggtggacctgcagaagaagctggaggagctggaacttgacgagcagcagaagaagcggctggaagcctttctcacccagaaagccaaggtcggcgaactcaaagacgatgacttcgaaaggatctcagagctgggcgcgggcaacggcggggtggtcaccaaagtccagcacagaccctcgggcctcatcatggccaggaagctgatccaccttgagatcaagccggccatccggaaccagatcatccgcgagctgcaggtcctgcacgaatgcaactcgccgtacatcgtgggcttctacggggccttctacagtgacggggagatcagcatttgcatggaacacatggacggcggctccctggaccaggtgctgaaagaggccaagaggattcccgaggagatcctggggaaagtcagcatcgcggttctccggggcttggcgtacctccgagagaagcaccagatcatgcaccgagatgtgaagccctccaacatcctcgtgaactctagaggggagatcaagctgtgtgacttcggggtgagcggccagctcatcgactccatggccaactccttcgtgggcacgcgctcctacatggctccggagcggttgcagggcacacattactcggtgcagtcggacatctggagcatgggcctgtccctggtggagctggccgtcggaaggtaccccatccccccgcccgacgccaaagagctggaggccatctttggccggcccgtggtcgacggggaagaaggagagcctcacagcatctcgcctcggccgaggccccccgggcgccccgtcagcggtcacgggatggatagccggcctgccatggccatctttgaactcctggactatattgtgaacgagccacctcctaagctgcccaacggtgtgttcacccccgacttccaggagtttgtcaataaatgcctcatcaagaacccagcggagcgggcggacctgaagatgctcacaaaccacaccttcatcaagcggtccgaggtggaagaagtggattttgccggctggttgtgtaaaaccctgcggctgaaccagcccggcacacccacgcgcaccgccgtgtgacagtggccgggctccctgcgtcccgctggtgacctgcccaccgtccctgtccatgccccgcccttccagctgaggacaggctggcgcctccacccaccctcctgcctcacccctgcggagagcaccgtggcggggcgacagcgcatgcaggaacgggggtctcctctcctgcccgtcctggccggggtgcctctggggacgggcgacgctgctgtgtgtggtctcagaggctctgcttccttaggttacaaaacaaaacagggagagaaaaagcaaaggccaaaaataaaacgagcgcgtggtcgacatatgcccttac

SEQ ID NO: 450342 - DNA, 1575 bp, Homo sapiens
tagcgggagaagccggtccgcgatcttgtggccgcccctcccctccccctgcctctcggactcgggctgcggcgtcagccttcttcgggcctcggcagcggtagcggctcgctcgcctcagccccagcgcccctcggctaccctcggcccaggcccgcagcgccgcccgccctcggccgccccgacgccggcctgggccgcggccgcagccccgggctcgcgtaggcgccgaccgctcccggcccgccccctatgggccccggctagaggcgccgccgccgccggcccgcggagccccgatgctggcccggaggaagccggtgctgccggcgctcaccatcaaccctaccatcgccgagggcccatcccctaccagcgagggcgcctccgaggcaaacctggtggacctgcagaagaagctggaggagctggaacttgacgagcagcagaagaagcggctggaagcctttctcacccagaaagccaaggtcggcgaactcaaagacgatgacttcgaaaggatctcagagctgggcgcgggcaacggcggggtggtcaccaaagtccagcacagaccctcgggcctcatcatggccaggaagctgatccaccttgagatcaagccggccatccggaaccagatcatccgcgagctgcaggtcctgcacgaatgcaactcgccgtacatcgtgggcttctacggggccttctacagtgacggggagatcagcatttgcatggaacacatggacggcggctccctggaccaggtgctgaaagaggccaagaggattcccgaggagatcctggggaaagtcagcatcgcggttctccggggcttggcgtacctccgagagaagcaccagatcatgcaccgagatgtgaagccctccaacatcctcgtgaactctagaggggagatcaagctgtgtgacttcggggtgagcggccagctcatcgactccatggccaactccttcgtgggcacgcgctcctacatggctccggagcggttgcagggcacacattactcggtgcagtcggacatctggagcatgggcctgtccctggtggagctggccgtcggaaggtaccccatccccccgcccgacgccaaagagctggaggccatctttggccggcccgtggtcgacggggaagaaggagagcctcacagcatctcgcctcggccgaggccccccgggcgccccgtcagcggtcacgggatggatagccggcctgccatggccatctttgaactcctggactatattgtgaacgagccaactcctaagctgccaacggcgtgtacacccccggacttccaggagtactggccataaatgcctcatccagaacccaggaaaagaggcggaccccgaagaaggctccagcaaccacacacttatacaagccggcccagagggaaaaaaagagataaagccggcggagacagtagataaacacagagagagaacaacacaggaacacaaacacccgcgagagacagtgccaggcaacaaaggaccaaaggagaaagaaacagacagagtaatacacgcactaaccagaaag

SEQ ID NO: 450343 - DNA, 1602 bp, Homo sapiens
tagcgggagaagccggtccgcgatcttgtggccgcccctcccctccccctgcctctcggactcgggctgcggcgtcagccttcttcgggcctcggcagcggtagcggctcgctcgcctcagccccagcgcccctcggctaccctcggcccaggcccgcagcgccgcccgccctcggccgccccgacgccggcctgggccgcggccgcagccccgggctcgcgtaggcgccgaccgctcccggcccgccccctatgggccccggctagaggcgccgccgccgccggcccgcggagccccgatgctggcccggaggaagccggtgctgccggcgctcaccatcaaccctaccatcgccgagggcccatcccctaccagcgagggcgcctccgaggcaaacctggtggacctgcagaagaagctggaggagctggaacttgacgagcagcagaagaagcggctggaagcctttctcacccagaaagccaaggtcggcgaactcaaagacgatgacttcgaaaggatctcagagctgggcgcgggcaacggcggggtggtcaccaaagtccagcacagaccctcgggcctcatcatggccaggaagctgatccaccttgagatcaagccggccatccggaaccagatcatccgcgagctgcaggtcctgcacgaatgcaactcgccgtacatcgtgggcttctacggggccttctacagtgacggggagatcagcatttgcatggaacacatggacggcggctccctggaccaggtgctgaaagaggccaagaggattcccgaggagatcctggggaaagtcagcatcgcggttctccggggcttggcgtacctccgagagaagcaccagatcatgcaccgagatgtgaagccctccaacatcctcgtgaactctagaggggagatcaagctgtgtgacttcggggtgagcggccagctcatcgactccatggccaactccttcgtgggcacgcgctcctacatggctgtcacgggatggatagccggcctgccatggccatctttgaactcctggactatattgtgaacgagccacctcctaagctgcccaacggtgtgttcacccccgacttccaggagtttgtcaataaatgcctcatcaagaacccagcggagcgggcggacctgaagatgctcacaaaccacaccttcatcaagcggtccgaggtggaagaagtggattttgccggctggttgtgtaaaaccctgcggctgaaccagcccggcacacccacgcgcaccgccgtgtgacagtggccgggctccctgcgtcccgctggtgacctgcccaccgtccctgtccatgccccgcccttccagctgaggacaggctggcgcctccacccaccctcctgcctcacccctgcggagagcaccgtggcggggcgacagcgcatgcaggaacgggggtctcctctcctgcccgtcctggccggggtgcctctggggacgggcgacgctgctgtgtgtggtctcagaggctctgcttccttaggttacaaaacaaaacagggagagaaaaagcaaaaaaaaaacaaacaggcgcgcgcccctctaaagcaccc

SEQ ID NO: 450344 - DNA, 1320 bp, Homo sapiens
tagcgggagaagccggtccgcgatcttgtggccgcccctcccctccccctgcctctcggactcgggctgcggcgtcagccttcttcgggcctcggcagcggtagcggctcgctcgcctcagccccagcgcccctcggctaccctcggcccaggcccgcagcgccgcccgccctcggccgccccgacgccggcctgggccgcggccgcagccccgggctcgcgtaggcgccgaccgctcccggcccgccccctatgggccccggctagaggcgccgccgccgccggcccgcggagccccgatgctggcccggaggaagccggtgctgccggcgctcaccatcaaccctaccatcgccgagggcccatcccctaccagcgagggcgcctccgaggcaaacctggtggacctgcagaagaagctggaggagctggaacttgacgagcagcagaagaagcggctggaagcctttctcacccagaaagccaaggtcggcgaactcaaagacgatgacttcgaaaggatctcagagctgggcgcgggcaacggcggggtggtcaccaaagtccagcacagaccctcgggcctcatcatggccaggaagctgatccaccttgagatcaagccggccatccggaaccagatcatccgcgagctgcaggtcctgcacgaatgcaactcgccgtacatcgtgggcttctacggggccttctacagtgacggggagatcagcatttgcatggaacacatggacggcggctccctggaccaggtgctgaaagaggccaagaggattcccgaggagatcctggggaaagtcagcatcgcggttctccggggcttggcgtacctccgagagaagcaccagatcatgcaccgagatgtgaagccctccaacatcctcgtgaactctagaggggagatcaagctgtgtgacttcggggtgagcggccagctcatcgactccatggccaactccttcgtgggcacgcgctcctacatggctccggagcggttgcagggcacacattactcggtgcagtcggacatctggagcatgggcctgtccctggtggagctggccgtcggaaggtaccccatcccccgtcccaaagcacagctgtgctttggcctgctgtctgcggaaagtgccctaggatacggtggcaggactggctggggttctggctccaggcccagccacagcgcctgtcagacttaccctccttgtgcctccgttcaccctgtccacacgcagggcctgcaggagcatcctgagagtgtagggtgcctgcccgccgtcccaaagcaaggggatcctc

SEQ ID NO: 450345 - DNA, 1271 bp, Homo sapiens
ttttaaagttttcatactttatttcacagcgattgacacagaaacatactaaagttagtaacacggcacccatccccaccgccgcccagttcatggtgtcctgcttctacgaggactgtactgtggctgggggtggggatgggatgggggtggcgcctccaaggcaaacctggtggacctgcagaagaagctggaggagctggaacttgacgagcagcagaagaagcggctggaagcctttctcacccagaaagccaaggtcggcgaactcaaagacgatgagttctccggggcttggcgtacctccgagagaagcaccagatcatgcaccgagatgtgaagccctccaacatcctcgtgaactctagaggggagatcaagctgtgtgacttcggggtgagcggccagctcatcgactccatggccaactccttcgtgggcacgcgctcctacatggctccggagcggttgcagggcacacattactcggtgcagtcggacatctggagcatgggcctgtccctggtggagctggccgtcggaaggtaccccatccccccgcccgacgccaaagagctggaggccatctttggccggcccgtggtcgacggggaagaaggagagcctcacagcatctcgcctcggccgaggccccccgggcgccccgtcagcggtcacgggatggatagccggcctgccatggccatctttgaactcctggactatattgtgaacgagccacctcctaagctgcccaacggtgtgttcacccccgacttccaggagtttgtcaataaatgcctcatcaagaacccagcggagcgggcggacctgaagatgctcacaaaccacaccttcatcaagcggtccgaggtggaagaagtggattttgccggctggttgtgtaaaaccctgcggctgaaccagcccggcacacccacgcgcaccgccgtgtgacagtggccgggctccctgcgtcccgctggtgacctgcccaccgtccctgtccatgccccgcccttccagctgaggacaggctggcgcctccacccaccctcctgcctcacccctgcggagagcaccgtggcggggcgacagcgcatgcaggaacgggggtctcctctcctgcccgtcctggccggggtgcctctggggacgggcgacgctgctgtgtgtggtctcagaggctctgcttccttaggttacaaaacaaaacagggagagaaaaagcaaaaaaaaaacaaacaggcgcgcgcccctctaaagcaccc

SEQ ID NO: 450346 - DNA, 1038 bp, Homo sapiens
tagcgggagaagccggtccgcgatcttgtggccgcccctcccctccccctgcctctcggactcgggctgcggcgtcagccttcttcgggcctcggcagcggtagcggctcgctcgcctcagccccagcgcccctcggctaccctcggcccaggcccgcagcgccgcccgccctcggccgccccgacgccggcctgggccgcggccgcagccccgggctcgcgtaggcgccgaccgctcccggcccgccccctatgggccccggctagaggcgccgccgccgccggcccgcggagccccgatgctggcccggaggaagccggtgctgccggcgctcaccatcaaccctaccatcgccgagggcccatcccctaccagcgagggcgcctccgaggcaaacctggtggacctgcagaagaagctggaggagctggaacttgacgagcagcagaagaagcggctggaagcctttctcacccagaaagccaaggtcggcgaactcaaagacgatgacttcgaaaggatctcagagctgggcgcgggcaacggcggggtggtcaccaaagtccagcacagaccctcgggcctcatcatggccaggaagctgatccaccttgagatcaagccggccatccggaaccagatcatccgcgagctgcaggtcctgcacgaatgcaactcgccgtacatcgtgggcttctacggggccttctacagtgacggggagatcagcatttgcatggaacacatggtgagtgcgtccggggcaggggcaggggcagggcctccacggaacagagcatgttggggagaaggaagaccccctcacggcccctttcctcagaggcaacagtgcgctggcttccaggggatccttctcaaggcagtcgatgccatacaagtatgtatatgtagatgcctttggttttgttttgttttctttttgtttttttgagaggcagtctcactctgtcactcaggctagaatctagtagtggcacaatctcggctcactgcaacctccacctcccagattcaag

SEQ ID NO: 450347 - DNA, 1190 bp, Homo sapiens
tagcgggagaagccggtccgcgatcttgtggccgcccctcccctccccctgcctctcggactcgggctgcggcgtcagccttcttcgggcctcggcagcggtagcggctcgctcgcctcagccccagcgcccctcggctaccctcggcccaggcccgcagcgccgcccgccctcggccgccccgacgccggcctgggccgcggccgcagccccgggctcgcgtaggcgccgaccgctcccggcccgccccctatgggccccggctagaggcgccgccgccgccggcccgcggagccccgatgctggcccggaggaagccggtgctgccggcgctcaccatcaaccctaccatcgccgagggcccatcccctaccagcgagggcgcctccgaggcaaacctggtggacctgcagaagaagctggaggagctggaacttgacgagcagcagaagaagcggctggaagcctttctcacccagaaagccaaggtcggcgaactcaaagacgatgacttcgaaaggatctcagagctgggcgcgggcaacggcggggtggtcaccaaagtccagcacagaccctcgggcggccggggtgcctctggggacgggcgacgctgctgtgtgtggtctcagaggctctgcttccttaggttacaaaacaaaacagggagagaaaaagcaaaagccaaaaaaaaaaagaaaaaaaaaataataataaacaacaaaaataaaaacacaataacaaaaaataaacaacacatttgttgcgcgcgcgcgcgccccgtcgggccccccagaaaaagactgtcttttaacacacccccgtgtgggtgtgggggggcgcgcgcgcgcgggcccccatggtgtgttatgtcacacaccgtgtggcgcatcacgtgtttcccctagagagggacacacctcgggggtcatacacaacaactaagagcggcgtgggggaatttttcgccaccatatataaaaaaaaaagcgcgggcgggggggaaaacaaaacgcgagagattgttgtttcgagacaaacaagcttgcaagagggtaggaggcgttttgcggaggagaataaatacagagggtggtgtctttctacaaaggggagagtatcacaacgaccgagagagcgtcggtatttatatcagatattttgagcgacgcaggtgtggggggtggtaa

SEQ ID NO: 450348 - DNA, 3299 bp, Homo sapiens
gggggcccgggtggtaaatcaaggcaggggggagcggtcagcgggaaccaggtggccacccggtgtcggtttcattttcctttggaatttctgctttacagacagaacaatggcagcccgagtacttataattggcagtggaggaagggaacatacgctggcctggaaacttgcacagtctcatcatgtcaaacaagtgttggttgccccaggaaacgcaggcactgcctgctctgaaaagatttcaaataccgccatctcaatcagtgaccacactgcccttgctcaattctgcaaagagaagaaaattgaatttgtagttgttggaccagaagcacctctggctgctgggattgttgggaacctgaggtctgcaggagtgcaatgctttggcccaacagcagaagcggctcagttagagtccagcaaaaggtttgccaaagagtttatggacagacatggaatcccaaccgcacaatggaaggctttcaccaaacctgaagaagcctgcagcttcattttgagtgcagacttccctgctttggttgtgaaggccagtggtcttgcagctggaaaaggggtgattgttgcaaagagcaaagaagaggcctgcaaagctgtacaagagatcatgcaggagaaagcctttggggcagctggagaaacaattgtcattgaagaacttcttgacggagaagaggtgtcgtgtctgtgtttcactgatggcaagactgtggcccccatgcccccagcacaggaccataagcgattactggagggagatggtggccctaacacagggggaatgggagcctattgtccagcccctcaggtttctaatgatctattactaaaaattaaagatactgttcttcagaggacagtggatggcatgcagcaagagggtactccatatacaggtattctctatgctggaataatgctgaccaagaatggcccaaaagttctagagtttaattgccgttttggtgatccagagtgccaagtaatcctcccacttcttaaaagtgatctttatgaagtgattcagtccaccttagatggactgctctgcacatctctgcctgtttggctagaaaaccacaccgccctaactgttgtcatggcaagtaaaggttatcctggagactacaccaagggtgtagagataacagggtttcctgaggctcaagctctaggactggaggtgttccatgcaggcactgccctcaaaaatggcaaagtagtaactcatgggggtagagttcttgcagtcacagccatccgggaaaatctcatatcagcccttgaggaagccaagaaaggactagctgctataaagtttgagggagcaatttataggaaagacatcggctttcgtgccatagctttcctccagcagcccaggagtttgacttacaaggaatctggagtagatatcgcagctggaaatatgctggtcaagaaaattcagcctttagcaaaagccacttccagatcaggctgtaaagttgatcttggaggtttgctggtctttttgatttaaaagcagctggtttcaaagatccccttctggcctctggaacagatggcgttggaactaaactaaagattgcccagctatgcaataaacatgataccattggtcaagatttggtagcaatgtgtgttaatgatattctggcacaaggagcagagcccctcttcttccttgattacttttcctgtggaaaacttgacctcagtgtaactgaagctgttgttgctggaattgctaaagcttgtggaaaagctggatgtgctctccttggaggtgaaacagcagaaatgcctgacatgtatccccctggagagtatgacctagctgggtttgccgttggtgccatggagcgagatcagaaactccctcacctggaaagaatcactgagggtgatgttgttgttggaatagcttcatctggtcttcatagcaatggatttagccttgtgaggaaaatcgtggcaaaatcttccctccagtactcctctccagcacctgatggttgtggtgaccagactttaggggacttacttctcacgcctaccagaatctacagccattcactgttacctgtcctacgttcaggacatgtcaaagcctttgcccatattactggtggaggattactagagaacatccccagagtcctccctgagaaacttggggtagatttagatgcccagacctggaggatccccagggtcttctcatggttgcagcaggaaggacacctctctgaggaagagatggccagaacatttaactgtggggttggcgctgtccttgtggtatcaaaggagcagacagagcagattctgagggatatccagcagcacaaggaagaagcctgggtgattggcagtgtggttgcacgagctgaaggttccccacgtgtgaaagtcaagaatctgattgaaagcatgcaaataaatgggtcagtgttgaagaatggctccctgacaaatcatttctcttttgaaaaaaaaaaggccagagtggctgtcttaatatctggaacaggatcgaacctgcaagcacttatagacagtactcgggaaccaaatagctctgcacaaattgatattgttatctccaacaaagccgcagtagctgggttagataaagcggaaagagctggtattcccactagagtaattaatcataaactgtataaaaatcgtgtagaatttgacagtgcaattgacctagtccttgaagagttctccatagacatagtctgtcttgcaggattcatgagaattctttctggcccctttgtccaaaagtggaatggaaaaatgctcaatatccacccatccttgctcccttcttttaagggttcaaatgcccatgagcaagccctggaaaccggagtcacagttactgggtgcactgtacactttgtagctgaagatgtggatgctggacagattattttgcaagaagctgttcccgtgaagaggggtgatactgtcgcaactctttctgaaagagtaaaattagcagaacataaaatatttcctgcagcccttcagctggtggccagtggaactgtacagcttggagaaaatggcaagatctgttgggttaaagaggaatgaagccttttaattcagaaatggggccagtttagaaagaattatttgctgtttgcatggtggttttttatcatggacttggcccaaaagaaaaactgctaaaagacaaaaaagacctcacccttacttcatctatttttttaataaatagagactcacta

SEQ ID NO: 450349 - DNA, 3743 bp, Homo sapiens
cggtcccggtgggccgacttccggcgagcgggcaagcgggaaccaggtggccacccggtgtcggtttcattttcctttggaatttctgctttacagacagaacaatggcagcccgagtacttataattggcagtggaggaagggaacatacgctggcctggaaacttgcacagtctcatcatgtcaaacaagtgttggttgccccaggaaacgcaggcactgcctgctctgaaaagatttcaaataccgccatctcaatcagtgaccacactgcccttgctcaattctgcaaagagaagaaaattgaatttgtagttgttggaccagaagcacctctggctgctgggattgttgggaacctgaggtctgcaggagtgcaatgctttggcccaacagcagaagcggctcagttagagtccagcaaaaggtttgccaaagagtttatggacagacatggaatcccaaccgcacaatggaaggctttcaccaaacctgaagaagcctgcagcttcattttgagtgcagacttccctgctttggttgtgaaggccagtggtcttgcagctggaaaaggggtgattgttgcaaagagcaaagaagaggcctgcaaagctgtacaagagatcatgcaggagaaagcctttggggcagctggagaaacaattgtcattgaagaacttcttgacggagaagaggtgtcgtgtctgtgtttcactgatggcaagactgtggcccccatgcccccagcacaggaccataagcgattactggagggagatggtggccctaacacagggggaatgggagcctattgtccagcccctcaggtttctaatgatctattactaaaaattaaagatactgttcttcagaggacagtggatggcatgcagcaagagggtactccatatacaggtattctctatgctggaataatgctgaccaagaatggcccaaaagttctagagtttaattgccgttttggtgatccagagtgccaagtaatcctcccacttcttaaaagtgatctttatgaagtgattcagtccaccttagatggactgctctgcacatctctgcctgtttggctagaaaaccacaccgccctaactgttgtcatggcaagtaaaggttatcctggagactacaccaagggtgtagagataacagggtttcctgaggctcaagctctaggactggaggtgttccatgcaggcactgccctcaaaaatggcaaagtagtaactcatgggggtagagttcttgcagtcacagccatccgggaaaatctcatatcagcccttgaggaagccaagaaaggactagctgctataaagtttgagggagcaatttataggaaagacatcggctttcgtgccatagctttcctccagcagcccaggagtttgacttacaaggaatctggagtagatatcgcagctggaaatatgctggtcaagaaaattcagcctttagcaaaagccacttccagatcaggctgtaaagttgatcttggaggtttgctggtctttttgatttaaaagcagctggtttcaaagatccccttctggcctctggaacagatggcgttggaactaaactaaagattgcccagctatgcaataaacatgataccattggtcaagatttggtagcaatgtgtgttaatgatattctggcacaaggagcagagcccctcttcttccttgattacttttcctgtggaaaacttgacctcagtgtaactgaagctgttgttgctggaattgctaaagcttgtggaaaagctggatgtgctctccttggaggtgaaacagcagaaatgcctgacatgtatccccctggagagtatgacctagctgggtttgccgttggtgccatggagcgagatcagaaactccctcacctggaaagaatcactgagggtgatgttgttgttggaatagcttcatctggtcttcatagcaatggatttagccttgtgaggaaaatcgtggcaaaatcttccctccagtactcctctccagcacctgatggttgtggtgaccagactttaggggacttacttctcacgcctaccagaatctacagccattcactgttacctgtcctacgttcaggacatgtcaaagcctttgcccatattactggtggaggattactagagaacatccccagagtcctccctgagaaacttggggtagatttagatgcccagacctggaggatccccagggtcttctcatggttgcagcaggaaggacacctctctgaggaagagatggccagaacatttaactgtggggttggcgctgtccttgtggtatcaaaggagcagacagagcagattctgagggatatccagcagcacaaggaagaagcctgggtgattggcagtgtggttgcacgagctgaaggttccccacgtgtgaaagtcaagaatctgattgaaagcatgcaaataaatgggtcagtgttgaagaatggctccctgacaaatcatttctcttttgaaaaaaaaaaggccagagtggctgtcttaatatctggaacaggatcgaacctgcaagcacttatagacagtactcgggaaccaaatagctctgcacaaattgatattgttatctccaacaaagccgcagtagctgggttagataaagcggaaagagctggtattcccactagagtaattaatcataaactgtataaaaatcgtgtagaatttgacagtgcaattgacctagtccttgaagagttctccatagacatagtctgtcttgcaggattcatgagaattctttctggcccctttgtccaaaagtggaatggaaaaatgctcaatatccacccatccttgctcccttcttttaagggttcaaatgcccatgagcaagccctggaaaccggagtcacagttactgggtgcactgtacactttgtagctgaagatgtggatgctggacagattattttgcaagaagctgttcccgtgaagaggggtgatactgtcgcaactctttctgaaagagtaaaattagcagaacataaaatatttcctgcagcccttcagctggtggccagtggaactgtacagcttggagaaaatggcaagatctgttgggttaaagaggaatgaagccttttaattcagaaatggggccagtttagaaagaattatttgctgtttgcatggtggttttttatcatggacttggcccaaaagaaaaactgctaaaagacaaaaaagacctcacccttacttcatctatttttttaataaatagagactcactaaaaacaagactagttagtgcagcatatctgagacatacagttttcttggtcttttttatgctctttttctaaccgtcaccccctctttttttttttggtattgcctgacaacatgatgaatcacctccatgtttataagttttatgttttcagctgggcacagtggctcacgcctgtaatcccagcactttgggaggccgaggcaggcggatcatgaggtcaggagatcgagactatcctggctaacacagtgaaatcccatctctactaaaaatacaaaaaatagttagctgggtgtggtggtacgcacctgtaatcccagctactcgggtggctgaggcaggagaatcgcttgaacccaggaagtggaggttgcagtgagccaagatcatgccactgcactccagcctgggcaacagagcgagacttgtctcaaaaaataataatgg

SEQ ID NO: 450350 - DNA, 3944 bp, Homo sapiens
tggcggacaaccgggcctacgagtagctaaacggcaggggggacccaaacaggggagaagggtgaacatcttaactcggttctgaaacagggagtcttgggttacctcggaaaaggcgaagttcctcgagggaaaaggaagggagcggctgggggggcggttggggggggcccggaaaatggatcccaggcccaggcggggccctagcggggcctgagccggggaacgactgcgtctccgaagaaaggtgccaaagaaggctaggtttcattttcctttggaatttctgctttacagacagaacaatggcagcccgagtacttataattggcagtggaggaagggaacatacgctggcctggaaacttgcacagtctcatcatgtcaaacaagtgttggttgccccaggaaacgcaggcactgcctgctctgaaaagatttcaaataccgccatctcaatcagtgaccacactgcccttgctcaattctgcaaagagaagaaaattgaatttgtagttgttggaccagaagcacctctggctgctgggattgttgggaacctgaggtctgcaggagtgcaatgctttggcccaacagcagaagcggctcagttagagtccagcaaaaggtttgccaaagagtttatggacagacatggaatcccaaccgcacaatggaaggctttcaccaaacctgaagaagcctgcagcttcattttgagtgcagacttccctgctttggttgtgaaggccagtggtcttgcagctggaaaaggggtgattgttgcaaagagcaaagaagaggcctgcaaagctgtacaagagatcatgcaggagaaagcctttggggcagctggagaaacaattgtcattgaagaacttcttgacggagaagaggtgtcgtgtctgtgtttcactgatggcaagactgtggcccccatgcccccagcacaggaccataagcgattactggagggagatggtggccctaacacagggggaatgggagcctattgtccagcccctcaggtttctaatgatctattactaaaaattaaagatactgttcttcagaggacagtggatggcatgcagcaagagggtactccatatacaggtattctctatgctggaataatgctgaccaagaatggcccaaaagttctagagtttaattgccgttttggtgatccagagtgccaagtaatcctcccacttcttaaaagtgatctttatgaagtgattcagtccaccttagatggactgctctgcacatctctgcctgtttggctagaaaaccacaccgccctaactgttgtcatggcaagtaaaggttatcctggagactacaccaagggtgtagagataacagggtttcctgaggctcaagctctaggactggaggtgttccatgcaggcactgccctcaaaaatggcaaagtagtaactcatgggggtagagttcttgcagtcacagccatccgggaaaatctcatatcagcccttgaggaagccaagaaaggactagctgctataaagtttgagggagcaatttataggaaagacatcggctttcgtgccatagctttcctccagcagcccaggagtttgacttacaaggaatctggagtagatatcgcagctggaaatatgctggtcaagaaaattcagcctttagcaaaagccacttccagatcaggctgtaaagttgatcttggaggtttgctggtctttttgatttaaaagcagctggtttcaaagatccccttctggcctctggaacagatggcgttggaactaaactaaagattgcccagctatgcaataaacatgataccattggtcaagatttggtagcaatgtgtgttaatgatattctggcacaaggagcagagcccctcttcttccttgattacttttcctgtggaaaacttgacctcagtgtaactgaagctgttgttgctggaattgctaaagcttgtggaaaagctggatgtgctctccttggaggtgaaacagcagaaatgcctgacatgtatccccctggagagtatgacctagctgggtttgccgttggtgccatggagcgagatcagaaactccctcacctggaaagaatcactgagggtgatgttgttgttggaatagcttcatctggtcttcatagcaatggatttagccttgtgaggaaaatcgtggcaaaatcttccctccagtactcctctccagcacctgatggttgtggtgaccagactttaggggacttacttctcacgcctaccagaatctacagccattcactgttacctgtcctacgttcaggacatgtcaaagcctttgcccatattactggtggaggattactagagaacatccccagagtcctccctgagaaacttggggtagatttagatgcccagacctggaggatccccagggtcttctcatggttgcagcaggaaggacacctctctgaggaagagatggccagaacatttaactgtggggttggcgctgtccttgtggtatcaaaggagcagacagagcagattctgagggatatccagcagcacaaggaagaagcctgggtgattggcagtgtggttgcacgagctgaaggttccccacgtgtgaaagtcaagaatctgattgaaagcatgcaaataaatgggtcagtgttgaagaatggctccctgacaaatcatttctcttttgaaaaaaaaaaggccagagtggctgtcttaatatctggaacaggatcgaacctgcaagcacttatagacagtactcgggaaccaaatagctctgcacaaattgatattgttatctccaacaaagccgcagtagctgggttagataaagcggaaagagctggtattcccactagagtaattaatcataaactgtataaaaatcgtgtagaatttgacagtgcaattgacctagtccttgaagagttctccatagacatagtctgtcttgcaggattcatgagaattctttctggcccctttgtccaaaagtggaatggaaaaatgctcaatatccacccatccttgctcccttcttttaagggttcaaatgcccatgagcaagccctggaaaccggagtcacagttactgggtgcactgtacactttgtagctgaagatgtggatgctggacagattattttgcaagaagctgttcccgtgaagaggggtgatactgtcgcaactctttctgaaagagtaaaattagcagaacataaaatatttcctgcagcccttcagctggtggccagtggaactgtacagcttggagaaaatggcaagatctgttgggttaaagaggaatgaagccttttaattcagaaatggggccagtttagaaagaattatttgctgtttgcatggtggttttttatcatggacttggcccaaaagaaaaactgctaaaagacaaaaaagacctcacccttacttcatctatttttttaataaatagagactcactaaaaacaagactagttagtgcagcatatctgagacatacagttttcttggtcttttttatgctctttttctaaccgtcaccccctctttttttttttggtattgcctgacaacatgatgaatcacctccatgtttataagttttatgttttcagctgggcacagtggctcacgcctgtaatcccagcactttgggaggccgaggcaggcggatcatgaggtcaggagatcgagactatcctggctaacacagtgaaatcccatctctactaaaaatacaaaaaatagttagctgggtgtggtggtacgcacctgtaatcccagctactcgggtggctgaggcaggagaatcgcttgaacccaggaagtggaggttgcagtgagccaagatcatgccactgcactccagcctgggcaacagagcgagacttgtctcaaaaaataataatgg

SEQ ID NO: 450351 - DNA, 4589 bp, Homo sapiens
ccctcctttttttttctcttttcgcgaggggatatactaaacactacgcgcgtttggccccctccctcaaatatatttccgccccaatttaatctccccccccaatttttttttttttcctaaacttcacttaggatccccaagctgtcacaaaccacaactttggagccccttcattgcttatctatctgaatttagaccccagagtctgcctctattttcccacaattctcattggtagactccgccagagcactcatcaccccctggttcctcaatgggtgtatttgtttcaccattcactgccttcatccttcccactggaaagctcctgttgaatttcccggaatttactgaccacgaaagacctaaaaatctgctcgatgttggtcgccatggcgtccgctccgttctctcaactcctcctcgctagtcctccaggctcccagcatgcctcgggaggaggcgcacgggccaattcggtctctcgccttcctgattggctccaaagggaatgcccggtccggcccgctccaccgagggaccaatcagtgagcacggccctgctctcctctgctgtttctgagcggctggggtagaggtgctgacgtttgcgccgcgcacgactatgtccgccatgttagtgtctgacgcaggcgccattacaggagccgtctctcttgaggcgaccgtgtccgcataagttgtcagtccccagcagtgtttgggagccttaacaggcttgctaagtgcctgagattaaaggcgaagaggaagaagagcaagaagggcaacccggtgtttaacacacggctttcaggcgctctcaggtggcgccaagttcagtttcgacagggatatgcatccgggagagaatttttcagcccccgcccccactggcatgtgagaggaggaactcgctgttgccctgtgtcttccccaacagaacaatggcagcccgagtacttataattggcagtggaggaagggaacatacgctggcctggaaacttgcacagtctcatcatgtcaaacaagtgttggttgccccaggaaacgcaggcactgcctgctctgaaaagatttcaaataccgccatctcaatcagtgaccacactgcccttgctcaattctgcaaagagaagaaaattgaatttgtagttgttggaccagaagcacctctggctgctgggattgttgggaacctgaggtctgcaggagtgcaatgctttggcccaacagcagaagcggctcagttagagtccagcaaaaggtttgccaaagagtttatggacagacatggaatcccaaccgcacaatggaaggctttcaccaaacctgaagaagcctgcagcttcattttgagtgcagacttccctgctttggttgtgaaggccagtggtcttgcagctggaaaaggggtgattgttgcaaagagcaaagaagaggcctgcaaagctgtacaagagatcatgcaggagaaagcctttggggcagctggagaaacaattgtcattgaagaacttcttgacggagaagaggtgtcgtgtctgtgtttcactgatggcaagactgtggcccccatgcccccagcacaggaccataagcgattactggagggagatggtggccctaacacagggggaatgggagcctattgtccagcccctcaggtttctaatgatctattactaaaaattaaagatactgttcttcagaggacagtggatggcatgcagcaagagggtactccatatacaggtattctctatgctggaataatgctgaccaagaatggcccaaaagttctagagtttaattgccgttttggtgatccagagtgccaagtaatcctcccacttcttaaaagtgatctttatgaagtgattcagtccaccttagatggactgctctgcacatctctgcctgtttggctagaaaaccacaccgccctaactgttgtcatggcaagtaaaggttatcctggagactacaccaagggtgtagagataacagggtttcctgaggctcaagctctaggactggaggtgttccatgcaggcactgccctcaaaaatggcaaagtagtaactcatgggggtagagttcttgcagtcacagccatccgggaaaatctcatatcagcccttgaggaagccaagaaaggactagctgctataaagtttgagggagcaatttataggaaagacatcggctttcgtgccatagctttcctccagcagcccaggagtttgacttacaaggaatctggagtagatatcgcagctggaaatatgctggtcaagaaaattcagcctttagcaaaagccacttccagatcaggctgtaaagttgatcttggaggtttgctggtctttttgatttaaaagcagctggtttcaaagatccccttctggcctctggaacagatggcgttggaactaaactaaagattgcccagctatgcaataaacatgataccattggtcaagatttggtagcaatgtgtgttaatgatattctggcacaaggagcagagcccctcttcttccttgattacttttcctgtggaaaacttgacctcagtgtaactgaagctgttgttgctggaattgctaaagcttgtggaaaagctggatgtgctctccttggaggtgaaacagcagaaatgcctgacatgtatccccctggagagtatgacctagctgggtttgccgttggtgccatggagcgagatcagaaactccctcacctggaaagaatcactgagggtgatgttgttgttggaatagcttcatctggtcttcatagcaatggatttagccttgtgaggaaaatcgtggcaaaatcttccctccagtactcctctccagcacctgatggttgtggtgaccagactttaggggacttacttctcacgcctaccagaatctacagccattcactgttacctgtcctacgttcaggacatgtcaaagcctttgcccatattactggtggaggattactagagaacatccccagagtcctccctgagaaacttggggtagatttagatgcccagacctggaggatccccagggtcttctcatggttgcagcaggaaggacacctctctgaggaagagatggccagaacatttaactgtggggttggcgctgtccttgtggtatcaaaggagcagacagagcagattctgagggatatccagcagcacaaggaagaagcctgggtgattggcagtgtggttgcacgagctgaaggttccccacgtgtgaaagtcaagaatctgattgaaagcatgcaaataaatgggtcagtgttgaagaatggctccctgacaaatcatttctcttttgaaaaaaaaaaggccagagtggctgtcttaatatctggaacaggatcgaacctgcaagcacttatagacagtactcgggaaccaaatagctctgcacaaattgatattgttatctccaacaaagccgcagtagctgggttagataaagcggaaagagctggtattcccactagagtaattaatcataaactgtataaaaatcgtgtagaatttgacagtgcaattgacctagtccttgaagagttctccatagacatagtctgtcttgcaggattcatgagaattctttctggcccctttgtccaaaagtggaatggaaaaatgctcaatatccacccatccttgctcccttcttttaagggttcaaatgcccatgagcaagccctggaaaccggagtcacagttactgggtgcactgtacactttgtagctgaagatgtggatgctggacagattattttgcaagaagctgttcccgtgaagaggggtgatactgtcgcaactctttctgaaagagtaaaattagcagaacataaaatatttcctgcagcccttcagctggtggccagtggaactgtacagcttggagaaaatggcaagatctgttgggttaaagaggaatgaagccttttaattcagaaatggggccagtttagaaagaattatttgctgtttgcatggtggttttttatcatggacttggcccaaaagaaaaactgctaaaagacaaaaaagacctcacccttacttcatctatttttttaataaatagagactcactaaaaacaagactagttagtgcagcatatctgagacatacagttttcttggtcttttttatgctctttttctaaccgtcaccccctctttttttttttggtattgcctgacaacatgatgaatcacctccatgtttataagttttatgttttcagctgggcacagtggctcacgcctgtaatcccagcactttgggaggccgaggcaggcggatcatgaggtcaggagatcgagactatcctggctaacacagtgaaatcccatctctactaaaaatacaaaaaatagttagctgggtgtggtggtacgcacctgtaatcccagctactcgggtggctgaggcaggagaatcgcttgaacccaggaagtggaggttgcagtgagccaagatcatgccactgcactccagcctgggcaacagagcgagacttgtctcaaaaaataataatgg

SEQ ID NO: 450352 - DNA, 3826 bp, Homo sapiens
  misc_feature (1663)..(1663): n is a, c, g, or t
cggtcccggtgggccgacttccggcgagcgggcaagcgggaaccaggtggccacccggtgtcggtttcattttcctttggaatttctgctttacagacagaacaatggcagcccgagtacttataattggcagtggaggaagggaacatacgctggcctggaaacttgcacagtctcatcatgtcaaacaagtgttggttgccccaggaaacgcaggcactgcctgctctgaaaagatttcaaataccgccatctcaatcagtgaccacactgcccttgctcaattctgcaaagagaagaaaattgaatttgtagttgttggaccagaagcacctctggctgctgggattgttgggaacctgaggtctgcaggagtgcaatgctttggcccaacagcagaagcggctcagttagagtccagcaaaaggtttgccaaagagtttatggacagacatggaatcccaaccgcacaatggaaggctttcaccaaacctgaagaagcctgcagcttcattttgagtgcagacttccctgctttggttgtgaaggccagtggtcttgcagctggaaaaggggtgattgttgcaaagagcaaagaagaggcctgcaaagctgtacaagagatcatgcaggagaaagcctttggggcagctggagaaacaattgtcattgaagaacttcttgacggagaagaggtgtcgtgtctgtgtttcactgatggcaagactgtggcccccatgcccccagcacaggaccataagcgattactggagggagatggtggccctaacacagggggaatgggagcctattgtccagcccctcaggtttctaatgatctattactaaaaattaaagatactgttcttcagaggacagtggatggcatgcagcaagagggtactccatatacaggtattctctatgctggaataatgctgaccaagaatggcccaaaagttctagagtttaattgccgttttggtgatccagagtgccaagtaatcctcccacttcttaaaagtgatctttatgaagtgattcagtccaccttagatggactgctctgcacatctctgcctgtttggctagaaaaccacaccgccctaactgttgtcatggcaagtaaaggttatcctggagactacaccaagggtgtagagataacagggtttcctgaggctcaagctctaggactggaggtgttccatgcaggcactgccctcaaaaatggcaaagtagtaactcatgggggtagagttcttgcagtcacagccatccgggaaaatctcatatcagcccttgaggaagccaagaaaggactagctgctataaagtttgagggagcaatttataggaaagacatcggctttcgtgccatagctttcctccagcagcccaggagtttgacttacaaggaatctggagtagatatcgcagctggaaatatgctggtcaagaaaattcagcctttagcaaaagccacttccagatcaggctgtaaagttgatcttggaggtttgctggtctttttgatttaaaagcagctggtttcaaagatccccttctggcctctggaacagatggcgttggaactaaactaaaggtgttaagagcagctaatcaaatggataagatacaattttgaacttattccctaatntggatgtttatattgttcttacatagattgcccagctatgcaataaacatgataccattggtcaagatttggtagcaatgtgtgttaatgatattctggcacaaggagcagagcccctcttcttccttgattacttttcctgtggaaaacttgacctcagtgtaactgaagctgttgttgctggaattgctaaagcttgtggaaaagctggatgtgctctccttggaggtgaaacagcagaaatgcctgacatgtatccccctggagagtatgacctagctgggtttgccgttggtgccatggagcgagatcagaaactccctcacctggaaagaatcactgagggtgatgttgttgttggaatagcttcatctggtcttcatagcaatggatttagccttgtgaggaaaatcgtggcaaaatcttccctccagtactcctctccagcacctgatggttgtggtgaccagactttaggggacttacttctcacgcctaccagaatctacagccattcactgttacctgtcctacgttcaggacatgtcaaagcctttgcccatattactggtggaggattactagagaacatccccagagtcctccctgagaaacttggggtagatttagatgcccagacctggaggatccccagggtcttctcatggttgcagcaggaaggacacctctctgaggaagagatggccagaacatttaactgtggggttggcgctgtccttgtggtatcaaaggagcagacagagcagattctgagggatatccagcagcacaaggaagaagcctgggtgattggcagtgtggttgcacgagctgaaggttccccacgtgtgaaagtcaagaatctgattgaaagcatgcaaataaatgggtcagtgttgaagaatggctccctgacaaatcatttctcttttgaaaaaaaaaaggccagagtggctgtcttaatatctggaacaggatcgaacctgcaagcacttatagacagtactcgggaaccaaatagctctgcacaaattgatattgttatctccaacaaagccgcagtagctgggttagataaagcggaaagagctggtattcccactagagtaattaatcataaactgtataaaaatcgtgtagaatttgacagtgcaattgacctagtccttgaagagttctccatagacatagtctgtcttgcaggattcatgagaattctttctggcccctttgtccaaaagtggaatggaaaaatgctcaatatccacccatccttgctcccttcttttaagggttcaaatgcccatgagcaagccctggaaaccggagtcacagttactgggtgcactgtacactttgtagctgaagatgtggatgctggacagattattttgcaagaagctgttcccgtgaagaggggtgatactgtcgcaactctttctgaaagagtaaaattagcagaacataaaatatttcctgcagcccttcagctggtggccagtggaactgtacagcttggagaaaatggcaagatctgttgggttaaagaggaatgaagccttttaattcagaaatggggccagtttagaaagaattatttgctgtttgcatggtggttttttatcatggacttggcccaaaagaaaaactgctaaaagacaaaaaagacctcacccttacttcatctatttttttaataaatagagactcactaaaaacaagactagttagtgcagcatatctgagacatacagttttcttggtcttttttatgctctttttctaaccgtcaccccctctttttttttttggtattgcctgacaacatgatgaatcacctccatgtttataagttttatgttttcagctgggcacagtggctcacgcctgtaatcccagcactttgggaggccgaggcaggcggatcatgaggtcaggagatcgagactatcctggctaacacagtgaaatcccatctctactaaaaatacaaaaaatagttagctgggtgtggtggtacgcacctgtaatcccagctactcgggtggctgaggcaggagaatcgcttgaacccaggaagtggaggttgcagtgagccaagatcatgccactgcactccagcctgggcaacagagcgagacttgtctcaaaaaataataatgg

SEQ ID NO: 450353 - DNA, 4171 bp, Homo sapiens
cggtcccggtgggccgacttccggcgagcgggcaagcgggaaccaggtggccacccggtgtcggtttcattttcctttggaatttctgctttacagacagaacaatggcagcccgagtacttataattggcagtggaggaagggaacatacgctggcctggaaacttgcacagtctcatcatgtcaaacaagtgttggttgccccaggaaacgcaggcactgcctgctctgaaaagatttcaaataccgccatctcaatcagtgaccacactgcccttgctcaattctgcaaagagaagaaaattgaatttgtagttgttggaccagaagcacctctggctgctgggattgttgggaacctgaggtctgcaggagtgcaatgctttggcccaacagcagaagcggctcagttagagtccagcaaaaggtttgccaaagagtttatggacagacatggaatcccaaccgcacaatggaaggctttcaccaaacctgaagaagcctgcagcttcattttgagtgcagacttccctgctttggttgtgaaggccagtggtcttgcagctggaaaaggggtgattgttgcaaagagcaaagaagaggcctgcaaagctgtacaagagatcatgcaggagaaagcctttggggcagctggagaaacaattgtcattgaagaacttcttgacggagaagaggtgtcgtgtctgtgtttcactgatggcaagactgtggcccccatgcccccagcacaggaccataagcgattactggagggagatggtggccctaacacagggggaatgggagcctattgtccagcccctcaggtttctaatgatctattactaaaaattaaagatactgttcttcagaggacagtggatggcatgcagcaagagggtactccatatacaggtaggcccacccacattactatggaagccacctatagagtaactttctacttttgataaaacttattttccattcccttttttttttttttttaccactttttaatggaccattttttaaatgtttatgatttttccaaaactttgattattagaagtttatgtagtagattttatatttgtaatacagtgtcttcatcatagattttctttctctcttttttttttttttcttttttaatgaaggtattctctatgctggaataatgctgaccaagaatggcccaaaagttctagagtttaattgccgttttggtgatccagagtgccaagtgggtaaaaatatcaaagtattacttggtagaagatatgtggtattttaatcttggaatttatcagcctggaagtaattacctttgggaaattcatgcaagttctgctagtacaccagtgaataaaatgtttaaggaaaactaaaatttatcccacctgccatgtggattatgtttttccaggtaatcctcccacttcttaaaagtgatctttatgaagtgattcagtccaccttagatggactgctctgcacatctctgcctgtttggctagaaaaccacaccgccctaactgttgtcatggcaagtaaaggttatcctggagactacaccaagggtgtagagataacagggtttcctgaggctcaagctctaggactggaggtgttccatgcaggcactgccctcaaaaatggcaaagtagtaactcatgggggtagagttcttgcagtcacagccatccgggaaaatctcatatcagcccttgaggaagccaagaaaggactagctgctataaagtttgagggagcaatttataggaaagacatcggctttcgtgccatagctttcctccagcagcccaggagtttgacttacaaggaatctggagtagatatcgcagctggaaatatgctggtcaagaaaattcagcctttagcaaaagccacttccagatcaggctgtaaagttgatcttggaggtttgctggtctttttgatttaaaagcagctggtttcaaagatccccttctggcctctggaacagatggcgttggaactaaactaaagattgcccagctatgcaataaacatgataccattggtcaagatttggtagcaatgtgtgttaatgatattctggcacaaggagcagagcccctcttcttccttgattacttttcctgtggaaaacttgacctcagtgtaactgaagctgttgttgctggaattgctaaagcttgtggaaaagctggatgtgctctccttggaggtgaaacagcagaaatgcctgacatgtatccccctggagagtatgacctagctgggtttgccgttggtgccatggagcgagatcagaaactccctcacctggaaagaatcactgagggtgatgttgttgttggaatagcttcatctggtcttcatagcaatggatttagccttgtgaggaaaatcgtggcaaaatcttccctccagtactcctctccagcacctgatggttgtggtgaccagactttaggggacttacttctcacgcctaccagaatctacagccattcactgttacctgtcctacgttcaggacatgtcaaagcctttgcccatattactggtggaggattactagagaacatccccagagtcctccctgagaaacttggggtagatttagatgcccagacctggaggatccccagggtcttctcatggttgcagcaggaaggacacctctctgaggaagagatggccagaacatttaactgtggggttggcgctgtccttgtggtatcaaaggagcagacagagcagattctgagggatatccagcagcacaaggaagaagcctgggtgattggcagtgtggttgcacgagctgaaggttccccacgtgtgaaagtcaagaatctgattgaaagcatgcaaataaatgggtcagtgttgaagaatggctccctgacaaatcatttctcttttgaaaaaaaaaaggccagagtggctgtcttaatatctggaacaggatcgaacctgcaagcacttatagacagtactcgggaaccaaatagctctgcacaaattgatattgttatctccaacaaagccgcagtagctgggttagataaagcggaaagagctggtattcccactagagtaattaatcataaactgtataaaaatcgtgtagaatttgacagtgcaattgacctagtccttgaagagttctccatagacatagtctgtcttgcaggattcatgagaattctttctggcccctttgtccaaaagtggaatggaaaaatgctcaatatccacccatccttgctcccttcttttaagggttcaaatgcccatgagcaagccctggaaaccggagtcacagttactgggtgcactgtacactttgtagctgaagatgtggatgctggacagattattttgcaagaagctgttcccgtgaagaggggtgatactgtcgcaactctttctgaaagagtaaaattagcagaacataaaatatttcctgcagcccttcagctggtggccagtggaactgtacagcttggagaaaatggcaagatctgttgggttaaagaggaatgaagccttttaattcagaaatggggccagtttagaaagaattatttgctgtttgcatggtggttttttatcatggacttggcccaaaagaaaaactgctaaaagacaaaaaagacctcacccttacttcatctatttttttaataaatagagactcactaaaaacaagactagttagtgcagcatatctgagacatacagttttcttggtcttttttatgctctttttctaaccgtcaccccctctttttttttttggtattgcctgacaacatgatgaatcacctccatgtttataagttttatgttttcagctgggcacagtggctcacgcctgtaatcccagcactttgggaggccgaggcaggcggatcatgaggtcaggagatcgagactatcctggctaacacagtgaaatcccatctctactaaaaatacaaaaaatagttagctgggtgtggtggtacgcacctgtaatcccagctactcgggtggctgaggcaggagaatcgcttgaacccaggaagtggaggttgcagtgagccaagatcatgccactgcactccagcctgggcaacagagcgagacttgtctcaaaaaataataatgg

SEQ ID NO: 450354 - DNA, 2899 bp, Homo sapiens
cggtcccggtgggccgacttccggcgagcgggcaagcgggaaccaggtggccacccggtgtcggtttcattttcctttggaatttctgctttacagacagaacaatggcagcccgagtacttataattggcagtggaggaagggaacatacgctggcctggaaacttgcacagtctcatcatgtcaaacaagtgttggttgccccaggaaacgcaggcactgcctgctctgaaaagatttcaaataccgccatctcaatcagtgaccacactgcccttgctcaattctgcaaagagaagaaaattgaatttgtagttgttggaccagaagcacctctggctgctgggattgttgggaacctgaggtctgcaggagtgcaatgctttggcccaacagcagaagcggctcagttagagtccagcaaaaggtttgccaaagagtttatggacagacatggaatcccaaccgcacaatggaaggctttcaccaaacctgaagaagcctgcagcttcattttgagtgcagacttccctgctttggttgtgaaggccagtggtcttgcagctggaaaaggggtgattgttgcaaagagcaaagaagaggcctgcaaagctgtacaagagatcatgcaggagaaagcctttggggcagctggagaaacaattgtcattgaagaacttcttgacggagaagaggtgtcgtgtctgtgtttcactgatggcaagactgtggcccccatgcccccagcacaggaccataagcgattactggagggagatggtggccctaacacagggggaatgggagcctattgtccagcccctcaggtttctaatgatctattactaaaaattaaagatactgttcttcagaggacagtggatggcatgcagcaagagggtactccatatacaggtattctctatgctggaataatgctgaccaagaatggcccaaaagttctagagtttaattgccgttttggtgatccagagtgccaagtaatcctcccacttcttaaaagtgatctttatgaagtgattcagtccaccttagatggactgctctgcacatctctgcctgtttggctagaaaaccacaccgccctaactgttgtcatggcaagtaaaggttatcctggagactacaccaagggtgtagagataacagggtttcctgaggctcaagctctaggactggaggtgttccatgcaggcactgccctcaaaaatggcaaagtagtaactcatgggggtagagttcttgcagtcacagccatccgggaaaatctcatatcagcccttgaggaagccaagaaaggactagctgctataaagtttgagggagcaatttataggaaagacatcggctttcgtgccatagctttcctccagcagcccaggagtttgacttacaaggaatctggagtagatatcgcagctggaaatatgctggtcaagaaaattcagcctttagcaaaagccacttccagatcaggctgtaaagttgatcttggaggtttgctggtctttttgatttaaaagcagctggtttcaaagatccccttctggcctctggaacagatggcgttggaactaaactaaagattgcccagctatgcaataaacatgataccattggtcaagatttggtagcaatgtgtgttaatgatattctggcacaaggagcagagcccctcttcttccttgattacttttcctgtggaaaacttgacctcagtgtaactgaagctgttgttgctggaattgctaaagcttgtggaaaagctggatgtgctctccttggaggtgaaacagcagaaatgcctgacatgtatccccctggagagtatgacctagctgggtttgccgttggtgccatggagcgagatcagaaactccctcacctggaaagaatcactgagggtgatgttgttgttggaatagcttcatctggtcttcatagcaatggatttagccttgtgaggaaaatcgtggcaaaatcttccctccagtactcctctccagcacctgatggttgtggtgaccagactttaggggacttacttctcacgcctaccagaatctacagccattcactgttacctgtcctacgttcaggacatgtcaaagcctttgcccatattactggtggaggattactagagaacatccccagagtcctccctgagaaacttggggtagatttagatgcccagacctggaggatccccagggtcttctcatggttgcagcaggaaggacacctctctgaggaagagatggccagaacatttaactgtggggttggcgctgtccttgtggtatcaaaggagcagacagagcagattctgagggatatccagcagcacaaggaagaagcctgggtgattggcagtgtggttgcacgagctgaaggtacttgctccttactcatttttagatatataattttagctgtataattttagctatacctcagccttgcctcacaagctttctgcccaccttttagtgcagccatcgctatggcaactatctttacacagatgtaacatgacagcacccaccccagcgataccacgtatctcttcatttctgcctcagaactaagcattcatgcatgcacagccacaccccacaggatcgcttcccaaagtaatctccctacacacaagacctcatggctctgctgtcactcagctcgattcaaggaatagcgagcaagcaccctgacaagtactgtatcagtcaggactctgcgagaagtgctagaacttggcagaggggcagaaaatccactcagattcactaacaaagacgtcacatgcttgctttggcaggacacatactaaaattggaacgatacagagaagattcacaaaaataaaaaatagaaa

SEQ ID NO: 450355 - DNA, 2890 bp, Homo sapiens
cggtcccggtgggccgacttccggcgagcgggcaagcgggaaccaggtggccacccggtgtcggtttcattttcctttggaatttctgctttacagacagaacaatggcagcccgagtacttataattggcagtggaggaagggaacatacgctggcctggaaacttgcacagtctcatcatgtcaaacaagtgttggttgccccaggaaacgcaggcactgcctgctctgaaaagatttcaaataccgccatctcaatcagtgaccacactgcccttgctcaattctgcaaagagaagaaaattgaatttgtagttgttggaccagaagcacctctggctgctgggattgttgggaacctgaggtctgcaggagtgcaatgctttggcccaacagcagaagcggctcagttagagtccagcaaaaggtttgccaaagagtttatggacagacatggaatcccaaccgcacaatggaaggctttcaccaaacctgaagaagcctgcagcttcattttgagtgcagacttccctgctttggttgtgaaggccagtggtcttgcagctggaaaaggggtgattgttgcaaagagcaaagaagaggcctgcaaagctgtacaagagatcatgcaggagaaagcctttggggcagctggagaaacaattgtcattgaagaacttcttgacggagaagaggtgtcgtgtctgtgtttcactgatggcaagactgtggcccccatgcccccagcacaggaccataagcgattactggagggagatggtggccctaacacagggggaatgggagcctattgtccagcccctcaggtttctaatgatctattactaaaaattaaagatactgttcttcagaggacagtggatggcatgcagcaagagggtactccatatacaggtattctctatgctggaataatgctgaccaagaatggcccaaaagttctagagtttaattgccgttttggtgatccagagtgccaagtaatcctcccacttcttaaaagtgatctttatgaagtgattcagtccaccttagatggactgctctgcacatctctgcctgtttggctagaaaaccacaccgccctaactgttgtcatggcaagtaaaggttatcctggagactacaccaagggtgtagagataacagggtttcctgaggctcaagctctaggactggaggtgttccatgcaggcactgccctcaaaaatggcaaagtagtaactcatgggggtagagttcttgcagtcacagccatccgggaaaatctcatatcagcccttgaggaagccaagaaaggactagctgctataaagtttgagggagcaatttataggaaagacatcggctttcgtgccatagctttcctccagcagcccaggagtttgacttacaaggaatctggagtagatatcgcagctggaaatatgctggtcaagaaaattcagcctttagcaaaagccacttccagatcaggctgtaaagttgatcttggaggtttgctggtctttttgatttaaaagcagctggtttcaaagatccccttctggcctctggaacagatggcgttggaactaaactaaagattgcccagctatgcaataaacatgataccattggtcaagatttggtagcaatgtgtgttaatgatattctggcacaaggagcagagcccctcttcttccttgattacttttcctgtggaaaacttgacctcagtgtaactgaagctgttgttgctggaattgctaaagcttgtggaaaagctggatgtgctctccttggaggtgaaacagcagaaatgcctgacatgtatccccctggagagtatgacctagctgggtttgccgttggtgccatggagcgagatcagaaactccctcacctggaaagaatcactgagggtgatgttgttgttggaatagcttcatctggtcttcatagcaatggatttagccttgtgaggaaaatcgtggcaaaatcttccctccagtactcctctccagcacctgatggttgtggtgaccagactttaggggacttacttctcacgcctaccagaatctacagccattcactgttacctgtcctacgttcaggacatgtcaaagcctttgcccatattactggtggaggattactagagaacatccccagagtcctccctgagaaacttggggtagatttagatgcccagacctggaggatccccagggtcttctcatggttgcagcaggaaggacacctctctgaggaagagatggccagaacatttaactgtggggttggcgctgtccttgtggtatcaaaggagcagacagagcagattctgagggatatccagcagcacaaggaagaagcctgggtgattggcagtgtggttgcacgagctgaaggtacttgctccttactcatttttagatatataattttagctgtataattttagctatacctcagccttgcctcacaagctttctgcccaccttttagtgcagccatcgctatggcaactatctttacacagatgtaacatgacagcacccaccccagcgataccacgtatctcttcatttctgcctcagaactaagcattcatgcatgcacagccacaccccacaggatcgcttcccaaagtaatctccctacacacaagacctcatggctctgctgtcactcagctcgattcaaggaatagcgagcaagcaccctgacaagtactgtatcagtcaggactctgcgagaagtgctagaacttggcagaggggcagaaaatcttctctgtatcgttccaattttagtatgtgtcctgccaaagcaagcatgtgacgtctttgttagtgaatctgagtggattttctgtcgacgc

SEQ ID NO: 450356 - DNA, 1527 bp, Homo sapiens
cagagtatgtgtgaggctgcttagtggattgatgtccagaaaccggctttatacaaatgtaggtgttcactcagtttcacatgatcaacaacgtagagtaaaagcactctgctagataccgtggggaataaagatcaatcagggttggaccctgctaaagggataagatcaagtgggcaggagtggttgcacgagctgaaggttccccacgtgtgaaagtcaagaatctgattgaaagcatgcaaataaatgggtcagtgttgaagaatggctccctgacaaatcatttctcttttgaaaaaaaaaaggccagagtggctgtcttaatatctggaacaggatcgaacctgcaagcacttatagacagtactcgggaaccaaatagctctgcacaaattgatattgttatctccaacaaagccgcagtagctgggttagataaagcggaaagagctggtattcccactagagtaattaatcataaactgtataaaaatcgtgtagaatttgacagtgcaattgacctagtccttgaagagttctccatagacatagtctgtcttgcaggattcatgagaattctttctggcccctttgtccaaaagtggaatggaaaaatgctcaatatccacccatccttgctcccttcttttaagggttcaaatgcccatgagcaagccctggaaaccggagtcacagttactgggtgcactgtacactttgtagctgaagatgtggatgctggacagattattttgcaagaagctgttcccgtgaagaggggtgatactgtcgcaactctttctgaaagagtaaaattagcagaacataaaatatttcctgcagcccttcagctggtggccagtggaactgtacagcttggagaaaatggcaagatctgttgggttaaagaggaatgaagccttttaattcagaaatggggccagtttagaaagaattatttgctgtttgcatggtggttttttatcatggacttggcccaaaagaaaaactgctaaaagacaaaaaagacctcacccttacttcatctatttttttaataaatagagactcactaaaaacaagactagttagtgcagcatatctgagacatacagttttcttggtcttttttatgctctttttctaaccgtcaccccctctttttttttttggtattgcctgacaacatgatgaatcacctccatgtttataagttttatgttttcagctgggcacagtggctcacgcctgtaatcccagcactttgggaggccgaggcaggcggatcatgaggtcaggagatcgagactatcctggctaacacagtgaaatcccatctctactaaaaatacaaaaaatagttagctgggtgtggtggtacgcacctgtaatcccagctactcgggtggctgaggcaggagaatcgcttgaacccaggaagtggaggttgcagtgagccaagatcatgccactgcactccagcctgggcaacagagcgagacttgtctcaaaaaataataatgg

SEQ ID NO: 450357 - DNA, 1057 bp, Homo sapiens
gtgaaatactgttgctatttgaaatcatatgtcaaatatgctctcttctagggtttcctgaggctcaagctctaggactggaggtgttccatgcaggcactgccctcaaaaatggcaaagtagtaactcatgggggtagagttcttgcagtcacagccatccgggaaaatctcatatcagcccttgaggaagccaagaaaggactagctgctataaagtttgagggagcaatttataggaaagacatcggctttcgtgccatagctttcctccagcagcccaggtaaaactctaagcaagttagctgtagtgccatttcagaaactggcctaaatggctatgtagaacatttcattaaccctataagtcattcagtattcttttctctctgtgggagtgatacagtcttggtttgtattttgtttgaatcaaaactggttatagcaatactcaaattaaatggaaaaaacttcatgatagcgtaagtttggaaagtttagcaaaatcacagtggtactgatttttatttgttttctattttttttattttatatttttaatttttttaacagggtcttcctctctcgcccaagttctcatgcctcagcctcccaaatagctgggactacaggcacaggccaccacacctggctaatttttttgtattttttgtggagatggggtttcaccatgttgccaaggccagtctgaaatcctgggctcaagtgatcctcctgctttggcctcccaaaatgctgggattataggcatgagccgctgcacttggcctgatactgatttttattccttgcgttatcacatagtgttgtatttgaaacatagttcatggttttatcaaagaactgaagatgagaatactggtcatctaactttgtaatttgatttgattatactgtaaagtttgacagtctcattttatcactgcgtttgtatctattactaaaatgtattttttgacctcttactgattcattgttggtatgtacaaactgttgacttgtaaaatcaataaagtcttagttggaaatgtgggtgt

SEQ ID NO: 450358 - DNA, 1397 bp, Homo sapiens
cggtcccggtgggccgacttccggcgagcgggcaagcgggaaccaggtggccacccggtgtcggtttcattttcctttggaatttctgctttacagacagaacaatggcagcccgagtacttataattggcagtggaggaagggaacatacgctggcctggaaacttgcacagtctcatcatgtcaaacaagtgttggttgccccaggaaacgcaggcactgcctgctctgaaaagatttcaaataccgccatctcaatcagtgaccacactgcccttgctcaattctgcaaagagaagaaaattgaatttgtagttgttggaccagaagcacctctggctgctgggattgttgggaacctgaggtctgcaggagtgcaatgctttggcccaacagcagaagcggctcagttagagtccagcaaaaggtttgccaaagagtttatggacagacatggaatcccaaccgcacaatggaaggctttcaccaaacctgaagaagcctgcagcttcattttgagtgcagacttccctgctttggttgtgaaggccagtggtcttgcagctggaaaaggggtgattgttgcaaagagcaaagaagaggcctgcaaagctgtacaagagatcatgcaggtaggctgggtcttctgaaaaaatttacttttctattcatactgaataaataccgttttaagtttaaaaaatgttcctcacaataaggaaaatctattttgcaaacatatgggtaagttattttttataatcccatgtattataatccatctctataaaatagttatggatttacactgtaaattaaaccatgattgtattattttgaagtaaattgtaacatcctttgttgtctgccactgaaagaaaatcctcagactctagaacatataaataaattatcaagccatccatgaggacaaaagtatttgtcccacatgtcccgggtctaagagaagtaaattaatgaatgaatatgccttgtctttcgtgatcgatctttgttgttgtgggttttctgtccttgtagaagtctactttcacaagcatgctttagtatagttattacagccaaacatgtataattataatcggaagtaaggattaagtggcgataatgaaaacatctgtttttcccataccttatttgaaactggatcaccaaatcttcaggagaatattagaggtgtgtttattccgtctgtaccagtgttagctacactattgccacattaaaaataggaaacatttatatgttccctttgagtctttctgaaagggaaagaaaaattacagtactcactggttcataatacaaatgctggataatgctaaaagtcaactaagtatcaaaaacttaccaagcctctttttttaaaaaaaaaa

SEQ ID NO: 450359 - DNA, 2176 bp, Homo sapiens
cggtcccggtgggccgacttccggcgagcgggcaagcgggaaccaggtggccacccggtgtcggtttcattttcctttggaatttctgctttacagacagaacaatggcagcccgagtacttataattggcagtggaggaagggaacatacgctggcctggaaacttgcacagtctcatcatgtcaaacaagtgttggttgccccaggaaacgcaggcactgcctgctctgaaaagatttcaaataccgccatctcaatcagtgaccacactgcccttgctcaattctgcaaagagaagaaaattgaatttgtagttgttggaccagaagcacctctggctgctgggattgttgggaacctgaggtctgcaggagtgcaatgctttggcccaacagcagaagcggctcagttagagtccagcaaaaggtttgccaaagagtttatggacagacatggaatcccaaccgcacaatggaaggctttcaccaaacctgaagaagcctgcagcttcattttgagtgcagacttccctgctttggttgtgaaggccagtggtcttgcagctggaaaaggggtgattgttgcaaagagcaaagaagaggcctgcaaagctgtacaagagatcatgcaggagaaagcctttggggcagctggagaaacaattgtcattgaagaacttcttgacggagaagaggtgtcgtgtctgtgtttcactgatggcaagactgtggcccccatgcccccagcacaggaccataagcgattactggagggagatggtggccctaacacagggggaatgggagcctattgtccagcccctcaggtttctaatgatctattactaaaaattaaagatactgttcttcagaggacagtggatggcatgcagcaagagggtactccatatacaggtattctctatgctggaataatgctgaccaagaatggcccaaaagttctagagtttaattgccgttttggtgatccagagtgccaagtaatcctcccacttcttaaaagtgatctttatgaagtgattcagtccaccttagatggactgctctgcacatctctgcctgtttggctagaaaaccacaccgccctaactgttgtcatggcaagtaaaggttatcctggagactacaccaagggtgtagagataacagggtttcctgaggctcaagctctaggactggaggtgttccatgcaggcactgccctcaaaaatggcaaagtagtaactcatgggggtagagttcttgcagtcacagccatccgggaaaatctcatatcagcccttgaggaagccaagaaaggactagctgctataaagtttgagggagcaatttataggaaagacatcggctttcgtgccatagctttcctccagcagcccaggtaaaactctaagcaagttagctgtagtgccatttcagaaactggcctaaatggctatgtagaacatttcattaaccctataagtcattcagtattcttttctctctgtgggagtgatacagtcttggtttgtattttgtttgaatcaaaactggttatagcaatactcaaattaaatggaaaaaacttcatgatagcgtaagtttggaaagtttagcaaaatcacagtggtactgatttttatttgttttctattttttttattttatatttttaatttttttaacagggtcttcctctctcgcccaagttctcatgcctcagcctcccaaatagctgggactacaggcacaggccaccacacctggctaatttttttgtattttttgtggagatggggtttcaccatgttgccaaggccagtctgaaatcctgggctcaagtgatcctcctgctttggcctcccaaaatgctgggattataggcatgagccgctgcacttggcctgatactgatttttattccttgcgttatcacatagtgttgtatttgaaacatagttcatggttttatcaaagaactgaagatgagaatactggtcatctaactttgtaatttgatttgattatactgtaaagtttgacagtctcattttatcactgcgtttgtatctattactaaaatgtattttttgacctcttactgattcattgttggtatgtacaaactgttgacttgtaaaatcaataaagtcttagttggaaatgtgggtgt

SEQ ID NO: 450360 - DNA, 4510 bp, Homo sapiens
ccctcctttttttttctcttttcgcgaggggatatactaaacactacgcgcgtttggccccctccctcaaatatatttccgccccaatttaatctccccccccaatttttttttttttcctaaacttcacttaggatccccaagctgtcacaaaccacaactttggagccccttcattgcttatctatctgaatttagaccccagagtctgcctctattttcccacaattctcattggtagactccgccagagcactcatcaccccctggttcctcaatgggtgtatttgtttcaccattcactgccttcatccttcccactggaaagctcctgttgaatttcccggaatttactgaccacgaaagacctaaaaatctgctcgatgttggtcgccatggcgtccgctccgttctctcaactcctcctcgctagtcctccaggctcccagcatgcctcgggaggaggcgcacgggccaattcggtctctcgccttcctgattggctccaaagggaatgcccggtccggcccgctccaccgagggaccaatcagtgagcacggccctgctctcctctgctgtttctgagcggctggggtagaggtgctgacgtttgcgccgcgcacgactatgtccgccatgttagtgtctgacgcaggcgccattacaggagccgtctctcttgaggcgaccgtgtccgcataagttgtcagtccccagcagtgtttgggagccttaacaggcttgctaagtgcctgagattaaaggcgaagaggaagaagagcaagaagggcaacccggtgtttaacacacggctttcaggcgctctcaggtttcattttcctttggaatttctgctttacagacagaacaatggcagcccgagtacttataattggcagtggaggaagggaacatacgctggcctggaaacttgcacagtctcatcatgtcaaacaagtgttggttgccccaggaaacgcaggcactgcctgctctgaaaagatttcaaataccgccatctcaatcagtgaccacactgcccttgctcaattctgcaaagagaagaaaattgaatttgtagttgttggaccagaagcacctctggctgctgggattgttgggaacctgaggtctgcaggagtgcaatgctttggcccaacagcagaagcggctcagttagagtccagcaaaaggtttgccaaagagtttatggacagacatggaatcccaaccgcacaatggaaggctttcaccaaacctgaagaagcctgcagcttcattttgagtgcagacttccctgctttggttgtgaaggccagtggtcttgcagctggaaaaggggtgattgttgcaaagagcaaagaagaggcctgcaaagctgtacaagagatcatgcaggagaaagcctttggggcagctggagaaacaattgtcattgaagaacttcttgacggagaagaggtgtcgtgtctgtgtttcactgatggcaagactgtggcccccatgcccccagcacaggaccataagcgattactggagggagatggtggccctaacacagggggaatgggagcctattgtccagcccctcaggtttctaatgatctattactaaaaattaaagatactgttcttcagaggacagtggatggcatgcagcaagagggtactccatatacaggtattctctatgctggaataatgctgaccaagaatggcccaaaagttctagagtttaattgccgttttggtgatccagagtgccaagtaatcctcccacttcttaaaagtgatctttatgaagtgattcagtccaccttagatggactgctctgcacatctctgcctgtttggctagaaaaccacaccgccctaactgttgtcatggcaagtaaaggttatcctggagactacaccaagggtgtagagataacagggtttcctgaggctcaagctctaggactggaggtgttccatgcaggcactgccctcaaaaatggcaaagtagtaactcatgggggtagagttcttgcagtcacagccatccgggaaaatctcatatcagcccttgaggaagccaagaaaggactagctgctataaagtttgagggagcaatttataggaaagacatcggctttcgtgccatagctttcctccagcagcccaggagtttgacttacaaggaatctggagtagatatcgcagctggaaatatgctggtcaagaaaattcagcctttagcaaaagccacttccagatcaggctgtaaagttgatcttggaggtttgctggtctttttgatttaaaagcagctggtttcaaagatccccttctggcctctggaacagatggcgttggaactaaactaaagattgcccagctatgcaataaacatgataccattggtcaagatttggtagcaatgtgtgttaatgatattctggcacaaggagcagagcccctcttcttccttgattacttttcctgtggaaaacttgacctcagtgtaactgaagctgttgttgctggaattgctaaagcttgtggaaaagctggatgtgctctccttggaggtgaaacagcagaaatgcctgacatgtatccccctggagagtatgacctagctgggtttgccgttggtgccatggagcgagatcagaaactccctcacctggaaagaatcactgagggtgatgttgttgttggaatagcttcatctggtcttcatagcaatggatttagccttgtgaggaaaatcgtggcaaaatcttccctccagtactcctctccagcacctgatggttgtggtgaccagactttaggggacttacttctcacgcctaccagaatctacagccattcactgttacctgtcctacgttcaggacatgtcaaagcctttgcccatattactggtggaggattactagagaacatccccagagtcctccctgagaaacttggggtagatttagatgcccagacctggaggatccccagggtcttctcatggttgcagcaggaaggacacctctctgaggaagagatggccagaacatttaactgtggggttggcgctgtccttgtggtatcaaaggagcagacagagcagattctgagggatatccagcagcacaaggaagaagcctgggtgattggcagtgtggttgcacgagctgaaggttccccacgtgtgaaagtcaagaatctgattgaaagcatgcaaataaatgggtcagtgttgaagaatggctccctgacaaatcatttctcttttgaaaaaaaaaaggccagagtggctgtcttaatatctggaacaggatcgaacctgcaagcacttatagacagtactcgggaaccaaatagctctgcacaaattgatattgttatctccaacaaagccgcagtagctgggttagataaagcggaaagagctggtattcccactagagtaattaatcataaactgtataaaaatcgtgtagaatttgacagtgcaattgacctagtccttgaagagttctccatagacatagtctgtcttgcaggattcatgagaattctttctggcccctttgtccaaaagtggaatggaaaaatgctcaatatccacccatccttgctcccttcttttaagggttcaaatgcccatgagcaagccctggaaaccggagtcacagttactgggtgcactgtacactttgtagctgaagatgtggatgctggacagattattttgcaagaagctgttcccgtgaagaggggtgatactgtcgcaactctttctgaaagagtaaaattagcagaacataaaatatttcctgcagcccttcagctggtggccagtggaactgtacagcttggagaaaatggcaagatctgttgggttaaagaggaatgaagccttttaattcagaaatggggccagtttagaaagaattatttgctgtttgcatggtggttttttatcatggacttggcccaaaagaaaaactgctaaaagacaaaaaagacctcacccttacttcatctatttttttaataaatagagactcactaaaaacaagactagttagtgcagcatatctgagacatacagttttcttggtcttttttatgctctttttctaaccgtcaccccctctttttttttttggtattgcctgacaacatgatgaatcacctccatgtttataagttttatgttttcagctgggcacagtggctcacgcctgtaatcccagcactttgggaggccgaggcaggcggatcatgaggtcaggagatcgagactatcctggctaacacagtgaaatcccatctctactaaaaatacaaaaaatagttagctgggtgtggtggtacgcacctgtaatcccagctactcgggtggctgaggcaggagaatcgcttgaacccaggaagtggaggttgcagtgagccaagatcatgccactgcactccagcctgggcaacagagcgagacttgtctcaaaaaataataatgg

SEQ ID NO: 450361 - DNA, 4477 bp, Homo sapiens
ccctcctttttttttctcttttcgcgaggggatatactaaacactacgcgcgtttggccccctccctcaaatatatttccgccccaatttaatctccccccccaatttttttttttttcctaaacttcacttaggatccccaagctgtcacaaaccacaactttggagccccttcattgcttatctatctgaatttagaccccagagtctgcctctattttcccacaattctcattggtagactccgccagagcactcatcaccccctggttcctcaatgggtgtatttgtttcaccattcactgccttcatccttcccactggaaagctcctgttgaatttcccggaatttactgaccacgaaagacctaaaaatctgctcgatgttggtcgccatggcgtccgctccgttctctcaactcctcctcgctagtcctccaggctcccagcatgcctcgggaggaggcgcacgggccaattcggtctctcgccttcctgattggctccaaagggaatgcccggtccggcccgctccaccgagggaccaatcagtgagcacggccctgctctcctctgctgtttctgagcggctggggtagaggtgctgacgtttgcgccgcgcacgactatgtccgccatgttagtgtctgacgcaggcgccattacaggagccgtctctcttgaggcgaccgtgtccgcataagttgtcagtccccagcagtgtttgggagccttaacaggcttgctaagtgcctgagattaaaggcgaagaggaagaagagcaagaagggcaacccggtgtttaacacacggctttcaggcgctctcagacagaacaatggcagcccgagtacttataattggcagtggaggaagggaacatacgctggcctggaaacttgcacagtctcatcatgtcaaacaagtgttggttgccccaggaaacgcaggcactgcctgctctgaaaagatttcaaataccgccatctcaatcagtgaccacactgcccttgctcaattctgcaaagagaagaaaattgaatttgtagttgttggaccagaagcacctctggctgctgggattgttgggaacctgaggtctgcaggagtgcaatgctttggcccaacagcagaagcggctcagttagagtccagcaaaaggtttgccaaagagtttatggacagacatggaatcccaaccgcacaatggaaggctttcaccaaacctgaagaagcctgcagcttcattttgagtgcagacttccctgctttggttgtgaaggccagtggtcttgcagctggaaaaggggtgattgttgcaaagagcaaagaagaggcctgcaaagctgtacaagagatcatgcaggagaaagcctttggggcagctggagaaacaattgtcattgaagaacttcttgacggagaagaggtgtcgtgtctgtgtttcactgatggcaagactgtggcccccatgcccccagcacaggaccataagcgattactggagggagatggtggccctaacacagggggaatgggagcctattgtccagcccctcaggtttctaatgatctattactaaaaattaaagatactgttcttcagaggacagtggatggcatgcagcaagagggtactccatatacaggtattctctatgctggaataatgctgaccaagaatggcccaaaagttctagagtttaattgccgttttggtgatccagagtgccaagtaatcctcccacttcttaaaagtgatctttatgaagtgattcagtccaccttagatggactgctctgcacatctctgcctgtttggctagaaaaccacaccgccctaactgttgtcatggcaagtaaaggttatcctggagactacaccaagggtgtagagataacagggtttcctgaggctcaagctctaggactggaggtgttccatgcaggcactgccctcaaaaatggcaaagtagtaactcatgggggtagagttcttgcagtcacagccatccgggaaaatctcatatcagcccttgaggaagccaagaaaggactagctgctataaagtttgagggagcaatttataggaaagacatcggctttcgtgccatagctttcctccagcagcccaggagtttgacttacaaggaatctggagtagatatcgcagctggaaatatgctggtcaagaaaattcagcctttagcaaaagccacttccagatcaggctgtaaagttgatcttggaggtttgctggtctttttgatttaaaagcagctggtttcaaagatccccttctggcctctggaacagatggcgttggaactaaactaaagattgcccagctatgcaataaacatgataccattggtcaagatttggtagcaatgtgtgttaatgatattctggcacaaggagcagagcccctcttcttccttgattacttttcctgtggaaaacttgacctcagtgtaactgaagctgttgttgctggaattgctaaagcttgtggaaaagctggatgtgctctccttggaggtgaaacagcagaaatgcctgacatgtatccccctggagagtatgacctagctgggtttgccgttggtgccatggagcgagatcagaaactccctcacctggaaagaatcactgagggtgatgttgttgttggaatagcttcatctggtcttcatagcaatggatttagccttgtgaggaaaatcgtggcaaaatcttccctccagtactcctctccagcacctgatggttgtggtgaccagactttaggggacttacttctcacgcctaccagaatctacagccattcactgttacctgtcctacgttcaggacatgtcaaagcctttgcccatattactggtggaggattactagagaacatccccagagtcctccctgagaaacttggggtagatttagatgcccagacctggaggatccccagggtcttctcatggttgcagcaggaaggacacctctctgaggaagagatggccagaacatttaactgtggggttggcgctgtccttgtggtatcaaaggagcagacagagcagattctgagggatatccagcagcacaaggaagaagcctgggtgattggcagtgtggttgcacgagctgaaggttccccacgtgtgaaagtcaagaatctgattgaaagcatgcaaataaatgggtcagtgttgaagaatggctccctgacaaatcatttctcttttgaaaaaaaaaaggccagagtggctgtcttaatatctggaacaggatcgaacctgcaagcacttatagacagtactcgggaaccaaatagctctgcacaaattgatattgttatctccaacaaagccgcagtagctgggttagataaagcggaaagagctggtattcccactagagtaattaatcataaactgtataaaaatcgtgtagaatttgacagtgcaattgacctagtccttgaagagttctccatagacatagtctgtcttgcaggattcatgagaattctttctggcccctttgtccaaaagtggaatggaaaaatgctcaatatccacccatccttgctcccttcttttaagggttcaaatgcccatgagcaagccctggaaaccggagtcacagttactgggtgcactgtacactttgtagctgaagatgtggatgctggacagattattttgcaagaagctgttcccgtgaagaggggtgatactgtcgcaactctttctgaaagagtaaaattagcagaacataaaatatttcctgcagcccttcagctggtggccagtggaactgtacagcttggagaaaatggcaagatctgttgggttaaagaggaatgaagccttttaattcagaaatggggccagtttagaaagaattatttgctgtttgcatggtggttttttatcatggacttggcccaaaagaaaaactgctaaaagacaaaaaagacctcacccttacttcatctatttttttaataaatagagactcactaaaaacaagactagttagtgcagcatatctgagacatacagttttcttggtcttttttatgctctttttctaaccgtcaccccctctttttttttttggtattgcctgacaacatgatgaatcacctccatgtttataagttttatgttttcagctgggcacagtggctcacgcctgtaatcccagcactttgggaggccgaggcaggcggatcatgaggtcaggagatcgagactatcctggctaacacagtgaaatcccatctctactaaaaatacaaaaaatagttagctgggtgtggtggtacgcacctgtaatcccagctactcgggtggctgaggcaggagaatcgcttgaacccaggaagtggaggttgcagtgagccaagatcatgccactgcactccagcctgggcaacagagcgagacttgtctcaaaaaataataatgg

SEQ ID NO: 450362 - DNA, 3689 bp, Homo sapiens
cggtcccggtgggccgacttccggcgagcgggcaagcgggaaccaggtggccacccggtgtcggtttcattttcctttggaatttctgctttacagacagaacaatggcagcccgagtacttataattggcagtggaggaagggaacatacgctggcctggaaacttgcacagtctcatcatgtcaaacaagtgttggttgccccaggaaacgcaggcactgcctgctctgaaaagatttcaaataccgccatctcaatcagtgaccacactgcccttgctcaattctgcaaagagaagaaaattgaatttgtagttgttggaccagaagcacctctggctgctgggattgttgggaacctgaggtctgcaggagtgcaatgctttggcccaacagcagaagcggctcagttagagtccagcaaaaggtttgccaaagagtttatggacagacatggaatcccaaccgcacaatggaaggctttcaccaaacctgaagaagcctgcagcttcattttgagtgcagacttccctgctttggttgtgaaggccagtggtcttgcagctggaaaaggggtgattgttgcaaagagcaaagaagaggcctgcaaagctgtacaagagatcatgcaggagaaagcctttggggcagctggagaaacaattgtcattgaagaacttcttgacggagaagaggtgtcgtgtctgtgtttcactgatggcaagactgtggcccccatgcccccagcacaggaccataagcgattactggagggagatggtggccctaacacagggggaatgggagcctattgtccagcccctcaggtttctaatgatctattactaaaaattaaagatactgttcttcagaggacagtggatggcatgcagcaagagggtactccatatacaggtattctctatgctggaataatgctgaccaagaatggcccaaaagttctagagtttaattgccgttttggtgatccagagtgccaagtaatcctcccacttcttaaaagtgatctttatgaagtgattcagtccaccttagatggactgctctgcacatctctgcctgtttggctagaaaaccacaccgccctaactgttgtcatggcaagtaaaggttatcctggagactacaccaagggtgtagagataacagggtttcctgaggctcaagctctaggactggaggtgttccatgcaggcactgccctcaaaaatggcaaagtagtaactcatgggggtagagttcttgcagtcacagccatccgggaaaatctcatatcagcccttgaggaagccaagaaaggactagctgctataaagtttgagggagcaatttataggaaagacatcggctttcgtgccatagctttcctccagcagcccaggagtttgacttacaaggaatctggagtagatatcgcagctggaaatatgctggtcaagaaaattcagcctttagcaaaagccacttccagatcaggctgtaaagttgatcttggaggtttgctggtctttttgatttaaaagcagctggtttcaaagatccccttctggcctctggaacagatggcgttggaactaaactaaagattgcccagctatgcaataaacatgataccattggtcaagatttggtagcaatgtgtgttaatgatattctggcacaaggagcagagcccctcttcttccttgattacttttcctgtggaaaacttgacctcagtgtaactgaagctgttgttgctggaattgctaaagcttgtggaaaagctggatgtgctctccttggaggtgaaacagcagaaatgcctgacatgtatccccctggagagtatgacctagctgggtttgccgttggtgccatggagcgagatcagaaactccctcacctggaaagaatcactgagggtgatgttgttgttggaatagcttcatctggtcttcatagcaatggatttagccttgtgaggaaaatcgtggcaaaatcttccctccagtactcctctccagcacctgatggttgtggtgaccagactttaggggacttacttctcacgcctaccagaatctacagccattcactgttacctgtcctacgttcaggacatgtcaaagcctttgcccatattactggtggaggattactagagaacatccccagagtcctccctgagaaacttggggtagatttagatgcccagacctggaggatccccagggtcttctcatggttgcagcaggaaggacacctctctgaggaagagatggccagaacatttaactgtggggttggcgctgtccttgtggtatcaaaggagcagacagagcagattctgagggatatccagcagcacaaggaagaagcctgggtgattggcagtgtggttgcacgagctgaaggttccccacgtgtgaaagtcaagaatctgattgaaagcatgcaaataaatgggtcagtgttgaagaatggctccctgacaaatcatttctcttttgaaaaaattatagacagtactcgggaaccaaatagctctgcacaaattgatattgttatctccaacaaagccgcagtagctgggttagataaagcggaaagagctggtattcccactagagtaattaatcataaactgtataaaaatcgtgtagaatttgacagtgcaattgacctagtccttgaagagttctccatagacatagtctgtcttgcaggattcatgagaattctttctggcccctttgtccaaaagtggaatggaaaaatgctcaatatccacccatccttgctcccttcttttaagggttcaaatgcccatgagcaagccctggaaaccggagtcacagttactgggtgcactgtacactttgtagctgaagatgtggatgctggacagattattttgcaagaagctgttcccgtgaagaggggtgatactgtcgcaactctttctgaaagagtaaaattagcagaacataaaatatttcctgcagcccttcagctggtggccagtggaactgtacagcttggagaaaatggcaagatctgttgggttaaagaggaatgaagccttttaattcagaaatggggccagtttagaaagaattatttgctgtttgcatggtggttttttatcatggacttggcccaaaagaaaaactgctaaaagacaaaaaagacctcacccttacttcatctatttttttaataaatagagactcactaaaaacaagactagttagtgcagcatatctgagacatacagttttcttggtcttttttatgctctttttctaaccgtcaccccctctttttttttttggtattgcctgacaacatgatgaatcacctccatgtttataagttttatgttttcagctgggcacagtggctcacgcctgtaatcccagcactttgggaggccgaggcaggcggatcatgaggtcaggagatcgagactatcctggctaacacagtgaaatcccatctctactaaaaatacaaaaaatagttagctgggtgtggtggtacgcacctgtaatcccagctactcgggtggctgaggcaggagaatcgcttgaacccaggaagtggaggttgcagtgagccaagatcatgccactgcactccagcctgggcaacagagcgagacttgtctcaaaaaataataatgg

SEQ ID NO: 450363 - DNA, 2298 bp, Homo sapiens
cggacgcgtgggtcgacccacgcgtccgagcaaacagccacttccagatcaggctgtaaagttgatcttggaggtttgctggtctttttgatttaaaagcagctggtttcaaagatccccttctggcctctggaacagatggcgttggaactaaactaaagattgcccagctatgcaataaacatgataccattggtcaagatttggtagcaatgtgtgttaatgatattctggcacaaggagcagagcccctcttcttccttgattacttttcctgtggaaaacttgacctcagtgtaactgaagctgttgttgctggaattgctaaagcttgtggaaaagctggatgtgctctccttggaggtgaaacagcagaaatgcctgacatgtatccccctggagagtatgacctagctgggtttgccgttggtgccatggagcgagatcagaaactccctcacctggaaagaatcactgagggtgatgttgttgttggaatagcttcatctggtcttcatagcaatggatttagccttgtgaggaaaatcgtggcaaaatcttccctccagtactcctctccagcacctgatggttgtggtgaccagactttaggggacttacttctcacgcctaccagaatctacagccattcactgttacctgtcctacgttcaggacatgtcaaagcctttgcccatattactggtggaggattactagagaacatccccagagtcctccctgagaaacttggggtagatttagatgcccagacctggaggatccccagggtcttctcatggttgcagcaggaaggacacctctctgaggaagagatggccagaacatttaactgtggggttggcgctgtccttgtggtatcaaaggagcagacagagcagattctgagggatatccagcagcacaaggaagaagcctgggtgattggcagtgtggttgcacgagctgaaggttccccacgtgtgaaagtcaagaatctgattgaaagcatgcaaataaatgggtcagtgttgaagaatggctccctgacaaatcatttctcttttgaaaaaaaaaaggccagagtggctgtcttaatatctggaacaggatcgaacctgcaagcacttatagacagtactcgggaaccaaatagctctgcacaaattgatattgttatctccaacaaagccgcagtagctgggttagataaagcggaaagagctggtattcccactagagtaattaatcataaactgtataaaaatcgtgtagaatttgacagtgcaattgacctagtccttgaagagttctccatagacatagtctgtcttgcaggattcatgagaattctttctggcccctttgtccaaaagtggaatggaaaaatgctcaatatccacccatccttgctcccttcttttaagggttcaaatgcccatgagcaagccctggaaaccggagtcacagttactgggtgcactgtacactttgtagctgaagatgtggatgctggacagattattttgcaagaagctgttcccgtgaagaggggtgatactgtcgcaactctttctgaaagagtaaaattagcagaacataaaatatttcctgcagcccttcagctggtggccagtggaactgtacagcttggagaaaatggcaagatctgttgggttaaagaggaatgaagccttttaattcagaaatggggccagtttagaaagaattatttgctgtttgcatggtggttttttatcatggacttggcccaaaagaaaaactgctaaaagacaaaaaagacctcacccttacttcatctatttttttaataaatagagactcactaaaaacaagactagttagtgcagcatatctgagacatacagttttcttggtcttttttatgctctttttctaaccgtcaccccctctttttttttttggtattgcctgacaacatgatgaatcacctccatgtttataagttttatgttttcagctgggcacagtggctcacgcctgtaatcccagcactttgggaggccgaggcaggcggatcatgaggtcaggagatcgagactatcctggctaacacagtgaaatcccatctctactaaaaatacaaaaaatagttagctgggtgtggtggtacgcacctgtaatcccagctactcgggtggctgaggcaggagaatcgcttgaacccaggaagtggaggttgcagtgagccaagatcatgccactgcactccagcctgggcaacagagcgagacttgtctcaaaaaataataatgg

SEQ ID NO: 450364 - DNA, 1656 bp, Homo sapiens
cggacgcgtgggtcgacccacgcgtccgttcaggacatgtcaaagcctttgcccatattactggtggaggattactagagaacatccccagagtcctccctgagaaacttggggtagatttagatgcccagacctggaggatccccagggtcttctcatggttgcagcaggaaggacacctctctgaggaagagatggccagaacatttaactgtggggttggcgctgtccttgtggtatcaaaggagcagacagagcagattctgagggatatccagcagcacaaggaagaagcctgggtgattggcagtgtggttgcacgagctgaaggttccccacgtgtgaaagtcaagaatctgattgaaagcatgcaaataaatgggtcagtgttgaagaatggctccctgacaaatcatttctcttttgaaaaaaaaaaggccagagtggctgtcttaatatctggaacaggatcgaacctgcaagcacttatagacagtactcgggaaccaaatagctctgcacaaattgatattgttatctccaacaaagccgcagtagctgggttagataaagcggaaagagctggtattcccactagagtaattaatcataaactgtataaaaatcgtgtagaatttgacagtgcaattgacctagtccttgaagagttctccatagacatagtctgtcttgcaggattcatgagaattctttctggcccctttgtccaaaagtggaatggaaaaatgctcaatatccacccatccttgctcccttcttttaagggttcaaatgcccatgagcaagccctggaaaccggagtcacagttactgggtgcactgtacactttgtagctgaagatgtggatgctggacagattattttgcaagaagctgttcccgtgaagaggggtgatactgtcgcaactctttctgaaagagtaaaattagcagaacataaaatatttcctgcagcccttcagctggtggccagtggaactgtacagcttggagaaaatggcaagatctgttgggttaaagaggaatgaagccttttaattcagaaatggggccagtttagaaagaattatttgctgtttgcatggtggttttttatcatggacttggcccaaaagaaaaactgctaaaagacaaaaaagacctcacccttacttcatctatttttttaataaatagagactcactaaaaacaagactagttagtgcagcatatctgagacatacagttttcttggtcttttttatgctctttttctaaccgtcaccccctctttttttttttggtattgcctgacaacatgatgaatcacctccatgtttataagttttatgttttcagctgggcacagtggctcacgcctgtaatcccagcactttgggaggccgaggcaggcggatcatgaggtcaggagatcgagactatcctggctaacacagtgaaatcccatctctactaaaaatacaaaaaatagttagctgggtgtggtggtacgcacctgtaatcccagctactcgggtggctgaggcaggagaatcgcttgaacccaggaagtggaggttgcagtgagccaagatcatgccactgcactccagcctgggcaacagagcgagacttgtctcaaaaaataataatgg

SEQ ID NO: 450365 - DNA, 1411 bp, Homo sapiens
cggtcccggtgggccgacttccggcgagcgggcaagcgggaaccaggtggccacccggtgtcggtttcattttcctttggaatttctgctttacagacagaacaatggcagcccgagtacttataattggcagtggaggaagggaacatacgctggcctggaaacttgcacagtctcatcatgtcaaacaagtgttggttgccccaggaaacgcaggcactgcctgctctgaaaagatttcaaataccgccatctcaatcagtgaccacactgcccttgctcaattctgcaaagagaagaaaattgaatttgtagttgttggaccagaagcacctctggctgctgggattgttgggaacctgaggtctgcaggagtgcaatgctttggcccaacagcagaagcggctcagttagagtccagcaaaaggtttgccaaagagtttatggacagacatggaatcccaaccgcacaatggaaggctttcaccaaacctgaagaagcctgcagcttcattttgagtgcagacttccctgctttggttgtgaaggccagtggtcttgcagctggaaaaggggtgattgttgcaaagagcaaagaagaggcctgcaaagctgtacaagagatcatgcaggagaaagcctttggggcagctggagaaacaattgtcattgaagaacttcttgacggagaagaggtgtcgtgtctgtgtttcactgatggcaagactgtggcccccatgcccccagcacaggaccataagcgattactggagggagatggtggccctaacacagggggaatgggagcctattgtccagcccctcaggtttctaatgatctattactaaaaattaaagatactgttcttcagaggacagtggatggcatgcagcaagagggtactccatatacaggtattctctatgctggaataatgctgaccaagaatggcccaaaagttctagagtttaattgccgttttggtgatccagagtgccaagtgggtaaaaatatcaaagtattacttggtagaagatatgtggtattttaatcttggaatttatcagcctggaagtaattacctttgggaaattcatgcaagttctgctagtacaccagtgaataaaatgtttaaggaaaactaaaatttatcccacctgccatgtggattatgtttttccaggtaatcctcccacttcttaaaagtgatctttatgaagtgattcagtccaccttagatggactgctctgcacatctctgcctgtttggctagaaaaccacaccgccctaactgttgtcatggcaagtaaaggttatcctggagactacaccaagggtgtagagataacaggtgagtgtcagggagcaagaggttggagtacaacgtgacaagtgccagcaccacagca

SEQ ID NO: 450366 - DNA, 1187 bp, Homo sapiens
cggtcccggtgggccgacttccggcgagcgggcaagcgggaaccaggtggccacccggtgtcggtttcattttcctttggaatttctgctttacagacagaacaatggcagcccgagtacttataattggcagtggaggaagggaacatacgctggcctggaaacttgcacagtctcatcatgtcaaacaagtgttggttgccccaggaaacgcaggcactgcctgctctgaaaagatttcaaataccgccatctcaatcagtgaccacactgcccttgctcaattctgcaaagagaagaaaattgaatttgtagttgttggaccagaagcacctctggctgctgggattgttgggaacctgaggtctgcaggagtgcaatgctttggcccaacagcagaagcggctcagttagagtccagcaaaaggtttgccaaagagtttatggacagacatggaatcccaaccgcacaatggaaggctttcaccaaacctgaagaagcctgcagcttcattttgagtgcagacttccctgctttggttgtgaaggccagtggtcttgcagctggaaaaggggtgattgttgcaaagagcaaagaagaggcctgcaaagctgtacaagagatcatgcaggagaaagcctttggggcagctggagaaacaattgtcattgaagaacttcttgacggagaagaggtgtcgtgtctgtgtttcactgatggcaagactgtggcccccatgcccccagcacaggaccataagcgattactggagggagatggtggccctaacacagggggaatgggagcctattgtccagcccctcaggtacttcccgaagactctgctgaagtcttgtagtagtttggttttctcagagaactcttagatgatactttctattttgttttgttttctgtttgtttgttgctatgaattatgttactaatcagcaattaaatgaggagtatcttttctggtctctaaaactaacttttcctaaaagccttttttgaagaactaaaataagccaatctaaagtatagtatgggttgaatagatcctcctattccctcctctctgcagccaatttttaacacatgggagcctgtcgtggtcttggattcatctttggatatccgtggttcagcacaaaagtgttgtctgtgtgtatctgtgtgtgtgtgt

SEQ ID NO: 450367 - DNA, 620 bp, Homo sapiens
cccgggttcacgccattctcccgcctcagcctccctcagcgtccggagtagctaggactacaggcgcccgctaccacgcccggctaatttttttgtagttttagtagagacggggtttcaccgtgttagccaggatggtctccatctcctgacctcgtgatccgcccgcctcggcctcccaaagcgttgggattacaggagtgagccaccgcgcccggccggtcacagtgtccatgtaactaactcctggttaagaggatatggatagaaggcacatgttcaacttctggcttctgtccttgaaaagtgtgatgattccatcctttgctgtcttccttcccgctgactggaatgtggacttggtagtgagctaccttggactatgtggatgaagacaaagataaaaggaaccaaggactctgatgattctgtagagaagaggaaccgtagctgctcaaacgttcatgtgaaagaagaataaactatcagatttaagccactgctattttgggtctttgtgataaacagtgtttaccatatcctaattcactattccttccatttctaggtcaaccatgttgaattaaatatagtgctctaacttgcaaaatggttttatg

SEQ ID NO: 450368 - DNA, 792 bp, Homo sapiens
ggtaatttattttctctctcaaatgccaggccccggaggatcagaatcaagtcctatagcagactcctgccaccttatgcttgtcaccaacccttctcctccaaatctgatacaccagactttctgagaacctgtgctttaatgagtaaactcacacagctgcaacaaatgctgccacctcctggcatcttttaaaaaggctggagtgcagtggcatgatctcggctcactgcaacctccgcctcccgggttcaagtgattctcctgcctcagcctcccaaatagctgtgattacagggaacccgttgttgctcagacacccgatgtggaaatttttcttctccctcagttcaaatgagataaagatcctcctctcctcacagtgaacatgaggtcacagtgtccatgtaactaactcctggttaagaggatatggatagaaggcacatgttcaacttctggcttctgtccttgaaaagtgtgatgattccatcctttgctgtcttccttcccgctgactggaatgtggacttggtagtgagctaccttggactatgtggatgaagacaaagataaaaggaaccaaggactctgatgattctgtagagaagaggaaccgtagctgctcaaacgttcatgtgaaagaagaataaactatcagatttaagccactgctattttgggtctttgtgataaacagtgtttaccatatcctaattcactattccttccatttctaggtcaaccatgttgaattaaatatagtgctctaacttgcaaaatggttttatg

SEQ ID NO: 450369 - DNA, 657 bp, Homo sapiens
ggtaatttattttctctctcaaatgccaggccccggaggatcagaatcaagtcctatagcagactcctgccaccttatgcttgtcaccaacccttctcctccaaatctgatacaccagactttctgagaacctgtgctttaatgagtaaactcacacagctgcaacaaatgctgccacctcctggcatcttttaaaaaggctggagtgcagtggcatgatctcggctcactgcaacctccgcctcccgggttcaagtgattctcctgcctcagcctcccaaatagctgtgattacagttcaaatgagataaagatcctcctctcctcacagtgaacatgaggtcacagtgtccatgtaactaactcctggttaagaggatatggatagaaggcacatgttcaacttctggcttctgtccttgaaaagtgtgatgattccatcctttgctgtcttccttcccgctgactggaatgtggacttggtagtgagctaccttggactatgtggatgaagacaaagataaaaggaaccaaggactctgatgattctgtagagaagaggaaccgtagctgctcaaacgttcatgtgaaagaagaataaaccaagatgcggccggtcttattattggggcgtatgaggaggcgagacttactgcg

SEQ ID NO: 450370 - DNA, 574 bp, Homo sapiens
atattaatacgaataacagtaacaaaagaaaagagaagagctaactgcgacgactctcttaacctccaccgctacacgctggagtgcagtggcatgatctcggctcactgcaacctccgcctcccgggttcaagtgattctcctgcctcagcctcccaaatagctgtgattacaggtcacagtgtccatgtaactaactcctggttaagaggatatggatagaaggcacatgttcaacttctggcttctgtccttgaaaagtgtgatgattccatcctttgctgtcttccttcccgctgactggaatgtggacttggtagtgagctaccttggactatgtggatgaagacaaagataaaaggaaccaaggactctgatgattctgtagagaagaggaaccgtagctgctcaaacgttcatgtgaaagaagaataaactatcagatttaagccactgctattttgggtctttgtgataaacagtgtttaccatatcctaattcactattccttccatttctaggtcaaccatgttgaattaaatatagtgctctaacttgcaaaatggttttatg

SEQ ID NO: 450371 - DNA, 402 bp, Homo sapiens
cactggtaccttttgccctttaggggaggctatgagtctgggacaggaggacaaattcagagcccaaagggggaaatggaaaatctctgggtgttccttcagcctcagcctcactggtaccttctgccctttaggggaggctatgagtctgggacaggaggacaaattcagagcccagagggggaaatggagaaacctgggctgctgaggaaagccacgggtgttggcgtgaactgatgatgtctcatcccacgcccactatggccacattacctaacctctccatatctgggctattcaaggtcttggaggccagcacagacccagctagttgttgaagccagttcttttttgtcttggtcatgagggaattaaacgttttctctggcagaaaaaaaaaag

SEQ ID NO: 450372 - DNA, 299 bp, Homo sapiens
gctttggaattaggaatcccgaattcgaatcttgattttaccagtgttaggattgatttttgcctttctctgtccaagttttcttgtttctctagtggggatatttggttctcctagggctggagggatcatatgaaaattaatgcaaaagctgtgtacaggttttaagtatcaatttaaagcctggtttcagttctgtttgtcagcatgtcacaaaaagaaacatttttgctctcaacccaattttctataactcagtaattccctaaataagcaacatgtatccaagaatacctgtt

SEQ ID NO: 450373 - DNA, 6441 bp, Homo sapiens
aattcgcggccgcgtcgacagaagacgacagaagggggggtgcagacgccgtggcgctggagacccaaacatggcaaacctggaagaaagcttcccccgaggaggtacaagaaagatccacaaaccagagaaagctttccagcagtcagttgaacaagacaacttatttgatatttctactgaagagggatccaccaaaagaaaaaagagccagaaggggccagcaaaaacaaaaaagttgaaaatcgaaaagagagaaagcagcaagtccgcaagagagaagtttgaaatccttagtgttgagtccctgtgtgagggaatgcgtattttgggttgcgtgaaagaggtgaatgaactggaactggtgattagtctccccaatggcctccagggctttgtgcaagtcactgaaatctgtgatgcctacaccaaaaagctgaatgagcaggtgacacaagaacaacctctgaaggacctacttcacttgcctgaacttttctcacctggaatgctggtaagatgtgtggtgagcagtctgggcatcacagacaggggcaagaagagtgtcaagctgtctctgaaccccaaaaatgtcaacagagtgctgagtgctgaggccctgaagcctggcatgctacttacaggtaccgtatccagcctggaagaccatggctacctagtggacattggtgttgatgggaccagagcttttctgccactgctgaaagcccaggagtacatcagacagaagaacaaaggtgctaaactaaaggtgggtcagtacctgaactgcattgttgaaaaggtgaaaggcaacggaggagttgttagtctgtctgttggtcactcagaggtttctacggccattgctactgaacagcagagctggaaccttaataacttgctaccaggactggtggtcaaagctcaggtacagaaggtgactccatttggccttacgctaaacttcctcacattcttcacgggcgtggttgactttatgcacctggatcccaagaaagctggaacatatttctcaaatcaggcagtgagggcctgcatcctttgcgtccatcctcgaaccagagttgtgcacctgagcctgcgccccatcttcctacagcctggacgcccactcacccgactctcttgccagaaccttggagcagtgctggatgatgttcctgtccagggttttttcaaaaaggctggggccacctttaggctgaaggatggggttctggcctatgcccggctcagccatctctctgattctaagaacgtcttcaatcctgaggccttcaagccagggaacactcacaagtgtagaattattgactacagccaaatggatgaactggccttgctctctctacgaacgtctattattgaagctcagtaccttagatatcatgacatcgaacctggggcagtggtaaagggcacagtgctaaccataaagtcatatgggatgctggtgaaggtgggcgagcagatgaggggcctggtacctcccatgcacctggctgacatcctgatgaagaatccggagaagaagtaccacatcggggatgaggtcaagtgccgggttttgctttgtgaccctgaagccaagaagctgatgatgaccctgaaaaaaaccctgattgagtccaaactacctgtcattacctgctatgccgatgccaagcctggtctgcagacacatggcttcatcatcagggtcaaggactatggctgcattgtgaagttctacaacaatgtgcagggactggtgcccaagcatgagctcagtactgagtatatccctgacccggagagagttttttacactggccaggtggtgaaggttgtcgtattgaactgtgagccatccaaagagaggatgctcttatccttcaagctgtcgagtgatccagagccaaagaaagagcctgcaggacacagtcagaagaaaggaaaagccattaacattgggcagttggtagatgtgaaggttttagagaagaccaaagatgggctggaggtggctgtcctgccccacaacatccgtgctttcctccccacatctcatctgtcggaccacgttgccaacggcccattgttacatcattggctccaggcaggtgacatccttcaccgagtcctgtgtctgagccagagcgaggggcgtgttcttctttgcaggaagccagccttggtctccacagtagaaggtggccaggatcccaagaacttctcagaaatccatcctggaatgctgctcattggttttgtgaagagcatcaaggactatggcgtgttcatccagttcccctcaggtcttagcggactggccccaaaagctatcatgagtgacaaatttgtgacctccacaagtgaccactttgttgagggccagacagtagcggcaaaggtgaccaatgtggatgaggagaagcagcggatgctgctgtcactgcggctgtcggactgtggtctgggggacttggctatcaccagcctcctcctcctgaatcagtgcctggaggagctgcagggcgtgcgcagccttatgagcaaccgagactctgtgttgatccagacgctggccgagatgaccccaggaatgttccttgacctagtggtgcaggaggtgttggaagatggctctgtggtattcagtgggggtccagtgcccgacctggtcctgaaagccagcagataccatcgcgcagggcaggaggtggaatctgggcagaaaaagaaggttgttatcttaaatgttgatcttttgaagttggaagtgcacgtttcccttcaccaggacttggtgaatagaaaagctagaaagctgaggaaaggcagcgaacaccaggcgattgtgcagcacttggagaagtcctttgccattgcctccttggtagagacgggccacctggcagctttctccctgacctctcacctcaacgacaccttccgctttgactcagagaaattgcaggtgggacagggtgtctccctaaccctcaagaccacagaaccaggagtgactggccttcttttggctgtggaggggccggctgccaagaggaccatgaggccgacccagaaggactctgagacagttgatgaggatgaagaagtggatccagctctgactgtagggaccataaagaagcacaccctctccatcggggacatggtcacagggactgtcaagtccattaagcctacccatgtggttgtgactctggaagatggcattattggctgtatccatgcctcccacattctagatgatgttccagagggcacctctcctactaccaagctgaaggttgggaagacggtcactgcccgagtgattggcgggcgagacatgaagacattcaagtatctcccaataagtcaccccagattcgttcgaaccatcccggagctgagtgttcggccaagtgagctggaggatggccacactgctcttaacactcactctgttagccccatggagaagattaaacagtaccaggccggccagactgttacttgcttcttaaagaaatacaatgtggtgaagaaatggcttgaggtggagattgccccagacatccgggggagaattcccttattgctcacttctctgagcttcaaggttctgaagcatccagataagaagttccgggttggccaggccctgagggccaccgttgttggcccagattcctccaagaccttcttatgtctgtccctcacaggtcctcacaagcttgaggaaggggaagtggccatgggccgagtggtgaaggtgactcccaacgaggggctgaccgtctccttcccctttgggaagataggaacagtcagtatatttcacatgagtgactcctactccgagacgcccctggaagacttcgtcccccagaaggttgtcagatgttacatcctgtccactgcagacaacgtattgactttgtcgctgcgatcatccagaacaaacccggagacgaaaagcaaagtagaagatccagagattaactccatccaggacattaaggaagggcagcttctgaggggctatgtagggtccatccagccacacggtgtgttctttcgccttggcccctccgttgtgggtttggctcggtactcccatgtctcccagcacagcccgtccaagaaagccctttataacaaacacctccctgaagggaagctgctcacagccagggtcctacgccttaaccaccagaagaacctggtagagctgtctttcctccccggagacactgggaagccagacgtgctttctgcttccttggaagggcaacttacaaagcaagaggagaggaaaacagaggctgaggagagagaccaaaaaggggaaaagaaaaatcagaaaaggaacgagaagaagaaccagaaggggcaggaggaggtggagatgcccagcaaggagaagcaacagccccagaagccacaggcgcagaagcggggcgggcgggagtgccgggagtctgggagtgagcaggaaagagtgagcaagaagccaaagaaagccggcctgtcagaggaggacgacagccttgtggacgtgtactatcgggagggaaaagaggaggcagaagagacgaatgtgctgcccaaggagaagcaaaccaagccagcagaagcgccccggctgcagctgtcttcaggcttcgcttggaatgtgggactagactctctgaccccggccttgccacctctagcagagagctcagacagcgaggaggatgagaagccacaccaagccacgataaagaaaagcaagaaagaaagggagttggagaagcagaaggcagagaaggaactgtcccgcattgaggaggcgctgatggatcctgggcggcagccagagtccgcggatgattttgaccgactggtgctgagctcccccaacagctccattctgtggctgcagtacatggctttccacctgcaggccacggagatcgagaaggcccgtgccgtggctgagagggcccttaagaccatctccttcagagaggagcaggagaagctgaacgtgtgggtggctctgctgaacctggagaacatgtacggctctcaggagtccctgaccaaggtctttgagcgagccgtgcagtacaacgagcctctcaaagtctttctccacctggctgacatctacgccaagtcagagaaattccaggaagctggtgaactctacaaccggatgctgaagcgtttccggcaggagaaagctgtgtggatcaaatacggcgccttccttctgcggaggagccaggctgcagccagtcaccgcgtgctgcagcgagccctggagtgcctgcctagcaaggagcatgtggatgtcattgccaagtttgcccagcttgagtttcagctgggggatgcagagcgggccaaagccatttttgagaacacgctgagcacctacccaaagcgcacagatgtctggtcggtctatatcgacatgaccatcaagcacggcagccagaaggacgtccgggacatctttgagcgggtcattcatctgagcttggcccccaagagaatgaagttcttcttcaagcgctacctggactacgagaagcagcatggcactgagaaggatgtgcaggcagtcaaggccaaggccctggagtatgtggaggccaagagctcagtgctagaggcctagtggcaggctggctctgtgggacactgtcaacaatgggccagcccggccccgcctcgagtgcctgggcactcggaaaactgttacctcaggactctatttaaatgctgctttttctgcagcacgcttggggaaatcctgtcaggatgaaaaggaagttgagattttttaaatccctcttcgcttgctttattttcagtaccaacttgttatctttttccttatctgaggctacctggggattgtgggcagcaggcccctggactcccagaaatgctgagggtccctcttccaggggagttccctggggagcaagagtagaggggctattcccgagggtcctgtggtcagggtcctgctttgtccctggcaggctgtcagtccagctggagggggtcagtaggctccagggagtgggccctcccctccgatcttggagtctctgggtgttccttcagcctcagcctcactggtaccttctgccctttaggggaggctatgagtctgggacaggaggacaaattcagagcccagagggggaaatggagaaacctgggctgctgaggaaagccacgggtgttggcgtgaactgatgatgtctcatcccacgcccactatggccacattacctaacctctccatatctgggctattcaaggtcttggaggccagcacagacccagctagttgttgaagccagttcttttttgtcttggtcatgagggaattaaacgttttctctggcagaaaaaaaaaag

SEQ ID NO: 450374 - DNA, 4625 bp, Homo sapiens
  misc_feature (11)..(11): n is a, c, g, or t
tcgagctcggnacccatcctccctgtggtgaaggttgtcgtattgaactgtgagccatccaaagagaggatgctcttatccttcaagctgtcgagtgatccagagccaaagaaagagcctgcaggacacagtcagaagaaaggaaaagccattaacattgggcagttggtagatgtgaaggttttagagaagaccaaagatgggctggaggtggctgtcctgccccacaacatccgtgctttcctccccacatctcatctgtcggaccacgttgccaacggcccattgttacatcattggctccaggcaggtgacatccttcaccgagtcctgtgtctgagccagagcgaggggcgtgttcttctttgcaggaagccagccttggtctccacagtagaaggtggccaggatcccaagaacttctcagaaatccatcctggaatgctgctcattggttttgtgaagagcatcaaggactatggcgtgttcatccagttcccctcaggtcttagcggactggccccaaaagctatcatgagtgacaaatttgtgacctccacaagtgaccactttgttgagggccagacagtagcggcaaaggtgaccaatgtggatgaggagaagcagcggatgctgctgtcactgcggctgtcggactgtggtctgggggacttggctatcaccagcctcctcctcctgaatcagtgcctggaggagctgcagggcgtgcgcagccttatgagcaaccgagactctgtgttgatccagacgctggccgagatgaccccaggaatgttccttgacctagtggtgcaggaggtgttggaagatggctctgtggtattcagtgggggtccagtgcccgacctggtcctgaaagccagcagataccatcgcgcagggcaggaggtggaatctgggcagaaaaagaaggttgttatcttaaatgttgatcttttgaagttggaagtgcacgtttcccttcaccaggacttggtgaatagaaaagctagaaagctgaggaaaggcagcgaacaccaggcgattgtgcagcacttggagaagtcctttgccattgcctccttggtagagacgggccacctggcagctttctccctgacctctcacctcaacgacaccttccgctttgactcagagaaattgcaggtgggacagggtgtctccctaaccctcaagaccacagaaccaggagtgactggccttcttttggctgtggaggggccggctgccaagaggaccatgaggccgacccagaaggactctgagacagttgatgaggatgaagaagtggatccagctctgactgtagggaccataaagaagcacaccctctccatcggggacatggtcacagggactgtcaagtccattaagcctacccatgtggttgtgactctggaagatggcattattggctgtatccatgcctcccacattctagatgatgttccagagggcacctctcctactaccaagctgaaggttgggaagacggtcactgcccgagtgattggcgggcgagacatgaagacattcaagtatctcccaataagtcaccccagattcgttcgaaccatcccggagctgagtgttcggccaagtgagctggaggatggccacactgctcttaacactcactctgttagccccatggagaagattaaacagtaccaggccggccagactgttacttgcttcttaaagaaatacaatgtggtgaagaaatggcttgaggtggagattgccccagacatccgggggagaattcccttattgctcacttctctgagcttcaaggttctgaagcatccagataagaagttccgggttggccaggccctgagggccaccgttgttggcccagattcctccaagaccttcttatgtctgtccctcacaggtcctcacaagcttgaggaaggggaagtggccatgggccgagtggtgaaggtgactcccaacgaggggctgaccgtctccttcccctttgggaagataggaacagtcagtatatttcacatgagtgactcctactccgagacgcccctggaagacttcgtcccccagaaggttgtcagatgttacatcctgtccactgcagacaacgtattgactttgtcgctgcgatcatccagaacaaacccggagacgaaaagcaaagtagaagatccagagattaactccatccaggacattaaggaagggcagcttctgaggggctatgtagggtccatccagccacacggtgtgttctttcgccttggcccctccgttgtgggtttggctcggtactcccatgtctcccagcacagcccgtccaagaaagccctttataacaaacacctccctgaagggaagctgctcacagccagggtcctacgccttaaccaccagaagaacctggtagagctgtctttcctccccggagacactgggaagccagacgtgctttctgcttccttggaagggcaacttacaaagcaagaggagaggaaaacagaggctgaggagagagaccaaaaaggggaaaagaaaaatcagaaaaggaacgagaagaagaaccagaaggggcaggaggaggtggagatgcccagcaaggagaagcaacagccccagaagccacaggcgcagaagcggggcgggcgggagtgccgggagtctgggagtgagcaggaaagagtgagcaagaagccaaagaaagccggcctgtcagaggaggacgacagccttgtggacgtgtactatcgggagggaaaagaggaggcagaagagacgaatgtgctgcccaaggagaagcaaaccaagccagcagaagcgccccggctgcagctgtcttcaggcttcgcttggaatgtgggactagactctctgaccccggccttgccacctctagcagagagctcagacagcgaggaggatgagaagccacaccaagccacgataaagaaaagcaagaaagaaagggagttggagaagcagaaggcagagaaggaactgtcccgcattgaggaggcgctgatggatcctgggcggcagccagagtccgcggatgattttgaccgactggtgctgagctcccccaacagctccattctgtggctgcagtacatggctttccacctgcaggccacggagatcgagaaggcccgtgccgtggctgagagggcccttaagaccatctccttcagagaggagcaggagaagctgaacgtgtgggtggctctgctgaacctggagaacatgtacggctctcaggagtccctgaccaaggtctttgagcgagccgtgcagtacaacgagcctctcaaagtctttctccacctggctgacatctacgccaagtcagagaaattccaggaagctggtgaactctacaaccggatgctgaagcgtttccggcaggagaaagctgtgtggatcaaatacggcgccttccttctgcggaggagccaggctgcagccagtcaccgcgtgctgcagcgagccctggagtgcctgcctagcaaggagcatgtggatgtcattgccaagtttgcccagcttgagtttcagctgggggatgcagagcgggccaaagccatttttgagaacacgctgagcacctacccaaagcgcacagatgtctggtcggtctatatcgacatgaccatcaagcacggcagccagaaggacgtccgggacatctttgagcgggtcattcatctgagcttggcccccaagagaatgaagttcttcttcaagcgctacctggactacgagaagcagcatggcactgagaaggatgtgcaggcagtcaaggccaaggccctggagtatgtggaggccaagagctcagtgctagaggcctagtggcaggctggctctgtgggacactgtcaacaatgggccagcccggccccgcctcgagtgcctgggcactcggaaaactgttacctcaggactctatttaaatgctgctttttctgcagcacgcttggggaaatcctgtcaggatgaaaaggaagttgagattttttaaatccctcttcgcttgctttattttcagtaccaacttgttatctttttccttatctgaggctacctggggattgtgggcagcaggcccctggactcccagaaatgctgagggtccctcttccaggggagttccctggggagcaagagtagaggggctattcccgagggtcctgtggtcagggtcctgctttgtccctggcaggctgtcagtccagctggagggggtcagtaggctccagggagtgggccctcccctccgatcttggagtctctgggtgttccttcagcctcagcctcactggtaccttctgccctttaggggaggctatgagtctgggacaggaggacaaattcagagcccagagggggaaatggagaaacctgggctgctgaggaaagccacgggtgttggcgtgaactgatgatgtctcatcccacgcccactatggccacattacctaacctctccatatctgggctattcaaggtcttggaggccagcacagacccagctagttgttgaagccagttcttttttgtcttggtcatgagggaattaaacgttttctctggcagaaaaaaaaaag

SEQ ID NO: 450375 - DNA, 4138 bp, Homo sapiens
aaccaaaggaaagcctgtcttcctggtatttgttggctactcccatgaattatggtcaggtaggattattagcaaggggcttaggtctgtctgcttgtgacaagagttttcatggatactgaacatttttgcaaaaagtgattttaccttgtcagtggttccagtgctccactgtcctccgtggtgatagcacactgccagaggaaaagaacagtgagagttctttcatggtactaatccgtgtttcctttggatctctggcagactctgtgttgatccagacgctggccgagatgaccccaggaatgttccttgacctagtggtgcaggaggtgttggaagatggctctgtggtattcagtgggggtccagtgcccgacctggtcctgaaagccagcagataccatcgcgcagggcaggaggtggaatctgggcagaaaaagaaggttgttatcttaaatgttgatcttttgaagttggaagtgcacgtttcccttcaccaggacttggtgaatagaaaagctagaaagctgaggaaaggcagcgaacaccaggcgattgtgcagcacttggagaagtcctttgccattgcctccttggtagagacgggccacctggcagctttctccctgacctctcacctcaacgacaccttccgctttgactcagagaaattgcaggtgggacagggtgtctccctaaccctcaagaccacagaaccaggagtgactggccttcttttggctgtggaggggccggctgccaagaggaccatgaggccgacccagaaggactctgagacagttgatgaggatgaagaagtggatccagctctgactgtagggaccataaagaagcacaccctctccatcggggacatggtcacagggactgtcaagtccattaagcctacccatgtggttgtgactctggaagatggcattattggctgtatccatgcctcccacattctagatgatgttccagagggcacctctcctactaccaagctgaaggttgggaagacggtcactgcccgagtgattggcgggcgagacatgaagacattcaagtatctcccaataagtcaccccagattcgttcgaaccatcccggagctgagtgttcggccaagtgagctggaggatggccacactgctcttaacactcactctgttagccccatggagaagattaaacagtaccaggccggccagactgttacttgcttcttaaagaaatacaatgtggtgaagaaatggcttgaggtggagattgccccagacatccgggggagaattcccttattgctcacttctctgagcttcaaggttctgaagcatccagataagaagttccgggttggccaggccctgagggccaccgttgttggcccagattcctccaagaccttcttatgtctgtccctcacaggtcctcacaagcttgaggaaggggaagtggccatgggccgagtggtgaaggtgactcccaacgaggggctgaccgtctccttcccctttgggaagataggaacagtcagtatatttcacatgagtgactcctactccgagacgcccctggaagacttcgtcccccagaaggttgtcagatgttacatcctgtccactgcagacaacgtattgactttgtcgctgcgatcatccagaacaaacccggagacgaaaagcaaagtagaagatccagagattaactccatccaggacattaaggaagggcagcttctgaggggctatgtagggtccatccagccacacggtgtgttctttcgccttggcccctccgttgtgggtttggctcggtactcccatgtctcccagcacagcccgtccaagaaagccctttataacaaacacctccctgaagggaagctgctcacagccagggtcctacgccttaaccaccagaagaacctggtagagctgtctttcctccccggagacactgggaagccagacgtgctttctgcttccttggaagggcaacttacaaagcaagaggagaggaaaacagaggctgaggagagagaccaaaaaggggaaaagaaaaatcagaaaaggaacgagaagaagaaccagaaggggcaggaggaggtggagatgcccagcaaggagaagcaacagccccagaagccacaggcgcagaagcggggcgggcgggagtgccgggagtctgggagtgagcaggaaagagtgagcaagaagccaaagaaagccggcctgtcagaggaggacgacagccttgtggacgtgtactatcgggagggaaaagaggaggcagaagagacgaatgtgctgcccaaggagaagcaaaccaagccagcagaagcgccccggctgcagctgtcttcaggcttcgcttggaatgtgggactagactctctgaccccggccttgccacctctagcagagagctcagacagcgaggaggatgagaagccacaccaagccacgataaagaaaagcaagaaagaaagggagttggagaagcagaaggcagagaaggaactgtcccgcattgaggaggcgctgatggatcctgggcggcagccagagtccgcggatgattttgaccgactggtgctgagctcccccaacagctccattctgtggctgcagtacatggctttccacctgcaggccacggagatcgagaaggcccgtgccgtggctgagagggcccttaagaccatctccttcagagaggagcaggagaagctgaacgtgtgggtggctctgctgaacctggagaacatgtacggctctcaggagtccctgaccaaggtctttgagcgagccgtgcagtacaacgagcctctcaaagtctttctccacctggctgacatctacgccaagtcagagaaattccaggaagctggtgaactctacaaccggatgctgaagcgtttccggcaggagaaagctgtgtggatcaaatacggcgccttccttctgcggaggagccaggctgcagccagtcaccgcgtgctgcagcgagccctggagtgcctgcctagcaaggagcatgtggatgtcattgccaagtttgcccagcttgagtttcagctgggggatgcagagcgggccaaagccatttttgagaacacgctgagcacctacccaaagcgcacagatgtctggtcggtctatatcgacatgaccatcaagcacggcagccagaaggacgtccgggacatctttgagcgggtcattcatctgagcttggcccccaagagaatgaagttcttcttcaagcgctacctggactacgagaagcagcatggcactgagaaggatgtgcaggcagtcaaggccaaggccctggagtatgtggaggccaagagctcagtgctagaggcctagtggcaggctggctctgtgggacactgtcaacaatgggccagcccggccccgcctcgagtgcctgggcactcggaaaactgttacctcaggactctatttaaatgctgctttttctgcagcacgcttggggaaatcctgtcaggatgaaaaggaagttgagattttttaaatccctcttcgcttgctttattttcagtaccaacttgttatctttttccttatctgaggctacctggggattgtgggcagcaggcccctggactcccagaaatgctgagggtccctcttccaggggagttccctggggagcaagagtagaggggctattcccgagggtcctgtggtcagggtcctgctttgtccctggcaggctgtcagtccagctggagggggtcagtaggctccagggagtgggccctcccctccgatcttggagtctctgggtgttccttcagcctcagcctcactggtaccttctgccctttaggggaggctatgagtctgggacaggaggacaaattcagagcccagagggggaaatggagaaacctgggctgctgaggaaagccacgggtgttggcgtgaactgatgatgtctcatcccacgcccactatggccacattacctaacctctccatatctgggctattcaaggtcttggaggccagcacagacccagctagttgttgaagccagttcttttttgtcttggtcatgagggaattaaacgttttctctggcagaaaaaaaaaag

SEQ ID NO: 450376 - DNA, 2250 bp, Homo sapiens
  misc_feature (13)..(13): n is a, c, g, or t
  misc_feature (16)..(16): n is a, c, g, or t
  misc_feature (24)..(24): n is a, c, g, or t
tgcattgtggtcnccncggggtantgggatatcgtcgtacccgcgcgcctcgagtctgtctttcctccccggagacactgggaagccagacgtgctttctgcttccttggaagggcaacttacaaagcaagaggagaggaaaacagaggctgaggagagagaccaaaaaggggaaaagaaaaatcagaaaaggaacgagaagaagaaccagaaggggcaggaggaggtggagatgcccagcaaggagaagcaacagccccagaagccacaggcgcagaagcggggcgggcgggagtgccgggagtctgggagtgagcaggaaagagtgagcaagaagccaaagaaagccggcctgtcagaggaggacgacagccttgtggacgtgtactatcgggagggaaaagaggaggcagaagagacgaatgtgctgcccaaggagaagcaaaccaagccagcagaagcgccccggctgcagctgtcttcaggcttcgcttggaatgtgggactagactctctgaccccggccttgccacctctagcagagagctcagacagcgaggaggatgagaagccacaccaagccacgataaagaaaagcaagaaagaaagggagttggagaagcagaaggcagagaaggaactgtcccgcattgaggaggcgctgatggatcctgggcggcagccagagtccgcggatgattttgaccgactggtgctgagctcccccaacagctccattctgtggctgcagtacatggctttccacctgcaggccacggagatcgagaaggcccgtgccgtggctgagagggcccttaagaccatctccttcagagaggagcaggagaagctgaacgtgtgggtggctctgctgaacctggagaacatgtacggctctcaggagtccctgaccaaggtctttgagcgagccgtgcagtacaacgagcctctcaaagtctttctccacctggctgacatctacgccaagtcagagaaattccaggaagctggtgaactctacaaccggatgctgaagcgtttccggcaggagaaagctgtgtggatcaaatacggcgccttccttctgcggaggagccaggctgcagccagtcaccgcgtgctgcagcgagccctggagtgcctgcctagcaaggagcatgtggatgtcattgccaagtttgcccagcttgagtttcagctgggggatgcagagcgggccaaagccatttttgagaacacgctgagcacctacccaaagcgcacagatgtctggtcggtctatatcgacatgaccatcaagcacggcagccagaaggacgtccgggacatctttgagcgggtcattcatctgagcttggcccccaagagaatgaagttcttcttcaagcgctacctggactacgagaagcagcatggcactgagaaggatgtgcaggcagtcaaggccaaggccctggagtatgtggaggccaagagctcagtgctagaggcctagtggcaggctggctctgtgggacactgtcaacaatgggccagcccggccccgcctcgagtgcctgggcactcggaaaactgttacctcaggactctatttaaatgctgctttttctgcagcacgcttggggaaatcctgtcaggatgaaaaggaagttgagattttttaaatccctcttcgcttgctttattttcagtaccaacttgttatctttttccttatctgaggctacctggggattgtgggcagcaggcccctggactcccagaaatgctgagggtccctcttccaggggagttccctggggagcaagagtagaggggctattcccgagggtcctgtggtcagggtcctgctttgtccctggcaggctgtcagtccagctggagggggtcagtaggctccagggagtgggccctcccctccgatcttggagtctctgggtgttccttcagcctcagcctcactggtaccttctgccctttaggggaggctatgagtctgggacaggaggacaaattcagagcccagagggggaaatggagaaacctgggctgctgaggaaagccacgggtgttggcgtgaactgatgatgtctcatcccacgcccactatggccacattacctaacctctccatatctgggctattcaaggtcttggaggccagcacagacccagctagttgttgaagccagttcttttttgtcttggtcatgagggaattaaacgttttctctggcagaaaaaaaaaag

SEQ ID NO: 450377 - DNA, 4964 bp, Homo sapiens
aagaattgcactggactgtgggtatcctggtctccgcgtgtgtgagtaccgcggcgcgaggttagtggtagctgggtgcagacgccgtggcgctggagacccaaacatggcaaacctggaagaaagcttcccccgaggaggtacaagaaagatccacaaaccagagaaagctttccagcagtcagttgaacaagacaacttatttgatatttctactgaagagggatccaccaaaagaaaaaagagccagaaggggccagcaaaaacaaaaaagttgaaaatcgaaaagagagaaagcagcaagtccgcaagagagaagtttgaaatccttagtgttgagtccctgtgtgagggaatgcgtattttgggttgcgtgaaagaggtgaatgaactggaactggtgattagtctccccaatggcctccagggctttgtgcaagtcactgaaatctgtgatgcctacaccaaaaagctgaatgagcaggtgacacaagaacaacctctgaaggacctacttcacttgcctgaacttttctcacctggaatgctggtaagatgtgtggtgagcagtctgggcatcacagacaggggcaagaagagtgtcaagctgtctctgaaccccaaaaatgtcaacagagtgctgagtgctgaggccctgaagcctggcatgctacttacaggtaccgtatccagcctggaagaccatggctacctagtggacattggtgttgatgggaccagagcttttctgccactgctgaaagcccaggagtacatcagacagaagaacaaaggtgctaaactaaaggtgggtcagtacctgaactgcattgttgaaaaggtgaaaggcaacggaggagttgttagtctgtctgttggtcactcagaggtttctacggccattgctactgaacagcagagctggaaccttaataacttgctaccaggactggtggtcaaagctcaggtacagaaggtgactccatttggccttacgctaaacttcctcacattcttcacgggcgtggttgactttatgcacctggatcccaagaaagctggaacatatttctcaaatcaggcagtgagggcctgcatcctttgcgtccatcctcgaaccagagttgtgcacctgagcctgcgccccatcttcctacagcctggacgcccactcacccgactctcttgccagaaccttggagcagtgctggatgatgttcctgtccagggttttttcaaaaaggctggggccacctttaggctgaaggatggggttctggcctatgcccggctcagccatctctctgattctaagaacgtcttcaatcctgaggccttcaagccagggaacactcacaagtgtagaattattgactacagccaaatggatgaactggccttgctctctctacgaacgtctattattgaagctcagtaccttagatatcatgacatcgaacctggggcagtggtaaagggcacagtgctaaccataaagtcatatgggatgctggtgaaggtgggcgagcagatgaggggcctggtacctcccatgcacctggctgacatcctgatgaagaatccggagaagaagtaccacatcggggatgaggtcaagtgccgggttttgctttgtgaccctgaagccaagaagctgatgatgaccctgaaaaaaaccctgattgagtccaaactacctgtcattacctgctatgccgatgccaagcctggtctgcagacacatggcttcatcatcagggtcaaggactatggctgcattgtgaagttctacaacaatgtgcagggactggtgcccaagcatgagctcagtactgagtatatccctgacccggagagagttttttacactggccaggtggtgaaggttgtcgtattgaactgtgagccatccaaagagaggatgctcttatccttcaagctgtcgagtgatccagagccaaagaaagagcctgcaggacacagtcagaagaaaggaaaagccattaacattgggcagttggtagatgtgaaggttttagagaagaccaaagatgggctggaggtggctgtcctgccccacaacatccgtgctttcctccccacatctcatctgtcggaccacgttgccaacggcccattgttacatcattggctccaggcaggtgacatccttcaccgagtcctgtgtctgagccagagcgaggggcgtgttcttctttgcaggaagccagccttggtctccacagtagaaggtggccaggatcccaagaacttctcagaaatccatcctggaatgctgctcattggttttgtgaagagcatcaaggactatggcgtgttcatccagttcccctcaggtcttagcggactggccccaaaagctatcatgagtgacaaatttgtgacctccacaagtgaccactttgttgagggccagacagtagcggcaaaggtgaccaatgtggatgaggagaagcagcggatgctgctgtcactgcggctgtcggactgtggtctgggggacttggctatcaccagcctcctcctcctgaatcagtgcctggaggagctgcagggcgtgcgcagccttatgagcaaccgagactctgtgttgatccagacgctggccgagatgaccccaggaatgttccttgacctagtggtgcaggaggtgttggaagatggctctgtggtattcagtgggggtccagtgcccgacctggtcctgaaagccagcagataccatcgcgcagggcaggaggtggaatctgggcagaaaaagaaggttgttatcttaaatgttgatcttttgaagttggaagtgcacgtttcccttcaccaggacttggtgaatagaaaagctagaaagctgaggaaaggcagcgaacaccaggcgattgtgcagcacttggagaagtcctttgccattgcctccttggtagagacgggccacctggcagctttctccctgacctctcacctcaacgacaccttccgctttgactcagagaaattgcaggtgggacagggtgtctccctaaccctcaagaccacagaaccaggagtgactggccttcttttggctgtggaggggccggctgccaagaggaccatgaggccgacccagaaggactctgagacagttgatgaggatgaagaagtggatccagctctgactgtagggaccataaagaagcacaccctctccatcggggacatggtcacagggactgtcaagtccattaagcctacccatgtggttgtgactctggaagatggcattattggctgtatccatgcctcccacattctagatgatgttccagagggcacctctcctactaccaagctgaaggttgggaagacggtcactgcccgagtgattggcgggcgagacatgaagacattcaagtatctcccaataagtcaccccagattcgttcgaaccatcccggagctgagtgttcggccaagtgagctggaggatggccacactgctcttaacactcactctgttagccccatggagaagattaaacagtaccaggccggccagactgttacttgcttcttaaagaaatacaatgtggtgaagaaatggcttgaggtggagattgccccagacatccgggggagaattcccttattgctcacttctctgagcttcaaggttctgaagcatccagataagaagttccgggttggccaggccctgagggccaccgttgttggcccagattcctccaagaccttcttatgtctgtccctcacaggtcctcacaagcttgaggaaggggaagtggccatgggccgagtggtgaaggtgactcccaacgaggggctgaccgtctccttcccctttgggaagataggaacagtcagtatatttcacatgagtgactcctactccgagacgcccctggaagacttcgtcccccagaaggttgtcagatgttacatcctgtccactgcagacaacgtattgactttgtcgctgcgatcatccagaacaaacccggagacgaaaagcaaagtagaagatccagagattaactccatccaggacattaaggaagggcagcttctgaggggctatgtagggtccatccagccacacggtgtgttctttcgccttggcccctccgttgtgggtttggctcggtactcccatgtctcccagcacagcccgtccaagaaagccctttataacaaacacctccctgaagggaagctgctcacagccagggtcctacgccttaaccaccagaagaacctggtagagctgtctttcctccccggagacactgggaagccagacgtgctttctgcttccttggaagggcaacttacaaagcaagaggagaggaaaacagaggctgaggagagagaccaaaaaggggaaaagaaaaatcagaaaaggaacgagaagaagaaccagaaggggcaggaggaggtggagatgcccagcaaggagaagcaacagccccagaagccacaggcgcagaagcggggcgggcgggagtgccgggagtctgggagtgagcaggaaagagtgagcaagaagccaaagaaagccggcgctgtcagtccagctggagggggtcagtaggctccagggagtgggccctcccctccgatcttggagtctctgggtgttccttcagcctcagcctcactggtaccttctgccctttaggggaggctatgagtctgggacaggaggacaaattcagagcccagagggggaaatggagaaacctgggctgctgaggaaagccacgggtgttggcgtgaactgatgatgtctcatcccacgcccactatggccacattacctaacctctccatatctgggctattcaaggtcttggaggccagcacagacccagctagttgttgaagccagttcttttttgtcttggtcatgagggaattaaacgttttctctggcagaaaaaaaaaag

SEQ ID NO: 450378 - DNA, 4209 bp, Homo sapiens
aagaattgcactggactgtgggtatcctggtctccgcgtgtgtgagtaccgcggcgcgaggttagtggtagctgggtgcagacgccgtggcgctggagacccaaacatggcaaacctggaagaaagcttcccccgaggaggtacaagaaagatccacaaaccagagaaagctttccagcagtcagttgaacaagacaacttatttgatatttctactgaagagggatccaccaaaagaaaaaagagccagaaggggccagcaaaaacaaaaaagttgaaaatcgaaaagagagaaagcagcaagtccgcaagagagaagtttgaaatccttagtgttgagtccctgtgtgagggaatgcgtattttgggttgcgtgaaagaggtgaatgaactggaactggtgattagtctccccaatggcctccagggctttgtgcaagtcactgaaatctgtgatgcctacaccaaaaagctgaatgagcaggtgacacaagaacaacctctgaaggacctacttcacttgcctgaacttttctcacctggaatgctggtaagatgtgtggtgagcagtctgggcatcacagacaggggcaagaagagtgtcaagctgtctctgaaccccaaaaatgtcaacagagtgctgagtgctgaggccctgaagcctggcatgctacttacaggtaccgtatccagcctggaagaccatggctacctagtggacattggtgttgatgggaccagagcttttctgccactgctgaaagcccaggagtacatcagacagaagaacaaaggtgctaaactaaaggtgggtcagtacctgaactgcattgttgaaaaggtgaaaggcaacggaggagttgttagtctgtctgttggtcactcagaggtttctacggccattgctactgaacagcagagctggaaccttaataacttgctaccaggactggtggtcaaagctcaggtacagaaggtgactccatttggccttacgctaaacttcctcacattcttcacgggcgtggttgactttatgcacctggatcccaagaaagctggaacatatttctcaaatcaggcagtgagggcctgcatcctttgcgtccatcctcgaaccagagttgtgcacctgagcctgcgccccatcttcctacagcctggacgcccactcacccgactctcttgccagaaccttggagcagtgctggatgatgttcctgtccagggttttttcaaaaaggctggggccacctttaggctgaaggatggggttctggcctatgcccggctcagccatctctctgattctaagaacgtcttcaatcctgaggccttcaagccagggaacactcacaagtgtagaattattgactacagccaaatggatgaactggccttgctctctctacgaacgtctattattgaagctcagtaccttagatatcatgacatcgaacctggggcagtggtaaagggcacagtgctaaccataaagtcatatgggatgctggtgaaggtgggcgagcagatgaggggcctggtacctcccatgcacctggctgacatcctgatgaagaatccggagaagaagtaccacatcggggatgaggtcaagtgccgggttttgctttgtgaccctgaagccaagaagctgatgatgaccctgaaaaaaaccctgattgagtccaaactacctgtcattacctgctatgccgatgccaagcctggtctgcagacacatggcttcatcatcagggtcaaggactatggctgcattgtgaagttctacaacaatgtgcagggactggtgcccaagcatgagctcagtactgagtatatccctgacccggagagagttttttacactggccaggtggtgaaggttgtcgtattgaactgtgagccatccaaagagaggatgctcttatccttcaagctgtcgagtgatccagagccaaagaaagagcctgcaggacacagtcagaagaaaggaaaagccattaacattgggcagttggtagatgtgaaggttttagagaagaccaaagatgggctggaggtggctgtcctgccccacaacatccgtgctttcctccccacatctcatctgtcggaccacgttgccaacggcccattgttacatcattggctccaggcaggtgacatccttcaccgagtcctgtgtctgagccagagcgaggggcgtgttcttctttgcaggaagccagccttggtctccacagtagaaggtggccaggatcccaagaacttctcagaaatccatcctggaatgctgctcattggttttgtgaagagcatcaaggactatggcgtgttcatccagttcccctcaggtcttagcggactggccccaaaagctatcatgagtgacaaatttgtgacctccacaagtgaccactttgttgagggccagacagtagcggcaaaggtgaccaatgtggatgaggagaagcagcggatgctgctgtcactgcggctgtcggactgtggtctgggggacttggctatcaccagcctcctcctcctgaatcagtgcctggaggagctgcagggcgtgcgcagccttatgagcaaccgagactctgtgttgatccagacgctggccgagatgaccccaggaatgttccttgacctagtggtgcaggaggtgttggaagatggctctgtggtattcagtgggggtccagtgcccgacctggtcctgaaagccagcagataccatcgcgcagggcaggaggtggaatctgggcagaaaaagaaggttgttatcttaaatgttgatcttttgaagttggaagtgcacgtttcccttcaccaggacttggtgaatagaaaagctagaaagctgaggaaaggcagcgaacaccaggcgattgtgcagcacttggagaagtcctttgccattgcctccttggtagagacgggccacctggcagctttctccctgacctctcacctcaacgacaccttccgctttgactcagagaaattgcaggtgggacagggtgtctccctaaccctcaagaccacagaaccaggagtgactggccttcttttggctgtggaggggccggctgccaagaggaccatgaggccgacccagaaggactctgagacagttgatgaggatgaagaagtggatccagctctgactgtagggaccataaagaagcacaccctctccatcggggacatggtcacagggactgtcaagtccattaagcctacccatgtggttgtgactctggaagatggcattattggctgtatccatgcctcccacattctagatgatgttccagagggcacctctcctactaccaagctgaaggttgggaagacggtcactgcccgagtgattggcgggcgagacatgaagacattcaagtatctcccaataagtcaccccagattcgttcgaaccatcccggagctgagtgttcggccaagtgagctggaggatggccacactgctcttaacactcactctgttagccccatggagaagattaaacagtaccaggccggccagactgttacttgcttcttaaagaaatacaatgtggtgaagaaatggcttgaggtggagattgccccagacatccgggggagaattcccttattgctcacttctctgagcttcaaggttctgaagcatccagataagaagttccgggttggccaggccctgagggccaccgttgttggcccagattcctccaagaccttcttatgtctgtccctcacaggtcctcacaagcttgaggaaggggaagtggccatgggccgagtggtgaaggtgactcccaacgaggggctgaccgtctccttcccctttgggaagataggaacagtcagtatatttcacatgagtgactcctactccgagacgcccctggaagacttcgtcccccagaaggttgtcagatgttacatcctgtccactgcagacaacgtattgactttgtcgctgcgatcatccagctgctgaggaaagccacgggtgttggcgtgaactgatgatgtctcatcccacgcccactatggccacattacctaacctctccatatctgggctattcaaggtcttggaggccagcacagacccagctagttgttgaagccagttcttttttgtcttggtcatgagggaattaaacgttttctctggcagaaaaaaaaaag

SEQ ID NO: 450379 - DNA, 3817 bp, Homo sapiens
aagaattgcactggactgtgggtatcctggtctccgcgtgtgtgagtaccgcggcgcgaggttagtggtagctgggtgcagacgccgtggcgctggagacccaaacatggcaaacctggaagaaagcttcccccgaggaggtacaagaaagatccacaaaccagagaaagctttccagcagtcagttgaacaagacaacttatttgatatttctactgaagagggatccaccaaaagaaaaaagagccagaaggggccagcaaaaacaaaaaagttgaaaatcgaaaagagagaaagcagcaagtccgcaagagagaagtttgaaatccttagtgttgagtccctgtgtgagggaatgcgtattttgggttgcgtgaaagaggtgaatgaactggaactggtgattagtctccccaatggcctccagggctttgtgcaagtcactgaaatctgtgatgcctacaccaaaaagctgaatgagcaggtgacacaagaacaacctctgaaggacctacttcacttgcctgaacttttctcacctggaatgctggtaagatgtgtggtgagcagtctgggcatcacagacaggggcaagaagagtgtcaagctgtctctgaaccccaaaaatgtcaacagagtgctgagtgctgaggccctgaagcctggcatgctacttacaggtaccgtatccagcctggaagaccatggctacctagtggacattggtgttgatgggaccagagcttttctgccactgctgaaagcccaggagtacatcagacagaagaacaaaggtgctaaactaaaggtgggtcagtacctgaactgcattgttgaaaaggtgaaaggcaacggaggagttgttagtctgtctgttggtcactcagaggtttctacggccattgctactgaacagcagagctggaaccttaataacttgctaccaggactggtggtcaaagctcaggtacagaaggtgactccatttggccttacgctaaacttcctcacattcttcacgggcgtggttgactttatgcacctggatcccaagaaagctggaacatatttctcaaatcaggcagtgagggcctgcatcctttgcgtccatcctcgaaccagagttgtgcacctgagcctgcgccccatcttcctacagcctggacgcccactcacccgactctcttgccagaaccttggagcagtgctggatgatgttcctgtccagggttttttcaaaaaggctggggccacctttaggctgaaggatggggttctggcctatgcccggctcagccatctctctgattctaagaacgtcttcaatcctgaggccttcaagccagggaacactcacaagtgtagaattattgactacagccaaatggatgaactggccttgctctctctacgaacgtctattattgaagctcagtaccttagatatcatgacatcgaacctggggcagtggtaaagggcacagtgctaaccataaagtcatatgggatgctggtgaaggtgggcgagcagatgaggggcctggtacctcccatgcacctggctgacatcctgatgaagaatccggagaagaagtaccacatcggggatgaggtcaagtgccgggttttgctttgtgaccctgaagccaagaagctgatgatgaccctgaaaaaaaccctgattgagtccaaactacctgtcattacctgctatgccgatgccaagcctggtctgcagacacatggcttcatcatcagggtcaaggactatggctgcattgtgaagttctacaacaatgtgcagggactggtgcccaagcatgagctcagtactgagtatatccctgacccggagagagttttttacactggccaggtggtgaaggttgtcgtattgaactgtgagccatccaaagagaggatgctcttatccttcaagctgtcgagtgatccagagccaaagaaagagcctgcaggacacagtcagaagaaaggaaaagccattaacattgggcagttggtagatgtgaaggttttagagaagaccaaagatgggctggaggtggctgtcctgccccacaacatccgtgctttcctccccacatctcatctgtcggaccacgttgccaacggcccattgttacatcattggctccaggcaggtgacatccttcaccgagtcctgtgtctgagccagagcgaggggcgtgttcttctttgcaggaagccagccttggtctccacagtagaaggtggccaggatcccaagaacttctcagaaatccatcctggaatgctgctcattggttttgtgaagagcatcaaggactatggcgtgttcatccagttcccctcaggtcttagcggactggccccaaaagctatcatgagtgacaaatttgtgacctccacaagtgaccactttgttgagggccagacagtagcggcaaaggtgaccaatgtggatgaggagaagcagcggatgctgctgtcactgcggctgtcggactgtggtctgggggacttggctatcaccagcctcctcctcctgaatcagtgcctggaggagctgcagggcgtgcgcagccttatgagcaaccgagactctgtgttgatccagacgctggccgagatgaccccaggaatgttccttgacctagtggtgcaggaggtgttggaagatggctctgtggtattcagtgggggtccagtgcccgacctggtcctgaaagccagcagataccatcgcgcagggcaggaggtggaatctgggcagaaaaagaaggttgttatcttaaatgttgatcttttgaagttggaagtgcacgtttcccttcaccaggacttggtgaatagaaaagctagaaagctgaggaaaggcagcgaacaccaggcgattgtgcagcacttggagaagtcctttgccattgcctccttggtagagacgggccacctggcagctttctccctgacctctcacctcaacgacaccttccgctttgactcagagaaattgcaggtgggacagggtgtctccctaaccctcaagaccacagaaccaggagtgactggccttcttttggctgtggaggggccggctgccaagaggaccatgaggccgacccagaaggactctgagacagttgatgaggatgaagaagtggatccagctctgactgtagggaccataaagaagcacaccctctccatcggggacatggtcacagggactgtcaagtccattaagcctacccatgtggttgtgactctggaagatggcattattggctgtatccatgcctcccacattctagatgatgttccagagggcacctctcctactaccaagctgaaggttgggaagacggtcactgcccgagtgattggcgggcgagacatgaagacattcaagtatctcccaataagtcaccccagattcgttcgaaccatcccggagctgagtgttcggccaagtgagctggaggatggccacactgctcttaacactcactctgttagccccatggagaagattaaacagtaccaggccggccagactgttacttgcttcttaaagaaatacaatgtggtgaagaaatggcttgaggtggagattgccccagacatccgggggagaattgacacctcccattgagggccaaaaaaaagtcacactctggcctgctggcaagtcacctgtcatttccagctcatcttcatagttccatagttagtcctattctttagtaaatataaagactattaaaagcttctatgaggtgcactatgtgtgtctctggggtaagtcttgtgcttg

SEQ ID NO: 450380 - DNA, 859 bp, Homo sapiens
aagaattgcactggactgtgggtatcctggtctccgcgtgtgtgagtaccgcggcgcgaggttagtggtagctgggtgcagacgccgtggcgctggagacccaaacatggcaaacctggaagaaagcttcccccgaggaggtacaagaaagatccacaaaccagagaaagctttccagcagtcagttgaacaagacaacttatttgatatttctactgaagagggatccaccaaaagaaaaaagagccagaaggggccagcaaaaacaaaaaagttgaaaatcgaaaagagagaaagcagcaagtccgcaagagagaagtttgaaatccttagtgttgagtccctgtgtgagggaatgcgtattttgggttgcgtgaaagaggtgaatgaactggaactggtgattagtctccccaatggcctccagggctttgtgcaagtcactgaaatctgtgatgcctacaccaaaaagctgaatgagcaggtgacacaagaacaacctctgaaggacctacttcacttgcctgaacttttctcacctggaatgctggtaagatgtgtggtgagcagtctgggcatcacagacaggggcaagaagagtgtcaagctgtctctgaaccccaaaaatgtcaacagagtgctgagtgctgaggccctgaagcctggcatggtaggtgtctagggtcggggaggaagagtggcaatgtgccttctctctgcctctgagggagcgtggtctaggccaccttttactttcagctcaattgtgacacataggagtggttctttttctggaaggaaggtctcttgggttctttgggcacttaatggacattgaagacttgaacctaatcattac

SEQ ID NO: 450381 - DNA, 396 bp, Homo sapiens
tgccgatgccaagcctggtctgcagacacatggcttcatcatcagggtcaaggactatggctgcattgtgaagttctacaacaatgtgcagggactggtgcccaagcatgagctcagtactgagtatatccctgacccggagagagttttttacactggccaggtaacccttcccctagacaggtcccctttacccttggtgaccccacaaacacaaatatgaaggagcagtaagtagtggggctgcctttaggaggctgaggaagagagcacatggggcagtgggtgtgagccggctaaatggaggagacggggaacagaacagagagaaagcctcagcggggttcagcagaagctggcaagctgatggatctcaggcacgcatggaagaggtca

SEQ ID NO: 450382 - DNA, 518 bp, Homo sapiens
cccagctacttgggaggctgagctgggaggattgcttgagcccaggagattgaggctacagtgagccatgattgcgccactgcattccagcttgggtgacagagtgagaccttgtcccagaaaaaaaaaaaattcagatgagcctgctccttactaataactgcaaaggttgggaatggaaaccttcagcctgacacatctgtcttcagtggtggtgtgacagtggaacagggtgcttttgtgagcttggtttggtggagagtagggagaaatcctgacctacagattactgtgttacagagatgaagagaaatgattcagcttatttgtttctccaggtatctcccaataagtcaccccagattcgttcgaaccatcccggagctgagtgttcggccaaggtgagggggacattagcagcactgtcttacggaaagagcactgggctttggaattaggaatcccgaattcgaatcttgattttaccagtgttaggattgatttttgcctttctctgt

SEQ ID NO: 450383 - DNA, 214 bp, Homo sapiens
gtgcccatctgtgtatttggccccaaacccaccccttttgggtctttgtccctcttgtcacaacctgagtcttgggacccaagagcagggagtcaggtgcacgctgaccctgcggaacactgtgttgtggtgagggggctgtctgcttgttgggtctctgagcagtcctctccctgcagatgtggatgtcattgccaagtttgcccagcttgag

SEQ ID NO: 450384 - DNA, 6477 bp, Homo sapiens
aagaattgcactggactgtgggtatcctggtctccgcgtgtgtgagtaccgcggcgcgaggttagtggtagctgggtgcagacgccgtggcgctggagacccaaacatggcaaacctggaagaaagcttcccccgaggaggtacaagaaagatccacaaaccagagaaagctttccagcagtcagttgaacaagacaacttatttgatatttctactgaagagggatccaccaaaagaaaaaagagccagaaggggccagcaaaaacaaaaaagttgaaaatcgaaaagagagaaagcagcaagtccgcaagagagaagtttgaaatccttagtgttgagtccctgtgtgagggaatgcgtattttgggttgcgtgaaagaggtgaatgaactggaactggtgattagtctccccaatggcctccagggctttgtgcaagtcactgaaatctgtgatgcctacaccaaaaagctgaatgagcaggtgacacaagaacaacctctgaaggacctacttcacttgcctgaacttttctcacctggaatgctggtaagatgtgtggtgagcagtctgggcatcacagacaggggcaagaagagtgtcaagctgtctctgaaccccaaaaatgtcaacagagtgctgagtgctgaggccctgaagcctggcatgctacttacaggtaccgtatccagcctggaagaccatggctacctagtggacattggtgttgatgggaccagagcttttctgccactgctgaaagcccaggagtacatcagacagaagaacaaaggtgctaaactaaaggtgggtcagtacctgaactgcattgttgaaaaggtgaaaggcaacggaggagttgttagtctgtctgttggtcactcagaggtttctacggccattgctactgaacagcagagctggaaccttaataacttgctaccaggactggtggtcaaagctcaggtacagaaggtgactccatttggccttacgctaaacttcctcacattcttcacgggcgtggttgactttatgcacctggatcccaagaaagctggaacatatttctcaaatcaggcagtgagggcctgcatcctttgcgtccatcctcgaaccagagttgtgcacctgagcctgcgccccatcttcctacagcctggacgcccactcacccgactctcttgccagaaccttggagcagtgctggatgatgttcctgtccagggttttttcaaaaaggctggggccacctttaggctgaaggatggggttctggcctatgcccggctcagccatctctctgattctaagaacgtcttcaatcctgaggccttcaagccagggaacactcacaagtgtagaattattgactacagccaaatggatgaactggccttgctctctctacgaacgtctattattgaagctcagtaccttagatatcatgacatcgaacctggggcagtggtaaagggcacagtgctaaccataaagtcatatgggatgctggtgaaggtgggcgagcagatgaggggcctggtacctcccatgcacctggctgacatcctgatgaagaatccggagaagaagtaccacatcggggatgaggtcaagtgccgggttttgctttgtgaccctgaagccaagaagctgatgatgaccctgaaaaaaaccctgattgagtccaaactacctgtcattacctgctatgccgatgccaagcctggtctgcagacacatggcttcatcatcagggtcaaggactatggctgcattgtgaagttctacaacaatgtgcagggactggtgcccaagcatgagctcagtactgagtatatccctgacccggagagagttttttacactggccaggtggtgaaggttgtcgtattgaactgtgagccatccaaagagaggatgctcttatccttcaagctgtcgagtgatccagagccaaagaaagagcctgcaggacacagtcagaagaaaggaaaagccattaacattgggcagttggtagatgtgaaggttttagagaagaccaaagatgggctggaggtggctgtcctgccccacaacatccgtgctttcctccccacatctcatctgtcggaccacgttgccaacggcccattgttacatcattggctccaggcaggtgacatccttcaccgagtcctgtgtctgagccagagcgaggggcgtgttcttctttgcaggaagccagccttggtctccacagtagaaggtggccaggatcccaagaacttctcagaaatccatcctggaatgctgctcattggttttgtgaagagcatcaaggactatggcgtgttcatccagttcccctcaggtcttagcggactggccccaaaagctatcatgagtgacaaatttgtgacctccacaagtgaccactttgttgagggccagacagtagcggcaaaggtgaccaatgtggatgaggagaagcagcggatgctgctgtcactgcggctgtcggactgtggtctgggggacttggctatcaccagcctcctcctcctgaatcagtgcctggaggagctgcagggcgtgcgcagccttatgagcaaccgagactctgtgttgatccagacgctggccgagatgaccccaggaatgttccttgacctagtggtgcaggaggtgttggaagatggctctgtggtattcagtgggggtccagtgcccgacctggtcctgaaagccagcagataccatcgcgcagggcaggaggtggaatctgggcagaaaaagaaggttgttatcttaaatgttgatcttttgaagttggaagtgcacgtttcccttcaccaggacttggtgaatagaaaagctagaaagctgaggaaaggcagcgaacaccaggcgattgtgcagcacttggagaagtcctttgccattgcctccttggtagagacgggccacctggcagctttctccctgacctctcacctcaacgacaccttccgctttgactcagagaaattgcaggtgggacagggtgtctccctaaccctcaagaccacagaaccaggagtgactggccttcttttggctgtggaggggccggctgccaagaggaccatgaggccgacccagaaggactctgagacagttgatgaggatgaagaagtggatccagctctgactgtagggaccataaagaagcacaccctctccatcggggacatggtcacagggactgtcaagtccattaagcctacccatgtggttgtgactctggaagatggcattattggctgtatccatgcctcccacattctagatgatgttccagagggcacctctcctactaccaagctgaaggttgggaagacggtcactgcccgagtgattggcgggcgagacatgaagacattcaagtatctcccaataagtcaccccagattcgttcgaaccatcccggagctgagtgttcggccaagtgagctggaggatggccacactgctcttaacactcactctgttagccccatggagaagattaaacagtaccaggccggccagactgttacttgcttcttaaagaaatacaatgtggtgaagaaatggcttgaggtggagattgccccagacatccgggggagaattcccttattgctcacttctctgagcttcaaggttctgaagcatccagataagaagttccgggttggccaggccctgagggccaccgttgttggcccagattcctccaagaccttcttatgtctgtccctcacaggtcctcacaagcttgaggaaggggaagtggccatgggccgagtggtgaaggtgactcccaacgaggggctgaccgtctccttcccctttgggaagataggaacagtcagtatatttcacatgagtgactcctactccgagacgcccctggaagacttcgtcccccagaaggttgtcagatgttacatcctgtccactgcagacaacgtattgactttgtcgctgcgatcatccagaacaaacccggagacgaaaagcaaagtagaagatccagagattaactccatccaggacattaaggaagggcagcttctgaggggctatgtagggtccatccagccacacggtgtgttctttcgccttggcccctccgttgtgggtttggctcggtactcccatgtctcccagcacagcccgtccaagaaagccctttataacaaacacctccctgaagggaagctgctcacagccagggtcctacgccttaaccaccagaagaacctggtagagctgtctttcctccccggagacactgggaagccagacgtgctttctgcttccttggaagggcaacttacaaagcaagaggagaggaaaacagaggctgaggagagagaccaaaaaggggaaaagaaaaatcagaaaaggaacgagaagaagaaccagaaggggcaggaggaggtggagatgcccagcaaggagaagcaacagccccagaagccacaggcgcagaagcggggcgggcgggagtgccgggagtctgggagtgagcaggaaagagtgagcaagaagccaaagaaagccggcctgtcagaggaggacgacagccttgtggacgtgtactatcgggagggaaaagaggaggcagaagagacgaatgtgctgcccaaggagaagcaaaccaagccagcagaagcgccccggctgcagctgtcttcaggcttcgcttggaatgtgggactagactctctgaccccggccttgccacctctagcagagagctcagacagcgaggaggatgagaagccacaccaagccacgataaagaaaagcaagaaagaaagggagttggagaagcagaaggcagagaaggaactgtcccgcattgaggaggcgctgatggatcctgggcggcagccagagtccgcggatgattttgaccgactggtgctgagctcccccaacagctccattctgtggctgcagtacatggctttccacctgcaggccacggagatcgagaaggcccgtgccgtggctgagagggcccttaagaccatctccttcagagaggagcaggagaagctgaacgtgtgggtggctctgctgaacctggagaacatgtacggctctcaggagtccctgaccaaggtctttgagcgagccgtgcagtacaacgagcctctcaaagtctttctccacctggctgacatctacgccaagtcagagaaattccaggaagctggtgaactctacaaccggatgctgaagcgtttccggcaggagaaagctgtgtggatcaaatacggcgccttccttctgcggaggagccaggctgcagccagtcaccgcgtgctgcagcgagccctggagtgcctgcctagcaaggagcatgtggatgtcattgccaagtttgcccagcttgagtttcagctgggggatgcagagcgggccaaagccatttttgagaacacgctgagcacctacccaaagcgcacagatgtctggtcggtctatatcgacatgaccatcaagcacggcagccagaaggacgtccgggacatctttgagcgggtcattcatctgagcttggcccccaagagaatgaagttcttcttcaagcgctacctggactacgagaagcagcatggcactgagaaggatgtgcaggcagtcaaggccaaggccctggagtatgtggaggccaagagctcagtgctagaggcctagtggcaggctggctctgtgggacactgtcaacaatgggccagcccggccccgcctcgagtgcctgggcactcggaaaactgttacctcaggactctatttaaatgctgctttttctgcagcacgcttggggaaatcctgtcaggatgaaaaggaagttgagattttttaaatccctcttcgcttgctttattttcagtaccaacttgttatctttttccttatctgaggctacctggggattgtgggcagcaggcccctggactcccagaaatgctgagggtccctcttccaggggagttccctggggagcaagagtagaggggctattcccgagggtcctgtggtcagggtcctgctttgtccctggcaggctgtcagtccagctggagggggtcagtaggctccagggagtgggccctcccctccgatcttggagtctctgggtgttccttcagcctcagcctcactggtaccttctgccctttaggggaggctatgagtctgggacaggaggacaaattcagagcccagagggggaaatggagaaacctgggctgctgaggaaagccacgggtgttggcgtgaactgatgatgtctcatcccacgcccactatggccacattacctaacctctccatatctgggctattcaaggtcttggaggccagcacagacccagctagttgttgaagccagttcttttttgtcttggtcatgagggaattaaacgttttctctggcagaaaaaaaaaag

SEQ ID NO: 450385 - DNA, 6354 bp, Homo sapiens
aagaattgcactggactgtgggtatcctggtctccgcgtgtgtgagtaccgcggcgcgaggttagtggtagctgggtgcagacgccgtggcgctggagacccaaacatggcaaacctggaagaaagcttcccccgaggaggtacaagaaagatccacaaaccagagaaagctttccagcagtcagttgaacaagacaacttatttgatatttctactgaagagggatccaccaaaagaaaaaagagccagaaggggccagcaaaaacaaaaaagttgaaaatcgaaaagagagaaagcagcaagtccgcaagagagaagtttgaaatccttagtgttgagtccctgtgtgagggaatgcgtattttgggttgcgtgaaagaggtgaatgaactggaactggtgattagtctccccaatggcctccagggctttgtgcaagtcactgaaatctgtgatgcctacaccaaaaagctgaatgagcaggtgacacaagaacaacctctgaaggacctacttcacttgcctgaacttttctcacctggaatgctggtaagatgtgtggtgagcagtctgggcatcacagacaggggcaagaagagtgtcaagctgtctctgaaccccaaaaatgtcaacagagtgctgagtgctgaggccctgaagcctggcatgctacttacaggtaccgtatccagcctggaagaccatggctacctagtggacattggtgttgatgggaccagagcttttctgccactgctgaaagcccaggagtacatcagacagaagaacaaaggtgctaaactaaaggtgggtcagtacctgaactgcattgttgaaaaggtgaaaggcaacggaggagttgttagtctgtctgttggtcactcagaggtttctacggccattgctactgaacagcagagctggaaccttaataacttgctaccaggactggtggtcaaagctcaggtacagaaggtgactccatttggccttacgctaaacttcctcacattcttcacgggcgtggttgactttatgcacctggatcccaagaaagctggaacatatttctcaaatcaggcagtgagggcctgcatcctttgcgtccatcctcgaaccagagttgtgcacctgagcctgcgccccatcttcctacagcctggacgcccactcacccgactctcttgccagaaccttggagcagtgctggatgatgttcctgtccagggttttttcaaaaaggctggggccacctttaggctgaaggatggggttctggcctatgcccggctcagccatctctctgattctaagaacgtcttcaatcctgaggccttcaagccagggaacactcacaagtgtagaattattgactacagccaaatggatgaactggccttgctctctctacgaacgtctattattgaagctcagtaccttagatatcatgacatcgaacctggggcagtggtaaagggcacagtgctaaccataaagtcatatgggatgctggtgaaggtgggcgagcagatgaggggcctggtacctcccatgcacctggctgacatcctgatgaagaatccggagaagaagtaccacatcggggatgaggtcaagtgccgggttttgctttgtgaccctgaagccaagaagctgatgatgaccctgaaaaaaaccctgattgagtccaaactacctgtcattacctgctatgccgatgccaagcctggtctgcagacacatggcttcatcatcagggtcaaggactatggctgcattgtgaagttctacaacaatgtgcagggactggtgcccaagcatgagctcagtactgagtatatccctgacccggagagagttttttacactggccaggtggtgaaggttgtcgtattgaactgtgagccatccaaagagaggatgctcttatccttcaagctgtcgagtgatccagagccaaagaaagagcctgcaggacacagtcagaagaaaggaaaagccattaacattgggcagttggtagatgtgaaggttttagagaagaccaaagatgggctggaggtggctgtcctgccccacaacatccgtgctttcctccccacatctcatctgtcggaccacgttgccaacggcccattgttacatcattggctccaggcaggtgacatccttcaccgagtcctgtgtctgagccagagcgaggggcgtgttcttctttgcaggaagccagccttggtctccacagtagaaggtggccaggatcccaagaacttctcagaaatccatcctggaatgctgctcattggttttgtgaagagcatcaaggactatggcgtgttcatccagttcccctcaggtcttagcggactggccccaaaagctatcatgagtgacaaatttgtgacctccacaagtgaccactttgttgagggccagacagtagcggcaaaggtgaccaatgtggatgaggagaagcagcggatgctgctgtcactgcggctgtcggactgtggtctgggggacttggctatcaccagcctcctcctcctgaatcagtgcctggaggagctgcagggcgtgcgcagccttatgagcaaccgagactctgtgttgatccagacgctggccgagatgaccccaggaatgttccttgacctagtggtgcaggaggtgttggaagatggctctgtggtattcagtgggggtccagtgcccgacctggtcctgaaagccagcagataccatcgcgcagggcaggaggtggaatctgggcagaaaaagaaggttgttatcttaaatgttgatcttttgaagttggaagtgcacgtttcccttcaccaggacttggtgaatagaaaagctagaaagctgaggaaaggcagcgaacaccaggcgattgtgcagcacttggagaagtcctttgccattgcctccttggtagagacgggccacctggcagctttctccctgacctctcacctcaacgacaccttccgctttgactcagagaaattgcaggtgggacagggtgtctccctaaccctcaagaccacagaaccaggagtgactggccttcttttggctgtggaggggccggctgccaagaggaccatgaggccgacccagaaggactctgagacagttgatgaggatgaagaagtggatccagctctgactgtagggaccataaagaagcacaccctctccatcggggacatggtcacagggactgtcaagtccattaagcctacccatgtggttgtgactctggaagatggcattattggctgtatccatgcctcccacattctagatgatgttccagagggcacctctcctactaccaagctgaaggttgggaagacggtcactgcccgagtgattggcgggcgagacatgaagacattcaagtatctcccaataagtcaccccagattcgttcgaaccatcccggagctgagtgttcggccaagtgagctggaggatggccacactgctcttaacactcactctgttagccccatggagaagattaaacagtaccaggccggccagactgttacttgcttcttaaagaaatacaatgtggtgaagaaatggcttgaggtggagattgccccagacatccgggggagaattcccttattgctcacttctctgagcttcaaggttctgaagcatccagataagaagttccgggttggccaggccctgagggccaccgttgttggcccagattcctccaagaccttcttatgtctgtccctcacaggtcctcacaagcttgaggaaggggaagtggccatgggccgagtggtgaaggtgactcccaacgaggggctgaccgtctccttcccctttgggaagataggaacagtcagtatatttcacatgagtgactcctactccgagacgcccctggaagacttcgtcccccagaaggttgtcagatgttacatcctgtccactgcagacaacgtattgactttgtcgctgcgatcatccagaacaaacccggagacgaaaagcaaagtagaagatccagagattaactccatccaggacattaaggaagggcagcttctgaggggctatgtagggtccatccagccacacggtgtgttctttcgccttaaccaccagaagaacctggtagagctgtctttcctccccggagacactgggaagccagacgtgctttctgcttccttggaagggcaacttacaaagcaagaggagaggaaaacagaggctgaggagagagaccaaaaaggggaaaagaaaaatcagaaaaggaacgagaagaagaaccagaaggggcaggaggaggtggagatgcccagcaaggagaagcaacagccccagaagccacaggcgcagaagcggggcgggcgggagtgccgggagtctgggagtgagcaggaaagagtgagcaagaagccaaagaaagccggcctgtcagaggaggacgacagccttgtggacgtgtactatcgggagggaaaagaggaggcagaagagacgaatgtgctgcccaaggagaagcaaaccaagccagcagaagcgccccggctgcagctgtcttcaggcttcgcttggaatgtgggactagactctctgaccccggccttgccacctctagcagagagctcagacagcgaggaggatgagaagccacaccaagccacgataaagaaaagcaagaaagaaagggagttggagaagcagaaggcagagaaggaactgtcccgcattgaggaggcgctgatggatcctgggcggcagccagagtccgcggatgattttgaccgactggtgctgagctcccccaacagctccattctgtggctgcagtacatggctttccacctgcaggccacggagatcgagaaggcccgtgccgtggctgagagggcccttaagaccatctccttcagagaggagcaggagaagctgaacgtgtgggtggctctgctgaacctggagaacatgtacggctctcaggagtccctgaccaaggtctttgagcgagccgtgcagtacaacgagcctctcaaagtctttctccacctggctgacatctacgccaagtcagagaaattccaggaagctggtgaactctacaaccggatgctgaagcgtttccggcaggagaaagctgtgtggatcaaatacggcgccttccttctgcggaggagccaggctgcagccagtcaccgcgtgctgcagcgagccctggagtgcctgcctagcaaggagcatgtggatgtcattgccaagtttgcccagcttgagtttcagctgggggatgcagagcgggccaaagccatttttgagaacacgctgagcacctacccaaagcgcacagatgtctggtcggtctatatcgacatgaccatcaagcacggcagccagaaggacgtccgggacatctttgagcgggtcattcatctgagcttggcccccaagagaatgaagttcttcttcaagcgctacctggactacgagaagcagcatggcactgagaaggatgtgcaggcagtcaaggccaaggccctggagtatgtggaggccaagagctcagtgctagaggcctagtggcaggctggctctgtgggacactgtcaacaatgggccagcccggccccgcctcgagtgcctgggcactcggaaaactgttacctcaggactctatttaaatgctgctttttctgcagcacgcttggggaaatcctgtcaggatgaaaaggaagttgagattttttaaatccctcttcgcttgctttattttcagtaccaacttgttatctttttccttatctgaggctacctggggattgtgggcagcaggcccctggactcccagaaatgctgagggtccctcttccaggggagttccctggggagcaagagtagaggggctattcccgagggtcctgtggtcagggtcctgctttgtccctggcaggctgtcagtccagctggagggggtcagtaggctccagggagtgggccctcccctccgatcttggagtctctgggtgttccttcagcctcagcctcactggtaccttctgccctttaggggaggctatgagtctgggacaggaggacaaattcagagcccagagggggaaatggagaaacctgggctgctgaggaaagccacgggtgttggcgtgaactgatgatgtctcatcccacgcccactatggccacattacctaacctctccatatctgggctattcaaggtcttggaggccagcacagacccagctagttgttgaagccagttcttttttgtcttggtcatgagggaattaaacgttttctctggcagaaaaaaaaaag

SEQ ID NO: 450386 - DNA, 6297 bp, Homo sapiens
aagaattgcactggactgtgggtatcctggtctccgcgtgtgtgagtaccgcggcgcgaggttagtggtagctgggtgcagacgccgtggcgctggagacccaaacatggcaaacctggaagaaagcttcccccgaggaggtacaagaaagatccacaaaccagagaaagctttccagcagtcagttgaacaagacaacttatttgatatttctactgaagagggatccaccaaaagaaaaaagagccagaaggggccagcaaaaacaaaaaagttgaaaatcgaaaagagagaaagcagcaagtccgcaagagagaagtttgaaatccttagtgttgagtccctgtgtgagggaatgcgtattttgggttgcgtgaaagaggtgaatgaactggaactggtgattagtctccccaatggcctccagggctttgtgcaagtcactgaaatctgtgatgcctacaccaaaaagctgaatgagcaggtgacacaagaacaacctctgaaggacctacttcacttgcctgaacttttctcacctggaatgctggtaagatgtgtggtgagcagtctgggcatcacagacaggggcaagaagagtgtcaagctgtctctgaaccccaaaaatgtcaacagagtgctgagtgctgaggccctgaagcctggcatgctacttacaggtaccgtatccagcctggaagaccatggctacctagtggacattggtgttgatgggaccagagcttttctgccactgctgaaagcccaggagtacatcagacagaagaacaaaggtgctaaactaaaggtgggtcagtacctgaactgcattgttgaaaaggtgaaaggcaacggaggagttgttagtctgtctgttggtcactcagaggtttctacggccattgctactgaacagcagagctggaaccttaataacttgctaccaggactggtggtcaaagctcaggtacagaaggtgactccatttggccttacgctaaacttcctcacattcttcacgggcgtggttgactttatgcacctggatcccaagaaagctggaacatatttctcaaatcaggcagtgagggcctgcatcctttgcgtccatcctcgaaccagagttgtgcacctgagcctgcgccccatcttcctacagcctggacgcccactcacccgactctcttgccagaaccttggagcagtgctggatgatgttcctgtccagggttttttcaaaaaggctggggccacctttaggctgaaggatggggttctggcctatgcccggctcagccatctctctgattctaagaacgtcttcaatcctgaggccttcaagccagggaacactcacaagtgtagaattattgactacagccaaatggatgaactggccttgctctctctacgaacgtctattattgaagctcagtaccttagatatcatgacatcgaacctggggcagtggtaaagggcacagtgctaaccataaagtcatatgggatgctggtgaaggtgggcgagcagatgaggggcctggtacctcccatgcacctggctgacatcctgatgaagaatccggagaagaagtaccacatcggggatgaggtcaagtgccgggttttgctttgtgaccctgaagccaagaagctgatgatgaccctgaaaaaaaccctgattgagtccaaactacctgtcattacctgctatgccgatgccaagcctggtctgcagacacatggcttcatcatcagggtcaaggactatggctgcattgtgaagttctacaacaatgtgcagggactggtgcccaagcatgagctcagtactgagtatatccctgacccggagagagttttttacactggccaggtggtgaaggttgtcgtattgaactgtgagccatccaaagagaggatgctcttatccttcaagctgtcgagtgatccagagccaaagaaagagcctgcaggacacagtcagaagaaaggaaaagccattaacattgggcagttggtagatgtgaaggttttagagaagaccaaagatgggctggaggtggctgtcctgccccacaacatccgtgctttcctccccacatctcatctgtcggaccacgttgccaacggcccattgttacatcattggctccaggcaggtgacatccttcaccgagtcctgtgtctgagccagagcgaggggcgtgttcttctttgcaggaagccagccttggtctccacagtagaaggtggccaggatcccaagaacttctcagaaatccatcctggaatgctgctcattggttttgtgaagagcatcaaggactatggcgtgttcatccagttcccctcaggtcttagcggactggccccaaaagctatcatgagtgacaaatttgtgacctccacaagtgaccactttgttgagggccagacagtagcggcaaaggtgaccaatgtggatgaggagaagcagcggatgctgctgtcactgcggctgtcggactgtggtctgggggacttggctatcaccagcctcctcctcctgaatcagtgcctggaggagctgcagggcgtgcgcagccttatgagcaaccgagactctgtgttgatccagacgctggccgagatgaccccaggaatgttccttgacctagtggtgcaggaggtgttggaagatggctctgtggtattcagtgggggtccagtgcccgacctggtcctgaaagccagcagataccatcgcgcagggcaggaggtggaatctgggcagaaaaagaaggttgttatcttaaatgttgatcttttgaagttggaagtgcacgtttcccttcaccaggacttggtgaatagaaaagctagaaagctgaggaaaggcagcgaacaccaggcgattgtgcagcacttggagaagtcctttgccattgcctccttggtagagacgggccacctggcagctttctccctgacctctcacctcaacgacaccttccgctttgactcagagaaattgcaggtgggacagggtgtctccctaaccctcaagaccacagaaccaggagtgactggccttcttttggctgtggaggggccggctgccaagaggaccatgaggccgacccagaaggactctgagacagttgatgaggatgaagaagtggatccagctctgactgtagggaccataaagaagcacaccctctccatcggggacatggtcacagggactgtcaagtccattaagcctacccatgtggttgtgactctggaagatggcattattggctgtatccatgcctcccacattctagatgatgttccagagggcacctctcctactaccaagctgaaggttgggaagacggtcactgcccgagtgattggcgggcgagacatgaagacattcaagtatctcccaataagtcaccccagattcgttcgaaccatcccggagctgagtgttcggccaagtgagctggaggatggccacactgctcttaacactcactctgttagccccatggagaagattaaacagtaccaggccggccagactgttacttgcttcttaaagaaatacaatgtggtgaagaaatggcttgaggtggagattgccccagacatccgggggagaattcccttattgctcacttctctgagcttcaaggttctgaagcatccagataagaagttccgggttggccaggccctgagggccaccgttgttggcccagattcctccaagaccttcttatgtctgtccctcacaggtcctcacaagcttgaggaaggggaagtggccatgggccgagtggtgaaggtgactcccaacgaggggctgaccgtctccttcccctttgggaagataggaacagtcagtatatttcacatgagtgactcctactccgagacgcccctggaagacttcgtcccccagaaggttgtcagccttggcccctccgttgtgggtttggctcggtactcccatgtctcccagcacagcccgtccaagaaagccctttataacaaacacctccctgaagggaagctgctcacagccagggtcctacgccttaaccaccagaagaacctggtagagctgtctttcctccccggagacactgggaagccagacgtgctttctgcttccttggaagggcaacttacaaagcaagaggagaggaaaacagaggctgaggagagagaccaaaaaggggaaaagaaaaatcagaaaaggaacgagaagaagaaccagaaggggcaggaggaggtggagatgcccagcaaggagaagcaacagccccagaagccacaggcgcagaagcggggcgggcgggagtgccgggagtctgggagtgagcaggaaagagtgagcaagaagccaaagaaagccggcctgtcagaggaggacgacagccttgtggacgtgtactatcgggagggaaaagaggaggcagaagagacgaatgtgctgcccaaggagaagcaaaccaagccagcagaagcgccccggctgcagctgtcttcaggcttcgcttggaatgtgggactagactctctgaccccggccttgccacctctagcagagagctcagacagcgaggaggatgagaagccacaccaagccacgataaagaaaagcaagaaagaaagggagttggagaagcagaaggcagagaaggaactgtcccgcattgaggaggcgctgatggatcctgggcggcagccagagtccgcggatgattttgaccgactggtgctgagctcccccaacagctccattctgtggctgcagtacatggctttccacctgcaggccacggagatcgagaaggcccgtgccgtggctgagagggcccttaagaccatctccttcagagaggagcaggagaagctgaacgtgtgggtggctctgctgaacctggagaacatgtacggctctcaggagtccctgaccaaggtctttgagcgagccgtgcagtacaacgagcctctcaaagtctttctccacctggctgacatctacgccaagtcagagaaattccaggaagctggtgaactctacaaccggatgctgaagcgtttccggcaggagaaagctgtgtggatcaaatacggcgccttccttctgcggaggagccaggctgcagccagtcaccgcgtgctgcagcgagccctggagtgcctgcctagcaaggagcatgtggatgtcattgccaagtttgcccagcttgagtttcagctgggggatgcagagcgggccaaagccatttttgagaacacgctgagcacctacccaaagcgcacagatgtctggtcggtctatatcgacatgaccatcaagcacggcagccagaaggacgtccgggacatctttgagcgggtcattcatctgagcttggcccccaagagaatgaagttcttcttcaagcgctacctggactacgagaagcagcatggcactgagaaggatgtgcaggcagtcaaggccaaggccctggagtatgtggaggccaagagctcagtgctagaggcctagtggcaggctggctctgtgggacactgtcaacaatgggccagcccggccccgcctcgagtgcctgggcactcggaaaactgttacctcaggactctatttaaatgctgctttttctgcagcacgcttggggaaatcctgtcaggatgaaaaggaagttgagattttttaaatccctcttcgcttgctttattttcagtaccaacttgttatctttttccttatctgaggctacctggggattgtgggcagcaggcccctggactcccagaaatgctgagggtccctcttccaggggagttccctggggagcaagagtagaggggctattcccgagggtcctgtggtcagggtcctgctttgtccctggcaggctgtcagtccagctggagggggtcagtaggctccagggagtgggccctcccctccgatcttggagtctctgggtgttccttcagcctcagcctcactggtaccttctgccctttaggggaggctatgagtctgggacaggaggacaaattcagagcccagagggggaaatggagaaacctgggctgctgaggaaagccacgggtgttggcgtgaactgatgatgtctcatcccacgcccactatggccacattacctaacctctccatatctgggctattcaaggtcttggaggccagcacagacccagctagttgttgaagccagttcttttttgtcttggtcatgagggaattaaacgttttctctggcagaaaaaaaaaag

SEQ ID NO: 450387 - DNA, 4527 bp, Homo sapiens
aagaattgcactggactgtgggtatcctggtctccgcgtgtgtgagtaccgcggcgcgaggttagtggtagctgggtgcagacgccgtggcgctggagacccaaacatggcaaacctggaagaaagcttcccccgaggaggtacaagaaagatccacaaaccagagaaagctttccagcagtcagttgaacaagacaacttatttgatatttctactgaagagggatccaccaaaagaaaaaagagccagaaggggccagcaaaaacaaaaaagttgaaaatcgaaaagagagaaagcagcaagtccgcaagagagaagtttgaaatccttagtgttgagtccctgtgtgagggaatgcgtattttgggttgcgtgaaagaggtgaatgaactggaactggtgattagtctccccaatggcctccagggctttgtgcaagtcactgaaatctgtgatgcctacaccaaaaagctgaatgagcaggtgacacaagaacaacctctgaaggacctacttcacttgcctgaacttttctcacctggaatgctggtaagatgtgtggtgagcagtctgggcatcacagacaggggcaagaagagtgtcaagctgtctctgaaccccaaaaatgtcaacagagtgctgagtgctgaggccctgaagcctggcatgctacttacaggtaccgtatccagcctggaagaccatggctacctagtggacattggtgttgatgggaccagagcttttctgccactgctgaaagcccaggagtacatcagacagaagaacaaaggtgctaaactaaaggtgggtcagtacctgaactgcattgttgaaaaggtgaaaggcaacggaggagttgttagtctgtctgttggtcactcagaggtttctacggccattgctactgaacagcagagctggaaccttaataacttgctaccaggactggtggtcaaagctcaggtacagaaggtgactccatttggccttacgctaaacttcctcacattcttcacgggcgtggttgactttatgcacctggatcccaagaaagctggaacatatttctcaaatcaggcagtgagggcctgcatcctttgcgtccatcctcgaaccagagttgtgcacctgagcctgcgccccatcttcctacagcctggacgcccactcacccgactctcttgccagaaccttggagcagtgctggatgatgttcctgtccagggttttttcaaaaaggctggggccacctttaggctgaaggatggggttctggcctatgcccggctcagccatctctctgattctaagaacgtcttcaatcctgaggccttcaagccagggaacactcacaagtgtagaattattgactacagccaaatggatgaactggccttgctctctctacgaacgtctattattgaagctcagtaccttagatatcatgacatcgaacctggggcagtggtaaagggcacagtgctaaccataaagtcatatgggatgctggtgaaggtgggcgagcagatgaggggcctggtacctcccatgcacctggctgacatcctgatgaagaatccggagaagaagtaccacatcggggatgaggtcaagtgccgggttttgctttgtgaccctgaagccaagaagctgatgatgaccctgaaaaaaaccctgattgagtccaaactacctgtcattacctgctatgccgatgccaagcctggtctgcagacacatggcttcatcatcagggtcaaggactatggctgcattgtgaagttctacaacaatgtgcagggactggtgcccaagcatgagctcagtactgagtatatccctgacccggagagagttttttacactggccaggtggtgaaggttgtcgtattgaactgtgagccatccaaagagaggatgctcttatccttcaagctgtcgagtgatccagagccaaagaaagagcctgcaggacacagtcagaagaaaggaaaagccattaacattgggcagttggtagatgtgaaggttttagagaagaccaaagatgggctggaggtggctgtcctgccccacaacatccgtgctttcctccccacatctcatctgtcggaccacgttgccaacggcccattgttacatcattggctccaggcaggtgacatccttcaccgagtcctgtgtctgagccagagcgaggggcgtgttcttctttgcaggaagccagccttggtctccacagtagaaggtggccaggatcccaagaacttctcagaaatccatcctggaatgctgctcattggttttgtgaagagcatcaaggactatggcgtgttcatccagttcccctcaggtcttagcggactggccccaaaagctatcatgagtgacaaatttgtgacctccacaagtgaccactttgttgagggccagacagtagcggcaaaggtgaccaatgtggatgaggagaagcagcggatgctgctgtcactgcggctgtcggactgtggtctgggggacttggctatcaccagcctcctcctcctgaatcagtgcctggaggagctgcagggcgtgcgcagccttatgagcaaccgagactctgtgttgatccagacgctggccgagatgaccccaggaatgttccttgacctagtggtgcaggaggtgttggaagatggctctgtggtattcagtgggggtccagtgcccgacctggtcctgaaagccagcagataccatcgcgcagggcaggaggtggaatctgggcagaaaaagaaggttgttatcttaaatgttgatcttttgaagttggaagtgcacgtttcccttcaccaggacttggtgaatagaaaagctagaaagctgaggaaaggcagcgaacaccaggcgattgtgcagcacttggagaagtcctttgccattgcctccttggtagagacgggccacctggcagctttctccctgacctctcacctcaacgacaccttccgctttgactcagagaaattgcaggtgggacagggtgtctccctaaccctcaagaccacagaaccaggagtgactggccttcttttggctgtggaggggccggctgccaagaggaccatgaggccgacccagaaggactctgagacagttgatgaggatgaagaagtggatccagctctgactgtagggaccataaagaagcacaccctctccatcggggacatggtcacagggactgtcaagtccattaagcctacccatgtggttgtgactctggaagatggcattattggctgtatccatgcctcccacattctagatgatgttccagagggcacctctcctactaccaagctgaaggttgggaagacggtcactgcccgagtgattggcgggcgagacatgaagacattcaagtatctcccaataagtcaccccagattcgttcgaaccatcccggagctgagtgttcggccaagtgagctggaggatggccacactgctcttaacactcactctgttagccccatggagaagattaaacagtaccaggccggccagactgttacttgcttcttaaagaaatacaatgtggtgaagaaatggcttgaggtggagattgccccagacatccgggggagaattcccttattgctcacttctctgagcttcaaggttctgaagcatccagataagaagttccgggttggccaggccctgagggccaccgttgttggcccagattcctccaagaccttcttatgtctgtccctcacaggtcctcacaagcttgaggaaggggaagtggccatgggccgagtggtgaaggtgactcccaacgaggggctgaccgtctccttcccctttgggaagataggaacagtcagtatatttcacatgagtgactcctactccgagacgcccctggaagacttcgtcccccagaaggttgtcagatgttacatcctgtccactgcagacaacgtattgactttgtcgctgcgatcatccagaacaaacccggagacgaaaagcaaagtagaagatccagagattaactccatccaggacattaaggaagggcagcttctgaggggctatgtagggtccatccagccacacggtgtgttctttcgccttggcccctccgttgtgggtttggctcggtactcccatgtctcccagcacagcccgtccaagaaagccctttataacaaacacctccctgaagggaagctgctcactggtaccttctgccctttaggggaggctatgagtctgggacaggaggacaaattcagagcccagagggggaaatggagaaacctgggctgctgaggaaagccacgggtgttggcgtgaactgatgatgtctcatcccacgcccactatggccacattacctaacctctccatatctgggctattcaaggtcttggaggccagcacagacccagctagttgttgaagccagttcttttttgtcttggtcatgagggaattaaacgttttctctggcagaaaaaaaaaag

SEQ ID NO: 450388 - DNA, 4134 bp, Homo sapiens
aagaattgcactggactgtgggtatcctggtctccgcgtgtgtgagtaccgcggcgcgaggttagtggtagctgggtgcagacgccgtggcgctggagacccaaacatggcaaacctggaagaaagcttcccccgaggaggtacaagaaagatccacaaaccagagaaagctttccagcagtcagttgaacaagacaacttatttgatatttctactgaagagggatccaccaaaagaaaaaagagccagaaggggccagcaaaaacaaaaaagttgaaaatcgaaaagagagaaagcagcaagtccgcaagagagaagtttgaaatccttagtgttgagtccctgtgtgagggaatgcgtattttgggttgcgtgaaagaggtgaatgaactggaactggtgattagtctccccaatggcctccagggctttgtgcaagtcactgaaatctgtgatgcctacaccaaaaagctgaatgagcaggtgacacaagaacaacctctgaaggacctacttcacttgcctgaacttttctcacctggaatgctggtaagatgtgtggtgagcagtctgggcatcacagacaggggcaagaagagtgtcaagctgtctctgaaccccaaaaatgtcaacagagtgctgagtgctgaggccctgaagcctggcatgctacttacaggtaccgtatccagcctggaagaccatggctacctagtggacattggtgttgatgggaccagagcttttctgccactgctgaaagcccaggagtacatcagacagaagaacaaaggtgctaaactaaaggtgggtcagtacctgaactgcattgttgaaaaggtgaaaggcaacggaggagttgttagtctgtctgttggtcactcagaggtttctacggccattgctactgaacagcagagctggaaccttaataacttgctaccaggactggtggtcaaagctcaggtacagaaggtgactccatttggccttacgctaaacttcctcacattcttcacgggcgtggttgactttatgcacctggatcccaagaaagctggaacatatttctcaaatcaggcagtgagggcctgcatcctttgcgtccatcctcgaaccagagttgtgcacctgagcctgcgccccatcttcctacagcctggacgcccactcacccgactctcttgccagaaccttggagcagtgctggatgatgttcctgtccagggttttttcaaaaaggctggggccacctttaggctgaaggatggggttctggcctatgcccggctcagccatctctctgattctaagaacgtcttcaatcctgaggccttcaagccagggaacactcacaagtgtagaattattgactacagccaaatggatgaactggccttgctctctctacgaacgtctattattgaagctcagtaccttagatatcatgacatcgaacctggggcagtggtaaagggcacagtgctaaccataaagtcatatgggatgctggtgaaggtgggcgagcagatgaggggcctggtacctcccatgcacctggctgacatcctgatgaagaatccggagaagaagtaccacatcggggatgaggtcaagtgccgggttttgctttgtgaccctgaagccaagaagctgatgatgaccctgaaaaaaaccctgattgagtccaaactacctgtcattacctgctatgccgatgccaagcctggtctgcagacacatggcttcatcatcagggtcaaggactatggctgcattgtgaagttctacaacaatgtgcagggactggtgcccaagcatgagctcagtactgagtatatccctgacccggagagagttttttacactggccaggtggtgaaggttgtcgtattgaactgtgagccatccaaagagaggatgctcttatccttcaagctgtcgagtgatccagagccaaagaaagagcctgcaggacacagtcagaagaaaggaaaagccattaacattgggcagttggtagatgtgaaggttttagagaagaccaaagatgggctggaggtggctgtcctgccccacaacatccgtgctttcctccccacatctcatctgtcggaccacgttgccaacggcccattgttacatcattggctccaggcaggtgacatccttcaccgagtcctgtgtctgagccagagcgaggggcgtgttcttctttgcaggaagccagccttggtctccacagtagaaggtggccaggatcccaagaacttctcagaaatccatcctggaatgctgctcattggttttgtgaagagcatcaaggactatggcgtgttcatccagttcccctcaggtcttagcggactggccccaaaagctatcatgagtgacaaatttgtgacctccacaagtgaccactttgttgagggccagacagtagcggcaaaggtgaccaatgtggatgaggagaagcagcggatgctgctgtcactgcggctgtcggactgtggtctgggggacttggctatcaccagcctcctcctcctgaatcagtgcctggaggagctgcagggcgtgcgcagccttatgagcaaccgagactctgtgttgatccagacgctggccgagatgaccccaggaatgttccttgacctagtggtgcaggaggtgttggaagatggctctgtggtattcagtgggggtccagtgcccgacctggtcctgaaagccagcagataccatcgcgcagggcaggaggtggaatctgggcagaaaaagaaggttgttatcttaaatgttgatcttttgaagttggaagtgcacgtttcccttcaccaggacttggtgaatagaaaagctagaaagctgaggaaaggcagcgaacaccaggcgattgtgcagcacttggagaagtcctttgccattgcctccttggtagagacgggccacctggcagctttctccctgacctctcacctcaacgacaccttccgctttgactcagagaaattgcaggtgggacagggtgtctccctaaccctcaagaccacagaaccaggagtgactggccttcttttggctgtggaggggccggctgccaagaggaccatgaggccgacccagaaggactctgagacagttgatgaggatgaagaagtggatccagctctgactgtagggaccataaagaagcacaccctctccatcggggacatggtcacagggactgtcaagtccattaagcctacccatgtggttgtgactctggaagatggcattattggctgtatccatgcctcccacattctagatgatgttccagagggcacctctcctactaccaagctgaaggttgggaagacggtcactgcccgagtgattggcgggcgagacatgaagacattcaagtatctcccaataagtcaccccagattcgttcgaaccatcccggagctgagtgttcggccaagtgagctggaggatggccacactgctcttaacactcactctgttagccccatggagaagattaaacagtaccaggccggccagactgttacttgcttcttaaagaaatacaatgtggtgaagaaatggcttgaggtggagattgccccagacatccgggggagaattcccttattgctcacttctctgagcttcaaggttctgaagcatccagataagaagttccgggttggccaggccctgagggccaccgttgttggcccagattcctccaagaccttcttatgtctgtccctcacaggtgtggggatgaaacagtgcctggtcggggaaggggagcggcaggaaggggtgggatgggttttcagctattgcttgagttggaggaccccttcggtattggaatcctcagaaagcctggtgtgggaccttcttggaacagtttttctcttgggctttgctctggcccagttactccactgctctctgagttacctttacctatacaggttacccttacctacacaggtgtttttctcaagtccctgggaaagagttgtccaccacttggccctgaggtccttggctacatggcagggtgatctcagtctagatggttctggatcactcagcccagataccccaagtctgggcagcctcca

SEQ ID NO: 450389 - DNA, 3137 bp, Homo sapiens
aagaattgcactggactgtgggtatcctggtctccgcgtgtgtgagtaccgcggcgcgaggttagtggtagctgggtgcagacgccgtggcgctggagacccaaacatggcaaacctggaagaaagcttcccccgaggaggtacaagaaagatccacaaaccagagaaagctttccagcagtcagttgaacaagacaacttatttgatatttctactgaagagggatccaccaaaagaaaaaagagccagaaggggccagcaaaaacaaaaaagttgaaaatcgaaaagagagaaagcagcaagtccgcaagagagaagtttgaaatccttagtgttgagtccctgtgtgagggaatgcgtattttgggttgcgtgaaagaggtgaatgaactggaactggtgattagtctccccaatggcctccagggctttgtgcaagtcactgaaatctgtgatgcctacaccaaaaagctgaatgagcaggtgacacaagaacaacctctgaaggacctacttcacttgcctgaacttttctcacctggaatgctggtaagatgtgtggtgagcagtctgggcatcacagacaggggcaagaagagtgtcaagctgtctctgaaccccaaaaatgtcaacagagtgctgagtgctgaggccctgaagcctggcatgctacttacaggtaccgtatccagcctggaagaccatggctacctagtggacattggtgttgatgggaccagagcttttctgccactgctgaaagcccaggagtacatcagacagaagaacaaaggtgctaaactaaaggtgggtcagtacctgaactgcattgttgaaaaggtgaaaggcaacggaggagttgttagtctgtctgttggtcactcagaggtttctacggccattgctactgaacagcagagctggaaccttaataacttgctaccaggactggtggtcaaagctcaggtacagaaggtgactccatttggccttacgctaaacttcctcacattcttcacgggcgtggttgactttatgcacctggatcccaagaaagctggaacatatttctcaaatcaggcagtgagggcctgcatcctttgcgtccatcctcgaaccagagttgtgcacctgagcctgcgccccatcttcctacagcctggacgcccactcacccgactctcttgccagaaccttggagcagtgctggatgatgttcctgtccagggttttttcaaaaaggctggggccacctttaggctgaaggatggggttctggcctatgcccggctcagccatctctctgattctaagaacgtcttcaatcctgaggccttcaagccagggaacactcacaagtgtagaattattgactacagccaaatggatgaactggccttgctctctctacgaacgtctattattgaagctcagtaccttagatatcatgacatcgaacctggggcagtggtaaagggcacagtgctaaccataaagtcatatgggatgctggtgaaggtgggcgagcagatgaggggcctggtacctcccatgcacctggctgacatcctgatgaagaatccggagaagaagtaccacatcggggatgaggtcaagtgccgggttttgctttgtgaccctgaagccaagaagctgatgatgaccctgaaaaaaaccctgattgagtccaaactacctgtcattacctgctatgccgatgccaagcctggtctgcagacacatggcttcatcatcagggtcaaggactatggctgcattgtgaagttctacaacaatgtgcagggactggtgcccaagcatgagctcagtactgagtatatccctgacccggagagagttttttacactggccaggtggtgaaggttgtcgtattgaactgtgagccatccaaagagaggatgctcttatccttcaagctgtcgagtgatccagagccaaagaaagagcctgcaggacacagtcagaagaaaggaaaagccattaacattgggcagttggtagatgtgaaggttttagagaagaccaaagatgggctggaggtggctgtcctgccccacaacatccgtgctttcctccccacatctcatctgtcggaccacgttgccaacggcccattgttacatcattggctccaggcaggtgacatccttcaccgagtcctgtgtctgagccagagcgaggggcgtgttcttctttgcaggaagccagccttggtctccacagtagaaggtggccaggatcccaagaacttctcagaaatccatcctggaatgctgctcattggttttgtgaagagcatcaaggactatggcgtgttcatccagttcccctcaggtcttagcggactggccccaaaagctatcatgagtgacaaatttgtgacctccacaagtgaccactttgttgagggccagacagtagcggcaaaggtgaccaatgtggatgaggagaagcagcggatgctgctgtcactgcggctgtcggactgtggtctgggggacttggctatcaccagcctcctcctcctgaatcagtgcctggaggagctgcagggcgtgcgcagccttatgagcaaccgagactctgtgttgatccagacgctggccgagatgaccccaggaatgttccttgacctagtggtgcaggaggtgttggaagatggctctgtggtattcagtgggggtccagtgcccgacctggtcctgaaagccagcagataccatcgcgcagggcaggaggtggaatctgggcagaaaaagaaggttgttatcttaaatgttgatcttttgaagttggaagtgcacgtttcccttcaccaggacttggtgaatagaaaagctagaaagctgaggaaaggcagcgaacaccaggcgattgtgcagcacttggagaagtcctttgccattgcctccttggtagagacgggccacctggcagctttctccctgacctctcacctcaacgacaccttccgctttgactcagagaaattgcaggtgggacagggtgtctccctaaccctcaagaccacagacccagctagttgttgaagccagttcttttttgtcttggtcatgagggaattaaacgttttctctggcagaaaaaaaaaag

SEQ ID NO: 450390 - DNA, 2202 bp, Homo sapiens
gcccacacaccccactccagctccggagcacccgtgctgggctgcatggggactggccggaggggcagggccaggggagcgggtaggcagagcttcgggaggagatgaggtgaaagtaattgacgctgcccagcccggcagtgggagaggcaggggatgcgtcagtgtcgcgctggagctggcagaggtgatgagcggcggagacacgcggggctgcgatcgctcgccccaggatggccgcggctcatggacctgtggccccctcttccccagaacagaatggtgctgtgcccagcgaggccaccaagagggaccagaacctcaaacggggcaactggggcaaccagatcgagtttgtactgacgagcgtgggctatgccgtgggcctgggcaatgtctggcgcttcccatacctctgctatcgcaacgggggaggcgccttcatgttcccctacttcatcatgctcatcttctgcgggatccccctcttcttcatggagctctccttcggccagtttgcaagccaggggtgcctgggggtctggaggatcagccccatgttcaaaggagtgggctatggtatgatggtggtgtccacctacatcggcatctactacaatgtggtcatctgcatcgccttctactacttcttctcgtccatgacgcacgtgctgccctgggcctactgcaataacccctggaacacgcatgactgcgccggtgtactggacgcctccaacctcaccaatggctctcggccagccgccttgcccagcaacctctcccacctgctcaaccacagcctccagaggaccagccccagcgaggagtactggaggctgtacgtgctgaagctgtcagatgacattgggaactttggggaggtgcggctgcccctccttggctgcctcggtgtctcctggttggtcgtcttcctctgcctcatccgaggggtcaagtcttcagggaaagtggtgtacttcacggccacgttcccctacgtggtgctgaccattctgtttgtccgcggagtgaccctggagggagcctttgacggcatcatgtactacctaaccccgcagtgggacaagatcctggaggccaaggtgtggggtgatgctgcctcccagatcttctactcactggcgtgcgcgtggggaggcctcatcaccatggcttcctacaacaagttccacaataactgttaccgggacagtgtcatcatcagcatcaccaactgtgccaccagcgtctatgctggcttcgtcatcttctccatcctcggcttcatggccaatcacctgggcgtggatgtgtcccgtgtggcagaccacggccctggcctggccttcgtggcttaccccgaggccctcacactacttcccatctccccgctgtggtctctgctcttcttcttcatgcttatcctgctggggctgggcactcagttctgcctcctggagacgctggtcacagccattgtggatgaggtggggaatgagtggatcctgcagaaaaagacctatgtgaccttgggcgtggctgtggctggcttcctgctgggcatccccctcaccagccaggcaggcatctattggctgctgctgatggacaactatgcggccagcttctccttggtggtcatctcctgcatcatgtgtgtggccatcatgtacatctacgggcaccggaactacttccaggacatccagatgatgctgggattcccaccacccctcttctttcagatctgctggcgcttcgtctctcccgccatcatcttctttattctagttttcactgtgatccagtaccagccgatcacctacaaccactaccagtacccaggctgggccgtggccattggcttcctcatggctctgtcctccgtcctctgcatccccctctacgccatgttccggctctgccgcacagacggggacaccctcctccagcgtttgaaaaatgccacaaagccaagcagagactggggccctgccctcctggagcaccggacagggcgctacgcccccaccatagccccctctcctgaggacggcttcgaggtccagtcactgcacccggacaaggcgcagatccccattgtgggcagtaatggctccagccgcctccaggactcccggatatagcacagctgccaggggagtgccaccccacccgtgctccacgagagactgtgag

SEQ ID NO: 450391 - DNA, 1323 bp, Homo sapiens
ggaggcgctcgttacggatgcgctccttacggaggcgctcgttacggtccgtaacgagcgcccttctggagaggggtgcctgggggtctggaggatcagccccatgttcaaaggagtgggctatggtatgatggtggtgtccacctacatcggcatctactacaatgtggtcatctgcatcgccttctactacttcttctcgtccatgacgcacgtgctgccctgggcctactgcaataacccctggaacacgcatgactgcgccggtgtactggacgcctccaacctcaccaatggctctcggccagccgccttgcccagcaacctctcccacctgctcaaccacagcctccagaggaccagccccagcgaggagtactggaggctgtacgtgctgaagctgtcagatgacattgggaactttggggaggtgcggctgcccctccttggctgcctcggtgtctcctggttggtcgtcttcctctgcctcatccgaggggtcaagtcttcagggaaagtggtgtacttcacggccacgttcccctacgtggtgctgaccattctgtttgtccgcggagtgaccctggagggagcctttgacggcatcatgtactacctaaccccgcagtgggacaagatcctggaggccaaggtgtggggtgatgctgcctcccagatcttctactcactggcgtgcgcgtggggaggcctcatcaccatggcttcctacaacaagttccacaataactgttaccggtgagtgctccctgctgggctgaggctgcccccttcctgcactctctgcagcctgatctcagctccagtgcagccatgggcccacgaggcctcctttcccctcatgatcttgaggttctgggaatactggttctggataaagttgttggagaatgaggagagaggtttaggcaggagagagaagagagatagggacagtgatgtcccaggggtctgtgaggactcaggcagctcaggctccttaaaaatgcccagaacagaccagaaaaggagttgggggccaggctcagtgcttcacgccgtaatcccagcactttgagaggccaaggcgggaggatcacttgagcccaggaattcaagacaagcctgggcagcatagtgagaccccatctttctttataaaacataaaaaagaaaattagctgggtgtggtggcacacacctgtagtcccagctacttaggaggctgaggtgggaggattgcttgagaccaagaggtcaaggctacagttagctgtgatagcgccattgcactccatcctggacaacagagtgagaccctgtctc

SEQ ID NO: 450392 - DNA, 168 bp, Homo sapiens
ttcagatctgctggcgcttcgtctctcccgccatcatcttcgtgagttccctggccggcccctcccttcccccgctgccccttggccatgtgtccatctcttgggacccagcggagggacagtgggagctcccgcacctggccggagctccatacccatgactctggc

SEQ ID NO: 450393 - DNA, 2364 bp, Homo sapiens
gcccacacaccccactccagctccggagcacccgtgctgggctgcatggggactggccggaggggcagggccaggggagcgggtaggcagagcttcgggaggagatgaggtgaaagtaattgacgctgcccagcccggcagtgggagaggcaggggatgcgtcagtgtcgcgctggagctggcagaggtgatgagcggcggagacacgcggggctgcgatcgctcgccccaggatggccgcggctcatggacctgtggccccctcttccccagaacaggtgacgcttctccctgttcagagatccttcttcctgccacccttttctggagccactccctctacttccctagcagagtctgtcctcaaagtctggcatggggcctacaactctggtctccttccccaactcatggcccagcactccctagccatggcccagaatggtgctgtgcccagcgaggccaccaagagggaccagaacctcaaacggggcaactggggcaaccagatcgagtttgtactgacgagcgtgggctatgccgtgggcctgggcaatgtctggcgcttcccatacctctgctatcgcaacgggggaggcgccttcatgttcccctacttcatcatgctcatcttctgcgggatccccctcttcttcatggagctctccttcggccagtttgcaagccaggggtgcctgggggtctggaggatcagccccatgttcaaaggagtgggctatggtatgatggtggtgtccacctacatcggcatctactacaatgtggtcatctgcatcgccttctactacttcttctcgtccatgacgcacgtgctgccctgggcctactgcaataacccctggaacacgcatgactgcgccggtgtactggacgcctccaacctcaccaatggctctcggccagccgccttgcccagcaacctctcccacctgctcaaccacagcctccagaggaccagccccagcgaggagtactggaggctgtacgtgctgaagctgtcagatgacattgggaactttggggaggtgcggctgcccctccttggctgcctcggtgtctcctggttggtcgtcttcctctgcctcatccgaggggtcaagtcttcagggaaagtggtgtacttcacggccacgttcccctacgtggtgctgaccattctgtttgtccgcggagtgaccctggagggagcctttgacggcatcatgtactacctaaccccgcagtgggacaagatcctggaggccaaggtgtggggtgatgctgcctcccagatcttctactcactggcgtgcgcgtggggaggcctcatcaccatggcttcctacaacaagttccacaataactgttaccgggacagtgtcatcatcagcatcaccaactgtgccaccagcgtctatgctggcttcgtcatcttctccatcctcggcttcatggccaatcacctgggcgtggatgtgtcccgtgtggcagaccacggccctggcctggccttcgtggcttaccccgaggccctcacactacttcccatctccccgctgtggtctctgctcttcttcttcatgcttatcctgctggggctgggcactcagttctgcctcctggagacgctggtcacagccattgtggatgaggtggggaatgagtggatcctgcagaaaaagacctatgtgaccttgggcgtggctgtggctggcttcctgctgggcatccccctcaccagccaggcaggcatctattggctgctgctgatggacaactatgcggccagcttctccttggtggtcatctcctgcatcatgtgtgtggccatcatgtacatctacgggcaccggaactacttccaggacatccagatgatgctgggattcccaccacccctcttctttcagatctgctggcgcttcgtctctcccgccatcatcttctttattctagttttcactgtgatccagtaccagccgatcacctacaaccactaccagtacccaggctgggccgtggccattggcttcctcatggctctgtcctccgtcctctgcatccccctctacgccatgttccggctctgccgcacagacggggacaccctcctccagcgtttgaaaaatgccacaaagccaagcagagactggggccctgccctcctggagcaccggacagggcgctacgcccccaccatagccccctctcctgaggacggcttcgaggtccagtcactgcacccggacaaggcgcagatccccattgtgggcagtaatggctccagccgcctccaggactcccggatatagcacagctgccaggggagtgccaccccacccgtgctccacgagagactgtgag

SEQ ID NO: 450394 - DNA, 753 bp, Homo sapiens
ggaggcgctcgttacggatgcgctccttacggaggcgctcgttacggtccgtaacgagcgcccttctggagaggggtgcctgggggtctggaggatcagccccatgttcaaaggagtgggctatggtatgatggtggtgtccacctacatcggcatctactacaatgtggtcatctgcatcgccttctactacttcttctcgtccatgacgcacgtgctgccctgggcctactgcaataacccctggaacacgcatgactgcgccggtgtactggacgcctccaacctcaccaatggctctcggccagccgccttgcccagcaacctctcccacctgctcaaccacagcctccagaggaccagccccagcgaggagtactggaggctgtacgtgctgaagctgtcagatgacattgggaactttggggaggtgcggctgcccctccttggctgcctcggtgtctcctggttggtcgtcttcctctgcctcatccgaggggtcaagtcttcagggaaagtggtgtacttcacggccacgttcccctacgtggtgctgaccattctgtttgtccgcggagtgaccctggagggagcctttgacggcatcatgtactacctaaccccgcagtgggacaagatcctggaggccaaggtgtggggtgatgctgcctcccagatcttctactcactggcgtgcgcgtaagggccagcaacgcgcgtaaggtccagcaaccgtgcgtaagggccagcagg

SEQ ID NO: 450395 - DNA, 5677 bp, Homo sapiens
taaaggtcctgtttggtccttctccagagctgaggagaaagggttttcagattataaataacagaggtgcccttgtatggcacagaattgcgataagactttacttcttaggggcttaaataatgaagtcagtaaaagaggactgaaaacgaacataaagaagagctttagctttgacgcaaagaattacatcagtgcttgacaaaaccgaggattcttaatttctaaaaacgctttctttaagcacttcctaacctttcattatctgagacaacatatcaagtgagcagcagtacaaaggatgcatgtgatttcgaaatgccacaattgagccaactgcagttgcacgcgtacgtagtatagagaggtgtgatcaaaaaaagaatatagggagcatagggcttcgtctgcatcaaaagatactctccccatcttctatagccttaagttttgcgaaggtaagtttctccccgcttgaaagcgcccccagggacaagaattcatcttgaccaagcctaaggccgtggcatgcaaggtgttgagtcaccgggtacagcggtcttgcgacataaatattatttgatgacgaaggtactcggggcccaggtgccaaggtaaaccactggcaaagatgaccgtggttaaggcagtagaaagcaggctcgacactgagacgcggttccagccctagaaggattgcattttacgattcaggcaaacttcgagtctcctcatgtgacatgtgtgcactcctggaccgttttaattatgagaaacgtggtttgcagcatgattccttccagtcgataaatcggaatctctctcgctcccaccccttcttaacttcaggcttcctgcatcccggagcactcccggcagccccttccctcccccgccccggggatgctccgactcggcgcttagccattcatcaaccggttcacaccggcggcggccgccgcggagtgacgtccggagggggcgggcctccgcccccgcctgtcggctcctggcccgcggttccaggccgcgattggtggctggagggttgcacgtcgcgccggctataaaggggagggcttgtgacgcaagggcgcctcggcgcgtgtattggctccttcggctgcgggccggctcggctacgcgctctgctccgagccgctcactgcatggtagagtctggtgcccccgccgccgcctgcatcgccgccaccgccgctccgccacgaccaccgccgcctcctgccctgcagccaccgccaccgcctgtgtcgccgccgcctcgggaccggctgtatgattaggccacaatcttcaatgagtaaacatattcctcaattctgtggtgttcttggtcacacatttatggagtttctgaagggcagtggagattactgccaggcacagcacgacctctatgcagacaagtgaactgtagaaactgattactgctccaccaagaagcccccataagagtggttatcctggacacagaagtgttgaattgaaatccacagagcattttacaagagttctgacctggatggggtaaacctcagtgcacttcttttctgttggcctcagtattactggattgaagaattgctgcttcttgttaggaggttcatttcacttatcattacttacaacttcatactcaaagcactgagaatttcaagtggagtatattgaagtagacttcagtttctttgcatcatttctgtattcaatttttttaattatttcataaccctattgagtgttttttaactaaattaacatggctcgaatgaaccgcccagctcctgtggaagtcacatacaagaacatgagatttcttattacacacaatccaaccaatgcgaccttaaacaaatttatagaggaacttaagaagtatggagttaccacaatagtaagagtatgtgaagcaacttatgacactactcttgtggagaaagaaggtatccatgttcttgattggccttttgatgatggtgcaccaccatccaaccagattgttgatgactggttaagtcttgtgaaaattaagtttcgtgaagaacctggttgttgtattgctgttcattgcgttgcaggccttgggagagctccagtacttgttgccctagcattaattgaaggtggaatgaaatacgaagatgcagtacaattcataagacaaaagcggcgtggagcttttaacagcaagcaacttctgtatttggagaagtatcgtcctaaaatgcggctgcgtttcaaagattccaacggtcatagaaacaactgttgcattcaataaaattggggtgcctaatgctactggaagtggaacttgagatagggcctaatttgttatacatattagccaacatgttggcttagtaagtctaatgaagcttccataggagtattgaaaggcagttttaccaggcctcaagctagacagatttggcaacctctgtatttgggttacagtcaacctatttggatacttggcaaaagattcttgctgtcagcatataaaatgtgcttgtcatttgtatcaattgacctttccccaaatcatgcagtattgagttatgacttgttaaatctattcccatgccagaatcttatcaatacataagaaatttaggaagattaggtgccaaaatacccagcacaatacttgtatatttttagtaccatacagaagtaaaatcccaggaactatgaacactagaccttatgtggtttattccttcaatcatttcaaacattgaaagtagggcctacatggttatttgcctgctcactttatgtttacatctcccacattcataccaatatacgtcaggtttgcttaaccattgatttttttttttttaccaagtcttacagtgattattttacgtgtttccatgtatctcactttgtgctgtattaaaaaaacctccattttgaaaatctacgttgtacagaagcacatgtctttaatgtcttcagacaaaaaagccttacattaatttaatgtttgcactctgaggtgcaacttaacagggagggcctgagaaaagaatgggagggggctattaattatttttagcaaaatgttgcctttgtcttgtgcaaacatgtagaatatgctctttaatttagtaaaatatttttttaaaaggtagagatgctttgttattgtaatcataaacttcctgaaattcttgtaatttttttcccatacttatcagaagtgtgtttaccaacttatttttgtttgaaagtgtgattttttttttccttcccaacctctcttgcaaaaaaagaaatgggtttctgctaatgaattgagcagacatctaatattttatatgccttttgagctgtgtaacttaatatttggatacttgacaatttgttttattatgtaattgataaaatggtgatgtgtattaatgttagttcaaccatatatttatactgtctggggatgtgtggttatagttctgtgggagaaataattttgtcagtgttcaccagcttgtaaaaacttagtgcgagagctgaaacatctaaataaataatgacatgcatttatcatcattgagattggtttgcttaaaattaacttattttgtagaagacaaaatgaattgcacttcacttaatgtgtgtcctcatctttttacaaataaatgaaggattataaatgatgtcagcattttagtaaacttttagacaaaatttgttagggtcattcatgaaaactttaatactaaaagcactttccattatatactttttaaaggtctagataattttgaaccaatttattattgtgtactgaggagaaataatgtatagtagaggacagccttggtttgtaaagctcagttccactagttcatggttttgtgcaacttctgagcctcagttttctcctttgcaaattaataattacatacctttatagattttgaaattaatttaaatattagtatttggtacatgaaggcttaatgttaagtttcctttaatgatccacaataatccctttgatcacgttaatctaaatctagatgtctttgtctaattttttttgaatagcagttataaatgtaaaggactcaaagtttaagtaaaaagtgatactccaccttgtgtttcaaagaatttagttccacctcttcataccagtttaacacttaatatatttcattggattttagacagggcaaaaggaagaacaggggcctctggaggcccttggttatttaaatcttggattatttgtgatagtaatcacaaatttttggctaatttttaacctgaggttttgttttttttttaaaggaaatgcagcctagtcttgagaacataattttatataatcaattactaaatgttaaactattaccacacagcccataaaacagcatttgcgtttattgagagagaggatgtgccatcatgattaatgaaaactatcttttgagtttgaaaagaaattaatttgcagtgtttggattgtatatatggtgctaaaaataaattaatttactttataaaccttatctgtacattatacgatgtgatgaaatttgctttttatccaaatattttgtatcttgtaaatatggctaattataggaatgcctataatacatcttagattccttatatctaataagagttcaaagagttatgagttgaagtcttgaatgcaggaaactatctgatagtgttctaaaatttggttacttgggtttggatacccttagtgggatgatgtaaatagaggctagctacctaggcttgtctatagcaaccataatgttgatgtaagtaatgcggttactgaatcataagaaaatgccatctctttttagttgaaggaaaactctggaagtaggtgccattggtcattctgcagtgcactgcaaccattgtttcccctagtgccctcttttccctagggcattgctctcctattcccacgccttaacacagctctatacctagaagcagccagcccaggcatgcagtcacatttaatcacatcccccttctagagtgcttcaaaatgatgtagtccctcaacttggctaaagaatctcaatctcttgaaatttatttttttaatgtcatattcatctggtaaatatctactgtttgccaggcatttaagaatatggcaaagaacataaaagatggtgtcaccagattttggtcaccaatgagtacccgacccgttgccatgattaagagagaatgctttctattggagtttcaggaaatataatttgagaatactttaaagggaagtggaagtataagtgaatgatatttttcttttacatgtaaacaatgaagttatttcaaagttaagttttaaacaaaatacatgaagtagtgtctgccatacatgttaatattctacattcttgcttccttaaattaatatgtttgtgtgtatatatgtgcctcacacctgaattgaaaattaaagactggtttaaaagtggtttaaaagtgacatttaatgtttctccattacgtttggggtaaccagcctaagtggaatcttggaaggaaagtaagggaaaaacttgtatttgccttcaatgaattaaaccagtgatatgtgttaacgtatgaatgaaaaaaagtcgacgcggccgcgaatttagtagtagta

SEQ ID NO: 450396 - DNA, 5673 bp, Homo sapiens
taaaggtcctgtttggtccttctccagagctgaggagaaagggttttcagattataaataacagaggtgcccttgtatggcacagaattgcgataagactttacttcttaggggcttaaataatgaagtcagtaaaagaggactgaaaacgaacataaagaagagctttagctttgacgcaaagaattacatcagtgcttgacaaaaccgaggattcttaatttctaaaaacgctttctttaagcacttcctaacctttcattatctgagacaacatatcaagtgagcagcagtacaaaggatgcatgtgatttcgaaatgccacaattgagccaactgcagttgcacgcgtacgtagtatagagaggtgtgatcaaaaaaagaatatagggagcatagggcttcgtctgcatcaaaagatactctccccatcttctatagccttaagttttgcgaaggtaagtttctccccgcttgaaagcgcccccagggacaagaattcatcttgaccaagcctaaggccgtggcatgcaaggtgttgagtcaccgggtacagcggtcttgcgacataaatattatttgatgacgaaggtactcggggcccaggtgccaaggtaaaccactggcaaagatgaccgtggttaaggcagtagaaagcaggctcgacactgagacgcggttccagccctagaaggattgcattttacgattcaggcaaacttcgagtctcctcatgtgacatgtgtgcactcctggaccgttttaattatgagaaacgtggtttgcagcatgattccttccagtcgataaatcggaatctctctcgctcccaccccttcttaacttcaggcttcctgcatcccggagcactcccggcagccccttccctcccccgccccggggatgctccgactcggcgcttagccattcatcaaccggttcacaccggcggcggccgccgcggagtgacgtccggagggggcgggcctccgcccccgcctgtcggctcctggcccgcggttccaggccgcgattggtggctggagggttgcacgtcgcgccggctataaaggggagggcttgtgacgcaagggcgcctcggcgcgtgtattggctccttcggctgcgggccggctcggctacgcgctctgctccgagccgctcactgcatggtagagtctggtgcccccgccgccgcctgcatcgccgccaccgccgctccgccacgaccaccgccgcctcctgccctgcagccaccgccaccgcctgtgtcgccgccgcctcgggaccggctgtatgattaggccacaatcttcaatgagtaaacatattcctcaattctgtggtgttcttggtcacacatttatggagtttctgaagggcagtggagattactgccaggcacagcacgacctctatgcagacaagtgaactgtagaaactgattactgctccaccaagaagcccccataagagtggttatcctggacacagaagtgttgaattgaaatccacagagcattttacaagagttctgacctggatggggtaaacctcagtgcacttcttttctgttggcctcagtattactggattgaagaattgctgcttcttgttaggaggttcatttcacttatcattacttacaacttcatactcaaagcactgagaatttcaagtggagtatattgaagtagacttcagtttctttgcatcatttctgtattcaatttttttaattatttcataaccctattgagtgttttttaactaaattaacatggctcgaatgaaccgcccagctcctgtggaagtcacatacaagaacatgagatttcttattacacacaatccaaccaatgcgaccttaaacaaatttatagaggaacttaagaagtatggagttaccacaatagtaagagtatgtgaagcaacttatgacactactcttgtggagaaagaaggtatccatgttcttgattggccttttgatgatggtgcaccaccatccaaccagattgttgatgactggttaagtcttgtgaaaattaagtttcgtgaagaacctggttgttgtattgctgttcattgcgttgcaggccttgggagagctccagtacttgttgccctagcattaattgaaggtggaatgaaatacgaagatgcagtacaattcataagacaaaagcggcgtggagcttttaacagcaagcaacttctgtatttggagaagtatcgtcctaaaatgcggctgcgtttcaaagattccaacggtcatagaaacaactgttgcattcaataaaattggggtgcctaatgctactggaagtggaacttgagatagggcctaatttgttatacatattagccaacatgttggcttagtaagtctaatgaagcttccataggagtattgaaaggcagttttaccaggcctcaagctagacagatttggcaacctctgtatttgggttacagtcaacctatttggatacttggcaaaagattcttgctgtcagcatataaaatgtgcttgtcatttgtatcaattgacctttccccaaatcatgcagtattgagttatgacttgttaaatctattcccatgccagaatcttatcaatacataagaaatttaggaagattaggtgccaaaatacccagcacaatacttgtatatttttagtaccatacagaagtaaaatcccaggaactatgaacactagaccttatgtggtttattccttcaatcatttcaaacattgaaagtagggcctacatggttatttgcctgctcactttatgtttacatctcccacattcataccaatatacgtcaggtttgcttaaccattgatttttttttttttaccaagtcttacagtgattattttacgtgtttccatgtatctcactttgtgctgtattaaaaaaacctccattttgaaaatctacgttgtacagaagcacatgtctttaatgtcttcagacaaaaaagccttacattaatttaatgtttgcactctgaggtgcaacttaacagggagggcctgagaaaagaatgggagggggctattaattatttttagcaaaatgttgcctttgtcttgtgcaaacatgtagaatatgctctttaatttagtaaaatatttttttaaaaggtagagatgctttgttattgtaatcataaacttcctgaaattcttgtaatttttttcccatacttatcagaagtgtgtttaccaacttatttttgtttgaaagtgtgattttttttttccttcccaacctctcttgcaaaaaaagaaatgggtttctgctaatgaattgagcagacatctaatattttatatgccttttgagctgtgtaacttaatatttggatacttgacaatttgttttattatgtaattgataaaatggtgatgtgtattaatgttagttcaaccatatatttatactgtctggggatgtgtggttatagttctgtgggagaaataattttgtcagtgttcaccagcttgtaaaaacttagtgcgagagctgaaacatctaaataaataatgacatgcatttatcatcattgagattggtttgcttaaaattaacttattttgtagaagacaaaatgaattgcacttcacttaatgtgtgtcctcatctttttacaaataaatgaaggattataaatgatgtcagcattttagtaaacttttagacaaaatttgttagggtcattcatgaaaactttaatactaaaagcactttccattatatactttttaaaggtctagataattttgaaccaatttattattgtgtactgaggagaaataatgtatagtagaggacagccttggtttgtaaagctcagttccactagttcatggttttgtgcaacttctgagcctcagttttctcctttgcaaattaataattacatacctttatagattttgaaattaatttaaatattagtatttggtacatgaaggcttaatgttaagtttcctttaatgatccacaataatccctttgatcacgttaatctaaatctagatgtctttgtctaattttttttgaatagcagttataaatgtaaaggactcaaagtttaagtaaaaagtgatactccaccttgtgtttcaaagaatttagttccacctcttcataccagtttaacacttaatatatttcattggattttagacagggcaaaaggaagaacaggggcctctggaggcccttggttatttaaatcttggattatttgtgatagtaatcacaaatttttggctaatttttaacctgaggttttgttttttttttaaaggaaatgcagcctagtcttgagaacataattttatataatcaattactaaatgttaaactattaccacacagcccataaaacagcatttgcgtttattgagagagaggatgtgccatcatgattaatgaaaactatcttttgagtttgaaaagaaattaatttgcagtgtttggattgtatatatggtgctaaatttgctttttatccaaatattttgtatcttgtaaatatggctaattataggaatgcctataatacatcttagattccttatatctaataagagttcaaagagttatgagttgaagtcttgaatgcaggaaactatctgatagtgttctaaaatttggttacttgggtttggatacccttagtgggatgatgtaaatagaggctagctacctaggcttgtctatagcaaccataatgttgatgtaagtaatgcggttactgaatcataagaaaatgccatctctttttagttgaaggaaaactctggaagtaggtgccattggtcattctgcagtgcactgcaaccattgtttcccctagtgccctcttttccctagggcattgctctcctattcccacgccttaacacagctctatacctagaagcagccagcccaggcatgcagtcacatttaatcacatcccccttctagagtgcttcaaaatgatgtagtccctcaacttggctaaagaatctcaatctcttgaaatttatttttttaatgtcatattcatctggtaaatatctactgtttgccaggcatttaagaatatggcaaagaacataaaagatggtgtcaccagattttggtcaccaatgagtacccgacccgttgccatgattaagagagaatgctttctattggagtttcaggaaatataatttgagaatactttaaagggaagtggaagtataagtgaatgatatttttcttttacatgtaaacaatgaagttatttcaaagttaagttttaaacaaaatacatgaagtagtgtctgccatacatgttaatattctacattcttgcttccttaaattaatatgtttgtgtgtatatatgtgcctcacacctgaattgaaaattaaagactggtttaaaagtggtttaaaagtgacatttaatgtttctccattacgtttggggtaaccagcctaagtggaatcttggaaggaaagtaagggaaaaacttgtatttgccttcaatgaattaaaccagtgatatgtgttaacgtatgaatgaaaggattgatggtgattttataattatatatattgccgcagtaaccagttaataaattgatagctaccatttaaaatgattttatt

SEQ ID NO: 450397 - DNA, 5567 bp, Homo sapiens
  misc_feature (6)..(6): n is a, c, g, or t
  misc_feature (24)..(24): n is a, c, g, or t
  misc_feature (52)..(53): n is a, c, g, or t
  misc_feature (57)..(57): n is a, c, g, or t
  misc_feature (83)..(83): n is a, c, g, or t
  misc_feature (105)..(105): n is a, c, g, or t
  misc_feature (108)..(108): n is a, c, g, or t
  misc_feature (129)..(129): n is a, c, g, or t
  misc_feature (142)..(142): n is a, c, g, or t
  misc_feature (154)..(154): n is a, c, g, or t
  misc_feature (165)..(165): n is a, c, g, or t
  misc_feature (185)..(185): n is a, c, g, or t
  misc_feature (242)..(242): n is a, c, g, or t
  misc_feature (272)..(272): n is a, c, g, or t
  misc_feature (274)..(274): n is a, c, g, or t
  misc_feature (290)..(290): n is a, c, g, or t
  misc_feature (292)..(292): n is a, c, g, or t
  misc_feature (303)..(303): n is a, c, g, or t
  misc_feature (316)..(317): n is a, c, g, or t
  misc_feature (432)..(432): n is a, c, g, or t
  misc_feature (471)..(471): n is a, c, g, or t
  misc_feature (477)..(477): n is a, c, g, or t
  misc_feature (878)..(878): n is a, c, g, or t
gaaatntaggaagattaggtgccnaaatacccagcacagtacttgtatattnntagnaccatacagaagtaaaatcccagganctatgaacactagaccttatgnggnttattccttcaatcatttcanacattgaaagtanggcctacatggntatttgcctgntcactttatgtttacatctnccacattcataccaatatacgtcaggtttgcttaaccattgattttttttttttttnaccaagtcttacagtgattattttacgtgntnccatgtatctcacttngngctgtattaanaaaacctccattnngaaaatctacgttgtacagaagcacatgtctttaatgtcttcagacaaaaaagccttacattaatttaatgtttgcactctgaggtgcaacttaacagggagggcctgagaaaangaatgggagggggctattaattatttttagcaaaatgtngccttngtcttgtgcaaacatgtagaatatgctctttaatttagtaaaatatttttttaaaaggtagagatgctttgttattgtaatcataaacttcctgaaattcttgtaatttttttcccatacttatcagaagtgtgtttaccaacttatttttgtttgaaagtgtgattttttttttccttcccaacctctcttgcaaaaaaagaaatgggtttctgctaatgaattgagcagacatctaatattttatatgccttttgagctgtgtaacttaatatttggatacttgacaatttgttttattatgtaattgataaaatggtgatgtgtattaatgttagttcaaccatatatttatactgtctggggatgtgtggttatagttctgtgggagaaataatttngtcagtgttcaccagcttgtaaaaacttagtgcgagagctgaaacatctaaataaataatgacatgcatttatcatcaaaaaaaaaaaaaaaaaacaaaaaaaaaaaaaaaaaaaaaaaaaaaaaaactgcatggtagagtctggtgcccccgccgccgcctgcatcgccgccaccgccgctccgccacgaccaccgccgcctcctgccctgcagccaccgccaccgcctgtgtcgccgccgcctcgggaccggctgtatgattaggccacaatcttcaatgagtaaacatattcctcaattctgtggtgttcttggtcacacatttatggagtttctgaagggcagtggagattactgccaggcacagcacgacctctatgcagacaagtgaactgtagaaactgattactgctccaccaagaagcccccataagagtggttatcctggacacagaagtgttgaattgaaatccacagagcattttacaagagttctgacctggatggggtaaacctcagtgcacttcttttctgttggcctcagtattactggattgaagaattgctgcttcttgttaggaggttcatttcacttatcattacttacaacttcatactcaaagcactgagaatttcaagtggagtatattgaagtagacttcagtttctttgcatcatttctgtattcaatttttttaattatttcataaccctattgagtgttttttaactaaattaacatggctcgaatgaaccgcccagctcctgtggaagtcacatacaagaacatgagatttcttattacacacaatccaaccaatgcgaccttaaacaaatttatagaggaacttaagaagtatggagttaccacaatagtaagagtatgtgaagcaacttatgacactactcttgtggagaaagaaggtatccatgttcttgattggccttttgatgatggtgcaccaccatccaaccagattgttgatgactggttaagtcttgtgaaaattaagtttcgtgaagaacctggttgttgtattgctgttcattgcgttgcaggccttgggagagctccagtacttgttgccctagcattaattgaaggtggaatgaaatacgaagatgcagtacaattcataagacaaaagcggcgtggagcttttaacagcaagcaacttctgtatttggagaagtatcgtcctaaaatgcggctgcgtttcaaagattccaacggtcatagaaacaactgttgcattcaataaaattggggtgcctaatgctactggaagtggaacttgagatagggcctaatttgttatacatattagccaacatgttggcttagtaagtctaatgaagcttccataggagtattgaaaggcagttttaccaggcctcaagctagacagatttggcaacctctgtatttgggttacagtcaacctatttggatacttggcaaaagattcttgctgtcagcatataaaatgtgcttgtcatttgtatcaattgacctttccccaaatcatgcagtattgagttatgacttgttaaatctattcccatgccagaatcttatcaatacataagaaatttaggaagattaggtgccaaaatacccagcacaatacttgtatatttttagtaccatacagaagtaaaatcccaggaactatgaacactagaccttatgtggtttattccttcaatcatttcaaacattgaaagtagggcctacatggttatttgcctgctcactttatgtttacatctcccacattcataccaatatacgtcaggtttgcttaaccattgatttttttttttttaccaagtcttacagtgattattttacgtgtttccatgtatctcactttgtgctgtattaaaaaaacctccattttgaaaatctacgttgtacagaagcacatgtctttaatgtcttcagacaaaaaagccttacattaatttaatgtttgcactctgaggtgcaacttaacagggagggcctgagaaaagaatgggagggggctattaattatttttagcaaaatgttgcctttgtcttgtgcaaacatgtagaatatgctctttaatttagtaaaatatttttttaaaaggtagagatgctttgttattgtaatcataaacttcctgaaattcttgtaatttttttcccatacttatcagaagtgtgtttaccaacttatttttgtttgaaagtgtgattttttttttccttcccaacctctcttgcaaaaaaagaaatgggtttctgctaatgaattgagcagacatctaatattttatatgccttttgagctgtgtaacttaatatttggatacttgacaatttgttttattatgtaattgataaaatggtgatgtgtattaatgttagttcaaccatatatttatactgtctggggatgtgtggttatagttctgtgggagaaataattttgtcagtgttcaccagcttgtaaaaacttagtgcgagagctgaaacatctaaataaataatgacatgcatttatcatcattgagattggtttgcttaaaattaacttattttgtagaagacaaaatgaattgcacttcacttaatgtgtgtcctcatctttttacaaataaatgaaggattataaatgatgtcagcattttagtaaacttttagacaaaatttgttagggtcattcatgaaaactttaatactaaaagcactttccattatatactttttaaaggtctagataattttgaaccaatttattattgtgtactgaggagaaataatgtatagtagaggacagccttggtttgtaaagctcagttccactagttcatggttttgtgcaacttctgagcctcagttttctcctttgcaaattaataattacatacctttatagattttgaaattaatttaaatattagtatttggtacatgaaggcttaatgttaagtttcctttaatgatccacaataatccctttgatcacgttaatctaaatctagatgtctttgtctaattttttttgaatagcagttataaatgtaaaggactcaaagtttaagtaaaaagtgatactccaccttgtgtttcaaagaatttagttccacctcttcataccagtttaacacttaatatatttcattggattttagacagggcaaaaggaagaacaggggcctctggaggcccttggttatttaaatcttggattatttgtgatagtaatcacaaatttttggctaatttttaacctgaggttttgttttttttttaaaggaaatgcagcctagtcttgagaacataattttatataatcaattactaaatgttaaactattaccacacagcccataaaacagcatttgcgtttattgagagagaggatgtgccatcatgattaatgaaaactatcttttgagtttgaaaagaaattaatttgcagtgtttggattgtatatatggtgctaaaaataaattaatttactttataaaccttatctgtacattatacgatgtgatgaaatttgctttttatccaaatattttgtatcttgtaaatatggctaattataggaatgcctataatacatcttagattccttatatctaataagagttcaaagagttatgagttgaagtcttgaatgcaggaaactatctgatagtgttctaaaatttggttacttgggtttggatacccttagtgggatgatgtaaatagaggctagctacctaggcttgtctatagcaaccataatgttgatgtaagtaatgcggttactgaatcataagaaaatgccatctctttttagttgaaggaaaactctggaagtaggtgccattggtcattctgcagtgcactgcaaccattgtttcccctagtgccctcttttccctagggcattgctctcctattcccacgccttaacacagctctatacctagaagcagccagcccaggcatgcagtcacatttaatcacatcccccttctagagtgcttcaaaatgatgtagtccctcaacttggctaaagaatctcaatctcttgaaatttatttttttaatgtcatattcatctggtaaatatctactgtttgccaggcatttaagaatatggcaaagaacataaaagatggtgtcaccagattttggtcaccaatgagtacccgacccgttgccatgattaagagagaatgctttctattggagtttcaggaaatataatttgagaatactttaaagggaagtggaagtataagtgaatgatatttttcttttacatgtaaacaatgaagttatttcaaagttaagttttaaacaaaatacatgaagtagtgtctgccatacatgttaatattctacattcttgcttccttaaattaatatgtttgtgtgtatatatgtgcctcacacctgaattgaaaattaaagactggtttaaaagtggtttaaaagtgacatttaatgtttctccattacgtttggggtaaccagcctaagtggaatcttggaaggaaagtaagggaaaaacttgtatttgccttcaatgaattaaaccagtgatatgtgttaacgtatgaatgaaaggattgatggtgattttataattatatatattgccgcagtaaccagttaataaattgatagctaccatttaaaatgattttatt

SEQ ID NO: 450398 - DNA, 4576 bp, Homo sapiens
taaaggtcctgtttggtccttctccagagctgaggagaaagggttttcagattataaataacagaggtgcccttgtatggcacagaattgcgataagactttacttcttaggggcttaaataatgaagtcagtaaaagaggactgaaaacgaacataaagaagagctttagctttgacgcaaagaattacatcagtgcttgacaaaaccgaggattcttaatttctaaaaacgctttctttaagcacttcctaacctttcattatctgagacaacatatcaagtgagcagcagtacaaaggatgcatgtgatttcgaaatgccacaattgagccaactgcagttgcacgcgtacgtagtatagagaggtgtgatcaaaaaaagaatatagggagcatagggcttcgtctgcatcaaaagatactctccccatcttctatagccttaagttttgcgaaggtaagtttctccccgcttgaaagcgcccccagggacaagaattcatcttgaccaagcctaaggccgtggcatgcaaggtgttgagtcaccgggtacagcggtcttgcgacataaatattatttgatgacgaaggtactcggggcccaggtgccaaggtaaaccactggcaaagatgaccgtggttaaggcagtagaaagcaggctcgacactgagacgcggttccagccctagaaggattgcattttacgattcaggcaaacttcgagtctcctcatgtgacatgtgtgcactcctggaccgttttaattatgagaaacgtggtttgcagcatgattccttccagtcgataaatcggaatctctctcgctcccaccccttcttaacttcaggcttcctgcatcccggagcactcccggcagccccttccctcccccgccccggggatgctccgactcggcgcttagccattcatcaaccggttcacaccggcggcggccgccgcggagtgacgtccggagggggcgggcctccgcccccgcctgtcggctcctggcccgcggttccaggccgcgattggtggctggagggttgcacgtcgcgccggctataaaggggagggcttgtgacgcaagggcgcctcggcgcgtgtattggctccttcggctgcgggccggctcggctacgcgctctgctccgagccgctcactgcatggtagagtctggtgcccccgccgccgcctgcatcgccgccaccgccgctccgccacgaccaccgccgcctcctgccctgcagccaccgccaccgcctgtgtcgccgccgcctcgggaccggctgtatgattaggccacaatcttcaatgagtaaacatattcctcaattctgtggtgttcttggtcacacatttatggagtttctgaagggcagtggagattactgccaggcacagcacgacctctatgcagacaagtgaactgtagaaactgattactgctccaccaagaagcccccataagagtggttatcctggacacagaagtgttgaattgaaatccacagagcattttacaagagttctgacctggatggggtaaacctcagtgcacttcttttctgttggcctcagtattactggattgaagaattgctgcttcttgttaggaggttcatttcacttatcattacttacaacttcatactcaaagcactgagaatttcaagtggagtatattgaagtagacttcagtttctttgcatcatttctgtattcaatttttttaattatttcataaccctattgagtgttttttaactaaattaacatggctcgaatgaaccgcccagctcctgtggaagtcacatacaagaacatgagatttcttattacacacaatccaaccaatgcgaccttaaacaaatttatagaggaacttaagaagtatggagttaccacaatagtaagagtatgtgaagcaacttatgacactactcttgtggagaaagaaggtatccatgttcttgattggccttttgatgatggtgcaccaccatccaaccagattgttgatgactggttaagtcttgtgaaaattaagtttcgtgaagaacctggttgttgtattgctgttcattgcgttgcaggccttgggagagctccagtacttgttgccctagcattaattgaaggtggaatgaaatacgaagatgcagtacaattcataagacaaaagcggcgtggagcttttaacagcaagcaacttctgtatttggagaagtatcgtcctaaaatgcggctgcgtttcaaagattccaacggtcatagaaacaactgttgcattcaataaaattggggtgcctaatgctactggaagtggaacttgagatagggcctaatttgttatacatattagccaacatgttggcttagtaagtctaatgaagcttccataggagtattgaaaggcagttttaccaggcctcaagctagacagatttggcaacctctgtatttgggttacagtcaacctatttggatacttggcaaaagattcttgctgtcagcatataaaatgtgcttgtcatttgtatcaattgacctttccccaaatcatgcagtattgagttatgacttgttaaatctattcccatgccagaatcttatcaatacataagaaatttaggaagattaggtgccaaaatacccagcacaatacttgtatatttttagtaccatacagaagtaaaatcccaggaactatgaacactagaccttatgtggtttattccttcaatcatttcaaacattgaaagtagggcctacatggttatttgcctgctcactttatgtttacatctcccacattcataccaatatacgtcaggtttgcttaaccattgatttttttttttttaccaagtcttacagtgattattttacgtgtttccatgtatctcactttgtgctgtattaaaaaaacctccattttgaaaatctacgttgtacagaagcacatgtctttaatgtcttcagacaaaaaagccttacattaatttaatgtttgcactctgaggtgcaacttaacagggagggcctgagaaaagaatgggagggggctattaattatttttagcaaaatgttgcctttgtcttgtgcaaacatgtagaatatgctctttaatttagtaaaatatttttttaaaaggtagagatgctttgttattgtaatcataaacttcctgaaattcttgtaatttttttcccatacttatcagaagtgtgtttaccaacttatttttgtttgaaagtgtgattttttttttccttcccaacctctcttgcaaaaaaagaaatgggtttctgctaatgaattgagcagacatctaatattttatatgccttttgagctgtgtaacttaatatttggatacttgacaatttgttttattatgtaattgataaaatggtgatgtgtattaatgttagttcaaccatatatttatactgtctggggatgtgtggttatagttctgtgggagaaataattttgtcagtgttcaccagcttgtaaaaacttagtgcgagagctgaaacatctaaataaataatgacatgcatttatcatcattgagattggtttgcttaaaattaacttattttgtagaagacaaaatgaattgcacttcacttaatgtgtgtcctcatctttttacaaataaatgaaggattataaatgatgtcagcattttagtaaacttttagacaaaatttgttagggtcattcatgaaaactttaatactaaaagcactttccattatatactttttaaaggtctagataattttgaaccaatttattattgtgtactgaggagaaataatgtatagtagaggacagccttggtttgtaaagctcagttccactagttcatggttttgtgcaacttctgagcctcagttttctcctttgcaaattaataattacatacctttatagattttgaaattaatttaaatattagtatttggtacatgaaggcttaatgttaagtttcctttaatgatccacaataatccctttgatcacgttaatctaaatctagatgtctttgtctaattttttttgaatagcagttataaatgtaaaggactcaaagtttaagtaaaaagtgatactccaccttgtgtttcaaagaatttagttccacctcttcataccagtttaacacttaatatatttcattggattttagacagggcaaaaggaagaacaggggcctctggaggcccttggttatttaaatcttggattatttgtgatagtaatcacaaatttttggctaatttttaacctgaggttttgttttttttttaaaggaaatgcagcctagtcttgagaacataattttatataatcaattactaaatgttaaactattaccacacagcccataaaacagcatttgcgtttattgagagagaggatgtgccatcatgattaatgaaaactatcttttgagtttgaaaagaaattaatttgcagtgtttggattgtatatatggtgctaaaaataaattaatttactttataaaccttatctgtacattatacgatgtgatg

SEQ ID NO: 450399 - DNA, 5931 bp, Homo sapiens
taaaggtcctgtttggtccttctccagagctgaggagaaagggttttcagattataaataacagaggtgcccttgtatggcacagaattgcgataagactttacttcttaggggcttaaataatgaagtcagtaaaagaggactgaaaacgaacataaagaagagctttagctttgacgcaaagaattacatcagtgcttgacaaaaccgaggattcttaatttctaaaaacgctttctttaagcacttcctaacctttcattatctgagacaacatatcaagtgagcagcagtacaaaggatgcatgtgatttcgaaatgccacaattgagccaactgcagttgcacgcgtacgtagtatagagaggtgtgatcaaaaaaagaatatagggagcatagggcttcgtctgcatcaaaagatactctccccatcttctatagccttaagttttgcgaaggtaagtttctccccgcttgaaagcgcccccagggacaagaattcatcttgaccaagcctaaggccgtggcatgcaaggtgttgagtcaccgggtacagcggtcttgcgacataaatattatttgatgacgaaggtactcggggcccaggtgccaaggtaaaccactggcaaagatgaccgtggttaaggcagtagaaagcaggctcgacactgagacgcggttccagccctagaaggattgcattttacgattcaggcaaacttcgagtctcctcatgtgacatgtgtgcactcctggaccgttttaattatgagaaacgtggtttgcagcatgattccttccagtcgataaatcggaatctctctcgctcccaccccttcttaacttcaggcttcctgcatcccggagcactcccggcagccccttccctcccccgccccggggatgctccgactcggcgcttagccattcatcaaccggttcacaccggcggcggccgccgcggagtgacgtccggagggggcgggcctccgcccccgcctgtcggctcctggcccgcggttccaggccgcgattggtggctggagggttgcacgtcgcgccggctataaaggggagggcttgtgacgcaagggcgcctcggcgcgtgtattggctccttcggctgcgggccggctcggctacgcgctctgctccgagccgctcactgcatggtagagtctggtgcccccgccgccgcctgcatcgccgccaagatccgggcgggcgtggggtaggccggacagccaggcacgggtggtaacgatctggttccagagcttctcggagctccggggtgggcgcgggacagccactgggtgcagctacactcttgtgctcgacggccgggacccgagcctcagacaaaatggcctcggcgcccgcgcctgactgaaggcgcggcgcgaacccgtgattgcggcgcggagagggggcgcagcgggcgtgctcgggcgcacacagccgcgtgcgcggggcggcggccctctggggcattccgcgagctgcacccctgcccgggccagagtggggttctgctagcaattctgtggtgttcttggtcacacatttatggagtttctgaagggcagtggagattactgccaggcacagcacgacctctatgcagacaagtgaactgtagaaactgattactgctccaccaagaagcccccataagagtggttatcctggacacagaagtgttgaattgaaatccacagagcattttacaagagttctgacctggatggggtaaacctcagtgcacttcttttctgttggcctcagtattactggattgaagaattgctgcttcttgttaggaggttcatttcacttatcattacttacaacttcatactcaaagcactgagaatttcaagtggagtatattgaagtagacttcagtttctttgcatcatttctgtattcaatttttttaattatttcataaccctattgagtgttttttaactaaattaacatggctcgaatgaaccgcccagctcctgtggaagtcacatacaagaacatgagatttcttattacacacaatccaaccaatgcgaccttaaacaaatttatagaggaacttaagaagtatggagttaccacaatagtaagagtatgtgaagcaacttatgacactactcttgtggagaaagaaggtatccatgttcttgattggccttttgatgatggtgcaccaccatccaaccagattgttgatgactggttaagtcttgtgaaaattaagtttcgtgaagaacctggttgttgtattgctgttcattgcgttgcaggccttgggagagctccagtacttgttgccctagcattaattgaaggtggaatgaaatacgaagatgcagtacaattcataagacaaaagcggcgtggagcttttaacagcaagcaacttctgtatttggagaagtatcgtcctaaaatgcggctgcgtttcaaagattccaacggtcatagaaacaactgttgcattcaataaaattggggtgcctaatgctactggaagtggaacttgagatagggcctaatttgttatacatattagccaacatgttggcttagtaagtctaatgaagcttccataggagtattgaaaggcagttttaccaggcctcaagctagacagatttggcaacctctgtatttgggttacagtcaacctatttggatacttggcaaaagattcttgctgtcagcatataaaatgtgcttgtcatttgtatcaattgacctttccccaaatcatgcagtattgagttatgacttgttaaatctattcccatgccagaatcttatcaatacataagaaatttaggaagattaggtgccaaaatacccagcacaatacttgtatatttttagtaccatacagaagtaaaatcccaggaactatgaacactagaccttatgtggtttattccttcaatcatttcaaacattgaaagtagggcctacatggttatttgcctgctcactttatgtttacatctcccacattcataccaatatacgtcaggtttgcttaaccattgatttttttttttttaccaagtcttacagtgattattttacgtgtttccatgtatctcactttgtgctgtattaaaaaaacctccattttgaaaatctacgttgtacagaagcacatgtctttaatgtcttcagacaaaaaagccttacattaatttaatgtttgcactctgaggtgcaacttaacagggagggcctgagaaaagaatgggagggggctattaattatttttagcaaaatgttgcctttgtcttgtgcaaacatgtagaatatgctctttaatttagtaaaatatttttttaaaaggtagagatgctttgttattgtaatcataaacttcctgaaattcttgtaatttttttcccatacttatcagaagtgtgtttaccaacttatttttgtttgaaagtgtgattttttttttccttcccaacctctcttgcaaaaaaagaaatgggtttctgctaatgaattgagcagacatctaatattttatatgccttttgagctgtgtaacttaatatttggatacttgacaatttgttttattatgtaattgataaaatggtgatgtgtattaatgttagttcaaccatatatttatactgtctggggatgtgtggttatagttctgtgggagaaataattttgtcagtgttcaccagcttgtaaaaacttagtgcgagagctgaaacatctaaataaataatgacatgcatttatcatcattgagattggtttgcttaaaattaacttattttgtagaagacaaaatgaattgcacttcacttaatgtgtgtcctcatctttttacaaataaatgaaggattataaatgatgtcagcattttagtaaacttttagacaaaatttgttagggtcattcatgaaaactttaatactaaaagcactttccattatatactttttaaaggtctagataattttgaaccaatttattattgtgtactgaggagaaataatgtatagtagaggacagccttggtttgtaaagctcagttccactagttcatggttttgtgcaacttctgagcctcagttttctcctttgcaaattaataattacatacctttatagattttgaaattaatttaaatattagtatttggtacatgaaggcttaatgttaagtttcctttaatgatccacaataatccctttgatcacgttaatctaaatctagatgtctttgtctaattttttttgaatagcagttataaatgtaaaggactcaaagtttaagtaaaaagtgatactccaccttgtgtttcaaagaatttagttccacctcttcataccagtttaacacttaatatatttcattggattttagacagggcaaaaggaagaacaggggcctctggaggcccttggttatttaaatcttggattatttgtgatagtaatcacaaatttttggctaatttttaacctgaggttttgttttttttttaaaggaaatgcagcctagtcttgagaacataattttatataatcaattactaaatgttaaactattaccacacagcccataaaacagcatttgcgtttattgagagagaggatgtgccatcatgattaatgaaaactatcttttgagtttgaaaagaaattaatttgcagtgtttggattgtatatatggtgctaaaaataaattaatttactttataaaccttatctgtacattatacgatgtgatgaaatttgctttttatccaaatattttgtatcttgtaaatatggctaattataggaatgcctataatacatcttagattccttatatctaataagagttcaaagagttatgagttgaagtcttgaatgcaggaaactatctgatagtgttctaaaatttggttacttgggtttggatacccttagtgggatgatgtaaatagaggctagctacctaggcttgtctatagcaaccataatgttgatgtaagtaatgcggttactgaatcataagaaaatgccatctctttttagttgaaggaaaactctggaagtaggtgccattggtcattctgcagtgcactgcaaccattgtttcccctagtgccctcttttccctagggcattgctctcctattcccacgccttaacacagctctatacctagaagcagccagcccaggcatgcagtcacatttaatcacatcccccttctagagtgcttcaaaatgatgtagtccctcaacttggctaaagaatctcaatctcttgaaatttatttttttaatgtcatattcatctggtaaatatctactgtttgccaggcatttaagaatatggcaaagaacataaaagatggtgtcaccagattttggtcaccaatgagtacccgacccgttgccatgattaagagagaatgctttctattggagtttcaggaaatataatttgagaatactttaaagggaagtggaagtataagtgaatgatatttttcttttacatgtaaacaatgaagttatttcaaagttaagttttaaacaaaatacatgaagtagtgtctgccatacatgttaatattctacattcttgcttccttaaattaatatgtttgtgtgtatatatgtgcctcacacctgaattgaaaattaaagactggtttaaaagtggtttaaaagtgacatttaatgtttctccattacgtttggggtaaccagcctaagtggaatcttggaaggaaagtaagggaaaaacttgtatttgccttcaatgaattaaaccagtgatatgtgttaacgtatgaatgaaaggattgatggtgattttataattatatatattgccgcagtaaccagttaataaattgatagctaccatttaaaatgattttatt

SEQ ID NO: 450400 - DNA, 4879 bp, Homo sapiens
cgggcatggcaggctccgcggcgtcccggggcctctttgttcggccggaggagagtggctgcactgggagcgggagacgtggcccggggtggggcgagggctgcgcgtgtcactgcggagccggatacggggagggcgcggcggtggcgggttcgcctccagatccgggcgggcgtggggtaggccggacagccaggcacgggtggtaacgatctggttccagagcttctcggagctccggggtgggcgcgggacagccactgggtgcagctacactcttgtgctcgacggccgggacccgagcctcagacaaaatggcctcggcgcccgcgcctgactgaaggcgcggcgcgaacccgtgattgcggcgcggagagggggcgcagcgggcgtgctcgggcgcacacagccgcgtgcgcggggcggcggccctctggggcattccgcgagctgcacccctgcccgggccagagtggggttctgctagcaattctgtggtgttcttggtcacacatttatggagtttctgaagggcagtggagattactgccaggcacagcacgacctctatgcagacaagtgaactgtagaaactgattactgctccaccaagaagcccccataagagtggttatcctggacacagaagtgttgaattgaaatccacagagcattttacaagagttctgacctggatggggtaaacctcagtgcacttcttttctgttggcctcagtattactggattgaagaattgctgcttcttgttaggaggttcatttcacttatcattacttacaacttcatactcaaagcactgagaatttcaagtggagtatattgaagtagacttcagtttctttgcatcatttctgtattcaatttttttaattatttcataaccctattgagtgttttttaactaaattaacatggctcgaatgaaccgcccagctcctgtggaagtcacatacaagaacatgagatttcttattacacacaatccaaccaatgcgaccttaaacaaatttatagaggaacttaagaagtatggagttaccacaatagtaagagtatgtgaagcaacttatgacactactcttgtggagaaagaaggtatccatgttcttgattggccttttgatgatggtgcaccaccatccaaccagattgttgatgactggttaagtcttgtgaaaattaagtttcgtgaagaacctggttgttgtattgctgttcattgcgttgcaggccttgggagagctccagtacttgttgccctagcattaattgaaggtggaatgaaatacgaagatgcagtacaattcataagacaaaagcggcgtggagcttttaacagcaagcaacttctgtatttggagaagtatcgtcctaaaatgcggctgcgtttcaaagattccaacggtcatagaaacaactgttgcattcaataaaattggggtgcctaatgctactggaagtggaacttgagatagggcctaatttgttatacatattagccaacatgttggcttagtaagtctaatgaagcttccataggagtattgaaaggcagttttaccaggcctcaagctagacagatttggcaacctctgtatttgggttacagtcaacctatttggatacttggcaaaagattcttgctgtcagcatataaaatgtgcttgtcatttgtatcaattgacctttccccaaatcatgcagtattgagttatgacttgttaaatctattcccatgccagaatcttatcaatacataagaaatttaggaagattaggtgccaaaatacccagcacaatacttgtatatttttagtaccatacagaagtaaaatcccaggaactatgaacactagaccttatgtggtttattccttcaatcatttcaaacattgaaagtagggcctacatggttatttgcctgctcactttatgtttacatctcccacattcataccaatatacgtcaggtttgcttaaccattgatttttttttttttaccaagtcttacagtgattattttacgtgtttccatgtatctcactttgtgctgtattaaaaaaacctccattttgaaaatctacgttgtacagaagcacatgtctttaatgtcttcagacaaaaaagccttacattaatttaatgtttgcactctgaggtgcaacttaacagggagggcctgagaaaagaatgggagggggctattaattatttttagcaaaatgttgcctttgtcttgtgcaaacatgtagaatatgctctttaatttagtaaaatatttttttaaaaggtagagatgctttgttattgtaatcataaacttcctgaaattcttgtaatttttttcccatacttatcagaagtgtgtttaccaacttatttttgtttgaaagtgtgattttttttttccttcccaacctctcttgcaaaaaaagaaatgggtttctgctaatgaattgagcagacatctaatattttatatgccttttgagctgtgtaacttaatatttggatacttgacaatttgttttattatgtaattgataaaatggtgatgtgtattaatgttagttcaaccatatatttatactgtctggggatgtgtggttatagttctgtgggagaaataattttgtcagtgttcaccagcttgtaaaaacttagtgcgagagctgaaacatctaaataaataatgacatgcatttatcatcattgagattggtttgcttaaaattaacttattttgtagaagacaaaatgaattgcacttcacttaatgtgtgtcctcatctttttacaaataaatgaaggattataaatgatgtcagcattttagtaaacttttagacaaaatttgttagggtcattcatgaaaactttaatactaaaagcactttccattatatactttttaaaggtctagataattttgaaccaatttattattgtgtactgaggagaaataatgtatagtagaggacagccttggtttgtaaagctcagttccactagttcatggttttgtgcaacttctgagcctcagttttctcctttgcaaattaataattacatacctttatagattttgaaattaatttaaatattagtatttggtacatgaaggcttaatgttaagtttcctttaatgatccacaataatccctttgatcacgttaatctaaatctagatgtctttgtctaattttttttgaatagcagttataaatgtaaaggactcaaagtttaagtaaaaagtgatactccaccttgtgtttcaaagaatttagttccacctcttcataccagtttaacacttaatatatttcattggattttagacagggcaaaaggaagaacaggggcctctggaggcccttggttatttaaatcttggattatttgtgatagtaatcacaaatttttggctaatttttaacctgaggttttgttttttttttaaaggaaatgcagcctagtcttgagaacataattttatataatcaattactaaatgttaaactattaccacacagcccataaaacagcatttgcgtttattgagagagaggatgtgccatcatgattaatgaaaactatcttttgagtttgaaaagaaattaatttgcagtgtttggattgtatatatggtgctaaaaataaattaatttactttataaaccttatctgtacattatacgatgtgatgaaatttgctttttatccaaatattttgtatcttgtaaatatggctaattataggaatgcctataatacatcttagattccttatatctaataagagttcaaagagttatgagttgaagtcttgaatgcaggaaactatctgatagtgttctaaaatttggttacttgggtttggatacccttagtgggatgatgtaaatagaggctagctacctaggcttgtctatagcaaccataatgttgatgtaagtaatgcggttactgaatcataagaaaatgccatctctttttagttgaaggaaaactctggaagtaggtgccattggtcattctgcagtgcactgcaaccattgtttcccctagtgccctcttttccctagggcattgctctcctattcccacgccttaacacagctctatacctagaagcagccagcccaggcatgcagtcacatttaatcacatcccccttctagagtgcttcaaaatgatgtagtccctcaacttggctaaagaatctcaatctcttgaaatttatttttttaatgtcatattcatctggtaaatatctactgtttgccaggcatttaagaatatggcaaagaacataaaagatggtgtcaccagattttggtcaccaatgagtacccgacccgttgccatgattaagagagaatgctttctattggagtttcaggaaatataatttgagaatactttaaagggaagtggaagtataagtgaatgatatttttcttttacatgtaaacaatgaagttatttcaaagttaagttttaaacaaaatacatgaagtagtgtctgccatacatgttaatattctacattcttgcttccttaaattaatatgtttgtgtgtatatatgtgcctcacacctgaattgaaaattaaagactggtttaaaagtggtttaaaagtgacatttaatgtttctccattacgtttggggtaaccagcctaagtggaatcttggaaggaaagtaagggaaaaacttgtatttgccttcaatgaattaaaccagtgatatgtgttaacgtatgaatgaaaggattgatggtgattttataattatatatattgccgcagtaaccagttaataaattgatagctaccatttaaaatgattttatt

SEQ ID NO: 450401 - DNA, 4447 bp, Homo sapiens
  misc_feature (38)..(38): n is a, c, g, or t
ggctgttctagaggatcccggtcaatttctacaccaantgagtaaacatattcctcaattctgtggtgttcttggtcacacatttatggagtttctgaagggcagtggagattactgccaggcacagcacgacctctatgcagacaagtgaactgtagaaactgattactgctccaccaagaagcccccataagagtggttatcctggacacagaagtgttgaattgaaatccacagagcattttacaagagttctgacctggatggggtaaacctcagtgcacttcttttctgttggcctcagtattactggattgaagaattgctgcttcttgttaggaggttcatttcacttatcattacttacaacttcatactcaaagcactgagaatttcaagtggagtatattgaagtagacttcagtttctttgcatcatttctgtattcaatttttttaattatttcataaccctattgagtgttttttaactaaattaacatggctcgaatgaaccgcccagctcctgtggaagtcacatacaagaacatgagatttcttattacacacaatccaaccaatgcgaccttaaacaaatttatagaggaacttaagaagtatggagttaccacaatagtaagagtatgtgaagcaacttatgacactactcttgtggagaaagaaggtatccatgttcttgattggccttttgatgatggtgcaccaccatccaaccagattgttgatgactggttaagtcttgtgaaaattaagtttcgtgaagaacctggttgttgtattgctgttcattgcgttgcaggccttgggagagctccagtacttgttgccctagcattaattgaaggtggaatgaaatacgaagatgcagtacaattcataagacaaaagcggcgtggagcttttaacagcaagcaacttctgtatttggagaagtatcgtcctaaaatgcggctgcgtttcaaagattccaacggtcatagaaacaactgttgcattcaataaaattggggtgcctaatgctactggaagtggaacttgagatagggcctaatttgttatacatattagccaacatgttggcttagtaagtctaatgaagcttccataggagtattgaaaggcagttttaccaggcctcaagctagacagatttggcaacctctgtatttgggttacagtcaacctatttggatacttggcaaaagattcttgctgtcagcatataaaatgtgcttgtcatttgtatcaattgacctttccccaaatcatgcagtattgagttatgacttgttaaatctattcccatgccagaatcttatcaatacataagaaatttaggaagattaggtgccaaaatacccagcacaatacttgtatatttttagtaccatacagaagtaaaatcccaggaactatgaacactagaccttatgtggtttattccttcaatcatttcaaacattgaaagtagggcctacatggttatttgcctgctcactttatgtttacatctcccacattcataccaatatacgtcaggtttgcttaaccattgatttttttttttttaccaagtcttacagtgattattttacgtgtttccatgtatctcactttgtgctgtattaaaaaaacctccattttgaaaatctacgttgtacagaagcacatgtctttaatgtcttcagacaaaaaagccttacattaatttaatgtttgcactctgaggtgcaacttaacagggagggcctgagaaaagaatgggagggggctattaattatttttagcaaaatgttgcctttgtcttgtgcaaacatgtagaatatgctctttaatttagtaaaatatttttttaaaaggtagagatgctttgttattgtaatcataaacttcctgaaattcttgtaatttttttcccatacttatcagaagtgtgtttaccaacttatttttgtttgaaagtgtgattttttttttccttcccaacctctcttgcaaaaaaagaaatgggtttctgctaatgaattgagcagacatctaatattttatatgccttttgagctgtgtaacttaatatttggatacttgacaatttgttttattatgtaattgataaaatggtgatgtgtattaatgttagttcaaccatatatttatactgtctggggatgtgtggttatagttctgtgggagaaataattttgtcagtgttcaccagcttgtaaaaacttagtgcgagagctgaaacatctaaataaataatgacatgcatttatcatcattgagattggtttgcttaaaattaacttattttgtagaagacaaaatgaattgcacttcacttaatgtgtgtcctcatctttttacaaataaatgaaggattataaatgatgtcagcattttagtaaacttttagacaaaatttgttagggtcattcatgaaaactttaatactaaaagcactttccattatatactttttaaaggtctagataattttgaaccaatttattattgtgtactgaggagaaataatgtatagtagaggacagccttggtttgtaaagctcagttccactagttcatggttttgtgcaacttctgagcctcagttttctcctttgcaaattaataattacatacctttatagattttgaaattaatttaaatattagtatttggtacatgaaggcttaatgttaagtttcctttaatgatccacaataatccctttgatcacgttaatctaaatctagatgtctttgtctaattttttttgaatagcagttataaatgtaaaggactcaaagtttaagtaaaaagtgatactccaccttgtgtttcaaagaatttagttccacctcttcataccagtttaacacttaatatatttcattggattttagacagggcaaaaggaagaacaggggcctctggaggcccttggttatttaaatcttggattatttgtgatagtaatcacaaatttttggctaatttttaacctgaggttttgttttttttttaaaggaaatgcagcctagtcttgagaacataattttatataatcaattactaaatgttaaactattaccacacagcccataaaacagcatttgcgtttattgagagagaggatgtgccatcatgattaatgaaaactatcttttgagtttgaaaagaaattaatttgcagtgtttggattgtatatatggtgctaaaaataaattaatttactttataaaccttatctgtacattatacgatgtgatgaaatttgctttttatccaaatattttgtatcttgtaaatatggctaattataggaatgcctataatacatcttagattccttatatctaataagagttcaaagagttatgagttgaagtcttgaatgcaggaaactatctgatagtgttctaaaatttggttacttgggtttggatacccttagtgggatgatgtaaatagaggctagctacctaggcttgtctatagcaaccataatgttgatgtaagtaatgcggttactgaatcataagaaaatgccatctctttttagttgaaggaaaactctggaagtaggtgccattggtcattctgcagtgcactgcaaccattgtttcccctagtgccctcttttccctagggcattgctctcctattcccacgccttaacacagctctatacctagaagcagccagcccaggcatgcagtcacatttaatcacatcccccttctagagtgcttcaaaatgatgtagtccctcaacttggctaaagaatctcaatctcttgaaatttatttttttaatgtcatattcatctggtaaatatctactgtttgccaggcatttaagaatatggcaaagaacataaaagatggtgtcaccagattttggtcaccaatgagtacccgacccgttgccatgattaagagagaatgctttctattggagtttcaggaaatataatttgagaatactttaaagggaagtggaagtataagtgaatgatatttttcttttacatgtaaacaatgaagttatttcaaagttaagttttaaacaaaatacatgaagtagtgtctgccatacatgttaatattctacattcttgcttccttaaattaatatgtttgtgtgtatatatgtgcctcacacctgaattgaaaattaaagactggtttaaaagtggtttaaaagtgacatttaatgtttctccattacgtttggggtaaccagcctaagtggaatcttggaaggaaagtaagggaaaaacttgtatttgccttcaatgaattaaaccagtgatatgtgttaacgtatgaatgaaaggattgatggtgattttataattatatatattgccgcagtaaccagttaataaattgatagctaccatttaaaatgattttatt

SEQ ID NO: 450402 - DNA, 5672 bp, Homo sapiens
taaaggtcctgtttggtccttctccagagctgaggagaaagggttttcagattataaataacagaggtgcccttgtatggcacagaattgcgataagactttacttcttaggggcttaaataatgaagtcagtaaaagaggactgaaaacgaacataaagaagagctttagctttgacgcaaagaattacatcagtgcttgacaaaaccgaggattcttaatttctaaaaacgctttctttaagcacttcctaacctttcattatctgagacaacatatcaagtgagcagcagtacaaaggatgcatgtgatttcgaaatgccacaattgagccaactgcagttgcacgcgtacgtagtatagagaggtgtgatcaaaaaaagaatatagggagcatagggcttcgtctgcatcaaaagatactctccccatcttctatagccttaagttttgcgaaggtaagtttctccccgcttgaaagcgcccccagggacaagaattcatcttgaccaagcctaaggccgtggcatgcaaggtgttgagtcaccgggtacagcggtcttgcgacataaatattatttgatgacgaaggtactcggggcccaggtgccaaggtaaaccactggcaaagatgaccgtggttaaggcagtagaaagcaggctcgacactgagacgcggttccagccctagaaggattgcattttacgattcaggcaaacttcgagtctcctcatgtgacatgtgtgcactcctggaccgttttaattatgagaaacgtggtttgcagcatgattccttccagtcgataaatcggaatctctctcgctcccaccccttcttaacttcaggcttcctgcatcccggagcactcccggcagccccttccctcccccgccccggggatgctccgactcggcgcttagccattcatcaaccggttcacaccggcggcggccgccgcggagtgacgtccggagggggcgggcctccgcccccgcctgtcggctcctggcccgcggttccaggccgcgattggtggctggagggttgcacgtcgcgccggctataaaggggagggcttgtgacgcaagggcgcctcggcgcgtgtattggctccttcggctgcgggccggctcggctacgcgctctgctccgagccgctcactgcatggtagagtctggtgcccccgccgccgcctgcatcgccgccaccgccgctccgccacgaccaccgccgcctcctgccctgcagccaccgccaccgcctgtgtcgccgccgcctcgggaccggctgtatgattaggccacaatcttcaatgagtaaacatattcctcaattctgtggtgttcttggtcacacatttatggagtttctgaagggcagtggagattactgccaggcacagcacgacctctatgcagacaagtgaactgtagaaactgattactgctccaccaagaagcccccataagagtggttatcctggacacagaagtgttgaattgaaatccacagagcattttacaagagttctgacctggatggggtaaacctcagtgcacttcttttctgttggcctcagtattactggattgaagaattgctgcttcttgttaggaggttcatttcacttatcattacttacaacttcatactcaaagcactgagaatttcaagtggagtatattgaagtagacttcagtttctttgcatcatttctgtattggctcgaatgaaccgcccagctcctgtggaagtcacatacaagaacatgagatttcttattacacacaatccaaccaatgcgaccttaaacaaatttatagaggaacttaagaagtatggagttaccacaatagtaagagtatgtgaagcaacttatgacactactcttgtggagaaagaaggtatccatgttcttgattggccttttgatgatggtgcaccaccatccaaccagattgttgatgactggttaagtcttgtgaaaattaagtttcgtgaagaacctggttgttgtattgctgttcattgcgttgcaggccttgggagagctccagtacttgttgccctagcattaattgaaggtggaatgaaatacgaagatgcagtacaattcataagacaaaagcggcgtggagcttttaacagcaagcaacttctgtatttggagaagtatcgtcctaaaatgcggctgcgtttcaaagattccaacggtcatagaaacaactgttgcattcaataaaattggggtgcctaatgctactggaagtggaacttgagatagggcctaatttgttatacatattagccaacatgttggcttagtaagtctaatgaagcttccataggagtattgaaaggcagttttaccaggcctcaagctagacagatttggcaacctctgtatttgggttacagtcaacctatttggatacttggcaaaagattcttgctgtcagcatataaaatgtgcttgtcatttgtatcaattgacctttccccaaatcatgcagtattgagttatgacttgttaaatctattcccatgccagaatcttatcaatacataagaaatttaggaagattaggtgccaaaatacccagcacaatacttgtatatttttagtaccatacagaagtaaaatcccaggaactatgaacactagaccttatgtggtttattccttcaatcatttcaaacattgaaagtagggcctacatggttatttgcctgctcactttatgtttacatctcccacattcataccaatatacgtcaggtttgcttaaccattgatttttttttttttaccaagtcttacagtgattattttacgtgtttccatgtatctcactttgtgctgtattaaaaaaacctccattttgaaaatctacgttgtacagaagcacatgtctttaatgtcttcagacaaaaaagccttacattaatttaatgtttgcactctgaggtgcaacttaacagggagggcctgagaaaagaatgggagggggctattaattatttttagcaaaatgttgcctttgtcttgtgcaaacatgtagaatatgctctttaatttagtaaaatatttttttaaaaggtagagatgctttgttattgtaatcataaacttcctgaaattcttgtaatttttttcccatacttatcagaagtgtgtttaccaacttatttttgtttgaaagtgtgattttttttttccttcccaacctctcttgcaaaaaaagaaatgggtttctgctaatgaattgagcagacatctaatattttatatgccttttgagctgtgtaacttaatatttggatacttgacaatttgttttattatgtaattgataaaatggtgatgtgtattaatgttagttcaaccatatatttatactgtctggggatgtgtggttatagttctgtgggagaaataattttgtcagtgttcaccagcttgtaaaaacttagtgcgagagctgaaacatctaaataaataatgacatgcatttatcatcattgagattggtttgcttaaaattaacttattttgtagaagacaaaatgaattgcacttcacttaatgtgtgtcctcatctttttacaaataaatgaaggattataaatgatgtcagcattttagtaaacttttagacaaaatttgttagggtcattcatgaaaactttaatactaaaagcactttccattatatactttttaaaggtctagataattttgaaccaatttattattgtgtactgaggagaaataatgtatagtagaggacagccttggtttgtaaagctcagttccactagttcatggttttgtgcaacttctgagcctcagttttctcctttgcaaattaataattacatacctttatagattttgaaattaatttaaatattagtatttggtacatgaaggcttaatgttaagtttcctttaatgatccacaataatccctttgatcacgttaatctaaatctagatgtctttgtctaattttttttgaatagcagttataaatgtaaaggactcaaagtttaagtaaaaagtgatactccaccttgtgtttcaaagaatttagttccacctcttcataccagtttaacacttaatatatttcattggattttagacagggcaaaaggaagaacaggggcctctggaggcccttggttatttaaatcttggattatttgtgatagtaatcacaaatttttggctaatttttaacctgaggttttgttttttttttaaaggaaatgcagcctagtcttgagaacataattttatataatcaattactaaatgttaaactattaccacacagcccataaaacagcatttgcgtttattgagagagaggatgtgccatcatgattaatgaaaactatcttttgagtttgaaaagaaattaatttgcagtgtttggattgtatatatggtgctaaaaataaattaatttactttataaaccttatctgtacattatacgatgtgatgaaatttgctttttatccaaatattttgtatcttgtaaatatggctaattataggaatgcctataatacatcttagattccttatatctaataagagttcaaagagttatgagttgaagtcttgaatgcaggaaactatctgatagtgttctaaaatttggttacttgggtttggatacccttagtgggatgatgtaaatagaggctagctacctaggcttgtctatagcaaccataatgttgatgtaagtaatgcggttactgaatcataagaaaatgccatctctttttagttgaaggaaaactctggaagtaggtgccattggtcattctgcagtgcactgcaaccattgtttcccctagtgccctcttttccctagggcattgctctcctattcccacgccttaacacagctctatacctagaagcagccagcccaggcatgcagtcacatttaatcacatcccccttctagagtgcttcaaaatgatgtagtccctcaacttggctaaagaatctcaatctcttgaaatttatttttttaatgtcatattcatctggtaaatatctactgtttgccaggcatttaagaatatggcaaagaacataaaagatggtgtcaccagattttggtcaccaatgagtacccgacccgttgccatgattaagagagaatgctttctattggagtttcaggaaatataatttgagaatactttaaagggaagtggaagtataagtgaatgatatttttcttttacatgtaaacaatgaagttatttcaaagttaagttttaaacaaaatacatgaagtagtgtctgccatacatgttaatattctacattcttgcttccttaaattaatatgtttgtgtgtatatatgtgcctcacacctgaattgaaaattaaagactggtttaaaagtggtttaaaagtgacatttaatgtttctccattacgtttggggtaaccagcctaagtggaatcttggaaggaaagtaagggaaaaacttgtatttgccttcaatgaattaaaccagtgatatgtgttaacgtatgaatgaaaggattgatggtgattttataattatatatattgccgcagtaaccagttaataaattgatagctaccatttaaaatgattttatt

SEQ ID NO: 450403 - DNA, 3583 bp, Homo sapiens
taaaggtcctgtttggtccttctccagagctgaggagaaagggttttcagattataaataacagaggtgcccttgtatggcacagaattgcgataagactttacttcttaggggcttaaataatgaagtcagtaaaagaggactgaaaacgaacataaagaagagctttagctttgacgcaaagaattacatcagtgcttgacaaaaccgaggattcttaatttctaaaaacgctttctttaagcacttcctaacctttcattatctgagacaacatatcaagtgagcagcagtacaaaggatgcatgtgatttcgaaatgccacaattgagccaactgcagttgcacgcgtacgtagtatagagaggtgtgatcaaaaaaagaatatagggagcatagggcttcgtctgcatcaaaagatactctccccatcttctatagccttaagttttgcgaaggtaagtttctccccgcttgaaagcgcccccagggacaagaattcatcttgaccaagcctaaggccgtggcatgcaaggtgttgagtcaccgggtacagcggtcttgcgacataaatattatttgatgacgaaggtactcggggcccaggtgccaaggtaaaccactggcaaagatgaccgtggttaaggcagtagaaagcaggctcgacactgagacgcggttccagccctagaaggattgcattttacgattcaggcaaacttcgagtctcctcatgtgacatgtgtgcactcctggaccgttttaattatgagaaacgtggtttgcagcatgattccttccagtcgataaatcggaatctctctcgctcccaccccttcttaacttcaggcttcctgcatcccggagcactcccggcagccccttccctcccccgccccggggatgctccgactcggcgcttagccattcatcaaccggttcacaccggcggcggccgccgcggagtgacgtccggagggggcgggcctccgcccccgcctgtcggctcctggcccgcggttccaggccgcgattggtggctggagggttgcacgtcgcgccggctataaaggggagggcttgtgacgcaagggcgcctcggcgcgtgtattggctccttcggctgcgggccggctcggctacgcgctctgctccgagccgctcactgcatggtagagtctggtgcccccgccgccgcctgcatcgccgccaccgccgctccgccacgaccaccgccgcctcctgccctgcagccaccgccaccgcctgtgtcgccgccgcctcgggaccggctgtatgattaggccacaatcttcaatgagtaaacatattcctcaattctgtggtgttcttggtcacacatttatggagtttctgaagggcagtggagattactgccaggcacagcacgacctctatgcagacaagtgaactgtagaaactgattactgctccaccaagaagcccccataagagtggttatcctggacacagaagtgttgaattgaaatccacagagcattttacaagagttctgacctggatggggtaaacctcagtgcacttcttttctgttggcctcagtattactggattgaagaattgctgcttcttgttaggaggttcatttcacttatcattacttacaacttcatactcaaagcactgagaatttcaagtggagtatattgaagtagacttcagtttctttgcatcatttctgtattcaatttttttaattatttcataaccctattgagtgttttttaactaaattaacatggctcgaatgaaccgcccagctcctgtggaagtcacatacaagaacatgagatttcttattacacacaatccaaccaatgcgaccttaaacaaatttatagaggaacttaagaagtatggagttaccacaatagtaagagtatgtgaagcaacttatgacactactcttgtggagaaagaaggtatccatgttcttgattggccttttgatgatggtgcaccaccatccaaccagattgttgatgactggttaagtcttgtgaaaattaagtttcgtgaagaacctggttgttgtattgctgttcattgcgttgcaggccttgggagagctccagtacttgttgccctagcattaattgaaggtggaatgaaatacgaagatgcagtacaattcataagacaaaagcggcgtggagcttttaacagcaagcaacttctgtatttggagaagtatcgtcctaaaatgcggctgcgtttcaaagattccaacggtcatagaaacaactgttgcattcaataaaattggggtgcctaatgctactggaagtggaacttgagatagggcctaatttgttatacatattagccaacatgttggcttagtaagtctaatgaagcttccataggagtattgaaaggcagttttaccaggcctcaagctagacagatttggcaacctctgtatttgggttacagtcaacctatttggatacttggcaaaagattcttgctgtcagcatataaaatgtgcttgtcatttgtatcaattgacctttccccaaatcatgcagtattgagttatgacttgttaaatctattcccatgccagaatcttatcaatacataagaaatttaggaagattaggtgccaaaatacccagcacaatacttgtatatttttagtaccatacagaagtaaaatcccaggaactatgaacactagaccttatgtggtttattccttcaatcatttcaaacattgaaagtagggcctacatggttatttgcctgctcactttatgtttacatctcccacattcataccaatatacgtcaggtttgcttaaccattgatttttttttttttaccaagtcttacagtgattattttacgtgtttccatgtatctcactttgtgctgtattaaaaaaacctccattttgaaaatctacgttgtacagaagcacatgtctttaatgtcttcagacaaaaaagccttacattaatttaatgtttgcactctgaggtgcaacttaacagggagggcctgagaaaagaatgggagggggctattaattatttttagcaaaatgttgcctttgtcttgtgcaaacatgtagaatatgctctttaatttagtaaaatatttttttaaaaggtagagatgctttgttattgtaatcataaacttcctgaaattcttgtaatttttttcccatacttatcagaagtgtgtttaccaacttatttttgtttgaaagtgtgattttttttttccttcccaacctctcttgcaaaaaaagaaatgggtttctgctaatgaattgagcagacatctaatattttatatgccttttgagctgtgtaacttaatatttggatacttgacaatttgttttattatgtaattgataaaatggtgatgtgtattaatgttagttcaaccatatatttatactgtctggggatgtgtggttatagttctgtgggagaaataattttgtcagtgttcaccagcttgtaaaaacttagtgcgagagctgaaacatctaaataaataatgacatgcatttatcatcat

SEQ ID NO: 450404 - DNA, 3553 bp, Homo sapiens
  misc_feature (6)..(6): n is a, c, g, or t
  misc_feature (24)..(24): n is a, c, g, or t
gaaatntaggaagattaggtgccnaaatacccagcaagcaacttctgtatttggagaagtatcgtcctaaaatgcggctgcgtttcaaagattccaacggtcatagaaacaactgttgcattcaataaaattggggtgcctaatgctactggaagtggaacttgagatagggcctaatttgttatacatattagccaacatgttggcttagtaagtctaatgaagcttccataggagtattgaaaggcagttttaccaggcctcaagctagacagatttggcaacctctgtatttgggttacagtcaacctatttggatacttggcaaaagattcttgctgtcagcatataaaatgtgcttgtcatttgtatcaattgacctttccccaaatcatgcagtattgagttatgacttgttaaatctattcccatgccagaatcttatcaatacataagaaatttaggaagattaggtgccaaaatacccagcacaatacttgtatatttttagtaccatacagaagtaaaatcccaggaactatgaacactagaccttatgtggtttattccttcaatcatttcaaacattgaaagtagggcctacatggttatttgcctgctcactttatgtttacatctcccacattcataccaatatacgtcaggtttgcttaaccattgatttttttttttttaccaagtcttacagtgattattttacgtgtttccatgtatctcactttgtgctgtattaaaaaaacctccattttgaaaatctacgttgtacagaagcacatgtctttaatgtcttcagacaaaaaagccttacattaatttaatgtttgcactctgaggtgcaacttaacagggagggcctgagaaaagaatgggagggggctattaattatttttagcaaaatgttgcctttgtcttgtgcaaacatgtagaatatgctctttaatttagtaaaatatttttttaaaaggtagagatgctttgttattgtaatcataaacttcctgaaattcttgtaatttttttcccatacttatcagaagtgtgtttaccaacttatttttgtttgaaagtgtgattttttttttccttcccaacctctcttgcaaaaaaagaaatgggtttctgctaatgaattgagcagacatctaatattttatatgccttttgagctgtgtaacttaatatttggatacttgacaatttgttttattatgtaattgataaaatggtgatgtgtattaatgttagttcaaccatatatttatactgtctggggatgtgtggttatagttctgtgggagaaataattttgtcagtgttcaccagcttgtaaaaacttagtgcgagagctgaaacatctaaataaataatgacatgcatttatcatcattgagattggtttgcttaaaattaacttattttgtagaagacaaaatgaattgcacttcacttaatgtgtgtcctcatctttttacaaataaatgaaggattataaatgatgtcagcattttagtaaacttttagacaaaatttgttagggtcattcatgaaaactttaatactaaaagcactttccattatatactttttaaaggtctagataattttgaaccaatttattattgtgtactgaggagaaataatgtatagtagaggacagccttggtttgtaaagctcagttccactagttcatggttttgtgcaacttctgagcctcagttttctcctttgcaaattaataattacatacctttatagattttgaaattaatttaaatattagtatttggtacatgaaggcttaatgttaagtttcctttaatgatccacaataatccctttgatcacgttaatctaaatctagatgtctttgtctaattttttttgaatagcagttataaatgtaaaggactcaaagtttaagtaaaaagtgatactccaccttgtgtttcaaagaatttagttccacctcttcataccagtttaacacttaatatatttcattggattttagacagggcaaaaggaagaacaggggcctctggaggcccttggttatttaaatcttggattatttgtgatagtaatcacaaatttttggctaatttttaacctgaggttttgttttttttttaaaggaaatgcagcctagtcttgagaacataattttatataatcaattactaaatgttaaactattaccacacagcccataaaacagcatttgcgtttattgagagagaggatgtgccatcatgattaatgaaaactatcttttgagtttgaaaagaaattaatttgcagtgtttggattgtatatatggtgctaaaaataaattaatttactttataaaccttatctgtacattatacgatgtgatgaaatttgctttttatccaaatattttgtatcttgtaaatatggctaattataggaatgcctataatacatcttagattccttatatctaataagagttcaaagagttatgagttgaagtcttgaatgcaggaaactatctgatagtgttctaaaatttggttacttgggtttggatacccttagtgggatgatgtaaatagaggctagctacctaggcttgtctatagcaaccataatgttgatgtaagtaatgcggttactgaatcataagaaaatgccatctctttttagttgaaggaaaactctggaagtaggtgccattggtcattctgcagtgcactgcaaccattgtttcccctagtgccctcttttccctagggcattgctctcctattcccacgccttaacacagctctatacctagaagcagccagcccaggcatgcagtcacatttaatcacatcccccttctagagtgcttcaaaatgatgtagtccctcaacttggctaaagaatctcaatctcttgaaatttatttttttaatgtcatattcatctggtaaatatctactgtttgccaggcatttaagaatatggcaaagaacataaaagatggtgtcaccagattttggtcaccaatgagtacccgacccgttgccatgattaagagagaatgctttctattggagtttcaggaaatataatttgagaatactttaaagggaagtggaagtataagtgaatgatatttttcttttacatgtaaacaatgaagttatttcaaagttaagttttaaacaaaatacatgaagtagtgtctgccatacatgttaatattctacattcttgcttccttaaattaatatgtttgtgtgtatatatgtgcctcacacctgaattgaaaattaaagactggtttaaaagtggtttaaaagtgacatttaatgtttctccattacgtttggggtaaccagcctaagtggaatcttggaaggaaagtaagggaaaaacttgtatttgccttcaatgaattaaaccagtgatatgtgttaacgtatgaatgaaaggattgatggtgattttataattatatatattgccgcagtaaccagttaataaattgatagctaccatttaaaatgattttatt

SEQ ID NO: 450405 - DNA, 2712 bp, Homo sapiens
gcggaaccccagatttctccttaacagggagggcctgagaaaagaatgggagggggctattaattatttttagcaaaatgttgcctttgtcttgtgcaaacatgtagaatatgctctttaatttagtaaaatatttttttaaaaggtagagatgctttgttattgtaatcataaacttcctgaaattcttgtaatttttttcccatacttatcagaagtgtgtttaccaacttatttttgtttgaaagtgtgattttttttttccttcccaacctctcttgcaaaaaaagaaatgggtttctgctaatgaattgagcagacatctaatattttatatgccttttgagctgtgtaacttaatatttggatacttgacaatttgttttattatgtaattgataaaatggtgatgtgtattaatgttagttcaaccatatatttatactgtctggggatgtgtggttatagttctgtgggagaaataattttgtcagtgttcaccagcttgtaaaaacttagtgcgagagctgaaacatctaaataaataatgacatgcatttatcatcattgagattggtttgcttaaaattaacttattttgtagaagacaaaatgaattgcacttcacttaatgtgtgtcctcatctttttacaaataaatgaaggattataaatgatgtcagcattttagtaaacttttagacaaaatttgttagggtcattcatgaaaactttaatactaaaagcactttccattatatactttttaaaggtctagataattttgaaccaatttattattgtgtactgaggagaaataatgtatagtagaggacagccttggtttgtaaagctcagttccactagttcatggttttgtgcaacttctgagcctcagttttctcctttgcaaattaataattacatacctttatagattttgaaattaatttaaatattagtatttggtacatgaaggcttaatgttaagtttcctttaatgatccacaataatccctttgatcacgttaatctaaatctagatgtctttgtctaattttttttgaatagcagttataaatgtaaaggactcaaagtttaagtaaaaagtgatactccaccttgtgtttcaaagaatttagttccacctcttcataccagtttaacacttaatatatttcattggattttagacagggcaaaaggaagaacaggggcctctggaggcccttggttatttaaatcttggattatttgtgatagtaatcacaaatttttggctaatttttaacctgaggttttgttttttttttaaaggaaatgcagcctagtcttgagaacataattttatataatcaattactaaatgttaaactattaccacacagcccataaaacagcatttgcgtttattgagagagaggatgtgccatcatgattaatgaaaactatcttttgagtttgaaaagaaattaatttgcagtgtttggattgtatatatggtgctaaaaataaattaatttactttataaaccttatctgtacattatacgatgtgatgaaatttgctttttatccaaatattttgtatcttgtaaatatggctaattataggaatgcctataatacatcttagattccttatatctaataagagttcaaagagttatgagttgaagtcttgaatgcaggaaactatctgatagtgttctaaaatttggttacttgggtttggatacccttagtgggatgatgtaaatagaggctagctacctaggcttgtctatagcaaccataatgttgatgtaagtaatgcggttactgaatcataagaaaatgccatctctttttagttgaaggaaaactctggaagtaggtgccattggtcattctgcagtgcactgcaaccattgtttcccctagtgccctcttttccctagggcattgctctcctattcccacgccttaacacagctctatacctagaagcagccagcccaggcatgcagtcacatttaatcacatcccccttctagagtgcttcaaaatgatgtagtccctcaacttggctaaagaatctcaatctcttgaaatttatttttttaatgtcatattcatctggtaaatatctactgtttgccaggcatttaagaatatggcaaagaacataaaagatggtgtcaccagattttggtcaccaatgagtacccgacccgttgccatgattaagagagaatgctttctattggagtttcaggaaatataatttgagaatactttaaagggaagtggaagtataagtgaatgatatttttcttttacatgtaaacaatgaagttatttcaaagttaagttttaaacaaaatacatgaagtagtgtctgccatacatgttaatattctacattcttgcttccttaaattaatatgtttgtgtgtatatatgtgcctcacacctgaattgaaaattaaagactggtttaaaagtggtttaaaagtgacatttaatgtttctccattacgtttggggtaaccagcctaagtggaatcttggaaggaaagtaagggaaaaacttgtatttgccttcaatgaattaaaccagtgatatgtgttaacgtatgaatgaaaggattgatggtgattttataattatatatattgccgcagtaaccagttaataaattgatagctaccatttaaaatgattttatt

SEQ ID NO: 450406 - DNA, 3119 bp, Homo sapiens
taaaggtcctgtttggtccttctccagagctgaggagaaagggttttcagattataaataacagaggtgcccttgtatggcacagaattgcgataagactttacttcttaggggcttaaataatgaagtcagtaaaagaggactgaaaacgaacataaagaagagctttagctttgacgcaaagaattacatcagtgcttgacaaaaccgaggattcttaatttctaaaaacgctttctttaagcacttcctaacctttcattatctgagacaacatatcaagtgagcagcagtacaaaggatgcatgtgatttcgaaatgccacaattgagccaactgcagttgcacgcgtacgtagtatagagaggtgtgatcaaaaaaagaatatagggagcatagggcttcgtctgcatcaaaagatactctccccatcttctatagccttaagttttgcgaaggtaagtttctccccgcttgaaagcgcccccagggacaagaattcatcttgaccaagcctaaggccgtggcatgcaaggtgttgagtcaccgggtacagcggtcttgcgacataaatattatttgatgacgaaggtactcggggcccaggtgccaaggtaaaccactggcaaagatgaccgtggttaaggcagtagaaagcaggctcgacactgagacgcggttccagccctagaaggattgcattttacgattcaggcaaacttcgagtctcctcatgtgacatgtgtgcactcctggaccgttttaattatgagaaacgtggtttgcagcatgattccttccagtcgataaatcggaatctctctcgctcccaccccttcttaacttcaggcttcctgcatcccggagcactcccggcagccccttccctcccccgccccggggatgctccgactcggcgcttagccattcatcaaccggttcacaccggcggcggccgccgcggagtgacgtccggagggggcgggcctccgcccccgcctgtcggctcctggcccgcggttccaggccgcgattggtggctggagggttgcacgtcgcgccggctataaaggggagggcttgtgacgcaagggcgcctcggcgcgtgtattggctccttcggctgcgggccggctcggctacgcgctctgctccgagccgctcactgcatggtagagtctggtgcccccgccgccgcctgcatcgccgccaccgccgctccgccacgaccaccgccgcctcctgccctgcagccaccgccaccgcctgtgtcgccgccgcctcgggaccggctgtatgattaggccacaatcttcaatgagtaaacatattcctcaattctgtggtgttcttggtcacacatttatggagtttctgaagggcagtggagattactgccaggcacagcacgacctctatgcagacaagtgaactgtagaaactgattactgctccaccaagaagcccccataagagtggttatcctggacacagaagtgttgaattgaaatccacagagcattttacaagagttctgacctggatggggtaaacctcagtgcacttcttttctgttggcctcagtattactggattgaagaattgctgcttcttgttaggaggttcatttcacttatcattacttacaacttcatactcaaagcactgagaatttcaagtggagtatattgaagtagacttcagtttctttgcatcatttctgtattcaatttttttaattatttcataaccctattgagtgttttttaactaaattaacatggctcgaatgaaccgcccagctcctgtggaagtcacatacaagaacatgagatttcttattacacacaatccaaccaatgcgaccttaaacaaatttatagaggaacttaagaagtatggagttaccacaatagtaagagtatgtgaagcaacttatgacactactcttgtggagaaagaaggtatccatgttcttgattggccttttgatgatggtgcaccaccatccaaccagattgttgatgactggttaagtcttgtgaaaattaagtttcgtgaagaacctggttgttgtattgctgttcattgcgttgcaggccttgggagagctccagtacttgttgccctagcattaattgaaggtggaatgaaatacgaagatgcagtacaattcataagacaaaagcggcgtggagcttttaacagcaagcaacttctgtatttggagaagtatcgtcctaaaatgcggctgcgtttcaaagattccaacggtcatagaaacaactgttgcattcaataaaattggggtgcctaatgctactggaagtggaacttgagatagggcctaatttgttatacatattagccaacatgttggcttagtaagtctaatgaagcttccataggagtattgaaaggcagttttaccaggcctcaagctagacagatttggcaacctctgtatttgggttacagtcaacctatttggatacttggcaaaagattcttgctgtcagcatataaaatgtgcttgtcatttgtatcaattgacctttccccaaatcatgcagtattgagttatgacttgttaaatctattcccatgccagaatcttatcaatacataagaaatttaggaagattaggtgccaaaatacccagcacaatacttgtatatttttagtaccatacagaagtaaaatcccaggaactatgaacactagaccttatgtggtttattccttcaatcatttcaaacattgaaagtagggcctacatggttatttgcctgctcactttatgtttacatctcccacattcataccaatatacgtcaggtttggtagaccactgacttgcgcctccttcttaccagttctaacgcgttatctacgtgtttcagtgttcccacttgtgccggttagaaagcctcctttgaaattcttgtacaaggccgttctcggtctcgacaacggcccatataaggtggcccggggacgcagagggggcagacagggggggatatatccaggctctttgctctgtgccataaccagaaggtccatcacgcatctcacatacttgtctcagtctatatatgtttttttctgtctccgc

SEQ ID NO: 450407 - DNA, 1978 bp, Homo sapiens
taaaggtcctgtttggtccttctccagagctgaggagaaagggttttcagattataaataacagaggtgcccttgtatggcacagaattgcgataagactttacttcttaggggcttaaataatgaagtcagtaaaagaggactgaaaacgaacataaagaagagctttagctttgacgcaaagaattacatcagtgcttgacaaaaccgaggattcttaatttctaaaaacgctttctttaagcacttcctaacctttcattatctgagacaacatatcaagtgagcagcagtacaaaggatgcatgtgatttcgaaatgccacaattgagccaactgcagttgcacgcgtacgtagtatagagaggtgtgatcaaaaaaagaatatagggagcatagggcttcgtctgcatcaaaagatactctccccatcttctatagccttaagttttgcgaaggtaagtttctccccgcttgaaagcgcccccagggacaagaattcatcttgaccaagcctaaggccgtggcatgcaaggtgttgagtcaccgggtacagcggtcttgcgacataaatattatttgatgacgaaggtactcggggcccaggtgccaaggtaaaccactggcaaagatgaccgtggttaaggcagtagaaagcaggctcgacactgagacgcggttccagccctagaaggattgcattttacgattcaggcaaacttcgagtctcctcatgtgacatgtgtgcactcctggaccgttttaattatgagaaacgtggtttgcagcatgattccttccagtcgataaatcggaatctctctcgctcccaccccttcttaacttcaggcttcctgcatcccggagcactcccggcagccccttccctcccccgccccggggatgctccgactcggcgcttagccattcatcaaccggttcacaccggcggcggccgccgcggagtgacgtccggagggggcgggcctccgcccccgcctgtcggctcctggcccgcggttccaggccgcgattggtggctggagggttgcacgtcgcgccggctataaaggggagggcttgtgacgcaagggcgcctcggcgcgtgtattggctccttcggctgcgggccggctcggctacgcgctctgctccgagccgctcactgcatggtagagtctggtgcccccgccgccgcctgcatcgccgccaccgccgctccgccacgaccaccgccgcctcctgccctgcagccaccgccaccgcctgtgtcgccgccgcctcgggaccggctgtatgattaggccacaatcttcaatgagtaaacatattcctcaattctgtggtgttcttggtcacacatttatggagtttctgaagggcagtggagattactgccaggcacagcacgacctctatgcagacaagtgaactgtagaaactgattactgctccaccaagaagcccccataagagtggttatcctggacacagaagtgttgaattgaaatccacagagcattttacaagagttctgacctggatggggtaaacctcagtgcacttcttttctgttggcctcagtattactggattgaagaattgctgcttcttgttaggaggttcatttcacttatcattacttacaacttcatactcaaagcactgagaatttcaagtggagtatattgaagtagacttcagtttctttgcatcatttctgtattcaatttttttaattatttcataaccctattgagtgttttttaactaaattaacatggctcgaatgaaccgcccagctcctgtggaagtcacatacaagaacatgagatttcttattacacacaatccaaccaatgcgaccttaaacaaatttatagaggtaagatttgatatgttttagtagcttaaattgattgcaatataatagtgggacttatagctaacaaaataaaaactactttggaaaaaatga

SEQ ID NO: 450408 - DNA, 971 bp, Homo sapiens
  misc_feature (6)..(6): n is a, c, g, or t
  misc_feature (24)..(24): n is a, c, g, or t
  misc_feature (52)..(53): n is a, c, g, or t
  misc_feature (57)..(57): n is a, c, g, or t
  misc_feature (83)..(83): n is a, c, g, or t
  misc_feature (105)..(105): n is a, c, g, or t
  misc_feature (108)..(108): n is a, c, g, or t
  misc_feature (129)..(129): n is a, c, g, or t
  misc_feature (142)..(142): n is a, c, g, or t
  misc_feature (154)..(154): n is a, c, g, or t
  misc_feature (165)..(165): n is a, c, g, or t
  misc_feature (185)..(185): n is a, c, g, or t
  misc_feature (242)..(242): n is a, c, g, or t
  misc_feature (272)..(272): n is a, c, g, or t
  misc_feature (274)..(274): n is a, c, g, or t
  misc_feature (290)..(290): n is a, c, g, or t
  misc_feature (292)..(292): n is a, c, g, or t
  misc_feature (303)..(303): n is a, c, g, or t
  misc_feature (316)..(317): n is a, c, g, or t
  misc_feature (432)..(432): n is a, c, g, or t
  misc_feature (471)..(471): n is a, c, g, or t
  misc_feature (477)..(477): n is a, c, g, or t
gaaatntaggaagattaggtgccnaaatacccagcacagtacttgtatattnntagnaccatacagaagtaaaatcccagganctatgaacactagaccttatgnggnttattccttcaatcatttcanacattgaaagtanggcctacatggntatttgcctgntcactttatgtttacatctnccacattcataccaatatacgtcaggtttgcttaaccattgattttttttttttttnaccaagtcttacagtgattattttacgtgntnccatgtatctcacttngngctgtattaanaaaacctccattnngaaaatctacgttgtacagaagcacatgtctttaatgtcttcagacaaaaaagccttacattaatttaatgtttgcactctgaggtgcaacttaacagggagggcctgagaaaangaatgggagggggctattaattatttttagcaaaatgtngccttngtcttgtgcaaacatgtagaatatgctctttaatttagtaaaatatttttttaaaaggtagagatgctttgttattgtaatcataaacttcctgaaattcttgtaatttttttcccatacttatcagaagtgtgtttaccaacttatttttgtttgaaagtgtgattttttttttccttcccaacctctcttgcaaaaaaagaaatgggtttctgctaatgaattgagcagacatctaatattttatatgccttttgagctgtgtaacttaatatttggatacttgacaatttgttttattatgtaattgataaaatggtgatgtgtattaatgttagttctcccacagaactataaccacacatccccagacagtataaatatatggttatagttctgtgggagaaataattttgtcagtgttcaccagcttgtaaaaacttagtgcgagagctgaaacatctaaataaataatgacatgcatttatcatcat

SEQ ID NO: 450409 - DNA, 339 bp, Homo sapiens
atgcagtacaattcataagacagtaagtaatggattctcttttcatttgtactctctttcatttccttgttgagtgtcagtgagtttaatagtctaatagcccatttaatcattatgattattttttgagatagtattaaaaccaggaaatcaagatcttacattcttttttgcatttcatgcagttgctcatattactaagattctaatccaacaagagtttttgaattattgttttgctttaaatacttgattgaatatgttggttattttgtatttttattgaggtataattaagatacatttaaagatacaataaaatgcacaggtctccaaagg

SEQ ID NO: 450410 - DNA, 613 bp, Homo sapiens
aatatctatttaagtcataaatagacctcaaaaagctaaaaacaaatattatattattgtgcagaatcttaatttctaaataaaggtgaaaagctaagcaaggatttgaagttgtgaaacatttttgtaaagattgagcatttagtcacatttggtagacaacagggtttaataagatttgattaaacattaaaatgagaatgcttttgaaaacatttccatgttagaaatttagaattattactacagtgtttatattaatgatctaaaatgtttaaatattcttctgacttaggattggccttttgatgatggtgcaccaccatccaaccagattgttgatgactggttaagtcttgtgaaaattaagtttcgtgaagaacctggttgttgtattgctgttcattgcgttgcaggccttgggaggtaaatgaatttatcaatttgattctaggtaaaaatctattgataatgaaaatacagaaacttgaaaaattcttataattttttaatataaagtcaacatttgtcataggtattacttaaataggaagggtggtagataatacttctgagttggggaatgtttggagaaataaatttacaaagatct

SEQ ID NO: 450411 - DNA, 5727 bp, Homo sapiens
taaaggtcctgtttggtccttctccagagctgaggagaaagggttttcagattataaataacagaggtgcccttgtatggcacagaattgcgataagactttacttcttaggggcttaaataatgaagtcagtaaaagaggactgaaaacgaacataaagaagagctttagctttgacgcaaagaattacatcagtgcttgacaaaaccgaggattcttaatttctaaaaacgctttctttaagcacttcctaacctttcattatctgagacaacatatcaagtgagcagcagtacaaaggatgcatgtgatttcgaaatgccacaattgagccaactgcagttgcacgcgtacgtagtatagagaggtgtgatcaaaaaaagaatatagggagcatagggcttcgtctgcatcaaaagatactctccccatcttctatagccttaagttttgcgaaggtaagtttctccccgcttgaaagcgcccccagggacaagaattcatcttgaccaagcctaaggccgtggcatgcaaggtgttgagtcaccgggtacagcggtcttgcgacataaatattatttgatgacgaaggtactcggggcccaggtgccaaggtaaaccactggcaaagatgaccgtggttaaggcagtagaaagcaggctcgacactgagacgcggttccagccctagaaggattgcattttacgattcaggcaaacttcgagtctcctcatgtgacatgtgtgcactcctggaccgttttaattatgagaaacgtggtttgcagcatgattccttccagtcgataaatcggaatctctctcgctcccaccccttcttaacttcaggcttcctgcatcccggagcactcccggcagccccttccctcccccgccccggggatgctccgactcggcgcttagccattcatcaaccggttcacaccggcggcggccgccgcggagtgacgtccggagggggcgggcctccgcccccgcctgtcggctcctggcccgcggttccaggccgcgattggtggctggagggttgcacgtcgcgccggctataaaggggagggcttgtgacgcaagggcgcctcggcgcgtgtattggctccttcggctgcgggccggctcggctacgcgctctgctccgagccgctcactgcatggtagagtctggtgcccccgccgccgcctgcatcgccgccaccgccgctccgccacgaccaccgccgcctcctgccctgcagccaccgccaccgcctgtgtcgccgccgcctcgggaccggctgtatgattaggccacaatcttcaatgagtaaacatattcctcaattctgtggtgttcttggtcacacatttatggagtttctgaagggcagtggagattactgccaggcacagcacgacctctatgcagacaagtgaactgtagaaactgattactgctccaccaagaagcccccataagagtggttatcctggacacagaagtgttgaattgaaatccacagagcattttacaagagttctgacctggatggggtaaacctcagtgcacttcttttctgttggcctcagtattactggattgaagaattgctgcttcttgttaggaggttcatttcacttatcattacttacaacttcatactcaaagcactgagaatttcaagtggagtatattgaagtagacttcagtttctttgcatcatttctgtattcaatttttttaattatttcataaccctattgagtgttttttaactaaattaacatggctcgaatgaaccgcccagctcctgtggaagtcacatacaagaacatgagatttcttattacacacaatccaaccaatgcgaccttaaacaaatttatagaggaacttaagaagtatggagttaccacaatagtaagagtatgtgaagcaacttatgacactactcttgtggagaaagaaggtatccatgttcttgattggccttttgatgatggtgcaccaccatccaaccagattgttgatgactggttaagtcttgtgaaaattaagtttcgtgaagaacctggttgttgtattgctgttcattgcgttgcaggccttgggagagctccagtacttgttgccctagcattaattgaaggtggaatgaaatacgaagatgcagtacaattcataagacaaaagcggcgtggagcttttaacagcaagcaacttctgtatttggagaagtatcgtcctaaaatgcggctgcgtttcaaagattccaacggtcatagaaacaactgttgcattcaataaaattggggtgcctaatgctactggaagtggaacttgagatagggcctaatttgttatacatattagccaacatgttggcttagtaagtctaatgaagcttccataggagtattgaaaggcagttttaccaggcctcaagctagacagatttggcaacctctgtatttgggttacagtcaacctatttggatacttggcaaaagattcttgctgtcagcatataaaatgtgcttgtcatttgtatcaattgacctttccccaaatcatgcagtattgagttatgacttgttaaatctattcccatgccagaatcttatcaatacataagaaatttaggaagattaggtgccaaaatacccagcacaatacttgtatatttttagtaccatacagaagtaaaatcccaggaactatgaacactagaccttatgtggtttattccttcaatcatttcaaacattgaaagtagggcctacatggttatttgcctgctcactttatgtttacatctcccacattcataccaatatacgtcaggtttgcttaaccattgatttttttttttttaccaagtcttacagtgattattttacgtgtttccatgtatctcactttgtgctgtattaaaaaaacctccattttgaaaatctacgttgtacagaagcacatgtctttaatgtcttcagacaaaaaagccttacattaatttaatgtttgcactctgaggtgcaacttaacagggagggcctgagaaaagaatgggagggggctattaattatttttagcaaaatgttgcctttgtcttgtgcaaacatgtagaatatgctctttaatttagtaaaatatttttttaaaaggtagagatgctttgttattgtaatcataaacttcctgaaattcttgtaatttttttcccatacttatcagaagtgtgtttaccaacttatttttgtttgaaagtgtgattttttttttccttcccaacctctcttgcaaaaaaagaaatgggtttctgctaatgaattgagcagacatctaatattttatatgccttttgagctgtgtaacttaatatttggatacttgacaatttgttttattatgtaattgataaaatggtgatgtgtattaatgttagttcaaccatatatttatactgtctggggatgtgtggttatagttctgtgggagaaataattttgtcagtgttcaccagcttgtaaaaacttagtgcgagagctgaaacatctaaataaataatgacatgcatttatcatcattgagattggtttgcttaaaattaacttattttgtagaagacaaaatgaattgcacttcacttaatgtgtgtcctcatctttttacaaataaatgaaggattataaatgatgtcagcattttagtaaacttttagacaaaatttgttagggtcattcatgaaaactttaatactaaaagcactttccattatatactttttaaaggtctagataattttgaaccaatttattattgtgtactgaggagaaataatgtatagtagaggacagccttggtttgtaaagctcagttccactagttcatggttttgtgcaacttctgagcctcagttttctcctttgcaaattaataattacatacctttatagattttgaaattaatttaaatattagtatttggtacatgaaggcttaatgttaagtttcctttaatgatccacaataatccctttgatcacgttaatctaaatctagatgtctttgtctaattttttttgaatagcagttataaatgtaaaggactcaaagtttaagtaaaaagtgatactccaccttgtgtttcaaagaatttagttccacctcttcataccagtttaacacttaatatatttcattggattttagacagggcaaaaggaagaacaggggcctctggaggcccttggttatttaaatcttggattatttgtgatagtaatcacaaatttttggctaatttttaacctgaggttttgttttttttttaaaggaaatgcagcctagtcttgagaacataattttatataatcaattactaaatgttaaactattaccacacagcccataaaacagcatttgcgtttattgagagagaggatgtgccatcatgattaatgaaaactatcttttgagtttgaaaagaaattaatttgcagtgtttggattgtatatatggtgctaaaaataaattaatttactttataaaccttatctgtacattatacgatgtgatgaaatttgctttttatccaaatattttgtatcttgtaaatatggctaattataggaatgcctataatacatcttagattccttatatctaataagagttcaaagagttatgagttgaagtcttgaatgcaggaaactatctgatagtgttctaaaatttggttacttgggtttggatacccttagtgggatgatgtaaatagaggctagctacctaggcttgtctatagcaaccataatgttgatgtaagtaatgcggttactgaatcataagaaaatgccatctctttttagttgaaggaaaactctggaagtaggtgccattggtcattctgcagtgcactgcaaccattgtttcccctagtgccctcttttccctagggcattgctctcctattcccacgccttaacacagctctatacctagaagcagccagcccaggcatgcagtcacatttaatcacatcccccttctagagtgcttcaaaatgatgtagtccctcaacttggctaaagaatctcaatctcttgaaatttatttttttaatgtcatattcatctggtaaatatctactgtttgccaggcatttaagaatatggcaaagaacataaaagatggtgtcaccagattttggtcaccaatgagtacccgacccgttgccatgattaagagagaatgctttctattggagtttcaggaaatataatttgagaatactttaaagggaagtggaagtataagtgaatgatatttttcttttacatgtaaacaatgaagttatttcaaagttaagttttaaacaaaatacatgaagtagtgtctgccatacatgttaatattctacattcttgcttccttaaattaatatgtttgtgtgtatatatgtgcctcacacctgaattgaaaattaaagactggtttaaaagtggtttaaaagtgacatttaatgtttctccattacgtttggggtaaccagcctaagtggaatcttggaaggaaagtaagggaaaaacttgtatttgccttcaatgaattaaaccagtgatatgtgttaacgtatgaatgaaaggattgatggtgattttataattatatatattgccgcagtaaccagttaataaattgatagctaccatttaaaatgattttatt

SEQ ID NO: 450412 - DNA, 6047 bp, Homo sapiens
taaaggtcctgtttggtccttctccagagctgaggagaaagggttttcagattataaataacagaggtgcccttgtatggcacagaattgcgataagactttacttcttaggggcttaaataatgaagtcagtaaaagaggactgaaaacgaacataaagaagagctttagctttgacgcaaagaattacatcagtgcttgacaaaaccgaggattcttaatttctaaaaacgctttctttaagcacttcctaacctttcattatctgagacaacatatcaagtgagcagcagtacaaaggatgcatgtgatttcgaaatgccacaattgagccaactgcagttgcacgcgtacgtagtatagagaggtgtgatcaaaaaaagaatatagggagcatagggcttcgtctgcatcaaaagatactctccccatcttctatagccttaagttttgcgaaggtaagtttctccccgcttgaaagcgcccccagggacaagaattcatcttgaccaagcctaaggccgtggcatgcaaggtgttgagtcaccgggtacagcggtcttgcgacataaatattatttgatgacgaaggtactcggggcccaggtgccaaggtaaaccactggcaaagatgaccgtggttaaggcagtagaaagcaggctcgacactgagacgcggttccagccctagaaggattgcattttacgattcaggcaaacttcgagtctcctcatgtgacatgtgtgcactcctggaccgttttaattatgagaaacgtggtttgcagcatgattccttccagtcgataaatcggaatctctctcgctcccaccccttcttaacttcaggcttcctgcatcccggagcactcccggcagccccttccctcccccgccccggggatgctccgactcggcgcttagccattcatcaaccggttcacaccggcggcggccgccgcggagtgacgtccggagggggcgggcctccgcccccgcctgtcggctcctggcccgcggttccaggccgcgattggtggctggagggttgcacgtcgcgccggctataaaggggagggcttgtgacgcaagggcgcctcggcgcgtgtattggctccttcggctgcgggccggctcggctacgcgctctgctccgagccgctcactgcatggtagagtctggtgcccccgccgccgcctgcatcgccgccaccgccgctccgccacgaccaccgccgcctcctgccctgcagccaccgccaccgcctgtgtcgccgccgcctcgggaccggctgtatgattaggccacaatcttcaatgagtaaacatattcctcaattctgtggtgttcttggtcacacatttatggagtttctgaagggcagtggagattactgccaggcacagcacgacctctatgcagacaagtgaactgtagaaactgattactgctccaccaagaagcccccataagagtggttatcctggacacagaagtgttgaattgaaatccacagagcattttacaagagttctgacctggatggggtaaacctcagtgcacttcttttctgttggcctcagtattactggattgaagaattgctgcttcttgttaggaggttcatttcacttatcattacttacaacttcatactcaaagcactgagaatttcaagtggagtatattgaagtagacttcagtttctttgcatcatttctgtattcaatttttttaattatttcataaccctattgagtgttttttaactaaattaacatggctcgaatgaaccgcccagctcctgtggaagtcacatacaagaacatgagatttcttattacacacaatccaaccaatgcgaccttaaacaaatttatagaggaacttaagaagtatggagttaccacaatagtaagagtatgtgaagcaacttatgacactactcttgtggagaaagaaggtatccatgttcttgattggccttttgatgatggtgcaccaccatccaaccagattgttgatgactggttaagtcttgtgaaaattaagtttcgtgaagaacctggttgttgtattgctgttcattgcgttgcaggccttgggagagctccagtacttgttgccctagcattaattgaaggtggaatgaaatacgaagatgcagtacaattcataagacaaaagcggcgtggagcttttaacagcaagcaacttctgtatttggagaagtatcgtcctaaaatgcggctgcgtttcaaagattccaacggtcatagaaacaactgttgcattcaataaaattggggtgcctaatgctactggaagtggaacttgagatagggcctaatttgttatacatattagccaacatgttggcttagtaagtctaatgaagcttccataggagtattgaaaggcagttttaccaggcctcaagctagacagatttggcaacctctgtatttgggttacagtcaacctatttggatacttggcaaaagattcttgctgtcagcatataaaatgtgcttgtcatttgtatcaattgacctttccccaaatcatgcagtattgagttatgacttgttaaatctattcccatgccagaatcttatcaatacataagaaatttaggaagattaggtgccaaaatacccagcacaatacttgtatatttttagtaccatacagaagtaaaatcccaggaactatgaacactagaccttatgtggtttattccttcaatcatttcaaacattgaaagtagggcctacatggttatttgcctgctcactttatgtttacatctcccacattcataccaatatacgtcaggtttgcttaaccattgatttttttttttttaccaagtcttacagtgattattttacgtgtttccatgtatctcactttgtgctgtattaaaaaaacctccattttgaaaatctacgttgtacagaagcacatgtctttaatgtcttcagacaaaaaagccttacattaatttaatgtttgcactctgaggtgcaacttaacagggagggcctgagaaaagaatgggagggggctattaattatttttagcaaaatgttgcctttgtcttgtgcaaacatgtagaatatgctctttaatttagtaaaatatttttttaaaaggtagagatgctttgttattgtaatcataaacttcctgaaattcttgtaatttttttcccatacttatcagaagtgtgtttaccaacttatttttgtttgaaagtgtgattttttttttccttcccaacctctcttgcaaaaaaagaaatgggtttctgctaatgaattgagcagacatctaatattttatatgccttttgagctgtgtaacttaatatttggatacttgacaatttgttttattatgtaattgataaaatggtgatgtgtattaatgttagttcaaccatatatttatactgtctggggatgtgtggttatagttctgtgggagaaataattttgtcagtgttcaccagcttgtaaaaacttagtgcgagagctgaaacatctaaataaataatgacatgcatttatcatcattgagattggtttgcttaaaattaacttattttgtagaagacaaaatgaattgcacttcacttaatgtgtgtcctcatctttttacaaataaatgaaggattataaatgatgtcagcattttagtaaacttttagacaaaatttgttagggtcattcatgaaaactttaatactaaaagcactttccattatatactttttaaaggtctagataattttgaaccaatttattattgtgtactgaggagaaataatgtatagtagaggacagccttggtttgtaaagctcagttccactagttcatggttttgtgcaacttctgagcctcagttttctcctttgcaaattaataattacatacctttatagattttgaaattaatttaaatattagtatttggtacatgaaggcttaatgttaagtttcctttaatgatccacaataatccctttgatcacgttaatctaaatctagatgtctttgtctaattttttttgaatagcagttataaatgtaaaggactcaaagtttaagtaaaaagtgatactccaccttgtgtttcaaagaatttagttccacctcttcataccagtttaacacttaatatatttcattggattttagacagggcaaaaggaagaacaggggcctctggaggcccttggttatttaaatcttggattatttgtgatagtaatcacaaatttttggctaatttttaacctgaggttttgttttttttttaaaggaaatgcagcctagtcttgagaacataattttatataatcaattactaaatgttaaactattaccacacagcccataaaacagcatttgcgtttattgagagagaggatgtgccatcatgattaatgaaaactatcttttgagtttgaaaagaaattaatttgcagtgtttggattgtatatatggtgctaaaaataaattaatttactttataaaccttatctgtacattatacgatgtgatgaaatttgctttttatccaaatattttgtatcttgtaaatatggctaattataggaatgcctataatacatcttagattccttatatctaataagagttcaaagagttatgagttgaagtcttgaatgcaggaaactatctgatagtgttctaaaatttggttacttgggtttggatacccttagtgggatgatgtaaatagaggctagctacctaggcttgtctatagcaaccataatgttgatgtaagtaatgcggttactgaatcataagaaaatgccatctctttttagttgaaggaaaactctggaagtaggtgccattggtcattctgcagtgcactgcaaccattgtttcccctagtgccctcttttccctagggcattgctctcctattcccacgccttaacacagctctatacctagaagcagccagcccaggcatgcagtcacatttaatcacatcccccttctagagtgcttcaaaatgatgtagtccctcaacttggctaaagaatctcaatctcttgaaatttatttttttaatgtcatattcatctggtaaatatctactgtttgccaggcatttaagaatatggcaaagaacataaaagatggtgtcaccagattttggtcaccaatgagtacccgacccgttgccatgattaagagagaatgctttctattggagtttcaggaaatataatttgagaatactttaaagggaagtggaagtataagtgaatgatatttttcttttacatgtaaacaatgaagttatttcaaagttaagttttaaacaaaatacatgaagtagtgtctgccatacatgttaatattctacattcttgcttccttaaattaatatgtttgtgtgtatatatgtgcctcacacctgaattgaaaattaaagactggtttaaaagtggtttaaaagtgacatttaatgtttctccattacgtttggggtaaccagcctaagtggaatcttggaaggaaagtaagggaaaaacttgtatttgccttcaatgaattaaaccagtgatatgtgttaacgtatgaatgacaacaataaacaaacagaaaaaaaaaacaacccttggtgggggccgcgcctcggggcctcccggaagacaaggtttctaagacacctattgcggtaggggggcgccgcggtggcccaaagtgtaggtacaaggggacacacagtggggcgcaaagaggctggatccccctagaggagaaatcccggggggtccacgagaaaagagggcgagggagattcccccacgcatacaaaaaaacgcgccgggggcgggaaaccccggaggcggctcctggagaacaaacctcccagaagtggggaggtctcaggaggggaataaaaaccgggggactatttagaccaacacggggaggccccaagagagacgtccgggaagtcaagattatgagcccccgccacgggggga

SEQ ID NO: 450413 - DNA, 5673 bp, Homo sapiens
taaaggtcctgtttggtccttctccagagctgaggagaaagggttttcagattataaataacagaggtgcccttgtatggcacagaattgcgataagactttacttcttaggggcttaaataatgaagtcagtaaaagaggactgaaaacgaacataaagaagagctttagctttgacgcaaagaattacatcagtgcttgacaaaaccgaggattcttaatttctaaaaacgctttctttaagcacttcctaacctttcattatctgagacaacatatcaagtgagcagcagtacaaaggatgcatgtgatttcgaaatgccacaattgagccaactgcagttgcacgcgtacgtagtatagagaggtgtgatcaaaaaaagaatatagggagcatagggcttcgtctgcatcaaaagatactctccccatcttctatagccttaagttttgcgaaggtaagtttctccccgcttgaaagcgcccccagggacaagaattcatcttgaccaagcctaaggccgtggcatgcaaggtgttgagtcaccgggtacagcggtcttgcgacataaatattatttgatgacgaaggtactcggggcccaggtgccaaggtaaaccactggcaaagatgaccgtggttaaggcagtagaaagcaggctcgacactgagacgcggttccagccctagaaggattgcattttacgattcaggcaaacttcgagtctcctcatgtgacatgtgtgcactcctggaccgttttaattatgagaaacgtggtttgcagcatgattccttccagtcgataaatcggaatctctctcgctcccaccccttcttaacttcaggcttcctgcatcccggagcactcccggcagccccttccctcccccgccccggggatgctccgactcggcgcttagccattcatcaaccggttcacaccggcggcggccgccgcggagtgacgtccggagggggcgggcctccgcccccgcctgtcggctcctggcccgcggttccaggccgcgattggtggctggagggttgcacgtcgcgccggctataaaggggagggcttgtgacgcaagggcgcctcggcgcgtgtattggctccttcggctgcgggccggctcggctacgcgctctgctccgagccgctcactgcatggtagagtctggtgcccccgccgccgcctgcatcgccgccaccgccgctccgccacgaccaccgccgcctcctgccctgcagccaccgccaccgcctgtgtcgccgccgcctcgggaccggctgtatgattaggccacaatcttcaatgagtaaacatattcctcaattctgtggtgttcttggtcacacatttatggagtttctgaagggcagtggagattactgccaggcacagcacgacctctatgcagacaagtgaactgtagaaactgattactgctccaccaagaagcccccataagagtggttatcctggacacagaagtgttgaattgaaatccacagagcattttacaagagttctgacctggatggggtaaacctcagtgcacttcttttctgttggcctcagtattactggattgaagaattgctgcttcttgttaggaggttcatttcacttatcattacttacaacttcatactcaaagcactgagaatttcaagtggagtatattgaagtagacttcagtttctttgcatcatttctgtattcaatttttttaattatttcataaccctattgagtgttttttaactaaattaacatggctcgaatgaaccgcccagctcctgtggaagtcacatacaagaacatgagatttcttattacacacaatccaaccaatgcgaccttaaacaaatttatagaggaacttaagaagtatggagttaccacaatagtaagagtatgtgaagcaacttatgacactactcttgtggagaaagaaggtatccatgttcttgattggccttttgatgatggtgcaccaccatccaaccagattgttgatgactggttaagtcttgtgaaaattaagtttcgtgaagaacctggttgttgtattgctgttcattgcgttgcaggccttgggagagctccagtacttgttgccctagcattaattgaaggtggaatgaaatacgaagatgcagtacaattcataagacaaaagcggcgtggagcttttaacagcaagcaacttctgtatttggagaagtatcgtcctaaaatgcggctgcgtttcaaagattccaacggtcatagaaacaactgttgcattcaataaaattggggtgcctaatgctactggaagtggaacttgagatagggcctaatttgttatacatattagccaacatgttggcttagtaagtctaatgaagcttccataggagtattgaaaggcagttttaccaggcctcaagctagacagatttggcaacctctgtatttgggttacagtcaacctatttggatacttggcaaaagattcttgctgtcagcatataaaatgtgcttgtcatttgtatcaattgacctttccccaaatcatgcagtattgagttatgacttgttaaatctattcccatgccagaatcttatcaatacataagaaatttaggaagattaggtgccaaaatacccagcacaatacttgtatatttttagtaccatacagaagtaaaatcccaggaactatgaacactagaccttatgtggtttattccttcaatcatttcaaacattgaaagtagggcctacatggttatttgcctgctcactttatgtttacatctcccacattcataccaatatacgtcaggtttgcttaaccattgatttttttttttttaccaagtcttacagtgattattttacgtgtttccatgtatctcactttgtgctgtattaaaaaaacctccattttgaaaatctacgttgtacagaagcacatgtctttaatgtcttcagacaaaaaagccttacattaatttaatgtttgcactctgaggtgcaacttaacagggagggcctgagaaaagaatgggagggggctattaattatttttagcaaaatgttgcctttgtcttgtgcaaacatgtagaatatgctctttaatttagtaaaatatttttttaaaaggtagagatgctttgttattgtaatcataaacttcctgaaattcttgtaatttttttcccatacttatcagaagtgtgtttaccaacttatttttgtttgaaagtgtgattttttttttccttcccaacctctcttgcaaaaaaagaaatgggtttctgctaatgaattgagcagacatctaatattttatatgccttttgagctgtgtaacttaatatttggatacttgacaatttgttttattatgtaattgataaaatggtgatgtgtattaatgttagttcaaccatatatttatactgtctggggatgtgtggttatagttctgtgggagaaataattttgtcagtgttcaccagcttgtaaaaacttagtgcgagagctgaaacatctaaataaataatgacatgcatttatcatcattgagattggtttgcttaaaattaacttattttgtagaagacaaaatgaattgcacttcacttaatgtgtgtcctcatctttttacaaataaatgaaggattataaatgatgtcagcattttagtaaacttttagacaaaatttgttagggtcattcatgaaaactttaatactaaaagcactttccattatatactttttaaaggtctagataattttgaaccaatttattattgtgtactgaggagaaataatgtatagtagaggacagccttggtttgtaaagctcagttccactagttcatggttttgtgcaacttctgagcctcagttttctcctttgcaaattaataattacatacctttatagattttgaaattaatttaaatattagtatttggtacatgaaggcttaatgttaagtttcctttaatgatccacaataatccctttgatcacgttaatctaaatctagatgtctttgtctaattttttttgaatagcagttataaatgtaaaggactcaaagtttaagtaaaaagtgatactccaccttgtgtttcaaagaatttagttccacctcttcataccagtttaacacttaatatatttcattggattttagacagggcaaaaggaagaacaggggcctctggaggcccttggttatttaaatcttggattatttgtgatagtaatcacaaatttttggctaatttttaacctgaggttttgttttttttttaaaggaaatgcagcctagtcttgagaacataattttatataatcaattactaaatgttaaactattaccacacagcccataaaacagcatttgcgtttattgagagagaggatgtgccatcatgattaatgaaaactatcttttgagtttgaaaagaaattaatttgcagtgtttggattgtatatatggtgctaaaaataaattaatttactttataaaccttatctgtacattatacgatgtgatgaaatttgctttttatccaaatattttgtatcttgtaaatatggctaattataggaatgcctataatacatcttagattccttatatctaataagagttcaaagagttatgagttgaagtcttgaatgcaggaaactatctgatagtgttctaaaatttggttacttgggtttggatacccttagtgggatgatgtaaatagaggctagctacctaggcttgtctatagcaaccataatgttgatgtaagtaatgcggttactgaatcataagaaaatgccatctctttttagttgaaggaaaactctggaagtaggtgccattggtcattctgcagtgcactgcaaccattgtttcccctagtgccctcttttccctagggcattgctctcctattcccacgccttaacacagctctatacctagaagcagccagcccaggcatgcagtcacatttaatcacatcccccttctagagtgcttcaaaatgatgtagtccctcaacttggctaaagaatctcaatctcttgaaatttatttttttaatgtcatattcatctggtaaatatctactgtttgccaggcatttaagaatatggcaaagaacatgattaagagagaatgctttctattggagtttcaggaaatataatttgagaatactttaaagggaagtggaagtataagtgaatgatatttttcttttacatgtaaacaatgaagttatttcaaagttaagttttaaacaaaatacatgaagtagtgtctgccatacatgttaatattctacattcttgcttccttaaattaatatgtttgtgtgtatatatgtgcctcacacctgaattgaaaattaaagactggtttaaaagtggtttaaaagtgacatttaatgtttctccattacgtttggggtaaccagcctaagtggaatcttggaaggaaagtaagggaaaaacttgtatttgccttcaatgaattaaaccagtgatatgtgttaacgtatgaatgaaaggattgatggtgattttataattatatatattgccgcagtaaccagttaataaattgatagctaccatttaaaatgattttatt

SEQ ID NO: 450414 - DNA, 5709 bp, Homo sapiens
taaaggtcctgtttggtccttctccagagctgaggagaaagggttttcagattataaataacagaggtgcccttgtatggcacagaattgcgataagactttacttcttaggggcttaaataatgaagtcagtaaaagaggactgaaaacgaacataaagaagagctttagctttgacgcaaagaattacatcagtgcttgacaaaaccgaggattcttaatttctaaaaacgctttctttaagcacttcctaacctttcattatctgagacaacatatcaagtgagcagcagtacaaaggatgcatgtgatttcgaaatgccacaattgagccaactgcagttgcacgcgtacgtagtatagagaggtgtgatcaaaaaaagaatatagggagcatagggcttcgtctgcatcaaaagatactctccccatcttctatagccttaagttttgcgaaggtaagtttctccccgcttgaaagcgcccccagggacaagaattcatcttgaccaagcctaaggccgtggcatgcaaggtgttgagtcaccgggtacagcggtcttgcgacataaatattatttgatgacgaaggtactcggggcccaggtgccaaggtaaaccactggcaaagatgaccgtggttaaggcagtagaaagcaggctcgacactgagacgcggttccagccctagaaggattgcattttacgattcaggcaaacttcgagtctcctcatgtgacatgtgtgcactcctggaccgttttaattatgagaaacgtggtttgcagcatgattccttccagtcgataaatcggaatctctctcgctcccaccccttcttaacttcaggcttcctgcatcccggagcactcccggcagccccttccctcccccgccccggggatgctccgactcggcgcttagccattcatcaaccggttcacaccggcggcggccgccgcggagtgacgtccggagggggcgggcctccgcccccgcctgtcggctcctggcccgcggttccaggccgcgattggtggctggagggttgcacgtcgcgccggctataaaggggagggcttgtgacgcaagggcgcctcggcgcgtgtattggctccttcggctgcgggccggctcggctacgcgctctgctccgagccgctcactgcatggtagagtctggtgcccccgccgccgcctgcatcgccgccacaccgccgcctcctgccctgcagccaccgccaccgcctgtgtcgccgccgcctcgggaccggctgtatgattaggccacaatcttcaatgagtaaacatattcctcaattctgtggtgttcttggtcacacatttatggagtttctgaagggcagtggagattactgccaggcacagcacgacctctatgcagacaagtgaactgtagaaactgattactgctccaccaagaagcccccataagagtggttatcctggacacagaagtgttgaattgaaatccacagagcattttacaagagttctgacctggatggggtaaacctcagtgcacttcttttctgttggcctcagtattactggattgaagaattgctgcttcttgttaggaggttcatttcacttatcattacttacaacttcatactcaaagcactgagaatttcaagtggagtatattgaagtagacttcagtttctttgcatcatttctgtattcaatttttttaattatttcataaccctattgagtgttttttaactaaattaacatggctcgaatgaaccgcccagctcctgtggaagtcacatacaagaacatgagatttcttattacacacaatccaaccaatgcgaccttaaacaaatttatagaggaacttaagaagtatggagttaccacaatagtaagagtatgtgaagcaacttatgacactactcttgtggagaaagaaggtatccatgttcttgattggccttttgatgatggtgcaccaccatccaaccagattgttgatgactggttaagtcttgtgaaaattaagtttcgtgaagaacctggttgttgtattgctgttcattgcgttgcaggccttgggagagctccagtacttgttgccctagcattaattgaaggtggaatgaaatacgaagatgcagtacaattcataagacaaaagcggcgtggagcttttaacagcaagcaacttctgtatttggagaagtatcgtcctaaaatgcggctgcgtttcaaagattccaacggtcatagaaacaactgttgcattcaataaaattggggtgcctaatgctactggaagtggaacttgagatagggcctaatttgttatacatattagccaacatgttggcttagtaagtctaatgaagcttccataggagtattgaaaggcagttttaccaggcctcaagctagacagatttggcaacctctgtatttgggttacagtcaacctatttggatacttggcaaaagattcttgctgtcagcatataaaatgtgcttgtcatttgtatcaattgacctttccccaaatcatgcagtattgagttatgacttgttaaatctattcccatgccagaatcttatcaatacataagaaatttaggaagattaggtgccaaaatacccagcacaatacttgtatatttttagtaccatacagaagtaaaatcccaggaactatgaacactagaccttatgtggtttattccttcaatcatttcaaacattgaaagtagggcctacatggttatttgcctgctcactttatgtttacatctcccacattcataccaatatacgtcaggtttgcttaaccattgatttttttttttttaccaagtcttacagtgattattttacgtgtttccatgtatctcactttgtgctgtattaaaaaaacctccattttgaaaatctacgttgtacagaagcacatgtctttaatgtcttcagacaaaaaagccttacattaatttaatgtttgcactctgaggtgcaacttaacagggagggcctgagaaaagaatgggagggggctattaattatttttagcaaaatgttgcctttgtcttgtgcaaacatgtagaatatgctctttaatttagtaaaatatttttttaaaaggtagagatgctttgttattgtaatcataaacttcctgaaattcttgtaatttttttcccatacttatcagaagtgtgtttaccaacttatttttgtttgaaagtgtgattttttttttccttcccaacctctcttgcaaaaaaagaaatgggtttctgctaatgaattgagcagacatctaatattttatatgccttttgagctgtgtaacttaatatttggatacttgacaatttgttttattatgtaattgataaaatggtgatgtgtattaatgttagttcaaccatatatttatactgtctggggatgtgtggttatagttctgtgggagaaataattttgtcagtgttcaccagcttgtaaaaacttagtgcgagagctgaaacatctaaataaataatgacatgcatttatcatcattgagattggtttgcttaaaattaacttattttgtagaagacaaaatgaattgcacttcacttaatgtgtgtcctcatctttttacaaataaatgaaggattataaatgatgtcagcattttagtaaacttttagacaaaatttgttagggtcattcatgaaaactttaatactaaaagcactttccattatatactttttaaaggtctagataattttgaaccaatttattattgtgtactgaggagaaataatgtatagtagaggacagccttggtttgtaaagctcagttccactagttcatggttttgtgcaacttctgagcctcagttttctcctttgcaaattaataattacatacctttatagattttgaaattaatttaaatattagtatttggtacatgaaggcttaatgttaagtttcctttaatgatccacaataatccctttgatcacgttaatctaaatctagatgtctttgtctaattttttttgaatagcagttataaatgtaaaggactcaaagtttaagtaaaaagtgatactccaccttgtgtttcaaagaatttagttccacctcttcataccagtttaacacttaatatatttcattggattttagacagggcaaaaggaagaacaggggcctctggaggcccttggttatttaaatcttggattatttgtgatagtaatcacaaatttttggctaatttttaacctgaggttttgttttttttttaaaggaaatgcagcctagtcttgagaacataattttatataatcaattactaaatgttaaactattaccacacagcccataaaacagcatttgcgtttattgagagagaggatgtgccatcatgattaatgaaaactatcttttgagtttgaaaagaaattaatttgcagtgtttggattgtatatatggtgctaaaaataaattaatttactttataaaccttatctgtacattatacgatgtgatgaaatttgctttttatccaaatattttgtatcttgtaaatatggctaattataggaatgcctataatacatcttagattccttatatctaataagagttcaaagagttatgagttgaagtcttgaatgcaggaaactatctgatagtgttctaaaatttggttacttgggtttggatacccttagtgggatgatgtaaatagaggctagctacctaggcttgtctatagcaaccataatgttgatgtaagtaatgcggttactgaatcataagaaaatgccatctctttttagttgaaggaaaactctggaagtaggtgccattggtcattctgcagtgcactgcaaccattgtttcccctagtgccctcttttccctagggcattgctctcctattcccacgccttaacacagctctatacctagaagcagccagcccaggcatgcagtcacatttaatcacatcccccttctagagtgcttcaaaatgatgtagtccctcaacttggctaaagaatctcaatctcttgaaatttatttttttaatgtcatattcatctggtaaatatctactgtttgccaggcatttaagaatatggcaaagaacataaaagatggtgtcaccagattttggtcaccaatgagtacccgacccgttgccatgattaagagagaatgctttctattggagtttcaggaaatataatttgagaatactttaaagggaagtggaagtataagtgaatgatatttttcttttacatgtaaacaatgaagttatttcaaagttaagttttaaacaaaatacatgaagtagtgtctgccatacatgttaatattctacattcttgcttccttaaattaatatgtttgtgtgtatatatgtgcctcacacctgaattgaaaattaaagactggtttaaaagtggtttaaaagtgacatttaatgtttctccattacgtttggggtaaccagcctaagtggaatcttggaaggaaagtaagggaaaaacttgtatttgccttcaatgaattaaaccagtgatatgtgttaacgtatgaatgaaaggattgatggtgattttataattatatatattgccgcagtaaccagttaataaattgatagctaccatttaaaatgattttatt

SEQ ID NO: 450415 - DNA, 5673 bp, Homo sapiens
taaaggtcctgtttggtccttctccagagctgaggagaaagggttttcagattataaataacagaggtgcccttgtatggcacagaattgcgataagactttacttcttaggggcttaaataatgaagtcagtaaaagaggactgaaaacgaacataaagaagagctttagctttgacgcaaagaattacatcagtgcttgacaaaaccgaggattcttaatttctaaaaacgctttctttaagcacttcctaacctttcattatctgagacaacatatcaagtgagcagcagtacaaaggatgcatgtgatttcgaaatgccacaattgagccaactgcagttgcacgcgtacgtagtatagagaggtgtgatcaaaaaaagaatatagggagcatagggcttcgtctgcatcaaaagatactctccccatcttctatagccttaagttttgcgaaggtaagtttctccccgcttgaaagcgcccccagggacaagaattcatcttgaccaagcctaaggccgtggcatgcaaggtgttgagtcaccgggtacagcggtcttgcgacataaatattatttgatgacgaaggtactcggggcccaggtgccaaggtaaaccactggcaaagatgaccgtggttaaggcagtagaaagcaggctcgacactgagacgcggttccagccctagaaggattgcattttacgattcaggcaaacttcgagtctcctcatgtgacatgtgtgcactcctggaccgttttaattatgagaaacgtggtttgcagcatgattccttccagtcgataaatcggaatctctctcgctcccaccccttcttaacttcaggcttcctgcatcccggagcactcccggcagccccttccctcccccgccccggggatgctccgactcggcgcttagccattcatcaaccggttcacaccggcggcggccgccgcggagtgacgtccggagggggcgggcctccgcccccgcctgtcggctcctggcccgcggttccaggccgcgattggtggctggagggttgcacgtcgcgccggctataaaggggagggcttgtgacgcaagggcgcctcggcgcgtgtattggctccttcggctgcgggccggctcggctacgcgctctgctccgagccgctcactgcatggtagagtctggtgcccccgccgccgcctgcatcgccgccaccgccgctccgccacgaccaccgccgcctcctgccctgcagccaccgccaccgcctgtgtcgccgccgcctcgggaccggctgtatgattaggccacaatcttcaatgagtaaacatattcctcaattctgtggtgttcttggtcacacatttatggagtttctgaagggcagtggagattactgccaggcacagcacgacctctatgcagacaagtgaactgtagaaactgattactgctccaccaagaagcccccataagagtggttatcctggacacagaagtgttgaattgaaatccacagagcattttacaagagttctgacctggatggggtaaacctcagtgcacttcttttctgttggcctcagtattactggattgaagaattgctgcttcttgttaggaggttcatttcacttatcattacttacaacttcatactcaaagcactgagaatttcaagtggagtatattgaagtagacttcagtttctttgcatcatttctgtattcaatttttttaattatttcataaccctattgagtgttttttaactaaattaacatggctcgaatgaaccgcccagctcctgtggaagtcacatacaagaacatgagatttcttattacacacaatccaaccaatgcgaccttaaacaaatttatagaggaacttaagaagtatggagttaccacaatagtaagagtatgtgaagcaacttatgacactactcttgtggagaaagaaggtatccatgttcttgattggccttttgatgatggtgcaccaccatccaaccagattgttgatgactggttaagtcttgtgaaaattaagtttcgtgaagaacctggttgttgtattgctgttcattgcgttgcaggccttgggagagctccagtacttgttgccctagcattaattgaaggtggaatgaaatacgaagatgcagtacaattcataagacaaaagcggcgtggagcttttaacagcaagcaacttctgtatttggagaagtatcgtcctaaaatgcggctgcgtttcaaagattccaacggtcatagaaacaactgttgcattcaataaaattggggtgcctaatgctactggaagtggaacttgagatagggcctaatttgttatacatattagccaacatgttggcttagtaagtctaatgaagcttccataggagtattgaaaggcagttttaccaggcctcaagctagacagatttggcaacctctgtatttgggttacagtcaacctatttggatacttggcaaaagattcttgctgtcagcatataaaatgtgcttgtcatttgtatcaattgacctttccccaaatcatgcagtattgagttatgacttgttaaatctattcccatgccagaatcttatcaatacataagaaatttaggaagattaggtgccaaaatacccagcacaatacttgtatatttttagtaccatacagaagtaaaatcccaggaactatgaacactagaccttatgtggtttattccttcaatcatttcaaacattgaaagtagggcctacatggttatttgcctgctcactttatgtttacatctcccacattcataccaatatacgtcaggtttgcttaaccattgatttttttttttttaccaagtcttacagtgattattttacgtgtttccatgtatctcactttgtgctgtattaaaaaaacctccattttgaaaatctacgttgtacagaagcacatgtctttaatgtcttcagacaaaaaagccttacattaatttaatgtttgcactctgaggtgcaacttaacagggagggcctgagaaaagaatgggagggggctattaattatttttagcaaaatgttgcctttgtcttgtgcaaacatgtagaatatgctctttaatttagtaaaatattttttttttttttcccatacttatcagaagtgtgtttaccaacttatttttgtttgaaagtgtgattttttttttccttcccaacctctcttgcaaaaaaagaaatgggtttctgctaatgaattgagcagacatctaatattttatatgccttttgagctgtgtaacttaatatttggatacttgacaatttgttttattatgtaattgataaaatggtgatgtgtattaatgttagttcaaccatatatttatactgtctggggatgtgtggttatagttctgtgggagaaataattttgtcagtgttcaccagcttgtaaaaacttagtgcgagagctgaaacatctaaataaataatgacatgcatttatcatcattgagattggtttgcttaaaattaacttattttgtagaagacaaaatgaattgcacttcacttaatgtgtgtcctcatctttttacaaataaatgaaggattataaatgatgtcagcattttagtaaacttttagacaaaatttgttagggtcattcatgaaaactttaatactaaaagcactttccattatatactttttaaaggtctagataattttgaaccaatttattattgtgtactgaggagaaataatgtatagtagaggacagccttggtttgtaaagctcagttccactagttcatggttttgtgcaacttctgagcctcagttttctcctttgcaaattaataattacatacctttatagattttgaaattaatttaaatattagtatttggtacatgaaggcttaatgttaagtttcctttaatgatccacaataatccctttgatcacgttaatctaaatctagatgtctttgtctaattttttttgaatagcagttataaatgtaaaggactcaaagtttaagtaaaaagtgatactccaccttgtgtttcaaagaatttagttccacctcttcataccagtttaacacttaatatatttcattggattttagacagggcaaaaggaagaacaggggcctctggaggcccttggttatttaaatcttggattatttgtgatagtaatcacaaatttttggctaatttttaacctgaggttttgttttttttttaaaggaaatgcagcctagtcttgagaacataattttatataatcaattactaaatgttaaactattaccacacagcccataaaacagcatttgcgtttattgagagagaggatgtgccatcatgattaatgaaaactatcttttgagtttgaaaagaaattaatttgcagtgtttggattgtatatatggtgctaaaaataaattaatttactttataaaccttatctgtacattatacgatgtgatgaaatttgctttttatccaaatattttgtatcttgtaaatatggctaattataggaatgcctataatacatcttagattccttatatctaataagagttcaaagagttatgagttgaagtcttgaatgcaggaaactatctgatagtgttctaaaatttggttacttgggtttggatacccttagtgggatgatgtaaatagaggctagctacctaggcttgtctatagcaaccataatgttgatgtaagtaatgcggttactgaatcataagaaaatgccatctctttttagttgaaggaaaactctggaagtaggtgccattggtcattctgcagtgcactgcaaccattgtttcccctagtgccctcttttccctagggcattgctctcctattcccacgccttaacacagctctatacctagaagcagccagcccaggcatgcagtcacatttaatcacatcccccttctagagtgcttcaaaatgatgtagtccctcaacttggctaaagaatctcaatctcttgaaatttatttttttaatgtcatattcatctggtaaatatctactgtttgccaggcatttaagaatatggcaaagaacataaaagatggtgtcaccagattttggtcaccaatgagtacccgacccgttgccatgattaagagagaatgctttctattggagtttcaggaaatataatttgagaatactttaaagggaagtggaagtataagtgaatgatatttttcttttacatgtaaacaatgaagttatttcaaagttaagttttaaacaaaatacatgaagtagtgtctgccatacatgttaatattctacattcttgcttccttaaattaatatgtttgtgtgtatatatgtgcctcacacctgaattgaaaattaaagactggtttaaaagtggtttaaaagtgacatttaatgtttctccattacgtttggggtaaccagcctaagtggaatcttggaaggaaagtaagggaaaaacttgtatttgccttcaatgaattaaaccagtgatatgtgttaacgtatgaatgaaaggattgatggtgattttataattatatatattgccgcagtaaccagttaataaattgatagctaccatttaaaatgattttatt

SEQ ID NO: 450416 - DNA, 4724 bp, Homo sapiens
ttgtctggtatccttatgcagaatgaactgaaataatcatcaatctgaaaagctactcttaaacagagacttgcttcaacaccaggaagaacatgaaagggtgactcataattcccagcagcagtgccagttcatgtgctgggattctgaccacaagcctaacaatcaggtcagggagtcagatttctgttggatttagaaaagcatctatgtgtttatgaaagaaacccactggatttttaatagttctgcagctcttggaggctctacatctaccctttctccccagccaagagcatggctatgggagaaggaaggcaggcagcaggcagcaattctgtggtgttcttggtcacacatttatggagtttctgaagggcagtggagattactgccaggcacagcacgacctctatgcagacaagtgaactgtagaaactgattactgctccaccaagaagcccccataagagtggttatcctggacacagaagtgttgaattgaaatccacagagcattttacaagagttctgacctggatggggtaaacctcagtgcacttcttttctgttggcctcagtattactggattgaagaattgctgcttcttgttaggaggttcatttcacttatcattacttacaacttcatactcaaagcactgagaatttcaagtggagtatattgaagtagacttcagtttctttgcatcatttctgtattcaatttttttaattatttcataaccctattgagtgttttttaactaaattaacatggctcgaatgaaccgcccagctcctgtggaagtcacatacaagaacatgagatttcttattacacacaatccaaccaatgcgaccttaaacaaatttatagaggaacttaagaagtatggagttaccacaatagtaagagtatgtgaagcaacttatgacactactcttgtggagaaagaaggtatccatgttcttgattggccttttgatgatggtgcaccaccatccaaccagattgttgatgactggttaagtcttgtgaaaattaagtttcgtgaagaacctggttgttgtattgctgttcattgcgttgcaggccttgggagagctccagtacttgttgccctagcattaattgaaggtggaatgaaatacgaagatgcagtacaattcataagacaaaagcggcgtggagcttttaacagcaagcaacttctgtatttggagaagtatcgtcctaaaatgcggctgcgtttcaaagattccaacggtcatagaaacaactgttgcattcaataaaattggggtgcctaatgctactggaagtggaacttgagatagggcctaatttgttatacatattagccaacatgttggcttagtaagtctaatgaagcttccataggagtattgaaaggcagttttaccaggcctcaagctagacagatttggcaacctctgtatttgggttacagtcaacctatttggatacttggcaaaagattcttgctgtcagcatataaaatgtgcttgtcatttgtatcaattgacctttccccaaatcatgcagtattgagttatgacttgttaaatctattcccatgccagaatcttatcaatacataagaaatttaggaagattaggtgccaaaatacccagcacaatacttgtatatttttagtaccatacagaagtaaaatcccaggaactatgaacactagaccttatgtggtttattccttcaatcatttcaaacattgaaagtagggcctacatggttatttgcctgctcactttatgtttacatctcccacattcataccaatatacgtcaggtttgcttaaccattgatttttttttttttaccaagtcttacagtgattattttacgtgtttccatgtatctcactttgtgctgtattaaaaaaacctccattttgaaaatctacgttgtacagaagcacatgtctttaatgtcttcagacaaaaaagccttacattaatttaatgtttgcactctgaggtgcaacttaacagggagggcctgagaaaagaatgggagggggctattaattatttttagcaaaatgttgcctttgtcttgtgcaaacatgtagaatatgctctttaatttagtaaaatatttttttaaaaggtagagatgctttgttattgtaatcataaacttcctgaaattcttgtaatttttttcccatacttatcagaagtgtgtttaccaacttatttttgtttgaaagtgtgattttttttttccttcccaacctctcttgcaaaaaaagaaatgggtttctgctaatgaattgagcagacatctaatattttatatgccttttgagctgtgtaacttaatatttggatacttgacaatttgttttattatgtaattgataaaatggtgatgtgtattaatgttagttcaaccatatatttatactgtctggggatgtgtggttatagttctgtgggagaaataattttgtcagtgttcaccagcttgtaaaaacttagtgcgagagctgaaacatctaaataaataatgacatgcatttatcatcattgagattggtttgcttaaaattaacttattttgtagaagacaaaatgaattgcacttcacttaatgtgtgtcctcatctttttacaaataaatgaaggattataaatgatgtcagcattttagtaaacttttagacaaaatttgttagggtcattcatgaaaactttaatactaaaagcactttccattatatactttttaaaggtctagataattttgaaccaatttattattgtgtactgaggagaaataatgtatagtagaggacagccttggtttgtaaagctcagttccactagttcatggttttgtgcaacttctgagcctcagttttctcctttgcaaattaataattacatacctttatagattttgaaattaatttaaatattagtatttggtacatgaaggcttaatgttaagtttcctttaatgatccacaataatccctttgatcacgttaatctaaatctagatgtctttgtctaattttttttgaatagcagttataaatgtaaaggactcaaagtttaagtaaaaagtgatactccaccttgtgtttcaaagaatttagttccacctcttcataccagtttaacacttaatatatttcattggattttagacagggcaaaaggaagaacaggggcctctggaggcccttggttatttaaatcttggattatttgtgatagtaatcacaaatttttggctaatttttaacctgaggttttgttttttttttaaaggaaatgcagcctagtcttgagaacataattttatataatcaattactaaatgttaaactattaccacacagcccataaaacagcatttgcgtttattgagagagaggatgtgccatcatgattaatgaaaactatcttttgagtttgaaaagaaattaatttgcagtgtttggattgtatatatggtgctaaaaataaattaatttactttataaaccttatctgtacattatacgatgtgatgaaatttgctttttatccaaatattttgtatcttgtaaatatggctaattataggaatgcctataatacatcttagattccttatatctaataagagttcaaagagttatgagttgaagtcttgaatgcaggaaactatctgatagtgttctaaaatttggttacttgggtttggatacccttagtgggatgatgtaaatagaggctagctacctaggcttgtctatagcaaccataatgttgatgtaagtaatgcggttactgaatcataagaaaatgccatctctttttagttgaaggaaaactctggaagtaggtgccattggtcattctgcagtgcactgcaaccattgtttcccctagtgccctcttttccctagggcattgctctcctattcccacgccttaacacagctctatacctagaagcagccagcccaggcatgcagtcacatttaatcacatcccccttctagagtgcttcaaaatgatgtagtccctcaacttggctaaagaatctcaatctcttgaaatttatttttttaatgtcatattcatctggtaaatatctactgtttgccaggcatttaagaatatggcaaagaacataaaagatggtgtcaccagattttggtcaccaatgagtacccgacccgttgccatgattaagagagaatgctttctattggagtttcaggaaatataatttgagaatactttaaagggaagtggaagtataagtgaatgatatttttcttttacatgtaaacaatgaagttatttcaaagttaagttttaaacaaaatacatgaagtagtgtctgccatacatgttaatattctacattcttgcttccttaaattaatatgtttgtgtgtatatatgtgcctcacacctgaattgaaaattaaagactggtttaaaagtggtttaaaagtgacatttaatgtttctccattacgtttggggtaaccagcctaagtggaatcttggaaggaaagtaagggaaaaacttgtatttgccttcaatgaattaaaccagtgatatgtgttaacgtatgaatgaaaggattgatggtgattttataattatatatattgccgcagtaaccagttaataaattgatagctaccatttaaaatgattttatt

SEQ ID NO: 450417 - DNA, 5668 bp, Homo sapiens
taaaggtcctgtttggtccttctccagagctgaggagaaagggttttcagattataaataacagaggtgcccttgtatggcacagaattgcgataagactttacttcttaggggcttaaataatgaagtcagtaaaagaggactgaaaacgaacataaagaagagctttagctttgacgcaaagaattacatcagtgcttgacaaaaccgaggattcttaatttctaaaaacgctttctttaagcacttcctaacctttcattatctgagacaacatatcaagtgagcagcagtacaaaggatgcatgtgatttcgaaatgccacaattgagccaactgcagttgcacgcgtacgtagtatagagaggtgtgatcaaaaaaagaatatagggagcatagggcttcgtctgcatcaaaagatactctccccatcttctatagccttaagttttgcgaaggtaagtttctccccgcttgaaagcgcccccagggacaagaattcatcttgaccaagcctaaggccgtggcatgcaaggtgttgagtcaccgggtacagcggtcttgcgacataaatattatttgatgacgaaggtactcggggcccaggtgccaaggtaaaccactggcaaagatgaccgtggttaaggcagtagaaagcaggctcgacactgagacgcggttccagccctagaaggattgcattttacgattcaggcaaacttcgagtctcctcatgtgacatgtgtgcactcctggaccgttttaattatgagaaacgtggtttgcagcatgattccttccagtcgataaatcggaatctctctcgctcccaccccttcttaacttcaggcttcctgcatcccggagcactcccggcagccccttccctcccccgccccggggatgctccgactcggcgcttagccattcatcaaccggttcacaccggcggcggccgccgcggagtgacgtccggagggggcgggcctccgcccccgcctgtcggctcctggcccgcggttccaggccgcgattggtggctggagggttgcacgtcgcgccggctataaaggggagggcttgtgacgcaagggcgcctcggcgcgtgtattggctccttcggctgcgggccggctcggctacgcgctctgctccgagccgctcactgcatggtagagtctggtgcccccgccgccgcctgcatcgccgccaccgccgctccgccacgaccaccgccgcctcctgccctgcagccaccgccaccgcctgtgtcgccgccgcctcgggaccggctgtatgattaggccacaatcttcaatgagtaaacatattcctcaattctgtggtgttcttggtcacacatttatggagtttctgaagggcagtggagattactgccaggcacagcacgacctctatgcagacaagtgaactgtagaaactgattactgctccaccaagaagcccccataagagtggttatcctggacacagaagtgttgaattgaaatccacagagcattttacaagagttctgacctggatggggtaaacctcagtgcacttcttttctgttggcctcagtattactggattgaagaattgctgcttcttgttaggaggttcatttcacttatcattacttacaacttcatactcaaagcactgagaatttcaagtggagtatattgaagtagacttcagtttctttgcatcatttctgtattcaatttttttaattatttcataaccctattgagtgttttttaactaaattaacatggctcgaatgaaccgcccagctcctgtggaagtcacatacaagaacatgagatttcttattacacacaatccaaccaatgcgaccttaaacaaatttatagaggaacttaagaagtatggagttaccacaatagtaagagtatgtgaagcaacttatgacactactcttgtggagaaagaaggtatccatgttcttgattggccttttgatgatggtgcaccaccatccaaccagattgttgatgactggttaagtcttgtgaaaattaagtttcgtgaagaacctggttgttgtattgctgttcattgcgttgcaggccttgggagagctccagtacttgttgccctagcattaattgaaggtggaatgaaatacgaagatgcagtacaattcataagacaaaagcggcgtggagcttttaacagcaagcaacttctgtatttggagaagtatcgtcctaaaatgcggctgcgtttcaaagattccaacggtcatagaaacaactgttgcattcaataaaattggggtgcctaatgctactggaagtggaacttgagatagggcctaatttgttatacatattagccaacatgttggcttagtaagtctaatgaagcttccataggagtattgaaaggcagttttaccaggcctcaagctagacagatttggcaacctctgtatttgggttacagtcaacctatttggatacttggcaaaagattcttgctgtcagcatataaaatgtgcttgtcatttgtatcaattgacctttccccaaatcatgcagtattgagttatgacttgttaaatctattcccatgccagaatcttatcaatacataagaaatttaggaagattaggtgccaaaatacccagcacaatacttgtatatttttagtaccatacattcaaacattgaaagtagggcctacatggttatttgcctgctcactttatgtttacatctcccacattcataccaatatacgtcaggtttgcttaaccattgatttttttttttttaccaagtcttacagtgattattttacgtgtttccatgtatctcactttgtgctgtattaaaaaaacctccattttgaaaatctacgttgtacagaagcacatgtctttaatgtcttcagacaaaaaagccttacattaatttaatgtttgcactctgaggtgcaacttaacagggagggcctgagaaaagaatgggagggggctattaattatttttagcaaaatgttgcctttgtcttgtgcaaacatgtagaatatgctctttaatttagtaaaatatttttttaaaaggtagagatgctttgttattgtaatcataaacttcctgaaattcttgtaatttttttcccatacttatcagaagtgtgtttaccaacttatttttgtttgaaagtgtgattttttttttccttcccaacctctcttgcaaaaaaagaaatgggtttctgctaatgaattgagcagacatctaatattttatatgccttttgagctgtgtaacttaatatttggatacttgacaatttgttttattatgtaattgataaaatggtgatgtgtattaatgttagttcaaccatatatttatactgtctggggatgtgtggttatagttctgtgggagaaataattttgtcagtgttcaccagcttgtaaaaacttagtgcgagagctgaaacatctaaataaataatgacatgcatttatcatcattgagattggtttgcttaaaattaacttattttgtagaagacaaaatgaattgcacttcacttaatgtgtgtcctcatctttttacaaataaatgaaggattataaatgatgtcagcattttagtaaacttttagacaaaatttgttagggtcattcatgaaaactttaatactaaaagcactttccattatatactttttaaaggtctagataattttgaaccaatttattattgtgtactgaggagaaataatgtatagtagaggacagccttggtttgtaaagctcagttccactagttcatggttttgtgcaacttctgagcctcagttttctcctttgcaaattaataattacatacctttatagattttgaaattaatttaaatattagtatttggtacatgaaggcttaatgttaagtttcctttaatgatccacaataatccctttgatcacgttaatctaaatctagatgtctttgtctaattttttttgaatagcagttataaatgtaaaggactcaaagtttaagtaaaaagtgatactccaccttgtgtttcaaagaatttagttccacctcttcataccagtttaacacttaatatatttcattggattttagacagggcaaaaggaagaacaggggcctctggaggcccttggttatttaaatcttggattatttgtgatagtaatcacaaatttttggctaatttttaacctgaggttttgttttttttttaaaggaaatgcagcctagtcttgagaacataattttatataatcaattactaaatgttaaactattaccacacagcccataaaacagcatttgcgtttattgagagagaggatgtgccatcatgattaatgaaaactatcttttgagtttgaaaagaaattaatttgcagtgtttggattgtatatatggtgctaaaaataaattaatttactttataaaccttatctgtacattatacgatgtgatgaaatttgctttttatccaaatattttgtatcttgtaaatatggctaattataggaatgcctataatacatcttagattccttatatctaataagagttcaaagagttatgagttgaagtcttgaatgcaggaaactatctgatagtgttctaaaatttggttacttgggtttggatacccttagtgggatgatgtaaatagaggctagctacctaggcttgtctatagcaaccataatgttgatgtaagtaatgcggttactgaatcataagaaaatgccatctctttttagttgaaggaaaactctggaagtaggtgccattggtcattctgcagtgcactgcaaccattgtttcccctagtgccctcttttccctagggcattgctctcctattcccacgccttaacacagctctatacctagaagcagccagcccaggcatgcagtcacatttaatcacatcccccttctagagtgcttcaaaatgatgtagtccctcaacttggctaaagaatctcaatctcttgaaatttatttttttaatgtcatattcatctggtaaatatctactgtttgccaggcatttaagaatatggcaaagaacataaaagatggtgtcaccagattttggtcaccaatgagtacccgacccgttgccatgattaagagagaatgctttctattggagtttcaggaaatataatttgagaatactttaaagggaagtggaagtataagtgaatgatatttttcttttacatgtaaacaatgaagttatttcaaagttaagttttaaacaaaatacatgaagtagtgtctgccatacatgttaatattctacattcttgcttccttaaattaatatgtttgtgtgtatatatgtgcctcacacctgaattgaaaattaaagactggtttaaaagtggtttaaaagtgacatttaatgtttctccattacgtttggggtaaccagcctaagtggaatcttggaaggaaagtaagggaaaaacttgtatttgccttcaatgaattaaaccagtgatatgtgttaacgtatgaatgaaaggattgatggtgattttataattatatatattgccgcagtaaccagttaataaattgatagctaccatttaaaatgattttatt

SEQ ID NO: 450418 - DNA, 3726 bp, Homo sapiens
  misc_feature (3629)..(3630): n is a, c, g, or t
taaaggtcctgtttggtccttctccagagctgaggagaaagggttttcagattataaataacagaggtgcccttgtatggcacagaattgcgataagactttacttcttaggggcttaaataatgaagtcagtaaaagaggactgaaaacgaacataaagaagagctttagctttgacgcaaagaattacatcagtgcttgacaaaaccgaggattcttaatttctaaaaacgctttctttaagcacttcctaacctttcattatctgagacaacatatcaagtgagcagcagtacaaaggatgcatgtgatttcgaaatgccacaattgagccaactgcagttgcacgcgtacgtagtatagagaggtgtgatcaaaaaaagaatatagggagcatagggcttcgtctgcatcaaaagatactctccccatcttctatagccttaagttttgcgaaggtaagtttctccccgcttgaaagcgcccccagggacaagaattcatcttgaccaagcctaaggccgtggcatgcaaggtgttgagtcaccgggtacagcggtcttgcgacataaatattatttgatgacgaaggtactcggggcccaggtgccaaggtaaaccactggcaaagatgaccgtggttaaggcagtagaaagcaggctcgacactgagacgcggttccagccctagaaggattgcattttacgattcaggcaaacttcgagtctcctcatgtgacatgtgtgcactcctggaccgttttaattatgagaaacgtggtttgcagcatgattccttccagtcgataaatcggaatctctctcgctcccaccccttcttaacttcaggcttcctgcatcccggagcactcccggcagccccttccctcccccgccccggggatgctccgactcggcgcttagccattcatcaaccggttcacaccggcggcggccgccgcggagtgacgtccggagggggcgggcctccgcccccgcctgtcggctcctggcccgcggttccaggccgcgattggtggctggagggttgcacgtcgcgccggctataaaggggagggcttgtgacgcaagggcgcctcggcgcgtgtattggctccttcggctgcgggccggctcggctacgcgctctgctccgagccgctcactgcatggtagagtctggtgcccccgccgccgcctgcatcgccgccaccgccgctccgccacgaccaccgccgcctcctgccctgcagccaccgccaccgcctgtgtcgccgccgcctcgggaccggctgtatgattaggccacaatcttcaatgagtaaacatattcctcaattctgtggtgttcttggtcacacatttatggagtttctgaagggcagtggagattactgccaggcacagcacgacctctatgcagacaagtgaactgtagaaactgattactgctccaccaagaagcccccataagagtggttatcctggacacagaagtgttgaattgaaatccacagagcattttacaagagttctgacctggatggggtaaacctcagtgcacttcttttctgttggcctcagtattactggattgaagaattgctgcttcttgttaggaggttcatttcacttatcattacttacaacttcatactcaaagcactgagaatttcaagtggagtatattgaagtagacttcagtttctttgcatcatttctgtattcaatttttttaattatttcataaccctattgagtgttttttaactaaattaacatggctcgaatgaaccgcccagctcctgtggaagtcacatacaagaacatgagatttcttattacacacaatccaaccaatgcgaccttaaacaaatttatagaggaacttaagaagtatggagttaccacaatagtaagagtatgtgaagcaacttatgacactactcttgtggagaaagaaggtatccatgttcttgattggccttttgatgatggtgcaccaccatccaaccagattgttgatgactggttaagtcttgtgaaaattaagtttcgtgaagaacctggttgttgtattgctgttcattgcgttgcaggccttgggagagctccagtacttgttgccctagcattaattgaaggtggaatgaaatacgaagatgcagtacaattcataagacaaaagcggcgtggagcttttaacagcaagcaacttctgtatttggagaagtatcgtcctaaaatgcggctgcgtttcaaagattccaacggtcatagaaacaactgttgcattcaataaaattggggtgcctaatgctactggaagtggaacttgagatagggcctaatttgttatacatattagccaacatgttggcttagtaagtctaatgaagcttccataggagtattgaaaggcagttttaccaggcctcaagctagacagatttggcaacctctgtatttgggttacagtcaacctatttggatacttggcaaaagattcttgctgtcagcatataaaatgtgcttgtcatttgtatcaattgacctttccccaaatcatgcagtattgagttatgacttgttaaatctattcccatgccagaatcttatcaatacataagaaatttaggaagattaggtgccaaaatacccagcacaatacttgtatatttttagtaccatacagaagtaaaatcccaggaactatgaacactagaccttatgtggtttattccttcaatcatttcaaacattgaaagtagggcctacatggttatttgcctgctcactttatgtttacatctcccacattcataccaatatacgtcaggtttgcttaaccattgatttttttttttttaccaagtcttacagtgattattttacgtgtttccatgtatctcactttgtgctgtattaaaaaaacctccattttgaaaatctacgttgtacagaagcacatgtctttaatgtcttcagacaaaaaagccttacattaatttaatgtttgcactctgaggtgcaacttaacagggagggcctgagaaaagaatgggagggggctattaattatttttagcaaaatgttgcctttgtcttgtgcaaacatgtagaatatgctctttaatttagtaaaatatttttttaaaaggtagagatgctttgttattgtaatcataaacttcctgaaattcttgtaatttttttcccatacttatcagaagtgtgtttaccaacttatttttgtttgaaagtgtgattttttttttccttcccaacctctcttgcaaaaaaagaaatgggtttctgctaatgaattgagcagacatctaatattttatatgccttttgagctgtgtaacttaatatttggatacttgacaatttgttttattatgtaattgataaaatggtgatgtgtattaatgttagttcaaccatatatttatactgtctggggatgtgtggttatagttctgtgggagaaataattttgtcagtgttcaccagcttgtaaaaacttagtgcgagagctgaaacatctaaataaataatgacatgcatttatcatcatccaaaaaaaacaaaaattaaaattttttatttaaatatattttttnntatttaataaattttttaatattttttttattaattattaataaaattaaaaaaaatatatatattctttgtgggggggcgccggccccaaatccc

SEQ ID NO: 450419 - DNA, 2967 bp, Homo sapiens
taaaggtcctgtttggtccttctccagagctgaggagaaagggttttcagattataaataacagaggtgcccttgtatggcacagaattgcgataagactttacttcttaggggcttaaataatgaagtcagtaaaagaggactgaaaacgaacataaagaagagctttagctttgacgcaaagaattacatcagtgcttgacaaaaccgaggattcttaatttctaaaaacgctttctttaagcacttcctaacctttcattatctgagacaacatatcaagtgagcagcagtacaaaggatgcatgtgatttcgaaatgccacaattgagccaactgcagttgcacgcgtacgtagtatagagaggtgtgatcaaaaaaagaatatagggagcatagggcttcgtctgcatcaaaagatactctccccatcttctatagccttaagttttgcgaaggtaagtttctccccgcttgaaagcgcccccagggacaagaattcatcttgaccaagcctaaggccgtggcatgcaaggtgttgagtcaccgggtacagcggtcttgcgacataaatattatttgatgacgaaggtactcggggcccaggtgccaaggtaaaccactggcaaagatgaccgtggttaaggcagtagaaagcaggctcgacactgagacgcggttccagccctagaaggattgcattttacgattcaggcaaacttcgagtctcctcatgtgacatgtgtgcactcctggaccgttttaattatgagaaacgtggtttgcagcatgattccttccagtcgataaatcggaatctctctcgctcccaccccttcttaacttcaggcttcctgcatcccggagcactcccggcagccccttccctcccccgccccggggatgctccgactcggcgcttagccattcatcaaccggttcacaccggcggcggccgccgcggagtgacgtccggagggggcgggcctccgcccccgcctgtcggctcctggcccgcggttccaggccgcgattggtggctggagggttgcacgtcgcgccggctataaaggggagggcttgtgacgcaagggcgcctcggcgcgtgtattggctccttcggctgcgggccggctcggctacgcgctctgctccgagccgctcactgcatggtagagtctggtgcccccgccgccgcctgcatcgccgccaccgccgctccgccacgaccaccgccgcctcctgccctgcagccaccgccaccgcctgtgtcgccgccgcctcgggaccggctgtatgattaggccacaatcttcaatgagtaaacatattcctcaattctgtggtgttcttggtcacacatttatggagtttctgaagggcagtggagattactgccaggcacagcacgacctctatgcagacaagtgaactgtagaaactgattactgctccaccaagaagcccccataagagtggttatcctggacacagaagtgttgaattgaaatccacagagcattttacaagagttctgacctggatggggtaaacctcagtgcacttcttttctgttggcctcagtattactggattgaagaattgctgcttcttgttaggaggttcatttcacttatcattacttacaacttcatactcaaagcactgagaatttcaagtggagtatattgaagtagacttcagtttctttgcatcatttctgtattcaatttttttaattatttcataaccctattgagtgttttttaactaaattaacatggctcgaatgaaccgcccagctcctgtggaagtcacatacaagaacatgagatttcttattacacacaatccaaccaatgcgaccttaaacaaatttatagaggaacttaagaagtatggagttaccacaatagtaagagtatgtgaagcaacttatgacactactcttgtggagaaagaaggtatccatgttcttgattggccttttgatgatggtgcaccaccatccaaccagattgttgatgactggttaagtcttgtgaaaattaagtttcgtgaagaacctggttgttgtattgctgttcattgcgttgcaggccttgggagagctccagtacttgttgccctagcattaattgaaggtggaatgaaatacgaagatgcagtacaattcataagacaaaagcggcgtggagcttttaacagcaagcaacttctgtatttggagaagtatcgtcctaaaatgcggctgcgtttcaaagattccaacggtcatagaaacaactgttgcattcaataaaattggggtgcctaatgctactggaagtggaacttgagatagggcctaatttgttatacatattagccaacatgttggcttagtaagtctaatgaagcttccataggagtattgaaaggcagttttaccaggcctcaagctagacagatttggcaacctctgtatttgggttacagtcaacctatttggatacttggcaaaagattcttgctgtcagcatataaaatgtgcttgtcatttgtatcaattgacctttccccaaatcatgcagtattgagttatgacttgttaaatctattcccatgccagaatcttatcaatacataagaaatttaggaagattaggtgccaaaatacccagcacaatacttgtatatttttagtaccatacagaagtaaaatcccaggaactatgaacactagaccttatgtggtttattccttcaatcatttccgacagtgtaattagagtcaaaacggtatattacgacgtcaagttaacgagtacatatgccacaagataaactatatgacggatcggcttacgcaccagagagattctgataattatatttatcaacaatattacgaggtgatgtgtgtgacgtgtttgccatgtatgtcactattctgactgtacgtatgaataaacatcatgttgcgat

SEQ ID NO: 450420 - DNA, 1198 bp, Homo sapiens
gccgcgccgtctcctgtttgtttcgccgacacgcctcctcctcatctctctactcgtcccctctcctcgctccttcccgtgccctgctccgccgctgtcccgcgccctcgcgccggcgcgcctgctgctgtcccgccgtctccccgtcgcccccgcctcccctctgtcgcgcgtcgtgtgcttgcctcccttgtcgtccgccgctccgcctcctcttcttggcctctctggcctcctccccctctgaccgctcgcccctctcccgcttgcgcgcacctcgtcgccccggtcggcgtccgcttgtcgctctcgttgtttcgtgtttcgtcttgctgtttcttcctgtttttcgctcgcttgtgtcctgttctcttcgcatcttcggtccgcctctgtccgctctcttccgtgtgtttgctctttgtcgcgttgtcctttgtcgtgcgttgtttccatgctctgtgttgcgcttgctttcttcctttcctgttctccctcttgctgtcgtgtttccttctccgttgctcgccccccgctcctctccttccccctccctgtcgttgtctcgcgtgctctggtgcccctcctctcgttctcgctcgtcttctttctgcgccgccgcgcgcccgctctccctgcggcgtgttgctgtcgttctctgttctttttccctcctcttctgtgttgctgcgcctccccagtctcttcttttgtcctctcctgttcgtcctcctccgtggtctttgcgcctgtccgcctcgcccgctttgttggctgtgctctggctcgtcctctccctctatccgccgtgtgttctgttttgtgcctctgccccccctgccggcggcctccgtgccgccccccccctccctctctttttctttctgcttgtgtctttctttctctcctctctctctctttctctcctcttcttctttttttttttttttttttttttttttttttctctttttttttttttttttttttttttttttttttttttttttttgtttttgtttttgttttggtagatcttcaatttggatatttggaggagtgaacatcgttgttttgctggagggaagatcttgatggtgtttctttccccaaaaattgacttagatattaaaatttggtgcttataagagagagttaaaaaaaaataggattgcttcaattaaaattacaaaagaga

SEQ ID NO: 450421 - DNA, 314 bp, Homo sapiens
cttattcaaagtccttcgttctcattcccacagtgctctaagccatgaagcttttcatccatctttcaatttgtaggccagcaaacgaattacaagtgatgtcttttcttccttgaattacctgcttttattccttgactccctgtccagatcttcaatttggatatttggaggagtgaacatcgttgttttgctggagggaagatcttgatggtgtttctttccccaaaaattgacttagatattaaaatttggtgcttataagagagagttaaaaaaaaataggattgcttcaattaaaattacaaaagaga

SEQ ID NO: 450422 - DNA, 2570 bp, Homo sapiens
acgtttccaccattagcgaggcctcacacccggcgctccaagttcggggctggaggcgtcccggcttcctccctcccggaggcgggaccggccccgcccccgcgccccgggtcgctcccggcggcccctcccacctcctagtcctggcctccccgggcgcagcacactcccagccggccgcagcctgacacgccgcgcggccccccagtctcccgcggctgctcccccaggcatggcacagggcctcgcctcactatggcagcagcacggcacagcacgctcgacttcatgctcggcgccaaagctgatggtgagaccattctaaaaggcctccagtccattttccaggagcaggggatggcggagtcggtgcacacctggcaggaccatggctatttagcaacctacacaaacaagaacggcagctttgccaatttgagaatttacccacatggattggtgttgctggaccttcagagttatgatggtgatgcgcaaggcaaagaagagatcgacagtattttgaacaaagtagaggaaagaatgaaagaattgagtcaggacagtactgggcgggtgaaacgattaccacccatagtgcgaggaggagccatcgacagatactggcccaccgccgacgggcgcctggttgaatatgacatagatgaagtggtatatgacgaagattcaccttatcaaaatataaaaattctacactcgaagcagtttggaaatattctcatccttagtggggatgttaatttggcagagagtgatttggcatatacccgggccatcatgggcagtggcaaagaagattacactggcaaagatgtactcattctgggaggtggagacggaggcatattgtgtgaaatagtcaaactaaaaccaaagatggtcactatggtagagattgaccaaatggtgattgatgggtgtaagaaatacatgcgaaaaacgtgtggcgatgtcttagacaatcttaaaggagactgctatcaggttctaatagaagactgtatcccggtactgaagaggtacgccaaagaagggagagaatttgattatgtgattaatgatttgacagctgttccaatctccacgtctccagaagaagattccacatgggagtttctcagactgattcttgacctctcaatgaaagtgttgaaacaggatgggaaatattttacacaggggaactgtgtcaatctgacagaagcactgtcgctctatgaagaacagctggggcgcctgtattgtcctgtggaattttcaaaggagatcgtctgtgtcccttcatacttggaattgtgggtattttacactgtttggaagaaagctaaaccctgaagatcagtagcccctaatcacatgtgctgcaaatagccttcctgacctccatatgctgtacatgacatcaaaatgagtcaggcaattgattgtgaattccttaaagttttcctttttttaataattatttttaatttaaaaaagcaaatggaaaatgtatattttgatgagcttagggtgttttttttttgaaagtcagctgaaggatggttagacagcacagcgaagactgctaaatgcactgaccccccccattagaatgtgatttttgttcctttttatttctctgtgggcttttgtttttgtttttgttttggtagatcttcaatttggatatttggaggagtgaacatcgttgttttgctggagggaagatcttgatggtgtttctttccccaaaaattgacttagatattaaaatttggtgcttataagagagagttaaaaaaaaataggattgcttcaattaaaattacaaaagagacattttgtgtgttctgtcgttttatttcagcccagtcccctctttctgacttgtgatctcatagagcaacagtatctcctggtctgtttttagttctgtcactcgatgtcatttatctctttataataggatggccccggggccttttttgaacagtagtaatgacttcatttgccaccgtgctaaatgatacacaacctattacattcaccagtccttcattataccattgacctgaggctagcaagagattttgtctgactgtaaagttgaaagtcaaaagcttatttctggtcccactcttagcagtgtattagatgtggaaataaaagtcattttgggtagctgctatgaaactttctgagcagattcttggctgcaccgatgtatgacagaatttatggagaggcctatggcaatatgagcaacttgaaaactcctaaggaagtgcaggtagctaacagcttggtgtggtgtgtgtgggtaacaatccacatcaaaagtgagctttacattgacttggattgttagacatcagtgggttattctgttgtttttataaaaggtttatactgtatcaatggaatgagtcatttatgatgaatttgcaataagcaaagcattaaaaatgaaatattcagtgtccattttgaggtagaattggtgtcaacacagaacgttcttcctctcaaggtgtaggaatcaatagtatggtatttaaaaaaaaaaa

SEQ ID NO: 450423 - DNA, 2205 bp, Homo sapiens
  misc_feature (1871)..(1871): n is a, c, g, or t
acgtttccaccattagcgaggcctcacacccggcgctccaagttcggggctggaggcgtcccggcttcctccctcccggaggcgggaccggccccgcccccgcgccccgggtcgctcccggcggcccctcccacctcctagtcctggcctccccgggcgcagcacactcccagccggccgcagcctgacacgccgcgcggccccccagtctcccgcggctgctcccccaggcatggcacagggcctcgcctcactatggcagcagcacggcacagcacgctcgacttcatgctcggcgccaaagctgatggtgagaccattctaaaaggcctccagtccattttccaggagcaggggatggcggagtcggtgcacacctggcaggaccatggctatttagcaacctacacaaacaagaacggcagctttgccaatttgagaatttacccacatggattggtgttgctggaccttcagagttatgatggtgatgcgcaaggcaaagaagagatcgacagtattttgaacaaagtagaggaaagaatgaaagaattgagtcaggacagtactgggcgggtgaaacgattaccacccatagtgcgaggaggagccatcgacagatactggcccaccgccgacgggcgcctggttgaatatgacatagatgaagtggtatatgacgaagattcaccttatcaaaatataaaaattctacactcgaagcagtttggaaatattctcatccttagtggggatgttaatttggcagagagtgatttggcatatacccgggccatcatgggcagtggcaaagaagattacactggcaaagatgtactcattctgggaggtggagacggaggcatattgtgtgaaatagtcaaactaaaaccaaagatggtcactatggtagagattgaccaaatggtgattgatgggtgtaagaaatacatgcgaaaaacgtgtggcgatgtcttagacaatcttaaaggagactgctatcaggttctaatagaagactgtatcccggtactgaagaggtacgccaaagaagggagagaatttgattatgtgattaatgatttgacagctgttccaatctccacgtctccagaagaagattccacatgggagtttctcagactgattcttgacctctcaatgaaagtgttgaaacaggatgggaaatattttacacaggggaactgtgtcaatctgacagaagcactgtcgctctatgaagaacagctggggcgcctgtattgtcctgtggaattttcaaaggagatcgtctgtgtcccttcatacttggaattgtgggtattttacactgtttggaagaaagctaaaccctgaagatcagtagcccctaatcacatgtgctgcaaatagccttcctgacctccatatgctgtacatgacatcaaaatgagtcaggcaattgattgtgaattccttaaagttttcctttttttaataattatttttaatttaaaaaagcaaatggaaaatgtatattttgatgagcttagggtgttttttttttgaaagtcagctgaaggatggttagacagcacagcgaagactgctaaatgcactgaccccccccattagaatgtgatttttgttcctttttatttctctgtgggcttttgtttttgtttttgttttggtagatcttcaatttggatatttggaggagtgaacatcgttgttttgctggagggaagatcttgatggtgtttctttccccaaaaattgacttagatattaaaatttggtgcttataagagagagttaaaaaaaaataggattgcttcaattaaaattacaaaagagaaaaaaaaaaaaaaaaaaaaaaaaaaaaaaanaaaaaaaaaaaaaaaaaaaaaaagaaaaaaaacaaaaaaagaaaaaaagaaaaaaaaaaaaaaaaaagagagaccaagaacaaaaaaagaataaacaaagagaaaccacaaactataagaagaaacacacaacaaaggagaaggagacaaagaagaaggaggacagccacaaagaagagaggagcacacataagaatgaagaacaaagcaaaggagaaaaaagaaagagacaacgcaagtcgacaacaagcaccaaacaatatacgaagagacaaacagaagacagaacgaaacaagacgagacaagaagggagacagagtagaacctacaaca

SEQ ID NO: 450424 - DNA, 1903 bp, Homo sapiens
acgtttccaccattagcgaggcctcacacccggcgctccaagttcggggctggaggcgtcccggcttcctccctcccggaggcgggaccggccccgcccccgcgccccgggtcgctcccggcggcccctcccacctcctagtcctggcctccccgggcgcagcacactcccagccggccgcagcctgacacgccgcgcggccccccagtctcccgcggctgctcccccaggcatggcacagggcctcgcctcactatggcagcagcacggcacagcacgctcgacttcatgctcggcgccaaagggtggagaatgtttatcgctcatgtcatgacaagggataagtgacactgacaactttgttcagctgatggtgagaccattctaaaaggcctccagtccattttccaggagcaggggatggcggagtcggtgcacacctggcaggaccatggctatttagcaacctacacaaacaagaacggcagctttgccaatttgagaatttacccacatggattggtgttgctggaccttcagagttatgatggtgatgcgcaaggcaaagaagagatcgacagtattttgaacaaagtagaggaaagaatgaaagaattgagtcaggacagtactgggcgggtgaaacgattaccacccatagtgcgaggaggagccatcgacagatactggcccaccgccgacgggcgcctggttgaatatgacatagatgaagtggtatatgacgaagattcaccttatcaaaatataaaaattctacactcgaagcagtttggaaatattctcatccttagtggggatgttaatttggcagagagtgatttggcatatacccgggccatcatgggcagtggcaaagaagattacactggcaaagatgtactcattctgggaggtggagacggaggcatattgtgtgaaatagtcaaactaaaaccaaagatggtcactatggtagagattgaccaaatggtgattgatgggtgtaagaaatacatgcgaaaaacgtgtggcgatgtcttagacaatcttaaaggagactgctatcaggttctaatagaagactgtatcccggtactgaagaggtacgccaaagaagggagagaatttgattatgtgattaatgatttgacagctgttccaatctccacgtctccagaagaagattccacatgggagtttctcagactgattcttgacctctcaatgaaagtgttgaaacaggatgggaaatattttacacaggggaactgtgtcaatctgacagaagcactgtcgctctatgaagaacagctggggcgcctgtattgtcctgtggaattttcaaaggagatcgtctgtgtcccttcatacttggaattgtgggtattttacactgtttggaagaaagctaaaccctgaagatcagtagcccctaatcacatgtgctgcaaatagccttcctgacctccatatgctgtacatgacatcaaaatgagtcaggcaattgattgtgaattccttaaagttttcctttttttaataattatttttaatttaaaaaagcaaatggaaaatgtatattttgatgagcttagggtgttttttttttgaaagtcagctgaaggatggttagacagcacagcgaagactgctaaatgcactgaccccccccattagaatgtgatttttgttcctttttatttctctgtgggcttttgtttttgtttttgttttggtagatcttcaatttggatatttggaggagtgaacatcgttgttttgctggagggaagatcttgatggtgtttctttccccaaaaattgacttagatattaaaatttggtgcttataagagagagttaaaaaaaaataggattgcttcaattaaaattacaaaagaga

SEQ ID NO: 450425 - DNA, 1746 bp, Homo sapiens
acgtttccaccattagcgaggcctcacacccggcgctccaagttcggggctggaggcgtcccggcttcctccctcccggaggcgggaccggccccgcccccgcgccccgggtcgctcccggcggcccctcccacctcctagtcctggcctccccgggcgcagcacactcccagccggccgcagcctgacacgccgcgcggccccccagtctcccgcggctgctcccccaggcatggcacagggcctcgcctcactatggcagcagcacggcacagcacgctcgacttcatgctcggcgccaaagctgatggtgagaccattctaaaaggcctccagtccattttccaggagcaggggatggcggagtcggtgcacacctggcaggaccatggctatttagcaacctacacaaacaagaacggcagattttgaacaaagtagaggaaagaatgaaagaattgagtcaggacagtactgggcgggtgaaacgattaccacccatagtgcgaggaggagccatcgacagatactggcccaccgccgacgggcgcctggttgaatatgacatagatgaagtggtatatgacgaagattcaccttatcaaaatataaaaattctacactcgaagcagtttggaaatattctcatccttagtggggatgttaatttggcagagagtgatttggcatatacccgggccatcatgggcagtggcaaagaagattacactggcaaagatgtactcattctgggaggtggagacggaggcatattgtgtgaaatagtcaaactaaaaccaaagatggtcactatggtagagattgaccaaatggtgattgatgggtgtaagaaatacatgcgaaaaacgtgtggcgatgtcttagacaatcttaaaggagactgctatcaggttctaatagaagactgtatcccggtactgaagaggtacgccaaagaagggagagaatttgattatgtgattaatgatttgacagctgttccaatctccacgtctccagaagaagattccacatgggagtttctcagactgattcttgacctctcaatgaaagtgttgaaacaggatgggaaatattttacacaggggaactgtgtcaatctgacagaagcactgtcgctctatgaagaacagctggggcgcctgtattgtcctgtggaattttcaaaggagatcgtctgtgtcccttcatacttggaattgtgggtattttacactgtttggaagaaagctaaaccctgaagatcagtagcccctaatcacatgtgctgcaaatagccttcctgacctccatatgctgtacatgacatcaaaatgagtcaggcaattgattgtgaattccttaaagttttcctttttttaataattatttttaatttaaaaaagcaaatggaaaatgtatattttgatgagcttagggtgttttttttttgaaagtcagctgaaggatggttagacagcacagcgaagactgctaaatgcactgaccccccccattagaatgtgatttttgttcctttttatttctctgtgggcttttgtttttgtttttgttttggtagatcttcaatttggatatttggaggagtgaacatcgttgttttgctggagggaagatcttgatggtgtttctttccccaaaaattgacttagatattaaaatttggtgcttataagagagagttaaaaaaaaataggattgcttcaattaaaattacaaaagaga

SEQ ID NO: 450426 - DNA, 1587 bp, Homo sapiens
  misc_feature (1495)..(1495): n is a, c, g, or t
acgtttccaccattagcgaggcctcacacccggcgctccaagttcggggctggaggcgtcccggcttcctccctcccggaggcgggaccggccccgcccccgcgccccgggtcgctcccggcggcccctcccacctcctagtcctggcctccccgggcgcagcacactcccagccggccgcagcctgacacgccgcgcggccccccagtctcccgcggctgctcccccaggcatggcacagggcctcgcctcactatggcagcagcacggcacagcacgctcgacttcatgctcggcgccaaagctgatggtgagaccattctaaaaggcctccagtccattttccaggagcaggggatggcggagtcggtgcacacctggcaggaccatggctatttagcaacctacacaaacaagaacggcagctttgccaatttgagaatttacccacatggattggtgttgctggaccttcagagttatgatggtgatgcgcaaggcaaagaagagatcgacagtattttgaacaaagtagaggaaagaatgaaagaattgagtcaggacagtactgggcgggtgaaacgattaccacccatagtgcgaggaggagccatcgacagatactggcccaccgccgacgggcgcctggttgaatatgacatagatgaagtggtatatgacgaagattcaccttatcaaaatataaaaattctacactcgaagcagtttggaaatattctcatccttagtggggatgttaatttggcagagagtgatttggcatatacccgggccatcatgggcagtggcaaagaagattacactggcaaagatgtactcattctgggaggtggagacggaggcatattgtgtgaaatagtcaaactaaaaccaaagatggtcactatggtagagattgaccaaatggtgattgatgggtgtaagaaatacatgcgaaaaacgtgtggcgatgtcttagacaatcttaaaggagactgctatcaggttctaatagaagactgtatcccggtactgaagaggtacgccaaagaagggagagaatttgattatgtgattaatgatttgacagctgttccaatctccacgtctccagaagaagattccacatgggagtttctcagactgattcttgacctctcaatgaaagtgttgaaacaggatgggaaatattttacacaggggaactgtgtcaatctgacagaagcactgtcgctctatgaagaacagctggggcgcctgtattgtcctgtggaattttcaaaggagatcgtctgtgtcccttcatacttggaattgtgggtattttacactgtttggaagaaagctaaaccctgaagatcagtagcccctaatcacatgtgctgcaaatagccttcctgacctccatatgctgtacatgacatcaaaatgagtcaggcatgatgggattcttaagtttcttttttatattattttattaaaagaggaagttttngaggaaggttttgaagagaagtgtgagagaggaagatagagggcaaaaggggaatagggggggaggagaaaaagagagaggggaagcacaaa

SEQ ID NO: 450427 - DNA, 1788 bp, Homo sapiens
acgtttccaccattagcgaggcctcacacccggcgctccaagttcggggctggaggcgtcccggcttcctccctcccggaggcgggaccggccccgcccccgcgccccgggtcgctcccggcggcccctcccacctcctagtcctggcctccccgggcgcagcacactcccagccggccgcagcctgacacgccgcgcggccccccagtctcccgcggctgctcccccaggcatggcacagggcctcgcctcactatggcagcagcacggcacagcacgctcgacttcatgctcggcgccaaagctgatggtgagaccattctaaaaggcctccagtccattttccaggagcaggggatggcggagtcggtgcacacctggcaggaccatggctatttagcaacctacacaaacaagaacggcagctttgccaatttgagaatttacccacatggattggtgttgctggaccttcagagttatgatggtgatgcgcaaggcaaagaagagatcgacagtattttgaacaaagtagaggaaagaatgaaagaattgagtcaggacagtactgggcgggtgaaacgattaccacccatagtgcgaggaggagccatcgacagatactggcccaccgccgacgggcgcctggttgaatatgacatagatgaagtggtatatgacgaagattcaccttatcaaaatataaaaatttggcagagagtgatttggcatatacccgggccatcatgggcagtggcaaagaagattacactggcaaagatgtactcattctgggaggtggagacggaggcatattgtgtgaaatagtcaaactaaaaccaaagatggtcactatggtagagattgaccaaatggtgattgatgggtgtaagaaatacatgcgaaaaacgtgtggcgatgtcttagacaatcttaaaggagactgctatcaggttctaatagaagactgtatcccggtactgaagaggtacgccaaagaagggagagaatttgattatgtgattaatgatttgacagctgttccaatctccacgtctccagaagaagattccacatgggagtttctcagactgattcttgacctctcaatgaaagtgttgaaacaggatgggaaatattttacacaggggaactgtgtcaatctgacagaagcactgtcgctctatgaagaacagctggggcgcctgtattgtcctgtggaattttcaaaggagatcgtctgtgtcccttcatacttggaattgtgggtattttacactgtttggaagaaagctaaaccctgaagatcagtagcccctaatcacatgtgctgcaaatagccttcctgacctccatatgctgtacatgacatcaaaatgagtcaggcaattgattgtgaattccttaaagttttcctttttttaataattatttttaatttaaaaaagcaaatggaaaatgtatattttgatgagcttagggtgttttttttttgaaagtcagctgaaggatggttagacagcacagcgaagactgctaaatgcactgaccccccccattagaatgtgatttttgttcctttttatttctctgtgggcttttgtttttgtttttgttttggtagatcttcaatttggatatttggaggagtgaacatcgttgttttgctggagggaagatcttgatggtgtttctttccccaaaaattgacttagatattaaaatttggtgcttataagagagagttaaaaaaaaataggattgcttcaattaaaattacaaaagaga

SEQ ID NO: 450428 - DNA, 1352 bp, Homo sapiens
acgtttccaccattagcgaggcctcacacccggcgctccaagttcggggctggaggcgtcccggcttcctccctcccggaggcgggaccggccccgcccccgcgccccgggtcgctcccggcggcccctcccacctcctagtcctggcctccccgggcgcagcacactcccagccggccgcagcctgacacgccgcgcggccccccagtctcccgcggctgctcccccaggcatggcacagggcctcgcctcactatggcagcagcacggcacagcacgctcgacttcatgctcggcgccaaagctgatggtgagaccattctaaaaggcctccagtccattttccaggagcaggggatggcggagtcggtgcacacctggcaggaccatggctatttagcaacctacacaaacaagaacggcagctttgccaatttgagaatttacccacatggattggtgttgctggaccttcagagttatgatggtgatgcgcaaggcaaagaagagatcgacagtattttgaacaaagtagaggaaagaatgaaagaattgagtcaggacagtactgggcgggtgaaacgattaccacccatagtgcgaggaggagccatcgacagatactggcccaccgccgacgggcgcctggttgaatatgacatagatgaagtggtatatgacgaagattcaccttatcaaaatataaaaattctacactcgaagcagtttggaaatattctcatccttagtggggatgttaatttggcagagagtgatttggcatatacccgggccatcatgggcagtggcaaagaagattacactggcaaagatgtactcattctgggaggtggagacggaggcatattgtgtgaaatagtcaaactaaaaccaaagatggtcactatggtagagattgaccaaatggtgattgatgggtgtaagaaatacatgcgaaaaacgtgtggcgatgtcttagacaatcttaaaggagactgctatcaggttctaatagaagactgtatcccggtactgaagaggtacgccaaagaagggagagaatttgattatgtgattaatgatttgacagctgttccaatctccacgtctccagaagaagattccacatgggagtttctcagactgattcttgacctctcaatgaaagtgttgaaacaggatgggaaatattttacacaggggaactgtgtcaatctgacagaagcactgtcgctctatgaagaacagctggggcgcctgtattgtcctgtggaattcaggcccgtaccaagactttgtcatgcttgccaggctagactcgtagaggatcgcttataacgtttagatatgtc

SEQ ID NO: 450429 - DNA, 1280 bp, Homo sapiens
acgtttccaccattagcgaggcctcacacccggcgctccaagttcggggctggaggcgtcccggcttcctccctcccggaggcgggaccggccccgcccccgcgccccgggtcgctcccggcggcccctcccacctcctagtcctggcctccccgggcgcagcacactcccagccggccgcagcctgacacgccgcgcggccccccagtctcccgcggctgctcccccaggcatggcacagggcctcgcctcactatggcagcagcacggcacagcacgctcgacttcatgctcggcgccaaagctgatggtgagaccattctaaaaggcctccagtccattttccaggagcaggggatggcggagtcggtgcacacctggcaggaccatggctatttagcaacctacacaaacaagaacggcagattaccacccatagtgcgaggaggagccatcgacagatactggcccaccgccgacgggcgcctggttgaatatgacatagatgaagtggtatatgacgaagattcaccttatcaaaatataaaaattctacactcgaagcagtttggaaatattctcatccttagtggggatgttaatttggcagagagtgatttggcatatacccgggccatcatgggcagtggcaaagaagattacactggcaaagatgtactcattctgggaggtggagacggaggcatattgtgtgaaatagtcaaactaaaaccaaagatggtcactatggtagaggtgggtattttacactgtttggaagaaagctaaaccctgaagatcagtagcccctaatcacatgtgctgcaaatagccttcctgacctccatatgctgtacatgacatcaaaatgagtcaggcaattgattgtgaattccttaaagttttcctttttttaataattatttttaatttaaaaaagcaaatggaaaatgtatattttgatgagcttagggtgttttttttttgaaagtcagctgaaggatggttagacagcacagcgaagactgctaaatgcactgaccccccccattagaatgtgatttttgttcctttttatttctctgtgggcttttgtttttgtttttgttttggtagatcttcaatttggatatttggaggagtgaacatcgttgttttgctggagggaagatcttgatggtgtttctttccccaaaaattgacttagatattaaaatttggtgcttataagagagagttaaaaaaaaataggattgcttcaattaaaattacaaaagaga

SEQ ID NO: 450430 - DNA, 674 bp, Homo sapiens
cttattcaaagtccttcgttctcattcccacagtgctctaagccatgaagcttttcatccatctttcaatttgtaggccagcaaacgaattacaagtgatgtcttttcttccttgaattacctgcttttattccttgactccctgtccaggtgggtattttacactgtttggaagaaagctaaaccctgaagatcagtagcccctaatcacatgtgctgcaaatagccttcctgacctccatatgctgtacatgacatcaaaatgagtcaggcaattgattgtgaattccttaaagttttcctttttttaataattatttttaatttaaaaaagcaaatggaaaatgtatattttgatgagcttagggtgttttttttttgaaagtcagctgaaggatggttagacagcacagcgaagactgctaaatgcactgaccccccccattagaatgtgatttttgttcctttttatttctctgtgggcttttgtttttgtttttgttttggtagatcttcaatttggatatttggaggagtgaacatcgttgttttgctggagggaagatcttgatggtgtttctttccccaaaaattgacttagatattaaaatttggtgcttataagagagagttaaaaaaaaataggattgcttcaattaaaattacaaaagaga

SEQ ID NO: 450431 - DNA, 1126 bp, Homo sapiens
acgtttccaccattagcgaggcctcacacccggcgctccaagttcggggctggaggcgtcccggcttcctccctcccggaggcgggaccggccccgcccccgcgccccgggtcgctcccggcggcccctcccacctcctagtcctggcctccccgggcgcagcacactcccagccggccgcagcctgacacgccgcgcggccccccagtctcccgcggctgctcccccaggcatggcacagggcctcgcctcactatggcagcagcacggcacagcacgctcgacttcatgctcggcgccaaagctgatggtgagaccattctaaaaggcctccagtccattttccaggagcaggggatggcggagtcggtgcacacctggcaggaccatggctatttagcaacctacacaaacaagaacggcagctttgccaatttgagaatttacccacatggattggtgttgctggaccttcagagttatgatggtgatgcgcaaggcaaagaagagatcgacagtattttgaacaaagtagaggaaagaatgaaagaattgagtcaggacagtactgggcgggtgaaacgattaccacccatagtgcgaggaggagccatcgacagatactggcccaccgccgacgggcgcctggttgaatatgacatagatgaagtggtatatgacgaagattcaccttatcaaaatataaaaattctacactcgaagcagtttggaaatattctcatccttagtggggatgttaatttggcagagagtgatttggcatatacccgggccatcatgggcagtggcaaagaagattacactggcaaagatgtactcattctgggaggtggagacggaggcatattgtgtgaaattgaactctatggcagtgttaaaaagattagtattactgtaccaaaactttcctttgacaatgtaagcagtgtcagcttgcgatgaaaatgtaggctatttatacttttaggctaaaaggatcagaaaattcagccagactgctagtcgagttcattgaaacttttaatttgatttttgctgttctgaaggtacatagccagatttcattgaaacttctgtggagaaggtttactgtgtagaaattgaa

SEQ ID NO: 450432 - DNA, 1110 bp, Homo sapiens
  misc_feature (787)..(787): n is a, c, g, or t
  misc_feature (799)..(799): n is a, c, g, or t
  misc_feature (803)..(803): n is a, c, g, or t
acgtttccaccattagcgaggcctcacacccggcgctccaagttcggggctggaggcgtcccggcttcctccctcccggaggcgggaccggccccgcccccgcgccccgggtcgctcccggcggcccctcccacctcctagtcctggcctccccgggcgcagcacactcccagccggccgcagcctgacacgccgcgcggccccccagtctcccgcggctgctcccccaggcatggcacagggcctcgcctcactatggcagcagcacggcacagcacgctcgacttcatgctcggcgccaaagctgatggtgagaccattctaaaaggcctccagtccattttccaggagcaggggatggcggagtcggtgcacacctggcaggaccatggctatttagcaacctacacaaacaagaacggcagctttgccaatttgagaatttacccacatggattggtgttgctggaccttcagagttatgatggtgatgcgcaaggcaaagaagagatcgacagtattttgaacaaagtagaggaaagaatgaaagaattgagtcaggacagtactgggcgggtgaaacgattaccacccatagtgcgaggaggagccatcgacagatactggcccaccgccgacgggcgcctggttgaatatgacatagatgaagtggtatatgacgaagattcaccttatcaaaatataaaaattctacactcgaagcagtttggaaatattctcatccttagtggggatgttaatttgggcgaagagtgattggcatatncccgggcccatnattnggcaggggcaagaagatcccctgggaaagatgtctcatctggcagtgcacggggctttggttaatgtcaactaaccagatgccttggtaattgcccggtgttgggtgacaatctgcaaccggggcttcaccctcggacgtcgccagtccgacagccccaggcatagtaacggggcccgccggcagcccggaggatgggtcctctgagtccttctcagacccgacccactcacacaagccaccaccgccacaccacccacccaccacaccaccatccaccagccctcaacccgctaagctcacggact

SEQ ID NO: 450433 - DNA, 401 bp, Homo sapiens
ttggtgttgctggaccttcagagttatgatggtgatgcgcaaggcaaagaagagatcgacagtgtcggtttttcactttcatttactcagtgtttaaggatcatagtatctgcttagcttagtgttaaaataatgttctcttcattgcttactttccagttaattttaaactttcctccctccacataagtgattttagaatagaagtagttgtttagttgtttttaggaacctgggtgtcagcgttcccttttaactgccttagtatgagtaatcttattttccactggagggaatagaaaacctttaaccaggattttatagctgcagtaccctttagccttcctcttccgtgttactttgttgctaacttacgctaaggttaggtcagcaacatgaag

SEQ ID NO: 450434 - DNA, 362 bp, Homo sapiens
ttgaatatgacatagatgaagtggtatatgacgaagattcaccttatcaaaatataaaaattctacactcgaagcagtttggaaatattctcatccttagtggggatgttagtaagtattccatccctgccccgatcacgtaacaaagtggtgatgtgttgaatgatggtgttttcctgacaattactactgtcgtggatttgtttgagtttgtttttgacactgctggtttttgagatgcacatttatgtcatattaacctgtggattgtctgggctttcacataaactttgtcttgacattgcttccttagtgatgagtatttggattgtatttcaaaagaaaatgcatttgcatattta

SEQ ID NO: 450435 - DNA, 155 bp, Homo sapiens
tggtagatcttcaatttggatatttggaggagtgaacatcgttgttttgctggagggaagatcttgatggtgtttctttccccaaaaattgacttagatattaaaatttggtgcttataagagagagttaaaaaaaaataggattgcttcaatta

SEQ ID NO: 450436 - DNA, 1840 bp, Homo sapiens
acgtttccaccattagcgaggcctcacacccggcgctccaagttcggggctggaggcgtcccggcttcctccctcccggaggcgggaccggccccgcccccgcgccccgggtcgctcccggcggcccctcccacctcctagtcctggcctccccgggcgcagcacactcccagccggccgcagcctgacacgccgcgcggccccccagtctcccgcggctgctcccccaggcatggcacagggcctcgcctcactatggcagcagcacggcacagcacgctcgacttcatgctcggcgccaaagctgatggtgagaccattctaaaaggcctccagtccattttccaggagcaggggatggcggagtcggtgcacacctggcaggaccatggctatttagcaacctacacaaacaagaacggcagctttgccaatttgagaatttacccacatggattggtgttgctggaccttcagagttatgatggtgatgcgcaaggcaaagaagagatcgacagtattttgaacaaagtagaggaaagaatgaaagaattgagtcaggacagtactgggcgggtgaaacgattaccacccatagtgcgaggaggagccatcgacagatactggcccaccgccgacgggcgcctggttgaatatgacatagatgaagtggtatatgacgaagattcaccttatcaaaatataaaaattctacactcgaagcagtttggaaatattctcatccttagtggggatgttaatttggcagagagtgatttggcatatacccgggccatcatgggcagtggcaaagaagattacactggcaaagatgtactcattctgggaggtggagacggaggcatattgtgtgaaatagtcaaactaaaaccaaagatggtcactatggtagagattgaccaaatggtgattgatgggtgtaagaaatacatgcgaaaaacgtgtggcgatgtcttagacaatcttaaaggagactgctatcaggttctaatagaagactgtatcccggtactgaagaggtacgccaaagaagggagagaatttgattatgtgattaatgatttgacagctgttccaatctccacgtctccagaagaagattccacatgggagtttctcagactgattcttgacctctcaatgaaagtgttgaaacaggatgggaaatattttacacaggggaactgtgtcaatctgacagaagcactgtcgctctatgaagaacagctggggcgcctgtattgtcctgtggaattttcaaaggagatcgtctgtgtcccttcatacttggaattgtgggtattttacactgtttggaagaaagctaaaccctgaagatcagtagcccctaatcacatgtgctgcaaatagccttcctgacctccatatgctgtacatgacatcaaaatgagtcaggcaattgattgtgaattccttaaagttttcctttttttaataattatttttaatttaaaaaagcaaatggaaaatgtatattttgatgagcttagggtgttttttttttgaaagtcagctgaaggatggttagacagcacagcgaagactgctaaatgcactgaccccccccattagaatgtgatttttgttcctttttatttctctgtgggcttttgtttttgtttttgttttggtagatcttcaatttggatatttggaggagtgaacatcgttgttttgctggagggaagatcttgatggtgtttctttccccaaaaattgacttagatattaaaatttggtgcttataagagagagttaaaaaaaaataggattgcttcaattaaaattacaaaagaga

SEQ ID NO: 450437 - DNA, 2184 bp, Homo sapiens
  misc_feature (1850)..(1850): n is a, c, g, or t
acgtttccaccattagcgaggcctcacacccggcgctccaagttcggggctggaggcgtcccggcttcctccctcccggaggcgggaccggccccgcccccgcgccccgggtcgctcccggcggcccctcccacctcctagtcctggcctccccgggcgcagcacactcccagccggccgcagcctgacacgccgcgcggccccccagtctcccgcggctgctcccccaggcatggcacagggcctcgcctcactatggcagcagcacggcacagcacgctcgacttcatgctcggcgccaaagctgatggtgagaccattctaaaaggcctccagtccattttccaggagcaggggatggcggagtcggtgcacacctggcaggaccatggctatttagcaacctacacaaacaagaacggcagctttgccaatttgagaatttacccacatggattggtgttgctggaccttcagagttatgatggtgatgcgcaaggcaaagaagagatcgacagtattttgaacaaagtagaggaaagaatgaaagaattgagtcaggacagtactgggcgggtgaaacgattaccacccatagtgcgaggaggagccatcgacagatactggcccaccgccgacgggcgcctggttgaatatgacatagatgaagtggtatatgacgaagattcaccttatcaaaatataaaaattctacactcgaagcagtttggaaatattctcatccttagtggggatgttaatttggcagagagtgatttggcatatacccgggccatcatgggcagtggcaaagaagattacactggcaaagatgtactcattctgggaggtggagacggaggcatattgtgtgaaatagtcaaactaaaaccaaagatggtcactatggtagagattgaccaaatggtgattgatgggtgtaagaaatacatgcgaaaaacgtgtggcgatgtcttagacaatcttaaaggagactgctatcaggttctaatagaagactgtatcccggtactgaagaggtacgccaaagaagggagagaatttgattatgtgattaatgatttgacagctgttccaatctccacgtctccagaagaagattccacatgggagtttctcagactgattcttgacctctcaatgaaagtgttgaaacaggatgggaaatattttacacaggggaactgtgtcaatctgacagaagcactgtcgctctatgaagaacagctggggcgcctgtattgtcctgtggaattttcaaaggagatcgtctgtgtcccttcatacttggaattgtgggtattttacactgtttggaagaaagctaaaccctgaagatcagtagcccctaatcacatgtgctgcaaatagccttcctgacctccatatgctgtacatgacatcaaaatgagtcaggcaattgattgtgaattccttaaagttttcctttttttaataattatttttaatttaaaaaagcaaatggaaaatgtatattttgatgagcttagggtgttttttttttgaaagtcagctgaaggatggttagacagcacagcgaagactgctaaatgcactgaccccccccattagaatgtgatttttgttcctttttatttctctgtgggcttttgtttttgtttttgttttggtagatcttcaatttggatatttggaggagtgaacatcgttgttttgctggagggaagatcttgatggtgtttctttccccaaaaattgacttagatattaaaatttggtgcttataagagagagttaaaaaaaaataggattgcttcaattaaaattacaaaagagaaaaaaaaaanaaaaaaaaaaaaaaaaaaaaaaagaaaaaaaacaaaaaaagaaaaaaagaaaaaaaaaaaaaaaaaagagagaccaagaacaaaaaaagaataaacaaagagaaaccacaaactataagaagaaacacacaacaaaggagaaggagacaaagaagaaggaggacagccacaaagaagagaggagcacacataagaatgaagaacaaagcaaaggagaaaaaagaaagagacaacgcaagtcgacaacaagcaccaaacaatatacgaagagacaaacagaagacagaacgaaacaagacgagacaagaagggagacagagtagaacctacaaca

SEQ ID NO: 450438 - DNA, 1851 bp, Homo sapiens
gggcggaggccgcgctcctgctggctccgcgctccgtcccggccgcagctcggggcctgcaggggcagtcccgggtgcccgccggccgcgccgcccttccgggccctggccgtccacccgcgctcccacgcgggctcgccgccttcgcgctcccgctcggggagtccccgggctgccgggcgcgggcggaccccccatgggacgagggttgcagggactgcggcggagcgaggcgtgacccgcgcggcgagcccgggctgggggcgtgcgccgagcggggctgcccgcgcgaccttttcctgttcttgcaggcggctgatggtgagaccattctaaaaggcctccagtccattttccaggagcaggggatggcggagtcggtgcacacctggcaggaccatggctatttagcaacctacacaaacaagaacggcagctttgccaatttgagaatttacccacatggattggtgttgctggaccttcagagttatgatggtgatgcgcaaggcaaagaagagatcgacagtattttgaacaaagtagaggaaagaatgaaagaattgagtcaggacagtactgggcgggtgaaacgattaccacccatagtgcgaggaggagccatcgacagatactggcccaccgccgacgggcgcctggttgaatatgacatagatgaagtggtatatgacgaagattcaccttatcaaaatataaaaattctacactcgaagcagtttggaaatattctcatccttagtggggatgttaatttggcagagagtgatttggcatatacccgggccatcatgggcagtggcaaagaagattacactggcaaagatgtactcattctgggaggtggagacggaggcatattgtgtgaaatagtcaaactaaaaccaaagatggtcactatggtagagattgaccaaatggtgattgatgggtgtaagaaatacatgcgaaaaacgtgtggcgatgtcttagacaatcttaaaggagactgctatcaggttctaatagaagactgtatcccggtactgaagaggtacgccaaagaagggagagaatttgattatgtgattaatgatttgacagctgttccaatctccacgtctccagaagaagattccacatgggagtttctcagactgattcttgacctctcaatgaaagtgttgaaacaggatgggaaatattttacacaggggaactgtgtcaatctgacagaagcactgtcgctctatgaagaacagctggggcgcctgtattgtcctgtggaattttcaaaggagatcgtctgtgtcccttcatacttggaattgtgggtattttacactgtttggaagaaagctaaaccctgaagatcagtagcccctaatcacatgtgctgcaaatagccttcctgacctccatatgctgtacatgacatcaaaatgagtcaggcaattgattgtgaattccttaaagttttcctttttttaataattatttttaatttaaaaaagcaaatggaaaatgtatattttgatgagcttagggtgttttttttttgaaagtcagctgaaggatggttagacagcacagcgaagactgctaaatgcactgaccccccccattagaatgtgatttttgttcctttttatttctctgtgggcttttgtttttgtttttgttttggtagatcttcaatttggatatttggaggagtgaacatcgttgttttgctggagggaagatcttgatggtgtttctttccccaaaaattgacttagatattaaaatttggtgcttataagagagagttaaaaaaaaataggattgcttcaattaaaattacaaaagaga

SEQ ID NO: 450439 - DNA, 1660 bp, Homo sapiens
acgtttccaccattagcgaggcctcacacccggcgctccaagttcggggctggaggcgtcccggcttcctccctcccggaggcgggaccggccccgcccccgcgccccgggtcgctcccggcggcccctcccacctcctagtcctggcctccccgggcgcagcacactcccagccggccgcagcctgacacgccgcgcggccccccagtctcccgcggctgctcccccaggcatggcacagggcctcgcctcactatggcagcagcacggcacagcacgctcgacttcatgctcggcgccaaagctgatggtgagaccattctaaaaggcctccagtccattttccaggagcaggggatggcggagtcggtgcacacctggcaggaccatggctatttagcaacctacacaaacaagaacggcagctttgccaatttgagaatttacccacatggattggtgttgctggaccttcagagttatgatggtgatgcgcaaggcaaagaagagatcgacagtattttgaacaaagtagaggaaagaatgaaagaattgagtcaggacagtactgggcgggtgaaacgattaccacccatagtgcgaggaggagccatcgacagatactggcccaccgccgacgggcgcctggttgaatatgacatagatgaagtggtatatgacgaagattcaccttatcaaaatataaaaattctacactcgaagcagtttggaaatattctcatccttagtggggatgttaatttggcagagagtgatttggcatatacccgggccatcatgggcagtggcaaagaagattacactggcaaagatgtactcattctgggaggtggagacggaggcatattgtgtgaaatagtcaaactaaaaccaaagatggtcactatggtagagattgaccaaatggtgattgatgggtgtaagaaatacatgcgaaaaacgtgtggcgatgtcttagacaatcttaaaggagactgctatcaggttctaatagaagactgtatcccggtactgaagaggtacgccaaagaagggagagaatttgattatgtgattaatgatttgacagctgttccaatctccacgtctccagaagaagattccacatgggagtttctcagactgattcttgacctctcaatgaaagtgttgaaacaggatgggaaatattttacacaggggaactgtgtcaatctgacagaagcactgtcgctctatgaagaacagctggggcgcctgtattgtcctgtggaattttcaaaggagatcgtctgtgtcccttcatacttggaattgtgggtattttacactgtttggaagaaagctaaaccctgaagatcagtagcccctaatcacatgtgctgcaaatagccttcctgacctccatatgctgtacatgacatcaaaatgagtcaggcaattgattgtgaattccttaaagttttcctttttttaataattatttttaatttaaaaaagcaaatggaaaatgtatattttgatgagcttagggtgttttttttgtggggcgcattcttatgcaaaatgggaattggggctaaactggtttgtttgttgctcttcagaattgccgtttgtgtatgctgtgccaaagcagcttctccaccccctggaggag

SEQ ID NO: 450440 - DNA, 1373 bp, Homo sapiens
acgtttccaccattagcgaggcctcacacccggcgctccaagttcggggctggaggcgtcccggcttcctccctcccggaggcgggaccggccccgcccccgcgccccgggtcgctcccggcggcccctcccacctcctagtcctggcctccccgggcgcagcacactcccagccggccgcagcctgacacgccgcgcggccccccagtctcccgcggctgctcccccaggcatggcacagggcctcgcctcactatggcagcagcacggcacagcacgctcgacttcatgctcggcgccaaagctgatggtgagaccattctaaaaggcctccagtccattttccaggagcaggggatggcggagtcggtgcacacctggcaggaccatggctatttagcaacctacacaaacaagaacggcagctttgccaatttgagaatttacccacatggattggtgttgctggaccttcagagttatgatggtgatgcgcaaggcaaagaagagatcgacagtattttgaacaaagtagaggaaagaatgaaagaattgagtcaggacagtactgggcgggtgaaacgattaccacccatagtgcgaggaggagccatcgacagatactggcccaccgccgacgggcgcctggttgaatatgacatagatgaagtggtatatgacgaagattcaccttatcaaaatataaaaattctacactcgaagcagtttggaaatattctcatccttagtggggatgttaatttggcagagagtgatttggcatatacccgggccatcatgggcagtggcaaagaagattacactggcaaagatgtactcattctgggaggtggagacggaggcatattgtgtgaaatagtcaaactaaaaccaaagatggtcactatggtagagattgaccaaatggtgattgatgggtgtaagaaatacatgcgaaaaacgtgtggcgatgtcttagacaatcttaaaggagactgctatcaggttctaatagaagactgtatcccggtactgaagaggtacgccaaagaagggagagaatttgattatgtgattaatgatttgacagctgttccaatctccacgtctccagaagaagattccacatgggagtttctcagactgattcttgacctctcaatgaaagtgttgaaacaggatgggaaatattttacacaggggaactgtgtcaatctgacagaagcactgtcgctctatgaagaacagctggggcgcctgtattgtcctgtggaattttcaaaggagatcgtctgtgtcccttcatacttggaattttctcttacattctggagagtcagtagttcgaatgcgcctgtagtggctaataagta

SEQ ID NO: 450441 - DNA, 1154 bp, Homo sapiens
acgtttccaccattagcgaggcctcacacccggcgctccaagttcggggctggaggcgtcccggcttcctccctcccggaggcgggaccggccccgcccccgcgccccgggtcgctcccggcggcccctcccacctcctagtcctggcctccccgggcgcagcacactcccagccggccgcagcctgacacgccgcgcggccccccagtctcccgcggctgctcccccaggcatggcacagggcctcgcctcactatggcagcagcacggcacagcacgctcgacttcatgctcggcgccaaagctgatggtgagaccattctaaaaggcctccagtccattttccaggagcaggggatggcggagtcggtgcacacctggcaggaccatggctatttagcaacctacacaaacaagaacggcagctttgccaatttgagaatttacccacatggattggtgttgctggaccttcagagttatgatggtgatgcgcaaggcaaagaagagatcgacagtattttgaacaaagtagaggaaagaatgaaagaattgagtcaggacagtactgggcgggtgaaacgattaccacccatagtgcgaggaggagccatcgacagatactggcccaccgccgacgggcgcctggttgaatatgacatagatgaagtggtatatgacgaagattcaccttatcaaaatataaaaattctacactcgaagcagtttggaaatattctcatccttagtggggatgttaatttggcagagagtgatttggcatatacccgggccatcatgggcagtggcaaagaagattacactggcaaagatgtactcattctgggaggtggagacggaggcatattgtgtgaaatagtcaaactaaaaccaaagatggtcactatggtagagattgaccaaatggtgattgatgggtgtaagaaatacatgcgaaaaacgtgtggcgatgtcttagacaatcttaaaggagactgctatcaggttctaatagaagactgtatcccggtactgaagaggtacgccaaagaagggagagaatttgattatgtgattaatgatttgacagctgtttaggttacagccatttaggttacagccatttaggaacagccatttagtagggatcctca

SEQ ID NO: 450442 - DNA, 1044 bp, Homo sapiens
acgtttccaccattagcgaggcctcacacccggcgctccaagttcggggctggaggcgtcccggcttcctccctcccggaggcgggaccggccccgcccccgcgccccgggtcgctcccggcggcccctcccacctcctagtcctggcctccccgggcgcagcacactcccagccggccgcagcctgacacgccgcgcggccccccagtctcccgcggctgctcccccaggcatggcacagggcctcgcctcactatggcagcagcacggcacagcacgctcgacttcatgctcggcgccaaagctgatggtgagaccattctaaaaggcctccagtccattttccaggagcaggggatggcggagtcggtgcacacctggcaggaccatggctatttagcaacctacacaaacaagaacggcagctttgccaatttgagaatttacccacatggattggtgttgctggaccttcagagttatgatggtgatgcgcaaggcaaagaagagatcgacagtattttgaacaaagtagaggaaagaatgaaagaattgagtcaggacagtactgggcgggtgaaacgattaccacccatagtgcgaggaggagccatcgacagatactggcccaccgccgacgggcgcctggttgaatatgacatagatgaagtggtatatgacgaagattcaccttatcaaaatataaaaattctacactcgaagcagtttggaaatattctcatccttagtggggatgttaatttggcagagagtgatttggcatatacccgggccatcatgggcagtggcaaagaagattacactggcaaagatgtactcattctgggaggtggagacggaggcatattgtgtgaaattgaacttcaatttctacacaaagaaagcaaacgaacaatttcttttacatgaagtatgctgtgttgaaagttcttttcagtggcatttcatgagtttgccttttctgaaccctggaaacagacattactcatctgagacatgattattctagtgtagaaattgacc

SEQ ID NO: 450443 - DNA, 2011 bp, Homo sapiens
gccacagcccagctgttccctccgcggattctccggggctggttcatcacctccgaatattcctgtgacaggagacgcttgcaaaacccgcctccagcctccagcagcaaataaatagaaggcttgcagcccagaaggagccagaagaagtttctaggcgcgcgtgccctgggtttattaagctcctggctccgctctagacctcagcggttctggctgccagcctgggcagcctgggaagcctgggaggacggtggcttgccggtctgtcgtgaggcagtgcggacggggaccctctgggattctgctggatctgccccgggggttacctttgggggctgggaccccagtcgaggggacacaaccgtccctggcagtggttggttctgcttctccctgcagaaaagcagcattttcggaagctgaagaataagctagcccagccacaccaccttgttgtgtgaccttgggcaggtggttctgtctctctgagcctctgtttctctctgagctgagcagccaccatggctgacggtcagatgcccttctcctgccactacccaagccgcctgcgccgagaccccttccgggactctcccctctcctctcgcctgctggatgatggctttggcatggaccccttcccagacgacttgacagcctcttggcccgactgggctctgcctcgtctctcctccgcctggccaggcaccctaaggtcgggcatggtgccccggggccccactgccaccgccaggtttggggtgcctgccgagggcaggacccccccacccttccctggggagccctggaaagtgtgtgtgaatgtgcacagcttcaagccagaggagttgatggtgaagaccaaagatggatacgtggaggtgtctggcaaacatgaagagaaacagcaagaaggtggcattgtttctaagaacttcacaaagaaaatccagcttcctgcagaggtggatcctgtgacagtatttgcctcactttccccagagggtctgctgatcatcgaagctccccaggtccctccttactcaacatttggagagagcagtttcaacaacgagcttccccaggacagccaggaagtcacctgtacctgagatgccagtactggcccatccttgttttgtccccaaccctagggcttctctgattccaggatacattactttagctgaactcagatttagtgcaagtaaaatgttagagggtgcgggggtgaggactgaccacagattccctggatagtgtagtggtagatttctccacaggatagcgcaattggcaaatcatgcttggttgtgttaggccaaaatactagttttgctttctttaccttttctatcttgatgaaaatgttgcacattctatagttgcaaaacacataaaaggggacttaacatttcacgttgtatcttacttgcagtgaatgcaagggttacttttctctggggacctcccccatcacccaggttcctactctgggctcccgattcccatggctcccaaaccatgccgcatggtttggttaatgaaacccagtagctaaccccactgtgcttccacatgcctggcctaaaatgggtgatatacaggtcttatatccccatatggaatttatccatcaaccacataaaaacaaacagtgccttctgccctctgcccagatgtgtccagcacgttctcaaagtttccacattagcactccctaaggacgctgggagcctgtcagtttatgatctgacctaggtcccccctttcttctgtcccctgtgtttaagtcgggatttttacagagggagctgtctccagacagctccatcaggaaccaagcaaaggccagatagcctgacagataggctagtggtattgtgtatatgggcgggacgtgtgtgtcattattatttgagttatgctgttgtttaggggtaaataacagtaaataattaataataataataataataataataaaggagctgacgttcttaaaaaa

SEQ ID NO: 450444 - DNA, 1065 bp, Homo sapiens
  misc_feature (757)..(757): n is a, c, g, or t
  misc_feature (761)..(761): n is a, c, g, or t
  misc_feature (767)..(767): n is a, c, g, or t
  misc_feature (770)..(770): n is a, c, g, or t
  misc_feature (774)..(774): n is a, c, g, or t
  misc_feature (781)..(781): n is a, c, g, or t
  misc_feature (794)..(794): n is a, c, g, or t
  misc_feature (796)..(798): n is a, c, g, or t
  misc_feature (819)..(819): n is a, c, g, or t
  misc_feature (822)..(822): n is a, c, g, or t
  misc_feature (828)..(828): n is a, c, g, or t
  misc_feature (844)..(844): n is a, c, g, or t
  misc_feature (898)..(898): n is a, c, g, or t
  misc_feature (901)..(901): n is a, c, g, or t
  misc_feature (909)..(909): n is a, c, g, or t
  misc_feature (913)..(914): n is a, c, g, or t
  misc_feature (919)..(919): n is a, c, g, or t
  misc_feature (928)..(928): n is a, c, g, or t
  misc_feature (930)..(930): n is a, c, g, or t
  misc_feature (937)..(937): n is a, c, g, or t
  misc_feature (950)..(950): n is a, c, g, or t
  misc_feature (954)..(954): n is a, c, g, or t
  misc_feature (960)..(960): n is a, c, g, or t
  misc_feature (970)..(970): n is a, c, g, or t
  misc_feature (973)..(973): n is a, c, g, or t
  misc_feature (978)..(978): n is a, c, g, or t
  misc_feature (982)..(982): n is a, c, g, or t
  misc_feature (988)..(988): n is a, c, g, or t
  misc_feature (990)..(990): n is a, c, g, or t
  misc_feature (997)..(997): n is a, c, g, or t
  misc_feature (1003)..(1003): n is a, c, g, or t
  misc_feature (1005)..(1005): n is a, c, g, or t
  misc_feature (1060)..(1060): n is a, c, g, or t
gccacagcccagctgttccctccgcggattctccggggctggttcatcacctccgaatattcctgtgacaggagacgcttgcaaaacccgcctccagcctccagcagcaaataaatagaaggcttgcagcccagaaggagccagaagaagtttctaggcgcgcgtgccctgggtttattaagctcctggctccgctctagacctcagcggttctggctgccagcctgggcagcctgggaagcctgggaggacggtggcttgccggtctgtcgtgaggcagtgcggacggggaccctctgggattctgctggatctgccccgggggttacctttgggggctgggaccccagtcgaggggacacaaccgtccctggcagtggttggttctgcttctccctgcagaaaagcagcattttcggaagctgaagaataagctagcccagccacaccaccttgttgtgtgaccttgggcaggtggttctgtctctctgagcctctgtttctctctgagctgagcagccaccatggctgacggtcagatgcccttctcctgccactacccaagccgcctgcgccgagaccccttccgggactctcccctctcctctcgcctgctggatgatggctttggcatggaccccttcccagacgacttgacagcctcttggcccgactgggctctgcctcgtctctcctccgcctggccaggcaccctaaggtcgggcatggtgccccccggggggcccccacattgccnaccngcctangtntttntggggtncctttgcctgaangnnngagggaccccccccccacccnttncccttnggggggagccccttgngaaaagttgtggtgttgaaatggtgccacagctttctaagcccagcagggagtntgnatgggtgnaagnnccaanagatgggananagtgggnaggtggtctggcncaanatatgnaagaagaaanaanccaanaaangtggcncnttgtttncttaananattctcaaaaaaaaaaacccaacattccctgccgaaaggtggggtccttgtgccnagttt

SEQ ID NO: 450445 - DNA, 1917 bp, Homo sapiens
gccacagcccagctgttccctccgcggattctccggggctggttcatcacctccgaatattcctgtgacaggagacgcttgcaaaacccgcctccagcctccagcagcaaataaatagaaggcttgcagcccagaaggagccagaagaagtttctaggcgcgcgtgccctgggtttattaagctcctggctccgctctagacctcagcggttctggctgccagcctgggcagcctgggaagcctgggaggacggtggcttgccggtctgtcgtgaggcagtgcggacggggaccctctgggattctgctggatctgccccgggggttacctttgggggctgggaccccagtcgaggggacacaaccgtccctggcagtggttggttctgcttctccctgcagaaaagcagcattttcggaagctgaagaataagctagcccagccacaccaccttgttgtgtgaccttgggcaggtggttctgtctctctgagcctctgtttctctctgagctgagcagccaccatggctgacggtcagatgcccttctcctgccactacccaagccgcctgcgccgagaccccttccgggactctcccctctcctctcgcctgctggatgatggctttggcatggaccccttcccagacgacttgacagcctcttggcccgactgggctctgcctcgtctctcctccgcctggccaggcaccctaaggtcgggcatggtgccccggggccccactgccaccgccaggtttggggtgcctgccgagggcaggacccccccacccttccctggggagccctggaaagtgtgtgtgaatgtgcacagcttcaagccagaggagttgatggtgaagaccaaagatggatacgtggaggtgtctggcaaacatgaagagaaacagcaagaaggtggcattgtttctaagaacttcacaaagaaaatccagcttcctgcagaggtggatcctgtgacagtatttgcctcactttccccagagggtctgctgatcatcgaagctccccaggtccctccttgttttgtccccaaccctagggcttctctgattccaggatacattactttagctgaactcagatttagtgcaagtaaaatgttagagggtgcgggggtgaggactgaccacagattccctggatagtgtagtggtagatttctccacaggatagcgcaattggcaaatcatgcttggttgtgttaggccaaaatactagttttgctttctttaccttttctatcttgatgaaaatgttgcacattctatagttgcaaaacacataaaaggggacttaacatttcacgttgtatcttacttgcagtgaatgcaagggttacttttctctggggacctcccccatcacccaggttcctactctgggctcccgattcccatggctcccaaaccatgccgcatggtttggttaatgaaacccagtagctaaccccactgtgcttccacatgcctggcctaaaatgggtgatatacaggtcttatatccccatatggaatttatccatcaaccacataaaaacaaacagtgccttctgccctctgcccagatgtgtccagcacgttctcaaagtttccacattagcactccctaaggacgctgggagcctgtcagtttatgatctgacctaggtcccccctttcttctgtcccctgtgtttaagtcgggatttttacagagggagctgtctccagacagctccatcaggaaccaagcaaaggccagatagcctgacagataggctagtggtattgtgtatatgggcgggacgtgtgtgtcattattatttgagttatgctgttgtttaggggtaaataacagtaaataattaataataataataataataataataaaggagctgacgttcttaaaaaa

SEQ ID NO: 450446 - DNA, 1217 bp, Homo sapiens
gccacagcccagctgttccctccgcggattctccggggctggttcatcacctccgaatattcctgtgacaggagacgcttgcaaaacccgcctccagcctccagcagcaaataaatagaaggcttgcagcccagaaggagccagaagaagtttctaggcgcgcgtgccctgggtttattaagctcctggctccgctctagacctcagcggttctggctgccagcctgggcagcctgggaagcctgggaggacggtggcttgccggtctgtcgtgaggcagtgcggacggggaccctctgggattctgctggatctgccccgggggttacctttgggggctgggaccccagtcgaggggacacaaccgtccctggcagtggttggttctgcttctccctgcagaaaagcagcattttcggaagctgaagaataagctagcccagccacaccaccttgttgtgtgaccttgggcaggtggttctgtctctctgagcctctgtttctctctgagctgagcagccaccatggctgacggtcagatgcccttctcctgccactacccaagccgcctgcgccgagaccccttccgggactctcccctctcctctcgcctgctggatgatggctttggcatggaccccttcccagacgacttgacagcctcttggcccgactgggctctgcctcgtctctcctccgcctggccaggcaccctaaggtcgggcatggtgccccggggccccactgccaccgccaggtttggggtgcctgccgagggcaggacccccccacccttccctggggagccctggaaagtgtgtgtgaatgtgcacagcttcaagccagaggagttgatggtgaagaccaaagatggatacgtggaggtgtctggtaagtcaggggcaggagggagagagaatggggaggccgggatgtagccctcagccctgggaatagccagagaaagtttcctgggagctgacgttgggacagtgtgacacaggtgacctcagggctcaggaatgcagcctgcaaagttatctttacggaaaacttctctcccggctcccagcagagatcttaacctgcctgactcagctattggggcctctgggtgctcatcaatcatggtacagacaggaaaatagaaaccatgttggatattttgacagagggcatttaatataaagaataggttaagcagatatcaaagaatt

SEQ ID NO: 450447 - DNA, 1248 bp, Homo sapiens
caagggttacttttctctggggacctcccccatcacccaggttccctggaaagtgtgtgtgaatgtgcacagcttcaagccagaggagttgatggtgaagaccaaagatggatacgtggaggtgtctggcaaacatgaagagaaacagcaagaaggtggcattgtttctaagaacttcacaaagaaaatccagcttcctgcagaggtggatcctgtgacagtatttgcctcactttccccagagggtctgctgatcatcgaagctccccaggtccctccttactcaacatttggagagagcagtttcaacaacgagcttccccaggacagccaggaagtcacctgtacctgagatgccagtactggcccatccttgttttgtccccaaccctagggcttctctgattccaggatacattactttagctgaactcagatttagtgcaagtaaaatgttagagggtgcgggggtgaggactgaccacagattccctggatagtgtagtggtagatttctccacaggatagcgcaattggcaaatcatgcttggttgtgttaggccaaaatactagttttgctttctttaccttttctatcttgatgaaaatgttgcacattctatagttgcaaaacacataaaaggggacttaacatttcacgttgtatcttacttgcagtgaatgcaagggttacttttctctggggacctcccccatcacccaggttcctactctgggctcccgattcccatggctcccaaaccatgccgcatggtttggttaatgaaacccagtagctaaccccactgtgcttccacatgcctggcctaaaatgggtgatatacaggtcttatatccccatatggaatttatccatcaaccacataaaaacaaacagtgccttctgccctctgcccagatgtgtccagcacgttctcaaagtttccacattagcactccctaaggacgctgggagcctgtcagtttatgatctgacctaggtcccccctttcttctgtcccctgtgtttaagtcgggatttttacagagggagctgtctccagacagctccatcaggaaccaagcaaaggccagatagcctgacagataggctagtggtattgtgtatatgggcgggacgtgtgtgtcattattatttgagttatgctgttgtttaggggtaaataacagtaaataattaataataataataataataataataaaggagctgacgttcttaaaaaa

SEQ ID NO: 450448 - DNA, 1214 bp, Homo sapiens
atcgatctagaggactccccattgtaagatgtgcacagcttcaagccagaggagttgatggtgaagaccaaagatggatacgtggaggtgtctggcaaacatgaagagaaacagcaagaaggtggcattgtttctaagaacttcacaaagaaaatccagcttcctgcagaggtggatcctgtgacagtatttgcctcactttccccagagggtctgctgatcatcgaagctccccaggtccctccttactcaacatttggagagagcagtttcaacaacgagcttccccaggacagccaggaagtcacctgtacctgagatgccagtactggcccatccttgttttgtccccaaccctagggcttctctgattccaggatacattactttagctgaactcagatttagtgcaagtaaaatgttagagggtgcgggggtgaggactgaccacagattccctggatagtgtagtggtagatttctccacaggatagcgcaattggcaaatcatgcttggttgtgttaggccaaaatactagttttgctttctttaccttttctatcttgatgaaaatgttgcacattctatagttgcaaaacacataaaaggggacttaacatttcacgttgtatcttacttgcagtgaatgcaagggttacttttctctggggacctcccccatcacccaggttcctactctgggctcccgattcccatggctcccaaaccatgccgcatggtttggttaatgaaacccagtagctaaccccactgtgcttccacatgcctggcctaaaatgggtgatatacaggtcttatatccccatatggaatttatccatcaaccacataaaaacaaacagtgccttctgccctctgcccagatgtgtccagcacgttctcaaagtttccacattagcactccctaaggacgctgggagcctgtcagtttatgatctgacctaggtcccccctttcttctgtcccctgtgtttaagtcgggatttttacagagggagctgtctccagacagctccatcaggaaccaagcaaaggccagatagcctgacagataggctagtggtattgtgtatatgggcgggacgtgtgtgtcattattatttgagttatgctgttgtttaggggtaaataacagtaaataattaataataataataataataataataaaggagctgacgttcttaaaaaa

SEQ ID NO: 450449 - DNA, 1345 bp, Homo sapiens
ttccatcaattatcttatttcaccttcatagccagccttggaagtggacttaggtgggtctgtatggcagacaaggtccttgaggcttagataactagagtctctagggtaggcctaagtcacacagcaaggcaggtccagggccaggatttgaacccaagcctcagtcctgaaggatgcccaaggaacatagatgctgacacgccacacttttcttccttccaggcaaacatgaagagaaacagcaagaaggtggcattgtttctaagaacttcacaaagaaaatccagcttcctgcagaggtggatcctgtgacagtatttgcctcactttccccagagggtctgctgatcatcgaagctccccaggtccctccttactcaacatttggagagagcagtttcaacaacgagcttccccaggacagccaggaagtcacctgtacctgagatgccagtactggcccatccttgttttgtccccaaccctagggcttctctgattccaggatacattactttagctgaactcagatttagtgcaagtaaaatgttagagggtgcgggggtgaggactgaccacagattccctggatagtgtagtggtagatttctccacaggatagcgcaattggcaaatcatgcttggttgtgttaggccaaaatactagttttgctttctttaccttttctatcttgatgaaaatgttgcacattctatagttgcaaaacacataaaaggggacttaacatttcacgttgtatcttacttgcagtgaatgcaagggttacttttctctggggacctcccccatcacccaggttcctactctgggctcccgattcccatggctcccaaaccatgccgcatggtttggttaatgaaacccagtagctaaccccactgtgcttccacatgcctggcctaaaatgggtgatatacaggtcttatatccccatatggaatttatccatcaaccacataaaaacaaacagtgccttctgccctctgcccagatgtgtccagcacgttctcaaagtttccacattagcactccctaaggacgctgggagcctgtcagtttatgatctgacctaggtcccccctttcttctgtcccctgtgtttaagtcgggatttttacagagggagctgtctccagacagctccatcaggaaccaagcaaaggccagatagcctgacagataggctagtggtattgtgtatatgggcgggacgtgtgtgtcattattatttgagttatgctgttgtttaggggtaaataacagtaaataattaataataataataataataataataaaggagctgacgttcttaaaaaa

SEQ ID NO: 450450 - DNA, 1196 bp, Homo sapiens
gcagaggtggtcagggaaggcaattcctggaaagaattttggagaaaataatagaagaaagccagagctccaataagcaaacatgaagagaaacagcaagaaggtggcattgtttctaagaacttcacaaagaaaatccagcttcctgcagaggtggatcctgtgacagtatttgcctcactttccccagagggtctgctgatcatcgaagctccccaggtccctccttactcaacatttggagagagcagtttcaacaacgagcttccccaggacagccaggaagtcacctgtacctgagatgccagtactggcccatccttgttttgtccccaaccctagggcttctctgattccaggatacattactttagctgaactcagatttagtgcaagtaaaatgttagagggtgcgggggtgaggactgaccacagattccctggatagtgtagtggtagatttctccacaggatagcgcaattggcaaatcatgcttggttgtgttaggccaaaatactagttttgctttctttaccttttctatcttgatgaaaatgttgcacattctatagttgcaaaacacataaaaggggacttaacatttcacgttgtatcttacttgcagtgaatgcaagggttacttttctctggggacctcccccatcacccaggttcctactctgggctcccgattcccatggctcccaaaccatgccgcatggtttggttaatgaaacccagtagctaaccccactgtgcttccacatgcctggcctaaaatgggtgatatacaggtcttatatccccatatggaatttatccatcaaccacataaaaacaaacagtgccttctgccctctgcccagatgtgtccagcacgttctcaaagtttccacattagcactccctaaggacgctgggagcctgtcagtttatgatctgacctaggtcccccctttcttctgtcccctgtgtttaagtcgggatttttacagagggagctgtctccagacagctccatcaggaaccaagcaaaggccagatagcctgacagataggctagtggtattgtgtatatgggcgggacgtgtgtgtcattattatttgagttatgctgttgtttaggggtaaataacagtaaataattaataataataataataataataataaaggagctgacgttcttaaaaaa

SEQ ID NO: 450451 - DNA, 1841 bp, Homo sapiens
  misc_feature (43)..(43): n is a, c, g, or t
gacccaatgcgcgccccgcttgattacgttaggttccatcccntgattgccagcctgggcagcctgggaagcctgggaggacggtggcttgccggtctgtcgtgaggcagtgcggacggggaccctctgggattctgctggatctgccccgggggttacctttgggggctgggaccccagtcgaggggacacaaccgtccctggcagtggttggttctgcttctccctgcagaaaagcagcattttcggaagctgaagaataagctagcccagccacaccaccttgttgtgtgaccttgggcaggtggttctgtctctctgagcctctgtttctctctgagctgagcagccaccatggctgacggtcagatgcccttctcctgccactacccaagccgcctgcgccgagaccccttccgggactctcccctctcctctcgcctgctggatgatggctttggcatggaccccttcccagacgacttgacagcctcttggcccgactgggctctgcctcgtctctcctccgcctggccaggcaccctaaggtcgggcatggtgccccggggccccactgccaccgccaggtttggggtgcctgccgagggcaggacccccccacccttccctggggagccctggaaagtgtgtgtgaatgtgcacagcttcaagccagaggagttgatggtgaagaccaaagatggatacgtggaggtgtctggcaaacatgaagagaaacagcaagaaggtggcattgtttctaagaacttcacaaagaaaatccagcttcctgcagaggtggatcctgtgacagtatttgcctcactttccccagagggtctgctgatcatcgaagctccccaggtccctccttactcaacatttggagagagcagtttcaacaacgagcttccccaggacagccaggaagtcacctgtacctgagatgccagtactggcccatccttgttttgtccccaaccctagggcttctctgattccaggatacattactttagctgaactcagatttagtgcaagtaaaatgttagagggtgcgggggtgaggactgaccacagattccctggatagtgtagtggtagatttctccacaggatagcgcaattggcaaatcatgcttggttgtgttaggccaaaatactagttttgctttctttaccttttctatcttgatgaaaatgttgcacattctatagttgcaaaacacataaaaggggacttaacatttcacgttgtatcttacttgcagtgaatgcaagggttacttttctctggggacctcccccatcacccaggttcctactctgggctcccgattcccatggctcccaaaccatgccgcatggtttggttaatgaaacccagtagctaaccccactgtgcttccacatgcctggcctaaaatgggtgatatacaggtcttatatccccatatggaatttatccatcaaccacataaaaacaaacagtgccttctgccctctgcccagatgtgtccagcacgttctcaaagtttccacattagcactccctaaggacgctgggagcctgtcagtttatgatctgacctaggtcccccctttcttctgtcccctgtgtttaagtcgggatttttacagagggagctgtctccagacagctccatcaggaaccaagcaaaggccagatagcctgacagataggctagtggtattgtgtatatgggcgggacgtgtgtgtcattattatttgagttatgctgttgtttaggggtaaataacagtaaataattaataataataataataataataataaaggagctgacgttcttaaaaaa

SEQ ID NO: 450452 - DNA, 1943 bp, Homo sapiens
gccacagcccagctgttccctccgcggattctccggggctggttcatcacctccgaatattcctgtgacaggagacgcttgcaaaacccgcctccagcctccagcagcaaataaatagaaggcttgcagcccagaaggagccagaagaagtttctaggcgcgcgtgccctgggtttattaagctcctggctccgctctagacctcagcggttctggctgccagcctgggcagcctgggaagcctgggaggacggtggcttgccggtctgtcgtgaggcagtgcggacggggaccctctgggattctgctggatctgccccgggggttacctttgggggctgggaccccagtcgaggggacacaaccgtccctggcagtggttggttctgcttctccctgcagaaaagcagcattttcggaagctgaagaataagctagcccagccacaccaccttgttgtgtgaccttgggcaggtggttctgtctctctgagcctctgtttctctctgagctgagcagccaccatggctgacggtcagatgcccttctcctgccactacccaagccgcctgcgccgagaccccttccgggactctcccctctcctctcgcctgctggatgatggctttggcatggaccccttcccagacgacttgacagcctcttggcccgactgggctctgcctcgtctctcctccgcctgccgagggcaggacccccccacccttccctggggagccctggaaagtgtgtgtgaatgtgcacagcttcaagccagaggagttgatggtgaagaccaaagatggatacgtggaggtgtctggcaaacatgaagagaaacagcaagaaggtggcattgtttctaagaacttcacaaagaaaatccagcttcctgcagaggtggatcctgtgacagtatttgcctcactttccccagagggtctgctgatcatcgaagctccccaggtccctccttactcaacatttggagagagcagtttcaacaacgagcttccccaggacagccaggaagtcacctgtacctgagatgccagtactggcccatccttgttttgtccccaaccctagggcttctctgattccaggatacattactttagctgaactcagatttagtgcaagtaaaatgttagagggtgcgggggtgaggactgaccacagattccctggatagtgtagtggtagatttctccacaggatagcgcaattggcaaatcatgcttggttgtgttaggccaaaatactagttttgctttctttaccttttctatcttgatgaaaatgttgcacattctatagttgcaaaacacataaaaggggacttaacatttcacgttgtatcttacttgcagtgaatgcaagggttacttttctctggggacctcccccatcacccaggttcctactctgggctcccgattcccatggctcccaaaccatgccgcatggtttggttaatgaaacccagtagctaaccccactgtgcttccacatgcctggcctaaaatgggtgatatacaggtcttatatccccatatggaatttatccatcaaccacataaaaacaaacagtgccttctgccctctgcccagatgtgtccagcacgttctcaaagtttccacattagcactccctaaggacgctgggagcctgtcagtttatgatctgacctaggtcccccctttcttctgtcccctgtgtttaagtcgggatttttacagagggagctgtctccagacagctccatcaggaaccaagcaaaggccagatagcctgacagataggctagtggtattgtgtatatgggcgggacgtgtgtgtcattattatttgagttatgctgttgtttaggggtaaataacagtaaataattaataataataataataataataataaaggagctgacgttcttaaaaaa

SEQ ID NO: 450453 - DNA, 1159 bp, Homo sapiens
  misc_feature (24)..(24): n is a, c, g, or t
aactagcggcactgactctcttanctaccacggctaaccgcaaacatgaagagaaacagcaagaaggtggcattgtttctaagaacttcacaaagaaaatccagcttcctgcagaggtggatcctgtgacagtatttgcctcactttccccagagggtctgctgatcatcgaagctccccaggtccctccttactcaacatttggagagagcagtttcaacaacgagcttccccaggacagccaggaagtcacctgtacctgagatgccagtactggcccatccttgttttgtccccaaccctagggcttctctgattccaggatacattactttagctgaactcagatttagtgcaagtaaaatgttagagggtgcgggggtgaggactgaccacagattccctggatagtgtagtggtagatttctccacaggatagcgcaattggcaaatcatgcttggttgtgttaggccaaaatactagttttgctttctttaccttttctatcttgatgaaaatgttgcacattctatagttgcaaaacacataaaaggggacttaacatttcacgttgtatcttacttgcagtgaatgcaagggttacttttctctggggacctcccccatcacccaggttcctactctgggctcccgattcccatggctcccaaaccatgccgcatggtttggttaatgaaacccagtagctaaccccactgtgcttccacatgcctggcctaaaatgggtgatatacaggtcttatatccccatatggaatttatccatcaaccacataaaaacaaacagtgccttctgccctctgcccagatgtgtccagcacgttctcaaagtttccacattagcactccctaaggacgctgggagcctgtcagtttatgatctgacctaggtcccccctttcttctgtcccctgtgtttaagtcgggatttttacagagggagctgtctccagacagctccatcaggaaccaagcaaaggccagatagcctgacagataggctagtggtattgtgtatatgggcgggacgtgtgtgtcattattatttgagttatgctgttgtttaggggtaaataacagtaaataattaataataataataataataataataaaggagctgacgttcttaaaaaa

SEQ ID NO: 450454 - DNA, 1151 bp, Homo sapiens
ctgccgctactactaccggcgggcgtgtctggcaaacatgaagagaaacagcaagaaggtggcattgtttctaagaacttcacaaagaaaatccagcttcctgcagaggtggatcctgtgacagtatttgcctcactttccccagagggtctgctgatcatcgaagctccccaggtccctccttactcaacatttggagagagcagtttcaacaacgagcttccccaggacagccaggaagtcacctgtacctgagatgccagtactggcccatccttgttttgtccccaaccctagggcttctctgattccaggatacattactttagctgaactcagatttagtgcaagtaaaatgttagagggtgcgggggtgaggactgaccacagattccctggatagtgtagtggtagatttctccacaggatagcgcaattggcaaatcatgcttggttgtgttaggccaaaatactagttttgctttctttaccttttctatcttgatgaaaatgttgcacattctatagttgcaaaacacataaaaggggacttaacatttcacgttgtatcttacttgcagtgaatgcaagggttacttttctctggggacctcccccatcacccaggttcctactctgggctcccgattcccatggctcccaaaccatgccgcatggtttggttaatgaaacccagtagctaaccccactgtgcttccacatgcctggcctaaaatgggtgatatacaggtcttatatccccatatggaatttatccatcaaccacataaaaacaaacagtgccttctgccctctgcccagatgtgtccagcacgttctcaaagtttccacattagcactccctaaggacgctgggagcctgtcagtttatgatctgacctaggtcccccctttcttctgtcccctgtgtttaagtcgggatttttacagagggagctgtctccagacagctccatcaggaaccaagcaaaggccagatagcctgacagataggctagtggtattgtgtatatgggcgggacgtgtgtgtcattattatttgagttatgctgttgtttaggggtaaataacagtaaataattaataataataataataataataataaaggagctgacgttcttaaaaaa

SEQ ID NO: 450455 - DNA, 410 bp, Homo sapiens
gaaacactctgggtctctgcttgatcagtgtcccctctaaactgcacctcactacagtagggatggcataagatacttctttacacagcatctttttgttcccacctcacccccagagctgtaataggtagagccagccaaatgtcaaagggatgatttgtcttgtcaccactagtttcccttttctctgccttgtatgtaacaggaatattctttagttcctccttatgttctaaagcacctccccaacctaaaaatagaagaggagttgtggggtcatttacactttagtgtgaatttgcccttgtgactttgccaaggctgttgtgcctaaccctttcaatctaacagcagaatgagagtctctgggactatccggggtccttccctggagaaggaatgaactggga

SEQ ID NO: 450456 - DNA, 1451 bp, Homo sapiens
tccagccaaggaaaaaattcttgattggtgtatttgttttcctgagacttctataactaattgctacaagcatgctagcttaaattaacagatttattctgttggttcccaaagtcactaggaattgagtgtggataaactcacagggctggcctaattgtattttctttgaaggataaaaagcttctctaaaaggttcatattctttgactcagcaattccacttacaggaattttttaagagcaattacacaatgatagtctttatctcattgaacactcactgcaatttcgatggtctcattcgttcattgagcatatttattaggtgtgtcttccaagggtcatcccattcgggacttaatacagctggaaacagtggtggcccgcccccaccccagtggagctcaccttccagtaggtctaaactggtttgattgagttccatggaaaacaacaaagtggggtaaggggaaaagtagtggggagctgagggggtcagcatgacatggaagcagaaatcaagagacaaggctttgtggggtgtgggtgtgggtccaagtgccaagggccagggagctttgtagagtgtgtggttatgtttctcagtgtttcctcatagttggttaactaatacatttgttcatgcaattaagccatcttttcattttctaacatttttaaaaatacatatattttttagagatgggggtctcgctttgttgcctaggctggtctccagctcctcagctcaagggatcctcctgccttggcctcccaaagtgctgggattataggtgtgagccaccaggcccagccaattaagctgcattttaaaacaaccaagacagaccttaaaccttggagctgctgacccaagctcatcctcacccctcttccccagagtctaccccagggaggaacagggactggccagtcaggtgagggttctctagctttggcctcaagctctggtgtgacatgggtgctgttttcacctgtggagggaggtatgtcgcctggaataaaggctcgccagagggcagggccttgtgcggcttttctcagcacctagatagtgcctggcaccatgttctcagcacctagatagtgcctggcacacatgagtctctgggatacagtggagtgagtgcagtgaacagatggctgaggaggctgtgtagatgggaaaggccttcgccagctcgcggggatgagcttaggccgggggactgagttctgtgtcctggctttttgtttgttttttaagagcctggagtcacatcctgccctttttttttttttaagggaaaaatggtggttttattcatttgtacttaaaccagccaaagtagtactgatgtgattatgattcagcaaatacaagatctctttccacaaatattagcataacaatcaaaatagggactatagtaaaacagccaaaaagg

SEQ ID NO: 450457 - DNA, 732 bp, Homo sapiens
ggcgcggccgcggaggggcctggagtgcggcggcggcgggacccggagcaggagcggcggcagcagcgactgggggcggcggcggcgcgttggaggcggccatggcaaagcagtacgactcggtggagtgccctttttgtgatgaagtttccaaatacgagaagctcgccaagatcggccaaggcaccttcggggaggtgttcaaggccaggcaccgcaagaccggccagaaggtggctctgaagaaggtgctgatggaaaacgagaaggaggggttccccattacagccttgcgggagatcaagatccttcagcttctaaaacacgagaatgtggtcaacttgattgagatttgtcgaaccaaagcttccccctataaccgctgcaagggtagtatatacctggtgttcgacttctgcgagcatgaccttgctgggctgttgagcaatgttttggtcaagttcacgctgtctgagatcaagagggtgatgcagatgctgcttaacggcctctactacatccacagaaacaagatcctgcatagggacatgaaggctgctaatgtgcttatcactcgtgatggggtcctgaagctggcagactttgggctggcccgggccttcagcctggccaagaacagccagcccaaccgctacaccaaccgtgtggtgacactctggtaccggcccccggagctgttgctcggtgaggactcccgagcgggccaagggg

SEQ ID NO: 450458 - DNA, 355 bp, Homo sapiens
ggacgcggctgttctcctacccatggaacctctgggaaccatccagaaaaccagcaaggacaagacagctccccaccagtgactttttctaagagctcccggcgtggtggaagaggggacaggtccctcacccacccacaatcctattctcgggctgagaaccctgcgtggggacagggctcgcctcaggaatgggctgtttttggcctaaccctcagaaacactggggctggcacaaactcttggtttcttcaacaggagaattttactgtgtttcttttggttccattgtttggagacattcctgggcacagtttggtccgttagaattaaaagttgaatttttttttttttt

SEQ ID NO: 450459 - DNA, 1902 bp, Homo sapiens
ggcgcggccgcggaggggcctggagtgcggcggcggcgggacccggagcaggagcggcggcagcagcgactgggggcggcggcggcgcgttggaggcggccatggcaaagcagtacgactcggtggagtgccctttttgtgatgaagtttccaaatacgagaagctcgccaagatcggccaaggcaccttcggggaggtgttcaaggccaggcaccgcaagaccggccagaaggtggctctgaagaaggtgctgatggaaaacgagaaggaggggttccccattacagccttgcgggagatcaagatccttcagcttctaaaacacgagaatgtggtcaacttgattgagatttgtcgaaccaaagcttccccctataaccgctgcaagggtagtatatacctggtgttcgacttctgcgagcatgaccttgctgggctgttgagcaatgttttggtcaagttcacgctgtctgagatcaagagggtgatgcagatgctgcttaacggcctctactacatccacagaaacaagatcctgcatagggacatgaaggctgctaatgtgcttatcactcgtgatggggtcctgaagctggcagactttgggctggcccgggccttcagcctggccaagaacagccagcccaaccgctacaccaaccgtgtggtgacactctggtaccggcccccggagctgttgctcggggagcgggactacggcccccccattgacctgtggggtgctgggtgcatcatggcagagatgtggacccgcagccccatcatgcagggcaacacggagcagcaccaactcgccctcatcagtcagctctgcggctccatcacccctgaggtgtggccaaacgtggacaactatgagctgtacgaaaagctggagctggtcaagggccagaagcggaaggtgaaggacaggctgaaggcctatgtgcgtgacccatacgcactggacctcatcgacaagctgctggtgctggaccctgcccagcgcatcgacagcgatgacgccctcaaccacgacttcttctggtccgaccccatgccctccgacctcaagggcatgctctccacccacctgacgtccatgttcgagtacttggcaccaccgcgccggaagggcagccagatcacccagcagtccaccaaccagagtcgcaatcccgccaccaccaaccagacggagtttgagcgcgtcttctgagggccggcgcttgccactagggctcttgtgttttttttcttctgctatgtgacttgcatcgtggagacagggcatttgagtttatatctctcatgcatattttatttaatccccaccctgggctctgggagcagcccgctgagtggactggagtggagcattggctgagagaccaggagggcactggagctgtcttgtccttgctggttttctggatggttcccagagggtttccatggggtaggaggatgggctcgcccaccagtgactttttctaagagctcccggcgtggtggaagaggggacaggtccctcacccacccacaatcctattctcgggctgagaaccctgcgtggggacagggctcgcctcaggaatgggctgtttttggcctaaccctcagaaacactggggctggcacaaactcttggtttcttcaacaggagaattttactgtgtttcttttggttccattgtttggagacattcctgggcacagtttggtccgttagaattaaaagttgaattttttttttttttttttttttttttggaaggggtttttgccttttgcccccgggggggggggggggggcaccccccggctcctgggaccctttgcccccggggttgggggaatttttccggccccaccccccgggttttgggggttatggggcc

SEQ ID NO: 450460 - DNA, 1746 bp, Homo sapiens
ggcgcggccgcggaggggcctggagtgcggcggcggcgggacccggagcaggagcggcggcagcagcgactgggggcggcggcggcgcgttggaggcggccatggcaaagcagtacgactcggtggagtgccctttttgtgatgaagtttccaaatacgagaagctcgccaagatcggccaaggcaccttcggggaggtgttcaaggccaggcaccgcaagaccggccagaaggtggctctgaagaaggtgctgatggaaaacgagaaggaggggttccccattacagccttgcgggagatcaagatccttcagcttctaaaacacgagaatgtggtcaacttgattgagatttgtcgaaccaaagcttccccctataaccgctgcaagggtagtatatacctggtgttcgacttctgcgagcatgaccttgctgggctgttgagcaatgttttggtcaagttcacgctgtctgagatcaagagggtgatgcagatgctgcttaacggcctctactacatccacagaaacaagatcctgcatagggacatgaaggctgctaatgtgcttatcactcgtgatggggtcctgaagctggcagactttgggctggcccgggccttcagcctggccaagaacagccagcccaaccgctacaccaaccgtgtggtgacactctggtaccggcccccggagctgttgctcggggagcgggactacggcccccccattgacctgtggggtgctgggtgcatcatggcagagatgtggacccgcagccccatcatgcagggcaacacggagcagcaccaactcgccctcatcagtcagctctgcggctccatcacccctgaggtgtggccaaacgtggacaactatgagctgtacgaaaagctggagctggtcaagggccagaagcggaaggtgaaggacaggctgaaggcctatgtgcgtgacccatacgcactggacctcatcgacaagctgctggtgctggaccctgcccagcgcatcgacagcgatgacgccctcaaccacgacttcttctggtccgacctcaagggcatgctctccacccacctgacgtccatgttcgagtacttggcaccaccgcgccggaagggcagccagatcacccagcagtccaccaaccagagtcgcaatcccgccaccaccaaccagacggagtttgagcgcgtcttctgagggccggcgcttgccactagggctcttgtgttttttttcttctgctatgtgacttgcatcgtggagacagggcatttgagtttatatctctcatgcatattttatttaatccccaccctgggctctgggagcagcccgctgagtggactggagtggagcattggctgagagaccaggagggcactggagctgtcttgtccttgctggttttctggatggttcccagagggtttccatggggtaggaggatgggctcgcccaccagtgactttttctaagagctcccggcgtggtggaagaggggacaggtccctcacccacccacaatcctattctcgggctgagaaccctgcgtggggacagggctcgcctcaggaatgggctgtttttggcctaaccctcagaaacactggggctggcacaaactcttggtttcttcaacaggagaattttactgtgtttcttttggttccattgtttggagacattcctgggcacagtttggtccgttagaattaaaagttgaatttttttttttttt

SEQ ID NO: 450461 - DNA, 1705 bp, Homo sapiens
ggcgcggccgcggaggggcctggagtgcggcggcggcgggacccggagcaggagcggcggcagcagcgactgggggcggcggcggcgcgttggaggcggccatggcaaagcagtacgactcggtggagtgccctttttgtgatgaagtttccaaatacgagaagctcgccaagatcggccaaggcaccttcggggaggtgttcaaggccaggcaccgcaagaccggccagaaggtggctctgaagaaggtgctgatggaaaacgagaaggaggggttccccattacagccttgcgggagatcaagatccttcagcttctaaaacacgagaatgtggtcaacttgattgagatttgtcgaaccaaagcttccccctataaccgctgcaagggtagtatatacctggtgttcgacttctgcgagcatgaccttgctgggctgttgagcaatgttttggtcaagttcacgctgtctgagatcaagagggtgatgcagatgctgcttaacggcctctactacatccacagaaacaagatcctgcatagggacatgaaggctgctaatgtgcttatcactcgtgatggggtcctgaagctggcagactttgggctggcccgggccttcagcctggccaagaacagccagcccaaccgctacaccaaccgtgtggtgacactctggtaccggcccccggagctgttgctcggggagcgggactacggcccccccattgacctgtggggtgctgggtgcatcatggcagagatgtggacccgcagccccatcatgcagggcaacacggagcagcaccaactcgccctcatcagtcagctctgcggctccatcacccctgaggtgtggccaaacgtggacaactatgagctgtacgaaaagctggagctggtcaagggccagaagcggaaggtgaaggacaggctgaaggcctatgtgcgtgacccatacgcactggacctcatcgacaagctgctggtgctggaccctgcccagcgcatcgacagcgatgacgccctcaaccacgacttcttctggtccgaccccatgccctccgacctcaagggcatgctctccacccacctgacgtccatgttcgagtacttggcaccaccgcgccggaagggcagccagatcacccagcagtccaccaaccagagtcgcaatcccgccaccaccaaccagacggagtttgagcgcgtcttctgagggccggcgcttgccactagggctcttgtgttttttttcttctgctatgtgacttgcatcgtggagacagggcatttgagtttatatctctcatgcatattttatttaatccccaccctgggctctgggagcagcccgctgagtggactggagtggagcattggctgagagaccaggagggcactggagctgtcttgtccttgctggttttctggatggttcccagagggtttccatggggtaggaggatgggctcgcccaccagtgactttttctaagagctcccggcgtggtggaagaggggacaggtccctcacccacccacaatcctattctcgggctgagaaccctgcgtggggacagggctcgcctcaggaatgggctgtttttggcctaacctatctgtgctgcacaactcttggttctcacagagatatactaggttctttggtccattgttgagtcctgggacacttggtcgcagt

SEQ ID NO: 450462 - DNA, 2496 bp, Homo sapiens
ggcgcggccgcggaggggcctggagtgcggcggcggcgggacccggagcaggagcggcggcagcagcgactgggggcggcggcggcgcgttggaggcggccatggcaaagcagtacgactcggtggagtgccctttttgtgatgaagtttccaaatacgagaagctcgccaagatcggccaaggcaccttcggggaggtgttcaaggccaggcaccgcaagaccggccagaaggtggctctgaagaaggtgctgatggaaaacgagaaggagggggtgagtacggatcgggcgtgcgggccggccggctaactgcccgggaccccgggtcggttttccaccctgctgcttctgggagtctcaggttgagatttaatttttttgtagtagttcagaaatttccagggaatgtggcttccaccctaaaactaaatgtttcattcttaggcagttatgggtgaggccaggagggggagttgatgcatgcatcgtgtgcactttatttcacgaagttaggaagcctttaaacacctttttttagtgttaaatttcgcttaatgtaaaagaaagattatatatgcatgctttttgaaaggtgtctgatactcaattatttaatgtatttaaaaggagcggtcccttctccaccccatcttagctctagtacaacttcccataaaccttcttttgcgtaatgtgcattagcaaggacatttttaaatcatcatgtttgttgccaacgaaacagccatagagctgaaatttgaagactgaaaccgccgagcgtttagtggctaatagcaaagtattgctgtttcagtttgttgtctcaaaccatcatcttgaagtgtgcatgctactaatatccattttatagacaaggcttctgagacagctggtttcagagcccatgatcttgctctgtctcccaacttggctgtcagtacagaccccagggctgggctctgtactgcgctcactcttgaccactttcccctctttctcacccagttccccattacagccttgcgggagatcaagatccttcagcttctaaaacacgagaatgtggtcaacttgattgagatttgtcgaaccaaagcttccccctataaccgctgcaagggtagtatatacctggtgttcgacttctgcgagcatgaccttgctgggctgttgagcaatgttttggtcaagttcacgctgtctgagatcaagagggtgatgcagatgctgcttaacggcctctactacatccacagaaacaagatcctgcatagggacatgaaggctgctaatgtgcttatcactcgtgatggggtcctgaagctggcagactttgggctggcccgggccttcagcctggccaagaacagccagcccaaccgctacaccaaccgtgtggtgacactctggtaccggcccccggagctgttgctcggggagcgggactacggcccccccattgacctgtggggtgctgggtgcatcatggcagagatgtggacccgcagccccatcatgcagggcaacacggagcagcaccaactcgccctcatcagtcagctctgcggctccatcacccctgaggtgtggccaaacgtggacaactatgagctgtacgaaaagctggagctggtcaagggccagaagcggaaggtgaaggacaggctgaaggcctatgtgcgtgacccatacgcactggacctcatcgacaagctgctggtgctggaccctgcccagcgcatcgacagcgatgacgccctcaaccacgacttcttctggtccgaccccatgccctccgacctcaagggcatgctctccacccacctgacgtccatgttcgagtacttggcaccaccgcgccggaagggcagccagatcacccagcagtccaccaaccagagtcgcaatcccgccaccaccaaccagacggagtttgagcgcgtcttctgagggccggcgcttgccactagggctcttgtgttttttttcttctgctatgtgacttgcatcgtggagacagggcatttgagtttatatctctcatgcatattttatttaatccccaccctgggctctgggagcagcccgctgagtggactggagtggagcattggctgagagaccaggagggcactggagctgtcttgtccttgctggttttctggatggttcccagagggtttccatggggtaggaggatgggctcgcccaccagtgactttttctaagagctcccggcgtggtggaagaggggacaggtccctcacccacccacaatcctattctcgggctgagaaccctgcgtggggacagggctcgcctcaggaatgggctgtttttggcctaaccctcagaaacactggggctggcacaaactcttggtttcttcaacaggagaattttactgtgtttcttttggttccattgtttggagacattcctgggcacagtttggtccgttagaattaaaagttgaatttttttttttttt

SEQ ID NO: 450463 - DNA, 1856 bp, Homo sapiens
ggcgcggccgcggaggggcctggagtgcggcggcggcgggacccggagcaggagcggcggcagcagcgactgggggcggcggcggcgcgttggaggcggccatggcaaagcagtacgactcggtggagtgccctttttgtgatgaagtttccaaatacgagaagctcgccaagatcggccaaggcaccttcggggaggtgttcaaggccaggcaccgcaagaccggccagaaggtggctctgaagaaggtgctgatggaaaacgagaaggaggggttccccattacagccttgcgggagatcaagatccttcagcttctaaaacacgagaatgtggtcaacttgattgagatttgtcgaaccaaagatggtgactgctttttctggtcctctttcatcgtagctggtgcttcctcggggcctgccctggcccagaagaggcactcagaaaatatttgaccgcttccccctataaccgctgcaagggtagtatatacctggtgttcgacttctgcgagcatgaccttgctgggctgttgagcaatgttttggtcaagttcacgctgtctgagatcaagagggtgatgcagatgctgcttaacggcctctactacatccacagaaacaagatcctgcatagggacatgaaggctgctaatgtgcttatcactcgtgatggggtcctgaagctggcagactttgggctggcccgggccttcagcctggccaagaacagccagcccaaccgctacaccaaccgtgtggtgacactctggtaccggcccccggagctgttgctcggggagcgggactacggcccccccattgacctgtggggtgctgggtgcatcatggcagagatgtggacccgcagccccatcatgcagggcaacacggagcagcaccaactcgccctcatcagtcagctctgcggctccatcacccctgaggtgtggccaaacgtggacaactatgagctgtacgaaaagctggagctggtcaagggccagaagcggaaggtgaaggacaggctgaaggcctatgtgcgtgacccatacgcactggacctcatcgacaagctgctggtgctggaccctgcccagcgcatcgacagcgatgacgccctcaaccacgacttcttctggtccgaccccatgccctccgacctcaagggcatgctctccacccacctgacgtccatgttcgagtacttggcaccaccgcgccggaagggcagccagatcacccagcagtccaccaaccagagtcgcaatcccgccaccaccaaccagacggagtttgagcgcgtcttctgagggccggcgcttgccactagggctcttgtgttttttttcttctgctatgtgacttgcatcgtggagacagggcatttgagtttatatctctcatgcatattttatttaatccccaccctgggctctgggagcagcccgctgagtggactggagtggagcattggctgagagaccaggagggcactggagctgtcttgtccttgctggttttctggatggttcccagagggtttccatggggtaggaggatgggctcgcccaccagtgactttttctaagagctcccggcgtggtggaagaggggacaggtccctcacccacccacaatcctattctcgggctgagaaccctgcgtggggacagggctcgcctcaggaatgggctgtttttggcctaaccctcagaaacactggggctggcacaaactcttggtttcttcaacaggagaattttactgtgtttcttttggttccattgtttggagacattcctgggcacagtttggtccgttagaattaaaagttgaatttttttttttttt

SEQ ID NO: 450464 - DNA, 1412 bp, Homo sapiens
ggcgcggccgcggaggggcctggagtgcggcggcggcgggacccggagcaggagcggcggcagcagcgactgggggcggcggcggcgcgttggaggcggccatggcaaagcagtacgactcggtggagtgccctttttgtgatgaagtttccaaatacgagaagctcgccaagatcggccaaggcaccttcggggaggtgttcaaggccaggcaccgcaagaccggccagaaggtggctctgaagaaggtgctgatggaaaacgagaaggaggggttccccattacagccttgcgggagatcaagatccttcagcttctaaaacacgagaatgtggtcaacttgattgagatttgtcgaaccaaagcttccccctataaccgctgcaagggtagtatatacctggtgttcgacttctgcgagcatgaccttgctgggctgttgagcaatgttttggtcaagttcacgctgtctgagatcaagagggtgatgcagatgctgcttaacggcctctactacatccacagaaacaagatcctgcatagggacatgaaggctgctaatgtgcttatcactcgtgatggggtctgaaggcctatgtgcgtgacccatacgcactggacctcatcgacaagctgctggtgctggaccctgcccagcgcatcgacagcgatgacgccctcaaccacgacttcttctggtccgaccccatgccctccgacctcaagggcatgctctccacccacctgacgtccatgttcgagtacttggcaccaccgcgccggaagggcagccagatcacccagcagtccaccaaccagagtcgcaatcccgccaccaccaaccagacggagtttgagcgcgtcttctgagggccggcgcttgccactagggctcttgtgttttttttcttctgctatgtgacttgcatcgtggagacagggcatttgagtttatatctctcatgcatattttatttaatccccaccctgggctctgggagcagcccgctgagtggactggagtggagcattggctgagagaccaggagggcactggagctgtcttgtccttgctggttttctggatggttcccagagggtttccatggggtaggaggatgggctcgcccaccagtgactttttctaagagctcccggcgtggtggaagaggggacaggtccctcacccacccacaatcctattctcgggctgagaaccctgcgtggggacagggctcgcctcaggaatgggctgtttttggcctaaccctcagaaacactggggctggcacaaactcttggtttcttcaacaggagaattttactgtgtttcttttggttccattgtttggagacattcctgggcacagtttggtccgttagaattaaaagttgaatttttttttttttt

SEQ ID NO: 450465 - DNA, 1260 bp, Homo sapiens
ggcgcggccgcggaggggcctggagtgcggcggcggcgggacccggagcaggagcggcggcagcagcgactgggggcggcggcggcgcgttggaggcggccatggcaaagcagtacgactcggtggagtgccctttttgtgatgaagtttccaaatacgagaagctcgccaagatcggccaaggcaccttcggggaggtgttcaaggccaggcaccgcaagaccggccagaaggtggctctgaagaaggtgctgatggaaaacgagaaggaggggttccccattacagccttgcgggagatcaagatccttcagcttctaaaacacgagaatgtggtcaacttgattgagatttgtcgaaccaaagcttccccctataaccgctgcaagggtagtatatacctggtgttcgacttctgcgagcatgaccttgctgggctgttgagcaatgttttggtcaagttcacgctgtctgagatcaagagggtgatgcagatgctgcttaacggcctctactacatccacagaaacaagcacgacttcttctggtccgaccccatgccctccgacctcaagggcatgctctccacccacctgacgtccatgttcgagtacttggcaccaccgcgccggaagggcagccagatcacccagcagtccaccaaccagagtcgcaatcccgccaccaccaaccagacggagtttgagcgcgtcttctgagggccggcgcttgccactagggctcttgtgttttttttcttctgctatgtgacttgcatcgtggagacagggcatttgagtttatatctctcatgcatattttatttaatccccaccctgggctctgggagcagcccgctgagtggactggagtggagcattggctgagagaccaggagggcactggagctgtcttgtccttgctggttttctggatggttcccagagggtttccatggggtaggaggatgggctcgcccaccagtgactttttctaagagctcccggcgtggtggaagaggggacaggtccctcacccacccacaatcctattctcgggctgagaaccctgcgtggggacagggctcgcctcaggaatgggctgtttttggcctaaccctcagaaacactggggctggcacaaactcttggtttcttcaacaggagaattttactgtgtttcttttggttccattgtttggagacattcctgggcacagtttggtccgttagaattaaaagttgaatttttttttttttt

SEQ ID NO: 450466 - DNA, 1183 bp, Homo sapiens
ggcgcggccgcggaggggcctggagtgcggcggcggcgggacccggagcaggagcggcggcagcagcgactgggggcggcggcggcgcgttggaggcggccatggcaaagcagtacgactcggtggagtgccctttttgtgatgaagtttccaaatacgagaagctcgccaagatcggccaaggcaccttcggggaggtgttcaaggccaggcaccgcaagaccggccagaaggtggctctgaagaaggtgctgatggaaaacgagaaggaggggttccccattacagccttgcgggagatcaagatccttcagcttctaaaacacgagaatgtggtcaacttgattgagatttgtcgaaccaaagcttccccctataaccgctgcaagggtagtatatacctggtgttcgacttctgcgagcatgaccttgctgggctgttgagcaatgttttggtcaagttcacgctgtctgagatcaagagggtgatgcagatgctgcttaacggcctctactacatccacagaaacaagatcctgcatagggacatgaaggctgctaatgtgcttatcactcgtgatggggtcctgaagctggcagactttgggctggcccgggccttcagcctggccaagaacagccagcccaaccgctacaccaaccgtgtggtgacactctggtaccggcccccggagctgttgctcggggagcgggactacggcccccccattgacctgtggggtgctgggtgcatcatggcagagatgtggacccgcagccccatcatgcagggcaacacggagcagcaccaactcgccctcatcagtcagctctgcggctccatcacccctgaggtgtggccaaacgtggacaactatgagctgtacgaaaagctggagctggtcaagggccagaagcggaaggtgaaggacaggctgaaggcctatgtgcgtgacccatacgcactggacctcatcgacaagctgctggtgctggaccctgcccagcgcatcgacagcgatgacgccctcaaccacgacttcttctggtccgaccccatgccgctctaattgtttctttttgtctatctttgaatctttattccagagatccagttgtcattggtatccagggagccctcctcttcctcctcctcctcctgccgcgttgagatcaggcatgt

SEQ ID NO: 450467 - DNA, 1080 bp, Homo sapiens
ggacaactgtgccaggaatgtctccaaacaatggaaccaaaagaaacacagtaaaattctcctgtagaagaaaccaagagttgtgccagcaccccaccagtgactttttctaagagctcccggcgtggtggaagaggggacaggtccctcacccacccacaatcctattctcgggctgagaaccctgcgtggggacagggctcgcctcaggaatgggctgtttttggcctaaccctcagaaacactggggctggcacaaactcttggtttcttcaacaggagaattttactgtgtttcttttggttccattgtttggagacattcctgggcacagtttggtccgttagaattaaaagttgaatttttttttttttttttttcctccaggacttgtgtgttttgttctgcgcacacaccgccaactgttcccccacagtcagcagcaggttgggcctgaccattgggacttgattgtcaagtcactggaggtcttgacttttttatctcagttcatgttctcttccataattggaaaggacctttgtctgtttttcctcttgggtgccttccagaacgcatctcatgtccctggtgagggaattggtgagggcctgctgtgagctgctgtggctgcgatggtcacccagctgggcaaatcactggagtgacaatttgacctgtcacctgagaaggatggtccctcagactgctgggtagagggcctggggcaggctggagagagagaaagtgggcagagggtgaagggatcacaggggtcttggaaggtggcagtagtttggacgggggtggggagtatgtgggagaaaaaaacagactgaaggtagaatccttgggaacctttgaggagcggcacattctggcaggcacgttttctgtgagcctgaagttaggaagagacattctggaggtcaatttcctacatcctcttacaggcggagaccttgaagtggggccaggaaggaaggttggcaaaacctttgaccagaactgtccttcatttacagaaactgacccagaccacaacacaaaaggccagtaaaagtaagaaaaaaaaattt

SEQ ID NO: 450468 - DNA, 230 bp, Homo sapiens
atggtgactgctttttctggtcctctttcatcgtagctggtgcttcctcggggcctgccctggcccagaagaggcactcagaaaatatttgaccggtgaaggaaggaacagacagatgctctggagggcatgggtgcccgtgggttggagcaggaagaaagaagctggttgtgggaaagtgtgttgggtgtggttttcttgactttttcttctttctattcctgcctcag

SEQ ID NO: 450469 - DNA, 532 bp, Homo sapiens
accactgcatgccagcctgggcgacagagcgagacttatcaaaaaaaaaaaaaaaaatcgaaattaaagctgttgtgtgctgtcctgacagcaggtcactaggaattgagtgtggataaactcacagggctggcctaattgtattttctttgaaggataaaaagcttctctaaaaggttcatattctttgactcagcaattccacttacaggaattttttaagagcaattacacaatgatagtctttatctcattgaacactcactgcaatttcgatggtctcattcgttcattgagcatatttattaggtgtgtcttccaagggtcatcccattcgggacttaatacagctggaaacagtggtggcccgcccccaccccagtggagctcaccttccagtaggtctaaactggtttgattgagttccatggaaaacaacaaagtggggtaaggggaaaagtagtggggagctgagggggtcagcatgacatggaagcagaaatcaagagacaaggctttgtggggtgtgggt

SEQ ID NO: 450470 - DNA, 357 bp, Homo sapiens
ccattcgggacttaatacagctggaaacagtggtggcccgcccccaccccagtggagctcaccttccagtaggtctaaactggtttgattgagttccatggaaaacaacaaagtggggtaaggggaaaagtagtggggagctgagggggtcagcatgacatggaagcagaaatcaagagacaaggctttgtggggtgtgggtgtgggtccaagtgccaagggccagggagctttgtagagtgtgtggttatgtttctcagtgtttcctcatagttggttaactaatacatttgttcatgcaattaagccatcttttcattttctaacatttttaaaaatacatatattttttagaga

SEQ ID NO: 450471 - DNA, 462 bp, Homo sapiens
tctctcaacgccccctccctcccaggtgtggccaaacgtggacaactatgagctgtacgaaaagctggagctggtcaagggccagaagcggaaggtgaaggacaggctgaaggcctatgtgcgtgacccatacgcactggacctcatcgacaagctgctggtgctggaccctgcccagcgcatcgacagcgatgacgccctcaaccacgacttcttctggtccgaccccatgccctccgacctcaagggcatgctctccacccacctgacgtccatgttcgagtacttggcaccaccgcgccggaagggcagccagatcacccagcagtccaccaaccagagtcgcaatcccgccaccaccaaccagacggagtttgagcgcgtcttctgagggccggcgcttgccactagggctcttgtgttttttttcttctgctatgtgacttgcatcgtggagacagg

SEQ ID NO: 450472 - DNA, 1761 bp, Homo sapiens
ggcgcggccgcggaggggcctggagtgcggcggcggcgggacccggagcaggagcggcggcagcagcgactgggggcggcggcggcgcgttggaggcggccatggcaaagcagtacgactcggtggagtgccctttttgtgatgaagtttccaaatacgagaagctcgccaagatcggccaaggcaccttcggggaggtgttcaaggccaggcaccgcaagaccggccagaaggtggctctgaagaaggtgctgatggaaaacgagaaggaggggttccccattacagccttgcgggagatcaagatccttcagcttctaaaacacgagaatgtggtcaacttgattgagatttgtcgaaccaaagcttccccctataaccgctgcaagggtagtatatacctggtgttcgacttctgcgagcatgaccttgctgggctgttgagcaatgttttggtcaagttcacgctgtctgagatcaagagggtgatgcagatgctgcttaacggcctctactacatccacagaaacaagatcctgcatagggacatgaaggctgctaatgtgcttatcactcgtgatggggtcctgaagctggcagactttgggctggcccgggccttcagcctggccaagaacagccagcccaaccgctacaccaaccgtgtggtgacactctggtaccggcccccggagctgttgctcggggagcgggactacggcccccccattgacctgtggggtgctgggtgcatcatggcagagatgtggacccgcagccccatcatgcagggcaacacggagcagcaccaactcgccctcatcagtcagctctgcggctccatcacccctgaggtgtggccaaacgtggacaactatgagctgtacgaaaagctggagctggtcaagggccagaagcggaaggtgaaggacaggctgaaggcctatgtgcgtgacccatacgcactggacctcatcgacaagctgctggtgctggaccctgcccagcgcatcgacagcgatgacgccctcaaccacgacttcttctggtccgaccccatgccctccgacctcaagggcatgctctccacccacctgacgtccatgttcgagtacttggcaccaccgcgccggaagggcagccagatcacccagcagtccaccaaccagagtcgcaatcccgccaccaccaaccagacggagtttgagcgcgtcttctgagggccggcgcttgccactagggctcttgtgttttttttcttctgctatgtgacttgcatcgtggagacagggcatttgagtttatatctctcatgcatattttatttaatccccaccctgggctctgggagcagcccgctgagtggactggagtggagcattggctgagagaccaggagggcactggagctgtcttgtccttgctggttttctggatggttcccagagggtttccatggggtaggaggatgggctcgcccaccagtgactttttctaagagctcccggcgtggtggaagaggggacaggtccctcacccacccacaatcctattctcgggctgagaaccctgcgtggggacagggctcgcctcaggaatgggctgtttttggcctaaccctcagaaacactggggctggcacaaactcttggtttcttcaacaggagaattttactgtgtttcttttggttccattgtttggagacattcctgggcacagtttggtccgttagaattaaaagttgaatttttttttttttt

SEQ ID NO: 450473 - DNA, 2465 bp, Homo sapiens
ggcgcggccgcggaggggcctggagtgcggcggcggcgggacccggagcaggagcggcggcagcagcgactgggggcggcggcggcgcgttggaggcggccatggcaaagcagtacgactcggtggagtgccctttttgtgatgaagtttccaaatacgagaagctcgccaagatcggccaaggcaccttcggggaggtgttcaaggccaggcaccgcaagaccggccagaaggtggctctgaagaaggtgctgatggaaaacgagaaggaggggttccccattacagccttgcgggagatcaagatccttcagcttctaaaacacgagaatgtggtcaacttgattgagatttgtcgaaccaaagcttccccctataaccgctgcaagggtagtatatacctggtgttcgacttctgcgagcatgaccttgctgggctgttgagcaatgttttggtcaagttcacgctgtctgagatcaagagggtgatgcagatgctgcttaacggcctctactacatccacagaaacaagatcctgcatagggacatgaaggctgctaatgtgcttatcactcgtgatggggtcctgaagctggcagactttgggctggcccgggccttcagcctggccaagaacagccagcccaaccgctacaccaaccgtgtggtgacactctggtaccggcccccggagctgttgctcggggagcgggactacggcccccccattgacctgtggggtgctgggtgcatcatggcagagatgtggacccgcagccccatcatgcagggcaacacggagcagcaccaactcgccctcatcagtcagctctgcggctccatcacccctgaggtgtggccaaacgtggacaactatgagctgtacgaaaagctggagctggtcaagggccagaagcggaaggtgaaggacaggctgaaggcctatgtgcgtgacccatacgcactggacctcatcgacaagctgctggtgctggaccctgcccagcgcatcgacagcgatgacgccctcaaccacgacttcttctggtccgaccccatgccctccgacctcaagggcatgctctccacccacctgacgtccatgttcgagtacttggcaccaccgcgccggaagggcagccagatcacccagcagtccaccaaccagagtcgcaatcccgccaccaccaaccagacggagtttgagcgcgtcttctgagggccggcgcttgccactagggctcttgtgttttttttcttctgctatgtgacttgcatcgtggagacagggcatttgagtttatatctctcatgcatattttatttaatccccaccctgggctctgggagcagcccgctgagtggactggagtggagcattggctgagagaccaggagggcactggagctgtcttgtccttgctggttttctggatggttcccagagggtttccatggggtaggaggatgggctcgcccaccagtgactttttctaagagctcccggcgtggtggaagaggggacaggtccctcacccacccacaatcctattctcgggctgagaaccctgcgtggggacagggctcgcctcaggaatgggctgtttttggcctaaccctcagaaacactggggctggcacaaactcttggtttcttcaacaggagaattttactgtgtttcttttggttccattgtttggagacattcctgggcacagtttggtccgttagaattaaaagttgaatttttttttttttttttttcctccaggacttgtgtgttttgttctgcgcacacaccgccaactgttcccccacagtcagcagcaggttgggcctgaccattgggacttgattgtcaagtcactggaggtcttgacttttttatctcagttcatgttctcttccataattggaaaggacctttgtctgtttttcctcttgggtgccttccagaacgcatctcatgtccctggtgagggaattggtgagggcctgctgtgagctgctgtggctgcgatggtcacccagctgggcaaatcactggagtgacaatttgacctgtcacctgagaaggatggtccctcagactgctgggtagagggcctggggcaggctggagagagagaaagtgggcagagggtgaagggatcacaggggtcttggaaggtggcagtagtttggacgggggtggggagtatgtgggagaaaaaaacagactgaaggtagaatccttgggaacctttgaggagcggcacattctggcaggcacgttttctgtgagcctgaagttaggaagagacattctggaggtcaatttcctacatcctcttacaggcggagaccttgaagtggggccaggaaggaaggttggcaaaacctttgaccagaactgtccttcatttacagaaactgacccagaccacaacacaaaaggccagtaaaagtaagaaaaaaaaattt

SEQ ID NO: 450474 - DNA, 1851 bp, Homo sapiens
ggcgcggccgcggaggggcctggagtgcggcggcggcgggacccggagcaggagcggcggcagcagcgactgggggcggcggcggcgcgttggaggcggccatggcaaagcagtacgactcggtggagtgccctttttgtgatgaagtttccaaatacgagaagctcgccaagatcggccaaggcaccttcggggaggtgttcaaggccaggcaccgcaagaccggccagaaggtggctctgaagaaggtgctgatggaaaacgagaaggaggggttccccattacagccttgcgggagatcaagatccttcagcttctaaaacacgagaatgtggtcaacttgattgagatttgtcgaaccaaagcttccccctataaccgctgcaagggtagtatatacctggtgttcgacttctgcgagcatgaccttgctgggctgttgagcaatgttttggtcaagttcacgctgtctgagatcaagagggtgatgcagatgctgcttaacggcctctactacatccacagaaacaagatcctgcatagggacatgaaggctgctaatgtgcttatcactcgtgatggggtcctgaagctggcagactttgggctggcccgggccttcagcctggccaagaacagccagcccaaccgctacaccaaccgtgtggtgacactctggtaccggcccccggagctgttgctcggggagcgggactacggcccccccattgacctgtggggtgctgggtgcatcatggcagagatgtggacccgcagccccatcatgcagggcaacacggagcagcaccaactcgccctcatcagtcagctctgcggctccatcacccctgaggtgtggccaaacgtggacaactatgagctgtacgaaaagctggagctggtcaagggccagaagcggaaggtgaaggacaggctgaaggcctatgtgcgtgacccatacgcactggacctcatcgacaagctgctggtgctggaccctgcccagcgcatcgacagcgatgacgccctcaaccacgacttcttctggtccgaccccatgccctccgacctcaagggcatgctctccacccacctgacgtccatgttcgagtacttggcaccaccgcgccggaagggcagccagatcacccagcagtccaccaaccagagtcgcaatcccgccaccaccaaccagacggagtttgagcgcgtcttctgagggccggcgcttgccactagggctcttgtgttttttttcttctgctatgtgacttgcatcgtggagacagggcatttgagtttatatctctcatgcatattttatttaatccccaccctgggctctgggagcagcccgctgagtggactggagtggagcattggctgagagaccaggagggcactggagctgtcttgtccttgctggttttctggatggttcccagagggtttccatggggtaggaggatgggctcgcccaccagtgactttttctaagagctcccggcgtggtggaagaggggacaggtccctcacccacccacaatcctattctcgggctgagaaccctgcgtggggacagggctcgcctcaggaatgggctgtttttggcctaaccctcagaaacactggggctggcacaaactcttggtttcttcaacaggagaattttactgtgtttcttttggttccattgtttggagacattcctgggcacagtttggtccgttagaattaaaagttgaatttttttttttttttttttttttttttttttatttttttttttttttatttttttattttatgggtatttgagggacaacaattttttttttttgggagggagg

SEQ ID NO: 450475 - DNA, 2425 bp, Homo sapiens
ggcgcggccgcggaggggcctggagtgcggcggcggcgggacccggagcaggagcggcggcagcagcgactgggggcggcggcggcgcgttggaggcggccatggcaaagcagtacgactcggtggagtgccctttttgtgatgaagtttccaaatacgagaagctcgccaagatcggccaaggcaccttcggggaggtgttcaaggccaggcaccgcaagaccggccagaaggtggctctgaagaaggtgctgatggaaaacgagaaggaggggttccccattacagccttgcgggagatcaagatccttcagcttctaaaacacgagaatgtggtcaacttgattgagatttgtcgaaccaaagcttccccctataaccgctgcaagggtagtatatacctggtgttcgacttctgcgagcatgaccttgctgggctgttgagcaatgttttggtcaagttcacgctgtctgagatcaagagggtgatgcagatgctgcttaacggcctctactacatccacagaaacaagatcctgcatagggacatgaaggctgctaatgtgcttatcactcgtgatggggtcctgaagctggcagactttgggctggcccgggccttcagcctggccaagaacagccagcccaaccgctacaccaaccgtgtggtgacactctggtaccggcccccggagctgttgctcggggagcgggactacggcccccccattgacctgtggggtgctgggtgcatcatggcagagatgtggacccgcagccccatcatgcagggcaacacggagcagcaccaactcgccctcatcagtcagctctgcggctccatcacccctgaggtgtggccaaacgtggacaactatgagctgtacgaaaagctggagctggtcaagggccagaagcggaaggtgaaggacaggctgaaggcctatgtgcgtgacccatacgcactggacctcatcgacaagctgctggtgctggaccctgcccagcgcatcgacagcgatgacgccctcaaccacgacttcttctggtccgaccccatgccctccgacctcaagggcatgctctccacccacctgacgtccatgttcgagtacttggcaccaccgcgccggaagggcagccagatcacccagcagtccaccaaccagagtcgcaatcccgccaccaccaaccagacggagtttgagcgcgtcttctgagggccggcgcttgccactagggctcttgtgttttttttcttctgctatgtgacttgcatcgtggagacagggcatttgagtttatatctctcatgcatattttatttaatccccaccctgggctctgggagcagcccgctgagtggactggagtggagcattggctgagagaccaggagggcactggagctgtcttgtccttgctggttttctggatggttcccagagggtttccatggggtaggaggatgggctcgcccaccagtgactttttctaagaagacaaggctttgtggggtgtgggtgtgggtccaagtgccaagggccagggagctttgtagagtgtgtggttatgtttctcagtgtttcctcatagttggttaactaatacatttgttcatgcaattaagccatcttttcattttctaacatttttaaaaatacatatattttttagagatgggggtctcgctttgttgcctaggctggtctccagctcctcagctcaagggatcctcctgccttggcctcccaaagtgctgggattataggtgtgagccaccaggcccagccaattaagctgcattttaaaacaaccaagacagaccttaaaccttggagctgctgacccaagctcatcctcacccctcttccccagagtctaccccagggaggaacagggactggccagtcaggtgagggttctctagctttggcctcaagctctggtgtgacatgggtgctgttttcacctgtggagggaggtatgtcgcctggaataaaggctcgccagagggcagggccttgtgcggcttttctcagcacctagatagtgcctggcaccatgttctcagcacctagatagtgcctggcacacatgagtctctgggatacagtggagtgagtgcagtgaacagatggctgaggaggctgtgtagatgggaaaggccttcgccagctcgcggggatgagcttaggccgggggactgagttctgtgtcctggctttttgtttgttttttaagagcctggagtcacatcctgccctttttttttttttaagggaaaaatggtggttttattcatttgtacttaaaccagccaaagtagtactgatgtgattatgattcagcaaatacaagatctctttccacaaatattagcataacaatcaaaatagggactatagtaaaacagccaaaaagg

SEQ ID NO: 450476 - DNA, 1666 bp, Homo sapiens
ccaatttggaccagtaggcacaggatcacccttggcaccaggtgctccaacttcacctttagggccggcaacacctttgtctactcgagtgacccgtcggaggtgttcaaggccaggcaccgcaagaccggccagaaggtggctctgaagaaggtgctgatggaaaacgagaaggaggggttccccattacagccttgcgggagatcaagatccttcagcttctaaaacacgagaatgtggtcaacttgattgagatttgtcgaaccaaagcttccccctataaccgctgcaagggtagtatatacctggtgttcgacttctgcgagcatgaccttgctgggctgttgagcaatgttttggtcaagttcacgctgtctgagatcaagagggtgatgcagatgctgcttaacggcctctactacatccacagaaacaagatcctgcatagggacatgaaggctgctaatgtgcttatcactcgtgatggggtcctgaagctggcagactttgggctggcccgggccttcagcctggccaagaacagccagcccaaccgctacaccaaccgtgtggtgacactctggtaccggcccccggagctgttgctcggggagcgggactacggcccccccattgacctgtggggtgctgggtgcatcatggcagagatgtggacccgcagccccatcatgcagggcaacacggagcagcaccaactcgccctcatcagtcagctctgcggctccatcacccctgaggtgtggccaaacgtggacaactatgagctgtacgaaaagctggagctggtcaagggccagaagcggaaggtgaaggacaggctgaaggcctatgtgcgtgacccatacgcactggacctcatcgacaagctgctggtgctggaccctgcccagcgcatcgacagcgatgacgccctcaaccacgacttcttctggtccgaccccatgccctccgacctcaagggcatgctctccacccacctgacgtccatgttcgagtacttggcaccaccgcgccggaagggcagccagatcacccagcagtccaccaaccagagtcgcaatcccgccaccaccaaccagacggagtttgagcgcgtcttctgagggccggcgcttgccactagggctcttgtgttttttttcttctgctatgtgacttgcatcgtggagacagggcatttgagtttatatctctcatgcatattttatttaatccccaccctgggctctgggagcagcccgctgagtggactggagtggagcattggctgagagaccaggagggcactggagctgtcttgtccttgctggttttctggatggttcccagagggtttccatggggtaggaggatgggctcgcccaccagtgactttttctaagagctcccggcgtggtggaagaggggacaggtccctcacccacccacaatcctattctcgggctgagaaccctgcgtggggacagggctcgcctcaggaatgggctgtttttggcctaaccctcagaaacactggggctggcacaaactcttggtttcttcaacaggagaattttactgtgtttcttttggttccattgtttggagacattcctgggcacagtttggtccgttagaattaaaagttgaatttttttttttttt

SEQ ID NO: 450477 - DNA, 1181 bp, Homo sapiens
ggccaggcatctacctggccccttccccccaactgccagggcttcttgagctgccggccctggggcattgagcctcaggaggccctcgggctcaaggggccctcctggtgcgctcttcttcccaggggagcgggactacggcccccccattgacctgtggggtgctgggtgcatcatggcagagatgtggacccgcagccccatcatgcagggcaacacggagcagcaccaactcgccctcatcagtcagctctgcggctccatcacccctgaggtgtggccaaacgtggacaactatgagctgtacgaaaagctggagctggtcaagggccagaagcggaaggtgaaggacaggctgaaggcctatgtgcgtgacccatacgcactggacctcatcgacaagctgctggtgctggaccctgcccagcgcatcgacagcgatgacgccctcaaccacgacttcttctggtccgaccccatgccctccgacctcaagggcatgctctccacccacctgacgtccatgttcgagtacttggcaccaccgcgccggaagggcagccagatcacccagcagtccaccaaccagagtcgcaatcccgccaccaccaaccagacggagtttgagcgcgtcttctgagggccggcgcttgccactagggctcttgtgttttttttcttctgctatgtgacttgcatcgtggagacagggcatttgagtttatatctctcatgcatattttatttaatccccaccctgggctctgggagcagcccgctgagtggactggagtggagcattggctgagagaccaggagggcactggagctgtcttgtccttgctggttttctggatggttcccagagggtttccatggggtaggaggatgggctcgcccaccagtgactttttctaagagctcccggcgtggtggaagaggggacaggtccctcacccacccacaatcctattctcgggctgagaaccctgcgtggggacagggctcgcctcaggaatgggctgtttttggcctaaccctcagaaacactggggctggcacaaactcttggtttcttcaacaggagaattttactgtgtttcttttggttccattgtttggagacattcctgggcacagtttggtccgttagaattaaaagttgaatttttttttttttt

SEQ ID NO: 450478 - DNA, 1614 bp, Homo sapiens
ggcgcggccgcggaggggcctggagtgcggcggcggcgggacccggagcaggagcggcggcagcagcgactgggggcggcggcggcgcgttggaggcggccatggcaaagcagtacgactcggtggagtgccctttttgtgatgaagtttccaaatacgagaagctcgccaagatcggccaaggcaccttcggggaggtgttcaaggccaggcaccgcaagaccggccagaaggtggctctgaagaaggtgctgatggaaaacgagaaggaggggttccccattacagccttgcgggagatcaagatccttcagcttctaaaacacgagaatgtggtcaacttgattgagatttgtcgaaccaaagcttccccctataaccgctgcaagggtagtatatacctggtgttcgacttctgcgagcatgaccttgctgggctgttgagcaatgttttggtcaagttcacgctgtctgagatcaagagggtgatgcagatgctgcttaacggcctctactacatccacagaaacaagatcctgcatagggacatgaaggctgctaatgtgcttatcactcgtgatggggtcctgaagctggcagactttgggctggcccgggccttcagcctggccaagaacagccagcccaaccgctacaccaaccgtgtggtgacactctggtaccggcccccggagctgttgctcggggagcgggactacggcccccccattgacctgtggggtgctgggtgcatcatggcagagatgtggacccgcagccccatcatgcagggcaacacggagcagcaccaactcgccctcatcagtcagctctgcggctccatcacccctgaggtgtggccaaacgtggacaactatgagctgtacgaaaagctggagctggtcaagggccagaagcggaaggtgaaggacaggctgaaggcctatgtgcgtgacccatacgcactggacctcatcgacaagctgctggtgctggaccctgcccagcgcatcgacagcgatgacgccctcaaccacgacttcttctggtccgaccccatgccctccgacctcaagggcatgctctccacccacctgacgtccatgttcgagtacttggcaccaccgcgccggaagggcagccagatcacccagcagtccaccaaccagagtcgcaatcccgccaccaccaaccagacggagtttgagcgcgtcttctgagggccggcgcttgccactagggctcttgtgttttttttcttctgctatgtgacttgcatcgtggagacagggcatttgagtttatatctctcatgcatattttatttaatccccaccctgggctctgggagcagcccgctgagtggactggagtggagcattggctgagagaccaggagggcactggagctgtcttgtccttgctggttttctggatggttcccagagggtttccatggggtaggaggatgggctcgacctcctacccccgtcatactattatactcatctccacaaaattctgaacctcatctcatcttctatgcttcacctatttacctaacttttctactaggttggtgcacagcaattgtggtaaaggtatattttagat

SEQ ID NO: 450479 - DNA, 6888 bp, Homo sapiens
ccaggagctgccttggcagtcacgccccttccttccgaggagctttctggctgcctaaactggtagaccccctgaattactcctccatctccgctctctttcgcctcctcttctcttagttctctccgcctccccctcaactaccaccacctccagtcagtctcgcctccggctatccgctgctccaccctctggcccggtatcctgcctgtccgctgccaccaaggagagcccggacggagcagcgaggaggggagcagccgggagttggggcttcccccctgcccatccctggccgctggcccgggaccgaagccacttgagcgagcagagagtcgtcaccttgtcttctttgccttcagggagctgctaagaaggacaaataagatagcagagtgaaagagcttttgtctccttagaaggaaggctgagaaactaaaggccagcgcaggacatctcattgccattgtcagccaggaactcgcagcctcacagccctacttcttctctgacctctggggggtccttgcccttgctacaatctccaccatccactagattgtctcctgcccgacaccccttggtcccaaaccagggagaccattcagctcacctgcctaggccgcagcagcatttccttcctaatcaggctcaccagggggatcattaccgtctctcccaacctggcctgagtcagcagcagcagcaacagcagcagcagcaccatcatcaccatcaccaccaacaacagcagcagcagcagccacagcagcagccaggagaagcctattcagctatgcctcgggctcagccatcctctgcttcttatcagccagtgccagcagacccttttgccattgtttccagagcccagcagatggttgagatcctctcagacgagaaccggaacttgaggcaagagttggaaggatgctatgagaaggtggcaagactgcagaaggtggagacagaaatccagcgcgtctcggaggcatatgagaacctcgtgaagtcatcctccaaaagagaggccctagagaaagccatgagaaacaagctagagggcgagattcggaggatgcatgatttcaacagggatctgagagagcgtctagagactgccaacaagcagcttgcagagaaggaatatgaggggtcagaggacaccagaaaaaccatctcgcagctctttgcaaaaaataaagaaagccagcgtgagaaggagaagctggaagcggagctggccactgcccgttctaccaatgaggaccaaagacgacacatcgaaatccgagatcaggccctgagtaatgcccaggccaaggtggtaaagctggaagaagagctgaaaaagaagcaagtgtacgttgacaaggtggagaagatgcagcaggcccttgtacagctccaggcagcatgtgaaaaacgtgagcagctagagcaccgtctccggacacgactggagagggaactggaatccctgagaatccagcagcgtcagggcaactgtcagcccaccaacgtttcagaatacaatgctgctgcactgatggagctccttcgggagaaagaggagaggattctggctctggaagctgatatgacaaagtgggagcagaaatatttggaggagaatgtgatgagacattttgctctggatgctgctgcaactgtggctgctcagagggacacaacagtcatcagtcactctcctaacaccagctatgacacagctctagaagctcgcatccagaaagaggaggaagaaatcttgatggccaataagcgttgccttgacatggagggcaggattaagaccctccatgcccagattattgagaaggatgccatgatcaaagtactccagcagcgttcccggaaggagccgagcaagacagagcagctgtcgtgcatgcggccagcgaagtctctgatgtccatttccaatgctggatcaggcttgctctcccactcatccaccctgactggctcccccatcatggaagaaaagcgagacgacaagagctggaaggggagcctaggcattctcctgggtggagactaccgtgctgaatatgtcccttccacaccctcgcctgtgccaccctcgactcccctgctctcggctcactccaagacaggcagccgagactgcagtacccaaactgaacgtgggacggaatcgaacaaaactgcagctgttgctcccatctctgttcctgctccagttgctgctgccgccactgctgccgccatcactgccactgctgccaccatcaccaccaccatggtagctgctgctccagttgctgttgctgctgctgctgctccagctgctgctgctgccccgtctccagccactgccgctgctactgctgctgctgtttctccagctgctgctggtcagattccagctgctgcctctgttgcctcagctgctgccgttgctccttctgctgctgctgctgctgctgttcaggttgctccagctgctccggctccagttccagctccggctctggttccggttccagctccagcagcggctcaggcttctgctcctgctcagactcaggcaccaacttcagctccggctgtggctccaactccagctccaactccaactccagctgtggctcaggctgaggttcctgcaagtccagctaccggtcctggaccacatcgtttgtctataccaagtttgacctgcaatccagacaaaacagatgggcctgtgttccactccaatactctggaaagaaaaactcccattcagatcctgggacaagagcctgatgcagagatggtggaatatctcatctaaacggccaaatcaagagctgcagattatcagcaaaaatgcttttaatcattttcccccttttattggttcttgttttgagggtgaggacaagggttgtggggaggggatgttttttaacaggactttttattggaacaatgtactacttgagtaataccatgtgaacaccagtctattttggtatgcttagggagtacctctaaagacagattaatcagaatgtgctctaaagcttattgtttgaatttatacgaatactgggactgttaacaggtggctatacatcgacgttttcaatgtgcttaaatttgtttaaattttccatattctagatcattttttattgaagagcacagtatgtgtggaagacagtgtataacacgtagtttggaagtgggaagctagagagaattgagtgtgtgctgttttgtatagttactatcctgtgcagcagctggagaaagcactcacctcaggcttacaaaagggaatagtttcaggagctatgtaagctggaaaaaaggtagggagttttggggtgcagaagggtactggagctaattttttcttccagtttcccagctaccctgccccagggaattgtgtttgtcttcatttcagtggtgctttggaaatggattcttttggttccctcctggaggttcatacattcatatatatgctctggagtaatttatgcatttggataattaatatattgctttcagatgctgggagagtacattaactgagtgatgcgcaacttcctctctcttagggaattagaccatcagaggccttgatggagagttgcatggggtgctatatgcagacttccatggtttgtgtgtagccatgaacacagcttgcttgcatttagtaagaccaatcagcttagtgtttatttcttctacagcacagattcactggctgggtctccagtctcaaattgccaatcatttgcaaagtgaggaaggatctttgttgacaggttgaatgctttgaatttctggtgactactttgaaataacttgttttgtttgtcaaattctaagcatatgtcttaaaaggcatttttgactatcacctccaagggaatagcttgagaaacccaaagtactatgctgcagtcgggggagaggtggattgcagcagtatcctcaactacctcttctcactgtcagtgacaccatcttggaatacctttgggaagcagcaggaaatgtgcatgtgggtagagatcaaaggaggcaatggctccaagccttgccatagggctgcctccaaggacacagaaggatgccagttgccacaggtccctgccctgtgtcacctgtctgcccttcattaaggtgagaaatctgcagatagcatcattaagatcagttttaaggggtatagggagggtgagggaagtggggggtgttaggtaagggttgggggtagaggttttgggatgtcttagttagaaaccagattaatagaagagtaggcctgatatattacatcatgagccatagtggtgggaaagaactttagcaatatagccctacctcctcattttagtgatgaggaatctgagaactggagaggttcagtgactttttgaaagtcatacaacacagctaaccattatgccaatcaccatgcttattttgggaaactctttatcttttttaaattccattttatgaaaaggcatcttcatggtccagggaatatgtatcttgtaaaatgtacctggttggagtagcttgtccagtcttgacaaactactgaatttctgtcttgcctctccttcagtgccttttaaaaggttttcccttttctgatctgcatttcaacatagagtcacataaatgtccccctgagaaaccaatcccacttctttctaggagattgggtatcttagataatcttttggggttcctctgtgagtataggaatggtatccttcctaattatcttccaaaggaattattttgtgtgtgtgcctgtgtgtgtgtagagacataaaggagggtgatgtgattttcagctagtcctttcacattttcaataatgaggtaatcatgttacatacacattagtcctcagttataaagtgaatctcagatagaaattaaaagtgcagttgtgttaagactctttcatactaccctttagtcataaggagaaaaaaacactcaaatagtagaagcagcaagtagcaaacttcaggagagctactttctatccaaataatttaaaaaacacttttcacctactcctttcatggttataacacattggcagactttttgctggctctgggagccatgattttaatcacattctgcaaggtgacaaatgtcatacattccacattgtgtggtagccatctctttagactcatgtgttttggggaaaggaagaagttcttggctgagtactattttgaactttccagaaccctctcacaccagagacagttcttctctgttcagtttccaatccccgataatttgctaaaataacattgtacatccaagagagggaagaagagtatgtcagtatattatgcagaagatagatacagccttttcagaagatctccactagtttttgttccaaaaattcaagtttatgggagaaatctcaattagccaccttttcacagttgtgtggatataacatttgggggatctttctggactcctacctatctgtgcattttaccggcacctcaggaaaggagggtgaccaggttgtcttagcttgtactgcttggtgatctctgaggaccttctaattcagttgtaccccagtgttccatgtatagaaaaacttcattagaacaaactttacttgatatgaaactcctattaacagtctttttttgaaataaaaagtagcttgagctttcttttaaaatcatgtatcttgattgttgatttaatgaaggatttccttttaatgctgcttttgagcttcaaggtaataggacagcaggaacctaaaatatctgccatcatctgccataggaaagatacccagagacccatcatgttctctttttgttgttacactgttgggtgggtataacaattggaaaatgaacaaactgattgattgtgcaaactactttttatgacaagcctaaaccctcataatgcggcagcttaaagtgtatacatatgcactaactttgatcaattatattctcatatctgttagctacacagtctcctattatctcaattgcttatgtgcatatggaatatgttacttaaaacgtgtgcattcttactgaaaatgttttcaaaggaaggtatcagctgtgggctaattgccaccaatttcagcctgccacgattcttggaaatatgtcttccaagtgccatccatcatcagtaggacaagtgtcgggagtttgtttatttttttccagtagcaacgatgggttacatggagccatgaaacctccttctggcctcccttgtgattaatggcatgtgtttgtaaaatggatagctggggttggcagatggctagagaagaatcgcctttggtttaaaatgtatgtggtcccctaatgattgtgaccccattctgtaatcaactgagctagttccaataaagttaagcaggtttaaatccactttgtgcctatcttttcactgacaataaagttagctattttaaaatgcagtaccgtgtggaaaatgctttggtgtttacccgacagaggctttatttgtgctgtatcagtgattactttcaattcagtatgcagtgaaattgcctttcaagggcagcgtgcagcagaatttgcatttgcttgaagtatggaatgtgattatagattataaagtattaagacaacaccacaggccgcatgctctaatcggtctctttatatactcaggcagcatatattaaaagctttgcatctttttatcttctggtttctagggataaaatgatggccacccaaagcagagaatttatcctttggttagcattttggaaggccccttgatattccttttgtacccttgttctgatgccaattcatcagtttt

SEQ ID NO: 450480 - DNA, 6464 bp, Homo sapiens
ccaggagctgccttggcagtcacgccccttccttccgaggagctttctggctgcctaaactggtagaccccctgaattactcctccatctccgctctctttcgcctcctcttctcttagttctctccgcctccccctcaactaccaccacctccagtcagtctcgcctccggctatccgctgctccaccctctggcccggtatcctgcctgtccgctgccaccaaggagagcccggacggagcagcgaggaggggagcagccgggagttggggcttcccccctgcccatccctggccgctggcccgggaccgaagccacttgagcgagcagagagtcgtcaccttgtcttctttgccttcagggagctgctaagaaggacaaataagatagcagagtgaaagagcttttgtctccttagaaggaaggctgagaaactaaaggccagcgcaggacatctcattgccattgtcagccaggaactcgcagcctcacagccctacttcttctctgacctctggggggtccttgcccttgctacaatctccaccatccactagattgtctcctgcccgacaccccttggtcccaaaccagggagaccattcagctcacctgcctaggccgcagcagcatttccttcctaatcaggctcaccagggggatcattaccgtctctcccaacctggcctgagtcagcagcagcagcaacagcagcagcagcaccatcatcaccatcaccaccaacaacagcagcagcagcagccacagcagcagccaggagaagcctattcagctatgcctcgggctcagccatcctctgcttcttatcagccagtgccagcagacccttttgccattgtttccagagcccagcagatggttgagatcctctcagacgagaaccggaacttgaggcaagagttggaaggatgctatgagaaggtggcaagactgcagaaggtggagacagaaatccagcgcgtctcggaggcatatgagaacctcgtgaagtcatcctccaaaagagaggccctagagaaagccatgagaaacaagctagagggcgagattcggaggatgcatgatttcaacagggatctgagagagcgtctagagactgccaacaagcagcttgcagagaaggaatatgaggggtcagaggacaccagaaaaaccatctcgcagctctttgcaaaaaataaagaaagccagcgtgagaaggagaagctggaagcggagctggccactgcccgttctaccaatgaggaccaaagacgacacatcgaaatccgagatcaggccctgagtaatgcccaggccaaggtggtaaagctggaagaagagctgaaaaagaagcaagtgtacgttgacaaggtggagaagatgcagcaggcccttgtacagctccaggcagcatgtgaaaaacgtgagcagctagagcaccgtctccggacacgactggagagggaactggaatccctgagaatccagcagcgtcagggcaactgtcagcccaccaacgtttcagaatacaatgctgctgcactgatggagctccttcgggagaaagaggagaggattctggctctggaagctgatatgacaaagtgggagcagaaatatttggaggagaatgtgatgagacattttgctctggatgctgctgcaactgtggctgctcagagggacacaacagtcatcagtcactctcctaacaccagctatgacacagctctagaagctcgcatccagaaagaggaggaagaaatcttgatggccaataagcgttgccttgacatggagggcaggattaagaccctccatgcccagattattgagaaggatgccatgatcaaagtactccagcagcgttcccggaaggagccgagcaagacagagcagctgtcgtgcatgcggccagcgaagtctctgatgtccatttccaatgctggatcaggcttgctctcccactcatccaccctgactggctcccccatcatggaagaaaagcgagacgacaagagctggaaggggagcctaggcattctcctgggtggagactaccgtgctgaatatgtcccttccacaccctcgcctgtgccaccctcgactcccctgctctcggctcactccaagacaggcagccgagactgcagtacccaaactgaacgtgggacggaatcgaacaaaactgcagctgttgctcccatctctgttcctgctccagttgctgctgccgccactgctgccgccatcactgccactgctgccaccatcaccaccaccatggtagctgctgctccagttgctgttgctgctgctgctgctccagctgctgctgctgccccgtctccagccactgccgctgctactgctgctgctgtttctccagctgctgctggtcagattccagctgctgcctctgttgcctcagctgctgccgttgctccttctgctgctgctgctgctgctgttcaggttgctccagctgctccggctccagttccagctccggctctggttccggttccagctccagcagcggctcaggcttctgctcctgctcagactcaggcaccaacttcagctccggctgtggctccaactccagctccaactccaactccagctgtggctcaggctgaggttcctgcaagtccagctaccggtcctggaccacatcgtttgtctataccaagtttgacctgcaatccagacaaaacagatgggcctgtgttccactccaatactctggaaagaaaaactcccattcagatcctgggacaagagcctgatgcagagatggtggaatatctcatctaaacggccaaatcaagagctgcagattatcagcaaaaatgcttttaatcattttcccccttttattggttcttgttttgagggtgaggacaagggttgtggggaggggatgttttttaacaggactttttattggaacaatgtactacttgagtaataccatgtgaacaccagtctattttggtatgcttagggagtacctctaaagacagattaatcagaatgtgctctaaagcttattgtttgaatttatacgaatactgggactgttaacaggtggctatacatcgacgttttcaatgtgcttaaatttgtttaaattttccatattctagatcattttttattgaagagcacagtatgtgtggaagacagtgtataacacgtagtttggaagtgggaagctagagagaattgagtgtgtgctgttttgtatagttactatcctgtgcagcagctggagaaagcactcacctcaggcttacaaaagggaatagtttcaggagctatgtaagctggaaaaaaggtagggagttttggggtgcagaagggtactggagctaattttttcttccagtttcccagctaccctgccccagggaattgtgtttgtcttcatttcagtggtgctttggaaatggattcttttggttccctcctggaggttcatacattcatatatatgctctggagtaatttatgcatttggataattaatatattgctttcagatgctgggagagtacattaactgagtgatgcgcaacttcctctctcttagggaattagaccatcagaggccttgatggagagttgcatggggtgctatatgcagacttccatggtttgtgtgtagccatgaacacagcttgcttgcatttagtaagaccaatcagcttagtgtttatttcttctacagcacagattcactggctgggtctccagtctcaaattgccaatcatttgcaaagtgaggaaggatctttgttgacaggttgaatgctttgaatttctggtgactactttgaaataacttgttttgtttgtcaaattctaagcatatgtcttaaaaggcatttttgactatcacctccaagggaatagcttgagaaacccaaagtactatgctgcagtcgggggagaggtggattgcagcagtatcctcaactacctcttctcactgtcagtgacaccatcttggaatacctttgggaagcagcaggaaatgtgcatgtgggtagagatcaaaggaggcaatggctccaagccttgccatagggctgcctccaaggacacagaaggatgccagttgccacaggtccctgccctgtgtcacctgtctgcccttcattaaggtgagaaatctgcagatagcatcattaagatcagttttaaggggtatagggagggtgagggaagtggggggtgttaggtaagggttgggggtagaggttttgggatgtcttagttagaaaccagattaatagaagagtaggcctgatatattacatcatgagccatagtggtgggaaagaactttagcaatatagccctacctcctcattttagtgatgaggaatctgagaactggagaggttcagtgactttttgaaagtcatacaacacagctaaccattatgccaatcaccatgcttattttgggaaactctttatcttttttaaattccattttatgaaaaggcatcttcatggtccagggaatatgtatcttgtaaaatgtacctggttggagtagcttgtccagtcttgacaaactactgaatttctgtcttgcctctccttcagtgccttttaaaaggttttcccttttctgatctgcatttcaacatagagtcacataaatgtccccctgagaaaccaatcccacttctttctaggagattgggtatcttagataatcttttggggttcctctgtgagtataggaatggtatccttcctaattatcttccaaaggaattattttgtgtgtgtgcctgtgtgtgtgtagagacataaaggagggtgatgtgattttcagctagtcctttcacattttcaataatgaggtaatcatgttacatacacattagtcctcagttataaagtgaatctcagatagaaattaaaagtgcagttgtgttaagactctttcatactaccctttagtcataaggagaaaaaaacactcaaatagtagaagcagcaagtagcaaacttcaggagagctactttctatccaaataatttaaaaaacacttttcacctactcctttcatggttataacacattggcagactttttgctggctctgggagccatgattttaatcacattctgcaaggtgacaaatgtcatacattccacattgtgtggtagccatctctttagactcatgtgttttggggaaaggaagaagttcttggctgagtactattttgaactttccagaaccctctcacaccagagacagttcttctctgttcagtttccaatccccgataatttgctaaaataacattgtacatccaagagagggaagaagagtatgtcagtatattatgcagaagatagatacagccttttcagaagatctccactagtttttgttccaaaaattcaagtttatgggagaaatctcaattagccaccttttcacagttgtgtggatataacatttgggggatctttctggactcctacctatctgtgcattttaccggcacctcaggaaaggagggtgaccaggttgtcttagcttgtactgcttggtgatctctgaggaccttctaattcagttgtaccccagtgttccatgtatagaaaaacttcattagaacaaactttacttgatatgaaactcctattaacagtctttttttgaaataaaaagtagcttgagctttcttttaaaatcatgtatcttgattgttgatttaatgaaggatttccttttaatgctgcttttgagcttcaaggtaataggacagcaggaacctaaaatatctgccatcatctgccataggaaagatacccagagacccatcatgttctctttttgttgttacactgttgggtgggtataacaattggaaaatgaacaaactgattgattgtgcaaactactttttatgacaagcctaaaccctcataatgcggcagcttaaagtgtatacatatgcactaactttgatcaattatattctcatatctgttagctacacagtctcctattatctcaattgcttatgtgcatatggaatatgttacttaaaacgtgtgcattcttactgaaaatgttttcaaaggaaggtatcagctgtgggctaattgccaccaatttcagcctgccacgattcttggaaatatgtcttccaagtgccatccatcatcagtaggacaagtgtcgggagtttgtttatttttttccagtagcaacgatgggttacatggagccatgaaacctccttctggcctcccttgtgattaatggcatgtgtttgtaaaatggatagctggggttggcagatggctagagaagaatcgcctttggtttaaaatgtatgtggtcccctaatgattgtgaccccattctgtaatcaactgagctagttccaataaagttaagcaggtttaaatcca

SEQ ID NO: 450481 - DNA, 6514 bp, Homo sapiens
ccaggagctgccttggcagtcacgccccttccttccgaggagctttctggctgcctaaactggtagaccccctgaattactcctccatctccgctctctttcgcctcctcttctcttagttctctccgcctccccctcaactaccaccacctccagtcagtctcgcctccggctatccgctgctccaccctctggcccggtatcctgcctgtccgctgccaccaaggagagcccggacggagcagcgaggaggggagcagccgggagttggggcttcccccctgcccatccctggccgctggcccgggaccgaagccacttgagcgagcagagagtcgtcaccttgtcttctttgccttcagggagctgctaagaaggacaaataagatagcagagtgaaagagcttttgtctccttagaaggaaggctgagaaactaaaggccagcgcaggacatctcattgccattgtcagccaggaactcgcagcctcacagccctacttcttctctgacctctggggggtccttgcccttgctacaatctccaccatccactagattgtctcctgcccgacaccccttggtcccaaaccagggagaccattcagctcacctgcctaggccgcagcagcatttccttcctaatcaggctcaccagggggatcattaccgtctctcccaacctggcctgagtcagcagcagcagcaacagcagcagcagcaccatcatcaccatcaccaccaacaacagcagcagcagcagccacagcagcagccaggagaagcctattcagctatgcctcgggctcagccatcctctgcttcttatcagccagtgccagcagacccttttgccattgtttccagagcccagcagatggttgagatcctctcagacgagaaccggaacttgaggcaagagttggaaggatgctatgagaaggtggcaagactgcagaaggtggagacagaaatccagcgcgtctcggaggcatatgagaacctcgtgaagtcatcctccaaaagagaggccctagagaaagccatgagaaacaagctagagggcgagattcggaggatgcatgatttcaacagggatctgagagagcgtctagagactgccaacaagcagcttgcagagaaggaatatgaggggtcagaggacaccagaaaaaccatctcgcagctctttgcaaaaaataaagaaagccagcgtgagaaggagaagctggaagcggagctggccactgcccgttctaccaatgaggaccaaagacgacacatcgaaatccgagatcaggccctgagtaatgcccaggccaaggtggtaaagctggaagaagagctgaaaaagaagcaagtgtacgttgacaaggtggagaagatgcagcaggcccttgtacagctccaggcagcatgtgaaaaacgtgagcagctagagcaccgtctccggacacgactggagagggaactggaatccctgagaatccagcagcgtcagggcaactgtcagcccaccaacgtttcagaatacaatgctgctgcactgatggagctccttcgggagaaagaggagaggattctggctctggaagctgatatgacaaagtgggagcagaaatatttggaggagaatgtgatgagacattttgctctggatgctgctgcaactgtggctgctcagagggacacaacagtcatcagtcactctcctaacaccagctatgacacagctctagaagctcgcatccagaaagaggaggaagaaatcttgatggccaataagcgttgccttgacatggagggcaggattaagaccctccatgcccagattattgagaaggatgccatgatcaaagtactccagcagcgttcccggaaggagccgagcaagacagagcagctgtcgtgcatgcggccagcgaagtctctgatgtccatttccaatgctggatcaggcttgctctcccactcatccaccctgactggctcccccatcatggaagaaaagcgagacgacaagagctggaaggggagcctaggcattctcctgggtggagactaccgtgctgaatatgtcccttccacaccctcgcctgtgccaccctcgactcccctgctctcggctcactccaagacaggcagccgagactgcagtacccaaactgaacgtgggacggaatcgaacaaaactgcagctgttgctcccatctctgttcctgctccagttgctgctgccgccactgctgccgccatcactgccactgctgccaccatcaccaccaccatggtagctgctgctccagttgctgttgctgctgctgctgctccagctgctgctgctgccccgtctccagccactgccgctgctactgctgctgctgtttctccagctgctgctggtcagattccagctgctgcctctgttgcctcagctgctgccgttgctccttctgctgctgctgctgctgctgttcaggttgctccagctgctccggctccagttccagctccggctctggttccggttccagctccagcagcggctcaggcttctgctcctgctcagactcaggcaccaacttcagctccggctgtggctccaactccagctccaactccaactccagctgtggctcaggctgaggttcctgcaagtccagctaccggtcctggaccacatcgtttgtctataccaagtttgacctgcaatccagacaaaacagatgggcctgtgttccactccaatactctggaaagaaaaactcccattcagatcctgggacaagagcctgatgcagagatggtggaatatctcatctaaacggccaaatcaagagctgcagattatcagcaaaaatgcttttaatcattttcccccttttattggttcttgttttgagggtgaggacaagggttgtggggaggggatgttttttaacaggactttttattggaacaatgtactacttgagtaataccatgtgaacaccagtctattttggtatgcttagggagtacctctaaagacagattaatcagaatgtgctctaaagcttattgtttgaatttatacgaatactgggactgttaacaggtggctatacatcgacgttttcaatgtgcttaaatttgtttaaattttccatattctagatcattttttattgaagagcacagtatgtgtggaagacagtgtataacacgtagtttggaagtgggaagctagagagaattgagtgtgtgctgttttgtatagttactatcctgtgcagcagctggagaaagcactcacctcaggcttacaaaagggaatagtttcaggagctatgtaagctggaaaaaaggtagggagttttggggtgcagaagggtactggagctaattttttcttccagtttcccagctaccctgccccagggaattgtgtttgtcttcatttcagtggtgctttggaaatggattcttttggttccctcctggaggttcatacattcatatatatgctctggagtaatttatgcatttggataattaatatattgctttcagatgctgggagagtacattaactgagtgatgcgcaacttcctctctcttagggaattagaccatcagaggccttgatggagagttgcatggggtgctatatgcagacttccatggtttgtgtgtagccatgaacacagcttgcttgcatttagtaagaccaatcagcttagtgtttatttcttctacagcacagattcactggctgggtctccagtctcaaattgccaatcatttgcaaagtgaggaaggatctttgttgacaggttgaatgctttgaatttctggtgactactttgaaataacttgttttgtttgtcaaattctaagcatatgtcttaaaaggcatttttgactatcacctccaagggaatagcttgagaaacccaaagtactatgctgcagtcgggggagaggtggattgcagcagtatcctcaactacctcttctcactgtcagtgacaccatcttggaatacctttgggaagcagcaggaaatgtgcatgtgggtagagatcaaaggaggcaatggctccaagccttgccatagggctgcctccaaggacacagaaggatgccagttgccacaggtccctgccctgtgtcacctgtctgcccttcattaaggtgagaaatctgcagatagcatcattaagatcagttttaaggggtatagggagggtgagggaagtggggggtgttaggtaagggttgggggtagaggttttgggatgtcttagttagaaaccagattaatagaagagtaggcctgatatattacatcatgagccatagtggtgggaaagaactttagcaatatagccctacctcctcattttagtgatgaggaatctgagaactggagaggttcagtgactttttgaaagtcatacaacacagctaaccattatgccaatcaccatgcttattttgggaaactctttatcttttttaaattccattttatgaaaaggcatcttcatggtccagggaatatgtatcttgtaaaatgtacctggttggagtagcttgtccagtcttgacaaactactgaatttctgtcttgcctctccttcagtgccttttaaaaggttttcccttttctgatctgcatttcaacatagagtcacataaatgtccccctgagaaaccaatcccacttctttctaggagattgggtatcttagataatcttttggggttcctctgtgagtataggaatggtatccttcctaattatcttccaaaggaattattttgtgtgtgtgcctgtgtgtgtgtagagacataaaggagggtgatgtgattttcagctagtcctttcacattttcaataatgaggtaatcatgttacatacacattagtcctcagttataaagtgaatctcagatagaaattaaaagtgcagttgtgttaagactctttcatactaccctttagtcataaggagaaaaaaacactcaaatagtagaagcagcaagtagcaaacttcaggagagctactttctatccaaataatttaaaaaacacttttcacctactcctttcatggttataacacattggcagactttttgctggctctgggagccatgattttaatcacattctgcaaggtgacaaatgtcatacattccacattgtgtggtagccatctctttagactcatgtgttttggggaaaggaagaagttcttggctgagtactattttgaactttccagaaccctctcacaccagagacagttcttctctgttcagtttccaatccccgataatttgctaaaataacattgtacatccaagagagggaagaagagtatgtcagtatattatgcagaagatagatacagccttttcagaagatctccactagtttttgttccaaaaattcaagtttatgggagaaatctcaattagccaccttttcacagttgtgtggatataacatttgggggatctttctggactcctacctatctgtgcattttaccggcacctcaggaaaggagggtgaccaggttgtcttagcttgtactgcttggtgatctctgaggaccttctaattcagttgtaccccagtgttccatgtatagaaaaacttcattagaacaaactttacttgatatgaaactcctattaacagtctttttttgaaataaaaagtagcttgagctttcttttaaaatcatgtatcttgattgttgatttaatgaaggatttccttttaatgctgcttttgagcttcaaggtaataggacagcaggaacctaaaatatctgccatcatctgccataggaaagatacccagagacccatcatgttctctttttgttgttacactgttgggtgggtataacaattggaaaatgaacaaactgattgattgtgcaaactactttttatgacaagcctaaaccctcataatgcggcagcttaaagtgtatacatatgcactaactttgatcaattatattctcatatctgttagctacacagtctcctattatctcaattgcttatgtgcatatggaatatgttacttaaaacgtgtgcattcttactgaaaatgttttcaaaggaaggtatcagctgtgggctaattgccaccaatttcagcctgccacgattcttggaaatatgtcttccaagtgccatccatcatcagtaggacaagtgtcgggagtttgtttatttttttccagtagcaacgatgggttacatggagccatgaaacctccttctggcctcccttgtgattaatggcatgtgtttgtaaaatggatagctggggttggcagatggctagagaagaatcgcctttggtttaaaatgtatgtggtcccctaatgattgtgaccccattctgtaatcaactgagctagttccaataaagttaagcaggtttaaatccactttgtgcctatcttttcactgacaataaagttagctattttaaaatgca

SEQ ID NO: 450482 - DNA, 6254 bp, Homo sapiens
ggagtgggacatgcgtagaggaggagtcacaacgctgtgcgtacatcggctcacagaggatgtgggctagcttggacagcacacaggaggagcctattcagctatgcctcggagcgagcagagagtcgtcaccttgtcttctttgccttcagggagctgctaagaaggacaaataagatagcagagtgaaagagcttttgtctccttagaaggaaggctgagaaactaaaggccagcgcaggacatctcattgccattgtcagccaggaactcgcagcctcacagccctacttcttctctgacctctggggggtccttgcccttgctacaatctccaccatccactagattgtctcctgcccgacaccccttggtcccaaaccagggagaccattcagctcacctgcctaggccgcagcagcatttccttcctaatcaggctcaccagggggatcattaccgtctctcccaacctggcctgagtcagcagcagcagcaacagcagcagcagcaccatcatcaccatcaccaccaacaacagcagcagcagcagccacagcagcagccaggagaagcctattcagctatgcctcgggctcagccatcctctgcttcttatcagccagtgccagcagacccttttgccattgtttccagagcccagcagatggttgagatcctctcagacgagaaccggaacttgaggcaagagttggaaggatgctatgagaaggtggcaagactgcagaaggtggagacagaaatccagcgcgtctcggaggcatatgagaacctcgtgaagtcatcctccaaaagagaggccctagagaaagccatgagaaacaagctagagggcgagattcggaggatgcatgatttcaacagggatctgagagagcgtctagagactgccaacaagcagcttgcagagaaggaatatgaggggtcagaggacaccagaaaaaccatctcgcagctctttgcaaaaaataaagaaagccagcgtgagaaggagaagctggaagcggagctggccactgcccgttctaccaatgaggaccaaagacgacacatcgaaatccgagatcaggccctgagtaatgcccaggccaaggtggtaaagctggaagaagagctgaaaaagaagcaagtgtacgttgacaaggtggagaagatgcagcaggcccttgtacagctccaggcagcatgtgaaaaacgtgagcagctagagcaccgtctccggacacgactggagagggaactggaatccctgagaatccagcagcgtcagggcaactgtcagcccaccaacgtttcagaatacaatgctgctgcactgatggagctccttcgggagaaagaggagaggattctggctctggaagctgatatgacaaagtgggagcagaaatatttggaggagaatgtgatgagacattttgctctggatgctgctgcaactgtggctgctcagagggacacaacagtcatcagtcactctcctaacaccagctatgacacagctctagaagctcgcatccagaaagaggaggaagaaatcttgatggccaataagcgttgccttgacatggagggcaggattaagaccctccatgcccagattattgagaaggatgccatgatcaaagtactccagcagcgttcccggaaggagccgagcaagacagagcagctgtcgtgcatgcggccagcgaagtctctgatgtccatttccaatgctggatcaggcttgctctcccactcatccaccctgactggctcccccatcatggaagaaaagcgagacgacaagagctggaaggggagcctaggcattctcctgggtggagactaccgtgctgaatatgtcccttccacaccctcgcctgtgccaccctcgactcccctgctctcggctcactccaagacaggcagccgagactgcagtacccaaactgaacgtgggacggaatcgaacaaaactgcagctgttgctcccatctctgttcctgctccagttgctgctgccgccactgctgccgccatcactgccactgctgccaccatcaccaccaccatggtagctgctgctccagttgctgttgctgctgctgctgctccagctgctgctgctgccccgtctccagccactgccgctgctactgctgctgctgtttctccagctgctgctggtcagattccagctgctgcctctgttgcctcagctgctgccgttgctccttctgctgctgctgctgctgctgttcaggttgctccagctgctccggctccagttccagctccggctctggttccggttccagctccagcagcggctcaggcttctgctcctgctcagactcaggcaccaacttcagctccggctgtggctccaactccagctccaactccaactccagctgtggctcaggctgaggttcctgcaagtccagctaccggtcctggaccacatcgtttgtctataccaagtttgacctgcaatccagacaaaacagatgggcctgtgttccactccaatactctggaaagaaaaactcccattcagatcctgggacaagagcctgatgcagagatggtggaatatctcatctaaacggccaaatcaagagctgcagattatcagcaaaaatgcttttaatcattttcccccttttattggttcttgttttgagggtgaggacaagggttgtggggaggggatgttttttaacaggactttttattggaacaatgtactacttgagtaataccatgtgaacaccagtctattttggtatgcttagggagtacctctaaagacagattaatcagaatgtgctctaaagcttattgtttgaatttatacgaatactgggactgttaacaggtggctatacatcgacgttttcaatgtgcttaaatttgtttaaattttccatattctagatcattttttattgaagagcacagtatgtgtggaagacagtgtataacacgtagtttggaagtgggaagctagagagaattgagtgtgtgctgttttgtatagttactatcctgtgcagcagctggagaaagcactcacctcaggcttacaaaagggaatagtttcaggagctatgtaagctggaaaaaaggtagggagttttggggtgcagaagggtactggagctaattttttcttccagtttcccagctaccctgccccagggaattgtgtttgtcttcatttcagtggtgctttggaaatggattcttttggttccctcctggaggttcatacattcatatatatgctctggagtaatttatgcatttggataattaatatattgctttcagatgctgggagagtacattaactgagtgatgcgcaacttcctctctcttagggaattagaccatcagaggccttgatggagagttgcatggggtgctatatgcagacttccatggtttgtgtgtagccatgaacacagcttgcttgcatttagtaagaccaatcagcttagtgtttatttcttctacagcacagattcactggctgggtctccagtctcaaattgccaatcatttgcaaagtgaggaaggatctttgttgacaggttgaatgctttgaatttctggtgactactttgaaataacttgttttgtttgtcaaattctaagcatatgtcttaaaaggcatttttgactatcacctccaagggaatagcttgagaaacccaaagtactatgctgcagtcgggggagaggtggattgcagcagtatcctcaactacctcttctcactgtcagtgacaccatcttggaatacctttgggaagcagcaggaaatgtgcatgtgggtagagatcaaaggaggcaatggctccaagccttgccatagggctgcctccaaggacacagaaggatgccagttgccacaggtccctgccctgtgtcacctgtctgcccttcattaaggtgagaaatctgcagatagcatcattaagatcagttttaaggggtatagggagggtgagggaagtggggggtgttaggtaagggttgggggtagaggttttgggatgtcttagttagaaaccagattaatagaagagtaggcctgatatattacatcatgagccatagtggtgggaaagaactttagcaatatagccctacctcctcattttagtgatgaggaatctgagaactggagaggttcagtgactttttgaaagtcatacaacacagctaaccattatgccaatcaccatgcttattttgggaaactctttatcttttttaaattccattttatgaaaaggcatcttcatggtccagggaatatgtatcttgtaaaatgtacctggttggagtagcttgtccagtcttgacaaactactgaatttctgtcttgcctctccttcagtgccttttaaaaggttttcccttttctgatctgcatttcaacatagagtcacataaatgtccccctgagaaaccaatcccacttctttctaggagattgggtatcttagataatcttttggggttcctctgtgagtataggaatggtatccttcctaattatcttccaaaggaattattttgtgtgtgtgcctgtgtgtgtgtagagacataaaggagggtgatgtgattttcagctagtcctttcacattttcaataatgaggtaatcatgttacatacacattagtcctcagttataaagtgaatctcagatagaaattaaaagtgcagttgtgttaagactctttcatactaccctttagtcataaggagaaaaaaacactcaaatagtagaagcagcaagtagcaaacttcaggagagctactttctatccaaataatttaaaaaacacttttcacctactcctttcatggttataacacattggcagactttttgctggctctgggagccatgattttaatcacattctgcaaggtgacaaatgtcatacattccacattgtgtggtagccatctctttagactcatgtgttttggggaaaggaagaagttcttggctgagtactattttgaactttccagaaccctctcacaccagagacagttcttctctgttcagtttccaatccccgataatttgctaaaataacattgtacatccaagagagggaagaagagtatgtcagtatattatgcagaagatagatacagccttttcagaagatctccactagtttttgttccaaaaattcaagtttatgggagaaatctcaattagccaccttttcacagttgtgtggatataacatttgggggatctttctggactcctacctatctgtgcattttaccggcacctcaggaaaggagggtgaccaggttgtcttagcttgtactgcttggtgatctctgaggaccttctaattcagttgtaccccagtgttccatgtatagaaaaacttcattagaacaaactttacttgatatgaaactcctattaacagtctttttttgaaataaaaagtagcttgagctttcttttaaaatcatgtatcttgattgttgatttaatgaaggatttccttttaatgctgcttttgagcttcaaggtaataggacagcaggaacctaaaatatctgccatcatctgccataggaaagatacccagagacccatcatgttctctttttgttgttacactgttgggtgggtataacaattggaaaatgaacaaactgattgattgtgcaaactactttttatgacaagcctaaaccctcataatgcggcagcttaaagtgtatacatatgcactaactttgatcaattatattctcatatctgttagctacacagtctcctattatctcaattgcttatgtgcatatggaatatgttacttaaaacgtgtgcattcttactgaaaatgttttcaaaggaaggtatcagctgtgggctaattgccaccaatttcagcctgccacgattcttggaaatatgtcttccaagtgccatccatcatcagtaggacaagtgtcgggagtttgtttatttttttccagtagcaacgatgggttacatggagccatgaaacctccttctggcctcccttgtgattaatggcatgtgtttgtaaaatggatagctggggttggcagatggctagagaagaatcgcctttggtttaaaatgtatgtggtcccctaatgattgtgaccccattctgtaatcaactgagctagttccaataaagttaagcaggtttaaatcca

SEQ ID NO: 450483 - DNA, 4883 bp, Homo sapiens
ccaggagctgccttggcagtcacgccccttccttccgaggagctttctggctgcctaaactggtagaccccctgaattactcctccatctccgctctctttcgcctcctcttctcttagttctctccgcctccccctcaactaccaccacctccagtcagtctcgcctccggctatccgctgctccaccctctggcccggtatcctgcctgtccgctgccaccaaggagagcccggacggagcagcgaggaggggagcagccgggagttggggcttcccccctgcccatccctggccgctggcccgggaccgaagccacttgagcgagcagagagtcgtcaccttgtcttctttgccttcagggagctgctaagaaggacaaataagatagcagagtgaaagagcttttgtctccttagaaggaaggctgagaaactaaaggccagcgcaggacatctcattgccattgtcagccaggaactcgcagcctcacagccctacttcttctctgacctctggggggtccttgcccttgctacaatctccaccatccactagattgtctcctgcccgacaccccttggtcccaaaccagggagaccattcagctcacctgcctaggccgcagcagcatttccttcctaatcaggctcaccagggggatcattaccgtctctcccaacctggcctgagtcagcagcagcagcaacagcagcagcagcaccatcatcaccatcaccaccaacaacagcagcagcagcagccacagcagcagccaggagaagcctattcagctatgcctcgggctcagccatcctctgcttcttatcagccagtgccagcagacccttttgccattgtttccagagcccagcagatggttgagatcctctcagacgagaaccggaacttgaggcaagagttggaaggatgctatgagaaggtggcaagactgcagaaggtggagacagaaatccagcgcgtctcggaggcatatgagaacctcgtgaagtcatcctccaaaagagaggccctagagaaagccatgagaaacaagctagagggcgagattcggaggatgcatgatttcaacagggatctgagagagcgtctagagactgccaacaagcagcttgcagagaaggaatatgaggggtcagaggacaccagaaaaaccatctcgcagctctttgcaaaaaataaagaaagccagcgtgagaaggagaagctggaagcggagctggccactgcccgttctaccaatgaggaccaaagacgacacatcgaaatccgagatcaggccctgagtaatgcccaggccaaggtggtaaagctggaagaagagctgaaaaagaagcaagtgtacgttgacaaggtggagaagatgcagcaggcccttgtacagctccaggcagcatgtgaaaaacgtgagcagctagagcaccgtctccggacacgactggagagggaactggaatccctgagaatccagcagcgtcagggcaactgtcagcccaccaacgtttcagaatacaatgctgctgcactgatggagctccttcgggagaaagaggagaggattctggctctggaagctgatatgacaaagtgggagcagaaatatttggaggagaatgtgatgagacattttgctctggatgctgctgcaactgtggctgctcagagggacacaacagtcatcagtcactctcctaacaccagctatgacacagctctagaagctcgcatccagaaagaggaggaagaaatcttgatggccaataagcgttgccttgacatggagggcaggattaagaccctccatgcccagattattgagaaggatgccatgatcaaagtactccagcagcgttcccggaaggagccgagcaagacagagcagctgtcgtgcatgcggccagcgaagtctctgatgtccatttccaatgctggatcaggcttgctctcccactcatccaccctgactggctcccccatcatggaagaaaagcgagacgacaagagctggaaggggagcctaggcattctcctgggtggagactaccgtgctgaatatgtcccttccacaccctcgcctgtgccaccctcgactcccctgctctcggctcactccaagacaggcagccgagactgcagtacccaaactgaacgtgggacggaatcgaacaaaactgcagctgttgctcccatctctgttcctgctccagttgctgctgccgccactgctgccgccatcactgccactgctgccaccatcaccaccaccatggtagctgctgctccagttgctgttgctgctgctgctgctccagctgctgctgctgccccgtctccagccactgccgctgctactgctgctgctgtttctccagctgctgctggtcagattccagctgctgcctctgttgcctcagctgctgccgttgctccttctgctgctgctgctgctgctgttcaggttgctccagctgctccggctccagttccagctccggctctggttccggttccagctccagcagcggctcaggcttctgctcctgctcagactcaggcaccaacttcagctccggctgtggctccaactccagctccaactccaactccagctgtggctcaggctgaggttcctgcaagtccagctaccggtcctggaccacatcgtttgtctataccaagtttgacctgcaatccagacaaaacagatgggcctgtgttccactccaatactctggaaagaaaaactcccattcagatcctgggacaagagcctgatgcagagatggtggaatatctcatctaaacggccaaatcaagagctgcagattatcagcaaaaatgcttttaatcattttcccccttttattggttcttgttttgagggtgaggacaagggttgtggggaggggatgttttttaacaggactttttattggaacaatgtactacttgagtaataccatgtgaacaccagtctattttggtatgcttagggagtacctctaaagacagattaatcagaatgtgctctaaagcttattgtttgaatttatacgaatactgggactgttaacaggtggctatacatcgacgttttcaatgtgcttaaatttgtttaaattttccatattctagatcattttttattgaagagcacagtatgtgtggaagacagtgtataacacgtagtttggaagtgggaagctagagagaattgagtgtgtgctgttttgtatagttactatcctgtgcagcagctggagaaagcactcacctcaggcttacaaaagggaatagtttcaggagctatgtaagctggaaaaaaggtagggagttttggggtgcagaagggtactggagctaattttttcttccagtttcccagctaccctgccccagggaattgtgtttgtcttcatttcagtggtgctttggaaatggattcttttggttccctcctggaggttcatacattcatatatatgctctggagtaatttatgcatttggataattaatatattgctttcagatgctgggagagtacattaactgagtgatgcgcaacttcctctctcttagggaattagaccatcagaggccttgatggagagttgcatggggtgctatatgcagacttccatggtttgtgtgtagccatgaacacagcttgcttgcatttagtaagaccaatcagcttagtgtttatttcttctacagcacagattcactggctgggtctccagtctcaaattgccaatcatttgcaaagtgaggaaggatctttgttgacaggttgaatgctttgaatttctggtgactactttgaaataacttgttttgtttgtcaaattctaagcatatgtcttaaaaggcatttttgactatcacctccaagggaatagcttgagaaacccaaagtactatgctgcagtcgggggagaggtggattgcagcagtatcctcaactacctcttctcactgtcagtgacaccatcttggaatacctttgggaagcagcaggaaatgtgcatgtgggtagagatcaaaggaggcaatggctccaagccttgccatagggctgcctccaaggacacagaaggatgccagttgccacaggtccctgccctgtgtcacctgtctgcccttcattaaggtgagaaatctgcagatagcatcattaagatcagttttaaggggtatagggagggtgagggaagtggggggtgttaggtaagggttgggggtagaggttttgggatgtcttagttagaaaccagattaatagaagagtaggcctgatatattacatcatgagccatagtggtgggaaagaactttagcaatatagccctacctcctcattttagtgatgaggaatctgagaactggagaggttcagtgactttttgaaagtcatacaacacagctaaccattatgccaatcaccatgcttattttgggaaactctttatcttttttaaattccattttatgaaaaggcatcttcatggtccagggaatatgtatcttgtaaaatgtacctggttggagtagcttgtccagtcttgacaaactactgaatttctgtcttgcctctccttcagtgccttttaaaaggttttcccttttctgatctgcatttcaacatagagtcacataaatgtccccctgagaaaccaatcccacttctttctaggagattgggtatcttagataatcttttggggttcctctgtgagtataggaatggtatccttcctaattatcttccaaaggaattattttgtgtgtgtgcctgtgtgtgtgttctagtgtggaagtggaggcgattgcttcccagcacaagcccgtttgactgtc

SEQ ID NO: 450484 - DNA, 868 bp, Homo sapiens
  misc_feature (304)..(304): n is a, c, g, or t
ctcttaatattacccctcatgatgatcgctttcaccgcgtacccaagtgttacttgctaggatgcgcggtcccgtaaatatgtgaatcaagcattcaataacgttgaccggtctgtatgctatctaattgcaagagttcggctagcatgtaggataccaagcatgagtgacgtcgtgagtgaactctgcgtgctagagattgacccatcactgtctatgtggcgatgagaagtagagtccgagaacgatcctggccctactatgatactctctagacgtcatctgccgagctaaagtactcaanatatgtgatgagagagtgtactcaagtggtgattgacgggtccactcgcgagtaatgcatcagggttgcctatgggcatggttccgcctatccttgatcatatgactttactgatgtcagttcatcctgcatgggaaaaatgttggaatgggagtctgaaatggggctactgtttcagtcctaacgtgctgtgtgacattgggacaacactttccctctctggacctcagtttccctctgtatacaaggatcagattcttgctgtgacccaagaactcctgaaatcatatagaaaggctggggtgggccctgtcattcgtggttgatttcaatacactcaagtgccattcatcctttaagaaaaacatctggatatcaaggtggaaatggcccatttaatgattgattatatcattttgtggatatagttataatctgatgggcctggctgggagtggaagaagggaagccttttgcaaatagtagagtatcagttgcaggtgccaatgactaactttttgaattctatgttggcattaacaataaagcattttgcaaacactg

SEQ ID NO: 450485 - DNA, 455 bp, Homo sapiens
ggcacgaggtgtatacaagaatctgatccttgtatacagagggaaactgaggtccagagagggaaagtgttgtcccaatgtcacacagcacgttaggactgaaacagtagccccatctcagtttccctctgtatacaaggatcagattcttgctgtgacccaagaactcctgaaatcatatagaaaggctggggtgggccctgtcattcgtggttgatttcaatacactcaagtgccattcatcctttaagaaaaacatctggatatcaaggtggaaatggcccatttaatgattgattatatcattttgtggatatagttataatctgatgggcctggctgggagtggaagaagggaagccttttgcaaatagtagagtatcagttgcaggtgccaatgactaactttttgaattctatgttggcattaacaataaagcattttgcaaacactg

SEQ ID NO: 450486 - DNA, 502 bp, Homo sapiens
  misc_feature (117)..(117): n is a, c, g, or t
aggcctggagagaggtgagaggcctggagagaagtgagaggcctggcaggcgagtgtgaaggcctggagagaggtgagaggcctggagagaagtgagaggcctggcaggcgagtgtnaaggcctggagagaggtgagaggcctggagagaggtaagaggcctggcaggtgagtgtgaaggcctggagagaggtgagaggcctggagagaggtgagaggcctggagagaggcgagaggcctggcaggtgagtgtgaaggcctggagggaggtgagaggcctggagagaggtgagaggcctggagagaggtgagaggcctggcaggcgagtgtgaaggcctggagagaggtgagaggcctggagagaggtgagaggcctggagagaggcgagaagtggaagaagggaagccttttgcaaatagtagagtatcagttgcaggtgccaatgactaactttttgaattctatgttggcattaacaataaagcattttgcaaacactg

SEQ ID NO: 450487 - DNA, 2304 bp, Homo sapiens
aaatgctggctgcaatccagccagccctctgccctttctgagcccgagggactgccacctccactgtgtgcacactcagctacgggacacatttcaggtatccaaggcagcagaggtgagtgggtcccccgagctctgtgaccttatgctccacactaactctggcagagcctccgtttcctcatagaacaaagaacagccaccatgcagctcttcctcctcttgtgcctggtgcttctcagccctcagggggcctcccttcaccgccaccacccccgggagatgaagaagagagtcgaggacctccatgtaggtgccacggtggcccccagcagcagaagggactttacctttgacctctacagggccttggcttccgctgcccccagccagaacatcttcttctcccctgtgagcatctccatgagcctggccatgctctccctgggggctgggtccagcacaaagatgcagatcctggagggcctgggcctcaacctccagaaaagctcagagaaggagctgcacagaggctttcagcagctccttcaggaactcaaccagcccagagatggcttccagctgagcctcggcaatgcccttttcaccgacctggtggtagacctgcaggacaccttcgtaagtgccatgaagacgctgtacctggcagacactttccccaccaactttagggactctgcaggggccatgaagcagatcaatgattatgtggcaaagcaaacgaagggcaagattgtggacttgcttaagaacctcgatagcaatgcggtcgtgatcatggtgaattacatcttctttaaagctaagtgggagacaagcttcaaccacaaaggcacccaagagcaagacttctacgtgacctcggagactgtggtgcgggtacccatgatgagccgcgaggatcagtatcactacctcctggaccggaacctctcctgcagggtggtgggggtcccctaccaaggcaatgccacggctttgttcattctccccagtgagggaaagatgcagcaggtggagaatggactgagtgagaaaacgctgaggaagtggcttaagatgttcaaaaagaggcagctcgagctttaccttcccaaattctccattgagggctcctatcagctggagaaagtcctccccagtctggggatcagtaacgtcttcacctcccatgctgatctgtccggcatcagcaaccactcaaatatccaggtgtctgagatggtgcacaaagctgtggtggaggtggacgagtcgggaaccagagcagcggcagccacggggacaatattcactttcaggtcggcccgcctgaactctcagaggctagtgttcaacaggccctttctgatgttcattgtggataacaacatcctcttccttggcaaagtgaaccgcccctgaggtggggcttctcctgaaatctacaggcctcagggtgggagatgaagggggctatgctatggcccatctgtatgctggtagctagtgatttacacaggtttagttgactaatgaggcattacaaataatattactctatgatgattgcttccacccacacgactgcaacatacaggtgccttggggaaatgtggagaacattcaatcttgccgtcactattcatcaatgaagattaacactgagatccagagaggctggatgacttgctcaagttcaccagcatggtagtggcaaagagaggtccagagtcctggcccttgatgcccagctcagtgccacaaagctcaataggagggatgttccagtggatgagggccaccaggaagcacaggtccaaggctggtcccacacttatcagcagcaacaactgtcagttcatcctgcatgggaaaaatgttggaatgggagtctgaaatggggctactgtttcagtcctaacgtgctgtgtgacattgggacaacactttccctctctggacctcagtttccctctgtatacaaggatcagattcttgctgtgacccaagaactcctgaaatcatatagaaaggctggggtgggccctgtcattcgtggttgatttcaatacactcaagtgccattcatcctttaagaaaaacatctggatatcaaggtggaaatggcccatttaatgattgattatatcattttgtggatatagttataatctgatgggcctggctgggagtggaagaagggaagccttttgcaaatagtagagtatcagttgcaggtgccaatgactaactttttgaattctatgttggcattaacaataaagcattttgcaaacactg

SEQ ID NO: 450488 - DNA, 2208 bp, Homo sapiens
aaatgctggctgcaatccagccagccctctgccctttctgagcccgagggactgccacctccactgtgtgcacactcagctacgggacacaaacaaagaacagccaccatgcagctcttcctcctcttgtgcctggtgcttctcagccctcagggggcctcccttcaccgccaccacccccgggagatgaagaagagagtcgaggacctccatgtaggtgccacggtggcccccagcagcagaagggactttacctttgacctctacagggccttggcttccgctgcccccagccagaacatcttcttctcccctgtgagcatctccatgagcctggccatgctctccctgggggctgggtccagcacaaagatgcagatcctggagggcctgggcctcaacctccagaaaagctcagagaaggagctgcacagaggctttcagcagctccttcaggaactcaaccagcccagagatggcttccagctgagcctcggcaatgcccttttcaccgacctggtggtagacctgcaggacaccttcgtaagtgccatgaagacgctgtacctggcagacactttccccaccaactttagggactctgcaggggccatgaagcagatcaatgattatgtggcaaagcaaacgaagggcaagattgtggacttgcttaagaacctcgatagcaatgcggtcgtgatcatggtgaattacatcttctttaaagctaagtgggagacaagcttcaaccacaaaggcacccaagagcaagacttctacgtgacctcggagactgtggtgcgggtacccatgatgagccgcgaggatcagtatcactacctcctggaccggaacctctcctgcagggtggtgggggtcccctaccaaggcaatgccacggctttgttcattctccccagtgagggaaagatgcagcaggtggagaatggactgagtgagaaaacgctgaggaagtggcttaagatgttcaaaaagaggcagctcgagctttaccttcccaaattctccattgagggctcctatcagctggagaaagtcctccccagtctggggatcagtaacgtcttcacctcccatgctgatctgtccggcatcagcaaccactcaaatatccaggtgtctgagatggtgcacaaagctgtggtggaggtggacgagtcgggaaccagagcagcggcagccacggggacaatattcactttcaggtcggcccgcctgaactctcagaggctagtgttcaacaggccctttctgatgttcattgtggataacaacatcctcttccttggcaaagtgaaccgcccctgaggtggggcttctcctgaaatctacaggcctcagggtgggagatgaagggggctatgctatggcccatctgtatgctggtagctagtgatttacacaggtttagttgactaatgaggcattacaaataatattactctatgatgattgcttccacccacacgactgcaacatacaggtgccttggggaaatgtggagaacattcaatcttgccgtcactattcatcaatgaagattaacactgagatccagagaggctggatgacttgctcaagttcaccagcatggtagtggcaaagagaggtccagagtcctggcccttgatgcccagctcagtgccacaaagctcaataggagggatgttccagtggatgagggccaccaggaagcacaggtccaaggctggtcccacacttatcagcagcaacaactgtcagttcatcctgcatgggaaaaatgttggaatgggagtctgaaatggggctactgtttcagtcctaacgtgctgtgtgacattgggacaacactttccctctctggacctcagtttccctctgtatacaaggatcagattcttgctgtgacccaagaactcctgaaatcatatagaaaggctggggtgggccctgtcattcgtggttgatttcaatacactcaagtgccattcatcctttaagaaaaacatctggatatcaaggtggaaatggcccatttaatgattgattatatcattttgtggatatagttataatctgatgggcctggctgggagtggaagaagggaagccttttgcaaatagtagagtatcagttgcaggtgccaatgactaactttttgaattctatgttggcattaacaataaagcattttgcaaacactg

SEQ ID NO: 450489 - DNA, 2060 bp, Homo sapiens
aaatgctggctgcaatccagccagccctctgccctttctgagcccgagggactgccacctccactgtgtgcacactcagctacgggacacaaacaaagaacagccaccatgcagctcttcctcctcttgtgcctggtgcttctcagccctcagggggcctcccttcaccgccaccacccccgggagatgaagaagagagtcgaggacctccatgtaggtgccacggtggcccccagcagcagaagggactttacctttgacctctacagggccttggcttccgctgcccccagccagaacatcttcttctcccctgtgagcatctccatgagcctggccatgctctccctgggggctgggtccagcacaaagatgcagatcctggagggcctgggcctcaacctccagaaaagctcagagaaggagctgcacagaggctttcagcagctccttcaggaactcaaccagcccagagatggcttccagctgagcctcggcaatgcccttttcaccgacctggtggtagacctgcaggacaccttcgtaagtgccatgaagacgctgtacctggcagacactttccccaccaactttagggactctgcaggggccatgaagcagatcaatgattatgtggcaaagcaaacgaagggcaagattgtggacttgcttaagaacctcgatagcaatgcggtcgtgatcatggtgaattacatcttctttaaagctaagtgggagacaagcttcaaccacaaaggcacccaagagcaagacttctacgtgacctcggagactgtggtgcgggtacccatgatgagccgcgaggatcagtatcactacctcctggaccggaacctctcctgcagggtggtgggggtcccctaccaaggcaatgccacggctttgttcattctccccagtgagggaaagatgcagcaggtggagaatggactgagtgagaaaacgctgaggaagtggcttaagatgttcaaaaagagatggtgcacaaagctgtggtggaggtggacgagtcgggaaccagagcagcggcagccacggggacaatattcactttcaggtcggcccgcctgaactctcagaggctagtgttcaacaggccctttctgatgttcattgtggataacaacatcctcttccttggcaaagtgaaccgcccctgaggtggggcttctcctgaaatctacaggcctcagggtgggagatgaagggggctatgctatggcccatctgtatgctggtagctagtgatttacacaggtttagttgactaatgaggcattacaaataatattactctatgatgattgcttccacccacacgactgcaacatacaggtgccttggggaaatgtggagaacattcaatcttgccgtcactattcatcaatgaagattaacactgagatccagagaggctggatgacttgctcaagttcaccagcatggtagtggcaaagagaggtccagagtcctggcccttgatgcccagctcagtgccacaaagctcaataggagggatgttccagtggatgagggccaccaggaagcacaggtccaaggctggtcccacacttatcagcagcaacaactgtcagttcatcctgcatgggaaaaatgttggaatgggagtctgaaatggggctactgtttcagtcctaacgtgctgtgtgacattgggacaacactttccctctctggacctcagtttccctctgtatacaaggatcagattcttgctgtgacccaagaactcctgaaatcatatagaaaggctggggtgggccctgtcattcgtggttgatttcaatacactcaagtgccattcatcctttaagaaaaacatctggatatcaaggtggaaatggcccatttaatgattgattatatcattttgtggatatagttataatctgatgggcctggctgggagtggaagaagggaagccttttgcaaatagtagagtatcagttgcaggtgccaatgactaactttttgaattctatgttggcattaacaataaagcattttgcaaacactg

SEQ ID NO: 450490 - DNA, 1930 bp, Homo sapiens
aaatgctggctgcaatccagccagccctctgccctttctgagcccgagggactgccacctccactgtgtgcacactcagctacgggacacaaacaaagaacagccaccatgcagctcttcctcctcttgtgcctggtgcttctcagccctcagggggcctcccttcaccgccaccacccccgggagatgaagaagagagtcgaggacctccatgtaggtgccacggtggcccccagcagcagaagggactttacctttgacctctacagggccttggcttccgctgcccccagccagaacatcttcttctcccctgtgagcatctccatgagcctggccatgctctccctgggggctgggtccagcacaaagatgcagatcctggagggcctgggcctcaacctccagaaaagctcagagaaggagctgcacagaggctttcagcagctccttcaggaactcaaccagcccagagatggcttccagctgagcctcggcaatgcccttttcaccgacctggtggtagacctgcaggacaccttcgtaagtgccatgaagacgctgtacctggcagacactttccccaccaactttagggactctgcaggggccatgaagcagatcaatgattatgtggcaaagcaaacgaagggcaagattgtggacttgcttaagaacctcgatagcaatgcggtcgtgatcatggtgaattacatcttctttaaagctaagtgggagacaagcttcaaccacaaaggcacccaagagcaagacttctacgtgacctcggagactgtggtgcgggtacccatgatgagccgcgaggatcagtatcactacctcctggaccggaacctctcctgcagggtggtgggggtcccctaccaaggcaatgccacggctttgttcattctccccagtgagggaaagatgcagcaggtggagaatggactgagtgagaaaacgctgaggaagtggcttaagatgttcaaaaagaggcagctcgagctttaccttcccaaattctccattgagggctcctatcagctggagaaagtcctccccagtctggggatcagtaacgtcttcacctcccatgctgatctgtccggcatcagcaaccactcaaatatccaggtgtctgagatggtgcacaaagctgtggtggaggtggacgagtcgggaaccagagcagcggcagccacggggacaatattcactttcaggtgccttggggaaatgtggagaacattcaatcttgccgtcactattcatcaatgaagattaacactgagatccagagaggctggatgacttgctcaagttcaccagcatggtagtggcaaagagaggtccagagtcctggcccttgatgcccagctcagtgccacaaagctcaataggagggatgttccagtggatgagggccaccaggaagcacaggtccaaggctggtcccacacttatcagcagcaacaactgtcagttcatcctgcatgggaaaaatgttggaatgggagtctgaaatggggctactgtttcagtcctaacgtgctgtgtgacattgggacaacactttccctctctggacctcagtttccctctgtatacaaggatcagattcttgctgtgacccaagaactcctgaaatcatatagaaaggctggggtgggccctgtcattcgtggttgatttcaatacactcaagtgccattcatcctttaagaaaaacatctggatatcaaggtggaaatggcccatttaatgattgattatatcattttgtggatatagttataatctgatgggcctggctgggagtggaagaagggaagccttttgcaaatagtagagtatcagttgcaggtgccaatgactaactttttgaattctatgttggcattaacaataaagcattttgcaaacactg

SEQ ID NO: 450491 - DNA, 2310 bp, Homo sapiens
aaatgctggctgcaatccagccagccctctgccctttctgagcccgagggactgccacctccactgtgtgcacactcagctacgggacacatttcaggtatccaaggcagcagaggtgagtgggtcccccgagctctgtgaccttatgctccacactaactctggcagagcctccgtttcctcatagaacaaagaacagccaccatgcagctcttcctcctcttgtgcctggtgcttctcagccctcagggggcctcccttcaccgccaccacccccgggagatgaagaagagagtcgaggacctccatgtaggtgccacggtggcccccagcagcagaagggactttacctttgacctctacagggccttggcttccgctgcccccagccagaacatcttcttctcccctgtgagcatctccatgagcctggccatgctctccctgggggctgggtccagcacaaagatgcagatcctggagggcctgggcctcaacctccagaaaagctcagagaaggagctgcacagaggctttcagcagctccttcaggaactcaaccagcccagagatggcttccagctgagcctcggcaatgcccttttcaccgacctggtggtagacctgcaggacaccttcgtaagtgccatgaagacgctgtacctggcagacactttccccaccaactttagggactctgcaggggccatgaagcagatcaatgattatgtggcaaagcaaacgaagggcaagattgtggacttgcttaagaacctcgatagcaatgcggtcgtgatcatggtgaattacatcttctttaaagctaagtgggagacaagcttcaaccacaaaggcacccaagagcaagacttctacgtgacctcggagactgtggtgcgggtacccatgatgagccgcgaggatcagtatcactacctcctggaccggaacctctcctgcagggtggtgggggtcccctaccaaggcaatgccacggctttgttcattctccccagtgagggaaagatgcagcaggtggagaatggactgagtgagaaaacgctgaggaagtggcttaagatgttcaaaaagaggcagctcgagctttaccttcccaaattctccattgagggctcctatcagctggagaaagtcctccccagtctggggatcagtaacgtcttcacctcccatgctgatctgtccggcatcagcaaccactcaaatatccaggtgtctgagatggtgcacaaagctgtggtggaggtggacgagtcgggaaccagagcagcggcagccacggggacaatattcactttcaggtcggcccgcctgaactctcagaggctagtgttcaacaggccctttctgatgttcattgtggataacaacatcctcttccttggcaaagtgaaccgcccctgaggtggggcttctcctgaaatctacaggcctcagggtgggagatgaagggggctatgctatggcccatctgtatgctggtagctagtgatttacacaggtttagttgactaatgaggcattacaaataatattactctatgatgattgcttccacccacacgactgcaacatacaggtgccttggggaaatgtggagaacattcaatcttgccgtcactattcatcaatgaagattaacactgagatccagagaggctggatgacttgctcaagttcaccagcatggtagtggcaaagagaggtccagagtcctggcccttgatgcccagctcagtgccacaaagctcaataggagggatgttccagtggatgagggccaccaggaagcacaggtccaaggctggtcccacacttatcagcagcaacaactgtcagttcatcctgcatgggaaaaatgttggaatgggagtctgaaatggggctactgtttcagtcctaacgtgctgtgtgacattgggacaacactttccctctctggacctcagtttccctctgtatacaaggatcagattcttgctgtgacccaagaactcctgaaatcatatagaaaggctggggtgggccctgtcattcgtggttgatttcaatacactcaagtgccattcatcctttaagaaaaacatctggatatcaaggtggaaatggcccatttaatgattgattatatcattttgtggatatagttataatctgatgggcctggctgggagtggaagaagggaagccttttgcaaaatgctttattgttaatgccaacatagaattcaaaaagttagtcattggcacctgcaactgacactctactatttgcaaaaggtcgacgcg

SEQ ID NO: 450492 - DNA, 2250 bp, Homo sapiens
aaatgctggctgcaatccagccagccctctgccctttctgagcccgagggactgccacctccactgtgtgcacactcagctacgggacacatttcaggtatccaaggcagcagaggtgagtgggtcccccgagctctgtgaccttatgctccacactaactctggcagagcctccgtttcctcatagaacaaagaacagccaccatgcagctcttcctcctcttgtgcctggtgcttctcagccctcagggggcctcccttcaccgccaccacccccgggagatgaagaagagagtcgaggacctccatgtaggtgccacggtggcccccagcagcagaagggactttacctttgacctctacagggccttggcttccgctgcccccagccagaacatcttcttctcccctgtgagcatctccatgagcctggccatgctctccctgggggctgggtccagcacaaagatgcagatcctggagggcctgggcctcaacctccagaaaaagcccagagatggcttccagctgagcctcggcaatgcccttttcaccgacctggtggtagacctgcaggacaccttcgtaagtgccatgaagacgctgtacctggcagacactttccccaccaactttagggactctgcaggggccatgaagcagatcaatgattatgtggcaaagcaaacgaagggcaagattgtggacttgcttaagaacctcgatagcaatgcggtcgtgatcatggtgaattacatcttctttaaagctaagtgggagacaagcttcaaccacaaaggcacccaagagcaagacttctacgtgacctcggagactgtggtgcgggtacccatgatgagccgcgaggatcagtatcactacctcctggaccggaacctctcctgcagggtggtgggggtcccctaccaaggcaatgccacggctttgttcattctccccagtgagggaaagatgcagcaggtggagaatggactgagtgagaaaacgctgaggaagtggcttaagatgttcaaaaagaggcagctcgagctttaccttcccaaattctccattgagggctcctatcagctggagaaagtcctccccagtctggggatcagtaacgtcttcacctcccatgctgatctgtccggcatcagcaaccactcaaatatccaggtgtctgagatggtgcacaaagctgtggtggaggtggacgagtcgggaaccagagcagcggcagccacggggacaatattcactttcaggtcggcccgcctgaactctcagaggctagtgttcaacaggccctttctgatgttcattgtggataacaacatcctcttccttggcaaagtgaaccgcccctgaggtggggcttctcctgaaatctacaggcctcagggtgggagatgaagggggctatgctatggcccatctgtatgctggtagctagtgatttacacaggtttagttgactaatgaggcattacaaataatattactctatgatgattgcttccacccacacgactgcaacatacaggtgccttggggaaatgtggagaacattcaatcttgccgtcactattcatcaatgaagattaacactgagatccagagaggctggatgacttgctcaagttcaccagcatggtagtggcaaagagaggtccagagtcctggcccttgatgcccagctcagtgccacaaagctcaataggagggatgttccagtggatgagggccaccaggaagcacaggtccaaggctggtcccacacttatcagcagcaacaactgtcagttcatcctgcatgggaaaaatgttggaatgggagtctgaaatggggctactgtttcagtcctaacgtgctgtgtgacattgggacaacactttccctctctggacctcagtttccctctgtatacaaggatcagattcttgctgtgacccaagaactcctgaaatcatatagaaaggctggggtgggccctgtcattcgtggttgatttcaatacactcaagtgccattcatcctttaagaaaaacatctggatatcaaggtggaaatggcccatttaatgattgattatatcattttgtggatatagttataatctgatgggcctggctgggagtggaagaagggaagccttttgcaaatagtagagtatcagttgcaggtgccaatgactaactttttgaattctatgttggcattaacaataaagcattttgcaaacactg

SEQ ID NO: 450493 - DNA, 1733 bp, Homo sapiens
gccccacaagaggaaattcatcgaacctcgtgccgaattcggcacgagtagacctgcaggacaccttcgtaagtgccatgaagacgctgtacctggcagacactttccccaccaactttagggactctgcaggggccatgaagcagatcaatgattatgtggcaaagcaaacgaagggcaagattgtggacttgcttaagaacctcgatagcaatgcggtcgtgatcatggtgaattacatcttctttaaagctaagtgggagacaagcttcaaccacaaaggcacccaagagcaagacttctacgtgacctcggagactgtggtgcgggtacccatgatgagccgcgaggatcagtatcactacctcctggaccggaacctctcctgcagggtggtgggggtcccctaccaaggcaatgccacggctttgttcattctccccagtgagggaaagatgcagcaggtggagaatggactgagtgagaaaacgctgaggaagtggcttaagatgttcaaaaagaggcagctcgagctttaccttcccaaattctccattgagggctcctatcagctggagaaagtcctccccagtctggggatcagtaacgtcttcacctcccatgctgatctgtccggcatcagcaaccactcaaatatccaggtgtctgagatggtgcacaaagctgtggtggaggtggacgagtcgggaaccagagcagcggcagccacggggacaatattcactttcaggtcggcccgcctgaactctcagaggctagtgttcaacaggccctttctgatgttcattgtggataacaacatcctcttccttggcaaagtgaaccgcccctgaggtggggcttctcctgaaatctacaggcctcagggtgggagatgaagggggctatgctatggcccatctgtatgctggtagctagtgatttacacaggtttagttgactaatgaggcattacaaataatattactctatgatgattgcttccacccacacgactgcaacatacaggtgccttggggaaatgtggagaacattcaatcttgccgtcactattcatcaatgaagattaacactgagatccagagaggctggatgacttgctcaagttcaccagcatggtagtggcaaagagaggtccagagtcctggcccttgatgcccagctcagtgccacaaagctcaataggagggatgttccagtggatgagggccaccaggaagcacaggtccaaggctggtcccacacttatcagcagcaacaactgtcagttcatcctgcatgggaaaaatgttggaatgggagtctgaaatggggctactgtttcagtcctaacgtgctgtgtgacattgggacaacactttccctctctggacctcagtttccctctgtatacaaggatcagattcttgctgtgacccaagaactcctgaaatcatatagaaaggctggggtgggccctgtcattcgtggttgatttcaatacactcaagtgccattcatcctttaagaaaaacatctggatatcaaggtggaaatggcccatttaatgattgattatatcattttgtggatatagttataatctgatgggcctggctgggagtggaagaagggaagccttttgcaaatagtagagtatcagttgcaggtgccaatgactaactttttgaattctatgttggcattaacaataaagcattttgcaaacactg

SEQ ID NO: 450494 - DNA, 1692 bp, Homo sapiens
aaatgctggctgcaatccagccagccctctgccctttctgagcccgagggactgccacctccactgtgtgcacactcagctacgggacacagggccatgaagcagatcaatgattatgtggcaaagcaaacgaagggcaagattgtggacttgcttaagaacctcgatagcaatgcggtcgtgatcatggtgaattacatcttctttaaagctaagtgggagacaagcttcaaccacaaaggcacccaagagcaagacttctacgtgacctcggagactgtggtgcgggtacccatgatgagccgcgaggatcagtatcactacctcctggaccggaacctctcctgcagggtggtgggggtcccctaccaaggcaatgccacggctttgttcattctccccagtgagggaaagatgcagcaggtggagaatggactgagtgagaaaacgctgaggaagtggcttaagatgttcaaaaagaggcagctcgagctttaccttcccaaattctccattgagggctcctatcagctggagaaagtcctccccagtctggggatcagtaacgtcttcacctcccatgctgatctgtccggcatcagcaaccactcaaatatccaggtgtctgagatggtgcacaaagctgtggtggaggtggacgagtcgggaaccagagcagcggcagccacggggacaatattcactttcaggtcggcccgcctgaactctcagaggctagtgttcaacaggccctttctgatgttcattgtggataacaacatcctcttccttggcaaagtgaaccgcccctgaggtggggcttctcctgaaatctacaggcctcagggtgggagatgaagggggctatgctatggcccatctgtatgctggtagctagtgatttacacaggtttagttgactaatgaggcattacaaataatattactctatgatgattgcttccacccacacgactgcaacatacaggtgccttggggaaatgtggagaacattcaatcttgccgtcactattcatcaatgaagattaacactgagatccagagaggctggatgacttgctcaagttcaccagcatggtagtggcaaagagaggtccagagtcctggcccttgatgcccagctcagtgccacaaagctcaataggagggatgttccagtggatgagggccaccaggaagcacaggtccaaggctggtcccacacttatcagcagcaacaactgtcagttcatcctgcatgggaaaaatgttggaatgggagtctgaaatggggctactgtttcagtcctaacgtgctgtgtgacattgggacaacactttccctctctggacctcagtttccctctgtatacaaggatcagattcttgctgtgacccaagaactcctgaaatcatatagaaaggctggggtgggccctgtcattcgtggttgatttcaatacactcaagtgccattcatcctttaagaaaaacatctggatatcaaggtggaaatggcccatttaatgattgattatatcattttgtggatatagttataatctgatgggcctggctgggagtggaagaagggaagccttttgcaaatagtagagtatcagttgcaggtgccaatgactaactttttgaattctatgttggcattaacaataaagcattttgcaaacactg

SEQ ID NO: 450495 - DNA, 1787 bp, Homo sapiens
aaatgctggctgcaatccagccagccctctgccctttctgagcccgagggactgccacctccactgtgtgcacactcagctacgggacacatttcaggtatccaaggcagcagaggtgagtgggtcccccgagctctgtgaccttatgctccacactaactctggcagagcctccgtttcctcatagaacaaagaacagccaccatgcagctcttcctcctcttgtgcctggtgcttctcagccctcagggggcctcccttcaccgccaccacccccgggagatgaagaagagagtcgaggacctccatgtaggtgccacggtggcccccagcagcagaagggactttacctttgacctctacagggccttggcttccgctgcccccagccagaacatcttcttctcccctgtgagcatctccatgagcctggccatgctctccctgggggctgggtccagcacaaagatgcagatcctggagggcctgggcctcaacctccagaaaagctcagagaaggagctgcacagaggctttcagcagctccttcaggaactcaaccagcccagagatggcttccagctgagcctcggcaatgcccttttcaccgacctggtggtagacctgcaggacaccttcgtaagtgccatgaagacgctgtacctggcagacactttccccaccaactttagggactctgcaggggccatgaagcagatcaatgattatgtggcaaagcaaacgaagggcaagattgtggacttgcttaagaacctcgatagcaatgcggtcgtgatcatggtgaattacatcttctttaaagctaagtgggagacaagcttcaaccacaaaggcacccaagagcaagacttctacgtgacctcggagactgtggtgcgggtacccatgatgagccgcgaggatcagtatcactacctcctggaccggaacctctcctgcagggtggtgggggtcccctaccaaggcaatgccacggctttgttcattctccccagtgagggaaagatgcagcaggtggagaatggactgagtgagaaaacgctgaggaagtggcttaagatgttcaaaaagaggcagctcgagctttaccttcccaaattctccattgagggctcctatcagctggagaaagtcctccccagtctggggatcagtaacgtcttcacctcccatgctgatctgtccggcatcagcaaccactcaaatatccaggtgtctgagatggtgcacaaagctgtggtggaggtggacgagtcgggaaccagagcagcggcagccacggggacaatattcactttcaggtcggcccgcctgaactctcagaggctagtgttcaacaggccctttctgatgttcattgtggataacaacatcctcttccttggcaaagtgaaccgcccctgaggtggggcttctcctgaaatctacaggcctcagggtgggagatgaagggggctatgctatggcccatctgtatgctggtagctagtgatttacacaggtttagttgactaatgaggcattacaaataatattactctatgatgattgcttccacccacacgactgcaacatacaggtgccttggggaaatgtggagaacattcaatcttgccttttgtggatatagttataatctgatgggcctggctgggagtggaagaagggaagccttttgcaaatagtagagtatcagttgcaggtgccaatgactaactttttgaattctatgttggcattaacaataaagcattttgcaaacactg

SEQ ID NO: 450496 - DNA, 1367 bp, Homo sapiens
aaatgctggctgcaatccagccagccctctgccctttctgagcccgagggactgccacctccactgtgtgcacactcagctacgggacacaaacaaagaacagccaccatgcagctcttcctcctcttgtgcctggtgcttctcagccctcagggggcctcccttcaccgccaccacccccgggagatgaagaagagagtcgaggacctccatgtaggtgccacggtggcccccagcagcagaagggactttacctttgacctctacagggccttggcttccgctgcccccagccagaacatcttcttctcccctgtgagcatctccatgagcctggccatgctctccctgggggctgggtccagcacaaagatgcagatcctggagggcctgggcctcaacctccagaaaagctcagagaaggagctgcacagaggctttcagcagctccttcaggaactcaaccagcccagagatggcttccagctgagcctcggcaatgcccttttcaccgacctggtggtagacctgcaggacaccttcgtaagtgccatgaagacgctgtacctggcagacactttccccaccaactttagggactctgcaggggccatgaagcagatcaatgattatgtggcaaagcaaacgaagggcaagattgtggacttgcttaagaacctcgatagcaatgcggtcgtgatcatggtgaattacatcttctttaaagctaagtgggagacaagcttcaaccacaaaggcacccaagagcaagacttctacgtgacctcggagactgtggtgcgggtacccatgatgagccgcgaggatcagtatcactacctcctggaccggaacctctcctgcagggtggtgggggtcccctaccaaggcaatgccacggctttgttcattctccccagtgagggaaagatgcagcaggtggagaatggactgagtgagaaaacgctgaggaagtggcttaagatgttcaaaaagagggtactttcagactaccccagggccagcctaaacccacacagccccagggagacacacacgccctaccagggccacacagcactggtgggaaggactcacccagccaaggagctgcctccaggcccagaggcatcctgtgacatccaagtcctgggggcctagcccagttggagggacaagagctggaaactgggttccttagggtggtgccagagtgggcagagacctctgggcagcccacgtccaagtccagagcaaggggaggctcatccaggtaacaagcacgcacacccaggcgagttccccatgctcgtccccacgttgatatctcagactctacaagtcttcagctgctgcctaggactctg

SEQ ID NO: 450497 - DNA, 2679 bp, Homo sapiens
  misc_feature (2529)..(2529): n is a, c, g, or t
aaatgctggctgcaatccagccagccctctgccctttctgagcccgagggactgccacctccactgtgtgcacactcagctacgggacacatttcaggtatccaaggcagcagaggtgagtgggtcccccgagctctgtgaccttatgctccacactaactctggcagagcctccgtttcctcatagaacaaagaacagccaccatgcagctcttcctcctcttgtgcctggtgcttctcagccctcagggggcctcccttcaccgccaccacccccgggagatgaagaagagagtcgaggacctccatgtaggtgccacggtggcccccagcagcagaagggactttacctttgacctctacagggccttggcttccgctgcccccagccagaacatcttcttctcccctgtgagcatctccatgagcctggccatgctctccctgggggctgggtccagcacaaagatgcagatcctggagggcctgggcctcaacctccagaaaagctcagagaaggagctgcacagaggctttcagcagctccttcaggaactcaaccagcccagagatggcttccagctgagcctcggcaatgcccttttcaccgacctggtggtagacctgcaggacaccttcgtaagtgccatgaagacgctgtacctggcagacactttccccaccaactttagggactctgcaggggccatgaagcagatcaatgattatgtggcaaagcaaacgaagggcaagattgtggacttgcttaagaacctcgatagcaatgcggtcgtgatcatggtgaattacatcttctttaaagctaagtgggagacaagcttcaaccacaaaggcacccaagagcaagacttctacgtgacctcggagactgtggtgcgggtacccatgatgagccgcgaggatcagtatcactacctcctggaccggaacctctcctgcagggtggtgggggtcccctaccaaggcaatgccacggctttgttcattctccccagtgagggaaagatgcagcaggtggagaatggactgagtgagaaaacgctgaggaagtggcttaagatgttcaaaaagaggcagctcgagctttaccttcccaaattctccattgagggctcctatcagctggagaaagtcctccccagtctggggatcagtaacgtcttcacctcccatgctgatctgtccggcatcagcaaccactcaaatatccaggtgtctgagatggtgcacaaagctgtggtggaggtggacgagtcgggaaccagagcagcggcagccacggggacaatattcactttcaggtcggcccgcctgaactctcagaggctagtgttcaacaggccctttctgatgttcattgtggataacaacatcctcttccttggcaaagtgaaccgcccctgaggtggggcttctcctgaaatctacaggcctcagggtgggagatgaagggggctatgctatggcccatctgtatgctggtagctagtgatttacacaggtttagttgactaatgaggcattacaaataatattactctatgatgattgcttccacccacacgactgcaacatacaggtgccttggggaaatgtggagaacattcaatcttgccgtcactattcatcaatgaagattaacactgagatccagagaggctggatgacttgctcaagttcaccagcatggtagtggcaaagagaggtccagagtcctggcccttgatgcccagctcagtgccacaaagctcaataggagggatgttccagtggatgagggccaccaggaagcacaggtccaaggctggtcccacacttatcagcagcaacaactgtcagttcatcctgcatgggaaaaatgttggaatgggagtctgaaatggggctactgtttcagtcctaacgtgctgtgtgacattgggacaacactttccctctctggacctcagtttccctctgtatacaaggatcagattcttgctgtgacccaagaactcctgaaatcatatagaaaggctggggtgggccctgtcattcgtggttgatttcaatacactcaagtgccattcatcctttaagaaaaacatctggatatcaaggtggaaatggcccatttaatgattgattatatcattttgtggatatagttataatctgatgggcctggctgggagtggaagaagggaagccttttgcaaatagtagagtatcagttgcaggtgccaatgactaactttttgaattctatgttggcattaacaataaagcattttgcaaacactgaaaaaaaaaaaaaaaaaaaaaaaaaaaaaaaaaaaaaaaaaaaaaaaaaaaaaaaaacaaaaaaaaaaaaaaaaaaacaaaaaaaacaaaaaaaaaaccaaaaaaatcaaaacacaaaccccaaaaactatcacatgcgcacctaccctcccctaccattaaaaaaaaactttttccccctcttccccacattttttctttatctccccccttttttcttatccnccccctattcccgcccttttttcccattccccctcaaggggggctcctcacaaatatatgcggcgcggtttttaacacgcgcgtcgcgtcgacccgtgggtgcccccactttccggtttcccacacactcccctctttcaccgcggctgt

SEQ ID NO: 450498 - DNA, 2159 bp, Homo sapiens
aaatgctggctgcaatccagccagccctctgccctttctgagcccgagggactgccacctccactgtgtgcacactcagctacgggacacaaacaaagaacagccaccatgcagctcttcctcctcttgtgcctggtgcttctcagccctcagggggcctcccttcaccgccaccacccccgggagatgaagaagagagtcgaggacctccatgtaggtgccacggtggcccccagcagcagaagggactttacctttgacctctacagggccttggcttccgctgcccccagccagaacatcttcttctcccctgtgagcatctccatgagcctggccatgctctccctgggggctgggtccagcacaaagatgcagatcctggagggcctgggcctcaacctccagaaaagctcagagaaggagctgcacagaggctttcagcagctccttcaggaactcaaccagcccagagatggcttccagctgagcctcggcaatgcccttttcaccgacctggtggtagacctgcaggacaccttcgtaagtgccatgaagacgctgtacctggcagacactttccccaccaactttagggactctgcaggggccatgaagcagatcaatgattatgtggcaaagcaaacgaagggcaagattgtggacttgcttaagaacctcgatagcaatgcggtcgtgatcatggtgaattacatcttctttaaagctaagtgggagacaagcttcaaccacaaaggcacccaagagcaagacttctacgtgacctcggagactgtggtgcgggtacccatgatgagccgcgaggatcagtatcactacctcctggaccggaacctctcctgcagggtggtgggggtcccctaccaaggcaatgccacggctttgttcattctccccagtgagggaaagatgcagcaggtggagaatggactgagtgagaaaacgctgaggaagtggcttaagatgttcaaaaagagctggagaaagtcctccccagtctggggatcagtaacgtcttcacctcccatgctgatctgtccggcatcagcaaccactcaaatatccaggtgtctgagatggtgcacaaagctgtggtggaggtggacgagtcgggaaccagagcagcggcagccacggggacaatattcactttcaggtcggcccgcctgaactctcagaggctagtgttcaacaggccctttctgatgttcattgtggataacaacatcctcttccttggcaaagtgaaccgcccctgaggtggggcttctcctgaaatctacaggcctcagggtgggagatgaagggggctatgctatggcccatctgtatgctggtagctagtgatttacacaggtttagttgactaatgaggcattacaaataatattactctatgatgattgcttccacccacacgactgcaacatacaggtgccttggggaaatgtggagaacattcaatcttgccgtcactattcatcaatgaagattaacactgagatccagagaggctggatgacttgctcaagttcaccagcatggtagtggcaaagagaggtccagagtcctggcccttgatgcccagctcagtgccacaaagctcaataggagggatgttccagtggatgagggccaccaggaagcacaggtccaaggctggtcccacacttatcagcagcaacaactgtcagttcatcctgcatgggaaaaatgttggaatgggagtctgaaatggggctactgtttcagtcctaacgtgctgtgtgacattgggacaacactttccctctctggacctcagtttccctctgtatacaaggatcagattcttgctgtgacccaagaactcctgaaatcatatagaaaggctggggtgggccctgtcattcgtggttgatttcaatacactcaagtgccattcatcctttaagaaaaacatctggatatcaaggtggaaatggcccatttaatgattgattatatcattttgtggatatagttataatctgatgggcctggctgggagtggaagaagggaagccttttgcaaatagtagagtatcagttgcaggtgccaatgactaactttttgaattctatgttggcattaacaataaagcattttgcaaacactg

SEQ ID NO: 450499 - DNA, 2160 bp, Homo sapiens
taaggccatggggacaaaatgtcggctggataggaggtgctcaaacaaagaacagccaccatgcagctcttcctcctcttgtgcctggtgcttctcagccctcagggggcctcccttcaccgccaccacccccgggagatgaagaagagagtcgaggacctccatgtaggtgccacggtggcccccagcagcagaagggactttacctttgacctctacagggccttggcttccgctgcccccagccagaacatcttcttctcccctgtgagcatctccatgagcctggccatgctctccctgggggctgggtccagcacaaagatgcagatcctggagggcctgggcctcaacctccagaaaagctcagagaaggagctgcacagaggctttcagcagctccttcaggaactcaaccagcccagagatggcttccagctgagcctcggcaatgcccttttcaccgacctggtggtagacctgcaggacaccttcgtaagtgccatgaagacgctgtacctggcagacactttccccaccaactttagggactctgcaggggccatgaagcagatcaatgattatgtggcaaagcaaacgaagggcaagattgtggacttgcttaagaacctcgatagcaatgcggtcgtgatcatggtgaattacatcttctttaaagctaagtgggagacaagcttcaaccacaaaggcacccaagagcaagacttctacgtgacctcggagactgtggtgcgggtacccatgatgagccgcgaggatcagtatcactacctcctggaccggaacctctcctgcagggtggtgggggtcccctaccaaggcaatgccacggctttgttcattctccccagtgagggaaagatgcagcaggtggagaatggactgagtgagaaaacgctgaggaagtggcttaagatgttcaaaaagaggcagctcgagctttaccttcccaaattctccattgagggctcctatcagctggagaaagtcctccccagtctggggatcagtaacgtcttcacctcccatgctgatctgtccggcatcagcaaccactcaaatatccaggtgtctgagatggtgcacaaagctgtggtggaggtggacgagtcgggaaccagagcagcggcagccacggggacaatattcactttcaggtcggcccgcctgaactctcagaggctagtgttcaacaggccctttctgatgttcattgtggataacaacatcctcttccttggcaaagtgaaccgcccctgaggtggggcttctcctgaaatctacaggcctcagggtgggagatgaagggggctatgctatggcccatctgtatgctggtagctagtgatttacacaggtttagttgactaatgaggcattacaaataatattactctatgatgattgcttccacccacacgactgcaacatacaggtgccttggggaaatgtggagaacattcaatcttgccgtcactattcatcaatgaagattaacactgagatccagagaggctggatgacttgctcaagttcaccagcatggtagtggcaaagagaggtccagagtcctggcccttgatgcccagctcagtgccacaaagctcaataggagggatgttccagtggatgagggccaccaggaagcacaggtccaaggctggtcccacacttatcagcagcaacaactgtcagttcatcctgcatgggaaaaatgttggaatgggagtctgaaatggggctactgtttcagtcctaacgtgctgtgtgacattgggacaacactttccctctctggacctcagtttccctctgtatacaaggatcagattcttgctgtgacccaagaactcctgaaatcatatagaaaggctggggtgggccctgtcattcgtggttgatttcaatacactcaagtgccattcatcctttaagaaaaacatctggatatcaaggtggaaatggcccatttaatgattgattatatcattttgtggatatagttataatctgatgggcctggctgggagtggaagaagggaagccttttgcaaatagtagagtatcagttgcaggtgccaatgactaactttttgaattctatgttggcattaacaataaagcattttgcaaacactg

SEQ ID NO: 450500 - DNA, 1936 bp, Homo sapiens
taaggccatggggacaaaatgtcggctggataggaggtgctcaaacaaagaacagccaccatgcagctcttcctcctcttgtgctgggtccagcacaaagatgcagatcctggagggcctgggcctcaacctccagaaaagctcagagaaggagctgcacagaggctttcagcagctccttcaggaactcaaccagcccagagatggcttccagctgagcctcggcaatgcccttttcaccgacctggtggtagacctgcaggacaccttcgtaagtgccatgaagacgctgtacctggcagacactttccccaccaactttagggactctgcaggggccatgaagcagatcaatgattatgtggcaaagcaaacgaagggcaagattgtggacttgcttaagaacctcgatagcaatgcggtcgtgatcatggtgaattacatcttctttaaagctaagtgggagacaagcttcaaccacaaaggcacccaagagcaagacttctacgtgacctcggagactgtggtgcgggtacccatgatgagccgcgaggatcagtatcactacctcctggaccggaacctctcctgcagggtggtgggggtcccctaccaaggcaatgccacggctttgttcattctccccagtgagggaaagatgcagcaggtggagaatggactgagtgagaaaacgctgaggaagtggcttaagatgttcaaaaagaggcagctcgagctttaccttcccaaattctccattgagggctcctatcagctggagaaagtcctccccagtctggggatcagtaacgtcttcacctcccatgctgatctgtccggcatcagcaaccactcaaatatccaggtgtctgagatggtgcacaaagctgtggtggaggtggacgagtcgggaaccagagcagcggcagccacggggacaatattcactttcaggtcggcccgcctgaactctcagaggctagtgttcaacaggccctttctgatgttcattgtggataacaacatcctcttccttggcaaagtgaaccgcccctgaggtggggcttctcctgaaatctacaggcctcagggtgggagatgaagggggctatgctatggcccatctgtatgctggtagctagtgatttacacaggtttagttgactaatgaggcattacaaataatattactctatgatgattgcttccacccacacgactgcaacatacaggtgccttggggaaatgtggagaacattcaatcttgccgtcactattcatcaatgaagattaacactgagatccagagaggctggatgacttgctcaagttcaccagcatggtagtggcaaagagaggtccagagtcctggcccttgatgcccagctcagtgccacaaagctcaataggagggatgttccagtggatgagggccaccaggaagcacaggtccaaggctggtcccacacttatcagcagcaacaactgtcagttcatcctgcatgggaaaaatgttggaatgggagtctgaaatggggctactgtttcagtcctaacgtgctgtgtgacattgggacaacactttccctctctggacctcagtttccctctgtatacaaggatcagattcttgctgtgacccaagaactcctgaaatcatatagaaaggctggggtgggccctgtcattcgtggttgatttcaatacactcaagtgccattcatcctttaagaaaaacatctggatatcaaggtggaaatggcccatttaatgattgattatatcattttgtggatatagttataatctgatgggcctggctgggagtggaagaagggaagccttttgcaaatagtagagtatcagttgcaggtgccaatgactaactttttgaattctatgttggcattaacaataaagcattttgcaaacactg

SEQ ID NO: 450501 - DNA, 2250 bp, Homo sapiens
aaatgctggctgcaatccagccagccctctgccctttctgagcccgagggactgccacctccactgtgtgcacactcagctacgggacacatttcaggtatccaaggcagcagaggtgagtgggtcccccgagctctgtgaccttatgctccacactaactctggcagagcctccgtttcctcatagaacaaagaacagccaccatgcagctcttcctcctcttgtgcctggtgcttctcagccctcagggggcctcccttcaccgccaccacccccgggagatgaagaagagagtcgaggacctccatgtaggtgccacggtggcccccagcagcagaagggactttacctttgacctctacagggccttggcttccgctgcccccagccagaacatcttcttctcccctgtgagcatctccatgagcctggccatgctctccctgggggctgggtccagcacaaagatgcagatcctggagggcctgggcctcaacctccagaaaagctcagagaaggagctgcacagaggctttcagcagctccttcaggaactcaaccagcccagagatggcttccagctgagcctcggcaatgcccttttcaccgacctggtggtagacctgcaggacaccttcgtaagtgccatgaagacgctgtacctggcagacactttccccaccaactttagggactctgcaggggccatgaagcagatcaatgattatgtggcaaagcaaacgaagggcaagattgtggacttgcttaagaacctcgatagcaatgcggtcgtgatcatggtgaattacatcttctttaaagctaagtgggagacaagcttcaaccacaaaggcacccaagagcaagacttctacgtgacctcggagactgtggtgcgggtacccatgatgagccgcgaggatcagtatcactacctcctggaccggaacctctcctgcagggtggtgggggtcccctaccaaggcaatgccacggctttgttcattctccccagtgagggaaagatgcagcaggtggagaatggactgagtgagaaaacgctgaggaagtggcttaagatgttcaaaaagaggcagctcgagctttaccttcccaaattctccattgagggctcctatcagctggagaaagtcctccccagtctggggatcagtaacgtcttcacctcccatgctgatctgtccggcatcagcaaccactcaaatatccaggtgtctgagatggtgcacaaagctgtggtggaggtggacgagtcgggaaccagagcagcggcagccacggggacaatattcactttcaggtcggcccgcctgaactctcagaggctagtgttcaacaggccctttctgatgttcattgtggataacaacatcctcttccttggcaaagtgaaccgcccctgaggtggggcttctcctgaaatctacaggcctcagggtgggagatgaagggggctatgctatggcccatctgtatgctggtagctagtgatttacacaggtttagttgactaatgaggcattacaaataatattactctatgatgattgcttccacccacacgactgcaacatacaggtgccttggggaaatgtggagaacattcaatcttgccgtcactattcatcaatgaagattaacactgagatccagagaggctggatgacttgctcaagttcaccagcatggtagtggcaaagagaggtccagagtcctggcccttgatgcccagctcagtgccacaaagctcaataggagggatgttccagtggatgagggccaccaggaagcacaggtccaaggctggtcccacacttatcagcagcaacaactgtcagttcatcctgcatgggagtgtgacattgggacaacactttccctctctggacctcagtttccctctgtatacaaggatcagattcttgctgtgacccaagaactcctgaaatcatatagaaaggctggggtgggccctgtcattcgtggttgatttcaatacactcaagtgccattcatcctttaagaaaaacatctggatatcaaggtggaaatggcccatttaatgattgattatatcattttgtggatatagttataatctgatgggcctggctgggagtggaagaagggaagccttttgcaaatagtagagtatcagttgcaggtgccaatgactaactttttgaattctatgttggcattaacaataaagcattttgcaaacactg

SEQ ID NO: 450502 - DNA, 1629 bp, Homo sapiens
gtgatccccccacgacccgaagactgcagggccatgaagcagatcaatgattatgtggcaaagcaaacgaagggcaagattgtggacttgcttaagaacctcgatagcaatgcggtcgtgatcatggtgaattacatcttctttaaagctaagtgggagacaagcttcaaccacaaaggcacccaagagcaagacttctacgtgacctcggagactgtggtgcgggtacccatgatgagccgcgaggatcagtatcactacctcctggaccggaacctctcctgcagggtggtgggggtcccctaccaaggcaatgccacggctttgttcattctccccagtgagggaaagatgcagcaggtggagaatggactgagtgagaaaacgctgaggaagtggcttaagatgttcaaaaagaggcagctcgagctttaccttcccaaattctccattgagggctcctatcagctggagaaagtcctccccagtctggggatcagtaacgtcttcacctcccatgctgatctgtccggcatcagcaaccactcaaatatccaggtgtctgagatggtgcacaaagctgtggtggaggtggacgagtcgggaaccagagcagcggcagccacggggacaatattcactttcaggtcggcccgcctgaactctcagaggctagtgttcaacaggccctttctgatgttcattgtggataacaacatcctcttccttggcaaagtgaaccgcccctgaggtggggcttctcctgaaatctacaggcctcagggtgggagatgaagggggctatgctatggcccatctgtatgctggtagctagtgatttacacaggtttagttgactaatgaggcattacaaataatattactctatgatgattgcttccacccacacgactgcaacatacaggtgccttggggaaatgtggagaacattcaatcttgccgtcactattcatcaatgaagattaacactgagatccagagaggctggatgacttgctcaagttcaccagcatggtagtggcaaagagaggtccagagtcctggcccttgatgcccagctcagtgccacaaagctcaataggagggatgttccagtggatgagggccaccaggaagcacaggtccaaggctggtcccacacttatcagcagcaacaactgtcagttcatcctgcatgggaaaaatgttggaatgggagtctgaaatggggctactgtttcagtcctaacgtgctgtgtgacattgggacaacactttccctctctggacctcagtttccctctgtatacaaggatcagattcttgctgtgacccaagaactcctgaaatcatatagaaaggctggggtgggccctgtcattcgtggttgatttcaatacactcaagtgccattcatcctttaagaaaaacatctggatatcaaggtggaaatggcccatttaatgattgattatatcattttgtggatatagttataatctgatgggcctggctgggagtggaagaagggaagccttttgcaaatagtagagtatcagttgcaggtgccaatgactaactttttgaattctatgttggcattaacaataaagcattttgcaaacactg

SEQ ID NO: 450503 - DNA, 1149 bp, Homo sapiens
aaatgctggctgcaatccagccagccctctgccctttctgagcccgagggactgccacctccactgtgtgcacactcagctacgggacacaaacaaagaacagccaccatgcagctcttcctcctcttgtgcctggtgcttctcagccctcagggggcctcccttcaccgccaccacccccgggagatgaagaagagagtcgaggacctccatgtaggtgccacggtggcccccagcagcagaagggactttacctttgacctctacagggccttggcttccgctgcccccagccagaacatcttcttctcccctgtgagcatctccatgagcctggccatgctctccctgggggctgggtccagcacaaagatgcagatcctggagggcctgggcctcaacctccagaaaagctcagagaaggagctgcacagaggctttcagcagctccttcaggaactcaaccagcccagagatggcttccagctgagcctcggcaatgcccttttcaccgacctggtggtagacctgcaggacaccttcgtaagtgccatgaagacgctgtacctggcagacactttccccaccaactttagggactctgcaggggccatgaagcagatcaatgattatgtggcaaagcaaacgaagggcaagattgtggacttgcttaagaacctcgatagcaatgcggtcgtgatcatggtgaattacatcttctttaaagctaagtgggagacaagcttcaaccacaaaggcacccaagagcaagacttctacgtgacctcggagactgtggtgcgggtacccatgatgagccgcgaggatcagtatcactacctcctggaccggaacctctcctgcagggtggtgggggtcccctaccaaggcaatgccacggctttgttcattctccccagtgagggaaagatgcagcaggtggagaatggactgagtgagaaaacgctgaggaagtggcttaagatgttcaaaaagaggcagctcgagctttaccttcccaaattctccattgagggctcctatcagctggagaaagtcctccccagtctggggatcagtaacgtgtgtaacctacatccgatatatccggctacaggttcaactctttatacccaggtatatctagat

SEQ ID NO: 450504 - DNA, 858 bp, Homo sapiens
aaatgctggctgcaatccagccagccctctgccctttctgagcccgagggactgccacctccactgtgtgcacactcagctacgggacacatttcaggtatccaaggcagcagaggtgagtgggtcccccgagctctgtgaccttatgctccacactaactctggcagagcctccgtttcctcatagaacaaagaacagccaccatgcagctcttcctcctcttgtgcctggtgcttctcagccctcagggggcctcccttcaccgccaccacccccgggagatgaagaagagagtcgaggacctccatgtaggtgccacggtggcccccagcagcagaagggactttacctttgacctctacagggccttggcttccgctgcccccagccagaacatcttcttctcccctgtgagcatctccatgagcctggccatgctctccctgggggctgggtccagcacaaagatgcagatcctggagggcctgggcctcaacctccagaaaagctcagagaaggagctgcacagaggctttcagcagctccttcaggaactcaaccagcccagagatggcttccagctgagcctcggcaatgcccttttcaccgacctggtggtagacctgcaggacaccttcgtaagtgccatgaagacgctgtacctggcagacactttccccaccaactttagggactctgcaggggccatgaagcagatcaatgattatgtggcaaagcaaacgaagggcaagattgtggacttgcttaagaacctcgatagcaatgcggtcgtgatcatggtgaattacatcttctttaaaggtaaggcccttgggcccaaacctgcaatttctttg

SEQ ID NO: 450505 - DNA, 6554 bp, Homo sapiens
gggaccatcctgcgcccactgtcaatggcacccgtcctgcccgaaagaagttccagaagaagggggccagccagagcttcagtaaggcggcaaggctcaagtggcagtccctggagcgacggatcattgacatcgtcatgcagagaatgaccattgtcaacctggaggctgacatggagcggctcatcaagaaaagggaggagctgttcctcctgcaggaggcactgcggaggaagcgggagcggctgcaggctgagagccccgaggaagagaaggggctgcaggagctggctgaggagatcgaggtgctggcagccaacattgactacatcaatgacggcatcaccgactgccaggccaccatcgtgcagctggaggagaccaaggaggagctggactccacagacacatccgtggtcatcagctcctgctccctggctgaagcccgcctcctgctagacaacttcctcaaggcatccattgacaaggggctgcaagtggcacaaaaggaagcccagatccggctgttggagggccgactgaggcagacggatatggcaggctcctcccagaaccatctgctcctggacgccctgcgtgagaaggctgaagctcaccccgagctgcaggccctcatctacaatgtgcagcaggagaatggctacgccagcacagatgaggagatctcagagttctctgagggcagcttctcccagtcattcaccatgaaaggctccaccagccatgacgatttcaagttcaagagcgagcccaaactgtctgcccaaatgaaagctgtgtcggctgagtgcctgggccccccactggatatctccaccaagaacatcaccaagtccctggcctccctcgttgagatcaaagaggacggagtgggcttctctgtccgagacccctattaccgggacagggtctcgcgcaccgtcagtctgcctacccggggcagcactttccctaggcaatctcgagccacagagacgtccccgctgacgagaaggaagtcctacgaccgagggcagcccattaggtccacagatgtgggattcacacccccatcatcccctcccactcggccccgcaatgaccgcaatgtcttctctcgtctcaccagtaatcagagccaggggtcagcgctggacaagtctgatgacagcgactcctctttgtcggaggtcctgaggggcatcatctccccggttggaggagccaagggtgcacggacggccccactgcagtgtgtctccatggccgaaggccacaccaagcccatcctctgcctggatgccacagatgagttgctattcacagggtccaaagaccgaagctgcaagatgtggaacttggttacgggacaggagatcgcagctctaaagggccaccccaacaacgtggtctccatcaagtactgcagccactcggggcttgtgttctccgtgtccacctcctacatcaaggtgtgggacatccgggactcagccaagtgcattcggactctcacgtcctcgggccaggtgatctcaggggatgcctgtgccgccacatccacccgtgccatcaccagtgctcagggcgagcatcagatcaaccagatcgccctcagcccttcgggcaccatgctgtacgccgcctcgggcaatgccgtccgcatctgggagcttagcaggttccagcctgtcggcaagctgactggccacatcggccctgtgatgtgcctgacggtcacccagacggccagccagcatgacctcgtggtgactggctccaaggaccactacgttaagatgttcgagctgggcgagtgtgtgacgggcaccatcggccccactcacaacttcgagcccccgcactacgatggcatcgagtgtctcgccatccagggagacatcctgttcagtggctcccgagataacggcatcaagaagtgggacctagaccagcaggagctcatccagcaaatccccaatgcgcacaaggactgggtgtgcgccctggccttcatcccgggccgccccatgctgctcagcgcctgccgtgcgggtgtcatcaaggtctggaacgtggacaacttcacacccatcggtgagatcaagggccacgacagtcccatcaatgccatctgcaccaatgccaagcatatcttcacagcctccagtgactgccgggtaaagttgtggaattacgtccctggactcaccccctgccttcctcgccgagtcctggccataaagggccgcgccaccaccctgccctgaccctccccaactctccctgtctcctctttcattcttcccctctttccttttccctctctttccccacttcgatctgagctgcttcttaacgtgacctgacggtgaagttctggagtgtccggcggttaccccacagcggcccaccctaggagtgaggtcagagggatgcccccggaccctcgaccccagcagcctggacaccatggaagggaagctgtgacccggccgatggggccagctgctctggggacagagggcgtggccccctctcctgccctcctccctctcccttggccttcccacaggacactgttccctcatccctcccctgcctctcaggagcctctgggtgagagagaggctggggaggaaattaagctgtgaagccaaagggcattatcccttcttgttcccctcctggcagtcgtggccacattgtctcctgctgaaccggctctgcccctttctcaggcctttggcccagtggtggagccctgtggggaggtgcagcagcctggccccatcccacccttccgaggagctggcctccccgcttctcccagcccagcctctagagccactgcacctgcctctgagcccaaaaagataagtcctcaggtagctaaggaaaccaggtgtgggcggctgggccttgcagctaacccttaaccctctggcaacccgcagatagccccaactggccccaacagttccctggggtcccttttggatggggccaaggtggagctgctagaaagattcctttggggagatggtcagaaatacttcagttatttattattttgttatttttattttttgctgttgcctcctggaaacggacttgaagtttcttcccctatattctttccctcagctcttgggggccagaaatcccaaagggagtccgctgccccggccctccagggccgcctcctctgtttgctttgcagaggagggaactgctccttcgactctgcagctcaggcctgtccccgacacagcccccagggagtcttctagctacccctggcctctaggccgcctgacgctcagtgccttcctccgttccggggcctggcacccgtgccgggcagccttacaccagccatgcccgcggcaccacatgtgtcttctcactcgcgaggtcttgtgcccagcgcccccgggaaggcgggggcgctcaccccacagcccaggccccggggttctgccccacagtcctgcgtgggccacgtaggaagcagcgtgggggctgtgtctgctgggaggtggcttggatggggaggacagcccggcaccctgacccccgcccctccccagccctgcagtcccccactgggccggggagtctctccagcttctctctctctggttattcaggagacacattttcggccttaaaactggcatggagcgcaggccctcccttgcagaaaattatcaaggaagagggagttggcagagtttctctgccccggggctggggacgcggagctccggggaaattgttaaatcagtgttctggcgccccctgttgggggaactctggaattacaggagtgggccttgggggggactgagctccatccctctcccccgccccacccccacccaaagttgcccaccctgtttttccgttgcatcgctggtcttgtgcttcccgcttcagtctgggagccaagagccagccccacctcccttcagaggacgcagtgacttttggactttccagaggtggttctgtgtttctgcccttggctcctctccgtcttgggctggggcacttggagccctctccatgtggcgcccagtgttggggggaggcaggctccagtggaggctgagtgaggcctggtcccttccccgtgccctcctcggagctgccacagaggctaagacggctgtcctgctggtgctggccctgctggatgtggtattgaagtctggggcagctgatagcaggaaggagacccccttggatgctggtctcctgggacctgaacagtctgtcagcaatggctggaaatccttcttcctctggccaccccgggggtgccgggcaacccccttagctctaagatgtggccacaaatctcttcccactcctccccgccaacctgaacagaaagttttgaccttgcaacctgtaagaaagaatccgtccgcatgactgtttacaagcgatagaaacacgtaagactctgtccccttgagctcccacccccgggccggggatgccccacctggggtgactgcactgtagctgcaaggcgtgttcttgcacgaagtgtgatcttatggccctgcgagaggtgctcatcatcatgcccattttctgctgtttctgatgggtcagctacctcacggcggggccagctctgctgtcctggcaagtgtcattgactctctaaacttgaagtccttcaggagccctgagcccaacatccatgagacaccccgagttgtgcttcatgagagttggattctctgcccactctttcagggatgtccaaggtccatgttagggggcaggcccccagctccactcactgcacaagcaccctaaatgttggaagcacaaaatggttgtgatttgagcacaatggcagggtcccgcaggcagacttgacaggcccaggcccgggaggatccccccacgttggctctgtccaaagtgagattgggggtgcctgtgtctgggacagggggctgcccttgctcagaccaggccttggctcatggcttgtcctaattctgggactcgtcatcttacttcttgcccttctgtgcccatcttaagactggaggctgagccttgtcaggcccagccacatctttacgccatgggaccaggagtaaagcgctctctaaaccccgcaccccaaatctctaaacgcctgagttcaggctgagtcctagccctagtgagcctgaagagcttggactgattcccagtctcctgggtcaagccccactttgtgctttcgaagcttatgagcgggttccctggatagaaggagtcttccatccccactgcccttgggcctcttcagcatagtcctgtgccagggccctgtcctcactatcagtcagttcagtatttgctttcacgtgagtggcggactcttctgaagcagccagaactctcaaaggcagcgcatggagttgccttgcgagatttccaaggaaggaggaaagattaacaggcggagcctggcacacccaagcctttgaggtggtcagagtgccaccttcagccccttgggaagggacagcggtgggtctgggagtggcctcaccctggattcagcctaggaatctcttcaccctcagctgtccagccctgctgcctgtctggggatgtgtggcctgggcagagggcagtttaaagcacaaaaccacatggggaaaacacaaggttgcggggactttctcatgtgcctgatgtggtggagggagacaccagcaggtggctgcagtgacgttagggaacataacacttctttgccctgctagctctcagctctggggggcatcccccgatgtggtctgggctgggagcaggcatatcccctggttgttgcctgtgcctggtctgttcaccatcgtgtttgtgtgggcagagcctgccctgcaggagcagtgactttcttcccactgtgtgtcccggacctgtggtatgtgtccctttgccatcccaaacaggcaactgcttgctgctctccttgcttggcatagcctcctggtcagtggccaatgccccacaggccttcctgggcctggccctcctctcctgactcccagatccttccctgccctcttgtgtgcaaggacagattttgcagggaaagttctgtttcttctttgatacctttgttctgtcccctgccccatccccagcactcatgatcttgaagcccctatcacactctagttcagtcctgtgaaccatgtcctgagggccttgcagggaagtaggaaatagaaactcctccacaaagagccgaggatcagagaagacccctgagatgaatcagggccctgccctgcccaccaactcttttctagcaatcatgtcctgcccaggctgcaggcttcattaggctcctgctgtcctccatgatgtgactagcacaaggtgtatatatgttttgtacctctgccgatggctgtacatagtgtatgaaagttatttaagccccatgttgtacatttctgttcctagattggatgtgtgtgttctaagaagttgtcataaataaaacctgaatgaccaatgtc

SEQ ID NO: 450506 - DNA, 6324 bp, Homo sapiens
gggaccatcctgcgcccactgtcaatggcacccgtcctgcccgaaagaagttccagaagaagggggccagccagagcttcagtaaggcggcaaggctcaagtggcagtccctggagcgacggatcattgacatcgtcatgcagagaatgaccattgtcaacctggaggctgacatggagcggctcatcaagaaaagggaggagctgttcctcctgcaggaggcactgcggaggaagcgggagcggctgcaggctgagagccccgaggaagagaaggggctgcaggagctggctgaggagatcgaggtgctggcagccaacattgactacatcaatgacggcatcaccgactgccaggccaccatcgtgcagctggaggagaccaaggaggagctggactccacagacacatccgtggtcatcagctcctgctccctggctgaagcccgcctcctgctagacaacttcctcaaggcatccattgacaaggggctgcaagtggcacaaaaggaagcccagatccggctgttggagggccgactgaggcagacggatatggcaggctcctcccagaaccatctgctcctggacgccctgcgtgagaaggctgaagctcaccccgagctgcaggccctcatctacaatgtgcagcaggagaatggctacgccagcacagatgaggagatctcagagttctctgagggcagcttctcccagtcattcaccatgaaaggctccaccagccatgacgatttcaagttcaagagcgagcccaaactgtctgcccaaatgaaagctgtgtcggctgagtgcctgggccccccactggatatctccaccaagaacatcaccaagtccctggcctccctcgttgagatcaaagaggacggagtgggcttctctgtccgagacccctattaccgggacagggtctcgcgcaccgtcagtctgcctacccggggcagcactttccctaggcaatctcgagccacagagacgtccccgctgacgagaaggaagtcctacgaccgagggcagcccattaggtccacagatgtgggattcacacccccatcatcccctcccactcggccccgcaatgaccgcaatgtcttctctcgtctcaccagtaatcagagccaggggtcagcgctggacaagggcatcatctccccggttggaggagccaagggtgcacggacggccccactgcagtgtgtctccatggccgaaggccacaccaagcccatcctctgcctggatgccacagatgagttgctattcacagggtccaaagaccgaagctgcaagatgtggaacttggttacgggacaggagatcgcagctctaaagggccaccccaacaacgtggtctccatcaagtactgcagccactcggggcttgtgttctccgtgtccacctcctacatcaaggtgtgggacatccgggactcagccaagtgcattcggactctcacgtcctcgggccaggtgatctcaggggatgcctgtgccgccacatccacccgtgccatcaccagtgctcagggcgagcatcagatcaaccagatcgccctcagcccttcgggcaccatgctgtacgccgcctcgggcaatgccgtccgcatctgggagcttagcaggttccagcctgtcggcaagctgactggccacatcggccctgtgatgtgcctgacggtcacccagacggccagccagcatgacctcgtggtgactggctccaaggaccactacgttaagatgttcgagctgggcgagtgtgtgacgggcaccatcggccccactcacaacttcgagcccccgcactacgatggcatcgagtgtctcgccatccagggagacatcctgttcagtggctcccgagataacggcatcaagaagtgggacctagaccagcaggagctcatccagcaaatccccaatgcgcacaaggactgggtgtgcgccctggccttcatcccgggccgccccatgctgctcagcgcctgccgtgcgggtgtcatcaaggtctggaacgtggacaacttcacacccatcggtgagatcaagggccacgacagtcccatcaatgccatctgcaccaatgccaagcatatcttcacagcctccagtgacctgacggtgaagttctggagtgtccggcggttaccccacagcggcccaccctaggagtgaggtcagagggatgcccccggaccctcgaccccagcagcctggacaccatggaagggaagctgtgacccggccgatggggccagctgctctggggacagagggcgtggccccctctcctgccctcctccctctcccttggccttcccacaggacactgttccctcatccctcccctgcctctcaggagcctctgggtgagagagaggctggggaggaaattaagctgtgaagccaaagggcattatcccttcttgttcccctcctggcagtcgtggccacattgtctcctgctgaaccggctctgcccctttctcaggcctttggcccagtggtggagccctgtggggaggtgcagcagcctggccccatcccacccttccgaggagctggcctccccgcttctcccagcccagcctctagagccactgcacctgcctctgagcccaaaaagataagtcctcaggtagctaaggaaaccaggtgtgggcggctgggccttgcagctaacccttaaccctctggcaacccgcagatagccccaactggccccaacagttccctggggtcccttttggatggggccaaggtggagctgctagaaagattcctttggggagatggtcagaaatacttcagttatttattattttgttatttttattttttgctgttgcctcctggaaacggacttgaagtttcttcccctatattctttccctcagctcttgggggccagaaatcccaaagggagtccgctgccccggccctccagggccgcctcctctgtttgctttgcagaggagggaactgctccttcgactctgcagctcaggcctgtccccgacacagcccccagggagtcttctagctacccctggcctctaggccgcctgacgctcagtgccttcctccgttccggggcctggcacccgtgccgggcagccttacaccagccatgcccgcggcaccacatgtgtcttctcactcgcgaggtcttgtgcccagcgcccccgggaaggcgggggcgctcaccccacagcccaggccccggggttctgccccacagtcctgcgtgggccacgtaggaagcagcgtgggggctgtgtctgctgggaggtggcttggatggggaggacagcccggcaccctgacccccgcccctccccagccctgcagtcccccactgggccggggagtctctccagcttctctctctctggttattcaggagacacattttcggccttaaaactggcatggagcgcaggccctcccttgcagaaaattatcaaggaagagggagttggcagagtttctctgccccggggctggggacgcggagctccggggaaattgttaaatcagtgttctggcgccccctgttgggggaactctggaattacaggagtgggccttgggggggactgagctccatccctctcccccgccccacccccacccaaagttgcccaccctgtttttccgttgcatcgctggtcttgtgcttcccgcttcagtctgggagccaagagccagccccacctcccttcagaggacgcagtgacttttggactttccagaggtggttctgtgtttctgcccttggctcctctccgtcttgggctggggcacttggagccctctccatgtggcgcccagtgttggggggaggcaggctccagtggaggctgagtgaggcctggtcccttccccgtgccctcctcggagctgccacagaggctaagacggctgtcctgctggtgctggccctgctggatgtggtattgaagtctggggcagctgatagcaggaaggagacccccttggatgctggtctcctgggacctgaacagtctgtcagcaatggctggaaatccttcttcctctggccaccccgggggtgccgggcaacccccttagctctaagatgtggccacaaatctcttcccactcctccccgccaacctgaacagaaagttttgaccttgcaacctgtaagaaagaatccgtccgcatgactgtttacaagcgatagaaacacgtaagactctgtccccttgagctcccacccccgggccggggatgccccacctggggtgactgcactgtagctgcaaggcgtgttcttgcacgaagtgtgatcttatggccctgcgagaggtgctcatcatcatgcccattttctgctgtttctgatgggtcagctacctcacggcggggccagctctgctgtcctggcaagtgtcattgactctctaaacttgaagtccttcaggagccctgagcccaacatccatgagacaccccgagttgtgcttcatgagagttggattctctgcccactctttcagggatgtccaaggtccatgttagggggcaggcccccagctccactcactgcacaagcaccctaaatgttggaagcacaaaatggttgtgatttgagcacaatggcagggtcccgcaggcagacttgacaggcccaggcccgggaggatccccccacgttggctctgtccaaagtgagattgggggtgcctgtgtctgggacagggggctgcccttgctcagaccaggccttggctcatggcttgtcctaattctgggactcgtcatcttacttcttgcccttctgtgcccatcttaagactggaggctgagccttgtcaggcccagccacatctttacgccatgggaccaggagtaaagcgctctctaaaccccgcaccccaaatctctaaacgcctgagttcaggctgagtcctagccctagtgagcctgaagagcttggactgattcccagtctcctgggtcaagccccactttgtgctttcgaagcttatgagcgggttccctggatagaaggagtcttccatccccactgcccttgggcctcttcagcatagtcctgtgccagggccctgtcctcactatcagtcagttcagtatttgctttcacgtgagtggcggactcttctgaagcagccagaactctcaaaggcagcgcatggagttgccttgcgagatttccaaggaaggaggaaagattaacaggcggagcctggcacacccaagcctttgaggtggtcagagtgccaccttcagccccttgggaagggacagcggtgggtctgggagtggcctcaccctggattcagcctaggaatctcttcaccctcagctgtccagccctgctgcctgtctggggatgtgtggcctgggcagagggcagtttaaagcacaaaaccacatggggaaaacacaaggttgcggggactttctcatgtgcctgatgtggtggagggagacaccagcaggtggctgcagtgacgttagggaacataacacttctttgccctgctagctctcagctctggggggcatcccccgatgtggtctgggctgggagcaggcatatcccctggttgttgcctgtgcctggtctgttcaccatcgtgtttgtgtgggcagagcctgccctgcaggagcagtgactttcttcccactgtgtgtcccggacctgtggtatgtgtccctttgccatcccaaacaggcaactgcttgctgctctccttgcttggcatagcctcctggtcagtggccaatgccccacaggccttcctgggcctggccctcctctcctgactcccagatccttccctgccctcttgtgtgcaaggacagattttgcagggaaagttctgtttcttctttgatacctttgttctgtcccctgccccatccccagcactcatgatcttgaagcccctatcacactctagttcagtcctgtgaaccatgtcctgagggccttgcagggaagtaggaaatagaaactcctccacaaagagccgaggatcagagaagacccctgagatgaatcagggccctgccctgcccaccaactcttttctagcaatcatgtcctgcccaggctgcaggcttcattaggctcctgctgtcctccatgatgtgactagcacaaggtgtatatatgttttgtacctctgccgatggctgtacatagtgtatgaaagttatttaagccccatgttgtacatttctgttcctagattggatgtgtgtgttctaagaagttgtcataaataaaacctgaatgaccaatgtc

SEQ ID NO: 450507 - DNA, 5985 bp, Homo sapiens
atcaaggaacacattatgcaaatgcttcaaaatcctgactggaaataccggcatgcaggattgatggccttatctggctggacaacttcctcaaggcatccattgacaaggggctgcaagtggcacaaaaggaagcccagatccggctgttggagggccgactgaggcagacggatatggcaggctcctcccagaaccatctgctcctggacgccctgcgtgagaaggctgaagctcaccccgagctgcaggccctcatctacaatgtgcagcaggagaatggctacgccagcacagatgaggagatctcagagttctctgagggcagcttctcccagtcattcaccatgaaaggctccaccagccatgacgatttcaagttcaagagcgagcccaaactgtctgcccaaatgaaagctgtgtcggctgagtgcctgggccccccactggatatctccaccaagaacatcaccaagtccctggcctccctcgttgagatcaaagaggacggagtgggcttctctgtccgagacccctattaccgggacagggtctcgcgcaccgtcagtctgcctacccggggcagcactttccctaggcaatctcgagccacagagacgtccccgctgacgagaaggaagtcctacgaccgagggcagcccattaggtccacagatgtgggattcacacccccatcatcccctcccactcggccccgcaatgaccgcaatgtcttctctcgtctcaccagtaatcagagccaggggtcagcgctggacaagtctgatgacagcgactcctctttgtcggaggtcctgaggggcatcatctccccggttggaggagccaagggtgcacggacggccccactgcagtgtgtctccatggccgaaggccacaccaagcccatcctctgcctggatgccacagatgagttgctattcacagggtccaaagaccgaagctgcaagatgtggaacttggttacgggacaggagatcgcagctctaaagggccaccccaacaacgtggtctccatcaagtactgcagccactcggggcttgtgttctccgtgtccacctcctacatcaaggtgtgggacatccgggactcagccaagtgcattcggactctcacgtcctcgggccaggtgatctcaggggatgcctgtgccgccacatccacccgtgccatcaccagtgctcagggcgagcatcagatcaaccagatcgccctcagcccttcgggcaccatgctgtacgccgcctcgggcaatgccgtccgcatctgggagcttagcaggttccagcctgtcggcaagctgactggccacatcggccctgtgatgtgcctgacggtcacccagacggccagccagcatgacctcgtggtgactggctccaaggaccactacgttaagatgttcgagctgggcgagtgtgtgacgggcaccatcggccccactcacaacttcgagcccccgcactacgatggcatcgagtgtctcgccatccagggagacatcctgttcagtggctcccgagataacggcatcaagaagtgggacctagaccagcaggagctcatccagcaaatccccaatgcgcacaaggactgggtgtgcgccctggccttcatcccgggccgccccatgctgctcagcgcctgccgtgcgggtgtcatcaaggtctggaacgtggacaacttcacacccatcggtgagatcaagggccacgacagtcccatcaatgccatctgcaccaatgccaagcatatcttcacagcctccagtgacctgacggtgaagttctggagtgtccggcggttaccccacagcggcccaccctaggagtgaggtcagagggatgcccccggaccctcgaccccagcagcctggacaccatggaagggaagctgtgacccggccgatggggccagctgctctggggacagagggcgtggccccctctcctgccctcctccctctcccttggccttcccacaggacactgttccctcatccctcccctgcctctcaggagcctctgggtgagagagaggctggggaggaaattaagctgtgaagccaaagggcattatcccttcttgttcccctcctggcagtcgtggccacattgtctcctgctgaaccggctctgcccctttctcaggcctttggcccagtggtggagccctgtggggaggtgcagcagcctggccccatcccacccttccgaggagctggcctccccgcttctcccagcccagcctctagagccactgcacctgcctctgagcccaaaaagataagtcctcaggtagctaaggaaaccaggtgtgggcggctgggccttgcagctaacccttaaccctctggcaacccgcagatagccccaactggccccaacagttccctggggtcccttttggatggggccaaggtggagctgctagaaagattcctttggggagatggtcagaaatacttcagttatttattattttgttatttttattttttgctgttgcctcctggaaacggacttgaagtttcttcccctatattctttccctcagctcttgggggccagaaatcccaaagggagtccgctgccccggccctccagggccgcctcctctgtttgctttgcagaggagggaactgctccttcgactctgcagctcaggcctgtccccgacacagcccccagggagtcttctagctacccctggcctctaggccgcctgacgctcagtgccttcctccgttccggggcctggcacccgtgccgggcagccttacaccagccatgcccgcggcaccacatgtgtcttctcactcgcgaggtcttgtgcccagcgcccccgggaaggcgggggcgctcaccccacagcccaggccccggggttctgccccacagtcctgcgtgggccacgtaggaagcagcgtgggggctgtgtctgctgggaggtggcttggatggggaggacagcccggcaccctgacccccgcccctccccagccctgcagtcccccactgggccggggagtctctccagcttctctctctctggttattcaggagacacattttcggccttaaaactggcatggagcgcaggccctcccttgcagaaaattatcaaggaagagggagttggcagagtttctctgccccggggctggggacgcggagctccggggaaattgttaaatcagtgttctggcgccccctgttgggggaactctggaattacaggagtgggccttgggggggactgagctccatccctctcccccgccccacccccacccaaagttgcccaccctgtttttccgttgcatcgctggtcttgtgcttcccgcttcagtctgggagccaagagccagccccacctcccttcagaggacgcagtgacttttggactttccagaggtggttctgtgtttctgcccttggctcctctccgtcttgggctggggcacttggagccctctccatgtggcgcccagtgttggggggaggcaggctccagtggaggctgagtgaggcctggtcccttccccgtgccctcctcggagctgccacagaggctaagacggctgtcctgctggtgctggccctgctggatgtggtattgaagtctggggcagctgatagcaggaaggagacccccttggatgctggtctcctgggacctgaacagtctgtcagcaatggctggaaatccttcttcctctggccaccccgggggtgccgggcaacccccttagctctaagatgtggccacaaatctcttcccactcctccccgccaacctgaacagaaagttttgaccttgcaacctgtaagaaagaatccgtccgcatgactgtttacaagcgatagaaacacgtaagactctgtccccttgagctcccacccccgggccggggatgccccacctggggtgactgcactgtagctgcaaggcgtgttcttgcacgaagtgtgatcttatggccctgcgagaggtgctcatcatcatgcccattttctgctgtttctgatgggtcagctacctcacggcggggccagctctgctgtcctggcaagtgtcattgactctctaaacttgaagtccttcaggagccctgagcccaacatccatgagacaccccgagttgtgcttcatgagagttggattctctgcccactctttcagggatgtccaaggtccatgttagggggcaggcccccagctccactcactgcacaagcaccctaaatgttggaagcacaaaatggttgtgatttgagcacaatggcagggtcccgcaggcagacttgacaggcccaggcccgggaggatccccccacgttggctctgtccaaagtgagattgggggtgcctgtgtctgggacagggggctgcccttgctcagaccaggccttggctcatggcttgtcctaattctgggactcgtcatcttacttcttgcccttctgtgcccatcttaagactggaggctgagccttgtcaggcccagccacatctttacgccatgggaccaggagtaaagcgctctctaaaccccgcaccccaaatctctaaacgcctgagttcaggctgagtcctagccctagtgagcctgaagagcttggactgattcccagtctcctgggtcaagccccactttgtgctttcgaagcttatgagcgggttccctggatagaaggagtcttccatccccactgcccttgggcctcttcagcatagtcctgtgccagggccctgtcctcactatcagtcagttcagtatttgctttcacgtgagtggcggactcttctgaagcagccagaactctcaaaggcagcgcatggagttgccttgcgagatttccaaggaaggaggaaagattaacaggcggagcctggcacacccaagcctttgaggtggtcagagtgccaccttcagccccttgggaagggacagcggtgggtctgggagtggcctcaccctggattcagcctaggaatctcttcaccctcagctgtccagccctgctgcctgtctggggatgtgtggcctgggcagagggcagtttaaagcacaaaaccacatggggaaaacacaaggttgcggggactttctcatgtgcctgatgtggtggagggagacaccagcaggtggctgcagtgacgttagggaacataacacttctttgccctgctagctctcagctctggggggcatcccccgatgtggtctgggctgggagcaggcatatcccctggttgttgcctgtgcctggtctgttcaccatcgtgtttgtgtgggcagagcctgccctgcaggagcagtgactttcttcccactgtgtgtcccggacctgtggtatgtgtccctttgccatcccaaacaggcaactgcttgctgctctccttgcttggcatagcctcctggtcagtggccaatgccccacaggccttcctgggcctggccctcctctcctgactcccagatccttccctgccctcttgtgtgcaaggacagattttgcagggaaagttctgtttcttctttgatacctttgttctgtcccctgccccatccccagcactcatgatcttgaagcccctatcacactctagttcagtcctgtgaaccatgtcctgagggccttgcagggaagtaggaaatagaaactcctccacaaagagccgaggatcagagaagacccctgagatgaatcagggccctgccctgcccaccaactcttttctagcaatcatgtcctgcccaggctgcaggcttcattaggctcctgctgtcctccatgatgtgactagcacaaggtgtatatatgttttgtacctctgccgatggctgtacatagtgtatgaaagttatttaagccccatgttgtacatttctgttcctagattggatgtgtgtgttctaagaagttgtcataaataaaacctgaatgaccaatgtc

SEQ ID NO: 450508 - DNA, 6411 bp, Homo sapiens
gggaccatcctgcgcccactgtcaatggcacccgtcctgcccgaaagaagttccagaagaagggggccagccagagcttcagtaaggcggcaaggctcaagtggcagtccctggagcgacggatcattgacatcgtcatgcagagaatgaccattgtcaacctggaggctgacatggagcggctcatcaagaaaagggaggagctgttcctcctgcaggaggcactgcggaggaagcgggagcggctgcaggctgagagccccgaggaagagaaggggctgcaggagctggctgaggagatcgaggtgctggcagccaacattgactacatcaatgacggcatcaccgactgccaggccaccatcgtgcagctggaggagaccaaggaggagctggactccacagacacatccgtggtcatcagctcctgctccctggctgaagcccgcctcctgctagacaacttcctcaaggcatccattgacaaggggctgcaagtggcacaaaaggaagcccagatccggctgttggagggccgactgaggcagacggatatggcaggctcctcccagaaccatctgctcctggacgccctgcgtgagaaggctgaagctcaccccgagctgcaggccctcatctacaatgtgcagcaggagaatggctacgccagcacagatgaggagatctcagagttctctgagggcagcttctcccagtcattcaccatgaaaggctccaccagccatgacgatttcaagttcaagagcgagcccaaactgtctgcccaaatgaaagctgtgtcggctgagtgcctgggccccccactggatatctccaccaagaacatcaccaagtccctggcctccctcgttgagatcaaagaggacggagtgggcttctctgtccgagacccctattaccgggacagggtctcgcgcaccgtcagtctgcctacccggggcagcactttccctaggcaatctcgagccacagagacgtccccgctgacgagaaggaagtcctacgaccgagggcagcccattaggtccacagatgtgggattcacacccccatcatcccctcccactcggccccgcaatgaccgcaatgtcttctctcgtctcaccagtaatcagagccaggggtcagcgctggacaagtctgatgacagcgactcctctttgtcggaggtcctgaggggcatcatctccccggttggaggagccaagggtgcacggacggccccactgcagtgtgtctccatggccgaaggccacaccaagcccatcctctgcctggatgccacagatgagttgctattcacagggtccaaagaccgaagctgcaagatgtggaacttggttacgggacaggagatcgcagctctaaagggccaccccaacaacgtggtctccatcaagtactgcagccactcggggcttgtgttctccgtgtccacctcctacatcaaggtgtgggacatccgggactcagccaagtgcattcggactctcacgtcctcgggccaggtgatctcaggggatgcctgtgccgccacatccacccgtgccatcaccagtgctcagggcgagcatcagatcaaccagatcgccctcagcccttcgggcaccatgctgtacgccgcctcgggcaatgccgtccgcatctgggagcttagcaggttccagcctgtcggcaagctgactggccacatcggccctgtgatgtgcctgacggtcacccagacggccagccagcatgacctcgtggtgactggctccaaggaccactacgttaagatgttcgagctgggcgagtgtgtgacgggcaccatcggccccactcacaacttcgagcccccgcactacgatggcatcgagtgtctcgccatccagggagacatcctgttcagtggctcccgagataacggcatcaagaagtgggacctagaccagcaggagctcatccagcaaatccccaatgcgcacaaggactgggtgtgcgccctggccttcatcccgggccgccccatgctgctcagcgcctgccgtgcgggtgtcatcaaggtctggaacgtggacaacttcacacccatcggtgagatcaagggccacgacagtcccatcaatgccatctgcaccaaatttgtggggcgccccccaaaaaggggccaattatatatctttcgcaaccccaaaggggggccccctctcacagttgacctgacggtgaagttctggagtgtccggcggttaccccacagcggcccaccctaggagtgaggtcagagggatgcccccggaccctcgaccccagcagcctggacaccatggaagggaagctgtgacccggccgatggggccagctgctctggggacagagggcgtggccccctctcctgccctcctccctctcccttggccttcccacaggacactgttccctcatccctcccctgcctctcaggagcctctgggtgagagagaggctggggaggaaattaagctgtgaagccaaagggcattatcccttcttgttcccctcctggcagtcgtggccacattgtctcctgctgaaccggctctgcccctttctcaggcctttggcccagtggtggagccctgtggggaggtgcagcagcctggccccatcccacccttccgaggagctggcctccccgcttctcccagcccagcctctagagccactgcacctgcctctgagcccaaaaagataagtcctcaggtagctaaggaaaccaggtgtgggcggctgggccttgcagctaacccttaaccctctggcaacccgcagatagccccaactggccccaacagttccctggggtcccttttggatggggccaaggtggagctgctagaaagattcctttggggagatggtcagaaatacttcagttatttattattttgttatttttattttttgctgttgcctcctggaaacggacttgaagtttcttcccctatattctttccctcagctcttgggggccagaaatcccaaagggagtccgctgccccggccctccagggccgcctcctctgtttgctttgcagaggagggaactgctccttcgactctgcagctcaggcctgtccccgacacagcccccagggagtcttctagctacccctggcctctaggccgcctgacgctcagtgccttcctccgttccggggcctggcacccgtgccgggcagccttacaccagccatgcccgcggcaccacatgtgtcttctcactcgcgaggtcttgtgcccagcgcccccgggaaggcgggggcgctcaccccacagcccaggccccggggttctgccccacagtcctgcgtgggccacgtaggaagcagcgtgggggctgtgtctgctgggaggtggcttggatggggaggacagcccggcaccctgacccccgcccctccccagccctgcagtcccccactgggccggggagtctctccagcttctctctctctggttattcaggagacacattttcggccttaaaactggcatggagcgcaggccctcccttgcagaaaattatcaaggaagagggagttggcagagtttctctgccccggggctggggacgcggagctccggggaaattgttaaatcagtgttctggcgccccctgttgggggaactctggaattacaggagtgggccttgggggggactgagctccatccctctcccccgccccacccccacccaaagttgcccaccctgtttttccgttgcatcgctggtcttgtgcttcccgcttcagtctgggagccaagagccagccccacctcccttcagaggacgcagtgacttttggactttccagaggtggttctgtgtttctgcccttggctcctctccgtcttgggctggggcacttggagccctctccatgtggcgcccagtgttggggggaggcaggctccagtggaggctgagtgaggcctggtcccttccccgtgccctcctcggagctgccacagaggctaagacggctgtcctgctggtgctggccctgctggatgtggtattgaagtctggggcagctgatagcaggaaggagacccccttggatgctggtctcctgggacctgaacagtctgtcagcaatggctggaaatccttcttcctctggccaccccgggggtgccgggcaacccccttagctctaagatgtggccacaaatctcttcccactcctccccgccaacctgaacagaaagttttgaccttgcaacctgtaagaaagaatccgtccgcatgactgtttacaagcgatagaaacacgtaagactctgtccccttgagctcccacccccgggccggggatgccccacctggggtgactgcactgtagctgcaaggcgtgttcttgcacgaagtgtgatcttatggccctgcgagaggtgctcatcatcatgcccattttctgctgtttctgatgggtcagctacctcacggcggggccagctctgctgtcctggcaagtgtcattgactctctaaacttgaagtccttcaggagccctgagcccaacatccatgagacaccccgagttgtgcttcatgagagttggattctctgcccactctttcagggatgtccaaggtccatgttagggggcaggcccccagctccactcactgcacaagcaccctaaatgttggaagcacaaaatggttgtgatttgagcacaatggcagggtcccgcaggcagacttgacaggcccaggcccgggaggatccccccacgttggctctgtccaaagtgagattgggggtgcctgtgtctgggacagggggctgcccttgctcagaccaggccttggctcatggcttgtcctaattctgggactcgtcatcttacttcttgcccttctgtgcccatcttaagactggaggctgagccttgtcaggcccagccacatctttacgccatgggaccaggagtaaagcgctctctaaaccccgcaccccaaatctctaaacgcctgagttcaggctgagtcctagccctagtgagcctgaagagcttggactgattcccagtctcctgggtcaagccccactttgtgctttcgaagcttatgagcgggttccctggatagaaggagtcttccatccccactgcccttgggcctcttcagcatagtcctgtgccagggccctgtcctcactatcagtcagttcagtatttgctttcacgtgagtggcggactcttctgaagcagccagaactctcaaaggcagcgcatggagttgccttgcgagatttccaaggaaggaggaaagattaacaggcggagcctggcacacccaagcctttgaggtggtcagagtgccaccttcagccccttgggaagggacagcggtgggtctgggagtggcctcaccctggattcagcctaggaatctcttcaccctcagctgtccagccctgctgcctgtctggggatgtgtggcctgggcagagggcagtttaaagcacaaaaccacatggggaaaacacaaggttgcggggactttctcatgtgcctgatgtggtggagggagacaccagcaggtggctgcagtgacgttagggaacataacacttctttgccctgctagctctcagctctggggggcatcccccgatgtggtctgggctgggagcaggcatatcccctggttgttgcctgtgcctggtctgttcaccatcgtgtttgtgtgggcagagcctgccctgcaggagcagtgactttcttcccactgtgtgtcccggacctgtggtatgtgtccctttgccatcccaaacaggcaactgcttgctgctctccttgcttggcatagcctcctggtcagtggccaatgccccacaggccttcctgggcctggccctcctctcctgactcccagatccttccctgccctcttgtgtgcaaggacagattttgcagggaaagttctgtttcttctttgatacctttgttctgtcccctgccccatccccagcactcatgatcttgaagcccctatcacactctagttcagtcctgtgaaccatgtcctgagggccttgcagggaagtaggaaatagaaactcctccacaaagagccgaggatcagagaagacccctgagatgaatcagggccctgccctgcccaccaactcttttctagcaatcatgtcctgcccaggctgcaggcttcattaggctcctgctgtcctccatgatgtgactagcacaaggtgtatatatgttttgtacctctgccgatggctgtacatagtgtatgaaagttatttaagccccatgttgtacatttctgttcctagattggatgtgtgtgttctaagaagttgtcataaataaaacctgaatgaccaatgtc

SEQ ID NO: 450509 - DNA, 3715 bp, Homo sapiens
  misc_feature (16)..(16): n is a, c, g, or t
  misc_feature (23)..(23): n is a, c, g, or t
tccatgtggtacgccncgagtantcgattcgtcgaccgagcctcctcaggtagctaaggaaaccaggtgtgggcggctgggccttgcagctaacccttaaccctctggcaacccgcagatagccccaactggccccaacagttccctggggtcccttttggatggggccaaggtggagctgctagaaagattcctttggggagatggtcagaaatacttcagttatttattattttgttatttttattttttgctgttgcctcctggaaacggacttgaagtttcttcccctatattctttccctcagctcttgggggccagaaatcccaaagggagtccgctgccccggccctccagggccgcctcctctgtttgctttgcagaggagggaactgctccttcgactctgcagctcaggcctgtccccgacacagcccccagggagtcttctagctacccctggcctctaggccgcctgacgctcagtgccttcctccgttccggggcctggcacccgtgccgggcagccttacaccagccatgcccgcggcaccacatgtgtcttctcactcgcgaggtcttgtgcccagcgcccccgggaaggcgggggcgctcaccccacagcccaggccccggggttctgccccacagtcctgcgtgggccacgtaggaagcagcgtgggggctgtgtctgctgggaggtggcttggatggggaggacagcccggcaccctgacccccgcccctccccagccctgcagtcccccactgggccggggagtctctccagcttctctctctctggttattcaggagacacattttcggccttaaaactggcatggagcgcaggccctcccttgcagaaaattatcaaggaagagggagttggcagagtttctctgccccggggctggggacgcggagctccggggaaattgttaaatcagtgttctggcgccccctgttgggggaactctggaattacaggagtgggccttgggggggactgagctccatccctctcccccgccccacccccacccaaagttgcccaccctgtttttccgttgcatcgctggtcttgtgcttcccgcttcagtctgggagccaagagccagccccacctcccttcagaggacgcagtgacttttggactttccagaggtggttctgtgtttctgcccttggctcctctccgtcttgggctggggcacttggagccctctccatgtggcgcccagtgttggggggaggcaggctccagtggaggctgagtgaggcctggtcccttccccgtgccctcctcggagctgccacagaggctaagacggctgtcctgctggtgctggccctgctggatgtggtattgaagtctggggcagctgatagcaggaaggagacccccttggatgctggtctcctgggacctgaacagtctgtcagcaatggctggaaatccttcttcctctggccaccccgggggtgccgggcaacccccttagctctaagatgtggccacaaatctcttcccactcctccccgccaacctgaacagaaagttttgaccttgcaacctgtaagaaagaatccgtccgcatgactgtttacaagcgatagaaacacgtaagactctgtccccttgagctcccacccccgggccggggatgccccacctggggtgactgcactgtagctgcaaggcgtgttcttgcacgaagtgtgatcttatggccctgcgagaggtgctcatcatcatgcccattttctgctgtttctgatgggtcagctacctcacggcggggccagctctgctgtcctggcaagtgtcattgactctctaaacttgaagtccttcaggagccctgagcccaacatccatgagacaccccgagttgtgcttcatgagagttggattctctgcccactctttcagggatgtccaaggtccatgttagggggcaggcccccagctccactcactgcacaagcaccctaaatgttggaagcacaaaatggttgtgatttgagcacaatggcagggtcccgcaggcagacttgacaggcccaggcccgggaggatccccccacgttggctctgtccaaagtgagattgggggtgcctgtgtctgggacagggggctgcccttgctcagaccaggccttggctcatggcttgtcctaattctgggactcgtcatcttacttcttgcccttctgtgcccatcttaagactggaggctgagccttgtcaggcccagccacatctttacgccatgggaccaggagtaaagcgctctctaaaccccgcaccccaaatctctaaacgcctgagttcaggctgagtcctagccctagtgagcctgaagagcttggactgattcccagtctcctgggtcaagccccactttgtgctttcgaagcttatgagcgggttccctggatagaaggagtcttccatccccactgcccttgggcctcttcagcatagtcctgtgccagggccctgtcctcactatcagtcagttcagtatttgctttcacgtgagtggcggactcttctgaagcagccagaactctcaaaggcagcgcatggagttgccttgcgagatttccaaggaaggaggaaagattaacaggcggagcctggcacacccaagcctttgaggtggtcagagtgccaccttcagccccttgggaagggacagcggtgggtctgggagtggcctcaccctggattcagcctaggaatctcttcaccctcagctgtccagccctgctgcctgtctggggatgtgtggcctgggcagagggcagtttaaagcacaaaaccacatggggaaaacacaaggttgcggggactttctcatgtgcctgatgtggtggagggagacaccagcaggtggctgcagtgacgttagggaacataacacttctttgccctgctagctctcagctctggggggcatcccccgatgtggtctgggctgggagcaggcatatcccctggttgttgcctgtgcctggtctgttcaccatcgtgtttgtgtgggcagagcctgccctgcaggagcagtgactttcttcccactgtgtgtcccggacctgtggtatgtgtccctttgccatcccaaacaggcaactgcttgctgctctccttgcttggcatagcctcctggtcagtggccaatgccccacaggccttcctgggcctggccctcctctcctgactcccagatccttccctgccctcttgtgtgcaaggacagattttgcagggaaagttctgtttcttctttgatacctttgttctgtcccctgccccatccccagcactcatgatcttgaagcccctatcacactctagttcagtcctgtgaaccatgtcctgagggccttgcagggaagtaggaaatagaaactcctccacaaagagccgaggatcagagaagacccctgagatgaatcagggccctgccctgcccaccaactcttttctagcaatcatgtcctgcccaggctgcaggcttcattaggctcctgctgtcctccatgatgtgactagcacaaggtgtatatatgttttgtacctctgccgatggctgtacatagtgtatgaaagttatttaagccccatgttgtacatttctgttcctagattggatgtgtgtgttctaagaagttgtcataaataaaacctgaatgaccaatgtc

SEQ ID NO: 450510 - DNA, 6425 bp, Homo sapiens
gggaccatcctgcgcccactgtcaatggcacccgtcctgcccgaaagaagttccagaagaagggggccagccagagcttcagtaaggcggcaaggctcaagtggcagtccctggagcgacggatcattgacatcgtcatgcagagaatgaccattgtcaacctggaggctgacatggagcggctcatcaagaaaagggaggagctgttcctcctgcaggaggcactgcggaggaagcgggagcggctgcaggctgagagccccgaggaagagaaggggctgcaggagctggctgaggagatcgaggtgctggcagccaacattgactacatcaatgacggcatcaccgactgccaggccaccatcgtgcagctggaggagaccaaggaggagctggactccacagacacatccgtggtcatcagctcctgctccctggctgaagcccgcctcctgctagacaacttcctcaaggcatccattgacaaggggctgcaagtggcacaaaaggaagcccagatccggctgttggagggccgactgaggcagacggatatggcaggctcctcccagaaccatctgctcctggacgccctgcgtgagaaggctgaagctcaccccgagctgcaggccctcatctacaatgtgcagcaggagaatggctacgccagcacagatgaggagatctcagagttctctgagggcagcttctcccagtcattcaccatgaaaggctccaccagccatgacgatttcaagttcaagagcgagcccaaactgtctgcccaaatgaaagctgtgtcggctgagtgcctgggccccccactggatatctccaccaagaacatcaccaagtccctggcctccctcgttgagatcaaagaggacggagtgggcttctctgtccgagacccctattaccgggacagggtctcgcgcaccgtcagtctgcctacccggggcagcactttccctaggcaatctcgagccacagagacgtccccgctgacgagaaggaagtcctacgaccgagggcagcccattaggtccacagatgtgggattcacacccccatcatcccctcccactcggccccgcaatgaccgcaatgtcttctctcgtctcaccagtaatcagagccaggggtcagcgctggacaagtctgatgacagcgactcctctttgtcggaggtcctgaggggcatcatctccccggttggaggagccaagggtgcacggacggccccactgcagtgtgtctccatggccgaaggccacaccaagcccatcctctgcctggatgccacagatgagttgctattcacagggtccaaagaccgaagctgcaagatgtggaacttggttacgggacaggagatcgcagctctaaagggccaccccaacaacgtggtctccatcaagtactgcagccactcggggcttgtgttctccgtgtccacctcctacatcaaggtgtgggacatccgggactcagccaagtgcattcggactctcacgtcctcgggccaggtgatctcaggggatgcctgtgccgccacatccacccgtgccatcaccagtgctcagggcgagcatcagatcaaccagatcgccctcagcccttcgggcaccatgctgtacgccgcctcgggcaatgccgtccgcatctgggagcttagcaggttccagcctgtcggcaagctgactggccacatcggccctgtgatgtgcctgacggtcacccagacggccagccagcatgacctcgtggtgactggctccaaggaccactacgttaagatgttcgagctgggcgagtgtgtgacgggcaccatcggccccactcacaacttcgagcccccgcactacgatggcatcgagtgtctcgccatccagggagacatcctgttcagtggctcccgagataacggcatcaagaagtgggacctagaccagcaggagctcatccagcaaatccccaatgcgcacaaggactgggtgtgcgccctggccttcatcccgggccgccccatgctgctcagcgcctgccgtgcgggtgtcatcaaggtctggaacgtggacaacttcacacccatcggtgagatcaagggccacgacagtcccatcaatgccatctgcaccaatgccaagcatatcttcacagcctccagtgacctgacggtgaagttctggagtgtccggcggttaccccacagcggcccaccctaggagtgaggtcagagggatgcccccggaccctcgaccccagcagcctggacaccatggaagggaagctgtgacccggccgatggggccagctgctctggggacagagggcgtggccccctctcctgccctcctccctctcccttggccttcccacaggacactgttccctcatccctcccctgcctctcaggagcctctgggtgagagagaggctggggaggaaattaagctgtgaagccaaagggcattatcccttcttgttcccctcctggcagtcgtggccacattgtctcctgctgaaccggctctgcccctttctcaggcctttggcccagtggtggagccctgtggggaggtgcagcagcctggccccatcccacccttccgaggagctggcctccccgcttctcccagcccagcctctagagccactgcacctgcctctgagcccaaaaagataagtcctcaggtagctaaggaaaccaggtgtgggcggctgggccttgcagctaacccttaaccctctggcaacccgcagatagccccaactggccccaacagttccctggggtcccttttggatggggccaaggtggagctgctagaaagattcctttggggagatggtcagaaatacttcagttatttattattttgttatttttattttttgctgttgcctcctggaaacggacttgaagtttcttcccctatattctttccctcagctcttgggggccagaaatcccaaagggagtccgctgccccggccctccagggccgcctcctctgtttgctttgcagaggagggaactgctccttcgactctgcagctcaggcctgtccccgacacagcccccagggagtcttctagctacccctggcctctaggccgcctgacgctcagtgccttcctccgttccggggcctggcacccgtgccgggcagccttacaccagccatgcccgcggcaccacatgtgtcttctcactcgcgaggtcttgtgcccagcgcccccgggaaggcgggggcgctcaccccacagcccaggccccggggttctgccccacagtcctgcgtgggccacgtaggaagcagcgtgggggctgtgtctgctgggaggtggcttggatggggaggacagcccggcaccctgacccccgcccctccccagccctgcagtcccccactgggccggggagtctctccagcttctctctctctggttattcaggagacacattttcggccttaaaactggcatggagcgcaggccctcccttgcagaaaattatcaaggaagagggagttggcagagtttctctgccccggggctggggacgcggagctccggggaaattgttaaatcagtgttctggcgccccctgttgggggaactctggaattacaggagtgggccttgggggggactgagctccatccctctcccccgccccacccccacccaaagttgcccaccctgtttttccgttgcatcgctggtcttgtgcttcccgcttcagtctgggagccaagagccagccccacctcccttcagaggacgcagtgacttttggactttccagaggtggttctgtgtttctgcccttggctcctctccgtcttgggctggggcacttggagccctctccatgtggcgcccagtgttggggggaggcaggctccagtggaggctgagtgaggcctggtcccttccccgtgccctcctcggagctgccacagaggctaagacggctgtcctgctggtgctggccctgctggatgtggtattgaagtctggggcagctgatagcaggaaggagacccccttggatgctggtctcctgggacctgaacagtctgtcagcaatggctggaaatccttcttcctctggccaccccgggggtgccgggcaacccccttagctctaagatgtggccacaaatctcttcccactcctccccgccaacctgaacagaaagttttgaccttgcaacctgtaagaaagaatccgtccgcatgactgtttacaagcgatagaaacacgtaagactctgtccccttgagctcccacccccgggccggggatgccccacctggggtgactgcactgtagctgcaaggcgtgttcttgcacgaagtgtgatcttatggccctgcgagaggtgctcatcatcatgcccattttctgctgtttctgatgggtcagctacctcacggcggggccagctctgctgtcctggcaagtgtcattgactctctaaacttgaagtccttcaggagccctgagcccaacatccatgagacaccccgagttgtgcttcatgagagttggattctctgcccactctttcagggatgtccaaggtccatgttagggggcaggcccccagctccactcactgcacaagcaccctaaatgttggaagcacaaaatggttgtgatttgagcacaatggcagggtcccgcaggcagacttgacaggcccaggcccgggaggatccccccacgttggctctgtccaaagtgagattgggggtgcctgtgtctgggacagggggctgcccttgctcagaccaggccttggctcatggcttgtcctaattctgggactcgtcatcttacttcttgcccttctgtgcccatcttaagactggaggctgagccttgtcaggcccagccacatctttacgccatgggaccaggagtaaagcgctctctaaaccccgcaccccaaatctctaaacgcctgagttcaggctgagtcctagccctagtgagcctgaagagcttggactgattcccagtctcctgggtcaagccccactttgtgctttcgaagcttatgagcgggttccctggatagaaggagtcttccatccccactgcccttgggcctcttcagcatagtcctgtgccagggccctgtcctcactatcagtcagttcagtatttgctttcacgtgagtggcggactcttctgaagcagccagaactctcaaaggcagcgcatggagttgccttgcgagatttccaaggaaggaggaaagattaacaggcggagcctggcacacccaagcctttgaggtggtcagagtgccaccttcagccccttgggaagggacagcggtgggtctgggagtggcctcaccctggattcagcctaggaatctcttcaccctcagctgtccagccctgctgcctgtctggggatgtgtggcctgggcagagggcagtttaaagcacaaaaccacatggggaaaacacaaggttgcggggactttctcatgtgcctgatgtggtggagggagacaccagcaggtggctgcagtgacgttagggaacataacacttctttgccctgctagctctcagctctggggggcatcccccgatgtggtctgggctgggagcaggcatatcccctggttgttgcctgtgcctggtctgttcaccatcgtgtttgtgtgggcagagcctgccctgcaggagcagtgactttcttcccactgtgtgtcccggacctgtggtatgtgtccctttgccatcccaaacaggcaactgcttgctgctctccttgcttggcatagcctcctggtcagtggccaatgccccacaggccttcctgggcctggccctcctctcctgactcccagatccttccctgccctcttgtgtgcaaggacagattttgcagggaaagttctgtttcttctttgatacctttgttctgtcccctgccccatccccagcactcatgatcttgaagcccctatcacactctagttcagtcctgtgaaccatgtcctgagggccttgcagggaagtaggaaatagaaactcctccacaaagagccgaggatcagagaagacccctgagatgaatcagggccctgccctgcccaccaactcttttctagcaatcatgtcctgcccaggctgcaggcttcattaggctcctgctgtcctccatgatgtgactagcacaaggtgtatatatgttttgtacctctgccgatggctgtacatagtgtatgaaagttatttaagccccatgttgtacatttctgttcctagattggatgtgtgtgttctaagaagttgtcataaataaaacctgaatgaccaatgtcaaaaaaaacacaaggggggggcaaaatacccggggcagattcggttcggttttggaagggca

SEQ ID NO: 450511 - DNA, 6415 bp, Homo sapiens
  misc_feature (6409)..(6409): n is a, c, g, or t
gggaccatcctgcgcccactgtcaatggcacccgtcctgcccgaaagaagttccagaagaagggggccagccagagcttcagtaaggcggcaaggctcaagtggcagtccctggagcgacggatcattgacatcgtcatgcagagaatgaccattgtcaacctggaggctgacatggagcggctcatcaagaaaagggaggagctgttcctcctgcaggaggcactgcggaggaagcgggagcggctgcaggctgagagccccgaggaagagaaggggctgcaggagctggctgaggagatcgaggtgctggcagccaacattgactacatcaatgacggcatcaccgactgccaggccaccatcgtgcagctggaggagaccaaggaggagctggactccacagacacatccgtggtcatcagctcctgctccctggctgaagcccgcctcctgctagacaacttcctcaaggcatccattgacaaggggctgcaagtggcacaaaaggaagcccagatccggctgttggagggccgactgaggcagacggatatggcaggctcctcccagaaccatctgctcctggacgccctgcgtgagaaggctgaagctcaccccgagctgcaggccctcatctacaatgtgcagcaggagaatggctacgccagcacagatgaggagatctcagagttctctgagggcagcttctcccagtcattcaccatgaaaggctccaccagccatgacgatttcaagttcaagagcgagcccaaactgtctgcccaaatgaaagctgtgtcggctgagtgcctgggccccccactggatatctccaccaagaacatcaccaagtccctggcctccctcgttgagatcaaagaggacggagtgggcttctctgtccgagacccctattaccgggacagggtctcgcgcaccgtcagtctgcctacccggggcagcactttccctaggcaatctcgagccacagagacgtccccgctgacgagaaggaagtcctacgaccgagggcagcccattaggtccacagatgtgggattcacacccccatcatcccctcccactcggccccgcaatgaccgcaatgtcttctctcgtctcaccagtaatcagagccaggggtcagcgctggacaagtctgatgacagcgactcctctttgtcggaggtcctgaggggcatcatctccccggttggaggagccaagggtgcacggacggccccactgcagtgtgtctccatggccgaaggccacaccaagcccatcctctgcctggatgccacagatgagttgctattcacagggtccaaagaccgaagctgcaagatgtggaacttggttacgggacaggagatcgcagctctaaagggccaccccaacaacgtggtctccatcaagtactgcagccactcggggcttgtgttctccgtgtccacctcctacatcaaggtgtgggacatccgggactcagccaagtgcattcggactctcacgtcctcgggccaggtgatctcaggggatgcctgtgccgccacatccacccgtgccatcaccagtgctcagggcgagcatcagatcaaccagatcgccctcagcccttcgggcaccatgctgtacgccgcctcgggcaatgccgtccgcatctgggagcttagcaggttccagcctgtcggcaagctgactggccacatcggccctgtgatgtgcctgacggtcacccagacggccagccagcatgacctcgtggtgactggctccaaggaccactacgttaagatgttcgagctgggcgagtgtgtgacgggcaccatcggccccactcacaacttcgagcccccgcactacgatggcatcgagtgtctcgccatccagggagacatcctgttcagtggctcccgagataacggcatcaagaagtgggacctagaccagcaggagctcatccagcaaatccccaatgcgcacaaggactgggtgtgcgccctggccttcatcccgggccgccccatgctgctcagcgcctgccgtgcgggtgtcatcaaggtctggaacgtggacaacttcacacccatcggtgagatcaagggccacgacagtcccatcaatgccatctgcaccaatgccaagcatatcttcacagcctccagtgacctgacggtgaagttctggagtgtccggcggttaccccacagcggcccaccctaggagtgaggtcagagggatgcccccggaccctcgaccccagcagcctggacaccatggaagggaagctgtgacccggccgatggggccagctgctctggggacagagggcgtggccccctctcctgccctcctccctctcccttggccttcccacaggacactgttccctcatccctcccctgcctctcaggagcctctgggtgagagagaggctggggaggaaattaagctgtgaagccaaagggcattatcccttcttgttcccctcctggcagtcgtggccacattgtctcctgctgaaccggctctgcccctttctcaggcctttggcccagtggtggagccctgtggggaggtgcagcagcctggccccatcccacccttccgaggagctggcctccccgcttctcccagcccagcctctagagccactgcacctgcctctgagcccaaaaagataagtcctcaggtagctaaggaaaccaggtgtgggcggctgggccttgcagctaacccttaaccctctggcaacccgcagatagccccaactggccccaacagttccctggggtcccttttggatggggccaaggtggagctgctagaaagattcctttggggagatggtcagaaatacttcagttatttattattttgttatttttattttttgctgttgcctcctggaaacggacttgaagtttcttcccctatattctttccctcagctcttgggggccagaaatcccaaagggagtccgctgccccggccctccagggccgcctcctctgtttgctttgcagaggagggaactgctccttcgactctgcagctcaggcctgtccccgacacagcccccagggagtcttctagctacccctggcctctaggccgcctgacgctcagtgccttcctccgttccggggcctggcacccgtgccgggcagccttacaccagccatgcccgcggcaccacatgtgtcttctcactcgcgaggtcttgtgcccagcgcccccgggaaggcgggggcgctcaccccacagcccaggccccggggttctgccccacagtcctgcgtgggccacgtaggaagcagcgtgggggctgtgtctgctgggaggtggcttggatggggaggacagcccggcaccctgacccccgcccctccccagccctgcagtcccccactgggccggggagtctctccagcttctctctctctggttattcaggagacacattttcggccttaaaactggcatggagcgcaggccctcccttgcagaaaattatcaaggaagagggagttggcagagtttctctgccccggggctggggacgcggagctccggggaaattgttaaatcagtgttctggcgccccctgttgggggaactctggaattacaggagtgggccttgggggggactgagctccatccctctcccccgccccacccccacccaaagttgcccaccctgtttttccgttgcatcgctggtcttgtgcttcccgcttcagtctgggagccaagagccagccccacctcccttcagaggacgcagtgacttttggactttccagaggtggttctgtgtttctgcccttggctcctctccgtcttgggctggggcacttggagccctctccatgtggcgcccagtgttggggggaggcaggctccagtggaggctgagtgaggcctggtcccttccccgtgccctcctcggagctgccacagaggctaagacggctgtcctgctggtgctggccctgctggatgtggtattgaagtctggggcagctgatagcaggaaggagacccccttggatgctggtctcctgggacctgaacagtctgtcagcaatggctggaaatccttcttcctctggccaccccgggggtgccgggcaacccccttagctctaagatgtggccacaaatctcttcccactcctccccgccaacctgaacagaaagttttgaccttgcaacctgtaagaaagaatccgtccgcatgactgtttacaagcgatagaaacacgtaagactctgtccccttgagctcccacccccgggccggggatgccccacctggggtgactgcactgtagctgcaaggcgtgttcttgcacgaagtgtgatcttatggccctgcgagaggtgctcatcatcatgcccattttctgctgtttctgatgggtcagctacctcacggcggggccagctctgctgtcctggcaagtgtcattgactctctaaacttgaagtccttcaggagccctgagcccaacatccatgagacaccccgagttgtgcttcatgagagttggattctctgcccactctttcagggatgtccaaggtccatgttagggggcaggcccccagctccactcactgcacaagcaccctaaatgttggaagcacaaaatggttgtgatttgagcacaatggcagggtcccgcaggcagacttgacaggcccaggcccgggaggatccccccacgttggctctgtccaaagtgagattgggggtgcctgtgtctgggacagggggctgcccttgctcagaccaggccttggctcatggcttgtcctaattctgggactcgtcatcttacttcttgcccttctgtgcccatcttaagactggaggctgagccttgtcaggcccagccacatctttacgccatgggaccaggagtaaagcgctctctaaaccccgcaccccaaatctctaaacgcctgagttcaggctgagtcctagccctagtgagcctgaagagcttggactgattcccagtctcctgggtcaagccccactttgtgctttcgaagcttatgagcgggttccctggatagaaggagtcttccatccccactgcccttgggcctcttcagcatagtcctgtgccagggccctgtcctcactatcagtcagttcagtatttgctttcacgtgagtggcggactcttctgaagcagccagaactctcaaaggcagcgcatggagttgccttgcgagatttccaaggaaggaggaaagattaacaggcggagcctggcacacccaagcctttgaggtggtcagagtgccaccttcagccccttgggaagggacagcggtgggtctgggagtggcctcaccctggattcagcctaggaatctcttcaccctcagctgtccagccctgctgcctgtctggggatgtgtggcctgggcagagggcagtttaaagcacaaaaccacatggggaaaacacaaggttgcggggactttctcatgtgcctgatgtggtggagggagacaccagcaggtggctgcagtgacgttagggaacataacacttctttgccctgctagctctcagctctggggggcatcccccgatgtggtctgggctgggagcaggcatatcccctggttgttgcctgtgcctggtctgttcaccatcgtgtttgtgtgggcagagcctgccctgcaggagcagtgactttcttcccactgtgtgtcccggacctgtggtatgtgtccctttgccatcccaaacaggcaactgcttgctgctctccttgcttggcatagcctcctggtcagtggccaatgccccacaggccttcctgggcctggccctcctctcctgactcccagatccttccctgccctcttgtgtgcaaggacagattttgcagggaaagttctgtttcttctttgatacctttgttctgtcccctgccccatccccagcactcatgatcttgaagcccctatcacactctagttcagtcctgtgaaccatgtcctgagggccttgcagggaagtaggaaatagaaactcctccacaaagagccgaggatcagagaagacccctgagatgaatcagggccctgccctgcccaccaactcttttctagcaatcatgtcctgcccaggctgcaggcttcattaggctcctgctgtcctccatgatgtgactagcacaaggtgtatatatgttttgtacctctgccgatggctgtacatagtgtatgaaagttatttaagccccatgttgtacatttctgttcctagattggatgtgtgtgttctaagaagttgtcataaataaaacctgaatgaccaatgtcggcaggcagagacacagcactgactccagcatcccttgtgttgaanagatgt

SEQ ID NO: 450512 - DNA, 6363 bp, Homo sapiens
gggaccatcctgcgcccactgtcaatggcacccgtcctgcccgaaagaagttccagaagaagggggccagccagagcttcagtaaggcggcaaggctcaagtggcagtccctggagcgacggatcattgacatcgtcatgcagagaatgaccattgtcaacctggaggctgacatggagcggctcatcaagaaaagggaggagctgttcctcctgcaggaggcactgcggaggaagcgggagcggctgcaggctgagagccccgaggaagagaaggggctgcaggagctggctgaggagatcgaggtgctggcagccaacattgactacatcaatgacggcatcaccgactgccaggccaccatcgtgcagctggaggagaccaaggaggagctggactccacagacacatccgtggtcatcagctcctgctccctggctgaagcccgcctcctgctagacaacttcctcaaggcatccattgacaaggggctgcaagtggcacaaaaggaagcccagatccggctgttggagggccgactgaggcagacggatatggcaggctcctcccagaaccatctgctcctggacgccctgcgtgagaaggctgaagctcaccccgagctgcaggccctcatctacaatgtgcagcaggagaatggctacgccagcacagatgaggagatctcagagttctctgagggcagcttctcccagtcattcaccatgaaaggctccaccagccatgacgatttcaagttcaagagcgagcccaaactgtctgcccaaatgaaagctgtgtcggctgagtgcctgggccccccactggatatctccaccaagaacatcaccaagtccctggcctccctcgttgagatcaaagaggacggagtgggcttctctgtccgagacccctattaccgggacagggtctcgcgcaccgtcagtctgcctacccggggcagcactttccctaggcaatctcgagccacagagacgtccccgctgacgagaaggaagtcctacgaccgagggcagcccattaggtccacagatgtgggattcacacccccatcatcccctcccactcggccccgcaatgaccgcaatgtcttctctcgtctcaccagtaatcagagccaggggtcagcgctggacaagtctgatgacagcgactcctctttgtcggaggtcctgaggggcatcatctccccggttggaggagccaagggtgcacggacggccccactgcagtgtgtctccatggccgaaggccacaccaagcccatcctctgcctggatgccacagatgagttgctattcacagggtccaaagaccgaagctgcaagatgtggaacttggttacgggacaggagatcgcagctctaaagggccaccccaacaacgtggtctccatcaagtactgcagccactcggggcttgtgttctccgtgtccacctcctacatcaaggtgtgggacatccgggactcagccaagtgcattcggactctcacgtcctcgggccaggtgatctcaggggatgcctgtgccgccacatccacccgtgccatcaccagtgctcagggcgagcatcagatcaaccagatcgccctcagcccttcgggcaccatgctgtacgccgcctcgggcaatgccgtccgcatctgggagcttagcaggttccagcctgtcggcaagctgactggccacatcggccctgtgatgtgcctgacggtcacccagacggccagccagcatgacctcgtggtgactggctccaaggaccactacgttaagatgttcgagctgggcgagtgtgtgacgggcaccatcggccccactcacaacttcgagcccccgcactacgatggcatcgagtgtctcgccatccagggagacatcctgttcagtggctcccgagataacggcatcaagaagtgggacctagaccagcaggagctcatccagcaaatccccaatgcgcacaaggactgggtgtgcgccctggccttcatcccgggccgccccatgctgctcagcgcctgccgtgcgggtgtcatcaaggtctggaacgtggacaacttcacacccatcggtgagatcaagggccacgacagtcccatcaatgccatctgcaccaatgccaagcatatcttcacagcctccagtgacctgacggtgaagttctggagtgtccggcggttaccccacagcggcccaccctaggagtgaggtcagagggatgcccccggaccctcgaccccagcagcctggacaccatggaagggaagctgtgacccggccgatggggccagctgctctggggacagagggcgtggccccctctcctgccctcctccctctcccttggccttcccacaggacactgttccctcatccctcccctgcctctcaggagcctctgggtgagagagaggctggggaggaaattaagctgtgaagccaaagggcattatcccttcttgttcccctcctggcagtcgtggccacattgtctcctgctgaaccggctctgcccctttctcaggcctttggcccagtggtggagccctgtggggaggtgcagcagcctggccccatcccacccttccgaggagctggcctccccgcttctcccagcccagcctctagagccactgcacctgcctctgagcccaaaaagataagtcctcaggtagctaaggaaaccaggtgtgggcggctgggccttgcagctaacccttaaccctctggcaacccgcagatagccccaactggccccaacagttccctggggtcccttttggatggggccaaggtggagctgctagaaagattcctttggggagatggtcagaaatacttcagttatttattattttgttatttttattttttgctgttgcctcctggaaacggacttgaagtttcttcccctatattctttccctcagctcttgggggccagaaatcccaaagggagtccgctgccccggccctccagggccgcctcctctgtttgctttgcagaggagggaactgctccttcgactctgcagctcaggcctgtccccgacacagcccccagggagtcttctagctacccctggcctctaggccgcctgacgctcagtgccttcctccgttccggggcctggcacccgtgccgggcagccttacaccagccatgcccgcggcaccacatgtgtcttctcactcgcgaggtcttgtgcccagcgcccccgggaaggcgggggcgctcaccccacagcccaggccccggggttctgccccacagtcctgcgtgggccacgtaggaagcagcgtgggggctgtgtctgctgggaggtggcttggatggggaggacagcccggcaccctgacccccgcccctccccagccctgcagtcccccactgggccggggagtctctccagcttctctctctctggttattcaggagacacattttcggccttaaaactggcatggagcgcaggccctcccttgcagaaaattatcaaggaagagggagttggcagagtttctctgccccggggctggggacgcggagctccggggaaattgttaaatcagtgttctggcgccccctgttgggggaactctggaattacaggagtgggccttgggggggactgagctccatccctctcccccgccccacccccacccaaagttgcccaccctgtttttccgttgcatcgctggtcttgtgcttcccgcttcagtctgggagccaagagccagccccacctcccttcagaggacgcagtgacttttggactttccagaggtggttctgtgtttctgcccttggctcctctccgtcttgggctggggcacttggagccctctccatgtggcgcccagtgttggggggaggcaggctccagtggaggctgagtgaggcctggtcccttccccgtgccctcctcggagctgccacagaggctaagacggctgtcctgctggtgctggccctgctggatgtggtattgaagtctggggcagctgatagcaggaaggagacccccttggatgctggtctcctgggacctgaacagtctgtcagcaatggctggaaatccttcttcctctggccaccccgggggtgccgggcaacccccttagctctaagatgtggccacaaatctcttcccactcctccccgccaacctgaacagaaagttttgaccttgcaacctgtaagaaagaatccgtccgcatgactgtttacaagcgatagaaacacgtaagactctgtccccttgagctcccacccccgggccggggatgccccacctggggtgactgcactgtagctgcaaggcgtgttcttgcacgaagtgtgatcttatggccctgcgagaggtgctcatcatcatgcccattttctgctgtttctgatgggtcagctacctcacggcggggccagctctgctgtcctggcaagtgtcattgactctctaaacttgaagtccttcaggagccctgagcccaacatccatgagacaccccgagttgtgcttcatgagagttggattctctgcccactctttcagggatgtccaaggtccatgttagggggcaggcccccagctccactcactgcacaagcaccctaaatgttggaagcacaaaatggttgtgatttgagcacaatggcagggtcccgcaggcagacttgacaggcccaggcccgggaggatccccccacgttggctctgtccaaagtgagattgggggtgcctgtgtctgggacagggggctgcccttgctcagaccaggccttggctcatggcttgtcctaattctgggactcgtcatcttacttcttgcccttctgtgcccatcttaagactggaggctgagccttgtcaggcccagccacatctttacgccatgggaccaggagtaaagcgctctctaaaccccgcaccccaaatctctaaacgcctgagttcaggctgagtcctagccctagtgagcctgaagagcttggactgattcccagtctcctgggtcaagccccactttgtgctttcgaagcttatgagcgggttccctggatagaaggagtcttccatccccactgcccttgggcctcttcagcatagtcctgtgccagggccctgtcctcactatcagtcagttcagtatttgctttcacgtgagtggcggactcttctgaagcagccagaactctcaaaggcagcgcatggagttgccttgcgagatttccaaggaaggaggaaagattaacaggcggagcctggcacacccaagcctttgaggtggtcagagtgccaccttcagccccttgggaagggacagcggtgggtctgggagtggcctcaccctggattcagcctaggaatctcttcaccctcagctgtccagccctgctgcctgtctggggatgtgtggcctgggcagagggcagtttaaagcacaaaaccacatggggaaaacacaaggttgcggggactttctcatgtgcctgatgtggtggagggagacaccagcaggtggctgcagtgacgttagggaacataacacttctttgccctgctagctctcagctctggggggcatcccccgatgtggtctgggctgggagcaggcatatcccctggttgttgcctgtgcctggtctgttcaccatcgtgtttgtgtgggcagagcctgccctgcaggagcagtgactttcttcccactgtgtgtcccggacctgtggtatgtgtccctttgccatcccaaacaggcaactgcttgctgctctccttgcttggcatagcctcctggtcagtggccaatgccccacaggccttcctgggcctggccctcctctcctgactcccagatccttccctgccctcttgtgtgcaaggacagattttgcagggaaagttctgtttcttctttgatacctttgttctgtcccctgccccatccccagcactcatgatcttgaagcccctatcacactctagttcagtcctgtgaaccatgtcctgagggccttgcagggaagtaggaaatagaaactcctccacaaagagccgaggatcagagaagacccctgagatgaatcagggccctgccctgcccaccaactcttttctagcaatcatgtcctgcccaggctgcaggcttcattaggctcctgctgtcctccatgatgtgactagcacaaggtgtatatatgttttgtacctctgccgatggctgtacatagtgtatgaaagttatttaagccccatgttgtacatttctgttcctagattggatgtgtgtgttctaagaagttgtcataaataaaacctgaatgaccaatgtc

SEQ ID NO: 450513 - DNA, 6979 bp, Homo sapiens
gggaccatcctgcgcccactgtcaatggcacccgtcctgcccgaaagaagttccagaagaagggggccagccagagcttcagtaaggcggcaaggctcaagtggcagtccctggagcgacggatcattgacatcgtcatgcagagaatgaccattgtcaacctggaggctgacatggagcggctcatcaagaaaagggaggagctgttcctcctgcaggaggcactgcggaggaagcgggagcggctgcaggctgagagccccgaggaagagaaggggctgcaggagctggctgaggagatcgaggtgctggcagccaacattgactacatcaatgacggcatcaccgactgccaggccaccatcgtgcagctggaggagaccaaggaggagctggactccacagacacatccgtggtcatcagctcctgctccctggctgaagcccgcctcctgctagacaacttcctcaaggcatccattgacaaggggctgcaagtggcacaaaaggaagcccagatccggctgttggagggccgactgaggcagacggatatggcaggctcctcccagaaccatctgctcctggacgccctgcgtgagaaggctgaagctcaccccgagctgcaggccctcatctacaatgtgcagcaggagaatggctacgccagcacagatgaggagatctcagagttctctgagggcagcttctcccagtcattcaccatgaaaggctccaccagccatgacgatttcaagttcaagagcgagcccaaactgtctgcccaaatgaaagctgtgtcggctgagtgcctgggccccccactggatatctccaccaagaacatcaccaagtccctggcctccctcgttgagatcaaagaggacggagtgggcttctctgtccgagacccctattaccgggacagggtctcgcgcaccgtcagtctgcctacccggggcagcactttccctaggcaatctcgagccacagagacgtccccgctgacgagaaggaagtcctacgaccgagggcagcccattaggtccacagatgtgggattcacacccccatcatcccctcccactcggccccgcaatgaccgcaatgtcttctctcgtctcaccagtaatcagagccaggggtcagcgctggacaagtctgatgacagcgactcctctttgtcggaggtcctgaggggcatcatctccccggttggaggagccaagggtgcacggacggccccactgcagtgtgtctccatggccgaaggccacaccaagcccatcctctgcctggatgccacagatgagttgctattcacagggtccaaagaccgaagctgcaagatgtggaacttggttacgggacaggagatcgcagctctaaagggccaccccaacaacgtggtctccatcaagtactgcagccactcggggcttgtgttctccgtgtccacctcctacatcaaggtgtgggacatccgggactcagccaagtgcattcggactctcacgtcctcgggccaggtgatctcaggggatgcctgtgccgccacatccacccgtgccatcaccagtgctcagggcgagcatcagatcaaccagatcgccctcagcccttcgggcaccatgctgtacgccgcctcgggcaatgccgtccgcatctgggagcttagcaggttccagcctgtcggcaagctgactggccacatcggccctgtgatgtgcctgacggtcacccagacggccagccagcatgacctcgtggtgactggctccaaggaccactacgttaagatgttcgagctgggcgagtgtgtgacgggcaccatcggccccactcacaacttcgagcccccgcactacgatggcatcgagtgtctcgccatccagggagacatcctgttcagtggctcccgagataacggcatcaagaagtgggacctagaccagcaggagctcatccagcaaatccccaatgcgcacaaggactgggtgtgcgccctggccttcatcccgggccgccccatgctgctcagcgcctgccgtgcgggtgtcatcaaggtctggaacgtggacaacttcacacccatcggtgagatcaagggccacgacagtcccatcaatgccatctgcaccaatgccaagcatatcttcacagcctccagtgactgccgggtaaagttgtggaattacgtccctggactcaccccctgccttcctcgccgagtcctggccataaagggccgcgccaccaccctgccctgaccctccccaactctccctgtctcctctttcattcttcccctctttccttttccctctctttccccacttcgatctgagctgcttcttaacggtatgagattattttactccttcttcttcctttcccttcctgtcctgcctggcctagagaggtgccctgcctgtccctcctgcacccaccgtccttttccaagcatgaacagtgggacaggccccaggagatgggtgccagggagcagaagggggagccttcaggcctggacaaaacgaaacacccccccaaaaaaagaaaacccatgacaaagctcccctgggggcctctgagtgcacaggcctctccatctgcccagcaccccaccacctgcagtccacctccccgtaagccatgcttgcctcccagccccaaccacatttggggagtttggggaatccagttcatcctctacttttgggggcagccagccaagcccactgcaagagctgaccggcacccctccactttgtcctccaccccagtgacctgacggtgaagttctggagtgtccggcggttaccccacagcggcccaccctaggagtgaggtcagagggatgcccccggaccctcgaccccagcagcctggacaccatggaagggaagctgtgacccggccgatggggccagctgctctggggacagagggcgtggccccctctcctgccctcctccctctcccttggccttcccacaggacactgttccctcatccctcccctgcctctcaggagcctctgggtgagagagaggctggggaggaaattaagctgtgaagccaaagggcattatcccttcttgttcccctcctggcagtcgtggccacattgtctcctgctgaaccggctctgcccctttctcaggcctttggcccagtggtggagccctgtggggaggtgcagcagcctggccccatcccacccttccgaggagctggcctccccgcttctcccagcccagcctctagagccactgcacctgcctctgagcccaaaaagataagtcctcaggtagctaaggaaaccaggtgtgggcggctgggccttgcagctaacccttaaccctctggcaacccgcagatagccccaactggccccaacagttccctggggtcccttttggatggggccaaggtggagctgctagaaagattcctttggggagatggtcagaaatacttcagttatttattattttgttatttttattttttgctgttgcctcctggaaacggacttgaagtttcttcccctatattctttccctcagctcttgggggccagaaatcccaaagggagtccgctgccccggccctccagggccgcctcctctgtttgctttgcagaggagggaactgctccttcgactctgcagctcaggcctgtccccgacacagcccccagggagtcttctagctacccctggcctctaggccgcctgacgctcagtgccttcctccgttccggggcctggcacccgtgccgggcagccttacaccagccatgcccgcggcaccacatgtgtcttctcactcgcgaggtcttgtgcccagcgcccccgggaaggcgggggcgctcaccccacagcccaggccccggggttctgccccacagtcctgcgtgggccacgtaggaagcagcgtgggggctgtgtctgctgggaggtggcttggatggggaggacagcccggcaccctgacccccgcccctccccagccctgcagtcccccactgggccggggagtctctccagcttctctctctctggttattcaggagacacattttcggccttaaaactggcatggagcgcaggccctcccttgcagaaaattatcaaggaagagggagttggcagagtttctctgccccggggctggggacgcggagctccggggaaattgttaaatcagtgttctggcgccccctgttgggggaactctggaattacaggagtgggccttgggggggactgagctccatccctctcccccgccccacccccacccaaagttgcccaccctgtttttccgttgcatcgctggtcttgtgcttcccgcttcagtctgggagccaagagccagccccacctcccttcagaggacgcagtgacttttggactttccagaggtggttctgtgtttctgcccttggctcctctccgtcttgggctggggcacttggagccctctccatgtggcgcccagtgttggggggaggcaggctccagtggaggctgagtgaggcctggtcccttccccgtgccctcctcggagctgccacagaggctaagacggctgtcctgctggtgctggccctgctggatgtggtattgaagtctggggcagctgatagcaggaaggagacccccttggatgctggtctcctgggacctgaacagtctgtcagcaatggctggaaatccttcttcctctggccaccccgggggtgccgggcaacccccttagctctaagatgtggccacaaatctcttcccactcctccccgccaacctgaacagaaagttttgaccttgcaacctgtaagaaagaatccgtccgcatgactgtttacaagcgatagaaacacgtaagactctgtccccttgagctcccacccccgggccggggatgccccacctggggtgactgcactgtagctgcaaggcgtgttcttgcacgaagtgtgatcttatggccctgcgagaggtgctcatcatcatgcccattttctgctgtttctgatgggtcagctacctcacggcggggccagctctgctgtcctggcaagtgtcattgactctctaaacttgaagtccttcaggagccctgagcccaacatccatgagacaccccgagttgtgcttcatgagagttggattctctgcccactctttcagggatgtccaaggtccatgttagggggcaggcccccagctccactcactgcacaagcaccctaaatgttggaagcacaaaatggttgtgatttgagcacaatggcagggtcccgcaggcagacttgacaggcccaggcccgggaggatccccccacgttggctctgtccaaagtgagattgggggtgcctgtgtctgggacagggggctgcccttgctcagaccaggccttggctcatggcttgtcctaattctgggactcgtcatcttacttcttgcccttctgtgcccatcttaagactggaggctgagccttgtcaggcccagccacatctttacgccatgggaccaggagtaaagcgctctctaaaccccgcaccccaaatctctaaacgcctgagttcaggctgagtcctagccctagtgagcctgaagagcttggactgattcccagtctcctgggtcaagccccactttgtgctttcgaagcttatgagcgggttccctggatagaaggagtcttccatccccactgcccttgggcctcttcagcatagtcctgtgccagggccctgtcctcactatcagtcagttcagtatttgctttcacgtgagtggcggactcttctgaagcagccagaactctcaaaggcagcgcatggagttgccttgcgagatttccaaggaaggaggaaagattaacaggcggagcctggcacacccaagcctttgaggtggtcagagtgccaccttcagccccttgggaagggacagcggtgggtctgggagtggcctcaccctggattcagcctaggaatctcttcaccctcagctgtccagccctgctgcctgtctggggatgtgtggcctgggcagagggcagtttaaagcacaaaaccacatggggaaaacacaaggttgcggggactttctcatgtgcctgatgtggtggagggagacaccagcaggtggctgcagtgacgttagggaacataacacttctttgccctgctagctctcagctctggggggcatcccccgatgtggtctgggctgggagcaggcatatcccctggttgttgcctgtgcctggtctgttcaccatcgtgtttgtgtgggcagagcctgccctgcaggagcagtgactttcttcccactgtgtgtcccggacctgtggtatgtgtccctttgccatcccaaacaggcaactgcttgctgctctccttgcttggcatagcctcctggtcagtggccaatgccccacaggccttcctgggcctggccctcctctcctgactcccagatccttccctgccctcttgtgtgcaaggacagattttgcagggaaagttctgtttcttctttgatacctttgttctgtcccctgccccatccccagcactcatgatcttgaagcccctatcacactctagttcagtcctgtgaaccatgtcctgagggccttgcagggaagtaggaaatagaaactcctccacaaagagccgaggatcagagaagacccctgagatgaatcagggccctgccctgcccaccaactcttttctagcaatcatgtcctgcccaggctgcaggcttcattaggctcctgctgtcctccatgatgtgactagcacaaggtgtatatatgttttgtacctctgccgatggctgtacatagtgtatgaaagttatttaagccccatgttgtacatttctgttcctagattggatgtgtgtgttctaagaagttgtcataaataaaacctgaatgaccaatgtc

SEQ ID NO: 450514 - DNA, 5420 bp, Homo sapiens
ccccgactagcccgacagcggggacttccctaggcaatctcgagccacagagacgtccccgctgacgagaaggaagtcctacgaccgagggcagcccattaggtccacagatgtgggattcacacccccatcatcccctcccactcggccccgcaatgaccgcaatgtcttctctcgtctcaccagtaatcagagccaggggtcagcgctggacaagtctgatgacagcgactcctctttgtcggaggtcctgaggggcatcatctccccggttggaggagccaagggtgcacggacggccccactgcagtgtgtctccatggccgaaggccacaccaagcccatcctctgcctggatgccacagatgagttgctattcacagggtccaaagaccgaagctgcaagatgtggaacttggttacgggacaggagatcgcagctctaaagggccaccccaacaacgtggtctccatcaagtactgcagccactcggggcttgtgttctccgtgtccacctcctacatcaaggtgtgggacatccgggactcagccaagtgcattcggactctcacgtcctcgggccaggtgatctcaggggatgcctgtgccgccacatccacccgtgccatcaccagtgctcagggcgagcatcagatcaaccagatcgccctcagcccttcgggcaccatgctgtacgccgcctcgggcaatgccgtccgcatctgggagcttagcaggttccagcctgtcggcaagctgactggccacatcggccctgtgatgtgcctgacggtcacccagacggccagccagcatgacctcgtggtgactggctccaaggaccactacgttaagatgttcgagctgggcgagtgtgtgacgggcaccatcggccccactcacaacttcgagcccccgcactacgatggcatcgagtgtctcgccatccagggagacatcctgttcagtggctcccgagataacggcatcaagaagtgggacctagaccagcaggagctcatccagcaaatccccaatgcgcacaaggactgggtgtgcgccctggccttcatcccgggccgccccatgctgctcagcgcctgccgtgcgggtgtcatcaaggtctggaacgtggacaacttcacacccatcggtgagatcaagggccacgacagtcccatcaatgccatctgcaccaatgccaagcatatcttcacagcctccagtgacctgacggtgaagttctggagtgtccggcggttaccccacagcggcccaccctaggagtgaggtcagagggatgcccccggaccctcgaccccagcagcctggacaccatggaagggaagctgtgacccggccgatggggccagctgctctggggacagagggcgtggccccctctcctgccctcctccctctcccttggccttcccacaggacactgttccctcatccctcccctgcctctcaggagcctctgggtgagagagaggctggggaggaaattaagctgtgaagccaaagggcattatcccttcttgttcccctcctggcagtcgtggccacattgtctcctgctgaaccggctctgcccctttctcaggcctttggcccagtggtggagccctgtggggaggtgcagcagcctggccccatcccacccttccgaggagctggcctccccgcttctcccagcccagcctctagagccactgcacctgcctctgagcccaaaaagataagtcctcaggtagctaaggaaaccaggtgtgggcggctgggccttgcagctaacccttaaccctctggcaacccgcagatagccccaactggccccaacagttccctggggtcccttttggatggggccaaggtggagctgctagaaagattcctttggggagatggtcagaaatacttcagttatttattattttgttatttttattttttgctgttgcctcctggaaacggacttgaagtttcttcccctatattctttccctcagctcttgggggccagaaatcccaaagggagtccgctgccccggccctccagggccgcctcctctgtttgctttgcagaggagggaactgctccttcgactctgcagctcaggcctgtccccgacacagcccccagggagtcttctagctacccctggcctctaggccgcctgacgctcagtgccttcctccgttccggggcctggcacccgtgccgggcagccttacaccagccatgcccgcggcaccacatgtgtcttctcactcgcgaggtcttgtgcccagcgcccccgggaaggcgggggcgctcaccccacagcccaggccccggggttctgccccacagtcctgcgtgggccacgtaggaagcagcgtgggggctgtgtctgctgggaggtggcttggatggggaggacagcccggcaccctgacccccgcccctccccagccctgcagtcccccactgggccggggagtctctccagcttctctctctctggttattcaggagacacattttcggccttaaaactggcatggagcgcaggccctcccttgcagaaaattatcaaggaagagggagttggcagagtttctctgccccggggctggggacgcggagctccggggaaattgttaaatcagtgttctggcgccccctgttgggggaactctggaattacaggagtgggccttgggggggactgagctccatccctctcccccgccccacccccacccaaagttgcccaccctgtttttccgttgcatcgctggtcttgtgcttcccgcttcagtctgggagccaagagccagccccacctcccttcagaggacgcagtgacttttggactttccagaggtggttctgtgtttctgcccttggctcctctccgtcttgggctggggcacttggagccctctccatgtggcgcccagtgttggggggaggcaggctccagtggaggctgagtgaggcctggtcccttccccgtgccctcctcggagctgccacagaggctaagacggctgtcctgctggtgctggccctgctggatgtggtattgaagtctggggcagctgatagcaggaaggagacccccttggatgctggtctcctgggacctgaacagtctgtcagcaatggctggaaatccttcttcctctggccaccccgggggtgccgggcaacccccttagctctaagatgtggccacaaatctcttcccactcctccccgccaacctgaacagaaagttttgaccttgcaacctgtaagaaagaatccgtccgcatgactgtttacaagcgatagaaacacgtaagactctgtccccttgagctcccacccccgggccggggatgccccacctggggtgactgcactgtagctgcaaggcgtgttcttgcacgaagtgtgatcttatggccctgcgagaggtgctcatcatcatgcccattttctgctgtttctgatgggtcagctacctcacggcggggccagctctgctgtcctggcaagtgtcattgactctctaaacttgaagtccttcaggagccctgagcccaacatccatgagacaccccgagttgtgcttcatgagagttggattctctgcccactctttcagggatgtccaaggtccatgttagggggcaggcccccagctccactcactgcacaagcaccctaaatgttggaagcacaaaatggttgtgatttgagcacaatggcagggtcccgcaggcagacttgacaggcccaggcccgggaggatccccccacgttggctctgtccaaagtgagattgggggtgcctgtgtctgggacagggggctgcccttgctcagaccaggccttggctcatggcttgtcctaattctgggactcgtcatcttacttcttgcccttctgtgcccatcttaagactggaggctgagccttgtcaggcccagccacatctttacgccatgggaccaggagtaaagcgctctctaaaccccgcaccccaaatctctaaacgcctgagttcaggctgagtcctagccctagtgagcctgaagagcttggactgattcccagtctcctgggtcaagccccactttgtgctttcgaagcttatgagcgggttccctggatagaaggagtcttccatccccactgcccttgggcctcttcagcatagtcctgtgccagggccctgtcctcactatcagtcagttcagtatttgctttcacgtgagtggcggactcttctgaagcagccagaactctcaaaggcagcgcatggagttgccttgcgagatttccaaggaaggaggaaagattaacaggcggagcctggcacacccaagcctttgaggtggtcagagtgccaccttcagccccttgggaagggacagcggtgggtctgggagtggcctcaccctggattcagcctaggaatctcttcaccctcagctgtccagccctgctgcctgtctggggatgtgtggcctgggcagagggcagtttaaagcacaaaaccacatggggaaaacacaaggttgcggggactttctcatgtgcctgatgtggtggagggagacaccagcaggtggctgcagtgacgttagggaacataacacttctttgccctgctagctctcagctctggggggcatcccccgatgtggtctgggctgggagcaggcatatcccctggttgttgcctgtgcctggtctgttcaccatcgtgtttgtgtgggcagagcctgccctgcaggagcagtgactttcttcccactgtgtgtcccggacctgtggtatgtgtccctttgccatcccaaacaggcaactgcttgctgctctccttgcttggcatagcctcctggtcagtggccaatgccccacaggccttcctgggcctggccctcctctcctgactcccagatccttccctgccctcttgtgtgcaaggacagattttgcagggaaagttctgtttcttctttgatacctttgttctgtcccctgccccatccccagcactcatgatcttgaagcccctatcacactctagttcagtcctgtgaaccatgtcctgagggccttgcagggaagtaggaaatagaaactcctccacaaagagccgaggatcagagaagacccctgagatgaatcagggccctgccctgcccaccaactcttttctagcaatcatgtcctgcccaggctgcaggcttcattaggctcctgctgtcctccatgatgtgactagcacaaggtgtatatatgttttgtacctctgccgatggctgtacatagtgtatgaaagttatttaagccccatgttgtacatttctgttcctagattggatgtgtgtgttctaagaagttgtcataaataaaacctgaatgaccaatgtc

SEQ ID NO: 450515 - DNA, 3228 bp, Homo sapiens
ttgtcgaccacgcgtcgccacgcgtcggagcgtcaggcgggccttacaccagccatgcccgcggcaccacatgtgtcttctcactcgcgaggtcttgtgcccagcgcccccgggaaggcgggggcgctcaccccacagcccaggccccggggttctgccccacagtcctgcgtgggccacgtaggaagcagcgtgggggctgtgtctgctgggaggtggcttggatggggaggacagcccggcaccctgacccccgcccctccccagccctgcagtcccccactgggccggggagtctctccagcttctctctctctggttattcaggagacacattttcggccttaaaactggcatggagcgcaggccctcccttgcagaaaattatcaaggaagagggagttggcagagtttctctgccccggggctggggacgcggagctccggggaaattgttaaatcagtgttctggcgccccctgttgggggaactctggaattacaggagtgggccttgggggggactgagctccatccctctcccccgccccacccccacccaaagttgcccaccctgtttttccgttgcatcgctggtcttgtgcttcccgcttcagtctgggagccaagagccagccccacctcccttcagaggacgcagtgacttttggactttccagaggtggttctgtgtttctgcccttggctcctctccgtcttgggctggggcacttggagccctctccatgtggcgcccagtgttggggggaggcaggctccagtggaggctgagtgaggcctggtcccttccccgtgccctcctcggagctgccacagaggctaagacggctgtcctgctggtgctggccctgctggatgtggtattgaagtctggggcagctgatagcaggaaggagacccccttggatgctggtctcctgggacctgaacagtctgtcagcaatggctggaaatccttcttcctctggccaccccgggggtgccgggcaacccccttagctctaagatgtggccacaaatctcttcccactcctccccgccaacctgaacagaaagttttgaccttgcaacctgtaagaaagaatccgtccgcatgactgtttacaagcgatagaaacacgtaagactctgtccccttgagctcccacccccgggccggggatgccccacctggggtgactgcactgtagctgcaaggcgtgttcttgcacgaagtgtgatcttatggccctgcgagaggtgctcatcatcatgcccattttctgctgtttctgatgggtcagctacctcacggcggggccagctctgctgtcctggcaagtgtcattgactctctaaacttgaagtccttcaggagccctgagcccaacatccatgagacaccccgagttgtgcttcatgagagttggattctctgcccactctttcagggatgtccaaggtccatgttagggggcaggcccccagctccactcactgcacaagcaccctaaatgttggaagcacaaaatggttgtgatttgagcacaatggcagggtcccgcaggcagacttgacaggcccaggcccgggaggatccccccacgttggctctgtccaaagtgagattgggggtgcctgtgtctgggacagggggctgcccttgctcagaccaggccttggctcatggcttgtcctaattctgggactcgtcatcttacttcttgcccttctgtgcccatcttaagactggaggctgagccttgtcaggcccagccacatctttacgccatgggaccaggagtaaagcgctctctaaaccccgcaccccaaatctctaaacgcctgagttcaggctgagtcctagccctagtgagcctgaagagcttggactgattcccagtctcctgggtcaagccccactttgtgctttcgaagcttatgagcgggttccctggatagaaggagtcttccatccccactgcccttgggcctcttcagcatagtcctgtgccagggccctgtcctcactatcagtcagttcagtatttgctttcacgtgagtggcggactcttctgaagcagccagaactctcaaaggcagcgcatggagttgccttgcgagatttccaaggaaggaggaaagattaacaggcggagcctggcacacccaagcctttgaggtggtcagagtgccaccttcagccccttgggaagggacagcggtgggtctgggagtggcctcaccctggattcagcctaggaatctcttcaccctcagctgtccagccctgctgcctgtctggggatgtgtggcctgggcagagggcagtttaaagcacaaaaccacatggggaaaacacaaggttgcggggactttctcatgtgcctgatgtggtggagggagacaccagcaggtggctgcagtgacgttagggaacataacacttctttgccctgctagctctcagctctggggggcatcccccgatgtggtctgggctgggagcaggcatatcccctggttgttgcctgtgcctggtctgttcaccatcgtgtttgtgtgggcagagcctgccctgcaggagcagtgactttcttcccactgtgtgtcccggacctgtggtatgtgtccctttgccatcccaaacaggcaactgcttgctgctctccttgcttggcatagcctcctggtcagtggccaatgccccacaggccttcctgggcctggccctcctctcctgactcccagatccttccctgccctcttgtgtgcaaggacagattttgcagggaaagttctgtttcttctttgatacctttgttctgtcccctgccccatccccagcactcatgatcttgaagcccctatcacactctagttcagtcctgtgaaccatgtcctgagggccttgcagggaagtaggaaatagaaactcctccacaaagagccgaggatcagagaagacccctgagatgaatcagggccctgccctgcccaccaactcttttctagcaatcatgtcctgcccaggctgcaggcttcattaggctcctgctgtcctccatgatgtgactagcacaaggtgtatatatgttttgtacctctgccgatggctgtacatagtgtatgaaagttatttaagccccatgttgtacatttctgttcctagattggatgtgtgtgttctaagaagttgtcataaataaaacctgaatgaccaatgtc

SEQ ID NO: 450516 - DNA, 2019 bp, Homo sapiens
  misc_feature (12)..(12): n is a, c, g, or t
taaggctcggancgcctcggccacgggtgacgcacgagcgcacgcggtgcgccgaaggggactgaggcccggagaggtgccacacagcccatctgcgtatgagggcgcacccacgggcgcagccgcgcccggcacggcatgatctctaaacttgaagtccttcaggagccctgagcccaacatccatgagacaccccgagttgtgcttcatgagagttggattctctgcccactctttcagggatgtccaaggtccatgttagggggcaggcccccagctccactcactgcacaagcaccctaaatgttggaagcacaaaatggttgtgatttgagcacaatggcagggtcccgcaggcagacttgacaggcccaggcccgggaggatccccccacgttggctctgtccaaagtgagattgggggtgcctgtgtctgggacagggggctgcccttgctcagaccaggccttggctcatggcttgtcctaattctgggactcgtcatcttacttcttgcccttctgtgcccatcttaagactggaggctgagccttgtcaggcccagccacatctttacgccatgggaccaggagtaaagcgctctctaaaccccgcaccccaaatctctaaacgcctgagttcaggctgagtcctagccctagtgagcctgaagagcttggactgattcccagtctcctgggtcaagccccactttgtgctttcgaagcttatgagcgggttccctggatagaaggagtcttccatccccactgcccttgggcctcttcagcatagtcctgtgccagggccctgtcctcactatcagtcagttcagtatttgctttcacgtgagtggcggactcttctgaagcagccagaactctcaaaggcagcgcatggagttgccttgcgagatttccaaggaaggaggaaagattaacaggcggagcctggcacacccaagcctttgaggtggtcagagtgccaccttcagccccttgggaagggacagcggtgggtctgggagtggcctcaccctggattcagcctaggaatctcttcaccctcagctgtccagccctgctgcctgtctggggatgtgtggcctgggcagagggcagtttaaagcacaaaaccacatggggaaaacacaaggttgcggggactttctcatgtgcctgatgtggtggagggagacaccagcaggtggctgcagtgacgttagggaacataacacttctttgccctgctagctctcagctctggggggcatcccccgatgtggtctgggctgggagcaggcatatcccctggttgttgcctgtgcctggtctgttcaccatcgtgtttgtgtgggcagagcctgccctgcaggagcagtgactttcttcccactgtgtgtcccggacctgtggtatgtgtccctttgccatcccaaacaggcaactgcttgctgctctccttgcttggcatagcctcctggtcagtggccaatgccccacaggccttcctgggcctggccctcctctcctgactcccagatccttccctgccctcttgtgtgcaaggacagattttgcagggaaagttctgtttcttctttgatacctttgttctgtcccctgccccatccccagcactcatgatcttgaagcccctatcacactctagttcagtcctgtgaaccatgtcctgagggccttgcagggaagtaggaaatagaaactcctccacaaagagccgaggatcagagaagacccctgagatgaatcagggccctgccctgcccaccaactcttttctagcaatcatgtcctgcccaggctgcaggcttcattaggctcctgctgtcctccatgatgtgactagcacaaggtgtatatatgttttgtacctctgccgatggctgtacatagtgtatgaaagttatttaagccccatgttgtacatttctgttcctagattggatgtgtgtgttctaagaagttgtcataaataaaacctgaatgaccaatgtc

SEQ ID NO: 450517 - DNA, 686 bp, Homo sapiens
cataactgtaagaaataaattccttttctttataaattaaccagtttcagatattctattataagcaatagaaagcagactaagatagaatctttgaaacaaaatggtaattcttgaactattaataaatactctttttgctacatgtccctattacttgatagtaatcgtgttcttgagtttccttatgtatagattatgtgtcagaggacctaactcactggaagcgtggtgtgggcactaaaattattattacttttttgagacggagtctcactctgttgcccaggctgtagtgcaatggtgcgatctcagctcactgcagcctccgcctcctgggttcaagcaattctcctgcctcagcctcccgagtagctgggattacaggcgtgcaccaccacacccagctaatttttgtatttttagtagatacgaggttttaccatgttggccaggctggtctcgaactcctgacctcgtgatccgcccacctcggcctcccgaagtgttgggattacaggtgtgagccaccgcacctggcctgaaaattctctccaaattctcagatgcctagtcaactcaacgtaagatgtttgcctgggtttagggcaaactatggcctgtggggccgaatctgtgcctgtgtttataaataaaattgaaacacagccacgtccatttattta

SEQ ID NO: 450518 - DNA, 5619 bp, Homo sapiens
ggtgtgagaggtcagtgtttcttcctggcctattcggggcagggccccctcgagtcctcccaccctacagctcctcagggccctggctgcctcaagcccccactgcactgtctggaaactcccagataatctgatcatgtaacgcggcagcaggacactaagggccattcgcccaaagatttttaaaaactctttttagaacagatagagaaaaccacccaaattaaatgcatggcttaatgaattattataaggcaaatgccactttgatcaagaagtggaaggccaccggtttctcagaagccccttccaggcccatatggccacagccccgtccagcatgtcttgatgtgtcttgtgcgcctgccctgtttttattttgatagttttgtgacccatatgagcatccgtgggcactgtagcttactgttgccaattaaaatattgttttttcttttgttttgttttgttttgttttgttttgttttttcatggagtctcactctgttgtccaggttagagtgcagtggtgtgatctcagatcactgcaacctttgcctcctgggttcaagtgactctcctgtctcagctttctgagtagctgggattacaggcacctgccaccacaccctgctaattttttttgtatttttagtagagacagggttttgccatgttggtcaggctggtcttgaacttctgacctcaagtgatctgcccgccttggcctctccaagtgctggaattacaggtgtgagccaccgtgtccggcctaaaatattgttgatatgtgttttaagtctttttaagcctatgctcccccatttccttacacttggccatagtcacatccagccatttttctctggtgtcctttggtctgggttgtgcctgttgtccctctgcctctgtgtttcctgcacgtgggcagttagatcctgagatgggatcaggctccactcagctgctgtggaagaataaaggggattcggatgtctgtcctctcatgctcctcgaagctgatgatgcttgatgccattcttggccttttttgcttttattttttgtagttcttaaggggtttaaaaaatcgtggcataaggtaatgcaaaaaggtgtccatgtgttaaacgtacaactagacggactctgcagtgtgcccacctgtcctgctgctggaggccatttgaggagccagctgcctctcacagctatggactgcagcctatgcatgcctatttcctagtgacctggtgtgaacatggtggagtggggggacaagctcctgatgctcctttcctgtctctgcagcttgtgtttgaccaccagccaggtgacatctttggctgtgtggccgacatcggttggattacaggacacagctacgtggtgtatgggcctctctgcaatggtgccaccagcgtcctttttgagagcaccccagtttatcccaatgctggtaaggatggtgaaccctgtttgggaccccatgctggtgtcaggggagagagcctgaggctcgaggcttgtggagaggttcatggaagggggacgcctgggttctggtgagggtgtggctctccaggtcctgctgtcgaaatgcccggtggggccaggccccaggtcttcagaaagatctgacaggcagcagcagggagtctgacttggtgctggaggacatctcaaggcccctgctcctgcactcctgccctctgacttaaactgccggcctcaggccatcgctttggcatccttctcacctctaggctgcttgcccagatccagccctttctcaaagccagggccagctgcccgccacttctgtgtccccagccctgcccctgagccttcagggctgtccctcaaaccatgttaggcatggcctagaaccatctccattaaattgagatcactttgaagacaaggtgatgactggctcccttgggcatcgtcctcccacacagcacagtgtcttcaaatattttctttaatgtaagcagatcatggtggctctgcccaaaggctgctgctccagtgttccatggcactgacaactgtgcatggactgtgttatcacctcccagtgctccatccctgcctttgggggctgggtgtgctcaaggaagaagttgtaggggcaagaccagggattaagggccatggcccaggtgctgtctcaggccaccacttcagcccttagaagctcagtgttccatgtggaggggatggtgtgggtagtgggtttacaggaaccaggggtgtgcatgccgggcacatggccctgctccctgggacacacgcagtggcagctgtactgtcaccaggggaagcaccagtcaccactttagagcccatgtgagtgtgatcgagtgaaagctctgtgttaatgctccatgggttattaaatccacgtagtatcaccttgaactaggccatcaccctaagcctggtgaagactgttcctgaatgtgccgcccatggatctggggagtgcttggaggagagcggccattggggacctgtcccatggggcttctttccatctttcactggcgggggtggggggttggggggatccctttcatatggacatatgcgcgtctgcacatgcccagcactcaggaagtcttggctgatctctgagtttaaagtaaaccatgtcagctctcctgctgacagtgaatttcggcctttctgtaggtcggtactgggagacagtagagaggttgaagatcaatcagttctatggcgccccaacggctgtccggctgttgctgaaatacggtgatgcctgggtgaagaagtatgatcgctcctccctgcggaccctggggtcaggtgagcggcctgccctgcagcaggagaggttgtgcttgccctagaccctcagagccaatacgggcttcagcaggacttcagtcatgaagctgcccggctttgtatgtgtgaattcacgcaatgccagaccggatctggtagaaagcaccagcacctcttcccacctgtaagctcctccccagagctggcagcagttacctgtctggggaacaacgttccagacattttctgtgccgttgtttctgtgcccaatttctgtagcttaatcttcattaggaatacttacccactcaataagttaagggtcaggtcagttctttagtggctgcatgggatttaactgtataacttagctgggtgtggtggcaaaggctgaggtgggaggattgcttgagcccaggagtttcaggctgcagtgaactaggattgcaccactgcgctccagcctggtgacagagtgagactcagtcgtctaaataatagtaataatagtataactacagtttgctaaacactgccccatagttggaccttttgattgtctccaagtctgtggagtggataccatcctgcacttttgccctgctgttactgtagacatttccaggcagacagttcaaagcttaggcctattggtaatgttgatggatattgccaaatcacatggaaacattttggaaatgtgatggtggcatggtttcgacagtatcagcagtgtctgtctttcgggctggtgctgggagggactgggtgctggtgactgctgttctctctcctgtccctgccacatttcatgtctgccttgacgtgtggtcacgcgtggtcagccacctgcttggtggcttttcactggggaagcatgcagggcagtgaccatggaagagtgtcccattctgccacatacatccttgggaagggagcatgtacctcccagtgaacatgtgattccactactactgggtgaccatgaggccatgcgggcatccgggccacaggctgagaggcacagcagctggggctgtgccctgcagagctcaccacttgttcccaaatgtgagatggggatgagacctacctacagggtggcgaggatgccacagagggtcagatgtgagccttagtataatgttcagcatggagatgattaatggagagagctcctgaggaatagcaggcatccaatgactcctcctcctcttttcccttattttccccattaacagtaaaaaccttctgtttctcaaccagctttctagattaaaaagcaggaggagtttgaatactattaataagagcaaatatgtattaaatgcctttatcttcacatcagtcctttgagcaaacagcagatgttgtttcacattacagagaaggaagaggaggcacagagaggtcagagaaccggcctgaggtcactcagcaagtagggcagcctgtgttgaacgcagcacttggttctagagtctgtaaaactcactctgccccccacctgattgatgggctctgtgcccccaccctgtaccctcaacaggtcccttgccatactgtcccctccacctctcagaaagagtatggggttcctttctagatggtgaatcttagtttgctttgtgctgctgtaatagaataccctgaaactgggtgatttataatgaactcagcgtgagatttggaggggacaaacattcaaaccataataagtggtgagtttgggtggtctctcttggcatgctggagctgggcttgagaggcccgtgtgattctgactgcctgggccatgtagtgcttgtggactgggaacaaacagcggggtggccagggccatagaaactcgcccagatcctctaggtgttgtcagcagggccacctgagtgggccctaggcattaggtggggacagggctgaagggcaagatttggttttccagatacactcatgggatttgtctcctgaaggaaggttcacggggtccaatgacaaggggtaccgccctaagtgcatttcaggaaggggtgtgctctggcagctgcattagagtgggatgtgtatcccagcagcctctgcctcacctaggggtccccacagacttggaacacctctgagccagggggccagcccccagcagaggctcagctgggttttgtgtatttagctggttgataggcacattcctattcctgttgcataaccggttctagccgcagagccctgcgggaggccaggtgctaatcacacacctcgctgttctgttctcggtatacagtgttggcaggcagcgtggcgtcttgtgatgtcttgcacctggggctcccagcacctcggagcagtgctgggagtcagtgtgttccacaccttggccagggccagcgctgtgctggcacacctgtcggtgcaattccacagcccagacccattccaggcagctgggatcagccctcatgacatttaatccgttgagtcgtcagaatcccactcactcaagacattccccctagatttgtatttctcaaagcttttttaaactttcaatttcataagtaatacatggatacactcttgtgaaaagaagaaattggagcattgtacttaaagctgatgtccttaggagctgggcgtggtggtacgtgcctgtagtccctcggctacttgggaggctgagatgggaggatccttgagccccagaagtcgaggttgcagtgagccatgatcatgccactgcactccagtccaggcaacagagcaagatccttgtctctctctctcaaaaaaaaagaaaaaaaa

SEQ ID NO: 450519 - DNA, 1405 bp, Homo sapiens
gaggcaccgagaagttaaggaacttgctcaaggtcacagagtttgaactcaggctacagatgctgcagcaactggagaaagtcctcatcgccccatatcacccaccaccgacccccagcaggacgtgacccccgccaggacggaggccggcagctggggggctggagcatgggacccagaacacggactcaggcttgcgcagcctcctggcttctaggcgggagcctagaaaggcgccagcccctttcgcgtgctgctgagactccaggggtggggttcactctcaggggcgcacaaaggcatgaaaaccttggcttcagcctctgagatgcggaactgaccgacctattgtcttgggacccaccagtgcgcttgggtgcaccagcccccttaacgttggtgccggctccctcccggctcctccccatcccagagggtcccctcgccccaggccctgagcctgcgtcctggggtcctgggccgcacgtgcctctggcagctcgaagaagctgtcggggcttgcaggagagcgtgcaaactgaaaccaaaacaggccgactcgaggaacatccgggtgggaccgcagactcaccggagcgcagcgcctgggccagggcctgggaccctgctccgccccgcgctcccctgcaccccttccccacgctgctcccctcttcctaagcggccccccctctcccgggcagcagaagaaggggtgggacccgggcgggctccgggagggggccctggaggaatggatggtggcggaagggcggagcaggggcggggcccgcggagactccacggggcgccccgggcgtgaggcacccactctgggagcacagagagctcaggtagcctgcctagatggcggcgcgcaccctgggccgcggcgtcgggaggctgctgggcagcctgcgagggctctcggggcagcccgcgcggccgccgtgcggggtgagcgcgccgcgcagggcggcctcgggaccctcgggcagcgctcccgcagttgcagcagcagcagcacagccaggctcgtatcccgcgctgagtgcacaggcagcccgggagccggccgccttctgggggcctctggcgcgggacactctcgtgtgggacaccccctaccacaccgtctgggactgcgacttcagcactggcaagatcggctggttcctgggaggccagttaaatgtctctgtcaactgcttggaccagcatgttcggaagtcccccgagagcgttgctttgatctgggagcgcgatgagcctggaacggaagtgaggatcacctacaggataagtgaatgtgaccgcaagcagagtgccccccagtgctagccggtgtagcgtgcctggggactctctcagcgccgtgtcgggcgggccaattagggattctttt

SEQ ID NO: 450520 - DNA, 3949 bp, Homo sapiens
ggtgtgagaggtcagtgtttcttcctggcctattcggggcagggccccctcgagtcctcccaccctacagctcctcagggccctggctgcctcaagcccccactgcactgtctggaaactcccagataatctgatcatgtaacgcggcagcaggacactaagggccattcgcccaaagatttttaaaaactctttttagaacagatagagaaaaccacccaaattaaatgcatggcttaatgaattattataaggcaaatgccactttgatcaagaagtggaaggccaccggtttctcagaagccccttccaggcccatatggccacagccccgtccagcatgtcttgatgtgtcttgtgcgcctgccctgtttttattttgatagttttgtgacccatatgagcatccgtgggcactgtagcttactgttgccaattaaaatattgttttttcttttgttttgttttgttttgttttgttttgttttttcatggagtctcactctgttgtccaggttagagtgcagtggtgtgatctcagatcactgcaacctttgcctcctgggttcaagtgactctcctgtctcagctttctgagtagctgggattacaggcacctgccaccacaccctgctaattttttttgtatttttagtagagacagggttttgccatgttggtcaggctggtcttgaacttctgacctcaagtgatctgcccgccttggcctctccaagtgctggaattacaggtgtgagccaccgtgtccggcctaaaatattgttgatatgtgttttaagtctttttaagcctatgctcccccatttccttacacttggccatagtcacatccagccatttttctctggtgtcctttggtctgggttgtgcctgttgtccctctgcctctgtgtttcctgcacgtgggcagttagatcctgagatgggatcaggctccactcagctgctgtggaagaataaaggggattcggatgtctgtcctctcatgctcctcgaagctgatgatgcttgatgccattcttggccttttttgcttttattttttgtagttcttaaggggtttaaaaaatcgtggcataaggtaatgcaaaaaggtgtccatgtgttaaacgtacaactagacggactctgcagtgtgcccacctgtcctgctgctggaggccatttgaggagccagctgcctctcacagctatggactgcagcctatgcatgcctatttcctagtgacctggtgtgaacatggtggagtggggggacaagctcctgatgctcctttcctgtctctgcagcttgtgtttgaccaccagccaggtgacatctttggctgtgtggccgacatcggttggattacaggacacagctacgtggtgtatgggcctctctgcaatggtgccaccagcgtcctttttgagagcaccccagtttatcccaatgctggtcggtactgggagacagtagagaggttgaagatcaatcagttctatggcgccccaacggctgtccggctgttgctgaaatacggtgatgcctgggtgaagaagtatgatcgctcctccctgcggaccctggggtcagtgggagagcccatcaactgtgaggcctgggagtggcttcacagggtggtgggggacagcaggtgcacgctggtggacacctggtggcagacagaaacaggtggcatctgcatcgcaccacggccctcggaagaaggggcggaaatcctccctgccatggcgatgaggcccttctttggcatcgtccccgtcctcatggatgagaagggcagcgtcgtggagggcagcaacgtctccggggccctgtgcatctcccaggcctggccgggcatggccaggaccatctatggcgaccaccagcgatttgtggacgcctacttcaaggcctacccaggctattacttcactggagacggggcttaccgaactgagggcggctattaccagatcacagggcggatggatgatgtcatcaacatcagtggccaccggctggggaccgcagagattgaggacgccatcgccgaccaccctgcagtaccagaaagtgctgtcattggctacccccacgacatcaaaggagaagctgcctttgccttcattgtggtgaaagatagtgcgggtgactcagatgtggtggtgcaggagctcaagtccatggtggccaccaagatcgccaaatatgctgtgcctgatgagatcctggtggtgaaacgtcttccaaaaaccaggtctgggaaggtcatgcggcggctcctgaggaagatcatcactagtgaggcccaggagctgggagacactaccaccttggaggaccccagcatcatcgcagagatcctgagtgtctaccagaagtgcaaggacaagcaggctgctgctaagtgagctggcaccttgtggggctcttgggatgggcgggcacccaagccctggcttgtccttcccagaaggtacccctgaggttggcgtcttcctacgtcccagaagcagcccccaccccacacatgacccacaccgccctcacgtgaagctgggctgagagccctttctcccatccattggaggtcccaggagtgtcacccatggagaggctatgcgacatggctagggctggttctgccatctgagtttggtttcctggaatgaaaaggcattgccatctccattcctctgccctcttgagccagcacaggaaggtgaggccctgggatagcgcgcctgctcagataacacagagctagttagctagtagcaaccgtgttttctccagatctgtctagatacaaaggtcagaaatcttatttttatacttttatattgtggaagaacagcatgcaacactcacatgtagtgtgtggatttacttgaacatgttctttttaacatgtagttatgaaaatctccttttttgcctctactggtgaggaaacatgaggatcagaggccacatttttaattattgttagtgtatttggaagtctgaattggagatgtttgtacctctgtctaaacagttcccttgagaacttccaagcctccggcatcttttcctggtgagtgtttctcctgtgcttggttgtgtataatggagctaactcctaagcggtggggtgaatgtggccgccttagttctgaagctactccagttatgttctgtttcttcaagctgtgatccagaaagatttttgtgcccccagatgcctcttgataggagaggcaacatactccaaatagttgggttcttcagggaagctattagaaactcaggtgacttgttagagcactaacttggtcagagccaaatcctggcaaacgctgcctgaccttcactctgtggttggggcagtgagaaccactgaggtccaatgatgagacttggaggtctggatccagtctctctttgttttaatgtgacttaggtgctgtcaacattagcaagataatggaaatcacgacgccagtgggtgcttacctccctgctaggcatgcaggggctggcggttggcaggggaaggaggcccagtgagccgggtcccttaggggagggagagtttgtcctctttgccccacagtctacccttcagggccttgtggcagtgccagtgttcggggggtgtctgggccactgagtacccactcggtcgtggttgtgctggcctcttgggtgagtgaacctgtgaagcccaggaggtggtgttggctgcagggtacacaaatactgagtggtggtcttttgttacaggcttagcaacaaagctgtgccctgggcatggggggctgtagtgtagctacagttgtgcgtttgtgaaatggcttagctttccatgttgctgagaggaacctggacatggtcccgggcatctgaatgatctgtaggggagggagttcaaataaagctttattttgttcattt

SEQ ID NO: 450521 - DNA, 4302 bp, Homo sapiens
gaggcaccgagaagttaaggaacttgctcaaggtcacagagtttgaactcaggctacagatgctgcagcaactggagaaagtcctcatcgccccatatcacccaccaccgacccccagcaggacgtgacccccgccaggacggaggccggcagctggggggctggagcatgggacccagaacacggactcaggcttgcgcagcctcctggcttctaggcgggagcctagaaaggcgccagcccctttcgcgtgctgctgagactccaggggtggggttcactctcaggggcgcacaaaggcatgaaaaccttggcttcagcctctgagatgcggaactgaccgacctattgtcttgggacccaccagtgcgcttgggtgcaccagcccccttaacgttggtgccggctccctcccggctcctccccatcccagagggtcccctcgccccaggccctgagcctgcgtcctggggtcctgggccgcacgtgcctctggcagctcgaagaagctgtcggggcttgcaggagagcgtgcaaactgaaaccaaaacaggccgactcgaggaacatccgggtgggaccgcagactcaccggagcgcagcgcctgggccagggcctgggaccctgctccgccccgcgctcccctgcaccccttccccacgctgctcccctcttcctaagcggccccccctctcccgggcagcagaagaaggggtgggacccgggcgggctccgggagggggccctggaggaatggatggtggcggaagggcggagcaggggcggggcccgcggagactccacggggcgccccgggcgtgaggcacccactctgggagcacagagagctcaggtagcctgcctagatggcggcgcgcaccctgggccgcggcgtcgggaggctgctgggcagcctgcgagggctctcggggcagcccgcgcggccgccgtgcggggtgagcgcgccgcgcagggcggcctcgggaccctcgggcagcgctcccgcagttgcagcagcagcagcacagccaggctcgtatcccgcgctgagtgcacaggcagcccgggagccggccgccttctgggggcctctggcgcgggacactctcgtgtgggacaccccctaccacaccgtctgggactgcgacttcagcactggcaagatcggctggttcctgggaggccagttaaatgtctctgtcaactgcttggaccagcatgttcggaagtcccccgagagcgttgctttgatctgggagcgcgatgagcctggaacggaagtgaggatcacctacagggaactactggagaccacgtgccgcctggccaacacgctgaagaggcatggagtccaccgtggggaccgtgttgccatctacatgcccgtgtccccattggctgtggcagcaatgctggcctgtgccaggatcggagctgtccacacagtcatctttgctggcttcagtgcagagtccttggctgggaggatcaatgatgccaagtgcaaggtggttatcaccttcaaccaaggactccggggtgggcgcgtggtggagctgaagaaaatagtggatgaggctgtgaagcactgccccaccgtgcagcatgtcctggtggctcacaggacagacaacaaggtccacatgggggatctggacgtcccgctggagcaggaaatggccaaggaggaccctgtttgcgccccagagagcatgggcagtgaggacatgctcttcatgctgtacacctcagggagcaccggaatgcccaagggcatcgtccatacccaggcaggctacctgctctatgccgccctgactcacaagcttgtgtttgaccaccagccaggtgacatctttggctgtgtggccgacatcggttggattacaggacacagctacgtggtgtatgggcctctctgcaatggtgccaccagcgtcctttttgagagcaccccagtttatcccaatgctggtcggtactgggagacagtagagaggttgaagatcaatcagttctatggcgccccaacggctgtccggctgttgctgaaatacggtgatgcctgggtgaagaagtatgatcgctcctccctgcggaccctggggtcagtgggagagcccatcaactgtgaggcctgggagtggcttcacagggtggtgggggacagcaggtgcacgctggtggacacctggtggcagacagaaacaggtggcatctgcatcgcaccacggccctcggaagaaggggcggaaatcctccctgccatggcgatgaggcccttctttggcatcgtccccgtcctcatggatgagaagggcagcgtcgtggagggcagcaacgtctccggggccctgtgcatctcccaggcctggccgggcatggccaggaccatctatggcgaccaccagcgatttgtggacgcctacttcaaggcctacccaggctattacttcactggagacggggcttaccgaactgagggcggctattaccagatcacagggcggatggatgatgtcatcaacatcagtggccaccggctggggaccgcagagattgaggacgccatcgccgaccaccctgcagtaccagaaagtgctgtcattggctacccccacgacatcaaaggagaagctgcctttgccttcattgtggtgaaagatagtgcgggtgactcagatgtggtggtgcaggagctcaagtccatggtggccaccaagatcgccaaatatgctgtgcctgatgagatcctggtggtgaaacgtcttccaaaaaccaggtctgggaaggtcatgcggcggctcctgaggaagatcatcactagtgaggcccaggagctgggagacactaccaccttggaggaccccagcatcatcgcagagatcctgagtgtctaccagaagtgcaaggacaagcaggctgctgctaagtgagctggcaccttgtggggctcttgggatgggcgggcacccaagccctggcttgtccttcccagaaggtacccctgaggttggcgtcttcctacgtcccagaagcagcccccaccccacacatgacccacaccgccctcacgtgaagctgggctgagagccctttctcccatccattggaggtcccaggagtgtcacccatggagaggctatgcgacatggctagggctggttctgccatctgagtttggtttcctggaatgaaaaggcattgccatctccattcctctgccctcttgagccagcacaggaaggtgaggccctgggatagcgcgcctgctcagataacacagagctagttagctagtagcaaccgtgttttctccagatctgtctagatacaaaggtcagaaatcttatttttatacttttatattgtggaagaacagcatgcaacactcacatgtagtgtgtggatttacttgaacatgttctttttaacatgtagttatgaaaatctcctgtgcttggttgtgtataatggagctaactcctaagcggtggggtgaatgtggccgccttagttctgaagctactccagttatgttctgtttcttcaagctgtgatccagaaagatttttgtgcccccagatgcctcttgataggagaggcaacatactccaaatagttgggttcttcagggaagctattagaaactcaggtgacttgttagagcactaacttggtcagagccaaatcctggcaaacgctgcctgaccttcactctgtggttggggcagtgagaaccactgaggtccaatgatgagacttggaggtctggatccagtctctctttgttttaatgtgacttaggtgctgtcaacattagcaagataatggaaatcacgacgccagtgggtgcttacctccctgctaggcatgcaggggctggcggttggcaggggaaggaggcccagtgagccgggtcccttaggggagggagagtttgtcctctttgccccacagtctacccttcagggccttgtggcagtgccagtgttcggggggtgtctgggccactgagtacccactcggtcgtggttgtgctggcctcttgggtgagtgaacctgtgaagcccaggaggtggtgttggctgcagggtacacaaatactgagtggtggtcttttgttacaggcttagcaacaaagctgtgccctgggcatggggggctgtagtgtagctacagttgtgcgtttgtgaaatggcttagctttccatgttgctgagaggaacctggacatggtcccgggcatctgaatgatctgtaggggagggagttcaaataaagctttattttgttcattt

SEQ ID NO: 450522 - DNA, 4013 bp, Homo sapiens
gaggcaccgagaagttaaggaacttgctcaaggtcacagagtttgaactcaggctacagatgctgcagcaactggagaaagtcctcatcgccccatatcacccaccaccgacccccagcaggacgtgacccccgccaggacggaggccggcagctggggggctggagcatgggacccagaacacggactcaggcttgcgcagcctcctggcttctaggcgggagcctagaaaggcgccagcccctttcgcgtgctgctgagactccaggggtggggttcactctcaggggcgcacaaaggcatgaaaaccttggcttcagcctctgagatgcggaactgaccgacctattgtcttgggacccaccagtgcgcttgggtgcaccagcccccttaacgttggtgccggctccctcccggctcctccccatcccagagggtcccctcgccccaggccctgagcctgcgtcctggggtcctgggccgcacgtgcctctggcagctcgaagaagctgtcggggcttgcaggagagcgtgcaaactgaaaccaaaacaggccgactcgaggaacatccgggtgggaccgcagactcaccggagcgcagcgcctgggccagggcctgggaccctgctccgccccgcgctcccctgcaccccttccccacgctgctcccctcttcctaagcggccccccctctcccgggcagcagaagaaggggtgggacccgggcgggctccgggagggggccctggaggaatggatggtggcggaagggcggagcaggggcggggcccgcggagactccacggggcgccccgggcgtgaggcacccactctgggagcacagagagctcaggtagcctgcctagatggcggcgcgcaccctgggccgcggcgtcgggaggctgctgggcagcctgcgagggctctcggggcagcccgcgcggccgccgtgcggggtgagcgcgccgcgcagggcggcctcgggaccctcgggcagcgctcccgcagttgcagcagcagcagcacagccaggctcgtatcccgcgctgagtgcacaggcagcccgggagccggccgccttctgggggcctctggcgcgggacactctcgtgtgggacaccccctaccacaccgtctgggactgcgacttcagcactggcaagatcggctggttcctgggaggccagttaaatgtctctgtcaactgcttggaccagcatgttcggaagtcccccgagagcgttgctttgatctgggagcgcgatgagcctggaacggaagtgaggatcacctacagggaactactggagaccacgtgccgcctggccaacacgctgaagaggcatggagtccaccgtggggaccgtgttgccatctacatgcccgtgtccccattggctgtggcagcaatgctggcctgtgccaggatcggagctgtccacacagtcatctttgctggcttcagtgcagagtccttggctgggaggatcaatgatgccaagtgcaaggtggttatcaccttcaaccaaggactccggggtgggcgcgtggtggagctgaagaaaatagtggatgaggctgtgaagcactgccccaccgtgcagcatgtcctggtggctcacaggacagacaacaaggtccacatgggggatctggacgtcccgctggagcaggaaatggccaaggaggaccctgtttgcgccccagagagcatgggcagtgaggacatgctcttcatgctgtacacctcagggagcaccggaatgcccaagggcatcgtccatacccaggcaggctacctgctctatgccgccctgactcacaagcttgtgtttgaccaccagccaggtgacatctttggctgtgtggccgacatcggttggattacaggacacagctacgtggtgtatgggcctctctgcaatggtgccaccagcgtcctttttgagagcaccccagtttatcccaatgctggtcggtactgggagacagtagagaggttgaagatcaatcagttctatggcgccccaacggctgtccggctgttgctgaaatacggtgatgcctgggtgaagaagtatgatcgctcctccctgcggaccctggggtcagtgggagagcccatcaactgtgaggcctgggagtggcttcacagggtggtgggggacagcaggtgcacgctggtggacacctggtggcagacagaaacaggtggcatctgcatcgcaccacggccctcggaagaaggggcggaaatcctccctgccatggcgatgaggcccttctttggcatcgtccccgtcctcatggatgagaagggcagcgtcgtggagggcagcaacgtctccggggccctgtgcatctcccaggcctggccgggcatggccaggaccatctatggcgaccaccagcgatttgtggacgcctacttcaaggcctacccaggctattacttcactggagacggggcttaccgaactgagggcggctattaccagatcacagggcggatggatgatgtcatcaacatcagtggccaccggctggggaccgcagagattgaggacgccatcgccgaccaccctgcagtaccagaaagtgctgtcattggctacccccacgacatcaaaggagaagctgcctttgccttcattgtggtgaaagatagtgcgggtgactcagatgtggtggtgcaggagctcaagtccatggtggccaccaagatcgccaaatatgctgtgcctgatgagatcctggtggtgaaacgtcttccaaaaaccaggtctgggaaggtcatgcggcggctcctgaggaagatcatcactagtgaggcccaggagctgggagacactaccaccttggaggaccccagcatcatcgcagagatcctgagtgtctaccagaagtgcaaggacaagcaggctgctgctaagtgagctggcaccttgtggggctcttgggatgggcgggcacccaagccctggcttgtccttcccagaaggtacccctgaggttggcgtcttcctacgtcccagaagcagcccccaccccacacatgacccacaccgccctcacgtgaagctgggctgagagccctttctcccatccattggaggtcccaggagtgtcacccatggagaggctatgcgacatggctagggctggttctgccatctgagtttggtttcctggaatgaaaaggcattgccatctccattcctctgccctcttgagccagcacaggaaggtgaggccctgggatagcgcgcctgctcagataacacagagctagttagctagtagcaaccgtgttttctccagatctgtctagatacaaaggtcagaaatcttatttttatacttttatattgtggaagaacagcatgcaacactcacatgtagtgtgtggatttacttgaacatgttctttttaacatgtagttatgaaaatctccttttttgcctctactggtgaggaaacatgaggatcagaggccacatttttaattattgttagtgtatttggaagtctgaattggagatgtttgtacctctgtctaaacagttcccttgagaacttccaagcctccggcatcttttcctggtgagtgtttctcctgtgcttggttgtgtataatggagctaactcctaagcggtggggtgaatgtggccgccttagttctgaagctactccagttatgttctgtttcttcaagctgtgatccagaaagatttttgtgcccccagatgcctcttgataggagaggcaacatactccaaatagttgggttcttcagggaagctattagaaactcaggtgacttgttagagcactaacttggtcagagccaaatcctggcaaacgctgcctgaccttcactctgtggttggggcagtgagaaccactgaggtccaatgatgagacttggaggtctggatccagtctctctttgttttaatagcttccctgaagaacccaactatttggagtatgttgcctttcggagaaga

SEQ ID NO: 450523 - DNA, 5864 bp, Homo sapiens
ggtgtgagaggtcagtgtttcttcctggcctattcggggcagggccccctcgagtcctcccaccctacagctcctcagggccctggctgcctcaagcccccactgcactgtctggaaactcccagataatctgatcatgtaacgcggcagcaggacactaagggccattcgcccaaagatttttaaaaactctttttagaacagatagagaaaaccacccaaattaaatgcatggcttaatgaattattataaggcaaatgccactttgatcaagaagtggaaggccaccggtttctcagaagccccttccaggcccatatggccacagccccgtccagcatgtcttgatgtgtcttgtgcgcctgccctgtttttattttgatagttttgtgacccatatgagcatccgtgggcactgtagcttactgttgccaattaaaatattgttttttcttttgttttgttttgttttgttttgttttgttttttcatggagtctcactctgttgtccaggttagagtgcagtggtgtgatctcagatcactgcaacctttgcctcctgggttcaagtgactctcctgtctcagctttctgagtagctgggattacaggcacctgccaccacaccctgctaattttttttgtatttttagtagagacagggttttgccatgttggtcaggctggtcttgaacttctgacctcaagtgatctgcccgccttggcctctccaagtgctggaattacaggtgtgagccaccgtgtccggcctaaaatattgttgatatgtgttttaagtctttttaagcctatgctcccccatttccttacacttggccatagtcacatccagccatttttctctggtgtcctttggtctgggttgtgcctgttgtccctctgcctctgtgtttcctgcacgtgggcagttagatcctgagatgggatcaggctccactcagctgctgtggaagaataaaggggattcggatgtctgtcctctcatgctcctcgaagctgatgatgcttgatgccattcttggccttttttgcttttattttttgtagttcttaaggggtttaaaaaatcgtggcataaggtaatgcaaaaaggtgtccatgtgttaaacgtacaactagacggactctgcagtgtgcccacctgtcctgctgctggaggccatttgaggagccagctgcctctcacagctatggactgcagcctatgcatgcctatttcctagtgacctggtgtgaacatggtggagtggggggacaagctcctgatgctcctttcctgtctctgcagcttgtgtttgaccaccagccaggtgacatctttggctgtgtggccgacatcggttggattacaggacacagctacgtggtgtatgggcctctctgcaatggtgccaccagcgtcctttttgagagcaccccagtttatcccaatgctggtaaggatggtgaaccctgtttgggaccccatgctggtgtcaggggagagagcctgaggctcgaggcttgtggagaggttcatggaagggggacgcctgggttctggtgagggtgtggctctccaggtcctgctgtcgaaatgcccggtggggccaggccccaggtcttcagaaagatctgacaggcagcagcagggagtctgacttggtgctggaggacatctcaaggcccctgctcctgcactcctgccctctgacttaaactgccggcctcaggccatcgctttggcatccttctcacctctaggctgcttgcccagatccagccctttctcaaagccagggccagctgcccgccacttctgtgtccccagccctgcccctgagccttcagggctgtccctcaaaccatgttaggcatggcctagaaccatctccattaaattgagatcactttgaagacaaggtgatgactggctcccttgggcatcgtcctcccacacagcacagtgtcttcaaatattttctttaatgtaagcagatcatggtggctctgcccaaaggctgctgctccagtgttccatggcactgacaactgtgcatggactgtgttatcacctcccagtgctccatccctgcctttgggggctgggtgtgctcaaggaagaagttgtaggggcaagaccagggattaagggccatggcccaggtgctgtctcaggccaccacttcagcccttagaagctcagtgttccatgtggaggggatggtgtgggtagtgggtttacaggaaccaggggtgtgcatgccgggcacatggccctgctccctgggacacacgcagtggcagctgtactgtcaccaggggaagcaccagtcaccactttagagcccatgtgagtgtgatcgagtgaaagctctgtgttaatgctccatgggttattaaatccacgtagtatcaccttgaactaggccatcaccctaagcctggtgaagactgttcctgaatgtgccgcccatggatctggggagtgcttggaggagagcggccattggggacctgtcccatggggcttctttccatctttcactggcgggggtggggggttggggggatccctttcatatggacatatgcgcgtctgcacatgcccagcactcaggaagtcttggctgatctctgagtttaaagtaaaccatgtcagctctcctgctgacagtgaatttcggcctttctgtaggtcggtactgggagacagtagagaggttgaagatcaatcagttctatggcgccccaacggctgtccggctgttgctgaaatacggtgatgcctgggtgaagaagtatgatcgctcctccctgcggaccctggggtcaggtgagcggcctgccctgcagcaggagaggttgtgcttgccctagaccctcagagccaatacgggcttcagcaggacttcagtcatgaagctgcccggctttgtatgtgtgaattcacgcaatgccagaccggatctggtagaaagcaccagcacctcttcccacctgtaagctcctccccagagctggcagcagttacctgtctggggaacaacgttccagacattttctgtgccgttgtttctgtgcccaatttctgtagcttaatcttcattaggaatacttacccactcaataagttaagggtcaggtcagttctttagtggctgcatgggatttaactgtataacttagctgggtgtggtggcaaaggctgaggtgggaggattgcttgagcccaggagtttcaggctgcagtgaactaggattgcaccactgcgctccagcctggtgacagagtgagactcagtcgtctaaataatagtaataatagtataactacagtttgctaaacactgccccatagttggaccttttgattgtctccaagtctgtggagtggataccatcctgcacttttgccctgctgttactgtagacatttccaggcagacagttcaaagcttaggcctattggtaatgttgatggatattgccaaatcacatggaaacattttggaaatgtgatggtggcatggtttcgacagtatcagcagtgtctgtctttcgggctggtgctgggagggactgggtgctggtgactgctgttctctctcctgtccctgccacatttcatgtctgccttgacgtgtggtcacgcgtggtcagccacctgcttggtggcttttcactggggaagcatgcagggcagtgaccatggaagagtgtcccattctgccacatacatccttgggaagggagcatgtacctcccagtgaacatgtgattccactactactgggtgaccatgaggccatgcgggcatccgggccacaggctgagaggcacagcagctggggctgtgccctgcagagctcaccacttgttcccaaatgtgagatggggatgagacctacctacagggtggcgaggatgccacagagggtcagatgtgagccttagtataatgttcagcatggagatgattaatggagagagctcctgaggaatagcaggcatccaatgactcctcctcctcttttcccttattttccccattaacagtaaaaaccttctgtttctcaaccagctttctagattaaaaagcaggaggagtttgaatactattaataagagcaaatatgtattaaatgcctttatcttcacatcagtcctttgagcaaacagcagatgttgtttcacattacagagaaggaagaggaggcacagagaggtcagagaaccggcctgaggtcactcagcaagtagggcagcctgtgttgaacgcagcacttggttctagagtctgtaaaactcactctgccccccacctgattgatgggctctgtgcccccaccctgtaccctcaacaggtcccttgccatactgtcccctccacctctcagaaagagtatggggttcctttctagatggtgaatcttagtttgctttgtgctgctgtaatagaataccctgaaactgggtgatttataatgaacagaaatttattggttcacatttctggaggctgggaagtccacatcaaggtgttggcatctggtgagggccttcttgctgcatcgtcccatggtggaagggcaaagagaaggcaagagagagcaagaggaggttgaactcacccttttataatggcaccaatcccactcatgagggtggaaacctcttggcataatcacctcataaaggttccacctcttaatactgttacaatggcaattacatttcagcgtgagatttggaggggacaaacattcaaaccataataagtggtgagtttgggtggtctctcttggcatgctggagctgggcttgagaggcccgtgtgattctgactgcctgggccatgtagtgcttgtggactgggaacaaacagcggggtggccagggccatagaaactcgcccagatcctctaggtgttgtcagcagggccacctgagtgggccctaggcattaggtggggacagggctgaagggcaagatttggttttccagatacactcatgggatttgtctcctgaaggaaggttcacggggtccaatgacaaggggtaccgccctaagtgcatttcaggaaggggtgtgctctggcagctgcattagagtgggatgtgtatcccagcagcctctgcctcacctaggggtccccacagacttggaacacctctgagccagggggccagcccccagcagaggctcagctgggttttgtgtatttagctggttgataggcacattcctattcctgttgcataaccggttctagccgcagagccctgcgggaggccaggtgctaatcacacacctcgctgttctgttctcggtatacagtgttggcaggcagcgtggcgtcttgtgatgtcttgcacctggggctcccagcacctcggagcagtgctgggagtcagtgtgttccacaccttggccagggccagcgctgtgctggcacacctgtcggtgcaattccacagcccagacccattccaggcagctgggatcagccctcatgacatttaatccgttgagtcgtcagaatcccactcactcaagacattccccctagatttgtatttctcaaagcttttttaaactttcaatttcataagtaatacatggatacactcttgtgaaaagaagaaattggagcattgtacttaaagctgatgtccttaggagctgggcgtggtggtacgtgcctgtagtccctcggctacttgggaggctgagatgggaggatccttgagccccagaagtcgaggttgcagtgagccatgatcatgccactgcactccagtccaggcaacagagcaagatccttgtctctctctctcaaaaaaaaagaaaaaaaa

SEQ ID NO: 450524 - DNA, 4465 bp, Homo sapiens
gaggcaccgagaagttaaggaacttgctcaaggtcacagagtttgaactcaggctacagatgctgcagcaactggagaaagtcctcatcgccccatatcacccaccaccgacccccagcaggacgtgacccccgccaggacggaggccggcagctggggggctggagcatgggacccagaacacggactcaggcttgcgcagcctcctggcttctaggcgggagcctagaaaggcgccagcccctttcgcgtgctgctgagactccaggggtggggttcactctcaggggcgcacaaaggcatgaaaaccttggcttcagcctctgagatgcggaactgaccgacctattgtcttgggacccaccagtgcgcttgggtgcaccagcccccttaacgttggtgccggctccctcccggctcctccccatcccagagggtcccctcgccccaggccctgagcctgcgtcctggggtcctgggccgcacgtgcctctggcagctcgaagaagctgtcggggcttgcaggagagcgtgcaaactgaaaccaaaacaggccgactcgaggaacatccgggtgggaccgcagactcaccggagcgcagcgcctgggccagggcctgggaccctgctccgccccgcgctcccctgcaccccttccccacgctgctcccctcttcctaagcggccccccctctcccgggcagcagaagaaggggtgggacccgggcgggctccgggagggggccctggaggaatggatggtggcggaagggcggagcaggggcggggcccgcggagactccacggggcgccccgggcgtgaggcacccactctgggagcacagagagctcaggtagcctgcctagatggcggcgcgcaccctgggccgcggcgtcgggaggctgctgggcagcctgcgagggctctcggggcagcccgcgcggccgccgtgcggggtgagcgcgccgcgcagggcggcctcgggaccctcgggcagcgctcccgcagttgcagcagcagcagcacagccaggctcgtatcccgcgctgagtgcacaggcagcccgggagccggccgccttctgggggcctctggcgcgggacactctcgtgtgggacaccccctaccacaccgtctgggactgcgacttcagcactggcaagatcggctggttcctgggaggccagttaaatgtctctgtcaactgcttggaccagcatgttcggaagtcccccgagagcgttgctttgatctgggagcgcgatgagcctggaacggaagtgaggatcacctacagggaactactggagaccacgtgccgcctggccaacacgctgaagaggcatggagtccaccgtggggaccgtgttgccatctacatgcccgtgtccccattggctgtggcagcaatgctggcctgtgccaggatcggagctgtccacacagtcatctttgctggcttcagtgcagagtccttggctgggaggatcaatgatgccaagtgcaaggtggttatcaccttcaaccaaggactccggggtgggcgcgtggtggagctgaagaaaatagtggatgaggctgtgaagcactgccccaccgtgcagcatgtcctggtggctcacaggacagacaacaaggtccacatgggggatctggacgtcccgctggagcaggaaatggccaaggaggaccctgtttgcgccccagagagcatgggcagtgaggacatgctcttcatgctgtacacctcagggagcaccggaatgcccaagggcatcgtccatacccaggcaggctacctgctctatgccgccctgactcacaagcttgtgtttgaccaccagccaggtgacatctttggctgtgtggccgacatcggttggattacaggacacagctacgtggtgtatgggcctctctgcaatggtgccaccagcgtcctttttgagagcaccccagtttatcccaatgctggtcggtactgggagacagtagagaggttgaagatcaatcagttctatggcgccccaacggctgtccggctgttgctgaaatacggtgatgcctgggtgaagaagtatgatcgctcctccctgcggaccctggggtcagtgggagagcccatcaactgtgaggcctgggagtggcttcacagggtggtgggggacagcaggtgcacgctggtggacacctggtggcagacagaaacaggtggcatctgcatcgcaccacggccctcggaagaaggggcggaaatcctccctgccatggcgatgaggcccttctttggcatcgtccccgtcctcatggatgagaagggcagcgtcgtggagggcagcaacgtctccggggccctgtgcatctcccaggcctggccgggcatggccaggaccatctatggcgaccaccagcgatttgtggacgcctacttcaaggcctacccaggctattacttcactggagacggggcttaccgaactgagggcggctattaccagatcacagggcggatggatgatgtcatcaacatcagtggccaccggctggggaccgcagagattgaggacgccatcgccgaccaccctgcagtaccagaaagtgctgtcattggctacccccacgacatcaaaggagaagctgcctttgccttcattgtggtgaaagatagtgcgggtgactcagatgtggtggtgcaggagctcaagtccatggtggccaccaagatcgccaaatatgctgtgcctgatgagatcctggtggtgaaacgtcttccaaaaaccaggtctgggaaggtcatgcggcggctcctgaggaagatcatcactagtgaggcccaggagctgggagacactaccaccttggaggaccccagcatcatcgcagagatcctgagtgtctaccagaagtgcaaggacaagcaggctgctgctaagtgagctggcaccttgtggggctcttgggatgggcgggcacccaagccctggcttgtccttcccagaaggtacccctgaggttggcgtcttcctacgtcccagaagcagcccccaccccacacatgacccacaccgccctcacgtgaagctgggctgagagccctttctcccatccattggaggtcccaggagtgtcacccatggagaggctatgcgacatggctagggctggttctgccatctgagtttggtttcctggaatgaaaaggcattgccatctccattcctctgccctcttgagccagcacaggaaggtgaggccctgggatagcgcgcctgctcagataacacagagctagttagctagtagcaaccgtgttttctccagatctgtctagatacaaaggtcagaaatcttatttttatacttttatattgtggaagaacagcatgcaacactcacatgtagtgtgtggatttacttgaacatgttctttttaacatgtagttatgaaaatctccttttttgcctctactggtgaggaaacatgaggatcagaggccacatttttaattattgttagtgtatttggaagtctgaattggagatgtttgtacctctgtctaaacagttcccttgagaacttccaagcctccggcatcttttcctggtgagtgtttctcctgtgcttggttgtgtataatggagctaactcctaagcggtggggtgaatgtggccgccttagttctgaagctactccagttatgttctgtttcttcaagctgtgatccagaaagatttttgtgcccccagatgcctcttgataggagaggcaacatactccaaatagttgggttcttcagggaagctattagaaactcaggtgacttgttagagcactaacttggtcagagccaaatcctggcaaacgctgcctgaccttcactctgtggttggggcagtgagaaccactgaggtccaatgatgagacttggaggtctggatccagtctctctttgttttaatgtgacttaggtgctgtcaacattagcaagataatggaaatcacgacgccagtgggtgcttacctccctgctaggcatgcaggggctggcggttggcaggggaaggaggcccagtgagccgggtcccttaggggagggagagtttgtcctctttgccccacagtctacccttcagggccttgtggcagtgccagtgttcggggggtgtctgggccactgagtacccactcggtcgtggttgtgctggcctcttgggtgagtgaacctgtgaagcccaggaggtggtgttggctgcagggtacacaaatactgagtggtggtcttttgttacaggcttagcaacaaagctgtgccctgggcatggggggctgtagtgtagctacagttgtgcgtttgtgaaatggcttagctttccatgttgctgagaggaacctggacatggtcccgggcatctgaatgatctgtaggggagggagttcaaataaagctttattttgttcattt

SEQ ID NO: 450525 - DNA, 4394 bp, Homo sapiens
gaggcaccgagaagttaaggaacttgctcaaggtcacagagtttgaactcaggctacagatgctgcagcaactggagaaagtcctcatcgccccatatcacccaccaccgacccccagcaggacgtgacccccgccaggacggaggccggcagctggggggctggagcatgggacccagaacacggactcaggcttgcgcagcctcctggcttctaggcgggagcctagaaaggcgccagcccctttcgcgtgctgctgagactccaggggtggggttcactctcaggggcgcacaaaggcatgaaaaccttggcttcagcctctgagatgcggaactgaccgacctattgtcttgggacccaccagtgcgcttgggtgcaccagcccccttaacgttggtgccggctccctcccggctcctccccatcccagagggtcccctcgccccaggccctgagcctgcgtcctggggtcctgggccgcacgtgcctctggcagctcgaagaagctgtcggggcttgcaggagagcgtgcaaactgaaaccaaaacaggccgactcgaggaacatccgggtgggaccgcagactcaccggagcgcagcgcctgggccagggcctgggaccctgctccgccccgcgctcccctgcaccccttccccacgctgctcccctcttcctaagcggccccccctctcccgggcagcagaagaaggggtgggacccgggcgggctccgggagggggccctggaggaatggatggtggcggaagggcggagcaggggcggggcccgcggagactccacggggcgccccgggcgtgaggcacccactctgggagcacagagagctcaggtagcctgcctagatggcggcgcgcaccctgggccgcggcgtcgggaggctgctgggcagcctgcgagggctctcggggcagcccgcgcggccgccgtgcggggtgagcgcgccgcgcagggcggcctcgggaccctcgggcagcgctcccgcagttgcagcagcagcagcacagccaggctcgtatcccgcgctgagtgcacaggcagcccgggagccggccgccttctgggggcctctggcgcgggacactctcgtgtgggacaccccctaccacaccgtctgggactgcgacttcagcactggcaagatcggctggttcctgggaggccagttaaatgtctctgtcaactgcttggaccagcatgttcggaagtcccccgagagcgttgctttgatctgggagcgcgatgagcctggaacggaagtgaggatcacctacagggaactactggagaccacgtgccgcctggccaacacgctgaagaggcatggagtccaccgtggggaccgtgttgccatctacatgcccgtgtccccattggctgtggcagcaatgctggcctgtgccaggatcggagctgtccacacagtcatctttgctggcttcagtgcagagtccttggctgggaggatcaatgatgccaagtgcaaggtggttatcaccttcaaccaaggactccggggtgggcgcgtggtggagctgaagaaaatagtggatgaggctgtgaagcactgccccaccgtgcagcatgtcctggtggctcacaggacagacaacaaggtccacatgggggatctggacgtcccgctggagcaggaaatggccaaggaggaccctgtttgcgccccagagagcatgggcagtgaggacatgctcttcatgctgtacacctcagggagcaccggaatgcccaagggcatcgtccatacccaggcaggctacctgctctatgccgccctgactcacaagcttgtgtttgaccaccagccaggtgacatctttggctgtgtggccgacatcggttggattacaggacacagctacgtggtgtatgggcctctctgcaatggtgccaccagcgtcctttttgagagcaccccagtttatcccaatgctggtcggtactgggagacagtagagaggttgaagatcaatcagttctatggcgccccaacggctgtccggctgttgctgaaatacggtgatgcctgggtgaagaagtatgatcgctcctccctgcggaccctggggtcagtgggagagcccatcaactgtgaggcctgggagtggcttcacagggtggtgggggacagcaggtgcacgctggtggacacctggtggcagacagaaacaggtggcatctgcatcgcaccacggccctcggaagaaggggcggaaatcctccctgccatggcgatgaggcccttctttggcatcgtccccgtcctcatggatgagaagggcagcgtcgtggagggcagcaacgtctccggggccctgtgcatctcccaggcctggccgggcatggccaggaccatctatggcgaccaccagcgatttgtggacgcctacttcaaggcctacccaggctattacttcactggagacggggcttaccgaactgagggcggctattaccagatcacagggcggatggatgatgtcatcaacatcagtggccaccggctggggaccgcagagattgaggacgccatcgccgaccaccctgcagtaccagaaagtgctgtcattggctacccccacgacatcaaaggagaagctgcctttgccttcattgtggtgaaagatagtgcgggtgactcagatgtggtggtgcaggagctcaagtccatggtggccaccaagatcgccaaatatgctgtgcctgatgagatcctggtggtgaaacgtcttccaaaaaccaggtctgggaaggtcatgcggcggctcctgaggaagatcatcactagtgaggcccaggagctgggagacactaccaccttggaggaccccagcatcatcgcagagatcctgagtgtctaccagaagtgcaaggacaagcaggctgctgctaagtgagctggcaccttgtggggctcttgggatgggcgggcacccaagccctggcttgtccttcccagaaggtacccctgaggttggcgtcttcctacgtcccagaagcagcccccaccccacacatgacccacaccgccctcacgtgaagctgggctgagagccctttctcccatccattggaggtcccaggagtgtcacccatggagaggctatgcgacatggctagggctggttctgccatctgagtttggtttcctggaatgaaaaggcattgccatctccattcctctgccctcttgagccagcacaggaaggtgaggccctgggatagcgcgcctgctcagataacacagagctagttagctagtagcaaccgtgttttctccagatctgtctagatacaaaggtcagaaatcttatttttatacttttatattgtggaagaacagcatgcaacactcacatgtagtgtgtggatttacttgaacatgttctttttaacatgtagttatgaaaatctccttttttgcctctactggtgaggaaacatgaggatcagaggccacatttttaattattgttagtgtatttggaagtctgaattggagatgtttgtacctctgtctaaacagttcccttgagaacttccaagcctccggcatcttttcctggtgagtgtttctcctgtgcttggttgtgtataatggagctaactcctaagcggtggggtgaatgtggccgccttagttctgaagctactccagttatgttctgtttcttcaagctgtgatccagaaagatttttgtgcccccagatgcctcttgataggagaggcaacatactccaaatagttgggttcttcagggaagctattagaaactcaggtgacttgttagagcactaacttggtcagagccaaatcctggcaaacgctgcctgaccttcactctgtggttggggcagtgagaaccactgaggtccaatgatgagacttggaggtctggatccagtctctctttgttttaatgtgacttaggtgctgtcaacattagcaagataatggaaatcacgacgccagtgggtgcttacctccctgctaggcatgcaggggctggcggttggcaggggaaggaggcccagtgagccgggtcccttaggggagggagagtttgtcctctttgccccacagtctacccttcagggccttgtggcagtgccagtgttcggggggtgtctgggccactgagtacccactcggtcgtggttgtgctggcctcttgggtgagtgaacctgtgaagcccaggaggtggtgttggctgcagggtacacaaatactgagtggtggtcttttgttacaggttagctttccatgttgctgagaggaacctggacatggtcccgggcatctgaatgatctgtaggggagggagttcaaataaagctttattttgttcattt

SEQ ID NO: 450526 - DNA, 3408 bp, Homo sapiens
gaggcaccgagaagttaaggaacttgctcaaggtcacagagtttgaactcaggctacagatgctgcagcaactggagaaagtcctcatcgccccatatcacccaccaccgacccccagcaggacgtgacccccgccaggacggaggccggcagctggggggctggagcatgggacccagaacacggactcaggcttgcgcagcctcctggcttctaggcgggagcctagaaaggcgccagcccctttcgcgtgctgctgagactccaggggtggggttcactctcaggggcgcacaaaggcatgaaaaccttggcttcagcctctgagatgcggaactgaccgacctattgtcttgggacccaccagtgcgcttgggtgcaccagcccccttaacgttggtgccggctccctcccggctcctccccatcccagagggtcccctcgccccaggccctgagcctgcgtcctggggtcctgggccgcacgtgcctctggcagctcgaagaagctgtcggggcttgcaggagagcgtgcaaactgaaaccaaaacaggccgactcgaggaacatccgggtgggaccgcagactcaccggagcgcagcgcctgggccagggcctgggaccctgctccgccccgcgctcccctgcaccccttccccacgctgctcccctcttcctaagcggccccccctctcccgggcagcagaagaaggggtgggacccgggcgggctccgggagggggccctggaggaatggatggtggcggaagggcggagcaggggcggggcccgcggagactccacggggcgccccgggcgtgaggcacccactctgggagcacagagagctcaggtagcctgcctagatggcggcgcgcaccctgggccgcggcgtcgggaggctgctgggcagcctgcgagggctctcggggcagcccgcgcggccgccgtgcggggtgagcgcgccgcgcagggcggcctcgggaccctcgggcagcgctcccgcagttgcagcagcagcagcacagccaggctcgtatcccgcgctgagtgcacaggcagcccgggagccggccgccttctgggggcctctggcgcgggacactctcgtgtgggacaccccctaccacaccgtctgggactgcgacttcagcactggcaagatcggctggttcctgggaggccagttaaatgtctctgtcaactgcttggaccagcatgttcggaagtcccccgagagcgttgctttgatctgggagcgcgatgagcctggaacggaagtgaggatcacctacagggaactactggagaccacgtgccgcctggccaacacgctgaagaggcatggagtccaccgtggggaccgtgttgccatctacatgcccgtgtccccattggctgtggcagcaatgctggcctgtgccaggatcggagctgtccacacagtcatctttgctggcttcagtgcagagtccttggctgggaggatcaatgatgccaagtgcaaggtggttatcaccttcaaccaaggactccggggtgggcgcgtggtggagctgaagaaaatagtggatgaggctgtgaagcactgccccaccgtgcagcatgtcctggtggctcacaggacagacaacaaggtccacatgggggatctggacgtcccgctggagcaggaaatggccaaggaggaccctgtttgcgccccagagagcatgggcagtgaggacatgctcttcatgctgtacacctcagggagcaccggaatgcccaagggcatcgtccatacccaggcaggctacctgctctatgccgccctgactcacaagcttgtgtttgaccaccagccaggtgacatctttggctgtgtggccgacatcggttggattacaggacacagctacgtggtgtatgggcctctctgcaatggtgccaccagcgtcctttttgagagcaccccagtttatcccaatgctggtcggtactgggagacagtagagaggttgaagatcaatcagttctatggcgccccaacggctgtccggctgttgctgaaatacggtgatgcctgggtgaagaagtatgatcgctcctccctgcggaccctggggtcagtgggagagcccatcaactgtgaggcctgggagtggcttcacagggtggtgggggacagcaggtgcacgctggtggacacctggtggcagacagaaacaggtggcatctgcatcgcaccacggccctcggaagaaggggcggaaatcctccctgccatggcgatgaggcccttctttggcatcgtccccgtcctcatggatgagaagggcagcgtcgtggagggcagcaacgtctccggggccctgtgcatctcccaggcctggccgggcatggccaggaccatctatggcgaccaccagcgatttgtggacgcctacttcaaggcctacccaggctattacttcactggagacggggcttaccgaactgagggcggctattaccagatcacagggcggatggatgatgtcatcaacatcagtggccaccggctggggaccgcagagattgaggacgccatcgccgaccaccctgcagtaccagaaagtgctgtcattggctacccccacgacatcaaaggagaagctgcctttgccttcattgtggtgaaagatagtgcgggtgactcagatgtggtggtgcaggagctcaagtccatggtggccaccaagatcgccaaatatgctgtgcctgatgagatcctggtggtgaaacgtcttccaaaaaccaggtctgggaaggtcatgcggcggctcctgaggaagatcatcactagtgaggcccaggagctgggagacactaccaccttggaggaccccagcatcatcgcagagatcctgagtgtctaccagaagtgcaaggacaagcaggctgctgctaagtgagctggcaccttgtggggctcttgggatgggcgggcacccaagccctggcttgtccttcccagaaggtacccctgaggttggcgtcttcctacgtcccagaagcagcccccaccccacacatgacccacagtctacccttcagggccttgtggcagtgccagtgttcggggggtgtctgggccactgagtacccactcggtcgtggttgtgctggcctcttgggtgagtgaacctgtgaagcccaggaggtggtgttggctgcagggtacacaaatactgagtggtggtcttttgttacaggcttagcaacaaagctgtgccctgggcatggggggctgtagtgtagctacagttgtgcgtttgtgaaatggcttagctttccatgttgctgagaggaacctggacatggtcccgggcatctgaatgatctgtaggggagggagttcaaataaagctttattttgttcattt

SEQ ID NO: 450527 - DNA, 2093 bp, Homo sapiens
  misc_feature (737)..(737): n is a, c, g, or t
gggcagtcgtaggagactctgaaaaagcaaataaatcaatgttaaatcagaaatgtgaatgtagtaaggggctgaagagacaggggaagagaatacatgggaaaatattgaaaaggacagagtgatcaaaaagagcagggacatgggagcattgggcagcacactgggagccatttcactttatgctcttattgtatgattgagaaaaaaatgtccttagtggttaagtggcttttcaatgccacatcagacttgttccatagcagttgaattaggggaaggtgaataagttggaggttggtgacaaggagagaagctggaacagagaggagagtcagaaccagagggaaatgagagactgagtaggcatctcagggtttttgaaggagtggattttctttgttgcagtcaggggaggtttgtctgttggctgcagaaagaagtcagaatagagatatcgtggggtaggtttgtttggaacagaaatcaaagaccaatttttctgagagaaggaaataacatctgcaaatgatatgctgtttttgctacttccattgttagctgttctcccaggtgatggcaatgcagacgggctcaaggagcctctctccttccatgtcacctggatcgcatccttttacaaccattcctggaaacaaaatctggtctcaggttggctgagtgatttgcagactcatacctgggacagcaattccagcaccatcgttttcctgtgnccctggtccaggggaaacttcagcaatgaggagtggaaggaactggaaacattattccgtatacgcaccattcggtcatttgagggaattcgtagatacgcccatgaattgcagtttgaatatccttttgagatacaggtgacaggaggctgtgagctgcactctggaaaggtctcaggaagcttcttgcagttagcttatcaaggatcagactttgtgagcttccagaacaattcatggttgccatatccagtggctgggaatatggccaagcatttctgcaaagtgctcaatcagaatcagcatgaaaatgacataacacacaatcttctcagtgacacctgcccacgtttcatcttgggtcttcttgatgcaggaaaggcacatctccagcggcaagtgaagcccgaggcctggctgtcccatggccccagtcctggccctggccatctgcagcttgtgtgccatgtctcaggattctacccaaagcccgtgtgggtgatgtggatgcggggtgagcaggagcagcagggcactcagcgaggggacatcttgcccagtgctgatgggacatggtatctccgcgcaaccctggaggtggccgctggggaggcagctgacctgtcctgtcgggtgaagcacagcagtctagagggccaggacatcgtcctctactgggagcatcacagttccgtgggcttcatcatcttggcggtgatagtgcctttacttcttctgataggtcttgcgctttggttcaggaaacgctgtttctgttaagacacaccatgagcctcctcgtcacccttctccttttggggtgagagaccagcagcccaagggctccagacacacctgaacacatcgtgatgatgacgtcctctcaactctctttgtaaaaattttgttatttttgcttgtttctgattaatgattgtttgtcaatataagctcaatttaattttgcaggatttgttgttctgacctgggttctgggacttttaaattcaaattttatctccagatggaatggggtcctagcaacctccacatgttcaactattaatggatcatcaggcctgttttagatatcccttactccagagggccttccctgacttacaagtgggaagcagtctcttcctggtctgaactcccgccacattttagccgtactttgctaactgtgctcctcacttcctcttcttcattgcagttatttagatcccccctttccttctaatttttcagctccttcaatgcaaagtacatgtatttttaatatatgcatccctggtgaaggatcttgcctgcatgaaacatgttctcaataaaactctgtgttgaatttatgcc

SEQ ID NO: 450528 - DNA, 1671 bp, Homo sapiens
  misc_feature (315)..(315): n is a, c, g, or t
caagatcttcattgctcatcagaggattccggcgagggtctcgctctgtgcagtggtgtgatcttggctcactttagcctcaacctcccgagtagctgggattacagatgtgacttgctcctccttgcattctgccatgattttgaggcctcctcagccatgtggaactggctcaaggagcctctctccttccatgtcacctggatcgcatccttttacaaccattcctggaaacaaaatctggtctcaggttggctgagtgatttgcagactcatacctgggacagcaattccagcaccatcgttttcctgtgnccctggtccaggggaaacttcagcaatgaggagtggaaggaactggaaacattattccgtatacgcaccattcggtcatttgagggaattcgtagatacgcccatgaattgcagtttgaatatccttttgagatacaggtgacaggaggctgtgagctgcactctggaaaggtctcaggaagcttcttgcagttagcttatcaaggatcagactttgtgagcttccagaacaattcatggttgccatatccagtggctgggaatatggccaagcatttctgcaaagtgctcaatcagaatcagcatgaaaatgacataacacacaatcttctcagtgacacctgcccacgtttcatcttgggtcttcttgatgcaggaaaggcacatctccagcggcaagtgaagcccgaggcctggctgtcccatggccccagtcctggccctggccatctgcagcttgtgtgccatgtctcaggattctacccaaagcccgtgtgggtgatgtggatgcggggtgagcaggagcagcagggcactcagcgaggggacatcttgcccagtgctgatgggacatggtatctccgcgcaaccctggaggtggccgctggggaggcagctgacctgtcctgtcgggtgaagcacagcagtctagagggccaggacatcgtcctctactgggagcatcacagttccgtgggcttcatcatcttggcggtgatagtgcctttacttcttctgataggtcttgcgctttggttcaggaaacgctgtttctgttaagacacaccatgagcctcctcgtcacccttctccttttggggtgagagaccagcagcccaagggctccagacacacctgaacacatcgtgatgatgacgtcctctcaactctctttgtaaaaattttgttatttttgcttgtttctgattaatgattgtttgtcaatataagctcaatttaattttgcaggatttgttgttctgacctgggttctgggacttttaaattcaaattttatctccagatggaatggggtcctagcaacctccacatgttcaactattaatggatcatcaggcctgttttagatatcccttactccagagggccttccctgacttacaagtgggaagcagtctcttcctggtctgaactcccgccacattttagccgtactttgctaactgtgctcctcacttcctcttcttcattgcagttatttagatcccccctttccttctaatttttcagctccttcaatgcaaagtacatgtatttttaatatatgcatccctggtgaaggatcttgcctgcatgaaacatgttctcaataaaactctgtgttgaatttatgcc

SEQ ID NO: 450529 - DNA, 2039 bp, Homo sapiens
  misc_feature (683)..(683): n is a, c, g, or t
gggcagtcgtaggagactctgaaaaagcaaataaatcaatgttaaatcagaaatgtgaatgtagtaaggggctgaagagacaggggaagagaatacatgggaaaatattgaaaaggacagagtgatcaaaaagagcagggacatgggagcattgggcagcacactgggagccatttcactttatgctcttattgtatgattgagaaaaaaatgtccttagtggttaagtggcttttcaatgccacatcagacttgttccatagcagttgaattaggggaaggtgaataagttggaggttggtgacaaggagagaagctggaacagagaggagagtcagaaccagagggaaatgagagactgagtaggcatctcagggtttttgaaggagtggattttctttgttgcagtcaggggaggtttgtctgttggctgcagaaagaagtcagaatagagatatcgtggggtaggtttgtttggaacagaaatcaaagaccaatttttctgagagaaggaaataacatctgcaaatgatatgctgtttttgctacttccattgttagctgttctcccaggtgatggcaatgcagacgggctcaaggagcctctctccttccatgtcacctggatcgcatccttttacaaccattcctggaaacattccagcaccatcgttttcctgtgnccctggtccaggggaaacttcagcaatgaggagtggaaggaactggaaacattattccgtatacgcaccattcggtcatttgagggaattcgtagatacgcccatgaattgcagtttgaatatccttttgagatacaggtgacaggaggctgtgagctgcactctggaaaggtctcaggaagcttcttgcagttagcttatcaaggatcagactttgtgagcttccagaacaattcatggttgccatatccagtggctgggaatatggccaagcatttctgcaaagtgctcaatcagaatcagcatgaaaatgacataacacacaatcttctcagtgacacctgcccacgtttcatcttgggtcttcttgatgcaggaaaggcacatctccagcggcaagtgaagcccgaggcctggctgtcccatggccccagtcctggccctggccatctgcagcttgtgtgccatgtctcaggattctacccaaagcccgtgtgggtgatgtggatgcggggtgagcaggagcagcagggcactcagcgaggggacatcttgcccagtgctgatgggacatggtatctccgcgcaaccctggaggtggccgctggggaggcagctgacctgtcctgtcgggtgaagcacagcagtctagagggccaggacatcgtcctctactgggagcatcacagttccgtgggcttcatcatcttggcggtgatagtgcctttacttcttctgataggtcttgcgctttggttcaggaaacgctgtttctgttaagacacaccatgagcctcctcgtcacccttctccttttggggtgagagaccagcagcccaagggctccagacacacctgaacacatcgtgatgatgacgtcctctcaactctctttgtaaaaattttgttatttttgcttgtttctgattaatgattgtttgtcaatataagctcaatttaattttgcaggatttgttgttctgacctgggttctgggacttttaaattcaaattttatctccagatggaatggggtcctagcaacctccacatgttcaactattaatggatcatcaggcctgttttagatatcccttactccagagggccttccctgacttacaagtgggaagcagtctcttcctggtctgaactcccgccacattttagccgtactttgctaactgtgctcctcacttcctcttcttcattgcagttatttagatcccccctttccttctaatttttcagctccttcaatgcaaagtacatgtatttttaatatatgcatccctggtgaaggatcttgcctgcatgaaacatgttctcaataaaactctgtgttgaatttatgcc

SEQ ID NO: 450530 - DNA, 1418 bp, Homo sapiens
  misc_feature (683)..(683): n is a, c, g, or t
gggcagtcgtaggagactctgaaaaagcaaataaatcaatgttaaatcagaaatgtgaatgtagtaaggggctgaagagacaggggaagagaatacatgggaaaatattgaaaaggacagagtgatcaaaaagagcagggacatgggagcattgggcagcacactgggagccatttcactttatgctcttattgtatgattgagaaaaaaatgtccttagtggttaagtggcttttcaatgccacatcagacttgttccatagcagttgaattaggggaaggtgaataagttggaggttggtgacaaggagagaagctggaacagagaggagagtcagaaccagagggaaatgagagactgagtaggcatctcagggtttttgaaggagtggattttctttgttgcagtcaggggaggtttgtctgttggctgcagaaagaagtcagaatagagatatcgtggggtaggtttgtttggaacagaaatcaaagaccaatttttctgagagaaggaaataacatctgcaaatgatatgctgtttttgctacttccattgttagctgttctcccaggtgatggcaatgcagacgggctcaaggagcctctctccttccatgtcacctggatcgcatccttttacaaccattcctggaaacattccagcaccatcgttttcctgtgnccctggtccaggggaaacttcagcaatgaggagtggaaggaactggaaacattattccgtatacgcaccattcggtcatttgagggaattcgtagatacgcccatgaattgcagtttgaatatccttttgagatacaggtgacaggaggctgtgagctgcactctggaaaggtctcaggaagcttcttgcagttagcttatcaaggatcagactttgtgagcttccagaacaattcatggttgccatatccagtggctgggaatatggccaagcatttctgcaaagtgctcaatcagaatcagcatgaaaatgacataacacacaatcttctcagtgacacctgcccacgtttcatcttgggtcttcttgatgcaggaaaggcacatctccagcggcaagtgaagcccgaggcctggctgtcccatggccccagtcctggccctggccatctgcagcttgtgtgccatgtctcaggattctacccaaagcccgtgtgggtgatgtggatgcggggtgagcaggagcagcagggcactcagcgaggggacatcttgcccagtgctgatgggacatggtatctccgcgcaaccctggaggtggccgctggggaggcagctgacctgtcctgtcgggtgaagcacagcagtctagagggccaggacatcgtcctctactggggtgagaaaaagctaaggcccaggctggaaatgccaggaagtggacctcaggcatag

SEQ ID NO: 450531 - DNA, 1557 bp, Homo sapiens
  misc_feature (201)..(201): n is a, c, g, or t
cttcaatggggaaggaagaatttaggagccatgtttgcgtttggaggagcaacagggctcaaggagcctctctccttccatgtcacctggatcgcatccttttacaaccattcctggaaacaaaatctggtctcaggttggctgagtgatttgcagactcatacctgggacagcaattccagcaccatcgttttcctgtgnccctggtccaggggaaacttcagcaatgaggagtggaaggaactggaaacattattccgtatacgcaccattcggtcatttgagggaattcgtagatacgcccatgaattgcagtttgaatatccttttgagatacaggtgacaggaggctgtgagctgcactctggaaaggtctcaggaagcttcttgcagttagcttatcaaggatcagactttgtgagcttccagaacaattcatggttgccatatccagtggctgggaatatggccaagcatttctgcaaagtgctcaatcagaatcagcatgaaaatgacataacacacaatcttctcagtgacacctgcccacgtttcatcttgggtcttcttgatgcaggaaaggcacatctccagcggcaagtgaagcccgaggcctggctgtcccatggccccagtcctggccctggccatctgcagcttgtgtgccatgtctcaggattctacccaaagcccgtgtgggtgatgtggatgcggggtgagcaggagcagcagggcactcagcgaggggacatcttgcccagtgctgatgggacatggtatctccgcgcaaccctggaggtggccgctggggaggcagctgacctgtcctgtcgggtgaagcacagcagtctagagggccaggacatcgtcctctactgggagcatcacagttccgtgggcttcatcatcttggcggtgatagtgcctttacttcttctgataggtcttgcgctttggttcaggaaacgctgtttctgttaagacacaccatgagcctcctcgtcacccttctccttttggggtgagagaccagcagcccaagggctccagacacacctgaacacatcgtgatgatgacgtcctctcaactctctttgtaaaaattttgttatttttgcttgtttctgattaatgattgtttgtcaatataagctcaatttaattttgcaggatttgttgttctgacctgggttctgggacttttaaattcaaattttatctccagatggaatggggtcctagcaacctccacatgttcaactattaatggatcatcaggcctgttttagatatcccttactccagagggccttccctgacttacaagtgggaagcagtctcttcctggtctgaactcccgccacattttagccgtactttgctaactgtgctcctcacttcctcttcttcattgcagttatttagatcccccctttccttctaatttttcagctccttcaatgcaaagtacatgtatttttaatatatgcatccctggtgaaggatcttgcctgcatgaaacatgttctcaataaaactctgtgttgaatttatgcc

SEQ ID NO: 450532 - DNA, 1503 bp, Homo sapiens
  misc_feature (201)..(201): n is a, c, g, or t
cttcaatggggaaggaagaatttaggagccatgtttgcgtttggaggagcaacagggctcaaggagcctctctccttccatgtcacctggatcgcatccttttacaaccattcctggaaacaaaatctggtctcaggttggctgagtgatttgcagactcatacctgggacagcaattccagcaccatcgttttcctgtgnccctggtccaggggaaacttcagcaatgaggagtggaaggaactggaaacattattccgtatacgcaccattcggtcatttgagggaattcgtagatacgcccatgaattgcagtttgaatatccttttgagatacaggtgacaggaggctgtgagctgcactctggaaaggtctcaggaagcttcttgcagttagcttatcaaggatcagactttgtgagcttccagaacaattcatggttgccatatccagtggctgggaatatggccaagcatttctgcaaagtgctcaatcagaatcagcatgaaaatgacataacacacaatcttctcagtgacacctgcccacgtttcatcttgggtcttcttgatgcaggaaaggcacatctccagcggcaagtgaagcccgaggcctggctgtcccatggccccagtcctggccctggccatctgcagcttgtgtgccatgtctcaggattctacccaaagcccgtgtgggtgatgtggatgcggggtgagcaggagcagcagggcactcagcgaggggacatcttgcccagtgctgatgggacatggtatctccgcgcaaccctggaggtggccgctggggaggcagctgacctgtcctgtcgggtgaagcacagcagtctagagggccaggacatcgtcctctactgggagcatcacagttccgtgggcttcatcatcttggcggtgatagtgcctttacttcttctgataggtcttgcgctttggttcaggaaacgctgtttctgttaagacacaccatgagcctcctcgtcacccttctccttttggggtgagagaccagcagcccaagggctccagacacacctgaacacatcgtgatgatgacgtcctctcaactctctttgtatcaatttaattttgcaggatttgttgttctgacctgggttctgggacttttaaattcaaattttatctccagatggaatggggtcctagcaacctccacatgttcaactattaatggatcatcaggcctgttttagatatcccttactccagagggccttccctgacttacaagtgggaagcagtctcttcctggtctgaactcccgccacattttagccgtactttgctaactgtgctcctcacttcctcttcttcattgcagttatttagatcccccctttccttctaatttttcagctccttcaatgcaaagtacatgtatttttaatatatgcatccctggtgaaggatcttgcctgcatgaaacatgttctcaataaaactctgtgttgaatttatgcc

SEQ ID NO: 450533 - DNA, 1313 bp, Homo sapiens
aattggaggagttgttgttaggccgtcccggagacccggtcgggagggaggaaggtggcaagatggtgttggaaagcactatggtgtgtgtggacaacagtgagtatatgcggaatggagacttcttacccaccaggctgcaggcccagcaggatgctgtcaacatagtttgtcattcaaagacccgcagcaaccctgagaacaacgtgggccttatcacactggctaatgactgtgaagtgctgaccacactcaccccagacactggccgtatcctgtccaagctacatactgtccaacccaagggcaagatcaccttctgcacgggcatccgcgtggcccatctggctctgaagcaccgacaaggcaagaatcacaagatgcgcatcattgcctttgtgggaagcccagtggaggacaatgagaaggatctggtgaaactggctaaacgcctcaagaaggagaaagtaaatgttgacattatcaattttggggaagaggaggtgaacacagaaaagctgacagcctttgtaaacacgttgaatggcaaagatggaaccggttctcatctggtgacagtgcctcctgggcccagtttggctgatgctctcatcagttctccgattttggctggtgaaggtggtgccatgctgggtcttggtgccagtgactttgaatttggagtagatcccagtgctgatcctgagctggccttggcccttcgtgtatctatggaagagcagcggcagcggcaggaggaggaggcccggcgggcagctgcagcttctgctgctgaggccgggattgctacgactgggactgaagactcagacgatgccctgctgaagatgaccatcagccagcaagagtttggccgcactgggcttcctgacctaagcagtatgactgaggaagagcagattgcttatgccatgcagatgtccctgcagggagcagagtttggccaggcggaatcagcagacattgatgccagctcagctatggacacatccgagccagccaaggaggaggatgattacgacgtgatgcaggaccccgagttccttcagagtgtcctagagaacctcccaggtgtggatcccaacaatgaagccattcgaaatgctatgggctccctggcctcccaggccaccaaggacggcaagaaggacaagaaggaggaagacaagaagtgagactggagggaaagggtagctgagtctgcttaggggactgcatgggaagcacggaatatagggttagatgtgtgttatctgtaaccattacagcctaaataaagcttggcaactttt

SEQ ID NO: 450534 - DNA, 348 bp, Homo sapiens
ggtaggaaaggaagaaattagaacaatgggagccttggctcccctctcgtctcctcccctccttcttgtcactggctttgatgaggcccacttcccagaggctcctgggcctgtgagtgcaggagctcattctcccctcacaatgaagccattcgaaatgctatgggctccctggcctcccaggccaccaaggacggcaagaaggacaagaaggaggaagacaagaagtgagactggagggaaagggtagctgagtctgcttaggggactgcatgggaagcacggaatatagggttagatgtgtgttatctgtaaccattacagcctaaataaagcttggcaactttt

SEQ ID NO: 450535 - DNA, 510 bp, Homo sapiens
gaacccgggaggcggagcttgcagtgacccgagatcacgccacgcactccagcctgggtgacagagtgagactccgtctaaaaaataaataaataaaagttagacacagtttagaggtacttgtgctgacctgaattcactgaaatgcttttcctacatcactttggggaaaggtgaatgtggagaattcagtgattctgttggaggaccttggggaggtcaatagatttctgtatgcttttatgcggcgggtcctttcccccctcgagtatggaacagatttcttgatttttctccccttcttcccagctggtgaaactggctaaacgcctcaagaaggagaaagtaaatgttgacattatcaattttggggaagaggtgagtagggactgattggagggcattgacttaatttggtcataaacagaatggtccttaaccctgaggagtgcgggtactgtgcagagtagtagtagcgcagcgggatcctctagactgacctcagcatca

SEQ ID NO: 450536 - DNA, 550 bp, Homo sapiens
atatcagtatatagagatcctgcggttcttctgatatggaagagcaggagggaggaggaggaggccggggaagtgagttctggtgtgaggcgggattgctacgagtgggactgaagactcagacgatgccctgctgaagatgaccatcagccagcaagagtttggccgcactgggcttcctgacctaagcagtatgactgaggaagagcagattgcttatgccatgcagatgtccctgcagggagcagagtttggccaggcggaatcagcagacattgatgccagctcagctatggacacatccgagccagccaagggtgagacccaaccctgcccccatcaggtttaaagtccttgaatttagatcctcatccctctggggctgggagtatttctaccatagctaagtcctttgaggagcagagggaaacacatggatttgcatttcttacatgtaaaccttgctaaggtagcaatgctaatggtcagagttggagaaatgtcctcttgttctgtaattttcctttcttgctggtgggagcagcctggg

SEQ ID NO: 450537 - DNA, 1393 bp, Homo sapiens
aattcccaaatgaccttttatttcatacagagatacaaaggcaactatgtgcagcaacaatctgatgggcagtccaaactcttgggaggaagtaaattcatggtaaatgtcatgatgggtcgggagggaggaaggtggcaagatggtgttggaaagcactatggtgtgtgtggacaacagtgagtatatgcggaatggagacttcttacccaccaggctgcaggcccagcaggatgctgtcaacatagtttgtcattcaaagacccgcagcaaccctgagaacaacgtgggccttatcacactggctaatgactgtgaagtgctgaccacactcaccccagacactggccgtatcctgtccaagctacatactgtccaacccaagggcaagatcaccttctgcacgggcatccgcgtggcccatctggctctgaagcaccgacaaggcaagaatcacaagatgcgcatcattgcctttgtgggaagcccagtggaggacaatgagaaggatctggtgaaactggctaaacgcctcaagaaggagaaagtaaatgttgacattatcaattttggggaagaggaggtgaacacagaaaagctgacagcctttgtaaacacgttgaatggcaaagatggaaccggttctcatctggtgacagtgcctcctgggcccagtttggctgatgctctcatcagttctccgattttggctggtgaaggtggtgccatgctgggtcttggtgccagtgactttgaatttggagtagatcccagtgctgatcctgagctggccttggcccttcgtgtatctatggaagagcagcggcagcggcaggaggaggaggcccggcgggcagctgcagcttctgctgctgaggccgggattgctacgactgggactgaagactcagacgatgccctgctgaagatgaccatcagccagcaagagtttggccgcactgggcttcctgacctaagcagtatgactgaggaagagcagattgcttatgccatgcagatgtccctgcagggagcagagtttggccaggcggaatcagcagacattgatgccagctcagctatggacacatccgagccagccaaggaggaggatgattacgacgtgatgcaggaccccgagttccttcagagtgtcctagagaacctcccaggtgtggatcccaacaatgaagccattcgaaatgctatgggctccctggcctcccaggccaccaaggacggcaagaaggacaagaaggaggaagacaagaagtgagactggagggaaagggtagctgagtctgcttaggggactgcatgggaagcacggaatatagggttagatgtgtgttatctgtaaccattacagcctaaataaagcttggcaactttt

SEQ ID NO: 450538 - DNA, 1393 bp, Homo sapiens
aattggaggagttgttgttaggccgtcccggagacccggtcgggagggaggaaggtggcaagatggtgttggaaagcactatggtgtgtgtggacaacagtgagtatatgcggaatggagacttcttacccaccaggctgcaggcccagcaggatgctgtcaacatagtttgtcattcaaagacccgcagcaaccctgagaacaacgtgggccttatcacactggctaatgactgtgaagtgctgaccacactcaccccagacactggccgtatcctgtccaagctacatactgtccaacccaagggcaagatcaccttctgcacgggcatccgcgtggcccatctggctctgaagcaccgacaaggcaagaatcacaagatgcgcatcattgcctttgtgggaagcccagtggaggacaatgagaaggatctggtgaaactggctaaacgcctcaagaaggagaaagtaaatgttgacattatcaattttggggaagaggaggtgaacacagaaaagctgacagcctttgtaaacacgttgaatggcaaagatggaaccggttctcatctggtgacagtgcctcctgggcccagtttggctgatgctctcatcagttctccgattttggctggtgaaggtggtgccatgctgggtcttggtgccagtgactttgaatttggagtagatcccagtgctgatcctgagctggccttggcccttcgtgtatctatggaagagcagcggcagcggcaggaggaggaggcccggcgggcagctgcagcttctgctgctgaggccgggattgctacgactgggactgaagactcagacgatgccctgctgaagatgaccatcagccagcaagagtttggccgcactgggcttcctgacctaagcagtatgactgaggaagagcagattgcttatgccatgcagatgtccctgcagggagcagagtttggccaggcggaatcagcagacattgatgccagctcagctatggacacatccgagccagccaaggaggaggatgattacgacgtgatgcaggaccccgagttccttcagagtgtcctagagaacctcccaggtgtggatcccaacaatgaagccattcgaaatgctatgggctccctggcctcccaggccaccaaggacggcaagaaggacaagaaggaggaagacaagaagtgagactggagggaaagggtagctgagtctgcttaggggactgcatgggaagcacggaatatagggttagatgtgtgttatctgtaaccattacagcctaaataaagcttggcaacttttcttgccatatgcaatgcatatggcaaggccaaggtcagatagatgaccacgtgacgaaatagtaaaagctacctatagat

SEQ ID NO: 450539 - DNA, 1259 bp, Homo sapiens
aattggaggagttgttgttaggccgtcccggagacccggtcgggagggaggaaggtggcaagatggtgttggaaagcactatggtgtgtgtggacaacagtgagtatatgcggaatggagacttcttacccaccaggctgcaggcccagcaggatgctgtcaacatagtttgtcattcaaagacccgcagcaaccctgagaacaacgtgggccttatcacactggctaatgactgtgaagtgctgaccacactcaccccagacactggccgtatcctgtccaagctacatactgtccaacccaagggcaagatcaccttctgcacgggcatccgcgtggcccatctggctctgaagcaccgacaaggcaagaatcacaagatgcgcatcattgcctttgtgggaagcccagtggaggacaatgagaaggatctggtgaaactggctaaacgcctcaagaaggagaaagtaaatgttgacattatcaattttggggaagaggaggtgaacacagaaaagctgacagcctttgtaaacacgttgaatggcaaagatggaaccggttctcatctggtgacagtgcctcctgggcccagtttggctgatgctctcatcagttctccgattttggctggtgaaggtggtgccatgctgggtcttggtgccagtgactttgaatttggagtagatcccagtgctgatcctgagctggccttggcccttcgtgtatctatggaagagcagcggcagcggcaggaggaggaggcccggcgggcagctgcagcttctgctgctgaggccgggattgctacgactgggactgaagactcagacgatgccctgctgaagatgaccatcagccagcaagagtttggccgcactgggcttcctgacctaagcagtatgactgaggaagagcagattgcttatgccatgcagatgtccctgcagggagcagagtttggccaggcggaatcagcagacattgatgccagctcagctatggacacatccgagccagccaagggtgagacccaaccctgcccccatcaggtttaaagtccttgaatttagatcctcatccctctggggctgggagtatttctaccatagctaagtcctttgaggagcagagggaaacacatggatttgcatttcttacatgtaaaccttgctaaggtagcaatgctaatggtcagagttggagaaatgtcctcttgttctgtaattttcctttcttgctggtgggagcagcctggg

SEQ ID NO: 450540 - DNA, 1293 bp, Homo sapiens
  misc_feature (22)..(23): n is a, c, g, or t
  misc_feature (25)..(27): n is a, c, g, or t
caatcggctggatgcatgcccnngnnnaatcggcgagggcagatggtgttggaaagcactatggtgtgtgtggacaacagtgagtatatgcggaatggagacttcttacccaccaggctgcaggcccagcaggatgctgtcaacatagtttgtcattcaaagacccgcagcaaccctgagaacaacgtgggccttatcacactggctaatgactgtgaagtgctgaccacactcaccccagacactggccgtatcctgtccaagctacatactgtccaacccaagggcaagatcaccttctgcacgggcatccgcgtggcccatctggctctgaagcaccgacaaggcaagaatcacaagatgcgcatcattgcctttgtgggaagcccagtggaggacaatgagaaggatctggtgaaactggctaaacgcctcaagaaggagaaagtaaatgttgacattatcaattttggggaagaggaggtgaacacagaaaagctgacagcctttgtaaacacgttgaatggcaaagatggaaccggttctcatctggtgacagtgcctcctgggcccagtttggctgatgctctcatcagttctccgattttggctggtgaaggtggtgccatgctgggtcttggtgccagtgactttgaatttggagtagatcccagtgctgatcctgagctggccttggcccttcgtgtatctatggaagagcagcggcagcggcaggaggaggaggcccggcgggcagctgcagcttctgctgctgaggccgggattgctacgactgggactgaagactcagacgatgccctgctgaagatgaccatcagccagcaagagtttggccgcactgggcttcctgacctaagcagtatgactgaggaagagcagattgcttatgccatgcagatgtccctgcagggagcagagtttggccaggcggaatcagcagacattgatgccagctcagctatggacacatccgagccagccaaggaggaggatgattacgacgtgatgcaggaccccgagttccttcagagtgtcctagagaacctcccaggtgtggatcccaacaatgaagccattcgaaatgctatgggctccctggcctcccaggccaccaaggacggcaagaaggacaagaaggaggaagacaagaagtgagactggagggaaagggtagctgagtctgcttaggggactgcatgggaagcacggaatatagggttagatgtgtgttatctgtaaccattacagcctaaataaagcttggcaactttt

SEQ ID NO: 450541 - DNA, 1509 bp, Homo sapiens
  misc_feature (1005)..(1005): n is a, c, g, or t
aattggaggagttgttgttaggccgtcccggagacccggtcgggagggaggaaggtggcaagatggtgttggaaagcactatggtgtgtgtggacaacagtgagtatatgcggaatggagacttcttacccaccaggctgcaggcccagcaggatgctgtcaacatagtttgtcattcaaagacccgcagcaaccctgagaacaacgtgggccttatcacactggctaatgactgtgaagtgctgaccacactcaccccagacactggccgtatcctgtccaagctacatactgtccaacccaagggcaagatcaccttctgcacgggcatccgcgtggcccatctggctctgaagcaccgacaaggcaagaatcacaagatgcgcatcattgcctttgtgggaagcccagtggaggacaatgagaaggatctggtgaaactggctaaacgcctcaagaaggagaaagtaaatgttgacattatcaattttggggaagaggaggtgaacacagaaaagctgacagcctttgtaaacacgttgaatggcaaagatggaaccggttctcatctggtgacagtgcctcctgggcccagtttggctgatgctctcatcagttctccgattttggctggtgaaggtggtgccatgctgggtcttggtgccagtgactttgaatttggagtagatcccagtgctgatcctgagctggccttggcccttcgtgtatctatggaagagcagcggcagcggcaggaggaggaggcccggcgggcagctgcagcttctgctgctgaggccgggattgctacgactgggactgaagggtgaaagaggtggaatccgaagtcctgggactgcgggatgctaaacattgaaagctgggtgtaggcactgcagggagagtgtggaggtctgacagggtaggaatatgtgggagggctgggctaggaatggccttggaggctggcctgtgtggatatggcaccaattctaccctgctccncttttccttttcccagactcagacgatgccctgctgaagatgaccatcagccagcaagagtttggccgcactgggcttcctgacctaagcagtatgactgaggaagagcagattgcttatgccatgcagatgtccctgcagggagcagagtttggccaggcggaatcagcagacattgatgccagctcagctatggacacatccgagccagccaaggaggaggatgattacgacgtgatgcaggaccccgagttccttcagagtgtcctagagaacctcccaggtgtggatcccaacaatgaagccattcgaaatgctatgggctccctggcctcccaggccaccaaggacggcaagaaggacaagaaggaggaagacaagaagtgagactggagggaaagggtagctgagtctgcttaggggactgcatgggaagcacggaatatagggttagatgtgtgttatctgtaaccattacagcctaaataaagcttggcaactttt

SEQ ID NO: 450542 - DNA, 1252 bp, Homo sapiens
aattcccaaatgaccttttatttcatacagagatacaaaggcaactatgtgcagcaacaatctgatgggcagtccaaactcttgggaggaagtaaattcatggtaaatgtcatgatgggtcgggagggaggaaggtggcaagatggtgttggaaagcactatggtgtgtgactgtgaagtgctgaccacactcaccccagacactggccgtatcctgtccaagctacatactgtccaacccaagggcaagatcaccttctgcacgggcatccgcgtggcccatctggctctgaagcaccgacaaggcaagaatcacaagatgcgcatcattgcctttgtgggaagcccagtggaggacaatgagaaggatctggtgaaactggctaaacgcctcaagaaggagaaagtaaatgttgacattatcaattttggggaagaggaggtgaacacagaaaagctgacagcctttgtaaacacgttgaatggcaaagatggaaccggttctcatctggtgacagtgcctcctgggcccagtttggctgatgctctcatcagttctccgattttggctggtgaaggtggtgccatgctgggtcttggtgccagtgactttgaatttggagtagatcccagtgctgatcctgagctggccttggcccttcgtgtatctatggaagagcagcggcagcggcaggaggaggaggcccggcgggcagctgcagcttctgctgctgaggccgggattgctacgactgggactgaagactcagacgatgccctgctgaagatgaccatcagccagcaagagtttggccgcactgggcttcctgacctaagcagtatgactgaggaagagcagattgcttatgccatgcagatgtccctgcagggagcagagtttggccaggcggaatcagcagacattgatgccagctcagctatggacacatccgagccagccaaggaggaggatgattacgacgtgatgcaggaccccgagttccttcagagtgtcctagagaacctcccaggtgtggatcccaacaatgaagccattcgaaatgctatgggctccctggcctcccaggccaccaaggacggcaagaaggacaagaaggaggaagacaagaagtgagactggagggaaagggtagctgagtctgcttaggggactgcatgggaagcacggaatatagggttagatgtgtgttatctgtaaccattacagcctaaataaagcttggcaactttt

SEQ ID NO: 450543 - DNA, 1833 bp, Homo sapiens
aattcccaaatgaccttttatttcatacagagatacaaaggcaactatgtgcagcaacaatctgatgggcagtccaaactcttgggaggaagtaaattcatggtaaatgtcatgatgggtcgggagggaggaaggtggcaagatggtgttggaaagcactatggtgtgtgtggacaacagtgagtatatgcggaatggagacttcttacccaccaggctgcaggcccagcaggatgctgtcaacatagtttgtcattcaaagacccgcagcaaccctgagaacaacgtgggccttatcacactggctaagtatgggggacagaggaggaggggactcagtaggtgggtggttgttacatgctactcttctttagattccatgaagctgcttttgcccatcaccttcctagactgccttctgcactatttagtgtaaatgtcaatagcaacttgttttttgtattaacctgtatttaatgtagtacggaagctaaatctcctggggtgaaatttctgtttctttttattgtttgttgggcagggctagggtagggggtgaaatttcataatatattttaaagtcagtgaaaagtgattttgggctgggcacatgacccgagatcacgccacgcactccagcctgggtgacagagtgagactccgtctaaaaaataaataaataaaagttagacacagtttagaggtacttgtgctgacctgaattcactgaaatgcttttcctacatcactgactgtgaagtgctgaccacactcaccccagacactggccgtatcctgtccaagctacatactgtccaacccaagggcaagatcaccttctgcacgggcatccgcgtggcccatctggctctgaagcaccgacaaggcaagaatcacaagatgcgcatcattgcctttgtgggaagcccagtggaggacaatgagaaggatctggtgaaactggctaaacgcctcaagaaggagaaagtaaatgttgacattatcaattttggggaagaggaggtgaacacagaaaagctgacagcctttgtaaacacgttgaatggcaaagatggaaccggttctcatctggtgacagtgcctcctgggcccagtttggctgatgctctcatcagttctccgattttggctggtgaaggtggtgccatgctgggtcttggtgccagtgactttgaatttggagtagatcccagtgctgatcctgagctggccttggcccttcgtgtatctatggaagagcagcggcagcggcaggaggaggaggcccggcgggcagctgcagcttctgctgctgaggccgggattgctacgactgggactgaagactcagacgatgccctgctgaagatgaccatcagccagcaagagtttggccgcactgggcttcctgacctaagcagtatgactgaggaagagcagattgcttatgccatgcagatgtccctgcagggagcagagtttggccaggcggaatcagcagacattgatgccagctcagctatggacacatccgagccagccaaggaggaggatgattacgacgtgatgcaggaccccgagttccttcagagtgtcctagagaacctcccaggtgtggatcccaacaatgaagccattcgaaatgctatgggctccctggcctcccaggccaccaaggacggcaagaaggacaagaaggaggaagacaagaagtgagactggagggaaagggtagctgagtctgcttaggggactgcatgggaagcacggaatatagggttagatgtgtgttatctgtaaccattacagcctaaataaagcttggcaactttt

SEQ ID NO: 450544 - DNA, 1133 bp, Homo sapiens
aattggaggagttgttgttaggccgtcccggagacccggtcgggagggaggaaggtggcaagatggtgttggaaagcactatggtgtgtgtggacaacagtgagtatatgcggaatggagacttcttacccaccaggctgcaggcccagcaggatgctgtcaacatagtttgtcattcaaagacccgcagcaaccctgagaacaacgtgggccttatcacactggctaatgactgtgaagtgctgaccacactcaccccagacactggccgtatcctgtccaagctacatactgtccaacccaagggcaagatcaccttctgcacgggcatccgcgtggcccatctggctctgaagcaccgacaaggcaagaatcacaagatgcgcatcattgcctttgtgggaagcccagtggaggacaatgagaaggatctggtgaaactggctaaacgcctcaagaaggagaaagtaaatgttgacattatcaattttggggaagaggaggtgaacacagaaaagctgacagcctttgtaaacacgttgaatggcaaagatggaaccggttctcatctggtgacagtgcctcctgggcccagtttggctgatgctctcatcagttctccgattttggctggtgaaggtggtgccatgctgggtcttggtgccagtgactttgaatttggagtagatcccagtgctgatcctgagctggccttggcccttcgtgtatctatggaagagcagcggcagcggcaggaggaggaggcccggcgggcagctgcagcttctgctgctgaggccgggattgctacgactgggactgaagcacatcagagcctgctgcaggaggaggatgattacgacgtgatgcaggaccccgagttccttcagagtgtcctagagaacctcccaggtgtggatcccaacaatgaagccattcgaaatgctatgggctccctggcctcccaggccaccaaggacggcaagaaggacaagaaggaggaagacaagaagtgagactggagggaaagggtagctgagtctgcttaggggactgcatgggaagcacggaatatagggttagatgtgtgttatctgtaaccattacagcctaaataaagcttggcaactttt

SEQ ID NO: 450545 - DNA, 1639 bp, Homo sapiens
aattcccaaatgaccttttatttcatacagagatacaaaggcaactatgtgcagcaacaatctgatgggcagtccaaactcttgggaggaagtaaattcatggtaaatgtcatgatgggtcgggagggaggaaggtggcaagatggtgttggaaagcactatggtgtgtgtggacaacagtgagtatatgcggaatggagacttcttacccaccaggctgcaggcccagcaggatgctgtcaacatagtttgtcattcaaagacccgcagcaaccctgagaacaacgtgggccttatcacactggctaatgactgtgaagtgctgaccacactcaccccagacactggccgtatcctgtccaagctacatactgtccaacccaagggcaagatcaccttctgcacgggcatccgcgtggcccatctggctctgaagcaccgacaaggcaagaatcacaagatgcgcatcattgcctttgtgggaagcccagtggaggacaatgagaaggatgtgagtccaagtggcagctggggaatgtggggagcccatgtttgggactgaggtcttccagccctcaggagaacctggcagaggcatcaggctcatcactttggggaaaggtgaatgtggagaattcagtgattctgttggaggaccttggggaggtcaatagatttctgtatgcttttatgcggcgggtcctttcccccctcgagtatggaacagatttcttgatttttctccccttcttcccagctggtgaaactggctaaacgcctcaagaaggagaaagtaaatgttgacattatcaattttggggaagaggaggtgaacacagaaaagctgacagcctttgtaaacacgttgaatggcaaagatggaaccggttctcatctggtgacagtgcctcctgggcccagtttggctgatgctctcatcagttctccgattttggctggtgaaggtggtgccatgctgggtcttggtgccagtgactttgaatttggagtagatcccagtgctgatcctgagctggccttggcccttcgtgtatctatggaagagcagcggcagcggcaggaggaggaggcccggcgggcagctgcagcttctgctgctgaggccgggattgctacgactgggactgaagactcagacgatgccctgctgaagatgaccatcagccagcaagagtttggccgcactgggcttcctgacctaagcagtatgactgaggaagagcagattgcttatgccatgcagatgtccctgcagggagcagagtttggccaggcggaatcagcagacattgatgccagctcagctatggacacatccgagccagccaaggaggaggatgattacgacgtgatgcaggaccccgagttccttcagagtgtcctagagaacctcccaggtgtggatcccaacaatgaagccattcgaaatgctatgggctccctggcctcccaggccaccaaggacggcaagaaggacaagaaggaggaagacaagaagtgagactggagggaaagggtagctgagtctgcttaggggactgcatgggaagcacggaatatagggttagatgtgtgttatctgtaaccattacagcctaaataaagcttggcaactttt

SEQ ID NO: 450546 - DNA, 1134 bp, Homo sapiens
ggttggctccgatggctgattgcgaagagccctatgtgctgctgtcactggtaacgtgctgaccacactcaccccagacactggccgtcttcttatcacagctcttctgtctcacacccatggtcaatcatatccttcttgtatggtctctcccgagtggcccatctggctctgaagcaccgacaaggcaagaatcacaagatgcgcatcattgcctttgtgggaagcccagtggaggacaatgagaaggatctggtgaaactggctaaacgcctcaagaaggagaaagtaaatgttgacattatcaattttggggaagaggaggtgaacacagaaaagctgacagcctttgtaaacacgttgaatggcaaagatggaaccggttctcatctggtgacagtgcctcctgggcccagtttggctgatgctctcatcagttctccgattttggctggtgaaggtggtgccatgctgggtcttggtgccagtgactttgaatttggagtagatcccagtgctgatcctgagctggccttggcccttcgtgtatctatggaagagcagcggcagcggcaggaggaggaggcccggcgggcagctgcagcttctgctgctgaggccgggattgctacgactgggactgaagactcagacgatgccctgctgaagatgaccatcagccagcaagagtttggccgcactgggcttcctgacctaagcagtatgactgaggaagagcagattgcttatgccatgcagatgtccctgcagggagcagagtttggccaggcggaatcagcagacattgatgccagctcagctatggacacatccgagccagccaaggaggaggatgattacgacgtgatgcaggaccccgagttccttcagagtgtcctagagaacctcccaggtgtggatcccaacaatgaagccattcgaaatgctatgggctccctggcctcccaggccaccaaggacggcaagaaggacaagaaggaggaagacaagaagtgagactggagggaaagggtagctgagtctgcttaggggactgcatgggaagcacggaatatagggttagatgtgtgttatctgtaaccattacagcctaaataaagcttggcaactttt

SEQ ID NO: 450547 - DNA, 1019 bp, Homo sapiens
  misc_feature (827)..(827): n is a, c, g, or t
  misc_feature (830)..(830): n is a, c, g, or t
  misc_feature (840)..(840): n is a, c, g, or t
  misc_feature (842)..(842): n is a, c, g, or t
  misc_feature (849)..(849): n is a, c, g, or t
  misc_feature (852)..(852): n is a, c, g, or t
  misc_feature (854)..(854): n is a, c, g, or t
  misc_feature (857)..(858): n is a, c, g, or t
  misc_feature (862)..(862): n is a, c, g, or t
  misc_feature (869)..(869): n is a, c, g, or t
  misc_feature (885)..(886): n is a, c, g, or t
  misc_feature (890)..(890): n is a, c, g, or t
aattggaggagttgttgttaggccgtcccggagacccggtcgggagggaggaaggtggcaagatggtgttggaaagcactatggtgtgtgtggacaacagtgagtatatgcggaatggagacttcttacccaccaggctgcaggcccagcaggatgctgtcaacatagtttgtcattcaaagacccgcagcaaccctgagaacaacgtgggccttatcacactggctaatgactgtgaagtgctgaccacactcaccccagacactggccgtatcctgtccaagctacatactgtccaacccaagggcaagatcaccttctgcacgggcatccgcgtggcccatctggctctgaagcaccgacaaggcaagaatcacaagatgcgcatcattgcctttgtgggaagcccagtggaggacaatgagaaggatctggtgaaactggctaaacgcctcaagaaggagaaagtaaatgttgacattatcaattttggggaagaggaggtgaacacagaaaagctgacagcctttgtaaacacgttgaatggcaaagatggaaccggttctcatctggtgacagtgcctcctgggcccagtttggctgatgctctcatcagttctccgattttggctggtgaaggtggtgccatgctgggtcttggtgccagtgactttgaatttggagtagatcccagtgctgatcctgagctggccttggcccttcgtgtatctatggaagagcagcggcagcggcaggaggaggaggcccggcgggcagctgcagcttctgctgctgaggccgggattgctacgactgggactgaagantcngacgatgccngntgaaatnacntngcnnaganttggcgntgggttctgaaccaanntatnggaaaaaatgtttcacgcgatcctccgggagaatgggccgggaaggacatggcctctgatcgcccgaggaaaatagggccgctctttcaaccggagaaaatttcccccgaagaaagaagtggtgtccaa

SEQ ID NO: 450548 - DNA, 1357 bp, Homo sapiens
aattcccaaatgaccttttatttcatacagagatacaaaggcaactatgtgcagcaacaatctgatgggcagtccaaactcttgggaggaagtaaattcatggtaaatgtcatgatgggtcgggagggaggaaggtggcaagatggtgttggaaagcactatggtgtgtgtggacaacagtgagtatatgcggaatggagacttcttacccaccaggctgcaggcccagcaggatgctgtcaacatagtttgtcattcaaagacccgcagcaaccctgagaacaacgtgggccttatcacactggctaatgactgtgaagtgctgaccacactcaccccagacactggccgtatcctgtccaagctacatactgtccaacccaagggcaagatcaccttctgcacgggcatccgcgtggcccatctggctctgaagcaccgacaaggcaagaatcacaagatgcgcatcattgcctttgtgggaagcccagtggaggacaatgagaaggatctggtgaaactggctaaacgcctcaagaaggagaaagtaaatgttgacattatcaattttggggaagaggaggtgaacacagaaaagctgacagcctttgtaaacacgttagtgcctcctgggcccagtttggctgatgctctcatcagttctccgattttggctggtgaaggtggtgccatgctgggtcttggtgccagtgactttgaatttggagtagatcccagtgctgatcctgagctggccttggcccttcgtgtatctatggaagagcagcggcagcggcaggaggaggaggcccggcgggcagctgcagcttctgctgctgaggccgggattgctacgactgggactgaagactcagacgatgccctgctgaagatgaccatcagccagcaagagtttggccgcactgggcttcctgacctaagcagtatgactgaggaagagcagattgcttatgccatgcagatgtccctgcagggagcagagtttggccaggcggaatcagcagacattgatgccagctcagctatggacacatccgagccagccaaggaggaggatgattacgacgtgatgcaggaccccgagttccttcagagtgtcctagagaacctcccaggtgtggatcccaacaatgaagccattcgaaatgctatgggctccctggcctcccaggccaccaaggacggcaagaaggacaagaaggaggaagacaagaagtgagactggagggaaagggtagctgagtctgcttaggggactgcatgggaagcacggaatatagggttagatgtgtgttatctgtaaccattacagcctaaataaagcttggcaactttt

SEQ ID NO: 450549 - DNA, 1489 bp, Homo sapiens
  misc_feature (22)..(23): n is a, c, g, or t
  misc_feature (25)..(27): n is a, c, g, or t
  misc_feature (985)..(985): n is a, c, g, or t
caatcggctggatgcatgcccnngnnnaatcggcgagggcagatggtgttggaaagcactatggtgtgtgtggacaacagtgagtatatgcggaatggagacttcttacccaccaggctgcaggcccagcaggatgctgtcaacatagtttgtcattcaaagacccgcagcaaccctgagaacaacgtgggccttatcacactggctaatgactgtgaagtgctgaccacactcaccccagacactggccgtatcctgtccaagctacatactgtccaacccaagggcaagatcaccttctgcacgggcatccgcgtggcccatctggctctgaagcaccgacaaggcaagaatcacaagatgcgcatcattgcctttgtgggaagcccagtggaggacaatgagaaggatctggtgaaactggctaaacgcctcaagaaggagaaagtaaatgttgacattatcaattttggggaagaggaggtgaacacagaaaagctgacagcctttgtaaacacgttgaatggcaaagatggaaccggttctcatctggtgacagtgcctcctgggcccagtttggctgatgctctcatcagttctccgattttggctggtgaaggtggtgccatgctgggtcttggtgccagtgactttgaatttggagtagatcccagtgctgatcctgagctggccttggcccttcgtgtatctatggaagagcagcggcagcggcaggaggaggaggcccggcgggcagctgcagcttctgctgctgaggccgggattgctacgactgggactgaagggtgaaagaggtggaatccgaagtcctgggactgcgggatgctaaacattgaaagctgggtgtaggcactgcagggagagtgtggaggtctgacagggtaggaatatgtgggagggctgggctaggaatggccttggaggctggcctgtgtggatatggcaccaattctaccctgctccncttttccttttcccagactcagacgatgccctgctgaagatgaccatcagccagcaagagtttggccgcactgggcttcctgacctaagcagtatgactgaggaagagcagattgcttatgccatgcagatgtccctgcagggagcagagtttggccaggcggaatcagcagacattgatgccagctcagctatggacacatccgagccagccaaggaggaggatgattacgacgtgatgcaggaccccgagttccttcagagtgtcctagagaacctcccaggtgtggatcccaacaatgaagccattcgaaatgctatgggctccctggcctcccaggccaccaaggacggcaagaaggacaagaaggaggaagacaagaagtgagactggagggaaagggtagctgagtctgcttaggggactgcatgggaagcacggaatatagggttagatgtgtgttatctgtaaccattacagcctaaataaagcttggcaactttt

SEQ ID NO: 450550 - DNA, 838 bp, Homo sapiens
aattcccaaatgaccttttatttcatacagagatacaaaggcaactatgtgcagcaacaatctgatgggcagtccaaactcttgggaggaagtaaattcatggtaaatgtcatgatgggtcgggagggaggaaggtggcaagatggtgttggaaagcactatggtgtgtgtggacaacagtgagtatatgcggaatggagacttcttacccaccaggctgcaggcccagcaggatgctgtcaacatagtttgtcattcaaagacccgcagcaaccctgagaacaacgtgggccttatcacactggctaatgactgtgaagtgctgaccacactcaccccagacactggccgtatcctgtccaagctacatactgtccaacccaagggcaagatcaccttctgcactgggcttcctgacctaagcagtatgactgaggaagagcagattgcttatgccatgcagatgtccctgcagggagcagagtttggccaggcggaatcagcagacattgatgccagctcagctatggacacatccgagccagccaaggaggaggatgattacgacgtgatgcaggaccccgagttccttcagagtgtcctagagaacctcccaggtgtggatcccaacaatgaagccattcgaaatgctatgggctccctggcctcccaggccaccaaggacggcaagaaggacaagaaggaggaagacaagaagtgagactggagggaaagggtagctgagtctgcttaggggactgcatgggaagcacggaatatagggttagatgtgtgttatctgtaaccattacagcctaaataaagcttggcaactttt

SEQ ID NO: 450551 - DNA, 1150 bp, Homo sapiens
aattcccaaatgaccttttatttcatacagagatacaaaggcaactatgtgcagcaacaatctgatgggcagtccaaactcttgggaggaagtaaattcatggtaaatgtcatgatgggtcgggagggaggaaggtggcaagatggtgttggaaagcactatggtgtgtgtggacaacagtgagtatatgcggaatggagacttcttacccaccaggctgcaggcccagcaggatgctgtcaacatagtttgtcattcaaagacccgcagcaaccctgagaacaacgtgggccttatcacactggctaagtatgggggacagaggaggaggggactcagtaggtgggtggttgttacatgctactcttctttagattccatgaagctgcttttgcccatcaccttcctagactgccttctgcactatttagtgtaaatgtcaatagcaacttgttttttgtattaacctgtatttaatgtagtacggaagctaaatctcctggggtgaaatttctgtttctttttattgtttgttgggcagggctagggtagggggtgaaatttcataatatattttaaagtcagtgaaaagtgattttgggctgggcacagtggctcatgtctgtaatcccaagagtttgagaccagcctgggcaacaggacaaaaccctgtctctactaaaaatacaaaaattagccaggcatggtggtggctacctgtaataccagctactcaggaggctgaggcaggagaatcgcttgaactcgggaggcggaggttgcagtgagccaagatcacaccactgcacaccagcttgggcgacagaatgagactccatttcaaaaaaaaagaaaaaagtaatttttggatcagagcccctgggcatatatcactcatccttttaccctgaaagtgttttgttttaggaactgataattcttaaatgagtagcctcccactccagtgtacatactgttagctaggagaatgggtctggaggtggagaggacaggagagatacaaattagcatcgttattttggtggattctcagggccctgtgagcctttaaaaggagttaggggaaaatatttggaagtagagggcagctttcttacaaagccagccacttaattatttctgtgcttgg

SEQ ID NO: 450552 - DNA, 329 bp, Homo sapiens
ctgaagatgaccatcagccagcaagagtttggccgcactgggcttcctgacctaagcagtatgactgaggaagagcagattgcttatgccatgcagatgtccctgcagggagcaggtgagccagagcctgggtggtgcctaggcagaggttggggtgaggaagtgtaactgaacagactgacctctcttcctcagagtttggccaggcggaatcagcagacattgatgccagctcagctatggacacatccgagccagccaagggtgagacccaaccctgcccccatcaggtttaaagtccttgaatttagatcctcatccctctgggg

SEQ ID NO: 450553 - DNA, 903 bp, Homo sapiens
  misc_feature (65)..(65): n is a, c, g, or t
  misc_feature (74)..(74): n is a, c, g, or t
  misc_feature (81)..(81): n is a, c, g, or t
  misc_feature (829)..(830): n is a, c, g, or t
  misc_feature (838)..(838): n is a, c, g, or t
acaaacaccaccacaccacccccacacccccctacgtctagcagcactgcctgcttaactcgtanaggctgtgngaagcantatggtgtgtgtggacaacagtgagtatatgcggaatggagacttcttacccaccaggctgcaggcccagcaggatgctgtcaacatagtttgtcattcaaagacccgcagcaaccctgagaacaacgtgggccttatcacactggctaatgactgtgaagtgctgaccacactcaccccagacactggccgtatcctgtccaagctacatactgtccaacccaagggcaagatcaccttctgcacgggcatccgcgtggcccatctggctctgaagcaccgacaaggcaagaatcacaagatgcgcatcattgcctttgtgggaagcccagtggaggacaatgagaaggatctggtgaaactggctaaacgcctcaagaaggagaaagtaaatgttgacattatcaattttggggaagaggaggtgaacacagaaaagctgacagcctttgtaaacacgttgaatggcaaagatggaaccggttctcatctggtgacagtgcctcctgggcccagtttggctgatgctctcatcagttctccgattttggctggtgaaggtggtgccatgctgggtcttggtgccagtgactttgaatttggagtagatcccagtgctgatcctgagctggccttggcccttcgtgtatctatggaagagcagcggcagcggcaggaggaggaggcccggcgggcagctgcagcttctgctgctgaggccgggattgctacgactgggactgaaganncagagatncctgctgaaataaccatagagcaagattgcgcatgggtccgactaacactatactggaccgaagg

SEQ ID NO: 450554 - DNA, 1693 bp, Homo sapiens
aattggaggagttgttgttaggccgtcccggagacccggtcgggagggaggaaggtggcaagatggtgttggaaagcactatggtgtgtgtggacaacagtgagtatatgcggaatggagacttcttacccaccaggctgcaggcccagcaggatgctgtcaacatagtttgtcattcaaagacccgcagcaaccctgagaacaacgtgggccttatcacactggctaatgactgtgaagtgctgaccacactcaccccagacactggccgtatcctgtccaagctacatactgtccaacccaagggcaagatcaccttctgcacgggcatccgcgtggcccatctggctctgaagcaccgacaaggcaagaatcacaagatgcgcatcattgcctttgtgggaagcccagtggaggacaatgagaaggatctggtgaaactggctaaacgcctcaagaaggagaaagtaaatgttgacattatcaattttggggaagaggaggtgaacacagaaaagctgacagcctttgtaaacacgttgaatggcaaagatggaaccggttctcatctggtgacagtgcctcctgggcccagtttggctgatgctctcatcagttctccgattttggctggtgaaggtggtgccatgctgggtcttggtgccagtgactttgaatttggagtagatcccagtgctgatcctgagctggccttggcccttcgtgtatctatggaagagcagcggcagcggcaggaggaggaggcccggcgggcagctgcagcttctgctgctgaggccgggattgctacgactgggactgaagactcagacgatgccctgctgaagatgaccatcagccagcaagagtttggccgcactgggcttcctgacctaagcagtatgactgaggaagagcagattgcttatgccatgcagatgtccctgcagggagcagagtttggccaggcggaatcagcagacattgatgccagctcagctatggacacatccgagccagccaaggaggaggatgattacgacgtgatgcaggaccccgagttccttcagagtgtcctagagaacctcccaggtgtggatcccaacaatgaagccattcgaaatgctatgggctccctggcctcccaggccaccaaggacggcaagaaggacaagaaggaggaagacaagaagtgagactggagggaaagggtagctgagtctgcttaggggactgcatgggaagcacggaatatagggttagatgtgtgttatctgtaaccattacagcctaaataaagcttggcaacttttaaaaaaaaaaaacaaccaaacaaaaacaaacaaaaaacaattggtggggcgcggcgccttggggcccctggagaaaggttttcttgacaaccacttccggtgggggcggcggggggcccagattggtgacaggggccatggggccaaaagcggggtcccacaagggggaactctggggcaaacagaaaaggggggggggggttttcaccccaattaaaaaacgcgccgggggggaacacacaggggtgttcttagaaaaaattcccaaagaggaagaggtaccaggaggagcaaaaacggggagactcttcaaacagggggggtccaaaaggggagtactcgaactacaaaattaaccccccggcgccgtgtggggacga

SEQ ID NO: 450555 - DNA, 1367 bp, Homo sapiens
aattggaggagttgttgttaggccgtcccggagacccggtcgggagggaggaaggtggcaagatggtgttggaaagcactatggtgtgtgtggacaacagtgagtatatgcggaatggagacttcttacccaccaggctgcaggcccagcaggatgctgtcaacatagtttgtcattcaaagacccgcagcaaccctgagaacaacgtgggccttatcacactggctaatgactgtgaagtgctgaccacactcaccccagacactggccgtatcctgtccaagctacatactgtccaacccaagggcaagatcaccttctgcacgggcatccgcgtggcccatctggctctgaagcaccgacaaggcaagaatcacaagatgcgcatcattgcctttgtgggaagcccagtggaggacaatgagaaggatctggtgaaactggctaaacgcctcaagaaggagaaagtaaatgttgacattatcaattttggggaagaggaggtgaacacagaaaagctgacagcctttgtaaacacgttgaatggcaaagatggaaccggttctcatctggtgacagtgcctcctgggcccagtttggctgatgctctcatcagttctccgattttggctggtgaaggtggtgccatgctgggtcttggtgccagtgactttgaatttggagtagatcccagtgctgatcctgagctggccttggcccttcgtgtatctatggaagagcagcggcagcggcaggaggaggaggcccggcgggcagctgcagcttctgctgctgaggccgggattgctacgactgggactgaagactcagacgatgccctgctgaagatgaccatcagccagcaagagtttggccgcactgggcttcctgacctaagcagtatgactgaggaagagcagattgcttatgccatgcagatgtccctgcagggagcagagtttggccaggcggaatcagcagacattgatgccagctcagctatggacacatccgagccagccaaggaggaggatgattacgacgtgatgcaggaccccgagttccttcagagtgtcctagagaacctcccaggtgtggatcccaacaatgaagccattcgaaatgctatgggctccctggcctcccaggccaccaaggacggcaagaaggacaagaaggaggaagacaagaagtgagactggagggaaagggtagctgagtctgcttaggggactgcatgggaagcacggaatatagggttagatgtgtgttatctgtaaccattacagcctaaataaagcttggcaacttttcttgccatatgcaacaggccaagaagtacatggaggagcaatgaccagcgcaag

SEQ ID NO: 450556 - DNA, 1553 bp, Homo sapiens
aattcccaaatgaccttttatttcatacagagatacaaaggcaactatgtgcagcaacaatctgatgggcagtccaaactcttgggaggaagtaaattcatggtaaatgtcatgatgggtcgggagggaggaaggtggcaagatggtgttggaaagcactatggtgtgaaattagctggcatggtggtgcacgcctgtggtcccagctacccgggaagctgaagtgggaagatctattgagcctgggaggttgaggctacagtgagctgtgactgcgcttgaacctgtgcctgcgcttgaacctgtgcctgaatactaccctagacagtgtggacaacagtgagtatatgcggaatggagacttcttacccaccaggctgcaggcccagcaggatgctgtcaacatagtttgtcattcaaagacccgcagcaaccctgagaacaacgtgggccttatcacactggctaatgactgtgaagtgctgaccacactcaccccagacactggccgtatcctgtccaagctacatactgtccaacccaagggcaagatcaccttctgcacgggcatccgcgtggcccatctggctctgaagcaccgacaaggcaagaatcacaagatgcgcatcattgcctttgtgggaagcccagtggaggacaatgagaaggatctggtgaaactggctaaacgcctcaagaaggagaaagtaaatgttgacattatcaattttggggaagaggaggtgaacacagaaaagctgacagcctttgtaaacacgttgaatggcaaagatggaaccggttctcatctggtgacagtgcctcctgggcccagtttggctgatgctctcatcagttctccgattttggctggtgaaggtggtgccatgctgggtcttggtgccagtgactttgaatttggagtagatcccagtgctgatcctgagctggccttggcccttcgtgtatctatggaagagcagcggcagcggcaggaggaggaggcccggcgggcagctgcagcttctgctgctgaggccgggattgctacgactgggactgaagactcagacgatgccctgctgaagatgaccatcagccagcaagagtttggccgcactgggcttcctgacctaagcagtatgactgaggaagagcagattgcttatgccatgcagatgtccctgcagggagcagagtttggccaggcggaatcagcagacattgatgccagctcagctatggacacatccgagccagccaaggaggaggatgattacgacgtgatgcaggaccccgagttccttcagagtgtcctagagaacctcccaggtgtggatcccaacaatgaagccattcgaaatgctatgggctccctggcctcccaggccaccaaggacggcaagaaggacaagaaggaggaagacaagaagtgagactggagggaaagggtagctgagtctgcttaggggactgcatgggaagcacggaatatagggttagatgtgtgttatctgtaaccattacagcctaaataaagcttggcaactttt

SEQ ID NO: 450557 - DNA, 1193 bp, Homo sapiens
aattggaggagttgttgttaggccgtcccggagacccggtcgggagggaggaaggtggcaagatggtgttggaaagcactatggtgtgtgtggacaacagtgagtatatgcggaatggagacttcttacccaccaggctgcaggcccagcaggatgctgtcaacatagtttgtcattcaaagacccgcagcaaccctgagaacaacgtgggccttatcacactggctaatgactgtgaagtgctgaccacactcaccccagacactggccgtatcctgtccaagctacatactgtccaacccaagggcaagatcaccttctgcacgggcatccgcgtggcccatctggctctgaagcaccgacaaggcaagaatcacaagatgcgcatcattgcctttgtgggaagcccagtggaggacaatgagaaggatctggtgaaactggctaaacgcctcaagaaggagaaagtaaatgttgacattatcaattttggggaagaggaggtgaacacagaaaagctgacagcctttgtaaacacgttgaatggcaaagatggaaccggttctcatctggtgacagtgcctcctgggcccagtttggctgatgctctcatcagttctccgattttggctggtgaaggtggtgccatgctgggtcttggtgccagtgactttgaatttggagtagatcccagtgctgatcctgagctggccttggcccttcgtgtatctatggaagagcagcggcagcggcaggaggaggaggcccggcgggcagctgcagcttctgctgctgaggccgggattgctacgactgggactgaagactcagacgatgccctgctgaagatgaccatcacagacattgatgccagctcagctatggacacatccgagccagccaaggaggaggatgattacgacgtgatgcaggaccccgagttccttcagagtgtcctagagaacctcccaggtgtggatcccaacaatgaagccattcgaaatgctatgggctccctggcctcccaggccaccaaggacggcaagaaggacaagaaggaggaagacaagaagtgagactggagggaaagggtagctgagtctgcttaggggactgcatgggaagcacggaatatagggttagatgtgtgttatctgtaaccattacagcctaaataaagcttggcaactttt

SEQ ID NO: 450558 - DNA, 1158 bp, Homo sapiens
tacggctaggagcgaggacagggcgtgtgaacttcggtgaggagggatcacagctggtctaatgacaggtaaggtgactgtgaagtgctgaccacactcaccccagacactggccgtatcctgtccaagctacatactgtccaacccaagggcaagatcaccttctgcacgggcatccgcgtggcccatctggctctgaagcaccgacaaggcaagaatcacaagatgcgcatcattgcctttgtgggaagcccagtggaggacaatgagaaggatctggtgaaactggctaaacgcctcaagaaggagaaagtaaatgttgacattatcaattttggggaagaggaggtgaacacagaaaagctgacagcctttgtaaacacgttgaatggcaaagatggaaccggttctcatctggtgacagtgcctcctgggcccagtttggctgatgctctcatcagttctccgattttggctggtgaaggtggtgccatgctgggtcttggtgccagtgactttgaatttggagtagatcccagtgctgatcctgagctggccttggcccttcgtgtatctatggaagagcagcggcagcggcaggaggaggaggcccggcgggcagctgcagcttctgctgctgaggccgggattgctacgactgggactgaagactcagacgatgccctgctgaagatgaccatcagccagcaagagtttggccgcactgggcttcctgacctaagcagtatgactgaggaagagcagattgcttatgccatgcagatgtccctgcagggagcagagtttggccaggcggaatcagcagacattgatgccagctcagctatggacacatccgagccagccaaggaggaggatgattacgacgtgatgcaggaccccgagttccttcagagtgtcctagagaacctcccaggtgtggatcccaacaatgaagccattcgaaatgctatgggctccctggcctcccaggccaccaaggacggcaagaaggacaagaaggaggaagacaagaagtgagactggagggaaagggtagctgagtctgcttaggggactgcatgggaagcacggaatatagggttagatgtgtgttatctgtaaccattacagcctaaataaagcttggcaactttt

SEQ ID NO: 450559 - DNA, 1551 bp, Homo sapiens
aattcccaaatgaccttttatttcatacagagatacaaaggcaactatgtgcagcaacaatctgatgggcagtccaaactcttgggaggaagtaaattcatggtaaatgtcatgatgggtcgggagggaggaaggtggcaagatggtgttggaaagcactatggtgtgtgtggacaacagtgagtatatgcggaatggagacttcttacccaccaggctgcaggcccagcaggatgctgtcaacatagtttgtcattcaaagacccgcagcaaccctgagaacaacgtgggccttatcacactggctaatgactgtgaagtgctgaccacactcaccccagacactggccgtatcctgtccaagctacatactgtccaacccaagggcaagatcaccttctgcacgggcatccgcgtggcccatctggctctgaagcaccgacaaggcaagaatcacaagatgcgcatcattgcctttgtgggaagcccagtggaggacaatgagaaggatctggtgaaactggctaaacgcctcaagaaggagaaagtaaatgttgacattatcaattttggggaagaggtgagtagggactgattggagggcattgacttaatttggtcataaacagaatggtccttaaccctgaggagtgcgggtactgtgcagagtagtgcagaaatgggaaagaacagggagcaaggcctgaagaagggcatcatgtgttctttcctccccaggaggtgaacacagaaaagctgacagcctttgtaaacacgttgaatggcaaagatggaaccggttctcatctggtgacagtgcctcctgggcccagtttggctgatgctctcatcagttctccgattttggctggtgaaggtggtgccatgctgggtcttggtgccagtgactttgaatttggagtagatcccagtgctgatcctgagctggccttggcccttcgtgtatctatggaagagcagcggcagcggcaggaggaggaggcccggcgggcagctgcagcttctgctgctgaggccgggattgctacgactgggactgaagactcagacgatgccctgctgaagatgaccatcagccagcaagagtttggccgcactgggcttcctgacctaagcagtatgactgaggaagagcagattgcttatgccatgcagatgtccctgcagggagcagagtttggccaggcggaatcagcagacattgatgccagctcagctatggacacatccgagccagccaaggaggaggatgattacgacgtgatgcaggaccccgagttccttcagagtgtcctagagaacctcccaggtgtggatcccaacaatgaagccattcgaaatgctatgggctccctggcctcccaggccaccaaggacggcaagaaggacaagaaggaggaagacaagaagtgagactggagggaaagggtagctgagtctgcttaggggactgcatgggaagcacggaatatagggttagatgtgtgttatctgtaaccattacagcctaaataaagcttggcaactttt

SEQ ID NO: 450560 - DNA, 1037 bp, Homo sapiens
  misc_feature (22)..(23): n is a, c, g, or t
  misc_feature (25)..(27): n is a, c, g, or t
caatcggctggatgcatgcccnngnnnaatcggcgagggcagatggtgttggaaagcactatggtgtgctggctctgaagcaccgacaaggcaagaatcacaagatgcgcatcattgcctttgtgggaagcccagtggaggacaatgagaaggatctggtgaaactggctaaacgcctcaagaaggagaaagtaaatgttgacattatcaattttggggaagaggaggtgaacacagaaaagctgacagcctttgtaaacacgttgaatggcaaagatggaaccggttctcatctggtgacagtgcctcctgggcccagtttggctgatgctctcatcagttctccgattttggctggtgaaggtggtgccatgctgggtcttggtgccagtgactttgaatttggagtagatcccagtgctgatcctgagctggccttggcccttcgtgtatctatggaagagcagcggcagcggcaggaggaggaggcccggcgggcagctgcagcttctgctgctgaggccgggattgctacgactgggactgaagactcagacgatgccctgctgaagatgaccatcagccagcaagagtttggccgcactgggcttcctgacctaagcagtatgactgaggaagagcagattgcttatgccatgcagatgtccctgcagggagcagagtttggccaggcggaatcagcagacattgatgccagctcagctatggacacatccgagccagccaaggaggaggatgattacgacgtgatgcaggaccccgagttccttcagagtgtcctagagaacctcccaggtgtggatcccaacaatgaagccattcgaaatgctatgggctccctggcctcccaggccaccaaggacggcaagaaggacaagaaggaggaagacaagaagtgagactggagggaaagggtagctgagtctgcttaggggactgcatgggaagcacggaatatagggttagatgtgtgttatctgtaaccattacagcctaaataaagcttggcaactttt

SEQ ID NO: 450561 - DNA, 1037 bp, Homo sapiens
ggctaggtcaggccggtgtgaatcggacgagggggcagatcccttctgacgggcatccgcgtggccatctggctctgaagcaccgacaaggcaagaatcacaagatgcgcatcattgcctttgtgggaagcccagtggaggacaatgagaaggatctggtgaaactggctaaacgcctcaagaaggagaaagtaaatgttgacattatcaattttggggaagaggaggtgaacacagaaaagctgacagcctttgtaaacacgttgaatggcaaagatggaaccggttctcatctggtgacagtgcctcctgggcccagtttggctgatgctctcatcagttctccgattttggctggtgaaggtggtgccatgctgggtcttggtgccagtgactttgaatttggagtagatcccagtgctgatcctgagctggccttggcccttcgtgtatctatggaagagcagcggcagcggcaggaggaggaggcccggcgggcagctgcagcttctgctgctgaggccgggattgctacgactgggactgaagactcagacgatgccctgctgaagatgaccatcagccagcaagagtttggccgcactgggcttcctgacctaagcagtatgactgaggaagagcagattgcttatgccatgcagatgtccctgcagggagcagagtttggccaggcggaatcagcagacattgatgccagctcagctatggacacatccgagccagccaaggaggaggatgattacgacgtgatgcaggaccccgagttccttcagagtgtcctagagaacctcccaggtgtggatcccaacaatgaagccattcgaaatgctatgggctccctggcctcccaggccaccaaggacggcaagaaggacaagaaggaggaagacaagaagtgagactggagggaaagggtagctgagtctgcttaggggactgcatgggaagcacggaatatagggttagatgtgtgttatctgtaaccattacagcctaaataaagcttggcaactttt

SEQ ID NO: 450562 - DNA, 1797 bp, Homo sapiens
aattcccaaatgaccttttatttcatacagagatacaaaggcaactatgtgcagcaacaatctgatgggcagtccaaactcttgggaggaagtaaattcatggtaaatgtcatgatgggtcgggagggaggaaggtggcaagatggtgttggaaagcactatggtgtgtgtggacaacagtgagtatatgcggaatggagacttcttacccaccaggctgcaggcccagcaggatgctgtcaacatagtttgtcattcaaagacccgcagcaaccctgagaacaacgtgggccttatcacactggctaatgactgtgaagtgctgaccacactcaccccagacactggccgtatcctgtccaagctacatactgtccaacccaagggcaagatcaccttctgcacgggcatccgcgtggcccatctggctctgaagcaccgacaaggcaagaatcacaagatgcgcatcattgcctttgtgggaagcccagtggaggacaatgagaaggatgtgagtccaagtggcagctggggaatgtggggagcccatgtttgggactgaggtcttccagccctcaggagaacctggcagaggcatcaggctcatcactttggggaaaggtgaatgtggagaattcagtgattctgttggaggaccttggggaggtcaatagatttctgtatgcttttatgcggcgggtcctttcccccctcgagtatggaacagatttcttgatttttctccccttcttcccagctggtgaaactggctaaacgcctcaagaaggagaaagtaaatgttgacattatcaattttggggaagaggtgagtagggactgattggagggcattgacttaatttggtcataaacagaatggtccttaaccctgaggagtgcgggtactgtgcagagtagtgcagaaatgggaaagaacagggagcaaggcctgaagaagggcatcatgtgttctttcctccccaggaggtgaacacagaaaagctgacagcctttgtaaacacgttgaatggcaaagatggaaccggttctcatctggtgacagtgcctcctgggcccagtttggctgatgctctcatcagttctccgattttggctggtgaaggtggtgccatgctgggtcttggtgccagtgactttgaatttggagtagatcccagtgctgatcctgagctggccttggcccttcgtgtatctatggaagagcagcggcagcggcaggaggaggaggcccggcgggcagctgcagcttctgctgctgaggccgggattgctacgactgggactgaagactcagacgatgccctgctgaagatgaccatcagccagcaagagtttggccgcactgggcttcctgacctaagcagtatgactgaggaagagcagattgcttatgccatgcagatgtccctgcagggagcagagtttggccaggcggaatcagcagacattgatgccagctcagctatggacacatccgagccagccaaggaggaggatgattacgacgtgatgcaggaccccgagttccttcagagtgtcctagagaacctcccaggtgtggatcccaacaatgaagccattcgaaatgctatgggctccctggcctcccaggccaccaaggacggcaagaaggacaagaaggaggaagacaagaagtgagactggagggaaagggtagctgagtctgcttaggggactgcatgggaagcacggaatatagggttagatgtgtgttatctgtaaccattacagcctaaataaagcttggcaactttt

SEQ ID NO: 450563 - DNA, 900 bp, Homo sapiens
  misc_feature (28)..(28): n is a, c, g, or t
  misc_feature (31)..(31): n is a, c, g, or t
  misc_feature (56)..(56): n is a, c, g, or t
  misc_feature (58)..(58): n is a, c, g, or t
  misc_feature (82)..(82): n is a, c, g, or t
  misc_feature (86)..(86): n is a, c, g, or t
tggggtcccacgtagcaacaagcttctnccntgatgtcgcgcacgatctcgggaantncccgttgacattatcaatttgggnaagnggaggtgaacacagaaaagctgacagcctttgtaaacacgttgaatggcaaagatggaaccggttctcatctggtgacagtgcctcctgggcccagtttggctgatgctctcatcagttctccgattttggctggtgaaggtggtgccatgctgggtcttggtgccagtgactttgaatttggagtagatcccagtgctgatcctgagctggccttggcccttcgtgtatctatggaagagcagcggcagcggcaggaggaggaggcccggcgggcagctgcagcttctgctgctgaggccgggattgctacgactgggactgaagactcagacgatgccctgctgaagatgaccatcagccagcaagagtttggccgcactgggcttcctgacctaagcagtatgactgaggaagagcagattgcttatgccatgcagatgtccctgcagggagcagagtttggccaggcggaatcagcagacattgatgccagctcagctatggacacatccgagccagccaaggaggaggatgattacgacgtgatgcaggaccccgagttccttcagagtgtcctagagaacctcccaggtgtggatcccaacaatgaagccattcgaaatgctatgggctccctggcctcccaggccaccaaggacggcaagaaggacaagaaggaggaagacaagaagtgagactggagggaaagggtagctgagtctgcttaggggactgcatgggaagcacggaatatagggttagatgtgtgttatctgtaaccattacagcctaaataaagcttggcaactttt

SEQ ID NO: 450564 - DNA, 912 bp, Homo sapiens
aattggaggagttgttgttaggccgtcccggagacccggtcgggagggaggaaggtggcaagatggtgttggaaagcactatggtgtgtgtggacaacagtgagtatatgcggaatggagacttcttacccaccaggctgcaggcccagcaggatgctgtcaacatagtttgtcattcaaagacccgcagcaaccctgagaacaacgtgggccttatcacactggctaatgactgtgaagtgctgaccacactcaccccagacactggccgtatcctgtccaagctacatactgtccaacccaagggcaagatcaccttctgcacgggcatccgcgtggcccatctggctctgaagcaccgacaaggcaagaatcacaagatgcgcatcattgcctttgtgggaagcccagtggaggacaatgagaaggatctggtgaaactggctaaacgcctcaagaaggagaaagtaaatgttgacattatcaattttggggaagaggaggtgaacacagaaaagctgacagcctttgtaaacacgttgaatggcaaagatggaaccggttctcatctggtgacagtgcctcctgggcccagtttggctgatgctctcatcagttctccgagaggaggatgattacgacgtgatgcaggaccccgagttccttcagagtgtcctagagaacctcccaggtgtggatcccaacaatgaagccattcgaaatgctatgggctccctggcctcccaggccaccaaggacggcaagaaggacaagaaggaggaagacaagaagtgagactggagggaaagggtagctgagtctgcttaggggactgcatgggaagcacggaatatagggttagatgtgtgttatctgtaaccattacagcctaaataaagcttggcaactttt

SEQ ID NO: 450565 - DNA, 586 bp, Homo sapiens
aattcccaaatgaccttttatttcatacagagatacaaaggcaactatgtgcagcaacaatctgatgggcagtccaaactcttgggaggaagtaaattcatggtaaatgtcatgatgggtcgggagggaggaaggtggcaagatggtgttggaaagcactatggtgtgtgtggacaacagtgagtatatgcggaatggagacttcttacccaccaggctgcaggcccagcaggatgctgtcaacatagtttgtcattcaaagacccgcagcaaccctgagaacaacgtgggccttatcacactggctaatgactgtgaagtgctgaccacactcaccccagacactggccgtatcctgtccaagctacatactgtccaacccaagggcaagatcaccttctgcacgggcatccgcgtggcccatctggctctgaagcaccgacaaggcaagaatcacaagatgcgcatcattgcctttgtgggaagcccagtggaggacaatgagaaggatctggtgaaactggctaaacgcctcaagaaggaaggttgtacaggaaggttggtagagtacaggaagtgtctaggg

SEQ ID NO: 450566 - DNA, 820 bp, Homo sapiens
gcactcctgccttcaccatgaagtccagcggcctcttccccttcctggtgctgcttgccctgggaactctggcaccttgggctgtggaaggctctggaaagtccttcaaagctggagtctgtcctcctaagaaatctgcccagtgccttagatacaagaaacctgagtgccagagtgactggcagtgtccagggaagaagagatgttgtcctgacacttgtggcatcaaatgcctggatcctgttgacaccccaaacccaacaaggaggaagcctgggaagtgcccagtgacttatggccaatgtttgatgcttaacccccccaatttctgtgagatggatggccagtgcaagcgtgacttgaagtgttgcatgggcatgtgtgggaaatcctgcgtttcccctgtgaaagcttgattcctgccatatggaggaggctctggagtcctgctctgtgtggtccaggtcctttccaccctgagacttggctccaccactgatatcctcctttggggaaaggcttggcacacagcaggctttcaagaagtgccagttgatcaatgaataaataaacgagcctatttctctttgcagcaaaaaaaaaaaaaaaaaaaaaaaaaacaaaaaaactgtgaggggatctctaaattgcgggggggcggaaaaaacggggtataggaaaggggccatttggggtcatataggttggttccttaggaccccggttttttttgcaccaagggtggaaaaattggcggggcccccaataaggaggggcggataaatttcgaaaaacgccggttacccggtagagggggaat

SEQ ID NO: 450567 - DNA, 939 bp, Homo sapiens
tcggtaccgacgacaggcgacccttcaaagctggagtctgtcctcctaagaaatctgcccagtgccttagatacaagaaacctgagtgccagagtgactggcagtgtccagggaagaagagatgttgtcctgacacttgtggcatcaaatgcctggatcctgttgacaccccaaacccaacaaggaggaagcctgggaagtgcccagtgacttatggccaatgtttgatgcttaacccccccaatttctgtgagatggatggccagtgcaagcgtgacttgaagtgttgcatgggcatgtgtgggaaatcctgcgtttcccctgtgaaagcttgattcctgccatatggaggaggctctggagtcctgctctgtgtggtccaggtcctttccaccctgagacttggctccaccactgatatcctcctttggggaaaggcttggcacacagcaggctttcaagaagtgccagttgatcaatgaataaataaacgagcctatttctctttgcaaaaaaaaaaaagcgcagagggcgtccgaggagtgtggcggaaggacctcgtggagggatttactgatgcaagagatccggaaggttcatcaaggcttttaagaaagttgggtctccctctggaaagggtggagtgcatagcacgtgatgctgacctggaaatagtcgggggggcagatctgaagcgctgggtggactggatccacacacaaggttgtgtcagcaaggcggaatcgaagagcgtgaagaaatgcgggggtaaggaccgggacaggcggccacaacaaggatccgggtccggtcaggaaccttccgtgggggggtggaagggtcaaccaccgggccgaaaaaaatgcttcggggccggcactagcggagggggacaaaccagggataccaggaacggcaccctatacaccggaactactg

SEQ ID NO: 450568 - DNA, 1015 bp, Homo sapiens
ttcaattcctcatgacagattgcagcttccttcattagcaatttgataaatgggatgccttcctctaagcccttgagagattgccagaaatgccccgccttcaaagctggagtctgtcctcctaagaaatctgcccagtgccttagatacaagaaacctgagtgccagagtgactggcagtgtccagggaagaagagatgttgtcctgacacttgtggcatcaaatgcctggatcctgttgacaccccaaacccaacaaggaggaagcctgggaagtgcccagtgacttatggccaatgtttgatgcttaacccccccaatttctgtgagatggatggccagtgcaagcgtgacttgaagtgttgcatgggcatgtgtgggaaatcctgcgtttcccctgtgaaagcttgattcctgccatatggaggaggctctggagtcctgctctgtgtggtccaggtcctttccaccctgagacttggctccaccactgatatcctcctttggggaaaggcttggcacacagcaggctttcaagaagtgccagttgatcaatgaataaataaacgagcctatttctctttgcaaaaaaaaaaaagcgcagagggcgtccgaggagtgtggcggaaggacctcgtggagggatttactgatgcaagagatccggaaggttcatcaaggcttttaagaaagttgggtctccctctggaaagggtggagtgcatagcacgtgatgctgacctggaaatagtcgggggggcagatctgaagcgctgggtggactggatccacacacaaggttgtgtcagcaaggcggaatcgaagagcgtgaagaaatgcgggggtaaggaccgggacaggcggccacaacaaggatccgggtccggtcaggaaccttccgtgggggggtggaagggtcaaccaccgggccgaaaaaaatgcttcggggccggcactagcggagggggacaaaccagggataccaggaacggcaccctatacaccggaactactg

SEQ ID NO: 450569 - DNA, 596 bp, Homo sapiens
gcactcctgccttcaccatgaagtccagcggcctcttccccttcctggtgctgcttgccctgggaactctggcaccttgggctgtggaaggctctggaaagtccttcaaagctggagtctgtcctcctaagaaatctgcccagtgccttagatacaagaaacctgagtgccagagtgactggcagtgtccagggaagaagagatgttgtcctgacacttgtggcatcaaatgcctggatcctgttgacaccccaaacccaacaaggaggaagcctgggaagtgcccagtgacttatggccaatgtttgatgcttaacccccccaatttctgtgagatggatggccagtgcaagcgtgacttgaagtgttgcatgggcatgtgtgggaaatcctgcgtttcccctgtgaaagcttgattcctgccatatggaggccgggctgagctggaggagctgaggtccctggggccagcaggtgatagaagctgaggtgtggattgagaacttcagagtaatacaggccaggtgcggtaatacaggccagcacttcggaaggccagggtgggcagattgcttgaggtcaggagtttgagacca

SEQ ID NO: 450570 - DNA, 838 bp, Homo sapiens
aggtgaaatcacaaaggatcagtggagtttgaggattatctagttcaatgctttgagtttagagttttacggtgaaaatgagacttgtctcctgacactaagtctctctcaactatagcgctatcttgctattttctctatctcagaaggatccttgggcaggaggaaggatgtggatatgatttggctggtttctatgctgaagctcttatctgattttctctcacagcttgattcctgccatatggaggaggctctggagtcctgctctgtgtggtccaggtcctttccaccctgagacttggctccaccactgatatcctcctttggggaaaggcttggcacacagcaggctttcaagaagtgccagttgatcaatgaataaataaacgagcctatttctctttgcaaaaaaaaaaaagcgcagagggcgtccgaggagtgtggcggaaggacctcgtggagggatttactgatgcaagagatccggaaggttcatcaaggcttttaagaaagttgggtctccctctggaaagggtggagtgcatagcacgtgatgctgacctggaaatagtcgggggggcagatctgaagcgctgggtggactggatccacacacaaggttgtgtcagcaaggcggaatcgaagagcgtgaagaaatgcgggggtaaggaccgggacaggcggccacaacaaggatccgggtccggtcaggaaccttccgtgggggggtggaagggtcaaccaccgggccgaaaaaaatgcttcggggccggcactagcggagggggacaaaccagggataccaggaacggcaccctatacaccggaactactg

SEQ ID NO: 450571 - DNA, 270 bp, Homo sapiens
agtcatctctctcattaacaatgttttttgtcttagaaatttcttgttgatttttaaacttacatgatttcttgttttggtatgaatacaggctgcttcagtccttcaataagcccatcacactttttcaccatgtcatctatcagcactttttctgcagtgttacgaacatcagcttcatcactgtcagcctgcgttttgcctgcaacccatcaaatgaggtcaggagaggagttttccacttttggcttcatgttggtgctcaaaact

SEQ ID NO: 450572 - DNA, 1020 bp, Homo sapiens
gcactcctgccttcaccatgaagtccagcggcctcttccccttcctggtgctgcttgccctgggaactctggcaccttgggctgtggaaggctctggaaagtccttcaaagctggagtctgtcctcctaagaaatctgcccagtgccttagatacaagaaacctgagtgccagagtgactggcagtgtccagggaagaagagatgttgtcctgacacttgtggcatcaaatgcctggatcctgttgacaccccaaacccaacaaggaggaagcctgggaagtgcccagtgacttatggccaatgtttgatgcttaacccccccaatttctgtgagatggatggccagtgcaagcgtgacttgaagtgttgcatgggcatgtgtgggaaatcctgcgtttcccctgtgaaagcttgattcctgccatatggaggaggctctggagtcctgctctgtgtggtccaggtcctttccaccctgagacttggctccaccactgatatcctcctttggggaaaggcttggcacacagcaggctttcaagaagtgccagttgatcaatgaataaataaacgagcctatttctctttgcaaaaaaaaaaaagcgcagagggcgtccgaggagtgtggcggaaggacctcgtggagggatttactgatgcaagagatccggaaggttcatcaaggcttttaagaaagttgggtctccctctggaaagggtggagtgcatagcacgtgatgctgacctggaaatagtcgggggggcagatctgaagcgctgggtggactggatccacacacaaggttgtgtcagcaaggcggaatcgaagagcgtgaagaaatgcgggggtaaggaccgggacaggcggccacaacaaggatccgggtccggtcaggaaccttccgtgggggggtggaagggtcaaccaccgggccgaaaaaaatgcttcggggccggcactagcggagggggacaaaccagggataccaggaacggcaccctatacaccggaactactg

SEQ ID NO: 450573 - DNA, 1223 bp, Homo sapiens
aaagagggaacttcagatgagaggagggagaaatcctggagaggtgatccttaaacggtggctggaatttccgcaggaggccatggaagactttacaggccactggatggcgccgggagcactgatttggagctgggtcctagagccttcgcaggccgttggcatctggcacttgggctgcagagcctgtcctcccttaattccccgactctggcagccccaccaccgaagtctacaagctgcttctgttcccatgcagtggccccatagtcctggatttgaagaccagccctgctacttaccagccttcaaagctggagtctgtcctcctaagaaatctgcccagtgccttagatacaagaaacctgagtgccagagtgactggcagtgtccagggaagaagagatgttgtcctgacacttgtggcatcaaatgcctggatcctgttgacaccccaaacccaacaaggaggaagcctgggaagtgcccagtgacttatggccaatgtttgatgcttaacccccccaatttctgtgagatggatggccagtgcaagcgtgacttgaagtgttgcatgggcatgtgtgggaaatcctgcgtttcccctgtgaaagcttgattcctgccatatggaggaggctctggagtcctgctctgtgtggtccaggtcctttccaccctgagacttggctccaccactgatatcctcctttggggaaaggcttggcacacagcaggctttcaagaagtgccagttgatcaatgaataaataaacgagcctatttctctttgcaaaaaaaaaaaagcgcagagggcgtccgaggagtgtggcggaaggacctcgtggagggatttactgatgcaagagatccggaaggttcatcaaggcttttaagaaagttgggtctccctctggaaagggtggagtgcatagcacgtgatgctgacctggaaatagtcgggggggcagatctgaagcgctgggtggactggatccacacacaaggttgtgtcagcaaggcggaatcgaagagcgtgaagaaatgcgggggtaaggaccgggacaggcggccacaacaaggatccgggtccggtcaggaaccttccgtgggggggtggaagggtcaaccaccgggccgaaaaaaatgcttcggggccggcactagcggagggggacaaaccagggataccaggaacggcaccctatacaccggaactactg

SEQ ID NO: 450574 - DNA, 504 bp, Homo sapiens
gcactcctgccttcaccatgaagtccagcggcctcttccccttcctggtgctgcttgccctgggaactctggcaccttgggctgtggaaggctctggaaagtccttcaaagctggagtctgtcctcctaagaaatctgcccagtgccttagatacaagaaacctgagtgccagagtgactggcagtgtccagggaagaagagatgttgtcctgacacttgtggcatcaaatgcctggatcctgttgacaccccaaacccaacaaggaggaagcctgggaagtgcccagtgacttatggccaatgtttgatgcttaacccccccaatttctgtgagatggatggccagtgcaagcgtgacttgaagtgttgcatgggcatgtgtgggaaatcctgcgtttcccctgtgaaaggctgcttcagtccttcaataagcccatcacactttttcaccatgtcatctatcagcactttttctgcagtgttacgaacatcagcttcatcac

SEQ ID NO: 450575 - DNA, 559 bp, Homo sapiens
gcactcctgccttcaccatgaagtccagcggcctcttccccttcctggtgctgcttgccctgggaactctggcaccttgggctgtggaaggctctggaaagtccttcaaagctggagtctgtcctcctaagaaatctgcccagtgccttagatacaagaaacctgagtgccagagtgactggcagtgtccagggaagaagagatgttgtcctgacacttgtggcatcaaatgcctggatcctgttgacaccccaaacccaacaaggaggaagcctgggaagtgcccagtgacttatggccaatgtttgatgcttaacccccccaatttctgtgagatggatggccagtgcaagcgtgacttgaagtgttgcatgggcatgtgtgggaaggggtacaggagcactgggggttttgcggttccaaaggtgtgtacagctgtgtgtgtctgtgtaatggaggcccagggagagcaggaccaggcaagtgtgtgtggggtgtggtgtgtgtgcttttaggcagggcaccgtgggctttgaggagtgtttctgagagattcgag

SEQ ID NO: 450576 - DNA, 3872 bp, Homo sapiens
aaaagcagaatctgtgagtcgcctggaggcagcgcggcggctgccgtgaggaggccgggtgcggagccgccggtggcccagccgctcagggccagggcctgggctgggagggagagaccggagcagcgccaggagcccgaggccggagccgaggaggaatgtgaccaggggtcggcgggggcgcgggagtacgcgagagcagggatggggcagcaggtgggccgcgtcggggaagctccggggctccagcagcctcagccccgcgggatccggggcagcagtgcagccaggccctccggccgcaggcgggacccggcggggcgcaccacagagaccggcttcaatatcttcacccagcatgatcactttgccagctgtgtggaggatggatttgagggagacaagactggaggcagtagtccagaagctttgcatcgtccctatggttgtgatgttgaaccccaggcactaaatgaggctatcaggtggagctccaaggagaacttgctcggagccactgagagtgaccctaatctcttcgttgcactttatgattttgtagcaagtggtgataacacactcagcatcactaaaggtgaaaagctacgagtccttggttacaaccagaatggtgagtggagtgaagttcgctctaagaatgggcagggctgggtgccaagcaactacatcaccccagtgaacagcctggaaaaacactcctggtaccatggacctgtgtcacgcagtgcagctgagtatctgctcagcagtctaatcaatggcagcttcctggtgcgagaaagtgagagtagccctgggcagctgtccatctcgctcaggtacgagggacgtgtgtatcactacaggatcaataccactgcagatggcaaggtgtatgtgactgctgagagccgcttcagcaccttggcagagcttgtacaccatcactccacagtggctgatgggctggtgacaacattacactacccagcacccaagtgtaataagcctacagtctatggtgtgtcccccatccacgacaaatgggaaatggagcgaacagatattaccatgaagcacaaacttgggggcggtcagtatggagaggtttacgttggcgtctggaagaaatacagccttacagttgctgtgaaaacattgaaggaagataccatggaggtagaagaattcctgaaagaagctgcagtaatgaaggaaatcaagcatcctaatctggtacaacttttaggtgtgtgtactttggagccaccattttacattgtgactgaatacatgccatacgggaatttgctggattacctccgagaatgcaaccgagaagaggtgactgcagttgtgctgctctacatggccactcagatttcttctgcaatggagtacttagagaagaagaatttcatccatagagatcttgcagctcgtaactgcctagtgggagaaaaccatgtggtaaaagtggctgactttggcttaagtagattgatgactggagacacttatactgctcatgctggagccaaatttcctattaagtggacagcaccagagagtcttgcctacaataccttctcaattaaatctgacgtctgggcttttggggtattgttgtgggaaattgctacctatggaatgtcaccatatccaggtattgacctgtctcaggtctatgacctactagaaaaaggatatcgaatggaacagcctgagggatgcccccctaaggtttatgaacttatgagagcatgctggaagtggagccctgccgataggccctcttttgctgaaacacaccaagcttttgaaaccatgttccatgactccagcatttctgaagaggtagctgaggagcttgggagagccgcctcctcgtcatctgttgttccatacctgccccggctacctatacttccttccaagactcggacactgaagaaacaggtggagaacaaggagaacattgaaggggcacaagatgccacagaaaattctgcttccagtttagcaccagggttcatcagaggtgcacaggcctctagtggatccccagcactgcctcgaaagcaaagagacaagtcacccagcagcctcttggaagatgccaaagagacatgcttcaccagggataggaaggggggcttcttcagctccttcatgaagaagagaaatgctcctacaccccccaaacgcagcagctccttccgagaaatggagaatcagccccataagaaatacgaactcacgggtaacttctcatctgttgcttctctacagcatgctgatgggttctctttcactcctgcccagcaagaggcgaatctggtgccacccaagtgctatggggggagctttgcacagaggaacctctgtaatgacgacggtggtgggggtgggggcagtggcactgctgggggtgggtggtctggcatcacaggcttctttacaccacgcttaatcaaaaagacactgggcttacgagcaggtaaacccacagccagtgatgacacttccaagccttttccaaggtcaaactctacatcttccatgtcctcagggcttccagagcaggataggatggcaatgacccttcccaggaactgccagaggtccaaactccagctggaaaggacagtgtccacctcttctcagccagaagagaatgtggacagggccaatgacatgcttccaaaaaaatcagaggaaagtgctgctccaagcagggagagaccaaaagccaagttattgcccagaggagccacagctcttcctctcagaacaccctctggggatctagccattacagagaaggaccctccaggggtgggagtggctggagtggcagctgcccccaagggtaaagagaagaatggtggggcacgacttgggatggctggagttccagaggatggagagcagccgggctggccttctccagccaaggctgcccccgtcctcccaaccactcacaaccacaaagtgccagtccttatctcacccactctgaaacacactccagctgacgtgcagctcattggcacagactctcaggggaataaattcaagctcttatctgagcatcaggtcacatcctctggagacaaggaccgaccccgacgggtaaaaccaaagtgtgccccacccccaccaccagtgatgagactactgcagcatccgtccatctgctcagaccctacagaagagccaactgccctaactgcaggacagtccacatcagaaacacaggaaggaggaaagaaggcagctctgggcgcagtgcccatcagtgggaaagctgggaggccagtgatgcctccacctcaagtgcctctgcccacatcttccatctcgccagccaaaatggccaatggcacagcaggtactaaagtggctctgagaaaaaccaaacaggccgctgagaaaatctcagcagacaaaatcagcaaagaggccctgctggaatgtgctgacctactgtccagtgcactcacggaacctgtgcccaacagccagctggtagacactggacaccagctgcttgactactgctcaggctatgtggactgcatccctcaaactcgcaacaaatttgccttccgagaggctgtgagcaaactggaactcagcctgcaggagctacaggtttcttcagcagctgctggtgtgcccgggacaaaccctgtccttaataacttattgtcatgtgtacaggaaatcagtgatgtggtgcagaggtagccactgttagcctggtgggaaaatgcacacatttctgaggggagagggaaaaggacttgttttcctgtgttcttgttttcagaaaatgaaagactcatacttgagtgtgtttatgtgaa

SEQ ID NO: 450577 - DNA, 3572 bp, Homo sapiens
ctgggcagaggtatggtccttgggacagttctccttccacctaatagttatggcagagatcaggacacttcactttgctgcctgtgcactgaggcctcagaatctgctctacccgacttaacagaagctttgcatcgtccctatggttgtgatgttgaaccccaggcactaaatgaggctatcaggtggagctccaaggagaacttgctcggagccactgagagtgaccctaatctcttcgttgcactttatgattttgtagcaagtggtgataacacactcagcatcactaaaggtgaaaagctacgagtccttggttacaaccagaatggtgagtggagtgaagttcgctctaagaatgggcagggctgggtgccaagcaactacatcaccccagtgaacagcctggaaaaacactcctggtaccatggacctgtgtcacgcagtgcagctgagtatctgctcagcagtctaatcaatggcagcttcctggtgcgagaaagtgagagtagccctgggcagctgtccatctcgctcaggtacgagggacgtgtgtatcactacaggatcaataccactgcagatggcaaggtgtatgtgactgctgagagccgcttcagcaccttggcagagcttgtacaccatcactccacagtggctgatgggctggtgacaacattacactacccagcacccaagtgtaataagcctacagtctatggtgtgtcccccatccacgacaaatgggaaatggagcgaacagatattaccatgaagcacaaacttgggggcggtcagtatggagaggtttacgttggcgtctggaagaaatacagccttacagttgctgtgaaaacattgaaggaagataccatggaggtagaagaattcctgaaagaagctgcagtaatgaaggaaatcaagcatcctaatctggtacaacttttaggtgtgtgtactttggagccaccattttacattgtgactgaatacatgccatacgggaatttgctggattacctccgagaatgcaaccgagaagaggtgactgcagttgtgctgctctacatggccactcagatttcttctgcaatggagtacttagagaagaagaatttcatccatagagatcttgcagctcgtaactgcctagtgggagaaaaccatgtggtaaaagtggctgactttggcttaagtagattgatgactggagacacttatactgctcatgctggagccaaatttcctattaagtggacagcaccagagagtcttgcctacaataccttctcaattaaatctgacgtctgggcttttggggtattgttgtgggaaattgctacctatggaatgtcaccatatccaggtattgacctgtctcaggtctatgacctactagaaaaaggatatcgaatggaacagcctgagggatgcccccctaaggtttatgaacttatgagagcatgctggaagtggagccctgccgataggccctcttttgctgaaacacaccaagcttttgaaaccatgttccatgactccagcatttctgaagaggtagctgaggagcttgggagagccgcctcctcgtcatctgttgttccatacctgccccggctacctatacttccttccaagactcggacactgaagaaacaggtggagaacaaggagaacattgaaggggcacaagatgccacagaaaattctgcttccagtttagcaccagggttcatcagaggtgcacaggcctctagtggatccccagcactgcctcgaaagcaaagagacaagtcacccagcagcctcttggaagatgccaaagagacatgcttcaccagggataggaaggggggcttcttcagctccttcatgaagaagagaaatgctcctacaccccccaaacgcagcagctccttccgagaaatggagaatcagccccataagaaatacgaactcacgggtaacttctcatctgttgcttctctacagcatgctgatgggttctctttcactcctgcccagcaagaggcgaatctggtgccacccaagtgctatggggggagctttgcacagaggaacctctgtaatgacgacggtggtgggggtgggggcagtggcactgctgggggtgggtggtctggcatcacaggcttctttacaccacgcttaatcaaaaagacactgggcttacgagcaggtaaacccacagccagtgatgacacttccaagccttttccaaggtcaaactctacatcttccatgtcctcagggcttccagagcaggataggatggcaatgacccttcccaggaactgccagaggtccaaactccagctggaaaggacagtgtccacctcttctcagccagaagagaatgtggacagggccaatgacatgcttccaaaaaaatcagaggaaagtgctgctccaagcagggagagaccaaaagccaagttattgcccagaggagccacagctcttcctctcagaacaccctctggggatctagccattacagagaaggaccctccaggggtgggagtggctggagtggcagctgcccccaagggtaaagagaagaatggtggggcacgacttgggatggctggagttccagaggatggagagcagccgggctggccttctccagccaaggctgcccccgtcctcccaaccactcacaaccacaaagtgccagtccttatctcacccactctgaaacacactccagctgacgtgcagctcattggcacagactctcaggggaataaattcaagctcttatctgagcatcaggtcacatcctctggagacaaggaccgaccccgacgggtaaaaccaaagtgtgccccacccccaccaccagtgatgagactactgcagcatccgtccatctgctcagaccctacagaagagccaactgccctaactgcaggacagtccacatcagaaacacaggaaggaggaaagaaggcagctctgggcgcagtgcccatcagtgggaaagctgggaggccagtgatgcctccacctcaagtgcctctgcccacatcttccatctcgccagccaaaatggccaatggcacagcaggtactaaagtggctctgagaaaaaccaaacaggccgctgagaaaatctcagcagacaaaatcagcaaagaggccctgctggaatgtgctgacctactgtccagtgcactcacggaacctgtgcccaacagccagctggtagacactggacaccagctgcttgactactgctcaggctatgtggactgcatccctcaaactcgcaacaaatttgccttccgagaggctgtgagcaaactggaactcagcctgcaggagctacaggtttcttcagcagctgctggtgtgcccgggacaaaccctgtccttaataacttattgtcatgtgtacaggaaatcagtgatgtggtgcagaggtagccactgttagcctggtgggaaaatgcacacatttctgaggggagagggaaaaggacttgttttcctgtgttcttgttttcagaaaatgaaagactcatacttgagtgtgtttatgtgaa

SEQ ID NO: 450578 - DNA, 541 bp, Homo sapiens
ctgggcagaggtatggtccttgggacagttctccttccacctaatagttatggcagagatcaggtactaaagtggctctgagaaaaaccaaacaggccgctgagaaaatctcagcagacaaaatcagcaaagaggccctgctggaatgtgctgacctactgtccagtgcactcacggaacctgtgcccaacagccagctggtagacactggacaccagctgcttgactactgctcaggctatgtggactgcatccctcaaactcgcaacaaatttgccttccgagaggctgtgagcaaactggaactcagcctgcaggagctacaggtttcttcagcagctgctggtgtgcccgggacaaaccctgtccttaataacttattgtcatgtgtacaggaaatcagtgatgtggtgcagaggtagccactgttagcctggtgggaaaatgcacacatttctgaggggagagggaaaaggacttgttttcctgtgttcttgttttcagaaaatgaaagactcatacttgagtgtgtttatgtgaa

SEQ ID NO: 450579 - DNA, 3141 bp, Homo sapiens
ctgggcagaggtatggtccttgggacagttctccttccacctaatagttatggcagagatcaggacacttcactttgctgcctgtgcactgaggcctcagaatctgctctacccgacttaacagatcactttgccagctgtgtggaggatggatttgagggagacaagactggaggcagtagtccagaagctttgcatcgtccctatggttgtgatgttgaaccccaggcactaaatgaggctatcaggtggagctccaaggagaacttgctcggagccactgagagtgaccctaatctcttcgttgcactttatgattttgtagcaagtggtgataacacactcagcatcactaaaggtgaaaagctacgagtccttggttacaaccagaatggtgagtggagtgaagttcgctctaagaatgggcagggctgggtgccaagcaactacatcaccccagtgaacagcctggaaaaacactcctggtaccatggacctgtgtcacgcagtgcagctgagtatctgctcagcagtctaatcaatggcagcttcctggtgcgagaaagtgagagtagccctgggcagctgtccatctcgctcaggtacgagggacgtgtgtatcactacaggatcaataccactgcagatggcaaggtgtatgtgactgctgagagccgcttcagcaccttggcagagcttgtacaccatcactccacagtggctgatgggctggtgacaacattacactacccagcacccaagtgtaataagcctacagtctatggtgtgtcccccatccacgacaaatgggaaatggagcgaacagatattaccatgaagcacaaacttgggggcggtcagtatggagaggtttacgttggcgtctggaagaaatacagccttacagttgctgtgaaaacattgaaggaagataccatggaggtagaagaattcctgaaagaagctgcagtaatgaaggaaatcaagcatcctaatctggtacaacttttaggtgtgtgtactttggagccaccattttacattgtgactgaatacatgccatacgggaatttgctggattacctccgagaatgcaaccgagaagaggtgactgcagttgtgctgctctacatggccactcagatttcttctgcaatggagtacttagagaagaagaatttcatccatagcttttggggtattgttgtgggaaattgctacctatggaatgtcaccatatccaggtattgacctgtctcaggtctatgacctactagaaaaaggatatcgaatggaacagcctgagggatgcccccctaaggtttatgaacttatgagagcatgctggaagtggagccctgccgataggccctcttttgctgaaacacaccaagcttttgaaaccatgttccatgactccagcatttctgaagaggtagctgaggagcttgggagagccgcctcctcgtcatctgttgttccatacctgccccggctacctatacttccttccaagactcggacactgaagaaacaggtggagaacaaggagaacattgaaggggcacaagatgccacagaaaattctgcttccagtttagcaccagggttcatcagaggtgcacaggcctctagtggatccccagcactgcctcgaaagcaaagagacaagtcacccagcagcctcttggaagatgccaaagagacatgcttcaccagggataggaaggggggcttcttcagctccttcatgaagaagagaaatgctcctacaccccccaaacgcagcagctccttccgagaaatggagaatcagccccataagaaatacgaactcacggggcttccagagcaggataggatggcaatgacccttcccaggaactgccagaggtccaaactccagctggaaaggacagtgtccacctcttctcagccagaagagaatgtggacagggccaatgacatgcttccaaaaaaatcagaggaaagtgctgctccaagcagggagagaccaaaagccaagttattgcccagaggagccacagctcttcctctcagaacaccctctggggatctagccattacagagaaggaccctccaggggtgggagtggctggagtggcagctgcccccaagggtaaagagaagaatggtggggcacgacttgggatggctggagttccagaggatggagagcagccgggctggccttctccagccaaggctgcccccgtcctcccaaccactcacaaccacaaagtgccagtccttatctcacccactctgaaacacactccagctgacgtgcagctcattggcacagactctcaggggaataaattcaagctcttatctgagcatcaggtcacatcctctggagacaaggaccgaccccgacgggtaaaaccaaagtgtgccccacccccaccaccagtgatgagactactgcagcatccgtccatctgctcagaccctacagaagagccaactgccctaactgcaggacagtccacatcagaaacacaggaaggaggaaagaaggcagctctgggcgcagtgcccatcagtgggaaagctgggaggccagtgatgcctccacctcaagtgcctctgcccacatcttccatctcgccagccaaaatggccaatggcacagcaggtactaaagtggctctgagaaaaaccaaacaggccgctgagaaaatctcagcagacaaaatcagcaaagaggccctgctggaatgtgctgacctactgtccagtgcactcacggaacctgtgcccaacagccagctggtagacactggacaccagctgcttgactactgctcaggctatgtggactgcatccctcaaactcgcaacaaatttgccttccgagaggctgtgagcaaactggaactcagcctgcaggagctacaggtttcttcagcagctgctggtgtgcccgggacaaaccctgtccttaataacttattgtcatgtgtacaggaaatcagtgatgtggtgcagaggtagccactgttagcctggtgggaaaatgcacacatttctgaggggagagggaaaaggacttgttttcctgtgttcttgttttcagaaaatgaaagactcatacttgagtgtgtttatgtgaa

SEQ ID NO: 450580 - DNA, 114 bp, Homo sapiens
ttttaatattttttcttctgttacataggctggaagtggagccctgccgataggccctcttttgctgaaacacaccaagcttttgaaaccatgttccatgactccagcatttct

SEQ ID NO: 450581 - DNA, 3450 bp, Homo sapiens
ctgggcagaggtatggtccttgggacagttctccttccacctaatagttatggcagagatcaggacacttcactttgctgcctgtgcactgaggcctcagaatctgctctacccgacttaacagatcactttgccagctgtgtggaggatggatttgagggagacaagactggaggcagtagtccagaagctttgcatcgtccctatggttgtgatgttgaaccccaggcactaaatgaggctatcaggtggagctccaaggagaacttgctcggagccactgagagtgaccctaatctcttcgttgcactttatgattttgtagcaagtggtgataacacactcagcatcactaaaggtgaaaagctacgagtccttggttacaaccagaatggtgagtggagtgaagttcgctctaagaatgggcagggctgggtgccaagcaactacatcaccccagtgaacagcctggaaaaacactcctggtaccatggacctgtgtcacgcagtgcagctgagtatctgctcagcagtctaatcaatggcagcttcctggtgcgagaaagtgagagtagccctgggcagctgtccatctcgctcaggtacgagggacgtgtgtatcactacaggatcaataccactgcagatggcaaggtgtatgtgactgctgagagccgcttcagcaccttggcagagcttgtacaccatcactccacagtggctgatgggctggtgacaacattacactacccagcacccaagtgtaataagcctacagtctatggtgtgtcccccatccacgacaaatgggaaatggagcgaacagatattaccatgaagcacaaacttgggggcggtcagtatggagaggtttacgttggcgtctggaagaaatacagccttacagttgctgtgaaaacattgaaggaagataccatggaggtagaagaattcctgaaagaagctgcagtaatgaaggaaatcaagcatcctaatctggtacaacttttaggtgtgtgtactttggagccaccattttacattgtgactgaatacatgccatacgggaatttgctggattacctccgagaatgcaaccgagaagaggtgactgcagttgtgctgctctacatggccactcagatttcttctgcaatggagtacttagagaagaagaatttcatccatagcttttggggtattgttgtgggaaattgctacctatggaatgtcaccatatccaggtattgacctgtctcaggtctatgacctactagaaaaaggatatcgaatggaacagcctgagggatgcccccctaaggtttatgaacttatgagagcatgctggaagtggagccctgccgataggccctcttttgctgaaacacaccaagcttttgaaaccatgttccatgactccagcatttctgaagaggtagctgaggagcttgggagagccgcctcctcgtcatctgttgttccatacctgccccggctacctatacttccttccaagactcggacactgaagaaacaggtggagaacaaggagaacattgaaggggcacaagatgccacagaaaattctgcttccagtttagcaccagggttcatcagaggtgcacaggcctctagtggatccccagcactgcctcgaaagcaaagagacaagtcacccagcagcctcttggaagatgccaaagagacatgcttcaccagggataggaaggggggcttcttcagctccttcatgaagaagagaaatgctcctacaccccccaaacgcagcagctccttccgagaaatggagaatcagccccataagaaatacgaactcacgggtaacttctcatctgttgcttctctacagcatgctgatgggttctctttcactcctgcccagcaagaggcgaatctggtgccacccaagtgctatggggggagctttgcacagaggaacctctgtaatgacgacggtggtgggggtgggggcagtggcactgctgggggtgggtggtctggcatcacaggcttctttacaccacgcttaatcaaaaagacactgggcttacgagcaggtaaacccacagccagtgatgacacttccaagccttttccaaggtcaaactctacatcttccatgtcctcagggcttccagagcaggataggatggcaatgacccttcccaggaactgccagaggtccaaactccagctggaaaggacagtgtccacctcttctcagccagaagagaatgtggacagggccaatgacatgcttccaaaaaaatcagaggaaagtgctgctccaagcagggagagaccaaaagccaagttattgcccagaggagccacagctcttcctctcagaacaccctctggggatctagccattacagagaaggaccctccaggggtgggagtggctggagtggcagctgcccccaagggtaaagagaagaatggtggggcacgacttgggatggctggagttccagaggatggagagcagccgggctggccttctccagccaaggctgcccccgtcctcccaaccactcacaaccacaaagtgccagtccttatctcacccactctgaaacacactccagctgacgtgcagctcattggcacagactctcaggggaataaattcaagctcttatctgagcatcaggtcacatcctctggagacaaggaccgaccccgacgggtaaaaccaaagtgtgccccacccccaccaccagtgatgagactactgcagcatccgtccatctgctcagaccctacagaagagccaactgccctaactgcaggacagtccacatcagaaacacaggaaggaggaaagaaggcagctctgggcgcagtgcccatcagtgggaaagctgggaggccagtgatgcctccacctcaagtgcctctgcccacatcttccatctcgccagccaaaatggccaatggcacagcaggtactaaagtggctctgagaaaaaccaaacaggccgctgagaaaatctcagcagacaaaatcagcaaagaggccctgctggaatgtgctgacctactgtccagtgcactcacggaacctgtgcccaacagccagctggtagacactggacaccagctgcttgactactgctcaggctatgtggactgcatccctcaaactcgcaacaaatttgccttccgagaggctgtgagcaaactggaactcagcctgcaggagctacaggtttcttcagcagctgctggtgtgcccgggacaaaccctgtccttaataacttattgtcatgtgtacaggaaatcagtgatgtggtgcagaggtagccactgttagcctggtgggaaaatgcacacatttctgaggggagagggaaaaggacttgttttcctgtgttcttgttttcagaaaatgaaagactcatacttgagtgtgtttatgtgaa

SEQ ID NO: 450582 - DNA, 519 bp, Homo sapiens
tcacaaagacccaagcttcctccagcttccaggatagcagtcagccagctggaaaaaaaaaagggcactctcggacattaacccgcattctgtaccatggggcgcaagttggaccctacgaaggagaagcgggggccaggccgaaaggcccggaagcagaagggtgccgagacagaactcgtcagattcttgcctgcagtaagtgacgaaaattccaagaggctgtctagtcgtgctcgaaagagggcagccaagaggagattgggctctgttgaagcccctaagacaaataagtctcctgaggccaaaccattgcctggaaagctaccaaaaggtccgtgaaactaagagctgtccaggggcaacagccagctgctgctatcttagatggttgaaaactagacgggtggctcactgccattgtcaccaggttggaactcttgcctctgtgaggatgccttctctactgtgcatacccatgaaatttaatacacattttaaaacctctgaaaaaaaaaa

SEQ ID NO: 450583 - DNA, 2717 bp, Homo sapiens
aggaagaggcggggccgcgaggctagcgctacccgtgcgcctgcgtggaacgattctgtggcgagtgccggccgaaagctaggtccggattgcacgtggagggccgcccgaagggcactctcggacattaacccgcattctgtaccatggggcgcaagttggaccctacgaaggagaagcgggggccaggccgaaaggcccggaagcagaagggtgccgagacagaactcgtcagattcttgcctgcagtaagtgacgaaaattccaagaggctgtctagtcgtgctcgaaagagggcagccaagaggagattgggctctgttgaagcccctaagacaaataagtctcctgaggccaaaccattgcctggaaagctaccaaaagggatctctgcaggagctgtccagacagctggtaagaagggaccccagtccctatttaatgctcctcgaggcaagaagcgcccagcacctggcagtgatgaggaagaggaggaggaagactctgaagaagatggtatggtgaaccacggggacctctggggctccgaggacgatgctgatacggtagatgactatggagctgactccaactctgaggatgaggaggaaggtgaagcgttgctgcccattgaaagagctgctcggaagcagaaggcccgggaagctgctgctgggatccagtggagtgaagaggagaccgaggacgaggaggaagagaaagaagtgacccctgagtcaggccccccaaaggtggaagaggcagatgggggcctgcagatcaatgtggatgaggaaccatttgtgctgccccctgctggggagatggagcaggatgcccaggctccagacctgcaacgagttcacaagcggatccaggatattgtgggaattctgcgtgattttggggctcagcgggaggaagggcggtctcgttctgaatacctgaaccggctcaagaaggatctggccatttactactcctatggagacttcctgcttggcaagctcatggacctcttccctctgtctgagctggtggagttcttagaagctaatgaggtgcctcggcccgtcaccctccggaccaataccttgaaaacccgacgccgagaccttgcacaggctctaatcaatcgtggggttaacctggatcccctgggcaagtggtcaaagactggactagtggtgtatgattcttctgtgcccattggtgctacccccgagtacctggctgggcactacatgctgcagggagcctccagcatgttgcccgtcatggccttggcaccccaggaacatgagcggatcctggacatgtgttgtgcccctggaggaaagaccagctacatggcccagctgatgaagaacacgggtgtgatccttgccaatgacgccaatgctgagcggctcaagagtgttgtgggcaacttgcatcggctgggagtcaccaacaccattatcagccactatgatgggcgccagttccccaaggtggtggggggctttgaccgagtactgctggatgctccctgcagtggcactggggtcatctccaaggatccagccgtgaagactaacaaggatgagaaggacatcctgcgctgtgctcacctccagaaggagttgctcctgagtgctattgactctgtcaatgcgacctccaagacaggaggctacctggtttactgcacctgttctatcacagtagaagagaatgagtgggtggtagactatgctctgaaaaagaggaatgtgcgactggtgcccacgggcctagactttggccaggaaggttttacccgctttcgagaaaggcgcttccaccccagtctgcgttctacccgacgcttctaccctcatacccacaatatggatgggttcttcattgccaagttcaagaaattttccaattctatccctcagtcccagacaggaaattctgaaacagccacacctacaaatgtagacttgcctcaggtcatccccaagtctgagaacagcagccagccagccaagaaagccaagggggctgcaaagacaaagcagcagctgcagaaacagcaacatcccaagaaggcctccttccagaagctgaatggcatctccaaaggggcagactcagaattgtccactgtaccttctgtcacaaagacccaagcttcctccagcttccaggatagcagtcagccagctggaaaagccgaagggatcagggagccaaaggtgactgggaagctaaagcaacgatcacctaaattacagtcctccaagaaagttgctttcctcaggcagaatgcccctcccaagggcacagacacacaaacaccggctgtgttatccccatccaagactcaggccaccctgaaacctaaggaccatcatcagccccttggaagggccaagggggttgagaagcagcagttgccagagcagccttttgagaaagctgccttccagaaacagaatgatacccccaaggggcctcagcctcccactgtgtctcccatccgttccagccgccccccaccagcaaagaggaagaaatctcagtccaggggcaacagccagctgctgctatcttagatggttgaaaactagacgggtggctcactgccattgtcaccaggttggaactcttgcctctgtgaggatgccttctctactgtgcatacccatgaaatttaatacacattttaaaacctctgaaaaaaaaaa

SEQ ID NO: 450584 - DNA, 2816 bp, Homo sapiens
aggaagaggcggggccgcgaggctagcgctacccgtgcgcctgcgtggaacgattctgtggcgagtgccggccgaaagctaggtccggattgcacgtggagggccgcccgaagggcactctcggacattaacccgcattctgtaccatggggcgcaagttggaccctacgaaggagaagcgggggccaggccgaaaggcccggaagcagaagggtgccgagacagaactcgtcagattcttgcctgcagtaagtgacgaaaattccaagaggctgtctagtcgtgctcgaaagagggcagccaagaggagattgggctctgttgaagcccctaagacaaataagtctcctgaggccaaaccattgcctggaaagctaccaaaagggatctctgcaggagctgtccagacagctggtaagaagggaccccagtccctatttaatgctcctcgaggcaagaagcgcccagcacctggcagtgatgaggaagaggaggaggaagactctgaagaagatggtatggtgaaccacggggacctctggggctccgaggacgatgctgatacggtagatgactatggagctgactccaactctgaggatgaggaggaaggtgaagcgttgctgcccattgaaagagctgctcggaagcagaaggcccgggaagctgctgctgggatccagtggagtgaagaggagaccgaggacgaggaggaagagaaagaagtgacccctgagtcaggccccccaaaggtggaagaggcagatgggggcctgcagatcaatgtggatgaggaaccatttgtgctgccccctgctggggagatggagcaggatatccttgcagggcagagtgaagagttaggaggaaggtggttgggagagggatttccaggccttaggacatcatgacacagttccttaacaggcccacatgcccaggctccagacctgcaacgagttcacaagcggatccaggatattgtgggaattctgcgtgattttggggctcagcgggaggaagggcggtctcgttctgaatacctgaaccggctcaagaaggatctggccatttactactcctatggagacttcctgcttggcaagctcatggacctcttccctctgtctgagctggtggagttcttagaagctaatgaggtgcctcggcccgtcaccctccggaccaataccttgaaaacccgacgccgagaccttgcacaggctctaatcaatcgtggggttaacctggatcccctgggcaagtggtcaaagactggactagtggtgtatgattcttctgtgcccattggtgctacccccgagtacctggctgggcactacatgctgcagggagcctccagcatgttgcccgtcatggccttggcaccccaggaacatgagcggatcctggacatgtgttgtgcccctggaggaaagaccagctacatggcccagctgatgaagaacacgggtgtgatccttgccaatgacgccaatgctgagcggctcaagagtgttgtgggcaacttgcatcggctgggagtcaccaacaccattatcagccactatgatgggcgccagttccccaaggtggtggggggctttgaccgagtactgctggatgctccctgcagtggcactggggtcatctccaaggatccagccgtgaagactaacaaggatgagaaggacatcctgcgctgtgctcacctccagaaggagttgctcctgagtgctattgactctgtcaatgcgacctccaagacaggaggctacctggtttactgcacctgttctatcacagtagaagagaatgagtgggtggtagactatgctctgaaaaagaggaatgtgcgactggtgcccacgggcctagactttggccaggaaggttttacccgctttcgagaaaggcgcttccaccccagtctgcgttctacccgacgcttctaccctcatacccacaatatggatgggttcttcattgccaagttcaagaaattttccaattctatccctcagtcccagacaggaaattctgaaacagccacacctacaaatgtagacttgcctcaggtcatccccaagtctgagaacagcagccagccagccaagaaagccaagggggctgcaaagacaaagcagcagctgcagaaacagcaacatcccaagaaggcctccttccagaagctgaatggcatctccaaaggggcagactcagaattgtccactgtaccttctgtcacaaagacccaagcttcctccagcttccaggatagcagtcagccagctggaaaagccgaagggatcagggagccaaaggtgactgggaagctaaagcaacgatcacctaaattacagtcctccaagaaagttgctttcctcaggcagaatgcccctcccaagggcacagacacacaaacaccggctgtgttatccccatccaagactcaggccaccctgaaacctaaggaccatcatcagccccttggaagggccaagggggttgagaagcagcagttgccagagcagccttttgagaaagctgccttccagaaacagaatgatacccccaaggggcctcagcctcccactgtgtctcccatccgttccagccgccccccaccagcaaagaggaagaaatctcagtccaggggcaacagccagctgctgctatcttagatggttgaaaactagacgggtggctcactgccattgtcaccaggttggaactcttgcctctgtgaggatgccttctctactgtgcatacccatgaaatttaatacacattttaaaacctctgaaaaaaaaaa

SEQ ID NO: 450585 - DNA, 2965 bp, Homo sapiens
aggaagaggcggggccgcgaggctagcgctacccgtgcgcctgcgtggaacgattctgtggcgagtgccggccgaaagctaggtccggattgcacgtggagggccgcccgaagggcactctcggacattaacccgcattctgtaccatggggcgcaagttggaccctacgaaggagaagcgggggccaggccgaaaggcccggaagcagaagggtgccgagacagaactcgtcagattcttgcctgcagtaagtgacgaaaattccaagaggctgtctagtcgtgctcgaaagagggcagccaagaggagattgggctctgttgaagcccctaagacaaataagtctcctgaggccaaaccattgcctggaaagctaccaaaagggatctctgcaggagctgtccagacagctggtaagaagggaccccagtccctatttaatgctcctcgaggcaagaagcgcccagcacctggcagtgatgaggaagaggaggaggaagactctgaagaagatggtatggtgaaccacggggacctctggggctccgaggacgatgctgatacggtagatgactatggagctgactccaactctgaggatgaggaggaaggtgaagcgttgctgcccattgaaagagctgctcggaagcagaaggcccgggaagctgctgctgggatccagtggagtgaagaggagaccgaggacgaggaggaagagaaagaagtgacccctgagtcaggccccccaaaggtggaagaggcagatgggggcctgcagatcaatgtggatgaggaaccatttgtgctgccccctgctggggagatggagcaggatgcccaggctccagacctgcaacgagttcacaagcggatccaggatattgtgggaattctgcgtgattttggggctcagcgggaggaagggcggtctcgttctgaatacctgaaccggctcaagaaggatctggccatttactactcctatggagacttcctgcttggcaagctcatggacctcttccctctgtctgagctggtggagttcttagaagctaatgaggtgcctcggcccgtcaccctccggaccaataccttgaaaacccgacgccgagaccttgcacaggctctaatcaatcgtggggttaacctggatcccctgggcaagtggtcaaagactggactagtggtgtatgattcttctgtgcccattggtgctacccccgagtacctggctgggcactacatgctgcagggagcctccagcatgttgcccgtcatggccttggcaccccaggaacatgagcggatcctggacatgtgttgtgcccctggaggaaagaccagctacatggcccagctgatgaagaacacgggtgtgatccttgccaatgacgccaatgctgagcggctcaagagtgttgtgggcaacttgcatcggctgggagtcaccaacaccattatcagccactatgatgggcgccagttccccaaggtggtggggggctttgaccgagtactgctggatgctccctgcagtggcactggggtcatctccaaggatccagccgtgaagactaacaaggtgaggagtcaggtggtgggcccctgagaggccttggctgggtctcgtagagctggaaactgagatggggacaccctctgggctcccctctcctcctgaggctgcctttgggtctctttttgggacaggatgagaaggacatcctgcgctgtgctcacctccagaaggagttgctcctgagtgctattgactctgtcaatgcgacctccaagacaggaggctacctggtttactgcacctgttctatcacagtgagacctctgccatggcagagcaggggaggctgggctggggggctctttgccccttagagctcccttcagctccagctctgctttttcctccgttctttgtcttccccccacatccaggtagaagagaatgagtgggtggtagactatgctctgaaaaagaggaatgtgcgactggtgcccacgggcctagactttggccaggaaggttttacccgctttcgagaaaggcgcttccaccccagtctgcgttctacccgacgcttctaccctcatacccacaatatggatgggttcttcattgccaagttcaagaaattttccaattctatccctcagtcccagacaggaaattctgaaacagccacacctacaaatgtagacttgcctcaggtcatccccaagtctgagaacagcagccagccagccaagaaagccaagggggctgcaaagacaaagcagcagctgcagaaacagcaacatcccaagaaggcctccttccagaagctgaatggcatctccaaaggggcagactcagaattgtccactgtaccttctgtcacaaagacccaagcttcctccagcttccaggatagcagtcagccagctggaaaagccgaagggatcagggagccaaaggtgactgggaagctaaagcaacgatcacctaaattacagtcctccaagaaagttgctttcctcaggcagaatgcccctcccaagggcacagacacacaaacaccggctgtgttatccccatccaagactcaggccaccctgaaacctaaggaccatcatcagccccttggaagggccaagggggttgagaagcagcagttgccagagcagccttttgagaaagctgccttccagaaacagaatgatacccccaaggggcctcagcctcccactgtgtctcccatccgttccagccgccccccaccagcaaagaggaagaaatctcagtccaggggcaacagccagctgctgctatcttagatggttgaaaactagacgggtggctcactgccattgtcaccaggttggaactcttgcctctgtgaggatgccttctctactgtgcatacccatgaaatttaatacacattttaaaacctctgaaaaaaaaaa

SEQ ID NO: 450586 - DNA, 1429 bp, Homo sapiens
aggaagaggcggggccgcgaggctagcgctacccgtgcgcctgcgtggaacgattctgtggcgagtgccggccgaaagctaggtccggattgcacgtggagggccgcccgaagggcactctcggacattaacccgcattctgtaccatggggcgcaagttggaccctacgaaggagaagcgggggccaggccgaaaggcccggaagcagaagggtgccgagacagaactcgtcagattcttgcctgcagtggcactggggtcatctccaaggatccagccgtgaagactaacaaggatgagaaggacatcctgcgctgtgctcacctccagaaggagttgctcctgagtgctattgactctgtcaatgcgacctccaagacaggaggctacctggtttactgcacctgttctatcacagtagaagagaatgagtgggtggtagactatgctctgaaaaagaggaatgtgcgactggtgcccacgggcctagactttggccaggaaggttttacccgctttcgagaaaggcgcttccaccccagtctgcgttctacccgacgcttctaccctcatacccacaatatggatgggttcttcattgccaagttcaagaaattttccaattctatccctcagtcccagacaggaaattctgaaacagccacacctacaaatgtagacttgcctcaggtcatccccaagtctgagaacagcagccagccagccaagaaagccaagggggctgcaaagacaaagcagcagctgcagaaacagcaacatcccaagaaggcctccttccagaagctgaatggcatctccaaaggggcagactcagaattgtccactgtaccttctgtcacaaagacccaagcttcctccagcttccaggatagcagtcagccagctggaaaagccgaagggatcagggagccaaaggtgactgggaagctaaagcaacgatcacctaaattacagtcctccaagaaagttgctttcctcaggcagaatgcccctcccaagggcacagacacacaaacaccggctgtgttatccccatccaagactcaggccaccctgaaacctaaggaccatcatcagccccttggaagggccaagggggttgagaagcagcagttgccagagcagccttttgagaaagctgccttccagaaacagaatgatacccccaaggggcctcagcctcccactgtgtctcccatccgttccagccgccccccaccagcaaagaggaagaaatctcagtccaggggcaacagccagctgctgctatcttagatggttgaaaactagacgggtggctcactgccattgtcaccaggttggaactcttgcctctgtgaggatgccttctctactgtgcatacccatgaaatttaatacacattttaaaacctctgaaaaaaaaaa

SEQ ID NO: 450587 - DNA, 2252 bp, Homo sapiens
aggaagaggcggggccgcgaggctagcgctacccgtgcgcctgcgtggaacgattctgtggcgagtgccggccgaaagctaggtccggattgcacgtggagggccgcccgaagggcactctcggacattaacccgcattctgtaccatggggcgcaagttggaccctacgaaggagaagcgggggccaggccgaaaggcccggaagcagaagggtgccgagacagaactcgtcagattcttgcctgcagtaagtgacgaaaattccaagaggctgtctagtcgtgctcgaaagagggcagccaagaggagattgggctctgttgaagcccctaagacaaataagtctcctgaggccaaaccattgcctggaaagctaccaaaagggatctctgcaggagctgtccagacagctggtaagaagggaccccagtccctatttaatgctcctcgaggcaagaagcgcccagcacctggcagtgatgaggaagaggaggaggaagactctgaagaagatggtatggtgaaccacggggacctctggggctccgaggacgatgctgatacggtagatgactatggagctgactccaactctgaggatgaggaggaaggtgaagcgttgctgcccattgaaagagctgctcggaagcagaaggcccgggaagctgctgctgggatccagtggagtgaagaggagaccgaggacgaggaggaagagaaagaagtgacccctgagtcaggccccccaaaggtggaagaggcagatgggggcctgcagatcaatgtggatgaggaaccatttgtgctgccccctgctggggagatggagcaggatgcccaggctccagacctgcaacgagttcacaagcggatccaggatattgtgggaattctgcgtgattttggggctcagcgggaggaagggcggtctcgttctgaatacctgaaccggctcaagaaggatctggccatttactactcctatggagacttcctgcttggcaagctcatggacctcttccctctgtctgagctggtggagttcttagaagctaatgaggtgcctcggcccgtcaccctccggaccaataccttgaaaacccgacgccgagaccttgcacaggctctaatcaatcgtggggttaacctggatcccctgggcaagtggtcaaagactggactagtggtgtatgattcttctgtgcccattggtgctacccccgagtacctggctgggcactacatgctgcagggagcctccagcatgttgcccgtcatggccttggcaccccaggaacatgagcggatcctggacatgtgttgtgcccctggaggaaagaccagctacatggcccagctgatgaagaacacgggtgtgatccttgccaatgacgccaatgctgagcggctcaagagtgttgtgggcaacttgcatcggctgggagtcaccaacaccattatcagccactatgatgggcgccagttccccaaggtggtggggggctttgaccgagtactgctggatgctccctgcagtggcactggggtcatctccaaggatccagccgtgaagactaacaaggatgagaaggacatcctgcgctgtgctcacctccagaaggagttgctcctgagtgctattgactctgtcaatgcgacctccaagacaggaggctacctggtttactgcacctgttctatcacagtagaagagaatgagtgggtggtagactatgctctgaaaaagaggaatgtgcgactggtgcccacgggcctagactttggccaggaaggttttacccgctttcgagaaaggcgcttccaccccagtctgcgttctacccgacgcttctaccctcatacccacaatatggatgggttcttcattgccaagttcaagaaattttccaattctatccctcagtcccagacaggaaattctgaaacagccacacctacaaatgtagacttgcctcaggtcatccccaagtctgagaacagcagccagccagccaagaaagccaagggggctgcaaagacaaagcagcagctgcagaaacagcaacatcccaagaaggcctccttccagaagctgaatggcatctccaaaggggcagactcagaattgtccactgtaccttctgtcacgccattgtcaccaggttggaactcttgcctctgtgaggatgccttctctactgtgcatacccatgaaatttaatacacattttaaaacctctgaaaaaaaaaa

SEQ ID NO: 450588 - DNA, 568 bp, Homo sapiens
aggaagaggcggggccgcgaggctagcgctacccgtgcgcctgcgtggaacgattctgtggcgagtgccggccgaaagctaggtccggattgcacgtggagggccgcccgaagggcactctcggacattaacccgcattctgtaccatggggcgcaagttggaccctacgaaggagaagcgggggccaggccgaaaggcccggaagcagaagggtgccgagacagaactcgtcagattcttgcctgcagtaagtgacgaaaattccaagaggctgtctagtcgtgctcgaaagagggcagccaagaggagattgggctctgttgaagcccctaagacaaataagtctcctgaggccaaaccattgcctggaaagctaccaaaagggatctctgcaggagctgtccagacagctggtaagaagggaccccagtccctatttaatgctcctcgaggcaagaagcgccgccattgtcaccaggttggaactcttgcctctgtgaggatgccttctctactgtgcatacccatgaaatttaatacacattttaaaacctctgaaaaaaaaaa

SEQ ID NO: 450589 - DNA, 147 bp, Homo sapiens
ttcttccggttgaccttctcccttcctgacctcaatgtttagactcgaccctagtaaatattgccctgctggttgcagaagagacatatgattcatctgtatcttttctccaggtggtggggggctttgaccgagtactgctggatg

SEQ ID NO: 450590 - DNA, 431 bp, Homo sapiens
aaataagtctcctgaggccaaaccattgcctggaaagctaccaaaaggtccgtgaaactaagagctggatgctacatgaggagtccctttgggtcctgggtagggaagaactcgctaaacatttccggagtgaaaggaacagccaaaggacattctgaggggtagaaagtacaggctcccagggtgtggggccagggaatgtgtggctgccattagtccaggactcttcaaacccttagggatctctgcaggagctgtccagacagctggtaagaagggaccccagtccctatttaatgctcctcgaggcaagaagcgcccagcacctggcagtgatgaggaagaggaggaggaagactctgaagaagatggtatggtgaaccacggggacctctggggctccgaggacgatgctgatacggtagatgact

SEQ ID NO: 450591 - DNA, 2615 bp, Homo sapiens
cacgcgcgacgccaccttctcccatttctgcctgccacagtaccatggggcgcaagttggaccctacgaaggagaagcgggggccaggccgaaaggcccggaagcagaagggtgccgagacagaactcgtcagattcttgcctgcagtaagtgacgaaaattccaagaggctgtctagtcgtgctcgaaagagggcagccaagaggagattgggctctgttgaagcccctaagacaaataagtctcctgaggccaaaccattgcctggaaagctaccaaaagggatctctgcaggagctgtccagacagctggtaagaagggaccccagtccctatttaatgctcctcgaggcaagaagcgcccagcacctggcagtgatgaggaagaggaggaggaagactctgaagaagatggtatggtgaaccacggggacctctggggctccgaggacgatgctgatacggtagatgactatggagctgactccaactctgaggatgaggaggaaggtgaagcgttgctgcccattgaaagagctgctcggaagcagaaggcccgggaagctgctgctgggatccagtggagtgaagaggagaccgaggacgaggaggaagagaaagaagtgacccctgagtcaggccccccaaaggtggaagaggcagatgggggcctgcagatcaatgtggatgaggaaccatttgtgctgccccctgctggggagatggagcaggatgcccaggctccagacctgcaacgagttcacaagcggatccaggatattgtgggaattctgcgtgattttggggctcagcgggaggaagggcggtctcgttctgaatacctgaaccggctcaagaaggatctggccatttactactcctatggagacttcctgcttggcaagctcatggacctcttccctctgtctgagctggtggagttcttagaagctaatgaggtgcctcggcccgtcaccctccggaccaataccttgaaaacccgacgccgagaccttgcacaggctctaatcaatcgtggggttaacctggatcccctgggcaagtggtcaaagactggactagtggtgtatgattcttctgtgcccattggtgctacccccgagtacctggctgggcactacatgctgcagggagcctccagcatgttgcccgtcatggccttggcaccccaggaacatgagcggatcctggacatgtgttgtgcccctggaggaaagaccagctacatggcccagctgatgaagaacacgggtgtgatccttgccaatgacgccaatgctgagcggctcaagagtgttgtgggcaacttgcatcggctgggagtcaccaacaccattatcagccactatgatgggcgccagttccccaaggtggtggggggctttgaccgagtactgctggatgctccctgcagtggcactggggtcatctccaaggatccagccgtgaagactaacaaggatgagaaggacatcctgcgctgtgctcacctccagaaggagttgctcctgagtgctattgactctgtcaatgcgacctccaagacaggaggctacctggtttactgcacctgttctatcacagtagaagagaatgagtgggtggtagactatgctctgaaaaagaggaatgtgcgactggtgcccacgggcctagactttggccaggaaggttttacccgctttcgagaaaggcgcttccaccccagtctgcgttctacccgacgcttctaccctcatacccacaatatggatgggttcttcattgccaagttcaagaaattttccaattctatccctcagtcccagacaggaaattctgaaacagccacacctacaaatgtagacttgcctcaggtcatccccaagtctgagaacagcagccagccagccaagaaagccaagggggctgcaaagacaaagcagcagctgcagaaacagcaacatcccaagaaggcctccttccagaagctgaatggcatctccaaaggggcagactcagaattgtccactgtaccttctgtcacaaagacccaagcttcctccagcttccaggatagcagtcagccagctggaaaagccgaagggatcagggagccaaaggtgactgggaagctaaagcaacgatcacctaaattacagtcctccaagaaagttgctttcctcaggcagaatgcccctcccaagggcacagacacacaaacaccggctgtgttatccccatccaagactcaggccaccctgaaacctaaggaccatcatcagccccttggaagggccaagggggttgagaagcagcagttgccagagcagccttttgagaaagctgccttccagaaacagaatgatacccccaaggggcctcagcctcccactgtgtctcccatccgttccagccgccccccaccagcaaagaggaagaaatctcagtccaggggcaacagccagctgctgctatcttagatggttgaaaactagacgggtggctcactgccattgtcaccaggttggaactcttgcctctgtgaggatgccttctctactgtgcatacccatgaaatttaatacacattttaaaacctctgaaaaaaaaaa

SEQ ID NO: 450592 - DNA, 2785 bp, Homo sapiens
aggaagaggcggggccgcgaggctagcgctacccgtgcgcctgcgtggaacgattctgtggcgagtgccggccgaaagctaggtccggattgcacgtggagggccgcccgaagggcactctcggacattaacccgcattctggtgggtctagaggaaattgggggacgaagagtggcagcactgacctggtctgggacgtggggagaaggtaccatggggcgcaagttggaccctacgaaggagaagcgggggccaggccgaaaggcccggaagcagaagggtgccgagacagaactcgtcagattcttgcctgcagtaagtgacgaaaattccaagaggctgtctagtcgtgctcgaaagagggcagccaagaggagattgggctctgttgaagcccctaagacaaataagtctcctgaggccaaaccattgcctggaaagctaccaaaagggatctctgcaggagctgtccagacagctggtaagaagggaccccagtccctatttaatgctcctcgaggcaagaagcgcccagcacctggcagtgatgaggaagaggaggaggaagactctgaagaagatggtatggtgaaccacggggacctctggggctccgaggacgatgctgatacggtagatgactatggagctgactccaactctgaggatgaggaggaaggtgaagcgttgctgcccattgaaagagctgctcggaagcagaaggcccgggaagctgctgctgggatccagtggagtgaagaggagaccgaggacgaggaggaagagaaagaagtgacccctgagtcaggccccccaaaggtggaagaggcagatgggggcctgcagatcaatgtggatgaggaaccatttgtgctgccccctgctggggagatggagcaggatgcccaggctccagacctgcaacgagttcacaagcggatccaggatattgtgggaattctgcgtgattttggggctcagcgggaggaagggcggtctcgttctgaatacctgaaccggctcaagaaggatctggccatttactactcctatggagacttcctgcttggcaagctcatggacctcttccctctgtctgagctggtggagttcttagaagctaatgaggtgcctcggcccgtcaccctccggaccaataccttgaaaacccgacgccgagaccttgcacaggctctaatcaatcgtggggttaacctggatcccctgggcaagtggtcaaagactggactagtggtgtatgattcttctgtgcccattggtgctacccccgagtacctggctgggcactacatgctgcagggagcctccagcatgttgcccgtcatggccttggcaccccaggaacatgagcggatcctggacatgtgttgtgcccctggaggaaagaccagctacatggcccagctgatgaagaacacgggtgtgatccttgccaatgacgccaatgctgagcggctcaagagtgttgtgggcaacttgcatcggctgggagtcaccaacaccattatcagccactatgatgggcgccagttccccaaggtggtggggggctttgaccgagtactgctggatgctccctgcagtggcactggggtcatctccaaggatccagccgtgaagactaacaaggatgagaaggacatcctgcgctgtgctcacctccagaaggagttgctcctgagtgctattgactctgtcaatgcgacctccaagacaggaggctacctggtttactgcacctgttctatcacagtagaagagaatgagtgggtggtagactatgctctgaaaaagaggaatgtgcgactggtgcccacgggcctagactttggccaggaaggttttacccgctttcgagaaaggcgcttccaccccagtctgcgttctacccgacgcttctaccctcatacccacaatatggatgggttcttcattgccaagttcaagaaattttccaattctatccctcagtcccagacaggaaattctgaaacagccacacctacaaatgtagacttgcctcaggtcatccccaagtctgagaacagcagccagccagccaagaaagccaagggggctgcaaagacaaagcagcagctgcagaaacagcaacatcccaagaaggcctccttccagaagctgaatggcatctccaaaggggcagactcagaattgtccactgtaccttctgtcacaaagacccaagcttcctccagcttccaggatagcagtcagccagctggaaaagccgaagggatcagggagccaaaggtgactgggaagctaaagcaacgatcacctaaattacagtcctccaagaaagttgctttcctcaggcagaatgcccctcccaagggcacagacacacaaacaccggctgtgttatccccatccaagactcaggccaccctgaaacctaaggaccatcatcagccccttggaagggccaagggggttgagaagcagcagttgccagagcagccttttgagaaagctgccttccagaaacagaatgatacccccaaggggcctcagcctcccactgtgtctcccatccgttccagccgccccccaccagcaaagaggaagaaatctcagtccaggggcaacagccagctgctgctatcttagatggttgaaaactagacgggtggctcactgccattgtcaccaggttggaactcttgcctctgtgaggatgccttctctactgtgcatacccatgaaatttaatacacattttaaaacctctgaaaaaaaaaa

SEQ ID NO: 450593 - DNA, 2837 bp, Homo sapiens
aggaagaggcggggccgcgaggctagcgctacccgtgcgcctgcgtggaacgattctgtggcgagtgccggccgaaagctaggtccggattgcacgtggagggccgcccgaagggcactctcggacattaacccgcattctgtaccatggggcgcaagttggaccctacgaaggagaagcgggggccaggccgaaaggcccggaagcagaagggtgccgagacagaactcgtcagattcttgcctgcagtaagtgacgaaaattccaagaggctgtctagtcgtgctcgaaagagggcagccaagaggagattgggctctgttgaagcccctaagacaaataagtctcctgaggccaaaccattgcctggaaagctaccaaaagggatctctgcaggagctgtccagacagctggtaagaagggaccccagtccctatttaatgctcctcgaggcaagaagcgcccagcacctggcagtgatgaggaagaggaggaggaagactctgaagaagatggtatggtgaaccacggggacctctggggctccgaggacgatgctgatacggtagatgactatggagctgactccaactctgaggatgaggaggaaggtgaagcgttgctgcccattgaaagagctgctcggaagcagaaggcccgggaagctgctgctgggatccagtggagtgaagaggagaccgaggacgaggaggaagagaaagaagtgacccctgagtcaggccccccaaaggtggaagaggcagatgggggcctgcagatcaatgtggatgaggaaccatttgtgctgccccctgctggggagatggagcaggatgcccaggctccagacctgcaacgagttcacaagcggatccaggatattgtgggaattctgcgtgattttggggctcagcgggaggaagggcggtctcgttctgaatacctgaaccggctcaagaaggatctggccatttactactcctatggagacttcctgcttggcaagctcatggacctcttccctctgtctgagctggtggagttcttagaagctaatgaggtgcctcggcccgtcaccctccggaccaataccttgaaaacccgacgccgagaccttgcacaggctctaatcaatcgtggggttaacctggatcccctgggcaagtggtcaaagactggactagtggtgtatgattcttctgtgcccattggtgctacccccgagtacctggctgggcactacatgctgcagggagcctccagcatgttgcccgtcatggccttggcaccccaggaacatgagcggatcctggacatgtgttgtgcccctggaggaaagaccagctacatggcccagctgatgaagaacacgggtgtgatccttgccaatgacgccaatgctgagcggctcaagagtgttgtgggcaacttgcatcggctgggagtcaccaacaccattatcagccactatgatgggcgccagttccccaaggtggtggggggctttgaccgagtactgctggatgctccctgcagtggcactggggtcatctccaaggatccagccgtgaagactaacaaggatgagaaggacatcctgcgctgtgctcacctccagaaggagttgctcctgagtgctattgactctgtcaatgcgacctccaagacaggaggctacctggtttactgcacctgttctatcacagtgagacctctgccatggcagagcaggggaggctgggctggggggctctttgccccttagagctcccttcagctccagctctgctttttcctccgttctttgtcttccccccacatccaggtagaagagaatgagtgggtggtagactatgctctgaaaaagaggaatgtgcgactggtgcccacgggcctagactttggccaggaaggttttacccgctttcgagaaaggcgcttccaccccagtctgcgttctacccgacgcttctaccctcatacccacaatatggatgggttcttcattgccaagttcaagaaattttccaattctatccctcagtcccagacaggaaattctgaaacagccacacctacaaatgtagacttgcctcaggtcatccccaagtctgagaacagcagccagccagccaagaaagccaagggggctgcaaagacaaagcagcagctgcagaaacagcaacatcccaagaaggcctccttccagaagctgaatggcatctccaaaggggcagactcagaattgtccactgtaccttctgtcacaaagacccaagcttcctccagcttccaggatagcagtcagccagctggaaaagccgaagggatcagggagccaaaggtgactgggaagctaaagcaacgatcacctaaattacagtcctccaagaaagttgctttcctcaggcagaatgcccctcccaagggcacagacacacaaacaccggctgtgttatccccatccaagactcaggccaccctgaaacctaaggaccatcatcagccccttggaagggccaagggggttgagaagcagcagttgccagagcagccttttgagaaagctgccttccagaaacagaatgatacccccaaggggcctcagcctcccactgtgtctcccatccgttccagccgccccccaccagcaaagaggaagaaatctcagtccaggggcaacagccagctgctgctatcttagatggttgaaaactagacgggtggctcactgccattgtcaccaggttggaactcttgcctctgtgaggatgccttctctactgtgcatacccatgaaatttaatacacattttaaaacctctgaaaaaaaaaa

SEQ ID NO: 450594 - DNA, 2176 bp, Homo sapiens
agaaagtattagaggcgataccggtttgttatttacgtgagggggctggggtttgattgatattactgtgggttaggcgttgctgcccattgaaagagctgctcggaagcagaaggcccgggaagctgctgctgggatccagtggagtgaagaggagaccgaggacgaggaggaagagaaagaagtgacccctgagtcaggccccccaaaggtggaagaggcagatgggggcctgcagatcaatgtggatgaggaaccatttgtgctgccccctgctggggagatggagcaggatgcccaggctccagacctgcaacgagttcacaagcggatccaggatattgtgggaattctgcgtgattttggggctcagcgggaggaagggcggtctcgttctgaatacctgaaccggctcaagaaggatctggccatttactactcctatggagacttcctgcttggcaagctcatggacctcttccctctgtctgagctggtggagttcttagaagctaatgaggtgcctcggcccgtcaccctccggaccaataccttgaaaacccgacgccgagaccttgcacaggctctaatcaatcgtggggttaacctggatcccctgggcaagtggtcaaagactggactagtggtgtatgattcttctgtgcccattggtgctacccccgagtacctggctgggcactacatgctgcagggagcctccagcatgttgcccgtcatggccttggcaccccaggaacatgagcggatcctggacatgtgttgtgcccctggaggaaagaccagctacatggcccagctgatgaagaacacgggtgtgatccttgccaatgacgccaatgctgagcggctcaagagtgttgtgggcaacttgcatcggctgggagtcaccaacaccattatcagccactatgatgggcgccagttccccaaggtggtggggggctttgaccgagtactgctggatgctccctgcagtggcactggggtcatctccaaggatccagccgtgaagactaacaaggatgagaaggacatcctgcgctgtgctcacctccagaaggagttgctcctgagtgctattgactctgtcaatgcgacctccaagacaggaggctacctggtttactgcacctgttctatcacagtagaagagaatgagtgggtggtagactatgctctgaaaaagaggaatgtgcgactggtgcccacgggcctagactttggccaggaaggttttacccgctttcgagaaaggcgcttccaccccagtctgcgttctacccgacgcttctaccctcatacccacaatatggatgggttcttcattgccaagttcaagaaattttccaattctatccctcagtcccagacaggaaattctgaaacagccacacctacaaatgtagacttgcctcaggtcatccccaagtctgagaacagcagccagccagccaagaaagccaagggggctgcaaagacaaagcagcagctgcagaaacagcaacatcccaagaaggcctccttccagaagctgaatggcatctccaaaggggcagactcagaattgtccactgtaccttctgtcacaaagacccaagcttcctccagcttccaggatagcagtcagccagctggaaaagccgaagggatcagggagccaaaggtgactgggaagctaaagcaacgatcacctaaattacagtcctccaagaaagttgctttcctcaggcagaatgcccctcccaagggcacagacacacaaacaccggctgtgttatccccatccaagactcaggccaccctgaaacctaaggaccatcatcagccccttggaagggccaagggggttgagaagcagcagttgccagagcagccttttgagaaagctgccttccagaaacagaatgatacccccaaggggcctcagcctcccactgtgtctcccatccgttccagccgccccccaccagcaaagaggaagaaatctcagtccaggggcaacagccagctgctgctatcttagatggttgaaaactagacgggtggctcactgccattgtcaccaggttggaactcttgcctctgtgaggatgccttctctactgtgcatacccatgaaatttaatacacattttaaaacctctgaaaaaaaaaa

SEQ ID NO: 450595 - DNA, 854 bp, Homo sapiens
aggaagaggcggggccgcgaggctagcgctacccgtgcgcctgcgtggaacgattctgtggcgagtgccggccgaaagctaggtccggattgcacgtggagggccgcccgaagggcactctcggacattaacccgcattctgtaccatggggcgcaagttggaccctacgaaggagaagcgggggccaggccgaaaggcccggaagcagaagggtgccgagacagaactcgtcagattcttgcctgcagtaagtgacgaaaattccaagaggctgtctagtcgtgctcgaaagagggcagccaagaggagattgggctctgttgaagcccctaagacaaataagtctcctgaggccaaaccattgcctggaaagctaccaaaagggatctctgcaggagctgtccagacagctggtaagaagggaccccagtccctatttaatgctcctcgaggcaagaagcgcccagcacctggcagtgatgaggaagaggaggaggaagactctgaagaagatggtatggtgaaccacggggacctctggggctccgaggacgatgctgatacggtagatgactatggagctgactccaactctgaggatgaggaggaaggtgaagcgttgctgcccattgaaagagctgctcggaagcagaaggcccgggaagctgctgctgggatccagtggagtgaagaggagaccgaggacgaggaggaagagaaagaagtgacccctgagtcaggccccccaaaggtggaagaggcagatgggggcctgcagatcaatgtggatggacgagctcccctggatggacgagctcccctggatggacgagctcccctggatggacgagct

SEQ ID NO: 450596 - DNA, 522 bp, Homo sapiens
aggaagaggcggggccgcgaggctagcgctacccgtgcgcctgcgtggaacgattctgtggcgagtgccggccgaaagctaggtccggattgcacgtggagggccgcccgaagggcactctcggacattaacccgcattctgtaccatggggcgcaagttggaccctacgaaggagaagcgggggccaggccgaaaggcccggaagcagaagggtgccgagacagaactcgtcagattcttgcctgcagtaagtgacgaaaattccaagaggctgtctagtcgtgctcgaaagagggcagccaagaggagattgggctctgttgaagcccctaagacaaataagtctcctgaggccaaaccattgcctggaaagctaccaaaagggatctctgcaggagctgtccagacagctggtaagaagggaccccagtccctatttaatgctcctctgtgaggatgccttctctactgtgcatacccatgaaatttaatacacattttaaaacctctgaaaaaaaaaa

SEQ ID NO: 450597 - DNA, 771 bp, Homo sapiens
  misc_feature (1)..(1): n is a, c, g, or t
  misc_feature (4)..(4): n is a, c, g, or t
  misc_feature (6)..(9): n is a, c, g, or t
ngcncnnnngttacagatacggaaacaggctcggaggtgcaatctctggctgtgtagacagaacagggagttggaacacggccttctgcgtttcctcactctcacataccagcgggcagggagagatccggggaggagttgcacttgcccccggcggaaatctccaaaaatctgcaaaaatgtattccctggtaccgctttgggctccggtgggaccaagcgaaattccgagaccgaaacggatgcgcgctgcggcccagggtgcgggtctggaccgcctcctccgtggtggacgaatccgaggagcaggactccccgcaacccagccccagccccagccccagccccgccgcgtccccagctgtcacgctgcgcgcagcgggtggggcctggggttcctggacagaggaggactacgcgtgtccttgggcggagaagggaggtgactccggcggaagaggacaaggcagaatgcaggcccttcgggtgtcccaggcgctgatccgctccttcagctccaccgcccggaaccgctttcagaaccgagtgcgcgagaaacagaagctcttccaggaggacaatgacatcccgttgtacctgaagggcggcatcgttgacaacatcctgtaccgagtgacaatgacgctgtgtctgggcggcactgtctacagcttgtactcccttggctgggcctccttccccaggaattaagaccaagaagcctggggggcctgagagacttgaacaagtgtcaataaacgctggcctctg

SEQ ID NO: 450598 - DNA, 894 bp, Homo sapiens
  misc_feature (1)..(1): n is a, c, g, or t
  misc_feature (4)..(4): n is a, c, g, or t
  misc_feature (6)..(9): n is a, c, g, or t
ngcncnnnngttacagatacggaaacaggctcggaggtgcaatctctggctgtgtagacagaacagggagttggaacacggccttctgcgtttcctcactctcacataccagcgggcagggagagatccggggaggagttgcacttgcccccggcggaaatctccaaaaatctgcaaaaatgtattccctggtaccgctttgggctccggtgggaccaagcgaaattccgagaccgaaacggatgcgcgctgcggcccagggtgcgggtctggaccgcctcctccgtggtggacgaatccgaggagcaggactccccgcaacccagccccagccccagccccagccccgccgcgtccccagctgtcacgctgcgcgcagcgggtggggcctggggttcctggacagaggaggactacgcgtgtccttgggcggagaagggaggtgactccggcggaagaggacaaggcagaatgcaggcccttcgggtgtcccaggcgctgatccgctccttcagctccaccgcccggaaccgctttcagaaccgagtgcgcgagaaacagaagctcttccaggtggggggggcggggggggtggggatccgacgcgccagccgggagcgcgccgagccggggcaggcggggcgcgctctaaggagcagccagcacccctttctcatcagacacccccacatccaggaggacaatgacatcccgttgtacctgaagggcggcatcgttgacaacatcctgtaccgagtgacaatgacgctgtgtctgggcggcactgtctacagcttgtactcccttggctgggcctccttccccaggaattaagaccaagaagcctggggggcctgagagacttgaacaagtgtcaataaacgctggcctctg

SEQ ID NO: 450599 - DNA, 1025 bp, Homo sapiens
  misc_feature (1)..(1): n is a, c, g, or t
  misc_feature (4)..(4): n is a, c, g, or t
  misc_feature (6)..(9): n is a, c, g, or t
ngcncnnnngttacagatacggaaacaggctcggaggtgcaatctctggctgtgtagacagaacagggagttggaacacggccttctgcgtttcctcactctcacataccagcgggcagggagagatccggggaggagttgcacttgcccccggcggaaatctccaaaaatctgcaaaaatgtattccctggtaccgctttgggctccggtgggaccaagcgaaattccgagaccgaaacggatgcgcgctgcggcccagggtgcgggtctggaccgcctcctccgtggtggacgaatccgaggagcaggactccccgcaacccagccccagccccagccccagccccgccgcgtccccagctgtcacgctgcgcgcagcgggtggggcctggggttcctggacagaggaggactacgcgtgtccttgggcggagaagggaggtgactccggcggaagaggacaaggcagaatgcaggcccttcgggtgtcccaggcgctgatccgctccttcagctccaccgcccggaaccgctttcagaaccgagtgcgcgagaaacagaagctcttccaggaggacaatgacatcccgttgtacctgaagggcggcatcgttgacaacatcctgtaccgagtgacaatgacgctgtgtctgggcggcactgtctacagcttgtactcccttggctgggcctccttccccaggaattaagaccaagaagcctggggggcctgagagacttgaacaagtgtcaataaacgctggcctctgaaaaaaaaaaaaaaaaaaaaaaaaaaaaaacacttgtgttgggcgggcgccctcggcccccgaaaaaagtttttaaaccccctcgtgtgtggggcgccggcgggccccattggtgttaggttgaaccctgtggcccaagaggggtcccagggaagaacccgggcccaggcactggggctcggggtttctcccccaaaaaaaaacgccgggggggacaccgccggcggttctggaaccaccccggatggggttgc

SEQ ID NO: 450600 - DNA, 752 bp, Homo sapiens
  misc_feature (1)..(1): n is a, c, g, or t
  misc_feature (4)..(4): n is a, c, g, or t
  misc_feature (6)..(9): n is a, c, g, or t
ngcncnnnngttacagatacggaaacaggctcggaggtgcaatctctggctgtgtagacagaacagggagttggaacacggccttctgcgtttcctcactctcacataccagcgggcagggagagatccggggaggagttgcacttgcccccggcggaaatctccaaaaatctgcaaaaatgtattccctggtaccgctttgggctccggtgggaccaagcgaaattccgagaccgaaacggatgcgcgctgcggcccagggtgcgggtctggaccgcctcctccgtggtggacgaatccgaggagcaggactccccgcaacccagccccagccccagccccagccccgccgcgtccccagctgtcacgctgcgcgcagcgggtggggcctggggttcctggacagaggaggactacgcgtgtccttgggcggagaagggaggtgactccggcggaagaggacaaggcagaatgcaggcccttcgggtgtcccaggcgctgatccgctccttcagctccaccgcccggaaccgctttcagaaccgagtgcgcgagaaacagaagctcttccaggaggacaatgacatcccgttgtacctgaagggcggcatcgttgacaacatcctgtaccgagtgacaatgacgctgtgtctgggcggcactgtctacagcttgtactcctttgctggcctacttcgcaagaattagacaagagactgcgagctaagatatatacagtctaataacgtggc

SEQ ID NO: 450601 - DNA, 271 bp, Homo sapiens
cagggggctttacaataggagtccaatctgggaagggagctggagtccgaactagagctggggtccaggctgggaaccagggagcctgaaggccttaaaagcctgggatgtccagggaggggattaggtctcattctgtctccaacgcttcccctttctaggcactgtctacagcttgtactcccttggctgggcctccttccccaggaactcccccaacaagattaggggttcttagggactttttttagtttcaataacagctatcacc

SEQ ID NO: 450602 - DNA, 407 bp, Homo sapiens
ttaggccccccagaacaaagtccttctgggtcctctcccttccgggaccctctaggcagcccggtcacccccaggccagactccagggcgagtcccctcccaacccagctggcagttcgcgggtgtcccaggcgctgatccgctccttcagctccaccgcccggaaccgctttcagaaccgagtgcgcgagaaacagaagctcttccaggaggacaatgacatcccgttgtacctgaagggcggcatcgttgacaacatcctgtaccgagtgacaatgacgctgtgtctgggcggcactgtctacagcttgtactcccttggctgggcctccttccccaggaattaagaccaagaagcctggggggcctgagagacttgaacaagtgtcaataaacgctggcctctg

SEQ ID NO: 450603 - DNA, 956 bp, Homo sapiens
  misc_feature (1)..(1): n is a, c, g, or t
  misc_feature (4)..(4): n is a, c, g, or t
  misc_feature (6)..(9): n is a, c, g, or t
ngcncnnnngttacagatacggaaacaggctcggaggtgcaatctctggctgtgtagacagaacagggagttggaacacggccttctgcgtttcctcactctcacataccagcgggcagggagagatccggggaggagttgcacttgcccccggcggaaatctccaaaaatctgcaaaaatgtattccctggtaccgctttgggctccggtgggaccaagcgaaattccgagaccgaaacggatgcgcgctgcggcccagggtgcgggtctggaccgcctcctccgtggtggacgaatccgaggagcaggactccccgcaacccagccccagccccagccccagccccgccgcgtccccagctgtcacgctgcgcgcagcgggtggggcctggggttcctggacagaggaggactacgcgtgtccttgggcggagaagggaggtgactccggcggaagaggacaaggcagaatgcaggcccttcgggtgtcccaggcgctgatccgctccttcagctccaccgcccggaaccgctttcagaaccgagtgcgcgagaaacagaagctcttccaggaggacaatgacatcccgttgtacctgaagggcggcatcgttgacaacatcctgtaccgagtgacaatgacgctgtgtctgggcggcactgtctacagcttgtactcccaggagaaactggagcaggccgagaagaaggccactgatgctgaaggcagatgtggcctccctgaaccggcgcattcagcttggttgagggaggagctggaccgggcccagggagccgcctgggttacaggcccttgcagaagctggaggaggccgagaaggcggctgatgagagcgagagaggacatgaaggtcactcgaaaaaccggggccatgcaggactgaggagaaagatggaactgcaggagatgcaggctgaaggaggccaagcacat

SEQ ID NO: 450604 - DNA, 744 bp, Homo sapiens
  misc_feature (1)..(1): n is a, c, g, or t
  misc_feature (4)..(4): n is a, c, g, or t
  misc_feature (6)..(9): n is a, c, g, or t
ngcncnnnngttacagatacggaaacaggctcggaggtgcaatctctggctgtgtagacagaacagggagttggaacacggccttctgcgtttcctcactctcacataccagcgggcagggagagatccggggaggagttgcacttgcccccggcggaaatctccaaaaatctgcaaaaatgtattccctggtaccgctttgggctccggtgggaccaagcgaaattccgagaccgaaacggatgcgcgctgcggcccagggtgcgggtctggaccgcctcctccgtggtggacgaatccgaggagcaggactccccgcaacccagccccagccccagccccagccccgccgcgtccccagctgtcacgctgcgcgcagcgggtggggcctggggttcctggacagaggaggactacgcgtgtccttgggcggagaagggaggtgactccggcggaagaggacaaggcagaatgcaggcccttcgggtgtcccaggcgctgatccgctccttcagctccaccgcccggaaccgctttcagaaccgagaggacaatgacatcccgttgtacctgaagggcggcatcgttgacaacatcctgtaccgagtgacaatgacgctgtgtctgggcggcactgtctacagcttgtactcccttggctgggcctccttccccaggaattaagaccaagaagcctggggggcctgagagacttgaacaagtgtcaataaacgctggcctctg

SEQ ID NO: 450605 - DNA, 335 bp, Homo sapiens
ccaccgtgcccagtgcatttttattttcataaaaatatctctgtacagtaccaatccttcttacactgtctgcttcagtttcagtgcctgtatcatagaagtgtccatgttgtaaaagaaatcaaaagcagtcttgaataattggaacccaccttctggattgtctaatgtcagtttgttgtctgggcactgcttcttctgtcttcttcctcactgtctaacactggttcagaaacactcatctccatcaagtaggcttcagttgatttcctcaggtgtggtgtctgttcgctcttgaattcctgcaacatccatatcttgaaactttttgccct

SEQ ID NO: 450606 - DNA, 3702 bp, Homo sapiens
cgcggtggcaagtcgaaagcgttcgcaccagcggggcagcggctgcgggcggcaggcggcgggcaggtcgggagtgagaaggaccggcctgggctgactgctctcccctcgcgcctagggagccggtcggagagcgcgattggggtgcggagccccgacgctgccctgccccggatttcattccgcggcgggggctccgcgagcggaattccggcggctgccgtgactccagtgcaacgtgacgacagcatgtacgatccctgaatgggcccgtgggcatatttagtcattcatttttgatcaggagaaagaagacagccatcatttgaaaggtaaagcttcagcgactgaaggagtgtggactttttgaatttcaagaacagtaaagttggaacacagcagagggtgtgtaataaaatacagattggaaagaagactgatgaagaaaaataacagcatgattcaggcacaccattgagttctttgggatgcccgaaagtgtctggttgggaaacatgaaatagaagacgagaacctgcctcagcaagcgtacctgagaatacttttaaaggaacctgttgataaatgcaaaacagtggctgttgcaggtgatggaactgtactggaacaatgggagaagctggtagcttataggaagccaagatgaccagaatgtttttaaataatccaaggaagaatcctgctcaaaaatgaggtgaattaatacttgggcgctcaggaaccctggacagctacatgaggtgtttaaaaactgccctgaccatcttgccaaacaagtctctgctcatgaggccccacaggatgaacgagccgaggcaggacagtgtcctgccctgtcggaacagtgactgctgacctgccaagagagagctggggactgcctgctgtctgccagtacaatgaaggaagtggtttattggtcacccaagaaggtggcagactggctgctggagaatgctatgccagaatactgtgagcctctggagcatttcacaggccaggacttgatcaacctaacccaagaggatttcaaaaaaccccccttgtgccgagtctcctctgacaatgggcagcggctcctggacatgatagaaaccctgaaaatggagcaccatttggaagcacacaagaacggccatgccaatgggcacctcaacattggcgtagacatccccacccccgacggcagcttcagcatcaagattaaacccaacgggatgccaaatgggtataggaaagagatgataaagatccccatgccagaactggagcgctctcagtaccccatggagtggggcaagacttttctggcctttctttatgcactttcctgtttcgttctcaccacagtgatgatctcggtcgtccacgaacgagtacctcctaaggaggtgcagcctccactaccggacacattttttgaccattttaaccgggtgcagtgggccttttctatttgtgaaattaatggcatgatccttgtaggactctggttaattcagtggctgctcttaaaatacaagtctattattagcagaagatttttctgcatagttggcacgctgtacctgtatcggtgtattacaatgtatgtaactacactcccagtacctggtatgcatttcaactgttctccgaagcttttcggagactgggaagcccaactgcgaagaataatgaagctcattgctggaggtggcttgtctatcactggctctcacaacatgtgtggggactatctgtacagcggccacacggtcatgctaacacttacctacttatttatcaaagagtattcccctcggcgactctggtggtatcactggatttgctggcttctcagcgtagttggaatcttctgtattctcttagcgcatgaccactacactgtggacgtggtggtggcatattacatcaccacgagactcttctggtggtatcacactatggccaatcagcaagtgctaaaggaagcttcccagatgaacctcctggccagggtgtggtggtacaggccatttcagtactttgaaaagaatgtccaaggaattgtacctcgatcttaccattggcctttcccctggccagtagtccacctcagtaggcaagttaaatacagccggctggtgaatgacacataacagctgtacaaagtggggaaaagacaaattgtccgaagtgctaagaactccatgagagaagatgccataaaataaacacctccctaatcctattatctttcaatggttaccttgacttaacctattgagttacctggtcagcactgtgatctttttttctctccaaaggacctgcgttggacaacaataaagaaaaatttaacctatcatgcactgtacacatttcctgttcataagtttgggatttacataacccgcaaccaccatgttcctttgtatatgatgcagcagcataaatgtaagcttttatatcataagttctggtctttccagtcacatctggaaataaagcgtattattttcttgggaaaacatacttttcatatctcttgccccaaagattgggctgtaagccattttctagcaaatgtctctatgaaggtttctaagtacctgaatggggtttgattctgaaatctttctacctgttgcaccgatattcaaataaaaatgatagacacagaaaggtttggtaactttgggttttgtaaaatcagcaaaggcagtgtttcaaaaagtgcaaaaaaaaagattctgttataaagtgattttctaagtatttcctaactttatttttcaaaatgatgttatgaacaccaaatttaaagatttttaacatgtcagagagaagagagttaaaatttaaaaatgcatcttgggagagaaatttgtctatgtttctagtgcctttcttgtcttgattgtatggtcagtaggcaatcttaaatgtttttatttaaaataaagtattccttgaaaatataaatatatgtatacactactaaattttgcatttatagctaaattgaatcagaagactgcttatggttttaaaattgcaatgacttaaataatgaggttgttaattagagtcagagcctgttcacatattgtgatcaggtagcaatgacatgtaccacttaaattattttatcgtcgatttggtagttcgattttaactactcaatgaaaacagccatgaatatcttttcttaaagagagttttgaaaatgatcacttacctaaaacttgaaagctatgaattagttatccatactctcatgacaattttgttggtgaacaacaaaaaagagatctatttctttaaaagatatttgtgcagaaactgcatgtaactctaagttttactcctaacatacatatgtttggggaagtattctattctatacttgccaatgtggagaacaaaatagttttttaagaatgaagaagtatatatatccattctgtattttacgtgcagcagaattatcttccgtaggatttttttgtgtattcacaaggtgatatttgtattgtaaaacaataatggtgaaggaaataaaaaggcttttaaaattttgtttgttttaaatctttgtaaagttattattccagagagtatactggtatcttacagcttacctagatcataaattaatcaaaatgcactttttaataaaaactgatacttaaaata

SEQ ID NO: 450607 - DNA, 3111 bp, Homo sapiens
tactatgcattaggctctagagattccaaagcaaatgaaaggacaaaggaaggtataaggtaggaagaatattccaggcagaaggaacaacttgcaagaaggaagaatcctgctcaaaaatgaggtgaattaatacttgggcgctcaggaaccctggacagctacatgaggtgtttaaaaactgccctgaccatcttgccaaacaagtctctgctcatgaggccccacaggatgaacgagccgaggcaggacagtgtcctgccctgtcggaacagtgactgctgacctgccaagagagagctggggactgcctgctgtctgccagtacaatgaaggaagtggtttattggtcacccaagaaggtggcagactggctgctggagaatgctatgccagaatactgtgagcctctggagcatttcacaggccaggacttgatcaacctaacccaagaggatttcaaaaaaccccccttgtgccgagtctcctctgacaatgggcagcggctcctggacatgatagaaaccctgaaaatggagcaccatttggaagcacacaagaacggccatgccaatgggcacctcaacattggcgtagacatccccacccccgacggcagcttcagcatcaagattaaacccaacgggatgccaaatgggtataggaaagagatgataaagatccccatgccagaactggagcgctctcagtaccccatggagtggggcaagacttttctggcctttctttatgcactttcctgtttcgttctcaccacagtgatgatctcggtcgtccacgaacgagtacctcctaaggaggtgcagcctccactaccggacacattttttgaccattttaaccgggtgcagtgggccttttctatttgtgaaattaatggcatgatccttgtaggactctggttaattcagtggctgctcttaaaatacaagtctattattagcagaagatttttctgcatagttggcacgctgtacctgtatcggtgtattacaatgtatgtaactacactcccagtacctggtatgcatttcaactgttctccgaagcttttcggagactgggaagcccaactgcgaagaataatgaagctcattgctggaggtggcttgtctatcactggctctcacaacatgtgtggggactatctgtacagcggccacacggtcatgctaacacttacctacttatttatcaaagagtattcccctcggcgactctggtggtatcactggatttgctggcttctcagcgtagttggaatcttctgtattctcttagcgcatgaccactacactgtggacgtggtggtggcatattacatcaccacgagactcttctggtggtatcacactatggccaatcagcaagtgctaaaggaagcttcccagatgaacctcctggccagggtgtggtggtacaggccatttcagtactttgaaaagaatgtccaaggaattgtacctcgatcttaccattggcctttcccctggccagtagtccacctcagtaggcaagttaaatacagccggctggtgaatgacacataacagctgtacaaagtggggaaaagacaaattgtccgaagtgctaagaactccatgagagaagatgccataaaataaacacctccctaatcctattatctttcaatggttaccttgacttaacctattgagttacctggtcagcactgtgatctttttttctctccaaaggacctgcgttggacaacaataaagaaaaatttaacctatcatgcactgtacacatttcctgttcataagtttgggatttacataacccgcaaccaccatgttcctttgtatatgatgcagcagcataaatgtaagcttttatatcataagttctggtctttccagtcacatctggaaataaagcgtattattttcttgggaaaacatacttttcatatctcttgccccaaagattgggctgtaagccattttctagcaaatgtctctatgaaggtttctaagtacctgaatggggtttgattctgaaatctttctacctgttgcaccgatattcaaataaaaatgatagacacagaaaggtttggtaactttgggttttgtaaaatcagcaaaggcagtgtttcaaaaagtgcaaaaaaaaagattctgttataaagtgattttctaagtatttcctaactttatttttcaaaatgatgttatgaacaccaaatttaaagatttttaacatgtcagagagaagagagttaaaatttaaaaatgcatcttgggagagaaatttgtctatgtttctagtgcctttcttgtcttgattgtatggtcagtaggcaatcttaaatgtttttatttaaaataaagtattccttgaaaatataaatatatgtatacactactaaattttgcatttatagctaaattgaatcagaagactgcttatggttttaaaattgcaatgacttaaataatgaggttgttaattagagtcagagcctgttcacatattgtgatcaggtagcaatgacatgtaccacttaaattattttatcgtcgatttggtagttcgattttaactactcaatgaaaacagccatgaatatcttttcttaaagagagttttgaaaatgatcacttacctaaaacttgaaagctatgaattagttatccatactctcatgacaattttgttggtgaacaacaaaaaagagatctatttctttaaaagatatttgtgcagaaactgcatgtaactctaagttttactcctaacatacatatgtttggggaagtattctattctatacttgccaatgtggagaacaaaatagttttttaagaatgaagaagtatatatatccattctgtattttacgtgcagcagaattatcttccgtaggatttttttgtgtattcacaaggtgatatttgtattgtaaaacaataatggtgaaggaaataaaaaggcttttaaaattttgtttgttttaaatctttgtaaagttattattccagagagtatactggtatcttacagcttacctagatcataaattaatcaaaatgcactttttaataaaaactgatacttaaaata

SEQ ID NO: 450608 - DNA, 3473 bp, Homo sapiens
ctaggcctgctgtgtaccacatcttgggatcctctctttaacacctttctgggcatttcttatatcttgcctatgtattggattcccagtttccctcattgcatattctcttctttcttggtttactcccgtatttgggaggagcacattttctggaagtgtcctagaaaatttcatatgggaggtaaagcttcagcgactgaaggagtgtggactttttgaatttcaagaacagtaaagttggaacacagcagagggtgtgtaataaaatacagattggaaagaagactgatgaagaaaaataacagcatgattcaggcacaccattgagttctttgggatgcccgaaagtgtctggttgggaaacatgaaatagaagacgagaacctgcctcagcaagcgtacctgagaatacttttaaaggaacctgttgataaatgcaaaacagtggctgttgcagaaggaagaatcctgctcaaaaatgaggtgaattaatacttgggcgctcaggaaccctggacagctacatgaggtgtttaaaaactgccctgaccatcttgccaaacaagtctctgctcatgaggccccacaggatgaacgagccgaggcaggacagtgtcctgccctgtcggaacagtgactgctgacctgccaagagagagctggggactgcctgctgtctgccagtacaatgaaggaagtggtttattggtcacccaagaaggtggcagactggctgctggagaatgctatgccagaatactgtgagcctctggagcatttcacaggccaggacttgatcaacctaacccaagaggatttcaaaaaaccccccttgtgccgagtctcctctgacaatgggcagcggctcctggacatgatagaaaccctgaaaatggagcaccatttggaagcacacaagaacggccatgccaatgggcacctcaacattggcgtagacatccccacccccgacggcagcttcagcatcaagattaaacccaacgggatgccaaatgggtataggaaagagatgataaagatccccatgccagaactggagcgctctcagtaccccatggagtggggcaagacttttctggcctttctttatgcactttcctgtttcgttctcaccacagtgatgatctcggtcgtccacgaacgagtacctcctaaggaggtgcagcctccactaccggacacattttttgaccattttaaccgggtgcagtgggccttttctatttgtgaaattaatggcatgatccttgtaggactctggttaattcagtggctgctcttaaaatacaagtctattattagcagaagatttttctgcatagttggcacgctgtacctgtatcggtgtattacaatgtatgtaactacactcccagtacctggtatgcatttcaactgttctccgaagcttttcggagactgggaagcccaactgcgaagaataatgaagctcattgctggaggtggcttgtctatcactggctctcacaacatgtgtggggactatctgtacagcggccacacggtcatgctaacacttacctacttatttatcaaagagtattcccctcggcgactctggtggtatcactggatttgctggcttctcagcgtagttggaatcttctgtattctcttagcgcatgaccactacactgtggacgtggtggtggcatattacatcaccacgagactcttctggtggtatcacactatggccaatcagcaagtgctaaaggaagcttcccagatgaacctcctggccagggtgtggtggtacaggccatttcagtactttgaaaagaatgtccaaggaattgtacctcgatcttaccattggcctttcccctggccagtagtccacctcagtaggcaagttaaatacagccggctggtgaatgacacataacagctgtacaaagtggggaaaagacaaattgtccgaagtgctaagaactccatgagagaagatgccataaaataaacacctccctaatcctattatctttcaatggttaccttgacttaacctattgagttacctggtcagcactgtgatctttttttctctccaaaggacctgcgttggacaacaataaagaaaaatttaacctatcatgcactgtacacatttcctgttcataagtttgggatttacataacccgcaaccaccatgttcctttgtatatgatgcagcagcataaatgtaagcttttatatcataagttctggtctttccagtcacatctggaaataaagcgtattattttcttgggaaaacatacttttcatatctcttgccccaaagattgggctgtaagccattttctagcaaatgtctctatgaaggtttctaagtacctgaatggggtttgattctgaaatctttctacctgttgcaccgatattcaaataaaaatgatagacacagaaaggtttggtaactttgggttttgtaaaatcagcaaaggcagtgtttcaaaaagtgcaaaaaaaaagattctgttataaagtgattttctaagtatttcctaactttatttttcaaaatgatgttatgaacaccaaatttaaagatttttaacatgtcagagagaagagagttaaaatttaaaaatgcatcttgggagagaaatttgtctatgtttctagtgcctttcttgtcttgattgtatggtcagtaggcaatcttaaatgtttttatttaaaataaagtattccttgaaaatataaatatatgtatacactactaaattttgcatttatagctaaattgaatcagaagactgcttatggttttaaaattgcaatgacttaaataatgaggttgttaattagagtcagagcctgttcacatattgtgatcaggtagcaatgacatgtaccacttaaattattttatcgtcgatttggtagttcgattttaactactcaatgaaaacagccatgaatatcttttcttaaagagagttttgaaaatgatcacttacctaaaacttgaaagctatgaattagttatccatactctcatgacaattttgttggtgaacaacaaaaaagagatctatttctttaaaagatatttgtgcagaaactgcatgtaactctaagttttactcctaacatacatatgtttggggaagtattctattctatacttgccaatgtggagaacaaaatagttttttaagaatgaagaagtatatatatccattctgtattttacgtgcagcagaattatcttccgtaggatttttttgtgtattcacaaggtgatatttgtattgtaaaacaataatggtgaaggaaataaaaaggcttttaaaattttgtttgttttaaatctttgtaaagttattattccagagagtatactggtatcttacagcttacctagatcataaattaatcaaaatgcactttttaataaaaactgatacttaaaata

SEQ ID NO: 450609 - DNA, 2805 bp, Homo sapiens
cgcggtggcaagtcgaaagcgttcgcaccagcggggcagcggctgcgggcggcaggcggcgggcaggtcgggagtgagaaggaccggcctgggctgactgctctcccctcgcgcctagggagccggtcggagagcgcgattggggtgcggagccccgacgctgccctgccccggatttcattccgcggcgggggctccgcgagcggaattccggcggctgccgtgactccagtgcaacgtgacgacagcatgtacgatccctgaatgggcccgtgggcatatttagtcattcatttttgatcaggagaaagaagacagccatcatttgaaaggtaaagcttcagcgactgaaggagtgtggactttttgaatttcaagaacagtaaagttggaacacagcagagggtgtgtaataaaatacagattggaaagaagactgatgaagaaaaataacagcatgattcaggcacaccattgagttctttgggatgcccgaaagtgtctggttgggaaacatgaaatagaagacgagaacctgcctcagcaagcgtacctgagaatacttttaaaggaacctgttgataaatgcaaaacagtggctgttgcaggtgatggaactgtactggaacaatgggagaagctggtagcttataggaagccaagatgaccagaatgtttttaaataatccaaggaagaatcctgctcaaaaatgaggtgaattaatacttgggcgctcaggaaccctggacagctacatgaggtgtttaaaaactgccctgaccatcttgccaaacaagtctctgctcatgaggccccacaggatgaacgagccgaggcaggacagtgtcctgccctgtcggaacagtgactgctgacctgccaagagagagctggggactgcctgctgtctgccagtacaatgaaggaagtggtttattggtcacccaagaaggtggcagactggctgctggagaatgctatgccagaatactgtgagcctctggagcatttcacaggccaggacttgatcaacctaacccaagaggatttcaaaaaaccccccttgtgccgagtctcctctgacaatgggcagcggctcctggacatgatagaaaccctgaaaatggagcaccatttggaagcacacaagaacggccatgccaatgggcacctcaacattggcgtagacatccccacccccgacggcagcttcagcatcaagattaaacccaacgggatgccaaatgggtataggaaagagatgataaagatccccatgccagaactggagcgctctcagtaccccatggagtggggcaagacttttctggcctttctttatgcactttcctgtttcgttctcaccacagtgatgatctcggtcgtccacgaacgagtacctcctaaggaggtgcagcctccactaccggacacattttttgaccattttaaccgggtgcagtgggccttttctatttgtgaaattaatggcatgatccttgtaggactctggttaattcagtggctgctcttaaaatacaagtaagtcaagtaaaagctctaagattcaatgattatgggatttgcactccaaacatctacttattatttataaatgaaatttatcaacttgttgggatcaaaacatactatttttttttcttttttaaacacataccctgttggactaacttactgtctggaagctttaaaagaaaatgttgtttgttgcctgttttatgcaagattcatacaggatgatgaataagatggttagagatgatgctctgttttcacttaataagaaagaaaactctcagacatcttcagacagtacaggctattgaacaacagatcaaccacctagtcttggttggtgttactaacccattaaataaatcgacagttggcctaagcactataaattggctgcatagcttttcccacacagagtcagacatctagagccttagcaatatgtatttaaagatgtttcacacagaattcagaacacctgttccagagtggcttgggttgttgggaaaacaataccaaagggtatgcctttgggtaggtgggaagtggatggacctgaatggattcccaccttctactactactacttaaaacaatatgtgactgttgcattcaaatttctcagagttttaagtaggcaactcccacttagttccaggtgtatccaaggtggctttcatatctgaagctctaaactcaacatggaccccctcagactggctgtttactggggttgcctacattgtcccttcactgatgtttgattttctccttagttaaaggaacgccttatggttttccatgaattgagggttggaaattggtttgttaaagagctgagtttctctccagtggagtgtgtttcatgatccaccatgtggttaaatattaaggaattcatcttacagcaagaaaacaaaatgcacactgagagttcatgctgaatgttctttgacagaaatgataaggtttttcctagtatgttttataacaactcttttttttaacctgataaattatatatctacaaattgaaataaaagcagttcctgacactttcccagggatggacggtcttaactggtataaagaaagccatttaactgatcagtgtttatttacagatggtttgacagtcctagagtttaagctgaatctgaaatagaattgttggtctgggctgcatttaatttggtggaagacgtttttttctgttcctttggttttaagaggctaataaataggaataggctttagaaatacaagat

SEQ ID NO: 450610 - DNA, 392 bp, Homo sapiens
tcacaacatgtgtggggactatctgtacagcggccacacggtcatgctaacacttacctacttatttatcaaagagtgtaagtctaaaagacttccattgtaatttcctcacctgccatttctcatgaactctggtcctctggtaaagctcattttctggaaaatctgctgaagcaagactggaggcttcaggaggcttgcagcttcatctcatcgccatgcaactggcacccagggaaatatgtggaaggacagaactggtcttcctgaggacgaggtgtcctggagtgtcatctgtagtactggggtggaggcagttccaagcacagcctgcagggtgtgttatgagccagttatacagctgctgtaaggagccagatggaaatctcaaa

SEQ ID NO: 450611 - DNA, 3585 bp, Homo sapiens
cgcggtggcaagtcgaaagcgttcgcaccagcggggcagcggctgcgggcggcaggcggcgggcaggtcgggagtgagaaggaccggcctgggctgactgctctcccctcgcgcctagggagccggtcggagagcgcgattggggtgcggagccccgacgctgccctgccccggatttcattccgcggcgggggctccgcgagcggaattccggcggctgccgtgactccagtgcaacgtgacgacagcatgtacgatccctgaatgggcccgtgggcatatttagtcattcatttttgatcaggagaaagaagacagccatcatttgaaaggtaaagcttcagcgactgaaggagtgtggactttttgaatttcaagaacagtaaagttggaacacagcagagggtgtgtaataaaatacagattggaaagaagactgatgaagaaaaataacagcatgattcaggcacaccattgagttctttgggatgcccgaaagtgtctggttgggaaacatgaaatagaagacgagaacctgcctcagcaagcgtacctgagaatacttttaaaggaacctgttgataaatgcaaaacagtggctgttgcaggtgatggaactgtactggaacaatgggagaagctggtagcttataggaagccaagatgaccagaatgtttttaaataatccaaggaagaatcctgctcaaaaatgaggtgaattaatacttgggcgctcaggaaccctggacagctacatgaggtgtttaaaaactgccctgaccatcttgccaaacaagtctctgctcatgaggccccacaggatgaacgagccgaggcaggacagtgtcctgccctgtcggaacagtgactgctgacctgccaagagagagctggggactgcctgctgtctgccagtacaatgaaggaagtggtttattggtcacccaagaaggtggcagactggctgctggagaatgctatgccagaatactgtgagcctctggagcatttcacaggccaggacttgatcaacctaacccaagaggatttcaaaaaaccccccttgtgccgagtctcctctgacaatgggcagcggctcctggacatgatagaaaccctgaaaatggagcaccatttggaagcacacaagaacggccatgccaatgggcacctcaacattggcgtagacatccccacccccgacggcagcttcagcatcaagattaaacccaacgggatgccaaatgggtataggaaagagatgataaagatccccatgccagaactggagcgctctcagtaccccatggagtggggcaagacttttctggcctttctttatgcactttcctgtttcgttctcaccacagtgatgatctcggtcgtccacgaacgagtacctcctaaggaggtgcagcctccactaccggacacattttttgaccattttaaccgggtgcagtgggccttttctatttgtgaaattaatggcatgatccttgtaggactctggttaattcagtggctgctcttaaaatacaagtctattattagcagaagatttttctgcatagttggcacgctgtacctgtatcggtgtattacaatgtatgtaactacactcccagtacctggtatgcatttcaactgttctccgaagcttttcggagactgggaagcccaactgcgaagaataatgaagctcattgctggaggtggcttgtctatcactggctctcacaacatgtgtggggactatctgtacagcggccacacggtcatgctaacacttacctacttatttatcaaagagtattcccctcggcgactctggtggtatcactggatttgctggcttctcagcgtagttggaatcttctgtattctcttagcgcatgaccactacactgtggacgtggtggtggcatattacatcaccacgagactcttctggtggtatcacactatggccaatcagcaagtgctaaaggaagcttcccagatgaacctcctggccagggtgtggtggtacaggccatttcagtactttgaaaagaatgtccaaggaattgtacctcgatcttaccattggcctttcccctggccagtagtccacctcagtaggcaagttaaatacagccggctggtgaatgacacataacagctgtacaaagtggggaaaagacaaattgtccgaagtgctaagaactccatgagagaagatgccataaaataaacacctccctaatcctattatctttcaatggttaccttgacttaacctattgagttacctggtcagcactgtgatctttttttctctccaaaggacctgcgttggacaacaataaagaaaaatttaacctatcatgcactgtacacatttcctgttcataagtttgggatttacataacccgcaaccaccatgttcctttgtatatgatgcagcagcataaatgtaagcttttatatcataagttctggtctttccagtcacatctggaaataaagcgtattattttcttgggaaaacatacttttcatatctcttgccccaaagattgggctgtaagccattttctagcaaatgtctctatgaaggtttctaagtacctgaatggggtttgattctgaaatctttctacctgttgcaccgatattcaaataaaaatgatagacacagaaaggtttggtaactttgggttttgtaaaatcagcaaaggcagtgtttcaaaaagtgcaaaaaaaaagattctgttataaagtgattttctaagtatttcctaactttatttttcaaaatgatgttatgaacaccaaatttaaagatttttaacatgtcagagagaagagagttaaaatttaaaaatgcatcttgggagagaaatttgtctatgtttctagtgcctttcttgtcttgattgtatggtcagtaggcaatcttaaatgtttttatttaaaataaagtattccttgaaaatataaatatatgtatacactactaaattttgcatttatagctaaattgaatcagaagactgcttatggttttaaaattgcaatgacttaaataatgaggttgttaattagagtcagagcctgttcacatattgtgatcaggtagcaatgacatgtaccacttaaattattttatcgtcgatttggtagttcgattttaactactcaatgaaaacagccatgaatatcttttcttaaagagagttttgaaaatgatcacttacctaaaacttgaaagctatgaattagttatccatactctcatgacaattttgttggtgaacaacaaaaaagagatctatttctttaaaagatatttgtgcagaaactgcatgtaactctaagttttactcctaacatacatatgtttggggaagtattctattctatacttgccaatgtggagaacaaaatagttttttaagaatgaagaagtatatatatccattctgtattttacgtgcagcagaattatcttccgtaggatttttttgtgtattcacaaggtgatatttgtattgtaaaacaataatggtgaaggaaataaaaaggcttttaaaatttt

SEQ ID NO: 450612 - DNA, 3644 bp, Homo sapiens
cgcggtggcaagtcgaaagcgttcgcaccagcggggcagcggctgcgggcggcaggcggcgggcaggtcgggagtgagaaggaccggcctgggctgactgctctcccctcgcgcctagggagccggtcggagagcgcgattggggtgcggagccccgacgctgccctgccccggatttcattccgcggcgggggctccgcgagcggaattccggcggctgccgtgactccagtgcaacgtgacgacagcatgtacgatccctgaatgggcccgtgggcatatttagtcattcatttttgatcaggagaaagaagacagccatcatttgaaaggtaaagcttcagcgactgaaggagtgtggactttttgaatttcaagaacagtaaagttggaacacagcagagggtgtgtaataaaatacagattggaaagaagactgatgaagaaaaataacagcatgattcaggcacaccattgagttctttgggatgcccgaaagtgtctggttgggaaacatgaaatagaagacgagaacctgcctcagcaagcgtacctgagaatacttttaaaggaacctgttgataaatgcaaaacagtggctgttgcaggtgatggaactgtactggaacaatgggagaagctggtagcttataggaagccaagatgaccagaatgtttttaaataatccaaggaagaatcctgctcaaaaatgaggtgaattaatacttgggcgctcaggaaccctggacagctacatgaggtgtttaaaaactgccctgaccatcttgccaaacaagtctctgctcatgaggccccacaggatgaacgagccgaggcaggacagtgtcctgccctgtcggaacagtgactgctgacctgccaagagagagctggggactgcctgctgtctgccagtacaatgaaggaagtggtttattggtcacccaagaaggtggcagactggctgctggagaatgctatgccagaatactgtgagcctctggagcatttcacaggccaggacttgatcaacctaacccaagaggatttcaaaaaaccccccttgtgccgagtctcctctgacaatgggcagcggctcctggacatgatagaaaccctgaaaatggagcaccatttggaagcacacaagaacggccatgccaatgggcacctcaacattggcgtagacatccccacccccgacggcagcttcagcatcaagattaaacccaacgggatgccaaatgggtataggaaagagatgataaagatccccatgccagaactggagcgctctcagtaccccatggagtggggcaagacttttctggcctttctttatgcactttcctgtttcgttctcaccacagtgatgatctcggtcgtccacgaacgagtacctcctaaggaggtgcagcctccactaccggacacattttttgaccattttaaccgggtgcagtgggccttttctatttgtgaaattaatggcatgatccttgtaggactctggttaattcagtggctgctcttaaaatacaagtctattattagcagaagatttttctgcatagttggcacgctgtacctgtatcggtgtattacaatgtatgtaactacactcccagtacctggtatgcatttcaactgttctccgaagcttttcggagactgggaagcccaactgcgaagaataatgaagctcattgctggaggtggcttgtctatcactggctctcacaacatgtgtggggactatctgtacagcggccacacggtcatgctaacacttacctacttatttatcaaagagtattcccctcggcgactctggtggtatcactggatttgctggcttctcagcgtagttggaatcttctgtattctcttagcgcatgaccactacactgtggacgtggtggtggcatattacatcaccacgagactcttctggtggtatcacactatggccaatcagcaagtgctaaaggaagcttcccagatgaacctcctggccagggtgtggtggtacaggccatttcagtactttgaaaagaatgtccaaggaattgtacctcgatcttaccattggcctttcccctggccagtagtccacctcagtaggcaagttaaatacagccggctggtgaatgacacataacagctgtacaaagtggggaaaagacaaattgtccgaagtgctaagaactccatgagagaagatgccataaaataaacacctccctaatcctattatctttcaatggttaccttgacttaacctattgagttacctggtcagcactgtgatctttttttctctccaaaggacctgcgttggacaacaataaagaaaaatttaacctatcatgcactgtacacatttcctgttcataagtttgggatttacataacccgcaaccaccatgttcctttgtatatgatgcagcagcataaatgtaagcttttatatcataagttctggtctttccagtcacatctggaaataaagcgtattattttcttgggaaaacatacttttcatatctcttgccccaaagattgggctgtaagccattttctagcaaatgtctctatgaaggtttctaagtacctgaatggggtttgattctgaaatctttctacctgttgcaccgatattcaaataaaaatgatagacacagaaaggtttggtaactttgggttttgtaaaatcagcaaaggcagtgtttcaaaaagtgcaaatgatgttatgaacaccaaatttaaagatttttaacatgtcagagagaagagagttaaaatttaaaaatgcatcttgggagagaaatttgtctatgtttctagtgcctttcttgtcttgattgtatggtcagtaggcaatcttaaatgtttttatttaaaataaagtattccttgaaaatataaatatatgtatacactactaaattttgcatttatagctaaattgaatcagaagactgcttatggttttaaaattgcaatgacttaaataatgaggttgttaattagagtcagagcctgttcacatattgtgatcaggtagcaatgacatgtaccacttaaattattttatcgtcgatttggtagttcgattttaactactcaatgaaaacagccatgaatatcttttcttaaagagagttttgaaaatgatcacttacctaaaacttgaaagctatgaattagttatccatactctcatgacaattttgttggtgaacaacaaaaaagagatctatttctttaaaagatatttgtgcagaaactgcatgtaactctaagttttactcctaacatacatatgtttggggaagtattctattctatacttgccaatgtggagaacaaaatagttttttaagaatgaagaagtatatatatccattctgtattttacgtgcagcagaattatcttccgtaggatttttttgtgtattcacaaggtgatatttgtattgtaaaacaataatggtgaaggaaataaaaaggcttttaaaattttgtttgttttaaatctttgtaaagttattattccagagagtatactggtatcttacagcttacctagatcataaattaatcaaaatgcactttttaataaaaactgatacttaaaata

SEQ ID NO: 450613 - DNA, 820 bp, Homo sapiens
cgcggtggcaagtcgaaagcgttcgcaccagcggggcagcggctgcgggcggcaggcggcgggcaggtcgggagtgagaaggaccggcctgggctgactgctctcccctcgcgcctagggagccggtcggagagcgcgattggggtgcggagccccgacgctgccctgccccggatttcattccgcggcgggggctccgcgagcggaattccggcggctgccgtgactccagtgcaacgtgacgacagcatgtacgatccctgaatgggcccgtgggcatatttagtcattcatttttgatcaggagaaagaagacagccatcatttgaaaggtaaagcttcagcgactgaaggagtgtggactttttgaatttcaagaacagtaaagttggaacacagcagagggtgtgtaataaaatacagattggaaagaagactgatgaagaaaaataacagcatgattcaggcacaccattgagttctttgggatgcccgaaagtgtctggttgggaaacatgaaatagaagacgagaacctgcctcagcaagcgtacctgagaatacttttaaaggaacctgttgataaatgcaaaacagtggctgttgcagcctttaatttttatctcctcaacaatgtatcatcaagatcaggggcacccattatttcatatcctgtgacctttggtggatgtctggctttggatgcactggctctctttgtaaggcacagcctgtgttattgtcatatgtcaccgtgatcctttaggatttttgtagtctttttttttttccatctaccaatgaagaacactacaaatgta

SEQ ID NO: 450614 - DNA, 415 bp, Homo sapiens
tttaagtgtgagtgtgggtgaacctgaatggctttaaatcagaagaatgcctaattgttcatttcccagaggccagaaagacttgcaaataaagttaattgtggtactttggaaatatggaatagtggaagggttgtatagtcaaatctttaagttagagtgtagagcaggggtctgcaaactgtggattgctggccagatatagcctgtcatgtgtgtttgtatggcttgtaagatagcttttatgttttttaaatgattgaaaaaattcagaagattttgtgacattacaggaaattcagatttcagtgcatagcccaggtactctttgggagactgaggcaagaggatcacttgaaaccaggaatttgagaacaccctggtcaatatagtgatatcctatctctaccaaaaa

SEQ ID NO: 450615 - DNA, 2947 bp, Homo sapiens
actttgtagcttaaccaacaaacatttatttctcattgttctggaggctagaaatctgagatcagggtgctagcagagacaggttctggcaagggtctttgccaacttttgctgtattctcacatagcagaaagagagctaaaaagccgtctggtacctcttcttacagaggcaccaatccaattcatgtgggctccaccctcatgacctaatcacctcaaaaggtcccaccacataataccatcacactggggattcaatttcaacatgtgaattttgggggaacacaaacactcagtccataacactcccccagcccacctctgctgccttttctctttgaaagcacttaccttctctttctgcattgatgtaatgccagaggattggatctgggaaaggaagtaaatgtgggagggaagaatcagggttcagccatttagcgagcacaagtaggtgccgtgtgtcagcaagggtaccctgtgcatgagttattttaccacccttacagcaatccagcaggcctgtgtgataagtgttgtgtttcctgtgtggtagacgaggagaccgagactcagaagtgacgtgatttttctcaaggtattagctggcaaattgtagactagaatccaggtctcctgagtgtgggttctgtttatctagtttacctactgcgccggcctctaagactttggggtctgaatatgtacctcttcataccactagagccccagcagtcttctaagtgacatgtgagccatactggggaggagtttggggaaaggagaccttaccactgacagcagagtctgggggctcacaagagaggaagatgcccactgggaagccagatctcaggttcttcagacctatacctccctgggatataattcaatcaagtgcattagttcccctctttaaaaaaaactaaaatgatgcagaaactaactatgaaacaaaggaagaaaaaacaagagaaggcagggattatttcccaggacattttcctctgaccaggagggtaagttggggacagaggaccgacttggtggggatcagaggcagcccaagggagaagagtcattccttctactctcccacctgtcctcattgctggctctgacccagatgagagctgggggcgttgacatgggaagcttctctccttcctgagtggtcagtgaggggcagcttctcctcctactccaggagggttgcgggaacctgcatgttgcatcccagagcagccagagcttcttcttgccagtctcctaccttccctttctggctcctttactcccacctcctcatgccctctttctcatttaatagcagggagaaaggaaatgaaacttgatggagcctgactgtgccaggcactgtgccaagaactttgtgttcatttgtttctagaagagggcttggtatactgtagatgctcaataaacgttaactcttagctttagtgtctccggtccttcacttcagtgatctctaggcacagttgatggctcagtttcacaactgctgcagagaggatgaaagaacaatgtcaagtggttgggtgggggaaaatgaaactggcattagggctaatcacatacatttctcagggtgctcctcttttgaggccctatttccatgagaaggaaattgaggcaaacccagaagttgacagcttagctgggaaccaaagatgatgatatacgggagcccatggaatctcatagctcgagcagcacttttggcaccaacctgcacccaaagagcatctttaaaagttgtcacatacttgctccgggcagctctttcacaccactaccatgctctgtgccagacatgactaattttttaaatctctgacactcttaattagtcatgagctaattctgtaagaatgttagagtaagcacactaaaattatattcttctgcaaagagaaagaagattacctgagaccacttgtcccccctcaaagaagcaaggtctcagccaaaatctttgaagccttgtgacatcaatagattttctagggtggcatcatgtccttttgatttttctgtatatagtagttcaaatgccaccttctcctctcctttccattgccactgccctggctaggtcctcatcagtgccatcaactctcaccaggctccctgccaccaatccaaacaaaaccaaacactactaatcatggatcttcatgggcacgtttgctttcgttggctccaaaagcctccagtggctttccattgcagattggaaaggtctagactcagcgatcaaaacttccaccactgattgcttttccaaacatctcccctacttcctgttgtgaataccacctggtttacttattatctctggcttgccattatctggtttacttattatcatcaatatgtctagacccttctgatcttcccaactttacccgtgccttttcagttctcttcttctcattcctcaccactgatggacagtcatccttccttccaagaagggcttaagtctggttgcctggactctagataatttccctcctccttagcaattccacctttgattgtctggactccttgtgccatgtacaattatcctgtattgttaattgtctttctatgtctgtaacttgcttctgtgttatagacatcatcatggcacagtgccgtgctttttcacagaataggtacttaatattctattatttaatttactagaactttgcaatttcataaagataactttgtcattaaaaatgtttccagtggggatttagggcccttgagatggtgcaagaaaaggagataaagggttttttttaagctatttgttctttctgtgcaaattacataacttccaattatttccaacgttaaagaaatagtccctctgaatcctttatgatttaaacattaaaatgattcactagtttttagaaaaaaaa

SEQ ID NO: 450616 - DNA, 3509 bp, Homo sapiens
gtcgcgccgagggaagcggcccgcggcggagggaggggaggccgagtcctggaagcggagctccgcgctgggactggttccttcgcagccattttctgtccaaccaaacagccgattggagacgggagccaaccagggctgcattggaggttgaaatcacaaagattagacacctttttagataggtgttcttcagcaccactgacaacacggttctgacagtatttcatgacaatggatggtgacagttctacaacagatgcttctcaactaggaatctctgcagactatattggaggaagtcattatgttatacagcctcatgatgatactgaggacagcatgaatgatcatgaagacacaaatggttcaaaagaaagtttcagagaacaagatatatatcttccaatagcaaacgtggctaggataatgaaaaatgccatacctcaaacgggaaagattgcaaaagatgccaaagaatgtgttcaagaatgtgtaagtgagttcatcagttttataacatctgaagcaagtgaaaggtgccatcaagagaaacggaaaacaatcaatggagaagatattctctttgctatgtctactttaggctttgacagttatgtggaacctctgaaattataccttcagaaattcagagaggctatgaaaggagaaaagggaattggtggagcagtcacagctacagatggactaagtgaagagcttacagaggaggcatttactaaccagttaccagctggcttaataaccacagacggtcaacaacaaaatgttatggtttacacaacatcatatcaacagatttctggtgttcagcaaattcagttttcatgatctgaagaaatgatggaatggggagtgtagagaaatgagagtctgtatgattctggaacagagacatcagaaggaaagactggtgaaaagatgtatctttgtatattaatagctgtaatgtagcttcctgatgcttgactaattgaggtgttaattctgacttgagaatctttttcatgaatgattttaaagaaaaatttggattttaaaggtattaaaatatttttgttttgtacgagagtttgttgctctgtatgactcctgtatgcattgtatattgcaatttattactgtcagagatttgtagacagtttcttattttcatattgaatcatgttacttttgtaattcaagtaagcggctgggttaattcatgatgtttgcccttttaataaaatataagggtagagttcattttgaatgcaagttgcctttattataaatttgagtttgtcttggttataccttgcatgataacctagctagatttctagcatttgctgtatttattaaaattattatttttttggtaaaacattaatagtttaagcagcatcatttttttaaaaaatgtaattgaataagtgtgaatgcagaagcaaatattgtctgccctgttaaacttggtgcccattaacagtgtttacactgttcatcgtgcctgttaatgtagttttagttactggagcttttttaagactagatttggttttgagttacatttttaagaatgtgggaatatatttaagtttaatgtagtcctagtgctcttgaaatggtgcccctttcatttggtacatgattttttttcaaatcatatcttcaagtactatagtattctcttacagaagaggagttttatagtctgatggtaaatgtcttcattttacctttttaattgaaatgtcaagtttcctgttacactatggaaaccaagaaacatcagacatcattgcgtgtacagaccttttgcatgggtgagtggatgaaatggagaacagagtgagtgctgtgaacggtgtgaaatagaagccaacttctagtatgctgtcttcatctctgcaataaactaaacgtaaataatgtaactttgtataatttagtagtatgtacttggattgtttctttttgaaaagtgaggatttgtattttctcatctattctttttggtgttaattaacttgagggatttcttttttaagtttttaatatcaaaaattgctattgtatagtttgcctaaaaggaagttggagtgaatatcatctttgaaggacactcaaatttataaggtagaagcaatttcccagatataggctgaacagaaacatttactttgccagaaggagcctttaggagtatatgtgggctaatcagaggttaataatgtcctcatctcctactctccatttaaaaaacaaacttcattgtagtaaattcaaataggaaaaaatgggggagtagttaagcaaaatcaacagtcatcctactatgttgaaagaaccaatgttaatattttgataaatatcatttgtccttttactttgctaaatatgtatatttttataaaaatgggctcatattgtgcataccattttgtaacctgcttttttcacttaacaatatattgggaacatcttttccaggtcatgcatagtcttctgcatcatttttattggtttattattctgctgtatgactcaatcataattcatttaatcttctattggatattttgactatttacatcttttcacagttataaacagcacttcactgaatcccatgtacatccatgactgttttcttaaattctttgaattgctgggttaccaaatatgcaaaattttaaggcttttgatacttcgttatgagtgtatttttgagatattttccacttgatccaagcagtgtgtcactatataactgataaaagcacttggtctttgattatcagatactgtctctaaaattattttaaagattaatatttgttcaagtagagaatgaagataaaaaaggaatttgaggccaggtatggggtgtctcatgcctataattccagcactttgggaggccaaggcaggcagatcactttgaggtcaggagtttgagaccagcctggccaacatggagaaccccccgtctctacaaaaaatacaaaattagcagggtgtggtggtgcacacctgtagtcccttactccctggtggctgaggcattatcccttgaacctgggaggcagagcctaaagtgagccgagatcgcgccactgcactccagcctgggtgacacagcaagactcttgtctcaaacaaacaggaatttgagtaaattttaaattagtatatactacaacaaatttccaaacttcataatttgctagtagtgctaactaaaattttacaccaggtaaaatcaggtcaccttttttatgtattgacttcattgttggacttcatactctgatgggaaagaaaatggacattctgaatgtgtcaggtgcataatatcctaatttatgcttgtcagagctggggtctctgtcttccttggcccatgttgcatttaactgaatgtcatgttttctcctctggaacttcttatgtatgcaagctcccatgttaacctatcataaaaatgttttttataattttgt

SEQ ID NO: 450617 - DNA, 2200 bp, Homo sapiens
  misc_feature (1794)..(1794): n is a, c, g, or t
gtcgcgccgagggaagcggcccgcggcggagggaggggaggccgagtcctggaagcggagctccgcgctgggactggttccttcgcagccattttctgtccaaccaaacagccgattggagacgggagccaaccagggctgcattggaggttgaaatcacaaagattagacacctttttagataggtgttcttcagcaccactgacaacacggttctgacagtatttcatgacaatggatggtgacagttctacaacagatgcttctcaactaggaatctctgcagactatattggaggaagtcattatgttatacagcctcatgatgatactgaggacagcatgaatgatcatgaagacacaaatggttcaaaagaaagtttcagagaacaagatatatatcttccaatagcaaacgtggctaggataatgaaaaatgccatacctcaaacgggaaagattgcaaaagatgccaaagaatgtgttcaagaatgtgtaagtgagttcatcagttttataacatctgaagcaagtgaaaggtgccatcaagagaaacggaaaacaatcaatggagaagatattctctttgctatgtctactttaggctttgacagttatgtggaacctctgaaattataccttcagaaattcagagaggctatgaaaggagaaaagggaattggtggagcagtcacagctacagatggactaagtgaagagcttacagaggaggcatttactaaccagttaccagctggcttaataaccacagacggtcaacaacaaaatgttatggtttacacaacatcatatcaacagatttctggtgttcagcaaattcagttttcatgatctgaagaaatgatggaatggggagtgtagagaaatgagagtctgtatgattctggaacagagacatcagaaggaaagactggtgaaaagatgtatctttgtatattaatagctgtaatgtagcttcctgatgcttgactaattgaggtgttaattctgacttgagaatctttttcatgaatgattttaaagaaaaatttggattttaaaggtattaaaatatttttgttttgtacgagagtttgttgctctgtatgactcctgtatgcattgtatattgcaatttattactgtcagagatttgtagacagtttcttattttcatattgaatcatgttacttttgtaattcaagtaagcggctgggttaattcatgatgtttgcccttttaataaaatataagggtagagttcattttgaatgcaagttgcctttattataaatttgagtttgtcttggttataccttgcatgataacctagctagatttctagcatttgctgtatttattaaaattattatttttttggtaaaaccaaaaaaaaaaaaaaaaaaaaaaaaaaaaactttttggcgcgcggcctttggcgccctctggagaaacgttttttatacaaccattcggtttgggcacgcccggggcccgcaggttggtgttaggttagacccctggcgctcatataggcgtgttccctatagaaaaccctgggctagtgagtatgtggtgttgtgggatttctctccccatattaaaaaaacgcgcccgggggggaaacaccgaggcggtttctcgtgaaaacaaaaatctcccagagatgtggagtgtttcggagaggcctccaatagcgcgggagctctcttatctacccgcgaggagggttctccccagcgcggagaagcctcgcgaatatatctaaataaattatagcgcccccgcgcgcnggttgtgaatagcgccactcaaccacgcagcaacacaagcaaagcgagcatgctagattgagacaaacacacgaacgcgagacaaaagcgcacagagacgaaaggaggacgaaacacatgcgaaacgatgcaacagagacgacagaggggagagaacagaagagcacagtgaagagcacggacagagaaggacaggagaggagagcaagcgacggagagaagcggaagagacacggcgagcagagaaagaacatggccagaagacgcacacggatcaagacgcggcacaagaacaaccgaggagagcagaagaacagaagagcggcggaagaagaccgccgcgcgcaggaggccaacacaggggagcgacgcacgaggagagacaagctggcgaagcgcagggacc

SEQ ID NO: 450618 - DNA, 1504 bp, Homo sapiens
gtcgcgccgagggaagcggcccgcggcggagggaggggaggccgagtcctggaagcggagctccgcgctgggactggttccttcgcagccattttctgtccaaccaaacagccgattggagacgggagccaaccagggctgcattggaggttgaaatcacaaagattagacacctttttagataggtgttcttcagcaccactgacaacacggttctgacagtatttcatgacaatggatggtgacagttctacaacagatgcttctcaactaggaatctctgcagactatattggaggaagtcattatgttatacagcctcatgatgatactgaggacagcatgaatgatcatgaagacacaaatggttcaaaagaaagtttcagagaacaagatatatatcttccaatagcaaacgtggctaggataatgaaaaatgccatacctcaaacgggaaagattgcaaaagatgccaaagaatgtgttcaagaatgtgtaagtgagttcatcagttttataacatctgaagcaagtgaaaggtgccatcaagagaaacggaaaacaatcaatggagaagatattctctttgctatgtctactttaggctttgacagttatgtggaacctctgaaattataccttcagaaattcagagaggctatgaaaggagaaaagggaattggtggagcagtcacagctacagatggactaagtgaagagcttacagaggaggcatttactaaccagttaccagctggcttaataaccacagacggtcaacaacaaaatgttatggtttacacaacatcatatcaacagatttctggtgttcagcaaattcagttttcatgatctgaagaaatgatggaatggggagtgtagagaaatgagagtctgtatgattctggaacagagacatcagaaggaaagactggtgaaaagatgtatctttgtatattaatagctgtaatgtagcttcctgatgcttgactaattgaggtgttaattctgacttgagaatctttttcatgaatgattttaaagaaaaatttggattttaaaggtattaaaatatttttgttttgtacgagagtttgttgctctgtatgactcctgtatgcattgtatattgcaatttattactgtcagagatttgtagacagtttcttattttcatattgaatcatgttacttttgtaattcaagtaagcggctgggttaattcatgatgtttgcccttttaataaaatataagggtagagttcattttgaatgcaagttgcctttattataaatttgagtttgtcttggttataccttgcatgataacctagctagatttctagcatttgctgtatttattaaaattattatttttttggtaaaacgttattctactcgttatcctacttccactcttccttttcactctctttatcctaacctctctttcttctcttacttctcctccttactctctctccgccttcatctttctctctcg

SEQ ID NO: 450619 - DNA, 1356 bp, Homo sapiens
gtcgcgccgagggaagcggcccgcggcggagggaggggaggccgagtcctggaagcggagctccgcgctgggactggttccttcgcagccattttctgtccaaccaaacagccgattggagacgggagccaaccagggctgcattggaggttgaaatcacaaagattagacacctttttagataggtgttcttcagcaccactgacaacacggttctgacagtatttcatgacaatggatggtgacagttctacaacagatgcttctcaactaggaatctctgcagactatattggaggaagtcattatgttatacagcctcatgatgatactgaggacagcatgaatgatcatgaagacacaaatggttcaaaagaaagtttcagagaacaagatatatatcttccaatagcaaacgtggctaggataatgaaaaatgccatacctcaaacgggaaagattgcaaaagatgccaaagaatgtgttcaagaatgtgtaagtgagttcatcagttttataacatctgaagcaagtgaaaggtgccatcaagagaaacggaaaacaatcaatggagaagatattctctttgctatgtctactttaggctttgacagttatgtggaacctctgaaattataccttcagaaattcagagaggctatgaaaggagaaaagggaattggtggagcagtcacagctacagatggactaagtgaagagcttacagaggaggcatttactaaccagttaccagctggcttaataaccacagacggtcaacaacaaaatgttatggtttacacaacatcatatcaacagatttctggtgttcagcaaattcagttttcatgatctgaagaaatgatggaatggggagtgtagagaaatgagagtctgtatgattctggaacagagacatcagaaggaaagactggtgaaaagatgtatctttgtatattaatagctgtaatgtagcttcctgatgcttgactaattgaggtgttaattctgacttgagaatctttttcatgaatgattttaaagaaaaatttggattttaaaggtattaaaatatttttgttttgtacgagagtttgttgctctgtatgactcctgtatgcattgtatattgcaatttattactgtcagagatttgtagacagtttcttattttcatattgaatcatgttacttttgtaattcaagtaagcggctgggttaattcatgatgtttgcccttttaataaaatataagggtagagttcataaaaaaaactgggcggcgtttacacggcgtgatgggcctggcgtacccacttatcggctggagacatacccttcgcagctgggtatacg

SEQ ID NO: 450620 - DNA, 3530 bp, Homo sapiens
ggagtttgccataaagtgcctgccctctagcctctactcttccagttgcggcttattgcatcacagtaattgctgtacgaaggtcagaatcgctacctatgtccaaagcagtcgtaagaagaggtcccaatcccccactctttccgccctaatggaggtctccagtttcggttgaaatcacaaagattagacacctttttagataggtgttcttcagcaccactgacaacacggttctgacagtatttcatgacaatggatggtgacagttctacaacagatgcttctcaactaggaatctctgcagactatattggaggaagtcattatgttatacagcctcatgatgatactgaggacagcatgaatgatcatgaagacacaaatggttcaaaagaaagtttcagagaacaagatatatatcttccaatagcaaacgtggctaggataatgaaaaatgccatacctcaaacgggaaagattgcaaaagatgccaaagaatgtgttcaagaatgtgtaagtgagttcatcagttttataacatctgaagcaagtgaaaggtgccatcaagagaaacggaaaacaatcaatggagaagatattctctttgctatgtctactttaggctttgacagttatgtggaacctctgaaattataccttcagaaattcagagaggctatgaaaggagaaaagggaattggtggagcagtcacagctacagatggactaagtgaagagcttacagaggaggcatttactaaccagttaccagctggcttaataaccacagacggtcaacaacaaaatgttatggtttacacaacatcatatcaacagatttctggtgttcagcaaattcagttttcatgatctgaagaaatgatggaatggggagtgtagagaaatgagagtctgtatgattctggaacagagacatcagaaggaaagactggtgaaaagatgtatctttgtatattaatagctgtaatgtagcttcctgatgcttgactaattgaggtgttaattctgacttgagaatctttttcatgaatgattttaaagaaaaatttggattttaaaggtattaaaatatttttgttttgtacgagagtttgttgctctgtatgactcctgtatgcattgtatattgcaatttattactgtcagagatttgtagacagtttcttattttcatattgaatcatgttacttttgtaattcaagtaagcggctgggttaattcatgatgtttgcccttttaataaaatataagggtagagttcattttgaatgcaagttgcctttattataaatttgagtttgtcttggttataccttgcatgataacctagctagatttctagcatttgctgtatttattaaaattattatttttttggtaaaacattaatagtttaagcagcatcatttttttaaaaaatgtaattgaataagtgtgaatgcagaagcaaatattgtctgccctgttaaacttggtgcccattaacagtgtttacactgttcatcgtgcctgttaatgtagttttagttactggagcttttttaagactagatttggttttgagttacatttttaagaatgtgggaatatatttaagtttaatgtagtcctagtgctcttgaaatggtgcccctttcatttggtacatgattttttttcaaatcatatcttcaagtactatagtattctcttacagaagaggagttttatagtctgatggtaaatgtcttcattttacctttttaattgaaatgtcaagtttcctgttacactatggaaaccaagaaacatcagacatcattgcgtgtacagaccttttgcatgggtgagtggatgaaatggagaacagagtgagtgctgtgaacggtgtgaaatagaagccaacttctagtatgctgtcttcatctctgcaataaactaaacgtaaataatgtaactttgtataatttagtagtatgtacttggattgtttctttttgaaaagtgaggatttgtattttctcatctattctttttggtgttaattaacttgagggatttcttttttaagtttttaatatcaaaaattgctattgtatagtttgcctaaaaggaagttggagtgaatatcatctttgaaggacactcaaatttataaggtagaagcaatttcccagatataggctgaacagaaacatttactttgccagaaggagcctttaggagtatatgtgggctaatcagaggttaataatgtcctcatctcctactctccatttaaaaaacaaacttcattgtagtaaattcaaataggaaaaaatgggggagtagttaagcaaaatcaacagtcatcctactatgttgaaagaaccaatgttaatattttgataaatatcatttgtccttttactttgctaaatatgtatatttttataaaaatgggctcatattgtgcataccattttgtaacctgcttttttcacttaacaatatattgggaacatcttttccaggtcatgcatagtcttctgcatcatttttattggtttattattctgctgtatgactcaatcataattcatttaatcttctattggatattttgactatttacatcttttcacagttataaacagcacttcactgaatcccatgtacatccatgactgttttcttaaattctttgaattgctgggttaccaaatatgcaaaattttaaggcttttgatacttcgttatgagtgtatttttgagatattttccacttgatccaagcagtgtgtcactatataactgataaaagcacttggtctttgattatcagatactgtctctaaaattattttaaagattaatatttgttcaagtagagaatgaagataaaaaaggaatttgaggccaggtatggggtgtctcatgcctataattccagcactttgggaggccaaggcaggcagatcactttgaggtcaggagtttgagaccagcctggccaacatggagaaccccccgtctctacaaaaaatacaaaattagcagggtgtggtggtgcacacctgtagtcccttactccctggtggctgaggcattatcccttgaacctgggaggcagagcctaaagtgagccgagatcgcgccactgcactccagcctgggtgacacagcaagactcttgtctcaaacaaacaggaatttgagtaaattttaaattagtatatactacaacaaatttccaaacttcataatttgctagtagtgctaactaaaattttacaccaggtaaaatcaggtcaccttttttatgtattgacttcattgttggacttcatactctgatgggaaagaaaatggacattctgaatgtgtcaggtgcataatatcctaatttatgcttgtcagagctggggtctctgtcttccttggcccatgttgcatttaactgaatgtcatgttttctcctctggaacttcttatgtatgcaagctcccatgttaacctatcataaaaatgttttttataattttgt

SEQ ID NO: 450621 - DNA, 1039 bp, Homo sapiens
gtcgcgccgagggaagcggcccgcggcggagggaggggaggccgagtcctggaagcggagctccgcgctgggactggttccttcgcagccattttctgtccaaccaaacagccgattggagacgggagccaaccagggctgcattggaggttgaaatcacaaagattagacacctttttagataggtgttcttcagcaccactgacaacacggttctgacagtatttcatgacaatggatggtgacagttctacaacagatgcttctcaactaggaatctctgcagactatattggaggaagtcattatgttatacagcctcatgatgatactgaggacagcatgaatgatcatgaagacacaaatggttcaaaagaaagtttcagagaacaagatatatatcttccaatagcaaacgtggctaggataatgaaaaatgccatacctcaaacgggaaagattgcaaaagatgccaaagaatgtgttcaagaatgtgtaagtgagttcatcagttttataacatctgaagcaagtgaaaggtgccatcaagagaaacggaaaacaatcaatggagaagatattctctttgctatgtctactttaggctttgacagttatgtggaacctctgaaattataccttcagaaattcagagaggctatgaaaggagaaaagggaattggtggagcagtcacagctacagatggactaagtgaagagcttacagaggaggcatttactaaccagttaccagctggcttaataaccacagacggtcaacaacaaaatgttatggtttacacaacatcatatcaacagatttctggtgttcagcaaattcagttttcatgatctgaagaaatgatggaatggggagtgtagagaaatgagagtctgtatgattctggaacagagacatcagaaggaaagactggtgaaaagatgtatctttgtatattaatagctgtaatgtagcttcctgatgcttgactaattgaggtgttaattctgacttgcgaccagctagggatcgtctaga

SEQ ID NO: 450622 - DNA, 3205 bp, Homo sapiens
gatagcacacattgtgttaatgttataacatatatttaagagattaaatagtcataaagtgaagatgtgttcttctgaataggctttcatttttgtaggttgttaggaaggtgatggttatagtttctgtaatttacctatgattttctcttcagattgcaaaagatgccaaagaatgtgttcaagaatgtgtaagtgagttcatcagttttataacatctgaagcaagtgaaaggtgccatcaagagaaacggaaaacaatcaatggagaagatattctctttgctatgtctactttaggctttgacagttatgtggaacctctgaaattataccttcagaaattcagagaggctatgaaaggagaaaagggaattggtggagcagtcacagctacagatggactaagtgaagagcttacagaggaggcatttactaaccagttaccagctggcttaataaccacagacggtcaacaacaaaatgttatggtttacacaacatcatatcaacagatttctggtgttcagcaaattcagttttcatgatctgaagaaatgatggaatggggagtgtagagaaatgagagtctgtatgattctggaacagagacatcagaaggaaagactggtgaaaagatgtatctttgtatattaatagctgtaatgtagcttcctgatgcttgactaattgaggtgttaattctgacttgagaatctttttcatgaatgattttaaagaaaaatttggattttaaaggtattaaaatatttttgttttgtacgagagtttgttgctctgtatgactcctgtatgcattgtatattgcaatttattactgtcagagatttgtagacagtttcttattttcatattgaatcatgttacttttgtaattcaagtaagcggctgggttaattcatgatgtttgcccttttaataaaatataagggtagagttcattttgaatgcaagttgcctttattataaatttgagtttgtcttggttataccttgcatgataacctagctagatttctagcatttgctgtatttattaaaattattatttttttggtaaaacattaatagtttaagcagcatcatttttttaaaaaatgtaattgaataagtgtgaatgcagaagcaaatattgtctgccctgttaaacttggtgcccattaacagtgtttacactgttcatcgtgcctgttaatgtagttttagttactggagcttttttaagactagatttggttttgagttacatttttaagaatgtgggaatatatttaagtttaatgtagtcctagtgctcttgaaatggtgcccctttcatttggtacatgattttttttcaaatcatatcttcaagtactatagtattctcttacagaagaggagttttatagtctgatggtaaatgtcttcattttacctttttaattgaaatgtcaagtttcctgttacactatggaaaccaagaaacatcagacatcattgcgtgtacagaccttttgcatgggtgagtggatgaaatggagaacagagtgagtgctgtgaacggtgtgaaatagaagccaacttctagtatgctgtcttcatctctgcaataaactaaacgtaaataatgtaactttgtataatttagtagtatgtacttggattgtttctttttgaaaagtgaggatttgtattttctcatctattctttttggtgttaattaacttgagggatttcttttttaagtttttaatatcaaaaattgctattgtatagtttgcctaaaaggaagttggagtgaatatcatctttgaaggacactcaaatttataaggtagaagcaatttcccagatataggctgaacagaaacatttactttgccagaaggagcctttaggagtatatgtgggctaatcagaggttaataatgtcctcatctcctactctccatttaaaaaacaaacttcattgtagtaaattcaaataggaaaaaatgggggagtagttaagcaaaatcaacagtcatcctactatgttgaaagaaccaatgttaatattttgataaatatcatttgtccttttactttgctaaatatgtatatttttataaaaatgggctcatattgtgcataccattttgtaacctgcttttttcacttaacaatatattgggaacatcttttccaggtcatgcatagtcttctgcatcatttttattggtttattattctgctgtatgactcaatcataattcatttaatcttctattggatattttgactatttacatcttttcacagttataaacagcacttcactgaatcccatgtacatccatgactgttttcttaaattctttgaattgctgggttaccaaatatgcaaaattttaaggcttttgatacttcgttatgagtgtatttttgagatattttccacttgatccaagcagtgtgtcactatataactgataaaagcacttggtctttgattatcagatactgtctctaaaattattttaaagattaatatttgttcaagtagagaatgaagataaaaaaggaatttgaggccaggtatggggtgtctcatgcctataattccagcactttgggaggccaaggcaggcagatcactttgaggtcaggagtttgagaccagcctggccaacatggagaaccccccgtctctacaaaaaatacaaaattagcagggtgtggtggtgcacacctgtagtcccttactccctggtggctgaggcattatcccttgaacctgggaggcagagcctaaagtgagccgagatcgcgccactgcactccagcctgggtgacacagcaagactcttgtctcaaacaaacaggaatttgagtaaattttaaattagtatatactacaacaaatttccaaacttcataatttgctagtagtgctaactaaaattttacaccaggtaaaatcaggtcaccttttttatgtattgacttcattgttggacttcatactctgatgggaaagaaaatggacattctgaatgtgtcaggtgcataatatcctaatttatgcttgtcagagctggggtctctgtcttccttggcccatgttgcatttaactgaatgtcatgttttctcctctggaacttcttatgtatgcaagctcccatgttaacctatcataaaaatgttttttataattttgt

SEQ ID NO: 450623 - DNA, 3962 bp, Homo sapiens
ggccgaggccgggccccgcgcctgcgaggccgctcccgcagcgggccgggccggggagcgggcgcggggccgcggcgcggctctttgtgcgccgggctgaggagcggcgggacgcgggccaggccacctcaccctcgccgccgttgagctccgggcccggggccgaggaggggccgcggggctgcgtcggggccccgctctcgacggcgtcccgggccggctccattttgtgcggggagccggccgaggggcgggagacgcggcccgggccctggccccgtagccccggcggcggcgcgagtccccgggggcgccctcctcccgcccgcggggctgtggcggggcccggcgctttgtctgcccgcacatcccgggggccgcgcggcgggtgggaggcaggcgttgggcgcggggccggggcggccgggcgagtcaggggatgcgctctgggggcggcctcctggcactcgcagggctgacaggtcgccgggaccaggccgtggggccggggccacccaggcacctgcgtggggaggaaggcatggctttagcttccccgcagcctggtttgcgcgtaaagaatgcagccatctggcggtttgcggtccctgtacttgccccgaaggtgggaaggaagcccttcggattggactaaggttgaaatcacaaagattagacacctttttagataggtgttcttcagcaccactgacaacacggttctgacagtatttcatgacaatggatggtgacagttctacaacagatgcttctcaactaggaatctctgcagactatattggaggaagtcattatgttatacagcctcatgatgatactgaggacagcatgaatgatcatgaagacacaaatggttcaaaagaaagtttcagagaacaagatatatatcttccaatagcaaacgtggctaggataatgaaaaaatgtgtaagtgagttcatcagttttataacatctgaagcaagtgaaaggtgccatcaagagaaacggaaaacaatcaatggagaagatattctctttgctatgtctactttaggctttgacagttatgtggaacctctgaaattataccttcagaaattcagagaggctatgaaaggagaaaagggaattggtggagcagtcacagctacagatggactaagtgaagagcttacagaggaggcatttactaaccagttaccagctggcttaataaccacagacggtcaacaacaaaatgttatggtttacacaacatcatatcaacagatttctggtgttcagcaaattcagttttcatgatctgaagaaatgatggaatggggagtgtagagaaatgagagtctgtatgattctggaacagagacatcagaaggaaagactggtgaaaagatgtatctttgtatattaatagctgtaatgtagcttcctgatgcttgactaattgaggtgttaattctgacttgagaatctttttcatgaatgattttaaagaaaaatttggattttaaaggtattaaaatatttttgttttgtacgagagtttgttgctctgtatgactcctgtatgcattgtatattgcaatttattactgtcagagatttgtagacagtttcttattttcatattgaatcatgttacttttgtaattcaagtaagcggctgggttaattcatgatgtttgcccttttaataaaatataagggtagagttcattttgaatgcaagttgcctttattataaatttgagtttgtcttggttataccttgcatgataacctagctagatttctagcatttgctgtatttattaaaattattatttttttggtaaaacattaatagtttaagcagcatcatttttttaaaaaatgtaattgaataagtgtgaatgcagaagcaaatattgtctgccctgttaaacttggtgcccattaacagtgtttacactgttcatcgtgcctgttaatgtagttttagttactggagcttttttaagactagatttggttttgagttacatttttaagaatgtgggaatatatttaagtttaatgtagtcctagtgctcttgaaatggtgcccctttcatttggtacatgattttttttcaaatcatatcttcaagtactatagtattctcttacagaagaggagttttatagtctgatggtaaatgtcttcattttacctttttaattgaaatgtcaagtttcctgttacactatggaaaccaagaaacatcagacatcattgcgtgtacagaccttttgcatgggtgagtggatgaaatggagaacagagtgagtgctgtgaacggtgtgaaatagaagccaacttctagtatgctgtcttcatctctgcaataaactaaacgtaaataatgtaactttgtataatttagtagtatgtacttggattgtttctttttgaaaagtgaggatttgtattttctcatctattctttttggtgttaattaacttgagggatttcttttttaagtttttaatatcaaaaattgctattgtatagtttgcctaaaaggaagttggagtgaatatcatctttgaaggacactcaaatttataaggtagaagcaatttcccagatataggctgaacagaaacatttactttgccagaaggagcctttaggagtatatgtgggctaatcagaggttaataatgtcctcatctcctactctccatttaaaaaacaaacttcattgtagtaaattcaaataggaaaaaatgggggagtagttaagcaaaatcaacagtcatcctactatgttgaaagaaccaatgttaatattttgataaatatcatttgtccttttactttgctaaatatgtatatttttataaaaatgggctcatattgtgcataccattttgtaacctgcttttttcacttaacaatatattgggaacatcttttccaggtcatgcatagtcttctgcatcatttttattggtttattattctgctgtatgactcaatcataattcatttaatcttctattggatattttgactatttacatcttttcacagttataaacagcacttcactgaatcccatgtacatccatgactgttttcttaaattctttgaattgctgggttaccaaatatgcaaaattttaaggcttttgatacttcgttatgagtgtatttttgagatattttccacttgatccaagcagtgtgtcactatataactgataaaagcacttggtctttgattatcagatactgtctctaaaattattttaaagattaatatttgttcaagtagagaatgaagataaaaaaggaatttgaggccaggtatggggtgtctcatgcctataattccagcactttgggaggccaaggcaggcagatcactttgaggtcaggagtttgagaccagcctggccaacatggagaaccccccgtctctacaaaaaatacaaaattagcagggtgtggtggtgcacacctgtagtcccttactccctggtggctgaggcattatcccttgaacctgggaggcagagcctaaagtgagccgagatcgcgccactgcactccagcctgggtgacacagcaagactcttgtctcaaacaaacaggaatttgagtaaattttaaattagtatatactacaacaaatttccaaacttcataatttgctagtagtgctaactaaaattttacaccaggtaaaatcaggtcaccttttttatgtattgacttcattgttggacttcatactctgatgggaaagaaaatggacattctgaatgtgtcaggtgcataatatcctaatttatgcttgtcagagctggggtctctgtcttccttggcccatgttgcatttaactgaatgtcatgttttctcctctggaacttcttatgtatgcaagctcccatgttaacctatcataaaaatgttttttataattttgt

SEQ ID NO: 450624 - DNA, 1388 bp, Homo sapiens
gtcgcgccgagggaagcggcccgcggcggagggaggggaggccgagtcctggaagcggagctccgcgctgggactggttccttcgcagccattttctgtccaaccaaacagccgattggagacgggagccaaccagggctgcattggaggttgaaatcacaaagattagacacctttttagataggtgttcttcagcaccactgacaacacggttctgacagtatttcatgacaatggatggtgacagttctacaacagatgcttctcaactaggaatctctgcagactatattggaggaagtcattatgttatacagcctcatgatgatactgaggacagcatgaatgatcatgaagacacaaatggttcaaaagaaagtttcagagaacaagatatatatcttccaatagcaaacgtggctaggataatgaaaaatgccatacctcaaacgggaaagattgcaaaagatgccaaagaatgtgttcaagaatgtgtaagtgagttcatcagttttataacatctgaagcaagtgaaaggtgccatcaagagaaacggaaaacaatcaatggagaagatattctctttgctatgtctactttaggctttgacagttatgtggaacctctgaaattataccttcagaaattcagagaggctatgaaaggagaaaagggaattggtggagcagtcacagctacagatggactaagtgaagagcttacagaggaggcatttactaaccagttaccagctggcttaataaccacagacggtcaacaacaaaatgttatggtttacacaacatcatatcaacagatttctggtgttcagcaaattcagttttcatgatctgaagaaatgatggaatggggagtgtagagaaatgagagtctgtatgattctggaacagagacatcagaaggaaagactggtgaaaagatgtatctttgtatattaatagctgtaatgtagcttcctgatgcttgactaattgaggtgttaattctgacttgagaatctttttcatgaatgattttaaagaaaaatttggattttaaaggtattaaaatatttttgttttgtacgagagtttgttgctctgtatgactcctgtatgcattgtatattgcaatttattactgtcagagatttgtagacagtttcttattttcatattgaatcatgttacttttgtaattcaagtaagcggctgggttaattcatgatgtttgcccttttaataaaatataagggtagagttcattttgaatgcaagttgcctttattataaatttgagtttgtcttggttataccttgcatgataacctagctagatttctagcatttgctgtatttattaaaattattatttttttggtaaaac

SEQ ID NO: 450625 - DNA, 3455 bp, Homo sapiens
gtcgcgccgagggaagcggcccgcggcggagggaggggaggccgagtcctggaagcggagctccgcgctgggactggttccttcgcagccattttctgtccaaccaaacagccgattggagacgggagccaaccagggctgcattggaggttgaaatcacaaagattagacacctttttagataggtgttcttcagcaccactgacaacacggttctgacagtatttcatgacaatggatggtgacagttctacaacagatgcttctcaactaggaatctctgcagactatattggaggaagtcattatgttatacagcctcatgatgatactgaggacagcatgaatgatcatgaagacacaaatggttcaaaagaaagtttcagagaacaagatatatatcttccaatagcaaacgtggctaggataatgaaaaatgccatacctcaaacgggaaagattgcaaaagatgccaaagaatgtgttcaagaatgtgtaagtgagttcatcagttttataacatctgaagcaagtgaaaggtgccatcaagagaaacggaaaacaatcaatggagaagatattctctttgctatgtctactttaggctttgacagttatgtggaacctctgaaattataccttcagaaattcagagaggctatgaaaggagaaaagggaattggtggagcagtcacagctacagatggactaagtgaagagcttacagaggaggcatttactaaccagttaccagctggcttaataaccacagacggtcaacaacaaaatgttatggtttacacaacatcatatcaacagatttctggtgttcagcaaattcagttttcatgatctgaagaaatgatggaatggggagtgtagagaaatgagagtctgtatgattctggaacagagacatcagaaggaaagactggtgaaaagatgtatctttgtatattaatagctgtaatgtagcttcctgatgcttgactaattgaggtgttaattctgacttgagaatctttttcatgaatgattttaaagaaaaatttggattttaaaggtattttgtatattgcaatttattactgtcagagatttgtagacagtttcttattttcatattgaatcatgttacttttgtaattcaagtaagcggctgggttaattcatgatgtttgcccttttaataaaatataagggtagagttcattttgaatgcaagttgcctttattataaatttgagtttgtcttggttataccttgcatgataacctagctagatttctagcatttgctgtatttattaaaattattatttttttggtaaaacattaatagtttaagcagcatcatttttttaaaaaatgtaattgaataagtgtgaatgcagaagcaaatattgtctgccctgttaaacttggtgcccattaacagtgtttacactgttcatcgtgcctgttaatgtagttttagttactggagcttttttaagactagatttggttttgagttacatttttaagaatgtgggaatatatttaagtttaatgtagtcctagtgctcttgaaatggtgcccctttcatttggtacatgattttttttcaaatcatatcttcaagtactatagtattctcttacagaagaggagttttatagtctgatggtaaatgtcttcattttacctttttaattgaaatgtcaagtttcctgttacactatggaaaccaagaaacatcagacatcattgcgtgtacagaccttttgcatgggtgagtggatgaaatggagaacagagtgagtgctgtgaacggtgtgaaatagaagccaacttctagtatgctgtcttcatctctgcaataaactaaacgtaaataatgtaactttgtataatttagtagtatgtacttggattgtttctttttgaaaagtgaggatttgtattttctcatctattctttttggtgttaattaacttgagggatttcttttttaagtttttaatatcaaaaattgctattgtatagtttgcctaaaaggaagttggagtgaatatcatctttgaaggacactcaaatttataaggtagaagcaatttcccagatataggctgaacagaaacatttactttgccagaaggagcctttaggagtatatgtgggctaatcagaggttaataatgtcctcatctcctactctccatttaaaaaacaaacttcattgtagtaaattcaaataggaaaaaatgggggagtagttaagcaaaatcaacagtcatcctactatgttgaaagaaccaatgttaatattttgataaatatcatttgtccttttactttgctaaatatgtatatttttataaaaatgggctcatattgtgcataccattttgtaacctgcttttttcacttaacaatatattgggaacatcttttccaggtcatgcatagtcttctgcatcatttttattggtttattattctgctgtatgactcaatcataattcatttaatcttctattggatattttgactatttacatcttttcacagttataaacagcacttcactgaatcccatgtacatccatgactgttttcttaaattctttgaattgctgggttaccaaatatgcaaaattttaaggcttttgatacttcgttatgagtgtatttttgagatattttccacttgatccaagcagtgtgtcactatataactgataaaagcacttggtctttgattatcagatactgtctctaaaattattttaaagattaatatttgttcaagtagagaatgaagataaaaaaggaatttgaggccaggtatggggtgtctcatgcctataattccagcactttgggaggccaaggcaggcagatcactttgaggtcaggagtttgagaccagcctggccaacatggagaaccccccgtctctacaaaaaatacaaaattagcagggtgtggtggtgcacacctgtagtcccttactccctggtggctgaggcattatcccttgaacctgggaggcagagcctaaagtgagccgagatcgcgccactgcactccagcctgggtgacacagcaagactcttgtctcaaacaaacaggaatttgagtaaattttaaattagtatatactacaacaaatttccaaacttcataatttgctagtagtgctaactaaaattttacaccaggtaaaatcaggtcaccttttttatgtattgacttcattgttggacttcatactctgatgggaaagaaaatggacattctgaatgtgtcaggtgcataatatcctaatttatgcttgtcagagctggggtctctgtcttccttggcccatgttgcatttaactgaatgtcatgttttctcctctggaacttcttatgtatgcaagctcccatgttaacctatcataaaaatgttttttataattttgt

SEQ ID NO: 450626 - DNA, 3985 bp, Homo sapiens
ggccgaggccgggccccgcgcctgcgaggccgctcccgcagcgggccgggccggggagcgggcgcggggccgcggcgcggctctttgtgcgccgggctgaggagcggcgggacgcgggccaggccacctcaccctcgccgccgttgagctccgggcccggggccgaggaggggccgcggggctgcgtcggggccccgctctcgacggcgtcccgggccggctccattttgtgcggggagccggccgaggggcgggagacgcggcccgggccctggccccgtagccccggcggcggcgcgagtccccgggggcgccctcctcccgcccgcggggctgtggcggggcccggcgctttgtctgcccgcacatcccgggggccgcgcggcgggtgggaggcaggcgttgggcgcggggccggggcggccgggcgagtcaggggatgcgctctgggggcggcctcctggcactcgcagggctgacaggtcgccgggaccaggccgtggggccggggccacccaggcacctgcgtggggaggaaggcatggctttagcttccccgcagcctggtttgcgcgtaaagaatgcagccatctggcggtttgcggtccctgtacttgccccgaaggttgaaatcacaaagattagacacctttttagataggtgttcttcagcaccactgacaacacggttctgacagtatttcatgacaatggatggtgacagttctacaacagatgcttctcaactaggaatctctgcagactatattggaggaagtcattatgttatacagcctcatgatgatactgaggacagcatgaatgatcatgaagacacaaatggttcaaaagaaagtttcagagaacaagatatatatcttccaatagcaaacgtggctaggataatgaaaaatgccatacctcaaacgggaaagattgcaaaagatgccaaagaatgtgttcaagaatgtgtaagtgagttcatcagttttataacatctgaagcaagtgaaaggtgccatcaagagaaacggaaaacaatcaatggagaagatattctctttgctatgtctactttaggctttgacagttatgtggaacctctgaaattataccttcagaaattcagagaggctatgaaaggagaaaagggaattggtggagcagtcacagctacagatggactaagtgaagagcttacagaggaggcatttactaaccagttaccagctggcttaataaccacagacggtcaacaacaaaatgttatggtttacacaacatcatatcaacagatttctggtgttcagcaaattcagttttcatgatctgaagaaatgatggaatggggagtgtagagaaatgagagtctgtatgattctggaacagagacatcagaaggaaagactggtgaaaagatgtatctttgtatattaatagctgtaatgtagcttcctgatgcttgactaattgaggtgttaattctgacttgagaatctttttcatgaatgattttaaagaaaaatttggattttaaaggtattaaaatatttttgttttgtacgagagtttgttgctctgtatgactcctgtatgcattgtatattgcaatttattactgtcagagatttgtagacagtttcttattttcatattgaatcatgttacttttgtaattcaagtaagcggctgggttaattcatgatgtttgcccttttaataaaatataagggtagagttcattttgaatgcaagttgcctttattataaatttgagtttgtcttggttataccttgcatgataacctagctagatttctagcatttgctgtatttattaaaattattatttttttggtaaaacattaatagtttaagcagcatcatttttttaaaaaatgtaattgaataagtgtgaatgcagaagcaaatattgtctgccctgttaaacttggtgcccattaacagtgtttacactgttcatcgtgcctgttaatgtagttttagttactggagcttttttaagactagatttggttttgagttacatttttaagaatgtgggaatatatttaagtttaatgtagtcctagtgctcttgaaatggtgcccctttcatttggtacatgattttttttcaaatcatatcttcaagtactatagtattctcttacagaagaggagttttatagtctgatggtaaatgtcttcattttacctttttaattgaaatgtcaagtttcctgttacactatggaaaccaagaaacatcagacatcattgcgtgtacagaccttttgcatgggtgagtggatgaaatggagaacagagtgagtgctgtgaacggtgtgaaatagaagccaacttctagtatgctgtcttcatctctgcaataaactaaacgtaaataatgtaactttgtataatttagtagtatgtacttggattgtttctttttgaaaagtgaggatttgtattttctcatctattctttttggtgttaattaacttgagggatttcttttttaagtttttaatatcaaaaattgctattgtatagtttgcctaaaaggaagttggagtgaatatcatctttgaaggacactcaaatttataaggtagaagcaatttcccagatataggctgaacagaaacatttactttgccagaaggagcctttaggagtatatgtgggctaatcagaggttaataatgtcctcatctcctactctccatttaaaaaacaaacttcattgtagtaaattcaaataggaaaaaatgggggagtagttaagcaaaatcaacagtcatcctactatgttgaaagaaccaatgttaatattttgataaatatcatttgtccttttactttgctaaatatgtatatttttataaaaatgggctcatattgtgcataccattttgtaacctgcttttttcacttaacaatatattgggaacatcttttccaggtcatgcatagtcttctgcatcatttttattggtttattattctgctgtatgactcaatcataattcatttaatcttctattggatattttgactatttacatcttttcacagttataaacagcacttcactgaatcccatgtacatccatgactgttttcttaaattctttgaattgctgggttaccaaatatgcaaaattttaaggcttttgatacttcgttatgagtgtatttttgagatattttccacttgatccaagcagtgtgtcactatataactgataaaagcacttggtctttgattatcagatactgtctctaaaattattttaaagattaatatttgttcaagtagagaatgaagataaaaaaggaatttgaggccaggtatggggtgtctcatgcctataattccagcactttgggaggccaaggcaggcagatcactttgaggtcaggagtttgagaccagcctggccaacatggagaaccccccgtctctacaaaaaatacaaaattagcagggtgtggtggtgcacacctgtagtcccttactccctggtggctgaggcattatcccttgaacctgggaggcagagcctaaagtgagccgagatcgcgccactgcactccagcctgggtgacacagcaagactcttgtctcaaacaaacaggaatttgagtaaattttaaattagtatatactacaacaaatttccaaacttcataatttgctagtagtgctaactaaaattttacaccaggtaaaatcaggtcaccttttttatgtattgacttcattgttggacttcatactctgatgggaaagaaaatggacattctgaatgtgtcaggtgcataatatcctaatttatgcttgtcagagctggggtctctgtcttccttggcccatgttgcatttaactgaatgtcatgttttctcctctggaacttcttatgtatgcaagctcccatgttaacctatcataaaaatgttttttataattttgt

SEQ ID NO: 450627 - DNA, 3615 bp, Homo sapiens
ggagtttgccataaagtgcctgccctctagcctctactcttccagttgcggcttattgcatcacagtaattgctgtacgaaggtcagaatcgctacctatgtccaaagcagtcgtaagaagaggtcccaatcccccactctttccgccctaatggaggtctccagtttcggttgaaatcacaaagattagacacctttttagataggtgttcttcagcaccactgacaacacggttctgacagtatttcatgacagttatgtaacatttgtcctgcaagctgaggacagagaccttgtctgttgttgacagctacgtgaccagcacatagcatgaacctgatggatggtgacagttctacaacagatgcttctcaactaggaatctctgcagactatattggaggaagtcattatgttatacagcctcatgatgatactgaggacagcatgaatgatcatgaagacacaaatggttcaaaagaaagtttcagagaacaagatatatatcttccaatagcaaacgtggctaggataatgaaaaatgccatacctcaaacgggaaagattgcaaaagatgccaaagaatgtgttcaagaatgtgtaagtgagttcatcagttttataacatctgaagcaagtgaaaggtgccatcaagagaaacggaaaacaatcaatggagaagatattctctttgctatgtctactttaggctttgacagttatgtggaacctctgaaattataccttcagaaattcagagaggctatgaaaggagaaaagggaattggtggagcagtcacagctacagatggactaagtgaagagcttacagaggaggcatttactaaccagttaccagctggcttaataaccacagacggtcaacaacaaaatgttatggtttacacaacatcatatcaacagatttctggtgttcagcaaattcagttttcatgatctgaagaaatgatggaatggggagtgtagagaaatgagagtctgtatgattctggaacagagacatcagaaggaaagactggtgaaaagatgtatctttgtatattaatagctgtaatgtagcttcctgatgcttgactaattgaggtgttaattctgacttgagaatctttttcatgaatgattttaaagaaaaatttggattttaaaggtattaaaatatttttgttttgtacgagagtttgttgctctgtatgactcctgtatgcattgtatattgcaatttattactgtcagagatttgtagacagtttcttattttcatattgaatcatgttacttttgtaattcaagtaagcggctgggttaattcatgatgtttgcccttttaataaaatataagggtagagttcattttgaatgcaagttgcctttattataaatttgagtttgtcttggttataccttgcatgataacctagctagatttctagcatttgctgtatttattaaaattattatttttttggtaaaacattaatagtttaagcagcatcatttttttaaaaaatgtaattgaataagtgtgaatgcagaagcaaatattgtctgccctgttaaacttggtgcccattaacagtgtttacactgttcatcgtgcctgttaatgtagttttagttactggagcttttttaagactagatttggttttgagttacatttttaagaatgtgggaatatatttaagtttaatgtagtcctagtgctcttgaaatggtgcccctttcatttggtacatgattttttttcaaatcatatcttcaagtactatagtattctcttacagaagaggagttttatagtctgatggtaaatgtcttcattttacctttttaattgaaatgtcaagtttcctgttacactatggaaaccaagaaacatcagacatcattgcgtgtacagaccttttgcatgggtgagtggatgaaatggagaacagagtgagtgctgtgaacggtgtgaaatagaagccaacttctagtatgctgtcttcatctctgcaataaactaaacgtaaataatgtaactttgtataatttagtagtatgtacttggattgtttctttttgaaaagtgaggatttgtattttctcatctattctttttggtgttaattaacttgagggatttcttttttaagtttttaatatcaaaaattgctattgtatagtttgcctaaaaggaagttggagtgaatatcatctttgaaggacactcaaatttataaggtagaagcaatttcccagatataggctgaacagaaacatttactttgccagaaggagcctttaggagtatatgtgggctaatcagaggttaataatgtcctcatctcctactctccatttaaaaaacaaacttcattgtagtaaattcaaataggaaaaaatgggggagtagttaagcaaaatcaacagtcatcctactatgttgaaagaaccaatgttaatattttgataaatatcatttgtccttttactttgctaaatatgtatatttttataaaaatgggctcatattgtgcataccattttgtaacctgcttttttcacttaacaatatattgggaacatcttttccaggtcatgcatagtcttctgcatcatttttattggtttattattctgctgtatgactcaatcataattcatttaatcttctattggatattttgactatttacatcttttcacagttataaacagcacttcactgaatcccatgtacatccatgactgttttcttaaattctttgaattgctgggttaccaaatatgcaaaattttaaggcttttgatacttcgttatgagtgtatttttgagatattttccacttgatccaagcagtgtgtcactatataactgataaaagcacttggtctttgattatcagatactgtctctaaaattattttaaagattaatatttgttcaagtagagaatgaagataaaaaaggaatttgaggccaggtatggggtgtctcatgcctataattccagcactttgggaggccaaggcaggcagatcactttgaggtcaggagtttgagaccagcctggccaacatggagaaccccccgtctctacaaaaaatacaaaattagcagggtgtggtggtgcacacctgtagtcccttactccctggtggctgaggcattatcccttgaacctgggaggcagagcctaaagtgagccgagatcgcgccactgcactccagcctgggtgacacagcaagactcttgtctcaaacaaacaggaatttgagtaaattttaaattagtatatactacaacaaatttccaaacttcataatttgctagtagtgctaactaaaattttacaccaggtaaaatcaggtcaccttttttatgtattgacttcattgttggacttcatactctgatgggaaagaaaatggacattctgaatgtgtcaggtgcataatatcctaatttatgcttgtcagagctggggtctctgtcttccttggcccatgttgcatttaactgaatgtcatgttttctcctctggaacttcttatgtatgcaagctcccatgttaacctatcataaaaatgttttttataattttgt

SEQ ID NO: 450628 - DNA, 359 bp, Homo sapiens
tgaattgcctttagtcacttgtttaaagccagttgtctagatacgtgtaggtctatttctcaactctgttccattgacttatttgtctacgtttatgcaaacaccacatactctttattattgtagtattacgttaagctttccaattagtagggttgatcctccaactgtgctcttcttcaatgttgtctaggttattctagatcctttgtgttttcatctgaattttagaatcaccttgtctatttttacaaaagctctgctgggattttttttttttttttttttttgagacagagtttcactcttgttgcccaggctggagtgcaatgatgtgatcttggctcactgcaacctcc

SEQ ID NO: 450629 - DNA, 5109 bp, Homo sapiens
gccgcagcatcggcatcgcagacgcgctcgggcggcgggtccgaggccggcgtgcgcggaggctgggcgggcagcccgagcggtggccgcagcgcagtgcccccactcccaactcccgccccaagccgcccaccagcccccttcccctccggccggagcctgaaccgagcccggctggctgtgctgcgcggtgccgccgggaaagatggtcgtggcgctgcggtacgtgtggcctctcctcctctgcagcccctgcctgcttatccagatccccgaggatatgggatgtgatggagccacctgtcatcacggaacagtctccacggcgcctggttgtcttccccacagatgacatcagcctcaagtgtgaggccagtggcaagcccgaagtgcagttccgctggacgagggatggtgtccacttcaaacccaaggaagagctgggtgtgaccgtgtaccagtcgccccactctggctccttcaccatcacgggcaacaacagcaactttgctcagaggttccagggcatctaccgctgctttgccagcaataagctgggcaccgccatgtcccatgagatccggctcatggccgagggtgcccccaagtggccaaaggagacagtgaagcccgtggaggtggaggaaggggagtcagtggttctgccttgcaaccctcccccaagtgcagagcctctccggatctactggatgaacagcaagatcttgcacatcaagcaggacgagcgggtgacgatgggccagaacggcaacctctactttgccaatgtgctcacctccgacaaccactcagactacatctgccacgcccacttcccaggcaccaggaccatcattcagaaggaacccattgacctccgggtcaaggccaccaacagcatgattgacaggaagccgcgcctgctcttccccaccaactccagcagccacctggtggccttgcaggggcagccattggtcctggagtgcatcgccgagggctttcccacgcccaccatcaaatggctgcgccccagtggccccatgccagccgaccgtgtcacctaccagaaccacaacaagaccctgcagctgctgaaagtgggcgaggaggatgatggcgagtaccgctgcctggccgagaactcactgggcagtgcccggcatgcgtactatgtcaccgtggaggctgccccgtactggctgcacaagccccagagccatctatatgggccaggagagactgcccgcctggactgccaagtccagggcaggccccaaccagaggtcacctggagaatcaacgggatccctgtggaggagctggccaaagaccagaagtaccggattcagcgtggcgccctgatcctgagcaacgtgcagcccagtgacacaatggtgacccaatgtgaggcccgcaaccggcacgggctcttgctggccaatgcctacatctacgttgtccagctgccagccaagatcctgactgcggacaatcagacgtacatggctgtccagggcagcactgcctaccttctgtgcaaggccttcggagcgcctgtgcccagtgttcagtggctggacgaggatgggacaacagtgcttcaggacgaacgcttcttcccctatgccaatgggaccctgggcattcgagacctccaggccaatgacaccggacgctacttctgcctggctgccaatgaccaaaacaatgttaccatcatggctaacctgaaggttaaagatgcaactcagatcactcaggggccccgcagcacaatcgagaagaaaggttccagggtgaccttcacgtgccaggcctcctttgacccctccttgcagcccagcatcacctggcgtggggacggtcgagacctccaggagcttggggacagtgacaagtacttcatagaggatgggcgcctggtcatccacagcctggactacagcgaccagggcaactacagctgcgtggccagtaccgaactggatgtggtggagagtagggcacagctcttggtggtggggagccctgggccggtgccacggctggtgctgtccgacctgcacctgctgacgcagagccaggtgcgcgtgtcctggagtcctgcagaagaccacaatgcccccattgagaaatatgacattgaatttgaggacaaggaaatggcgcctgaaaaatggtacagtctgggcaaggttccagggaaccagacctctaccaccctcaagctgtcgccctatgtccactacacctttagggttactgccataaacaaatatggccccggggagcccagcccggtctctgagactgtggtcacacctgaggcagccccagagaagaaccctgtggatgtgaagggggaaggaaatgagaccaccaatatggtcatcacgtggaagccgctccggtggatggactggaacgccccccaggttcagtaccgcgtgcagtggcgccctcaggggacacgagggccctggcaggagcagattgtcagcgaccccttcctggtggtgtccaacacgtccaccttcgtgccctatgagatcaaagtccaggccgtcaacagccagggcaagggaccagagccccaggtcactatcggctactctggagaggactacccccaggcaatccctgagctggaaggcattgaaatcctcaactcaagtgccgtgctggtcaagtggcggccggtggacctggcccaggtcaagggccacctccgcggatacaatgtgacgtactggagggagggcagtcagaggaagcacagcaagagacatatccacaaagaccatgtggtggtgcccgccaacaccaccagtgtcatcctcagtggcttgcggccctatagctcctaccacctggaggtgcaggcctttaacgggcgaggatcggggcccgccagcgagttcaccttcagcaccccagagggagtgcctggccaccccgaggcgttgcacctggagtgccagtcgaacaccagcctgctgctgcgctggcagcccccactcagccacaacggcgtgctcaccggctacgtgctctcctaccaccccctggatgaggggggcaaggggcaactgtccttcaaccttcgggaccccgaacttcggacacacaacctgaccgatctcagcccccacctgcggtaccgcttccagcttcaggccaccaccaaagagggccctggtgaagccatcgtacgggaaggaggcactatggccttgtctgggatctcagattttggcaacatctcagccacagcgggtgaaaactacagtgtcgtctcctgggtccccaaggagggccagtgcaacttcaggttccatatcttgttcaaagccttgggagaagagaagggtggggcttccctttcgccacagtatgtcagctacaaccagagctcctacacgcagtgggacctgcagcctgacactgactacgagatccacttgtttaaggagaggatgttccggcaccaaatggctgtgaagaccaatggcacaggccgcgtgaggctccctcctgctggcttcgccactgagggctggttcatcggctttgtgagtgccatcatcctcctgctcctcgtcctgctcatcctctgcttcatcaagcgcagcaagggcggcaaatactcagtgaaggataaggaggacacccaggtggactctgaggcccgaccgatgaaagatgagaccttcggcgagtacagtgatgacaacgaggagaaggcctttggcagcagccagccatcgctcaacggggacatcaagcccctgggcagtgacgacagcctggccgattatgggggcagcgtggatgttcagttcaacgaggatggttcgttcattggccagtacagtggcaagaaggagaaggaggcggcagggggcaatgacagctcaggggccacttcccccatcaaccctgccgtggccctagaatagtggagtccaggacaggagatgctgtgcccctggccttgggatccaggcccctccctctccagcaggcccatgggaggctggagttggggcagaggagaacttgctgcctcggatccccttcctaccacccggtccccactttattgccaaaacccagctgcaccccttcctgggcacacgctgctctgccccagcttgggcagatctcccacatgccaggggcctttgggtgctgttttgccagcccatttgggcagagaggctgtggtttgggggagaagaagtaggggtggcccgaaagggtctccgaaatgctgtctttcttgctccctgactgggggcagacatggtggggtctcctcaggaccagggttggcaccttccccctcccccagccactccccagccagcctggctgggactgggaacagaactcggtgtccccaccatctgctgtcttttctttgccatctctgctccaaccgggatgggagccgggcaaactggccgcgggggcaggggaggccatctggagagcccagagtccccccactcccagcatcgcactctggcagcaccgcctcttcccgccgcccagcccaccccatggccggctttcaggagctccatacacacgctgccttcggtacccaccacacaacatccaagtggcctccgtcactacctggctgcggggcgggcacacctcctcccactgcccactggccggcctcttccagccgcccccaccccccaggaccccttagcagccctgccctccctatcgtctgaacagttgtcttcctcagcctcctcccgcccccaccttgggaatgtaaatacaccgtgactttgaaagtttgtacccctgtccttccctttacgccactagtgtgtaggcagatgtctgagtccctaggtggtttctaggattgatagcaattagctttgatgaacccatcccaggaaaaataaaaacagacaaaaaaaaaggaaagattggttctcccagcactgctcagcagccacagcctccctgtatgcctgtgcttggtctactgataagccctctacaaaaaaacaaaagtatatatatatatgtacataatatcagaattataacaggcaaataaaacctgaaaatcaa

SEQ ID NO: 450630 - DNA, 5246 bp, Homo sapiens
  misc_feature (5065)..(5065): n is a, c, g, or t
gccgcagcatcggcatcgcagacgcgctcgggcggcgggtccgaggccggcgtgcgcggaggctgggcgggcagcccgagcggtggccgcagcgcagtgcccccactcccaactcccgccccaagccgcccaccagcccccttcccctccggccggagcctgaaccgagcccggctggctgtgctgcgcggtgccgccgggaaagatggtcgtggcgctgcggtacgtgtggcctctcctcctctgcagcccctgcctgcttatccagatccccgaggatatgggatgtgatggagccacctgtcatcacggaacagtctccacggcgcctggttgtcttccccacagatgacatcagcctcaagtgtgaggccagtggcaagcccgaagtgcagttccgctggacgagggatggtgtccacttcaaacccaaggaagagctgggtgtgaccgtgtaccagtcgccccactctggctccttcaccatcacgggcaacaacagcaactttgctcagaggttccagggcatctaccgctgctttgccagcaataagctgggcaccgccatgtcccatgagatccggctcatggccgagggtgcccccaagtggccaaaggagacagtgaagcccgtggaggtggaggaaggggagtcagtggttctgccttgcaaccctcccccaagtgcagagcctctccggatctactggatgaacagcaagatcttgcacatcaagcaggacgagcgggtgacgatgggccagaacggcaacctctactttgccaatgtgctcacctccgacaaccactcagactacatctgccacgcccacttcccaggcaccaggaccatcattcagaaggaacccattgacctccgggtcaaggccaccaacagcatgattgacaggaagccgcgcctgctcttccccaccaactccagcagccacctggtggccttgcaggggcagccattggtcctggagtgcatcgccgagggctttcccacgcccaccatcaaatggctgcgccccagtggccccatgccagccgaccgtgtcacctaccagaaccacaacaagaccctgcagctgctgaaagtgggcgaggaggatgatggcgagtaccgctgcctggccgagaactcactgggcagtgcccggcatgcgtactatgtcaccgtggaggctgccccgtactggctgcacaagccccagagccatctatatgggccaggagagactgcccgcctggactgccaagtccagggcaggccccaaccagaggtcacctggagaatcaacgggatccctgtggaggagctggccaaagaccagaagtaccggattcagcgtggcgccctgatcctgagcaacgtgcagcccagtgacacaatggtgacccaatgtgaggcccgcaaccggcacgggctcttgctggccaatgcctacatctacgttgtccagctgccagccaagatcctgactgcggacaatcagacgtacatggctgtccagggcagcactgcctaccttctgtgcaaggccttcggagcgcctgtgcccagtgttcagtggctggacgaggatgggacaacagtgcttcaggacgaacgcttcttcccctatgccaatgggaccctgggcattcgagacctccaggccaatgacaccggacgctacttctgcctggctgccaatgaccaaaacaatgttaccatcatggctaacctgaaggttaaagatgcaactcagatcactcaggggccccgcagcacaatcgagaagaaaggttccagggtgaccttcacgtgccaggcctcctttgacccctccttgcagcccagcatcacctggcgtggggacggtcgagacctccaggagcttggggacagtgacaagtacttcatagaggatgggcgcctggtcatccacagcctggactacagcgaccagggcaactacagctgcgtggccagtaccgaactggatgtggtggagagtagggcacagctcttggtggtggggagccctgggccggtgccacggctggtgctgtccgacctgcacctgctgacgcagagccaggtgcgcgtgtcctggagtcctgcagaagaccacaatgcccccattgagaaatatgacattgaatttgaggacaaggaaatggcgcctgaaaaatggtacagtctgggcaaggttccagggaaccagacctctaccaccctcaagctgtcgccctatgtccactacacctttagggttactgccataaacaaatatggccccggggagcccagcccggtctctgagactgtggtcacacctgaggcagccccagagaagaaccctgtggatgtgaagggggaaggaaatgagaccaccaatatggtcatcacgtggaagccgctccggtggatggactggaacgccccccaggttcagtaccgcgtgcagtggcgccctcaggggacacgagggccctggcaggagcagattgtcagcgaccccttcctggtggtgtccaacacgtccaccttcgtgccctatgagatcaaagtccaggccgtcaacagccagggcaagggaccagagccccaggtcactatcggctactctggagaggactacccccaggcaatccctgagctggaaggcattgaaatcctcaactcaagtgccgtgctggtcaagtggcggccggtggacctggcccaggtcaagggccacctccgcggatacaatgtgacgtactggagggagggcagtcagaggaagcacagcaagagacatatccacaaagaccatgtggtggtgcccgccaacaccaccagtgtcatcctcagtggcttgcggccctatagctcctaccacctggaggtgcaggcctttaacgggcgaggatcggggcccgccagcgagttcaccttcagcaccccagagggagtgcctggccaccccgaggcgttgcacctggagtgccagtcgaacaccagcctgctgctgcgctggcagcccccactcagccacaacggcgtgctcaccggctacgtgctctcctaccaccccctggatgaggggggcaaggggcaactgtccttcaaccttcgggaccccgaacttcggacacacaacctgaccgatctcagcccccacctgcggtaccgcttccagcttcaggccaccaccaaagagggccctggtgaagccatcgtacgggaaggaggcactatggccttgtctgggatctcagattttggcaacatctcagccacagcgggtgaaaactacagtgtcgtctcctgggtccccaaggagggccagtgcaacttcaggttccatatcttgttcaaagccttgggagaagagaagggtggggcttccctttcgccacagtatgtcagctacaaccagagctcctacacgcagtgggacctgcagcctgacactgactacgagatccacttgtttaaggagaggatgttccggcaccaaatggctgtgaagaccaatggcacaggccgcgtgaggctccctcctgctggcttcgccactgagggctggttcatcggctttgtgagtgccatcatcctcctgctcctcgtcctgctcatcctctgcttcatcaagcgcagcaagggcggcaaatactcagtgaaggataaggaggacacccaggtggactctgaggcccgaccgatgaaagatgagaccttcggcgagtacagtgatgacaacgaggagaaggcctttggcagcagccagccatcgctcaacggggacatcaagcccctgggcagtgacgacagcctggccgattatgggggcagcgtggatgttcagttcaacgaggatggttcgttcattggccagtacagtggcaagaaggagaaggaggcggcagggggcaatgacagctcaggggccacttcccccatcaaccctgccgtggccctagaatagtggagtccaggacaggagatgctgtgcccctggccttgggatccaggcccctccctctccagcaggcccatgggaggctggagttggggcagaggagaacttgctgcctcggatccccttcctaccacccggtccccactttattgccaaaacccagctgcaccccttcctgggcacacgctgctctgccccagcttgggcagatctcccacatgccaggggcctttgggtgctgttttgccagcccatttgggcagagaggctgtggtttgggggagaagaagtaggggtggcccgaaagggtctccgaaatgctgtctttcttgctccctgactgggggcagacatggtggggtctcctcaggaccagggttggcaccttccccctcccccagccactccccagccagcctggctgggactgggaacagaactcggtgtccccaccatctgctgtcttttctttgccatctctgctccaaccgggatgggagccgggcaaactggccgcgggggcaggggaggccatctggagagcccagagtccccccactcccagcatcgcactctggcagcaccgcctcttcccgccgcccagcccaccccatggccggctttcaggagctccatacacacgctgccttcggtacccaccacacaacatccaagtggcctccgtcactacctggctgcggggcgggcacacctcctcccactgcccactggccggcctcttccagccgcccccaccccccaggaccccttagcagccctgccctccctatcgtctgaacagttgtcttcctcagcctcctcccgcccccaccttgggaatgtaaatacaccgtgactttgaaagtttgtacccctgtccttccctttacgccactagtgtgtaggcagatgtctgagtccctaggtggtttctaggattgatagcaattagctttgatgaacccatcccaggaaaaataaaaacagacagcctgtgcttggtctactgataagccctctacaaaaaaacaaaactcgtgccgaattcggcacgagctttggtcatcttcacttcctgcttggagtgggcattggcactggcatctcanagaatgcccgggagcagtgtaagtctgttttcccctggcctgggttttatgtgtcctatctgtgccaccaagaagcctagaaggccaccccagcagatactacacgtgatagcaggtcttggtctaatatatctccacggagagagaggttattaccggaatgggcagacaacttggtctt

SEQ ID NO: 450631 - DNA, 4703 bp, Homo sapiens
gccgcagcatcggcatcgcagacgcgctcgggcggcgggtccgaggccggcgtgcgcggaggctgggcgggcagcccgagcggtggccgcagcgcagtgcccccactcccaactcccgccccaagccgcccaccagcccccttcccctccggccggagcctgaaccgagcccggctggctgtgctgcgcggtgccgccgggaaagatggtcgtggcgctgcggtacgtgtggcctctcctcctctgcagcccctgcctgcttatccagatccccgaggatatgggatgtgatggagccacctgtcatcacggaacagtctccacggcgcctggttgtcttccccacagatgacatcagcctcaagtgtgaggccagtggcaagcccgaagtgcagttccgctggacgagggatggtgtccacttcaaacccaaggaagagctgggtgtgaccgtgtaccagtcgccccactctggctccttcaccatcacgggcaacaacagcaactttgctcagaggttccagggcatctaccgctgctttgccagcaataagctgggcaccgccatgtcccatgagatccggctcatggccgaggtcccacgcccaccatcaaatggctgcgccccagtggccccatgccagccgaccgtgtcacctaccagaaccacaacaagaccctgcagctgctgaaagtgggcgaggaggatgatggcgagtaccgctgcctggccgagaactcactgggcagtgcccggcatgcgtactatgtcaccgtggaggctgccccgtactggctgcacaagccccagagccatctatatgggccaggagagactgcccgcctggactgccaagtccagggcaggccccaaccagaggtcacctggagaatcaacgggatccctgtggaggagctggccaaagaccagaagtaccggattcagcgtggcgccctgatcctgagcaacgtgcagcccagtgacacaatggtgacccaatgtgaggcccgcaaccggcacgggctcttgctggccaatgcctacatctacgttgtccagctgccagccaagatcctgactgcggacaatcagacgtacatggctgtccagggcagcactgcctaccttctgtgcaaggccttcggagcgcctgtgcccagtgttcagtggctggacgaggatgggacaacagtgcttcaggacgaacgcttcttcccctatgccaatgggaccctgggcattcgagacctccaggccaatgacaccggacgctacttctgcctggctgccaatgaccaaaacaatgttaccatcatggctaacctgaaggttaaagatgcaactcagatcactcaggggccccgcagcacaatcgagaagaaaggttccagggtgaccttcacgtgccaggcctcctttgacccctccttgcagcccagcatcacctggcgtggggacggtcgagacctccaggagcttggggacagtgacaagtacttcatagaggatgggcgcctggtcatccacagcctggactacagcgaccagggcaactacagctgcgtggccagtaccgaactggatgtggtggagagtagggcacagctcttggtggtggggagccctgggccggtgccacggctggtgctgtccgacctgcacctgctgacgcagagccaggtgcgcgtgtcctggagtcctgcagaagaccacaatgcccccattgagaaatatgacattgaatttgaggacaaggaaatggcgcctgaaaaatggtacagtctgggcaaggttccagggaaccagacctctaccaccctcaagctgtcgccctatgtccactacacctttagggttactgccataaacaaatatggccccggggagcccagcccggtctctgagactgtggtcacacctgaggcagccccagagaagaaccctgtggatgtgaagggggaaggaaatgagaccaccaatatggtcatcacgtggaagccgctccggtggatggactggaacgccccccaggttcagtaccgcgtgcagtggcgccctcaggggacacgagggccctggcaggagcagattgtcagcgaccccttcctggtggtgtccaacacgtccaccttcgtgccctatgagatcaaagtccaggccgtcaacagccagggcaagggaccagagccccaggtcactatcggctactctggagaggactacccccaggcaatccctgagctggaaggcattgaaatcctcaactcaagtgccgtgctggtcaagtggcggccggtggacctggcccaggtcaagggccacctccgcggatacaatgtgacgtactggagggagggcagtcagaggaagcacagcaagagacatatccacaaagaccatgtggtggtgcccgccaacaccaccagtgtcatcctcagtggcttgcggccctatagctcctaccacctggaggtgcaggcctttaacgggcgaggatcggggcccgccagcgagttcaccttcagcaccccagagggagtgcctggccaccccgaggcgttgcacctggagtgccagtcgaacaccagcctgctgctgcgctggcagcccccactcagccacaacggcgtgctcaccggctacgtgctctcctaccaccccctggatgaggggggcaaggggcaactgtccttcaaccttcgggaccccgaacttcggacacacaacctgaccgatctcagcccccacctgcggtaccgcttccagcttcaggccaccaccaaagagggccctggtgaagccatcgtacgggaaggaggcactatggccttgtctgggatctcagattttggcaacatctcagccacagcgggtgaaaactacagtgtcgtctcctgggtccccaaggagggccagtgcaacttcaggttccatatcttgttcaaagccttgggagaagagaagggtggggcttccctttcgccacagtatgtcagctacaaccagagctcctacacgcagtgggacctgcagcctgacactgactacgagatccacttgtttaaggagaggatgttccggcaccaaatggctgtgaagaccaatggcacaggccgcgtgaggctccctcctgctggcttcgccactgagggctggttcatcggctttgtgagtgccatcatcctcctgctcctcgtcctgctcatcctctgcttcatcaagcgcagcaagggcggcaaatactcagtgaaggataaggaggacacccaggtggactctgaggcccgaccgatgaaagatgagaccttcggcgagtacagtgatgacaacgaggagaaggcctttggcagcagccagccatcgctcaacggggacatcaagcccctgggcagtgacgacagcctggccgattatgggggcagcgtggatgttcagttcaacgaggatggttcgttcattggccagtacagtggcaagaaggagaaggaggcggcagggggcaatgacagctcaggggccacttcccccatcaaccctgccgtggccctagaatagtggagtccaggacaggagatgctgtgcccctggccttgggatccaggcccctccctctccagcaggcccatgggaggctggagttggggcagaggagaacttgctgcctcggatccccttcctaccacccggtccccactttattgccaaaacccagctgcaccccttcctgggcacacgctgctctgccccagcttgggcagatctcccacatgccaggggcctttgggtgctgttttgccagcccatttgggcagagaggctgtggtttgggggagaagaagtaggggtggcccgaaagggtctccgaaatgctgtctttcttgctccctgactgggggcagacatggtggggtctcctcaggaccagggttggcaccttccccctcccccagccactccccagccagcctggctgggactgggaacagaactcggtgtccccaccatctgctgtcttttctttgccatctctgctccaaccgggatgggagccgggcaaactggccgcgggggcaggggaggccatctggagagcccagagtccccccactcccagcatcgcactctggcagcaccgcctcttcccgccgcccagcccaccccatggccggctttcaggagctccatacacacgctgccttcggtacccaccacacaacatccaagtggcctccgtcactacctggctgcggggcgggcacacctcctcccactgcccactggccggcctcttccagccgcccccaccccccaggaccccttagcagccctgccctccctatcgtctgaacagttgtcttcctcagcctcctcccgcccccaccttgggaatgtaaatacaccgtgactttgaaagtttgtacccctgtccttccctttacgccactagtgtgtaggcagatgtctgagtccctaggtggtttctaggattgatagcaattagctttgatgaacccatcccaggaaaaataaaaacagacaaaaaaaaaggaaagattggttctcccagcactgctcagcagccacagcctccctgtatgcctgtgcttggtctactgataagccctctacaaaaaaacaaaagtatatatatatatgtacataatatcagaattataacaggcaaataaaacctgaaaatcaa

SEQ ID NO: 450632 - DNA, 3945 bp, Homo sapiens
gggcggctctccccttcctcccagctgccccgtactggctgcacaagccccagagccatctatatgggccaggagagactgcccgcctggactgccaagtccagggcaggccccaaccagaggtcacctggagaatcaacgggatccctgtggaggagctggccaaagaccagaagtaccggattcagcgtggcgccctgatcctgagcaacgtgcagcccagtgacacaatggtgacccaatgtgaggcccgcaaccggcacgggctcttgctggccaatgcctacatctacgttgtccagctgccagccaagatcctgactgcggacaatcagacgtacatggctgtccagggcagcactgcctaccttctgtgcaaggccttcggagcgcctgtgcccagtgttcagtggctggacgaggatgggacaacagtgcttcaggacgaacgcttcttcccctatgccaatgggaccctgggcattcgagacctccaggccaatgacaccggacgctacttctgcctggctgccaatgaccaaaacaatgttaccatcatggctaacctgaaggttaaagatgcaactcagatcactcaggggccccgcagcacaatcgagaagaaaggttccagggtgaccttcacgtgccaggcctcctttgacccctccttgcagcccagcatcacctggcgtggggacggtcgagacctccaggagcttggggacagtgacaagtacttcatagaggatgggcgcctggtcatccacagcctggactacagcgaccagggcaactacagctgcgtggccagtaccgaactggatgtggtggagagtagggcacagctcttggtggtggggagccctgggccggtgccacggctggtgctgtccgacctgcacctgctgacgcagagccaggtgcgcgtgtcctggagtcctgcagaagaccacaatgcccccattgagaaatatgacattgaatttgaggacaaggaaatggcgcctgaaaaatggtacagtctgggcaaggttccagggaaccagacctctaccaccctcaagctgtcgccctatgtccactacacctttagggttactgccataaacaaatatggccccggggagcccagcccggtctctgagactgtggtcacacctgaggcagccccagagaagaaccctgtggatgtgaagggggaaggaaatgagaccaccaatatggtcatcacgtggaagccgctccggtggatggactggaacgccccccaggttcagtaccgcgtgcagtggcgccctcaggggacacgagggccctggcaggagcagattgtcagcgaccccttcctggtggtgtccaacacgtccaccttcgtgccctatgagatcaaagtccaggccgtcaacagccagggcaagggaccagagccccaggtcactatcggctactctggagaggactacccccaggcaatccctgagctggaaggcattgaaatcctcaactcaagtgccgtgctggtcaagtggcggccggtggacctggcccaggtcaagggccacctccgcggatacaatgtgacgtactggagggagggcagtcagaggaagcacagcaagagacatatccacaaagaccatgtggtggtgcccgccaacaccaccagtgtcatcctcagtggcttgcggccctatagctcctaccacctggaggtgcaggcctttaacgggcgaggatcggggcccgccagcgagttcaccttcagcaccccagagggagtgcctggccaccccgaggcgttgcacctggagtgccagtcgaacaccagcctgctgctgcgctggcagcccccactcagccacaacggcgtgctcaccggctacgtgctctcctaccaccccctggatgaggggggcaaggggcaactgtccttcaaccttcgggaccccgaacttcggacacacaacctgaccgatctcagcccccacctgcggtaccgcttccagcttcaggccaccaccaaagagggccctggtgaagccatcgtacgggaaggaggcactatggccttgtctgggatctcagattttggcaacatctcagccacagcgggtgaaaactacagtgtcgtctcctgggtccccaaggagggccagtgcaacttcaggttccatatcttgttcaaagccttgggagaagagaagggtggggcttccctttcgccacagtatgtcagctacaaccagagctcctacacgcagtgggacctgcagcctgacactgactacgagatccacttgtttaaggagaggatgttccggcaccaaatggctgtgaagaccaatggcacaggccgcgtgaggctccctcctgctggcttcgccactgagggctggttcatcggctttgtgagtgccatcatcctcctgctcctcgtcctgctcatcctctgcttcatcaagcgcagcaagggcggcaaatactcagtgaaggataaggaggacacccaggtggactctgaggcccgaccgatgaaagatgagaccttcggcgagtacagtgatgacaacgaggagaaggcctttggcagcagccagccatcgctcaacggggacatcaagcccctgggcagtgacgacagcctggccgattatgggggcagcgtggatgttcagttcaacgaggatggttcgttcattggccagtacagtggcaagaaggagaaggaggcggcagggggcaatgacagctcaggggccacttcccccatcaaccctgccgtggccctagaatagtggagtccaggacaggagatgctgtgcccctggccttgggatccaggcccctccctctccagcaggcccatgggaggctggagttggggcagaggagaacttgctgcctcggatccccttcctaccacccggtccccactttattgccaaaacccagctgcaccccttcctgggcacacgctgctctgccccagcttgggcagatctcccacatgccaggggcctttgggtgctgttttgccagcccatttgggcagagaggctgtggtttgggggagaagaagtaggggtggcccgaaagggtctccgaaatgctgtctttcttgctccctgactgggggcagacatggtggggtctcctcaggaccagggttggcaccttccccctcccccagccactccccagccagcctggctgggactgggaacagaactcggtgtccccaccatctgctgtcttttctttgccatctctgctccaaccgggatgggagccgggcaaactggccgcgggggcaggggaggccatctggagagcccagagtccccccactcccagcatcgcactctggcagcaccgcctcttcccgccgcccagcccaccccatggccggctttcaggagctccatacacacgctgccttcggtacccaccacacaacatccaagtggcctccgtcactacctggctgcggggcgggcacacctcctcccactgcccactggccggcctcttccagccgcccccaccccccaggaccccttagcagccctgccctccctatcgtctgaacagttgtcttcctcagcctcctcccgcccccaccttgggaatgtaaatacaccgtgactttgaaagtttgtacccctgtccttccctttacgccactagtgtgtaggcagatgtctgagtccctaggtggtttctaggattgatagcaattagctttgatgaacccatcccaggaaaaataaaaacagacaaaaaaaaaggaaagattggttctcccagcactgctcagcagccacagcctccctgtatgcctgtgcttggtctactgataagccctctacaaaaaaacaaaagtatatatatatatgtacataatatcagaattataacaggcaaataaaacctgaaaatcaa

SEQ ID NO: 450633 - DNA, 4236 bp, Homo sapiens
gccgcagcatcggcatcgcagacgcgctcgggcggcgggtccgaggccggcgtgcgcggaggctgggcgggcagcccgagcggtggccgcagcgcagtgcccccactcccaactcccgccccaagccgcccaccagcccccttcccctccggccggagcctgaaccgagcccggctggctgtgctgcgcggtgccgccgggaaagatggtcgtggcgctgcggtacgtgtggcctctcctcctctgcagcccctgcctgcttatccagatccccgaggatatgggatgtgatggagccacctgtcatcacggaacagtctccacggcgcctggttgtcttccccacagatgacatcagcctcaagtgtgaggccagtggcaagcccgaagtgcagttccgctggacgagggatggtgtccacttcaaacccaaggaagagctgggtgtgaccgtgtaccagtcgccccactctggctccttcaccatcacgggcaacaacagcaactttgctcagaggttccagggcatctaccgctgctttgccagcaataagctgggcaccgccatgtcccatgagatccggctcatggccgagggtgcccccaagtggccaaaggagacagtgaagcccgtggaggtggaggaaggggagtcagtggttctgccttgcaaccctcccccaagtgcagagcctctccggatctactggatgaacagcaagatcttgcacatcaagcaggacgagcgggtgacgatgggccagaacggcaacctctactttgccaatgtgctcacctccgacaaccactcagactacatctgccacgcccacttcccaggcaccaggaccatcattcagaaggaacccattgacctccgggtcaaggccaccaacagcatgattgacaggaagccgcgcctgctcttccccaccaactccagcagccacctggtggccttgcaggggcagccattggtcctggagtgcatcgccgagggctttcccacgcccaccatcaaatggctgcgccccagtggccccatgccagccgaccgtgtcacctaccagaaccacaacaagaccctgcagctgctgaaagtgggcgaggaggatgatggcgagtaccgctgcctggccgagaactcactgggcagtgcccggcatgcgtactatgtcaccgtggaggctgccccgtactggctgcacaagccccagagccatctatatgggccaggagagactgcccgcctggactgccaagtccagggcaggccccaaccagaggtcacctggagaatcaacgggatccctgtggaggagctggccaaagaccagaagtaccggattcagcgtggcgccctgatcctgagcaacgtgcagcccagtgacacaatggtgacccaatgtgaggcccgcaaccggcacgggctcttgctggccaatgcctacatctacgttgtccagctgccagccaagatcctgactgcggacaatcagacgtacatggctgtccagggcagcactgcctaccttctgtgcaaggccttcggagcgcctgtgcccagtgttcagtggctggacgaggatgggacaacagtgcttcaggacgaacgcttcttcccctatgccaatgggaccctgggcattcgagacctccaggccaatgacaccggacgctacttctgcctggctgccaatgaccaaaacaatgttaccatcatggctaacctgaaggttaaagatgcaactcagatcactcaggggccccgcagcacaatcgagaagaaaggttccagggtgaccttcacgtgccaggcctcctttgacccctccttgcagcccagcatcacctggcgtggggacggtcgagacctccaggagcttggggacagtgacaagtacttcatagaggatgggcgcctggtcatccacagcctggactacagcgaccagggcaactacagctgcgtggccagtaccgaactggatgtggtggagagtagggcacagctcttggtggtggggagccctgggccggtgccacggctggtgctgtccgacctgcacctgctgacgcagagccaggtgcgcgtgtcctggagtcctgcagaagaccacaatgcccccattgagaaatatgacattgaatttgaggacaaggaaatggcgcctgaaaaatggtacagtctgggcaaggttccagggaaccagacctctaccaccctcaagctgtcgccctatgtccactacacctttagggttactgccataaacaaatatggccccggggagcccagcccggtctctgagactgtggtcacacctgaggcagccccagagaagaaccctgtggatgtgaagggggaaggaaatgagaccaccaatatggtcatcacgtggaagccgctccggtggatggactggaacgccccccaggttcagtaccgcgtgcagtggcgccctcaggggacacgagggccctggcaggagcagattgtcagcgaccccttcctggtggtgtccaacacgtccaccttcgtgccctatgagatcaaagtccaggccgtcaacagccagggcaagggaccagagccccaggtcactatcggctactctggagaggactacccccaggcaatccctgagctggaaggcattgaaatcctcaactcaagtgccgtgctggtcaagtggcggccggtggacctggcccaggtcaagggccacctccgcggatacaatgtgacgtactggagggagggcagtcagaggaagcacagcaagagacatatccacaaagaccatgtggtggtgcccgccaacaccaccagtgtcatcctcagtggcttgcggccctatagctcctaccacctggaggtgcaggcctttaacgggcgaggatcggggcccgccagcgagttcaccttcagcaccccagagggagtgcctggccaccccgaggcgttgcacctggagtgccagtcgaacaccagcctgctgctgcgctggcagcccccactcagccacaacggcgtgctcaccggctacgtgctctcctaccaccccctggatgaggggggcaaggggcaactgtccttcaaccttcgggaccccgaacttcggacacacaacctgaccgatctcagcccccacctgcggtaccgcttccagcttcaggccaccaccaaagagggccctggtgaagccatcgtacgggaaggaggcactatggccttgtctgggatctcagattttggcaacatctcagccacagcgggtgaaaactacagtgtcgtctcctgggtccccaaggagggccagtgcaacttcaggttccatatcttgttcaaagccttgggagaagagaagggtggggcttccctttcgccacagtatgtcagctacaaccagagctcctacacgcagtgggacctgcagcctgacactgactacgagatccacttgtttaaggagaggatgttccggcaccaaatggctgtgaagaccaatggcacaggccgcgtgaggctccctcctgctggcttcgccactgagggctggttcatcggctttgtgagtgccatcatcctcctgctcctcgtcctgctcatcctctgcttcatcaagcgcagcaagggcggcaaatactcagtgaaggataaggaggacacccaggtggactctgaggcccgaccgatgaaagatgagaccttcggcgagtacagtgacttcggtacccaccacacaacatccaagtggcctccgtcactacctggctgcggggcgggcacacctcctcccactgcccactggccggcctcttccagccgcccccaccccccaggaccccttagcagccctgccctccctatcgtctgaacagttgtcttcctcagcctcctcccgcccccaccttgggaatgtaaatacaccgtgactttgaaagtttgtacccctgtccttccctttacgccactagtgtgtaggcagatgtctgagtccctaggtggtttctaggattgatagcaattagctttgatgaacccatcccaggaaaaataaaaacagacaaaaaaaaaggaaagattggttctcccagcactgctcagcagccacagcctccctgtatgcctgtgcttggtctactgataagccctctacaaaaaaacaaaagtatatatatatatgtacataatatcagaattataacaggcaaataaaacctgaaaatcaa

SEQ ID NO: 450634 - DNA, 4588 bp, Homo sapiens
gccgcagcatcggcatcgcagacgcgctcgggcggcgggtccgaggccggcgtgcgcggaggctgggcgggcagcccgagcggtggccgcagcgcagtgcccccactcccaactcccgccccaagccgcccaccagcccccttcccctccggccggagcctgaaccgagcccggctggctgtgctgcgcggtgccgccgggaaagatggtcgtggcgctgcggtacgtgtggcctctcctcctctgcagcccctgcctgcttatccagatccccgaggatatgggatgtgatggagccacctgtcatcacggaacagtctccacggcgcctggttgtcttccccacagatgacatcagcctcaagtgtgaggccagtggcaagcccgaagtgcagttccgctggacgagggatggtgtccacttcaaacccaaggaagagctgggtgtgaccgtgtaccagtcgccccactctggctccttcaccatcacgggcaacaacagcaactttgctcagaggttccagggcatctaccgctgctttgccagcaataagctgggcaccgccatgtcccatgagatccggctcatggccgagggtgcccccaagtggccaaaggagacagtgaagcccgtggaggtggaggaaggggagtcagtggttctgccttgcaaccctcccccaagtgcagagcctctccggatctactggatgaacagcaagatcttgcacatcaagcaggacgagcgggtgacgatgggccagaacggcaacctctactttgccaatgtgctcacctccgacaaccactcagactacatctgccacgcccacttcccaggcaccaggaccatcattcagaaggaacccattgacctccgggtcaaggccaccaacagcatgattgacaggaagccgcgcctgctcttccccaccaactccagcagccacctggtggccttgcaggggcagccattggtcctggagtgcatcgccgagggctttcccacgcccaccatcaaatggctgcgccccagtggccccatgccagccgaccgtgtcacctaccagaaccacaacaagaccctgcagctgctgaaagtgggcgaggaggatgatggcgagtaccgctgcctggccgagaactcactgggcagtgcccggcatgcgtactatgtcaccgtggaggctgccccgtactggctgcacaagccccagagccatctatatgggccaggagagactgcccgcctggactgccaagtccagggcaggccccaaccagaggtcacctggagaatcaacgggatccctgtggaggagctggccaaagaccagaagtaccggattcagcgtggcgccctgatcctgagcaacgtgcagcccagtgacacaatggtgacccaatgtgaggcccgcaaccggcacgggctcttgctggccaatgcctacatctacgttgtccagctgccagccaagatcctgactgcggacaatcagacgtacatggctgtccagggcagcactgcctaccttctgtgcaaggccttcggagcgcctgtgcccagtgttcagtggctggacgaggatgggacaacagtgcttcaggacgaacgcttcttcccctatgccaatgggaccctgggcattcgagacctccaggccaatgacaccggacgctacttctgcctggctgccaatgaccaaaacaatgttaccatcatggctaacctgaaggttaaagatgcaactcagatcactcaggggccccgcagcacaatcgagaagaaaggttccagggtgaccttcacgtgccaggcctcctttgacccctccttgcagcccagcatcacctggcgtggggacggtcgagacctccaggagcttggggacagtgacaagtacttcatagaggatgggcgcctggtcatccacagcctggactacagcgaccagggcaactacagctgcgtggccagtaccgaactggatgtggtggagagtagggcacagctcttggtggtggggagccctgggccggtgccacggctggtgctgtccgacctgcacctgctgacgcagagccaggtgcgcgtgtcctggagtcctgcagaagaccacaatgcccccattgagaaatatgacattgaatttgaggacaaggaaatggcgcctgaaaaatggtacagtctgggcaaggttccagggaaccagacctctaccaccctcaagctgtcgccctatgtccactacacctttagggttactgccataaacaaatatggccccggggagcccagcccggtctctgagactgtggtcacacctgaggcagccccagagaagaaccctgtggatgtgaagggggaaggaaatgagaccaccaatatggtcatcacgtggaagccgctccggtggatggactggaacgccccccaggttcagtaccgcgtgcagtggcgccctcaggggacacgagggccctggcaggagcagattgtcagcgaccccttcctggtggtgtccaacacgtccaccttcgtgccctatgagatcaaagtccaggccgtcaacagccagggcaagggaccagagccccaggtcactatcggctactctggagaggactacccccaggcaatccctgagctggaaggcattgaaatcctcaactcaagtgccgtgctggtcaagtggcggccggtggacctggcccaggtcaagggccacctccgcggatacaatgtgacgtactggagggagggcagtcagaggaagcacagcaagagacatatccacaaagaccatgtggtggtgcccgccaacaccaccagtgtcatcctcagtggcttgcggccctatagctcctaccacctggaggtgcaggcctttaacgggcgaggatcggggcccgccagcgagttcaccttcagcaccccagagggagtgcctggccaccccgaggcgttgcacctggagtgccagtcgaacaccagcctgctgctgcgctggcagcccccactcagccacaacggcgtgctcaccggctacgtgctctcctaccaccccctggatgaggggggcaaggggcaactgtccttcaaccttcgggaccccgaacttcggacacacaacctgaccgatctcagcccccacctgcggtaccgcttccagcttcaggccaccaccaaagagggccctggtgaagccatcgtacgggaaggaggcactatggccttgtctgggatctcagattttggcaacatctcagccacagcgggtgaaaactacagtgtcgtctcctgggtccccaaggagggccagtgcaacttcaggttccatatcttgttcaaagccttgggagaaggagaaggaggcggcagggggcaatgacagctcaggggccacttcccccatcaaccctgccgtggccctagaatagtggagtccaggacaggagatgctgtgcccctggccttgggatccaggcccctccctctccagcaggcccatgggaggctggagttggggcagaggagaacttgctgcctcggatccccttcctaccacccggtccccactttattgccaaaacccagctgcaccccttcctgggcacacgctgctctgccccagcttgggcagatctcccacatgccaggggcctttgggtgctgttttgccagcccatttgggcagagaggctgtggtttgggggagaagaagtaggggtggcccgaaagggtctccgaaatgctgtctttcttgctccctgactgggggcagacatggtggggtctcctcaggaccagggttggcaccttccccctcccccagccactccccagccagcctggctgggactgggaacagaactcggtgtccccaccatctgctgtcttttctttgccatctctgctccaaccgggatgggagccgggcaaactggccgcgggggcaggggaggccatctggagagcccagagtccccccactcccagcatcgcactctggcagcaccgcctcttcccgccgcccagcccaccccatggccggctttcaggagctccatacacacgctgccttcggtacccaccacacaacatccaagtggcctccgtcactacctggctgcggggcgggcacacctcctcccactgcccactggccggcctcttccagccgcccccaccccccaggaccccttagcagccctgccctccctatcgtctgaacagttgtcttcctcagcctcctcccgcccccaccttgggaatgtaaatacaccgtgactttgaaagtttgtacccctgtccttccctttacgccactagtgtgtaggcagatgtctgagtccctaggtggtttctaggattgatagcaattagctttgatgaacccatcccaggaaaaataaaaacagacaaaaaaaaaggaaagattggttctcccagcactgctcagcagccacagcctccctgtatgcctgtgcttggtctactgataagccctctacaaaaaaacaaaagtatatatatatatgtacataatatcagaattataacaggcaaataaaacctgaaaatcaa

SEQ ID NO: 450635 - DNA, 955 bp, Homo sapiens
gccgcagcatcggcatcgcagacgcgctcgggcggcgggtccgaggccggcgtgcgcggaggctgggcgggcagcccgagcggtggccgcagcgcagtgcccccactcccaactcccgccccaagccgcccaccagcccccttcccctccggccggagcctgaaccgagcccggctggctgtgctgcgcggtgccgccgggaaagatggtcgtggcgctgcggtacgtgtggcctctcctcctctgcagcccctgcctgcttatccagatccccgaggatatgggagtagctgaagggagcctgggcgcctaccttcgccgctatgttgggcccctctttatcttctacctcctcaccttctccctgttccggaccctgactcctctccctggcctttcctgggcacagggtgggcaggagatagccaggacgttgggtacccccggagagaagggcagggtagaaggtgcggggcgtgtcaggaccatggacagggacaggcgcggccgccggggcgatttcagcaccagggacagcgaacctggagcagggccccgaggtcttgggcctcctccatgctctccttagcccgccccatctctgcccgccccactccgactcctccgcttccatcccccaccacaggggtgtggcagcaggagaatggggtcgtccccagccctcagctggcttgtgcaaaggcctgtgttcaagtcttgtccccatttctctttcccctcctgggcccttggtcaccctgtctctgaactgagacaggaaaaggtggcttgaaaaaccctggtcccagcccagcagccttctggacccttttttgtgtgtagttatttggtgggggtgggggcagggctgctggagcatgtgtctatggttgtaacatttgttgggggcacaagcaggtgagtggatgttggggagtgtggccgtagggttgtg

SEQ ID NO: 450636 - DNA, 916 bp, Homo sapiens
gccgcagcatcggcatcgcagacgcgctcgggcggcgggtccgaggccggcgtgcgcggaggctgggcgggcagcccgagcggtggccgcagcgcaggacacttgaaatatacagaaaagaacaaaagaaattaagaatcgctagtgatctgatcaccaagagggaaacacgttcagcacgccccagcctccctggtttgctacaccgcgctcctaaaaggctcctccccaagttcccagctgccagctccctgctgagcatcaggaggacaatcagcgcttcaaggtggcggggtcccctgccctgcagccagtgaagagcttccctacccaggcgctcagcatcccagcgatgggcagtcgtgtactgggcagctgctcatggccagtgctcctttgggccgggctctgggctgcccatggaagagccagtgacaaactggaccagcattgtccctgtcttcgtggggtgtcacttgttttcttttttcttgatgattatctgaagggaaaagggaggcaaagagtgaggaagggcctggcctgagggctcctacagtgagcagggtgcccagattgtgcccccaatcggcctctcccaggtccgagccctttccaccactggaactacagctggcgccttccttggcatgcacctggccaggactggcaggtgagggtcgaggagacaggcctgtgtgccctaccttgatcaccaagttccctttcaaagctcgaaaaaaaaaaaaaggggggcgtaaaattatctcgagggccaagtttagcgttaccggtttttgtaaagggccttaggggggataaaagaaagaggcgggttaaagcggggggaatgtttgggttgggagaacccttgggggttggcaaccaaagtagggatattggttggagtatggga

SEQ ID NO: 450637 - DNA, 5483 bp, Homo sapiens
gccgcagcatcggcatcgcagacgcgctcgggcggcgggtccgaggccggcgtgcgcggaggctgggcgggcagcccgagcggtggccgcagcgcagtgcccccactcccaactcccgccccaagccgcccaccagcccccttcccctccggccggagcctgaaccgagcccggctggctgtgctgcgcggtgccgccgggaaagatggtcgtggcgctgcggtacgtgtggcctctcctcctctgcagcccctgcctgcttatccagatccccgaggatatgggatgtgatggagccacctgtcatcacggaacagtctccacggcgcctggttgtcttccccacagatgacatcagcctcaagtgtgaggccagtggcaagcccgaagtgcagttccgctggacgagggatggtgtccacttcaaacccaaggaagagctgggtgtgaccgtgtaccagtcgccccactctggctccttcaccatcacgggcaacaacagcaactttgctcagaggttccagggcatctaccgctgctttgccagcaataagctgggcaccgccatgtcccatgagatccggctcatggccgagggtgcccccaagtggccaaaggagacagtgaagcccgtggaggtggaggaaggggagtcagtggttctgccttgcaaccctcccccaagtgcagagcctctccggatctactggatgaacagcaagatcttgcacatcaagcaggacgagcgggtgacgatgggccagaacggcaacctctactttgccaatgtgctcacctccgacaaccactcagactacatctgccacgcccacttcccaggcaccaggaccatcattcagaaggaacccattgacctccgggtcaaggccaccaacagcatgattgacaggaagccgcgcctgctcttccccaccaactccagcagccacctggtggccttgcaggggcagccattggtcctggagtgcatcgccgagggctttcccacgcccaccatcaaatggctgcgccccagtggccccatgccagccgaccgtgtcacctaccagaaccacaacaagaccctgcagctgctgaaagtgggcgaggaggatgatggcgagtaccgctgcctggccgagaactcactgggcagtgcccggcatgcgtactatgtcaccgtggaggctgccccgtactggctgcacaagccccagagccatctatatgggccaggagagactgcccgcctggactgccaagtccagggcaggccccaaccagaggtcacctggagaatcaacgggatccctgtggaggagctggccaaagaccagaagtaccggattcagcgtggcgccctgatcctgagcaacgtgcagcccagtgacacaatggtgacccaatgtgaggcccgcaaccggcacgggctcttgctggccaatgcctacatctacgttgtccagctgccagccaagatcctgactgcggacaatcagacgtacatggctgtccagggcagcactgcctaccttctgtgcaaggccttcggagcgcctgtgcccagtgttcagtggctggacgaggatgggacaacagtgcttcaggacgaacgcttcttcccctatgccaatgggaccctgggcattcgagacctccaggccaatgacaccggacgctacttctgcctggctgccaatgaccaaaacaatgttaccatcatggctaacctgaaggttaaagatgcaactcagatcactcaggggccccgcagcacaatcgagaagaaaggttccagggtgaccttcacgtgccaggcctcctttgacccctccttgcagcccagcatcacctggcgtggggacggtcgagacctccaggagcttggggacagtgacaagtacttcatagaggatgggcgcctggtcatccacagcctggactacagcgaccagggcaactacagctgcgtggccagtaccgaactggatgtggtggagagtagggcacagctcttggtggtggggagccctgggccggtgccacggctggtgctgtccgacctgcacctgctgacgcagagccaggtgcgcgtgtcctggagtcctgcagaagaccacaatgcccccattgagaaatatgacattgaatttgaggacaaggaaatggcgcctgaaaaatggtacagtctgggcaaggttccagggaaccagacctctaccaccctcaagctgtcgccctatgtccactacacctttagggttactgccataaacaaatatggccccggggagcccagcccggtctctgagactgtggtcacacctgaggcagccccagagaagaaccctgtggatgtgaagggggaaggaaatgagaccaccaatatggtcatcacgtggaagccgctccggtggatggactggaacgccccccaggttcagtaccgcgtgcagtggcgccctcaggggacacgagggccctggcaggagcagattgtcagcgaccccttcctggtggtgtccaacacgtccaccttcgtgccctatgagatcaaagtccaggccgtcaacagccagggcaagggaccagagccccaggtcactatcggctactctggagaggactacccccaggcaatccctgagctggaaggcattgaaatcctcaactcaagtgccgtgctggtcaagtggcggccggtggacctggcccaggtcaagggccacctccgcggatacaatgtgacgtactggagggagggcagtcagaggaagcacagcaagagacatatccacaaagaccatgtggtggtgcccgccaacaccaccagtgtcatcctcagtggcttgcggccctatagctcctaccacctggaggtgcaggcctttaacgggcgaggatcggggcccgccagcgagttcaccttcagcaccccagagggagtgcctggccaccccgaggcgttgcacctggagtgccagtcgaacaccagcctgctgctgcgctggcagcccccactcagccacaacggcgtgctcaccggctacgtgctctcctaccaccccctggatgaggggggcaaggggcaactgtccttcaaccttcgggaccccgaacttcggacacacaacctgaccgatctcagcccccacctgcggtaccgcttccagcttcaggccaccaccaaagagggccctggtgaagccatcgtacgggaaggaggcactatggccttgtctgggatctcagattttggcaacatctcagccacagcgggtgaaaactacagtgtcgtctcctgggtccccaaggagggccagtgcaacttcaggttccatatcttgttcaaagccttgggagaagagaagggtggggcttccctttcgccacagtatgtcagctacaaccagagctcctacacgcagtgggacctgcagcctgacactgactacgagatccacttgtttaaggagaggatgttccggcaccaaatggctgtgaagaccaatggcacaggccgcgtgaggctccctcctgctggcttcgccactgagggctggttcatcggctttgtgagtgccatcatcctcctgctcctcgtcctgctcatcctctgcttcatcaagcgcagcaagggcggcaaatactcagtgaaggataaggaggacacccaggtggactctgaggcccgaccgatgaaagatgagaccttcggcgagtacagtgatgacaacgaggagaaggcctttggcagcagccagccatcgctcaacggggacatcaagcccctgggcagtgacgacagcctggccgattatgggggcagcgtggatgttcagttcaacgaggatggttcgttcattggccagtacagtggcaagaaggagaaggaggcggcagggggcaatgacagctcaggggccacttcccccatcaaccctgccgtggccctagaatagtggagtccaggacaggagatgctgtgcccctggccttgggatccaggcccctccctctccagcaggcccatgggaggctggagttggggcagaggagaacttgctgcctcggatccccttcctaccacccggtccccactttattgccaaaacccagctgcaccccttcctgggcacacgctgctctgccccagcttgggcagatctcccacatgccaggggcctttgggtgctgttttgccagcccatttgggcagagaggctgtggtttgggggagaagaagtaggggtggcccgaaagggtctccgaaatgctgtctttcttgctccctgactgggggcagacatggtggggtctcctcaggaccagggttggcaccttccccctcccccagccactccccagccagcctggctgggactgggaacagaactcggtgtccccaccatctgctgtcttttctttgccatctctgctccaaccgggatgggagccgggcaaactggccgcgggggcaggggaggccatctggagagcccagagtccccccactcccagcatcgcactctggcagcaccgcctcttcccgccgcccagcccaccccatggccggctttcaggagctccatacacacgctgccttcggtacccaccacacaacatccaagtggcctccgtcactacctggctgcggggcgggcacacctcctcccactgcccactggccggcctcttccagccgcccccaccccccaggaccccttagcagccctgccctccctatcgtctgaacagttgtcttcctcagcctcctcccgcccccaccttgggaatgtaaatacaccgtgactttgaaagtttgtacccctgtccttccctttacgccactagtgtgtaggcagatgtctgagtccctaggtggtttctaggattgatagcaattagctttgatgaacccatcccaggaaaaataaaaacagacaaaaaaaaaggaaagattggttctcccagcactgctcagcagccacagcctccctgtatgcctgtgcttggtctactgataagccctctacaaaaaaacaaaagtatatatatatatgtacataatatcagaattataacaggcaaataaaacctgaaaatcaaaaaaaaaaaaaaaaaaaaaaaaaaaaaaaaaaaaaaaaaaaaacaaaaaaagaaaaacaaaaaaacaaagacaaacaaaagaaaacacaaaaaacaaagaaggaggggcgcgcgcgcgcagacgacaaactctcctcccgcgcgcggcgcaccacaaaagacgcaagccgccgcgcatgctatctagtgaaagacagggaggcccaacacaaaggggaaaggcaataaaaagaaacaaagagacggggcgcgagataagacaaacacattataacggagagaacaaacaggacaacgagtaatgatgtggaggagggaaccacgcaagagggagggagcaacacagaagcagacagaaaaccatcacagcgaga

SEQ ID NO: 450638 - DNA, 4555 bp, Homo sapiens
gccgcagcatcggcatcgcagacgcgctcgggcggcgggtccgaggccggcgtgcgcggaggctgggcgggcagcccgagcggtggccgcagcgcagtgcccccactcccaactcccgccccaagccgcccaccagcccccttcccctccggccggagcctgaaccgagcccggctggctgtgctgcgcggtgccgccgggaaagatggtcgtggcgctgcggtacgtgtggcctctcctcctctgcagcccctgcctgcttatccagatccccgaggatatgggatgtgatggagccacctgtcatcacggaacagtctccacggcgcctggttgtcttccccacagatgacatcagcctcaagtgtgaggccagtggcaagcccgaagtgcagttccgctggacgagggatggtgtccacttcaaacccaaggaagagctgggtgtgaccgtgtaccagtcgccccactctggctccttcaccatcacgggcaacaacagcaactttgctcagaggttccagggcatctaccgctgctttgccagcaataagctgggcaccgccatgtcccatgagatccggctcatggccgagggtgcccccaagtggccaaaggagacagtgaagcccgtggaggtggaggaaggggagtcagtggttctgccttgcaaccctcccccaagtgcagagcctctccggatctactggatgaacagcaagatcttgcacatcaagcaggacgagcgggtgacgatgggccagaacggcaacctctactttgccaatgtgctcacctccgacaaccactcagactacatctgccacgcccacttcccaggcaccaggaccatcattcagaaggaacccattgacctccgggtcaaggccaccaacagcatgattgacaggaagccgcgcctgctcttccccaccaactccagcagccacctggtggccttgcaggggcagccattggtcctggagtgcatcgccgagggctttcccacgcccaccatcaaatggctgcgccccagtggccccatgccagccgaccgtgtcacctaccagaaccacaacaagaccctgcagctgctgaaagtgggcgaggaggatgatggcgagtaccgctgcctggccgagaactcactgggcagtgcccggcatgcgtactatgtcaccgtggaggctgccccgtactggctgcacaagccccagagccatctatatgggccaggagagactgcccgcctggactgccaagtccagggcaggccccaaccagaggtcacctggagaatcaacgggatccctgtggaggagctggccaaagaccagaagtaccggattcagcgtggcgccctgatcctgagcaacgtgcagcccagtgacacaatggtgacccaatgtgaggcccgcaaccggcacgggctcttgctggccaatgcctacatctacgttgtccagctgccagccaagatcctgactgcggacaatcagacgtacatggctgtccagggcagcactgcctaccttctgtgcaaggccttcggagcgcctgtgcccagtgttcagtggctggacgaggatgggacaacagtgcttcaggacgaacgcttcttcccctatgccaatgggaccctgggcattcgagacctccaggccaatgacaccggacgctacttctgcctggctgccaatgaccaaaacaatgttaccatcatggctaacctgaaggttaaagatgcaactcagatcactcaggggccccgcagcacaatcgagaagaaaggttccagggtgaccttcacgtgccaggcctcctttgacccctccttgcagcccagcatcacctggcgtggggacggtcgagacctccaggagcttggggacagtgacaagtacttcatagaggatgggcgcctggtcatccacagcctggactacagcgaccagggcaactacagctgcgtggccagtaccgaactggatgtggtggagagtagggcacagctcttggtggtggggagccctgggccggtgccacggctggtgctgtccgacctgcacctgctgacgcagagccaggtgcgcgtgtcctggagtcctgcagaagaccacaatgcccccattgagaaatatgacattgaatttgaggacaaggaaatggcgcctgaaaaatggtacagtctgggcaaggttccagggaaccagacctctaccaccctcaagctgtcgccctatgtccactacacctttagggttactgccataaacaaatatggccccggggagcccagcccggtctctgagactgtggtcacacctgaggcagccccagagaagaaccctgtggatgtgaagggggaaggaaatgagaccaccaatatggtcatcacgtggaagccgctccggtggatggactggaacgccccccaggttcagtaccgcgtgcagtggcgccctcaggggacacgagggccctggcaggagcagattgtcagcgaccccttcctggtggtgtccaacacgtccaccttcgtgccctatgagatcaaagtccaggccgtcaacagccagggcaagggaccagagccccaggtcactatcggctactctggagaggactacccccaggcaatccctgagctggaaggcattgaaatcctcaactcaagtgccgtgctggtcaagtggcggccggtggacctggcccaggtcaagggccacctccgcggatacaatgtgacgtactggagggagggcagtcagaggaagcacagcaagagacatatccacaaagaccatgtggtggtgcccgccaacaccaccagtgtcatcctcagtggcttgcggccctatagctcctaccacctggaggtgcaggcctttaacgggcgaggatcggggcccgccagcgagttcaccttcagcaccccagagggagtgcctggccaccccgaggcgttgcacctggagtgccagtcgaacaccagcctgctgctgcgctggcagcccccactcagccacaacggcgtgctcaccggctacgtgctctcctaccaccccctggatgaggggggcaaggggcaactgtccttcaaccttcgggaccccgaacttcggacacacaacctgaccgatctcagcccccacctgcggtaccgcttccagcttcaggccaccaccaaagagggccctggtgaagccatcgtacgggaaggaggcactatggccttgtctgggatctcagattttggcaacatctcagccacagcgggtgaaaactacagtgtcgtctcctgggtccccaaggagggccagtgcaacttcaggttccatatcttgttcaaagccttgggagaagagaagggtggggcttccctttcgccacagtatgtcagctacaaccagagctcctacacgcagtgggacctgcagcctgacactgactacgagatccacttgtttaaggagaggatgttccggcaccaaatggctgtgaagaccaatggcacaggccgcgtgaggctccctcctgctggcttcgccactgagggctggttcatcggctttgtgagtgccatcatcctcctgctcctcgtcctgctcatcctctgcttcatcaagcgcagcaagggcggcaaatactcagtgaaggataaggaggacacccaggtggactctgaggcccgaccgatgaaagatgagaccttcggcgagtacagtgatgacaacgaggagaaggcctttggcagcagccagccatcgctcaacggggacatcaagcccctgggcagtgacgacagcctggccgattatgggggcagcgtggatgttcagttcaacgaggatggttcgttcattggccagtacagtggcaagaaggagaaggaggcggcagggggcaatgacagctcaggggccacttcccccatcaaccctgccgtggccctagaatagtggagtccaggacaggagatgctgtgcccctggccttgggatccaggcccctccctctccagcaggcccatgggaggctggagttggggcagaggagaacttgctgcctcggatccccttcctaccacccggtccccactttattgccaaaacccagctgcaccccttcctgggcacacgctgctctgccccagcttgggcagatctcccacatgccaggggcctttgggtgctgttttgccagcccatttgggcagagaggctgtggtttgggggagaagaagtaggggtggcccgaaagggtctccgaaatgctgtccttccctttacgccactagtgtgtaggcagatgtctgagtccctaggtggtttctaggattgatagcaattagctttgatgaacccatcccaggaaaaataaaaacagacaaaaaaaaaggaaagattggttctcccagcactgctcagcagccacagcctccctgtatgcctgtgcttggtctactgataagccctctacaaaaaaacaaaagtatatatatatatgtacataatatcagaattataacaggcaaataaaacctgaaaatcaa

SEQ ID NO: 450639 - DNA, 5694 bp, Homo sapiens
gccgcagcatcggcatcgcagacgcgctcgggcggcgggtccgaggccggcgtgcgcggaggctgggcgggcagcccgagcggtggccgcagcgcagtgcccccactcccaactcccgccccaagccgcccaccagcccccttcccctccggccggagcctgaaccgagcccggctggctgtgctgcgcggtgccgccgggaaagatggtcgtggcgctgcggtacgtgtggcctctcctcctctgcagcccctgcctgcttatccagatccccgaggatatgggatgtgatggagccacctgtcatcacggaacagtctccacggcgcctggttgtcttccccacagatgacatcagcctcaagtgtgaggccagtggcaagcccgaagtgcagttccgctggacgagggatggtgtccacttcaaacccaaggaagagctgggtgtgaccgtgtaccagtcgccccactctggctccttcaccatcacgggcaacaacagcaactttgctcagaggttccagggcatctaccgctgctttgccagcaataagctgggcaccgccatgtcccatgagatccggctcatggccgagggtgcccccaagtggccaaaggagacagtgaagcccgtggaggtggaggaaggggagtcagtggttctgccttgcaaccctcccccaagtgcagagcctctccggatctactggatgaacagcaagatcttgcacatcaagcaggacgagcgggtgacgatgggccagaacggcaacctctactttgccaatgtgctcacctccgacaaccactcagactacatctgccacgcccacttcccaggcaccaggaccatcattcagaaggaacccattgacctccgggtcaaggccaccaacagcatgattgacaggaagccgcgcctgctcttccccaccaactccagcagccacctggtggccttgcaggggcagccattggtcctggagtgcatcgccgagggctttcccacgcccaccatcaaatggctgcgccccagtggccccatgccagccgaccgtgtcacctaccagaaccacaacaagaccctgcagctgctgaaagtgggcgaggaggatgatggcgagtaccgctgcctggccgagaactcactgggcagtgcccggcatgcgtactatgtcaccgtggaggctgccccgtactggctgcacaagccccagagccatctatatgggccaggagagactgcccgcctggactgccaagtccagggcaggccccaaccagaggtcacctggagaatcaacgggatccctgtggaggagctggccaaagaccagaagtaccggattcagcgtggcgccctgatcctgagcaacgtgcagcccagtgacacaatggtgacccaatgtgaggcccgcaaccggcacgggctcttgctggccaatgcctacatctacgttgtccagctgccagccaagatcctgactgcggacaatcagacgtacatggctgtccagggcagcactgcctaccttctgtgcaaggccttcggagcgcctgtgcccagtgttcagtggctggacgaggatgggacaacagtgcttcaggacgaacgcttcttcccctatgccaatgggaccctgggcattcgagacctccaggccaatgacaccggacgctacttctgcctggctgccaatgaccaaaacaatgttaccatcatggctaacctgaaggttaaagatgcaactcagatcactcaggggccccgcagcacaatcgagaagaaaggttccagggtgaccttcacgtgccaggcctcctttgacccctccttgcagcccagcatcacctggcgtggggacggtcgagacctccaggagcttggggacagtgacaagtacttcatagaggatgggcgcctggtcatccacagcctggactacagcgaccagggcaactacagctgcgtggccagtaccgaactggatgtggtggagagtagggcacagctcttggtggtggggagccctgggccggtgccacggctggtgctgtccgacctgcacctgctgacgcagagccaggtgcgcgtgtcctggagtcctgcagaagaccacaatgcccccattgagaaatatgacattgaatttgaggacaaggaaatggcgcctgaaaaatggtacagtctgggcaaggttccagggaaccagacctctaccaccctcaagctgtcgccctatgtccactacacctttagggttactgccataaacaaatatggccccggggagcccagcccggtctctgagactgtggtcacacctgaggcagccccagagaagaaccctgtggatgtgaagggggaaggaaatgagaccaccaatatggtcatcacgtggaagccgctccggtggatggactggaacgccccccaggttcagtaccgcgtgcagtggcgccctcaggggacacgagggccctggcaggagcagattgtcagcgaccccttcctggtggtgtccaacacgtccaccttcgtgccctatgagatcaaagtccaggccgtcaacagccagggcaagggaccagagccccaggtcactatcggctactctggagaggactacccccaggcaatccctgagctggaaggcattgaaatcctcaactcaagtgccgtgctggtcaagtggcggccggtggacctggcccaggtcaagggccacctccgcggatacaatgtgacgtactggagggagggcagtcagaggaagcacagcaagagacatatccacaaagaccatgtggtggtgcccgccaacaccaccagtgtcatcctcagtggcttgcggccctatagctcctaccacctggaggtgcaggcctttaacgggcgaggatcggggcccgccagcgagttcaccttcagcaccccagagggagtgcctggccaccccgaggcgttgcacctggagtgccagtcgaacaccagcctgctgctgcgctggcagcccccactcagccacaacggcgtgctcaccggctacgtgctctcctaccaccccctggatgaggggggcaaggggcaactgtccttcaaccttcgggaccccgaacttcggacacacaacctgaccgatctcagcccccacctgcggtaccgcttccagcttcaggccaccaccaaagagggccctggtgaagccatcgtacgggaaggaggcactatggccttgtctgggatctcagattttggcaacatctcagccacagcgggtgaaaactacagtgtcgtctcctgggtccccaaggagggccagtgcaacttcaggttccatatcttgttcaaagccttgggagaagagaagggtggggcttccctttcgccacagtatgtcagctacaaccagagctcctacacgcagtgggacctgcagcctgacactgactacgagatccacttgtttaaggagaggatgttccggcaccaaatggctgtgaagaccaatggcacaggccgcgtgaggctccctcctgctggcttcgccactgagggctggttcatcggctttgtgagtgccatcatcctcctgctcctcgtcctgctcatcctctgcttcatcaagcgcagcaagggcggcaaatactcagtgaaggataaggaggacacccaggtggactctgaggcccgaccgatgaaagatgagaccttcggcgagtacagtgacaggtgagccggggcaggagtgggtgctggcactcagctccaccctggccttcacatctcaccccctctctctcttctctgtgctgccgggtgacttcaggtccctggagaggtaaggcaggggcggtggggaggggccaacagcaaggtctccctatagacaatgtgcgcctggtgtgccattgtcccctggctgccggggctctgacaggactctcacttcccagcccccaggcccggcagctcctcatttcagggagaggccaacacgccccagcccctcctctccacacagataccttcactgctcccctctccccaagggaggccccagacagcttcccagacaggaaccaggccccataatcccctggccgagcgcacattttctccctcacagtccccaggatctggggaatgcccaaagatgacagctccagacctgcctgccagggtggccagagctgctctttctgagcgcattctaaacaaatggaaggcaggcgggcgtctgcctcacccccagccaggctcctgcaggggctcggcagtgctctcactcgcacctgccctgtgcctctgcagtgacaacgaggagaaggcctttggcagcagccagccatcgctcaacggggacatcaagcccctgggcagtgacgacagcctggccgattatgggggcagcgtggatgttcagttcaacgaggatggttcgttcattggccagtacagtggcaagaaggagaaggaggcggcagggggcaatgacagctcaggggccacttcccccatcaaccctgccgtggccctagaatagtggagtccaggacaggagatgctgtgcccctggccttgggatccaggcccctccctctccagcaggcccatgggaggctggagttggggcagaggagaacttgctgcctcggatccccttcctaccacccggtccccactttattgccaaaacccagctgcaccccttcctgggcacacgctgctctgccccagcttgggcagatctcccacatgccaggggcctttgggtgctgttttgccagcccatttgggcagagaggctgtggtttgggggagaagaagtaggggtggcccgaaagggtctccgaaatgctgtctttcttgctccctgactgggggcagacatggtggggtctcctcaggaccagggttggcaccttccccctcccccagccactccccagccagcctggctgggactgggaacagaactcggtgtccccaccatctgctgtcttttctttgccatctctgctccaaccgggatgggagccgggcaaactggccgcgggggcaggggaggccatctggagagcccagagtccccccactcccagcatcgcactctggcagcaccgcctcttcccgccgcccagcccaccccatggccggctttcaggagctccatacacacgctgccttcggtacccaccacacaacatccaagtggcctccgtcactacctggctgcggggcgggcacacctcctcccactgcccactggccggcctcttccagccgcccccaccccccaggaccccttagcagccctgccctccctatcgtctgaacagttgtcttcctcagcctcctcccgcccccaccttgggaatgtaaatacaccgtgactttgaaagtttgtacccctgtccttccctttacgccactagtgtgtaggcagatgtctgagtccctaggtggtttctaggattgatagcaattagctttgatgaacccatcccaggaaaaataaaaacagacaaaaaaaaaggaaagattggttctcccagcactgctcagcagccacagcctccctgtatgcctgtgcttggtctactgataagccctctacaaaaaaacaaaagtatatatatatatgtacataatatcagaattataacaggcaaataaaacctgaaaatcaa

SEQ ID NO: 450640 - DNA, 3788 bp, Homo sapiens
gccgcagcatcggcatcgcagacgcgctcgggcggcgggtccgaggccggcgtgcgcggaggctgggcgggcagcccgagcggtggccgcagcgcagtgcccccactcccaactcccgccccaagccgcccaccagcccccttcccctccggccggagcctgaaccgagcccggctggctgtgctgcgcggtgccgccgggaaagatggtcgtggcgctgcggtacgtgtggcctctcctcctctgcagcccctgcctgcttatccagatccccgaggatatgggatgtgatggagccacctgtcatcacggaacagtctccacggcgcctggttgtcttccccacagatgacatcagcctcaagtgtgaggccagtggcaagcccgaagtgcagttccgctggacgagggatggtgtccacttcaaacccaaggaagagctgggtgtgaccgtgtaccagtcgccccactctggctccttcaccatcacgggcaacaacagcaactttgctcagaggttccagggcatctaccgctgctttgccagcaataagctgggcaccgccatgtcccatgagatccggctcatggccgagggtgcccccaagtggccaaaggagacagtgaagcccgtggaggtggaggaaggggagtcagtggttctgccttgcaaccctcccccaagtgcagagcctctccggatctactggatgaacagcaagatcttgcacatcaagcaggacgagcgggtgacgatgggccagaacggcaacctctactttgccaatgtgctcacctccgacaaccactcagactacatctgccacgcccacttcccaggcaccaggaccatcattcagaaggaacccattgacctccgggtcaaggccaccaacagcatgattgacaggaagccgcgcctgctcttccccaccaactccagcagccacctggtggccttgcaggggcagccattggtcctggagtgcatcgccgagggctttcccacgcccaccatcaaatggctgcgccccagtggccccatgccagccgaccgtgtcacctaccagaaccacaacaagaccctgcagctgctgaaagtgggcgaggaggatgatggcgagtaccgctgcctggccgagaactcactgggcagtgcccggcatgcgtactatgtcaccgtggaggctgccccgtactggctgcacaagccccagagccatctatatgggccaggagagactgcccgcctggactgccaagtccagggcaggccccaaccagaggtcacctggagaatcaacgggatccctgtggaggagctggccaaagaccagaagtaccggattcagcgtggcgccctgatcctgagcaacgtgcagcccagtgacacaatggtgacccaatgtgaggcccgcaaccggcacgggctcttgctggccaatgcctacatctacgttgtccagctgccagccaagatcctgactgcggacaatcagacgtacatggctgtccagggcagcactgcctaccttctgtgcaaggccttcggagcgcctgtgcccagtgttcagtggctggacgaggatgggacaacagtgcttcaggacgaacgcttcttcccctatgccaatgggaccctgggcattcgagacctccaggccaatgacaccggacgctacttctgcctggctgccaatgaccaaaacaatgttaccatcatggctaacctgaaggttaaagatgcaactcagatcactcaggggccccgcagcacaatcgagaagaaaggttccagggtgaccttcacgtgccaggcctcctttgacccctccttgcagcccagcatcacctggcgtggggacggtcgagacctccaggagcttggggacagtgacaagtacttcatagaggatgggcgcctggtcatccacagcctggactacagcgaccagggcaactacagctgcgtggccagtaccgaactggatgtggtggagagtagggcacagctcttggtggtggggagccctgggccggtgccacggctggtgctgtccgacctgcacctgctgacgcagagccaggtgcgcgtgtcctggagtcctgcagaagaccacaatgcccccattgagaaatatgacattgaatttgaggacaaggaaatggcgcctgaaaaatggtacagtctgggcaaggttccagggaaccagacctctaccaccctcaagctgtcgccctatgtccactacacctttagggttactgccataaacaaatatggccccggggagcccagcccggtctctgagactgtggtcacacctgaggcagccccagagaagaaccctgtggatgtgaagggggaaggaaatgagaccaccaatatggtcatcacgtggaagccgctccggtggatggactggaacgccccccaggttcagtaccgcgtgcagtggcgccctcaggggacacgagggccctggcaggagcagattgtcagcgaccccttcctggtggtgtccaacacgtccaccttcgtgccctatgagatcaaagtccaggccgtcaacagccagggcaagggaccagagccccaggtcactatcggctactctggagaggactacccccaggcaatccctgagctggaaggcattgaaatcctcaactcaagtgccgtgctggtcaagtggcggccggtggacctggcccaggtcaagggccacctccgcggatacaatgtgacgtactggagggagggcagtcagaggaagcacagcaagagacatatccacaaagaccatgtggtggtgcccgccaacaccaccagtgtcatcctcagtggcttgcggccctatagctcctaccacctggaggtgcaggcctttaacgggcgaggatcggggcccgccagcgagttcaccttcagcaccccagagggagtgcctggccaccccgaggcgttgcacctggagtgccagtcgaacaccagcctgctgctgcgctggcagcccccactcagccacaacggcgtgctcaccggctacgtgctctcctaccaccccctggatgaggggggcaaggggcaactgtccttcaaccttcgggaccccgaacttcggacacacaacctgaccgatctcagcccccacctgcggtaccgcttccagcttcaggccaccaccaaagagggccctggtgaagccatcgtacgggaaggaggcactatggccttgtctgggatctcagattttggcaacatctcagccacagcgggtgaaaactacagtgtcgtctcctgggtccccaaggagggccagtgcaacttcaggttccatatcttgttcaaagccttgggagaagagaagggtggggcttccctttcgccacagtatgtcagctacaaccagagctcctacacgcagtgggacctgcagcctgacactgactacgagatccacttgtttaaggagaggatgttccggcaccaaatggctgtgaagaccaatggcacaggccgcgtgaggctccctcctgctggcttcgccactgagggctggttcatcggctttgtgagtgccatcatcctcctgctcctcgtcctgctcatcctctgcttcatcaagcgcagcaagggcggcaaatactcagtgaaggataaggaggacacccaggtggactctgaggcccgaccgatgaaagatgagaccttcggcgagtacagtgatacaacaaggaggctcgacatgtctgggatcctctagataagaccaggagcatcactc

SEQ ID NO: 450641 - DNA, 1614 bp, Homo sapiens
gccgcagcatcggcatcgcagacgcgctcgggcggcgggtccgaggccggcgtgcgcggaggctgggcgggcagcccgagcggtggccgcagcgcagtgcccccactcccaactcccgccccaagccgcccaccagcccccttcccctccggccggagcctgaaccgagcccggctggctgtgctgcgcggtgccgccgggaaagatggtcgtggcgctgcggtacgtgtggcctctcctcctctgcagcccctgcctgcttatccagatccccgaggatatgggatgtgatggagccacctgtcatcacggaacagtctccacggcgcctggttgtcttccccacagatgacatcagcctcaagtgtgaggccagtggcaagcccgaagtgcagttccgctggacgagggatggtgtccacttcaaacccaaggaagagctgggtgtgaccgtgtaccagtcgccccactctggctccttcaccatcacgggcaacaacagcaactttgctcagaggttccagggcatctaccgctgctttgccagcaataagctgggcaccgccatgtcccatgagatccggctcatggccgagggtgcccccaagtggccaaaggagacagtgaagcccgtggaggtggaggaaggggagtcagtggttctgccttgcaaccctcccccaagtgcagagcctctccggatctactggatgaacagcaagatcttgcacatcaagcaggacgagcgggtgacgatgggccagaacggcaacctctactttgccaatgtgctcacctccgacaaccactcagactacatctgccacgcccacttcccaggcaccaggaccatcattcagaaggaacccattgacctccgggtcaaggccaccaacagcatgattgacaggaagccgcgcctgctcttccccaccaactccagcagccacctggtggccttgcaggggcagccattggtcctggagtgcatcgccgagggctttcccacgcccaccatcaaatggctgcgccccagtggccccatgccagccgaccgtgtcacctaccagaaccacaacaagaccctgcagctgctgaaagtgggcgaggaggatgatggcgagtaccgctgcctggccgagaactcactgggcagtgcccggcatgcgtactatgtcaccgtggagggtatggacctcctgggacaccgcccccaccccccaggaccccttagcagccctgccctccctatcgtctgaacagttgtcttcctcagcctcctcccgcccccaccttgggaatgtaaatacaccgtgactttgaaagtttgtacccctgtccttccctttacgccactagtgtgtaggcagatgtctgagtccctaggtggtttctaggattgatagcaattagctttgatgaacccatcccaggaaaaataaaaacagacaaaaaaaaaggaaagattggttctcccagcactgctcagcagccacagcctccctgtatgcctgtgcttggtctactgataagccctctacaaaaaaacaaaagtatatatatatatgtacataatatcagaattataacaggcaaataaaacctgaaaatcaa

SEQ ID NO: 450642 - DNA, 2207 bp, Homo sapiens
tcagggtgggacgtgggcgcggggagacaggtggtggctacgacggcgaagggagctgagactgtccaggcagccaggttaggccaggaggaccatgtgaatggggccagagggctcccgggctgggcagggaccatgggctgtggctgcagctcacacccggaagatgactggatggaaaacatcgatgtgtgtgagaactgccattatcccatagtcccactggatggcaagggcacgctgctcatccgaaatggctctgaggtgcgggacccactggttacctacgaaggctccaatccgccggcttccccactgcaagacaacctggttatcgctctgcacagctatgagccctctcacgacggagatctgggctttgagaagggggaacagctccgcatcctggagcagagcggcgagtggtggaaggcgcagtccctgaccacgggccaggaaggcttcatccccttcaattttgtggccaaagcgaacagcctggagcccgaaccctggttcttcaagaacctgagccgcaaggacgcggagcggcagctcctggcgcccgggaacactcacggctccttcctcatccgggagagcgagagcaccgcgggatcgttttcactgtcggtccgggacttcgaccagaaccagggagaggtggtgaaacattacaagatccgtaatctggacaacggtggcttctacatctcccctcgaatcacttttcccggcctgcatgaactggtccgccattacaccaatgcttcagatgggctgtgcacacggttgagccgcccctgccagacccagaagccccagaagccgtggtgggaggacgagtgggaggttcccagggagacgctgaagctggtggagcggctgggggctggacagttcggggaggtgtggatggggtactacaacgggcacacgaaggtggcggtgaagagcctgaagcagggcagcatgtccccggacgccttcctggccgaggccaacctcatgaagcagctgcaacaccagcggctggttcggctctacgctgtggtcacccaggagcccatctacatcatcactgaatacatggagaatgggagtctagtggattttctcaagaccccttcaggcatcaagttgaccatcaacaaactcctggacatggcagcccaagtaaggagactggggaggggggctgggcaagggaacagaccagtgacgtgaagacatctggctcaggaccgctgatctgtgtttggcctgcagattgcagaaggcatggcattcattgaagagcggaattatattcatcgtgaccttcgggctgccaacattctggtgtctgacaccctgagctgcaagattgcagactttggcctagcacgcctcattgaggacaacgagtacacagccagggagggggccaagtttcccattaagtggacagcgccagaagccattaactacgggacattcaccatcaagtcagatgtgtggtcttttgggatcctgctgacggaaattgtcacccacggccgcatcccttacccagggatgaccaacccggaggtgattcagaacctggagcgaggctaccgcatggtgcgccctgacaactgtccagaggagctgtaccaactcatgaggctgtgctggaaggagcgcccagaggaccggcccacctttgactacctgcgcagtgtgctggaggacttcttcacggccacagagggccagtaccagcctcagccttgagaggccttgagaggccctggggttctccccctttctctccagcctgacttggggagatggagttcttgtgccatagtcacatggcctatgcacatatggactctgcacatgaatcccacccacatgtgacacatatgcaccttgtgtctgtacacgtgtcctgtagttgcgtggactctgcacatgtcttgtacatgtgtagcctgtgcatgtatgtcttggacactgtacaaggtacccctttctggctctcccatttcctgagaccacagagagaggggagaagcctgggattgacagaagcttctgcccacctacttttctttcctcagatcatccagaagttcctcaagggccaggactttatctaatacctctgtgtgctcctccttggtgcctggcctggcacacatcaggagttcaataaatgtctgttgatgactgttgta

SEQ ID NO: 450643 - DNA, 2092 bp, Homo sapiens
ttacttgtagcctgagggctcagagggagcaccggtttggagctgggaccccctattttagcttttctgtggctggtgaatggggatcccaggatctcacaatctcagggaccatgggctgtggctgcagctcacacccggaagatgactggatggaaaacatcgatgtgtgtgagaactgccattatcccatagtcccactggatggcaagggcacgctgctcatccgaaatggctctgaggtgcgggacccactggttacctacgaaggctccaatccgccggcttccccactgcaagacaacctggttatcgctctgcacagctatgagccctctcacgacggagatctgggctttgagaagggggaacagctccgcatcctggagcagagcggcgagtggtggaaggcgcagtccctgaccacgggccaggaaggcttcatccccttcaattttgtggccaaagcgaacagcctggagcccgaaccctggttcttcaagaacctgagccgcaaggacgcggagcggcagctcctggcgcccgggaacactcacggctccttcctcatccgggagagcgagagcaccgcgggatcgttttcactgtcggtccgggacttcgaccagaaccagggagaggtggtgaaacattacaagatccgtaatctggacaacggtggcttctacatctcccctcgaatcacttttcccggcctgcatgaactggtccgccattacaccaatgcttcagatgggctgtgcacacggttgagccgcccctgccagacccagaagccccagaagccgtggtgggaggacgagtgggaggttcccagggagacgctgaagctggtggagcggctgggggctggacagttcggggaggtgtggatggggtactacaacgggcacacgaaggtggcggtgaagagcctgaagcagggcagcatgtccccggacgccttcctggccgaggccaacctcatgaagcagctgcaacaccagcggctggttcggctctacgctgtggtcacccaggagcccatctacatcatcactgaatacatggagaatgggagtctagtggattttctcaagaccccttcaggcatcaagttgaccatcaacaaactcctggacatggcagcccaaattgcagaaggcatggcattcattgaagagcggaattatattcatcgtgaccttcgggctgccaacattctggtgtctgacaccctgagctgcaagattgcagactttggcctagcacgcctcattgaggacaacgagtacacagccagggagggggccaagtttcccattaagtggacagcgccagaagccattaactacgggacattcaccatcaagtcagatgtgtggtcttttgggatcctgctgacggaaattgtcacccacggccgcatcccttacccagggatgaccaacccggaggtgattcagaacctggagcgaggctaccgcatggtgcgccctgacaactgtccagaggagctgtaccaactcatgaggctgtgctggaaggagcgcccagaggaccggcccacctttgactacctgcgcagtgtgctggaggacttcttcacggccacagagggccagtaccagcctcagccttgagaggccttgagaggccctggggttctccccctttctctccagcctgacttggggagatggagttcttgtgccatagtcacatggcctatgcacatatggactctgcacatgaatcccacccacatgtgacacatatgcaccttgtgtctgtacacgtgtcctgtagttgcgtggactctgcacatgtcttgtacatgtgtagcctgtgcatgtatgtcttggacactgtacaaggtacccctttctggctctcccatttcctgagaccacagagagaggggagaagcctgggattgacagaagcttctgcccacctacttttctttcctcagatcatccagaagttcctcaagggccaggactttatctaatacctctgtgtgctcctccttggtgcctggcctggcacacatcaggagttcaataaatgtctgttgatgactgttgta

SEQ ID NO: 450644 - DNA, 2496 bp, Homo sapiens
ttacttgtagcctgagggctcagagggagcaccggtttggagctgggaccccctattttagcttttctgtggctggtgaatggggatcccaggatctcacaatctcagggaccatgggctgtggctgcagctcacacccggaagatgactggatggaaaacatcgatgtgtgtgagaactgccattatcccatagtcccactggatggcaagggcacgctgctcatccgaaatggctctgaggtgcgggacccactggttacctacgaaggctccaatccgccggcttccccactgcaagacaacctggttatcgctctgcacagctatgagccctctcacgacggagatctgggctttgagaagggggaacagctccgcatcctggagcagagcggcgagtggtggaaggcgcagtccctgaccacgggccaggaaggcttcatccccttcaattttgtggccaaagcgaacagcctggagcccgaaccctggttcttcaagaacctgagccgcaaggacgcggagcggcagctcctggcgcccgggaacactcacggctccttcctcatccgggagagcgagagcaccgcgggatcgttttcactgtcggtccgggacttcgaccagaaccagggagaggtggtgaaacattacaagatccgtaatctggacaacggtggcttctacatctcccctcgaatcacttttcccggcctgcatgaactggtccgccattacaccaatgcttcagatgggctgtgcacacggttgagccgcccctgccagacccagaagccccagaagccgtggtgggaggacgagtgggaggttcccagggagacgctgaagctggtggagcggctgggggctggacagttcggggaggtgtggatggggtactacaacgggcacacgaaggtggcggtgaagagcctgaagcagggcagcatgtccccggacgccttcctggccgaggccaacctcatgaagcagctgcaacaccagcggctggttcggctctacgctgtggtcacccaggagcccatctacatcatcactgaatacatggagaatgggagtctagtggattttctcaagaccccttcaggcatcaagttgaccatcaacaaactcctggacatggcagcccaaattgcagaaggcatggcattcattgaagagcggaattatattcatcgtgaccttcgggctgccaacattctggtgtctgacaccctgagctgcaagattgcagactttggcctagcacgcctcattgaggacaacgagtacacagccagggagggggccaagtttcccattaagtggacagcgccagaagccattaactacgggacattcaccatcaagtcagatgtgtggtcttttgggatcctgctgacggaaattgtcacccacggccgcatcccttacccagggatgaccaacccggaggtgattcagaacctggagcgaggctaccgcatggtgcgccctgacaactgtccagaggagctgtaccaactcatgaggctgtgctggaaggagcgcccagaggaccggcccacctttgactacctgcgcagtgtgctggaggacttcttcacggccacagagggccagtaccagcctcagccttgagaggccttgagaggccctggggttctccccctttctctccagcctgacttggggagatggagttcttgtgccatagtcacatggcctatgcacatatggactctgcacatgaatcccacccacatgtgacacatatgcaccttgtgtctgtacacgtgtcctgtagttgcgtggactctgcacatgtcttgtacatgtgtagcctgtgcatgtatgtcttggacactgtacaaggtacccctttctggctctcccatttcctgagaccacagagagaggggagaagcctgggattgacagaagcttctgcccacctacttttctttcctcagatcatccagaagttcctcaagggccaggactttatctaatacctctgtgtgctcctccttggtgcctggcctggcacacatcaggagttcaataaatgtctgttgatgactgttgtaacaacaaaacacacacaccaaacacacacaacacaacaaaaaaaaacaacacaaaagagggcggccacacacacaacaaaaatacccacacaagagagcccccaaaagcgaaccgcccaacacacccaagaacccgacacacacaaaagggggcgcccacaacaaggggagcccacggacagaccacacaacagaccaacagaaacacacgcagccccccgcacacgatatcacaacccacacaccaagagacacgcgcgcaacacaaaatagcaaacccagcgacgaaaccaaaactgacaaaacaacgacccaccaaaaccttcagggagagagcacacacacacagcgcgacaagaaaacccgcccaacaagacatcaacagccccacagagaggaacaaa

SEQ ID NO: 450645 - DNA, 1961 bp, Homo sapiens
tcagggtgggacgtgggcgcggggagacaggtggtggctacgacggcgaagggagctgagactgtccaggcagccaggttaggccaggaggaccatgtgaatggggccagagggctcccgggctgggcagggaccatgggctgtggctgcagctcacacccggaagatgactggatggaaaacatcgatgtgtgtgagaactgccattatcccatagtcccactggatggcaagggcacgctgctcatccgaaatggctctgaggtgcgggacccactggttacctacgaaggctccaatccgccggcttccccactgcaagacaacctggttatcgctctgcacagctatgagccctctcacgacggagatctgggctttgagaagggggaacagctccgcatcctggagcagagcggcgagtggtggaaggcgcagtccctgaccacgggccaggaaggcttcatccccttcaattttgtggccaaagcgaacagcctggagcccgaaccctggttcttcaagaacctgagccgcaaggacgcggagcggcagctcctggcgcccgggaacactcacggctccttcctcatccgggagagcgagagcaccgcgggatcgttttcactgtcggtccgggacttcgaccagaaccagggagaggtggtgaaacattacaagatccgtaatctggacaacggtggcttctacatctcccctcgaatcacttttcccggcctgcatgaactggtccgccattacaccaggtactacaacgggcacacgaaggtggcggtgaagagcctgaagcagggcagcatgtccccggacgccttcctggccgaggccaacctcatgaagcagctgcaacaccagcggctggttcggctctacgctgtggtcacccaggagcccatctacatcatcactgaatacatggagaatgggagtctagtggattttctcaagaccccttcaggcatcaagttgaccatcaacaaactcctggacatggcagcccaaattgcagaaggcatggcattcattgaagagcggaattatattcatcgtgaccttcgggctgccaacattctggtgtctgacaccctgagctgcaagattgcagactttggcctagcacgcctcattgaggacaacgagtacacagccagggagggggccaagtttcccattaagtggacagcgccagaagccattaactacgggacattcaccatcaagtcagatgtgtggtcttttgggatcctgctgacggaaattgtcacccacggccgcatcccttacccagggatgaccaacccggaggtgattcagaacctggagcgaggctaccgcatggtgcgccctgacaactgtccagaggagctgtaccaactcatgaggctgtgctggaaggagcgcccagaggaccggcccacctttgactacctgcgcagtgtgctggaggacttcttcacggccacagagggccagtaccagcctcagccttgagaggccttgagaggccctggggttctccccctttctctccagcctgacttggggagatggagttcttgtgccatagtcacatggcctatgcacatatggactctgcacatgaatcccacccacatgtgacacatatgcaccttgtgtctgtacacgtgtcctgtagttgcgtggactctgcacatgtcttgtacatgtgtagcctgtgcatgtatgtcttggacactgtacaaggtacccctttctggctctcccatttcctgagaccacagagagaggggagaagcctgggattgacagaagcttctgcccacctacttttctttcctcagatcatccagaagttcctcaagggccaggactttatctaatacctctgtgtgctcctccttggtgcctggcctggcacacatcaggagttcaataaatgtctgttgatgactgttgta

SEQ ID NO: 450646 - DNA, 1436 bp, Homo sapiens
ttacttgtagcctgagggctcagagggagcaccggtttggagctgggaccccctattttagcttttctgtggctggtgaatggggatcccaggatctcacaatctcaggtacttttggaactttccagggcaaggccccattatatctgatgttgggggagcagatcttgggaggttcccagggagacgctgaagctggtggagcggctgggggctggacagttcggggaggtgtggatggggtactacaacgggcacacgaaggtggcggtgaagagcctgaagcagggcagcatgtccccggacgccttcctggccgaggccaacctcatgaagcagctgcaacaccagcggctggttcggctctacgctgtggtcacccaggagcccatctacatcatcactgaatacatggagaatgggagtctagtggattttctcaagaccccttcaggcatcaagttgaccatcaacaaactcctggacatggcagcccaaattgcagaaggcatggcattcattgaagagcggaattatattcatcgtgaccttcgggctgccaacattctggtgtctgacaccctgagctgcaagattgcagactttggcctagcacgcctcattgaggacaacgagtacacagccagggagggggccaagtttcccattaagtggacagcgccagaagccattaactacgggacattcaccatcaagtcagatgtgtggtcttttgggatcctgctgacggaaattgtcacccacggccgcatcccttacccagggatgaccaacccggaggtgattcagaacctggagcgaggctaccgcatggtgcgccctgacaactgtccagaggagctgtaccaactcatgaggctgtgctggaaggagcgcccagaggaccggcccacctttgactacctgcgcagtgtgctggaggacttcttcacggccacagagggccagtaccagcctcagccttgagaggccttgagaggccctggggttctccccctttctctccagcctgacttggggagatggagttcttgtgccatagtcacatggcctatgcacatatggactctgcacatgaatcccacccacatgtgacacatatgcaccttgtgtctgtacacgtgtcctgtagttgcgtggactctgcacatgtcttgtacatgtgtagcctgtgcatgtatgtcttggacactgtacaaggtacccctttctggctctcccatttcctgagaccacagagagaggggagaagcctgggattgacagaagcttctgcccacctacttttctttcctcagatcatccagaagttcctcaagggccaggactttatctaatacctctgtgtgctcctccttggtgcctggcctggcacacatcaggagttcaataaatgtctgttgatgactgttgta

SEQ ID NO: 450647 - DNA, 1405 bp, Homo sapiens
tcagggtgggacgtgggcgcggggagacaggtggtggctacgacggcgaagggagctgagactgtccaggcagccaggttaggccaggaggaccatgtgaatggggccagagggctcccgggctgggcagggaccatgggctgtggctgcagctcacacccggaagatgactggatggaaaacatcgatgtgtgtgagaactgccattatcccatagtcccactggatggcaagggcacgctgctcatccgaaatggctctgaggtgcgggacccactggttacctacgaaggctccaatccgccggcttccccactgcaagacaacctggttatcgctctgcacagctatgagccctctcacgacggagatctgggctttgagaagggggaacagctccgcatcctggagcagagcggcgagtggtggaaggcgcagtccctgaccacgggccaggaaggcttcatccccttcaattttgtggccaaagcgaacagcctggagcccgaaccctggttcttcaagaacctgagccgcaaggacgcggagcggcagctcctggcgcccgggaacactcacggctccttcctcatccgggagagcgagagcaccgcgggatcgttttcactgtcggtccgggacttcgaccagaaccagggagaggtggtgaaacattacaagatccgtaatctggacaacggtggcttctacatctcccctcgaatcacttttcccggcctgcatgaactggtccgccattacaccaatgcttcagatgggctgtgcacacggttgagccgcccctgccagacccagaagccccagaagccgtggtgggaggacgagtgggaggttcccagggagacgctgaagctggtggagcggctgggggctggacagttcggggaggtgtggatggggtactacaacgggcacacgaaggtggcggtgaagagcctgaagcagggcagcatgtccccggacgccttcctggccgaggccaacctcatgaagcagctgcaacaccagcggctggttcggctctacgctgtggtcacccaggagcccatctacatcatcactgaatacatggagaatgggagtctagtggattttctcaagaccccttcaggcatcaagttgaccatcaacaaactcctggacatggcagcccaaattgcagaaggcatggcattcattgaagagcggaattatattcatcgtgaccttcgggctgccaacattctggtgtctgacaccctgagctgcaagattgcagactttggcctagcacgcctcattgaggacaacgagtacacagccagggaggccgccaagtttcccattaagtggacagcgccagaagcctgtgccaactctctgcattcctgctcttcaccgccat

SEQ ID NO: 450648 - DNA, 2114 bp, Homo sapiens
tcagggtgggacgtgggcgcggggagacaggtggtggctacgacggcgaagggagctgagactgtccaggcagccaggttaggccaggaggaccatgtgaatggggccagagggctcccgggctgggcagggaccatgggctgtggctgcagctcacacccggaagatgactggatggaaaacatcgatgtgtgtgagaactgccattatcccatagtcccactggatggcaagggcacgctgctcatccgaaatggctctgaggtgcgggacccactggttacctacgaaggctccaatccgccggcttccccactgcaagacaacctggttatcgctctgcacagctatgagccctctcacgacggagatctgggctttgagaagggggaacagctccgcatcctggagcagagcggcgagtggtggaaggcgcagtccctgaccacgggccaggaaggcttcatccccttcaattttgtggccaaagcgaacagcctggagcccgaaccctggttcttcaagaacctgagccgcaaggacgcggagcggcagctcctggcgcccgggaacactcacggctccttcctcatccgggagagcgagagcaccgcgggatcgttttcactgtcggtccgggacttcgaccagaaccagggagaggtggtgaaacattacaagatccgtaatctggacaacggtggcttctacatctcccctcgaatcacttttcccggcctgcatgaactggtccgccattacaccaatgcttcagatgggctgtgcacacggttgagccgcccctgccagacccagaagccccagaagccgtggtgggaggacgagtgggaggttcccagggagacgctgaagctggtggagcggctgggggctggacagttcggggaggtgtggatggggtactacaacgggcacacgaaggtggcggtgaagagcctgaagcagggcagcatgtccccggacgccttcctggccgaggccaacctcatgaagcagctgcaacaccagcggctggttcggctctacgctgtggtcacccaggagcccatctacatcatcactgaatacatggagaatgggagtctagtggattttctcaagaccccttcaggcatcaagttgaccatcaacaaactcctggacatggcagcccaaattgcagaaggcatggcattcattgaagagcggaattatattcatcgtgaccttcgggctgccaacattctggtgtctgacaccctgagctgcaagattgcagactttggcctagcacgcctcattgaggacaacgagtacacagccagggagggggccaagtttcccattaagtggacagcgccagaagccattaactacgggacattcaccatcaagtcagatgtgtggtcttttgggatcctgctgacggaaattgtcacccacggccgcatcccttacccagggatgaccaacccggaggtgattcagaacctggagcgaggctaccgcatggtgcgccctgacaactgtccagaggagctgtaccaactcatgaggctgtgctggaaggagcgcccagaggaccggcccacctttgactacctgcgcagtgtgctggaggacttcttcacggccacagagggccagtaccagcctcagccttgagaggccttgagaggccctggggttctccccctttctctccagcctgacttggggagatggagttcttgtgccatagtcacatggcctatgcacatatggactctgcacatgaatcccacccacatgtgacacatatgcaccttgtgtctgtacacgtgtcctgtagttgcgtggactctgcacatgtcttgtacatgtgtagcctgtgcatgtatgtcttggacactgtacaaggtacccctttctggctctcccatttcctgagaccacagagagaggggagaagcctgggattgacagaagcttctgcccacctacttttctttcctcagatcatccagaagttcctcaagggccaggactttatctaatacctctgtgtgctcctccttggtgcctggcctggcacacatcaggagttcaataaatgtctgttgatgactgttgta

SEQ ID NO: 450649 - DNA, 2182 bp, Homo sapiens
ttacttgtagcctgagggctcagagggagcaccggtttggagctgggaccccctattttagcttttctgtggctggtgaatggggatcccaggatctcacaatctcagggaccatgggctgtggctgcagctcacacccggaagatgactggatggaaaacatcgatgtgtgtgagaactgccattatcccatagtcccactggatggcaagggcacgctgctcatccgaaatggctctgaggtgcgggacccactggttacctacgaaggctccaatccgccggcttccccactgcaagacaacctggttatcgctctgcacagctatgagccctctcacgacggagatctgggctttgagaagggggaacagctccgcatcctggagcagagcggcgagtggtggaaggcgcagtccctgaccacgggccaggaaggcttcatccccttcaattttgtggccaaagcgaacagcctggagcccgaaccctggttcttcaagaacctgagccgcaaggacgcggagcggcagctcctggcgcccgggaacactcacggctccttcctcatccgggagagcgagagcaccgcgggatcgttttcactgtcggtccgggacttcgaccagaaccagggagaggtggtgaaacattacaagatccgtaatctggacaacggtggcttctacatctcccctcgaatcacttttcccggcctgcatgaactggtccgccattacaccaatgcttcagatgggctgtgcacacggttgagccgcccctgccagacccagaagccccagaagccgtggtgggaggacgagtgggaggttcccagggagacgctgaagctggtggagcggctgggggctggacagttcggggaggtgtggatggggtactacaacgggcacacgaaggtggcggtgaagagcctgaagcagggcagcatgtccccggacgccttcctggccgaggccaacctcatgaagcagctgcaacaccagcggctggttcggctctacgctgtggtcacccaggagcccatctacatcatcactgaatacatggagaatgacacacttctagactcccagttggaggagaaaggtctgggggcctccccctggggcaacttgggccagcaactcttgcttctgcccacagggagtctagtggattttctcaagaccccttcaggcatcaagttgaccatcaacaaactcctggacatggcagcccaaattgcagaaggcatggcattcattgaagagcggaattatattcatcgtgaccttcgggctgccaacattctggtgtctgacaccctgagctgcaagattgcagactttggcctagcacgcctcattgaggacaacgagtacacagccagggagggggccaagtttcccattaagtggacagcgccagaagccattaactacgggacattcaccatcaagtcagatgtgtggtcttttgggatcctgctgacggaaattgtcacccacggccgcatcccttacccagggatgaccaacccggaggtgattcagaacctggagcgaggctaccgcatggtgcgccctgacaactgtccagaggagctgtaccaactcatgaggctgtgctggaaggagcgcccagaggaccggcccacctttgactacctgcgcagtgtgctggaggacttcttcacggccacagagggccagtaccagcctcagccttgagaggccttgagaggccctggggttctccccctttctctccagcctgacttggggagatggagttcttgtgccatagtcacatggcctatgcacatatggactctgcacatgaatcccacccacatgtgacacatatgcaccttgtgtctgtacacgtgtcctgtagttgcgtggactctgcacatgtcttgtacatgtgtagcctgtgcatgtatgtcttggacactgtacaaggtacccctttctggctctcccatttcctgagaccacagagagaggggagaagcctgggattgacagaagcttctgcccacctacttttctttcctcagatcatccagaagttcctcaagggccaggactttatctaatacctctgtgtgctcctccttggtgcctggcctggcacacatcaggagttcaataaatgtctgttgatgactgttgta

SEQ ID NO: 450650 - DNA, 2288 bp, Homo sapiens
tcagggtgggacgtgggcgcggggagacaggtggtggctacgacggcgaagggagctgagactgtccaggcagccaggttaggccaggaggaccatgtgaatggggccagagggctcccgggctgggcagggaccatgggctgtggctgcagctcacacccggaagatgactggatggaaaacatcgatgtgtgtgagaactgccattatcccatagtcccactggatggcaagggcacgctgctcatccgaaatggctctgaggtgcgggacccactggttacctacgaaggctccaatccgccggcttccccactgcaaggtgaccccaggcagcagggcctgaaagacaaggcctgcggatccctggctgttggcttccacctctcccccacctactttctccccggtcttgccttccttgtcccccaccctgtaactccaggcttcctgccgatcccagctcggttctccctgatgccccttgtctttacagacaacctggttatcgctctgcacagctatgagccctctcacgacggagatctgggctttgagaagggggaacagctccgcatcctggagcagagcggcgagtggtggaaggcgcagtccctgaccacgggccaggaaggcttcatccccttcaattttgtggccaaagcgaacagcctggagcccgaaccctggttcttcaagaacctgagccgcaaggacgcggagcggcagctcctggcgcccgggaacactcacggctccttcctcatccgggagagcgagagcaccgcgggatcgttttcactgtcggtccgggacttcgaccagaaccagggagaggtggtgaaacattacaagatccgtaatctggacaacggtggcttctacatctcccctcgaatcacttttcccggcctgcatgaactggtccgccattacaccaatgcttcagatgggctgtgcacacggttgagccgcccctgccagacccagaagccccagaagccgtggtgggaggacgagtgggaggttcccagggagacgctgaagctggtggagcggctgggggctggacagttcggggaggtgtggatggggtactacaacgggcacacgaaggtggcggtgaagagcctgaagcagggcagcatgtccccggacgccttcctggccgaggccaacctcatgaagcagctgcaacaccagcggctggttcggctctacgctgtggtcacccaggagcccatctacatcatcactgaatacatggagaatgggagtctagtggattttctcaagaccccttcaggcatcaagttgaccatcaacaaactcctggacatggcagcccaaattgcagaaggcatggcattcattgaagagcggaattatattcatcgtgaccttcgggctgccaacattctggtgtctgacaccctgagctgcaagattgcagactttggcctagcacgcctcattgaggacaacgagtacacagccagggagggggccaagtttcccattaagtggacagcgccagaagccattaactacgggacattcaccatcaagtcagatgtgtggtcttttgggatcctgctgacggaaattgtcacccacggccgcatcccttacccagggatgaccaacccggaggtgattcagaacctggagcgaggctaccgcatggtgcgccctgacaactgtccagaggagctgtaccaactcatgaggctgtgctggaaggagcgcccagaggaccggcccacctttgactacctgcgcagtgtgctggaggacttcttcacggccacagagggccagtaccagcctcagccttgagaggccttgagaggccctggggttctccccctttctctccagcctgacttggggagatggagttcttgtgccatagtcacatggcctatgcacatatggactctgcacatgaatcccacccacatgtgacacatatgcaccttgtgtctgtacacgtgtcctgtagttgcgtggactctgcacatgtcttgtacatgtgtagcctgtgcatgtatgtcttggacactgtacaaggtacccctttctggctctcccatttcctgagaccacagagagaggggagaagcctgggattgacagaagcttctgcccacctacttttctttcctcagatcatccagaagttcctcaagggccaggactttatctaatacctctgtgtgctcctccttggtgcctggcctggcacacatcaggagttcaataaatgtctgttgatgactgttgta

SEQ ID NO: 450651 - DNA, 1768 bp, Homo sapiens
aactcccatccatgtccagctgccctccactattagagaggtggtccctcagacccccagaccccctctttcttattccatccaatatattcagcacatagttattgtttcttactctcggctgggcaccaggaacatggatggatgaaacaaggttcctgttgtcagggaaacctgattttagttacagctactggggaaaccagagtttgtgccatgggaaagttccagcatgcccatgggagtgtagatgatgatccagtttattatgcctggtaggatctagagaggcttcctagtggggcagtctagcagggccacgaaagaaaagtagaattttttttagcaggcagagatgaaacaaagaggctttggggtgagagcctagtggtctgagtgcaggatctcaaaattgctaaactgtttgaagtcaaaggcagagtgggggaaagagaagaagctaccagtgtggaccatgccaagcttaggatactagttgaggattctaggttctaccttattggtgatgaaaaacctacagatccctcccagcatgctctaccctagcccctctgcaaaaaaacctttacatatcctgggcatccttaccctgaacacacactcctccattctcactcttcaatcttccttttcacatgtcagacacacttctagactcccagttggaggagaaaggtctgggggcctccccctggggcaacttgggccagcaactcttgcttctgcccacagggagtctagtggattttctcaagaccccttcaggcatcaagttgaccatcaacaaactcctggacatggcagcccaaattgcagaaggcatggcattcattgaagagcggaattatattcatcgtgaccttcgggctgccaacattctggtgtctgacaccctgagctgcaagattgcagactttggcctagcacgcctcattgaggacaacgagtacacagccagggagggggccaagtttcccattaagtggacagcgccagaagccattaactacgggacattcaccatcaagtcagatgtgtggtcttttgggatcctgctgacggaaattgtcacccacggccgcatcccttacccagggatgaccaacccggaggtgattcagaacctggagcgaggctaccgcatggtgcgccctgacaactgtccagaggagctgtaccaactcatgaggctgtgctggaaggagcgcccagaggaccggcccacctttgactacctgcgcagtgtgctggaggacttcttcacggccacagagggccagtaccagcctcagccttgagaggccttgagaggccctggggttctccccctttctctccagcctgacttggggagatggagttcttgtgccatagtcacatggcctatgcacatatggactctgcacatgaatcccacccacatgtgacacatatgcaccttgtgtctgtacacgtgtcctgtagttgcgtggactctgcacatgtcttgtacatgtgtagcctgtgcatgtatgtcttggacactgtacaaggtacccctttctggctctcccatttcctgagaccacagagagaggggagaagcctgggattgacagaagcttctgcccacctacttttctttcctcagatcatccagaagttcctcaagggccaggactttatctaatacctctgtgtgctcctccttggtgcctggcctggcacacatcaggagttcaataaatgtctgttgatgactgttgta

SEQ ID NO: 450652 - DNA, 2040 bp, Homo sapiens
tcagggtgggacgtgggcgcggggagacaggtggtggctacgacggcgaagggagctgagactgtccaggcagccaggttaggccaggaggaccatgtgaatggggccagagggctcccgggctgggcagggaccatgggctgtggctgcagctcacacccggaagatgactggatggaaaacatcgatgtgtgtgagaactgccattatcccatagtcccactggatggcaagggcacgctgctcatccgaaatggctctgaggtgcgggacccactggttacctacgaaggctccaatccgccggcttccccactgcaagacaacctggttatcgctctgcacagctatgagccctctcacgacggagatctgggctttgagaagggggaacagctccgcatcctggagcagagcggcgagtggtggaaggcgcagtccctgaccacgggccaggaaggcttcatccccttcaattttgtggccaaagcgaacagcctggagcccgaaccctggttcttcaagaacctgagccgcaaggacgcggagcggcagctcctggcgcccgggaacactcacggctccttcctcatccgggagagcgagagcaccgcgggatcgttttcactgtcggtccgggacttcgaccagaaccagggagaggtggtgaaacattacaagatccgtaatctggacaacggtggcttctacatctcccctcgaatcacttttcccggcctgcatgaactggtccgccattacaccaatgcttcagatgggctgtgcacacggttgagccgcccctgccagacccagaagccccagaagccgtggtgggaggacgagtgggaggttcccagggagacgctgaagctggtggagcggctgggggctggacagttcggggaggtgtggatggggtactacaacgggcacacgaaggtggcggtgaagagcctgaagcagggcagcatgtccccggacgccttcctggccgaggccaacctcatgaagcagctgcaacaccagcggctggttcggctctacgctgtggtcacccaggagcccatctacatcatcactgaatacatggagaatgggagtctagtggattttctcaagaccccttcaggcatcaagttgaccatcaacaaactcctggacatggcagcccaaattgcagaaggcatggcattcattgaagagcggaattatattcatcgtgaccttcgggctgccaacattctggtgtctgacaccctgagctgcaagattgcagactttggcctagcacgcctcattgaggacattcaccatcaagtcagatgtgtggtcttttgggatcctgctgacggaaattgtcacccacggccgcatcccttacccagggatgaccaacccggaggtgattcagaacctggagcgaggctaccgcatggtgcgccctgacaactgtccagaggagctgtaccaactcatgaggctgtgctggaaggagcgcccagaggaccggcccacctttgactacctgcgcagtgtgctggaggacttcttcacggccacagagggccagtaccagcctcagccttgagaggccttgagaggccctggggttctccccctttctctccagcctgacttggggagatggagttcttgtgccatagtcacatggcctatgcacatatggactctgcacatgaatcccacccacatgtgacacatatgcaccttgtgtctgtacacgtgtcctgtagttgcgtggactctgcacatgtcttgtacatgtgtagcctgtgcatgtatgtcttggacactgtacaaggtacccctttctggctctcccatttcctgagaccacagagagaggggagaagcctgggattgacagaagcttctgcccacctacttttctttcctcagatcatccagaagttcctcaagggccaggactttatctaatacctctgtgtgctcctccttggtgcctggcctggcacacatcaggagttcaataaatgtctgttgatgactgttgta

SEQ ID NO: 450653 - DNA, 745 bp, Homo sapiens
  misc_feature (692)..(692): n is a, c, g, or t
  misc_feature (709)..(709): n is a, c, g, or t
  misc_feature (714)..(714): n is a, c, g, or t
  misc_feature (718)..(718): n is a, c, g, or t
  misc_feature (729)..(729): n is a, c, g, or t
ggaaggcaagagatctaggacttctagcccctgaactttcagccgaatacatcttttccaaaggagtgaattcaggcccttgtatcactggcagcaggacgtgaccatggagaagctgttgtgtttcttggtcttgaccagcctctctcatgcttttggccagacagacatgtcgaggaaggcttttgtgtttcccaaagagtcggatacttcctatgtatccctcaaagcaccgttaacgaagcctctcaaagccttcactgtgtgcctccacttctacacggaactgtcctcgacccgttcctaatgtcctgaactggcgggcactgaagtatgaagtgcaaggcgaagtgttcaccaaaccccagctgtggccctgaggcccagctgtgggtaggaccaactacagtcttcccaaggattgagttatggactttgggagtgagacatcttcttgctgctggatttccaagctgagaggacgtgaacctgggaccaccagtagccatcttgtttgccacatggagagagactgtgaggacagaagccaaactggaagtggaggagccaagggattgacaaacaacagagccttgaccacgtggagtctctgaatcagccttgtctggaaccagatctacacctggactgcccaggtctataagccaataaagcccctgtttacttgcaanaaaaaaaaaaaaaaaantttgngggngctgggcccgnaaagttttaaaaccat

SEQ ID NO: 450654 - DNA, 2160 bp, Homo sapiens
ggaaggcaagagatctaggacttctagcccctgaactttcagccgaatacatcttttccaaaggagtgaattcaggcccttgtatcactggcagcaggacgtgaccatggagaagctgttgtgtttcttggtcttgaccagcctctctcatgcttttggccagacagacatgtcgaggaaggcttttgtgtttcccaaagagtcggatacttcctatgtatccctcaaagcaccgttaacgaagcctctcaaagccttcactgtgtgcctccacttctacacggaactgtcctcgacccgtgggtacagtattttctcgtatgccaccaagagacaagacaatgagattctcatattttggtctaaggatataggatacagttttacagtgggtgggtctgaaatattattcgaggttcctgaagtcacagtagctccagtacacatttgtacaagctgggagtccgcctcagggatcgtggagttctgggtagatgggaagcccagggtgaggaagagtctgaagaagggatacactgtgggggcagaagcaagcatcatcttggggcaggagcaggattccttcggtgggaactttgaaggaagccagtccctggtgggagacattggaaatgtgaacatgtgggactttgtgctgtcaccagatgagattaacaccatctatcttggcgggcccttcagtcctaatgtcctgaactggcgggcactgaagtatgaagtgcaaggcgaagtgttcaccaaaccccagctgtggccctgaggcccagctgtgggtcctgaaggtacctcccggttttttacaccgcatgggccccacgtctctgtctctggtacctcccgcttttttacactgcatggttcccacgtctctgtctctgggcctttgttcccctatatgcattgcaggcctgctccaccctcctcagcgcctgagaatggaggtaaagtgtctggtctgggagctcgttaactatgctgggaaacggtccaaaagaatcagaatttgaggtgttttgttttcatttttatttcaagttggacagatcttggagataatttcttacctcacatagatgagaaaactaacacccagaaaggagaaatgatgttataaaaaactcataaggcaagagctgagaaggaagcgctgatcttctatttaattccccacccatgacccccagaaagcaggagggcattgcccacattcacagggctcttcagtctcagaatcaggacactggccaggtgtctggtttgggtccagagtgctcatcatcatgtcatagaactgctgggcccaggtctcctgaaatgggaagcccagcaataccacgcagtccctccactttctcaaagcacactggaaaggccattagaattgccccagcagagcagatctgctttttttccagagcaaaatgaagcactaggtataaatatgttgttactgccaagaacttaaatgactggtttttgtttgcttgcagtgctttcttaattttatggctcttctgggaaactcctccccttttccacacgaaccttgtggggctgtgaattctttcttcatccccgcattcccaatatacccaggccacaagagtggacgtgaaccacagggtgtcctgtcagaggagcccatctcccatctccccagctccctatctggaggatagttggatagttacgtgttcctagcaggaccaactacagtcttcccaaggattgagttatggactttgggagtgagacatcttcttgctgctggatttccaagctgagaggacgtgaacctgggaccaccagtagccatcttgtttgccacatggagagagactgtgaggacagaagccaaactggaagtggaggagccaagggattgacaaacaacagagccttgaccacgtggagtctctgaatcagccttgtctggaaccagatctacacctggactgcccaggtctataagccaataaagcccctgtttacttgaaaaaataaagtaaaaggatataaaagatttataaagtggtaatctttgtggataaattaaattgaaatcctcggggggggggcccggaccccaattcccccctttggggggtggttttacaattccactggccgccgttttac

SEQ ID NO: 450655 - DNA, 2073 bp, Homo sapiens
  misc_feature (2020)..(2020): n is a, c, g, or t
  misc_feature (2037)..(2037): n is a, c, g, or t
  misc_feature (2042)..(2042): n is a, c, g, or t
  misc_feature (2046)..(2046): n is a, c, g, or t
  misc_feature (2057)..(2057): n is a, c, g, or t
ggaaggcaagagatctaggacttctagcccctgaactttcagccgaatacatcttttccaaaggagtgaattcaggcccttgtatcactggcagcaggacgtgaccatggagaagctgttgtgtttcttggtcttgaccagcctctctcatgcttttggccagacagacatgtcgaggaaggcttttgtgtttcccaaagagtcggatacttcctatgtatccctcaaagcaccgttaacgaagcctctcaaagccttcactgtgtgcctccacttctacacggaactgtcctcgacccgtgggtacagtattttctcgtatgccaccaagagacaagacaatgagattctcatattttggtctaaggatataggatacagttttacagtgggtgggtctgaaatattattcgaggttcctgaagtcacagtagctccagtacacatttgtacaagctgggagtccgcctcagggatcgtggagttctgggtagatgggaagcccagggtgaggaagagtctgaagaagggatacactgtgggggcagaagcaagcatcatcttggggcaggagcaggattccttcggtgggaactttgaaggaagccagtccctggtgggagacattggaaatgtgaacatgtgggactttgtgctgtcaccagatgagattaacaccatctatcttggcgggcccttcagtcctaatgtcctgaactggcgggcactgaagtatgaagtgcaaggcgaagtgttcaccaaaccccagctgtggccctgaggcccagctgtgggtcctgaaggtacctcccggttttttacaccgcatgggccccacgtctctgtctctggtacctcccgcttttttacactgcatggttcccacgtctctgtctctgggcctttgttcccctatatgcattgcaggcctgctccaccctcctcagcgcctgagaatggaggtaaagtgtctggtctgggagctcgttaactatgctgggaaacggtccaaaagaatcagaatttgaggtgttttgttttcatttttatttcaagttggacagatcttggagataatttcttacctcacatagatgagaaaactaacacccagaaaggagaaatgatgttataaaaaactcataaggcaagagctgagaaggaagcgctgatcttctatttaattccccacccatgacccccagaaagcaggagggcattgcccacattcacagggctcttcagtctcagaatcaggacactggccaggtgtctggtttgggtccagagtgctcatcatcatgtcatagaactgctgggcccaggtctcctgaaatgggaagcccagcaataccacgcagtccctccactttctcaaagcacactggaaaggccattagaattgccccagcagagcagatctgctttttttccagagcaaaatgaagcactaggtataaatatgttgttactgccaagaacttaaatgactggtttttgtttgcttgcagtgctttcttaattttatggctcttctgggaaactcctccccttttccacacgaaccttgtggggctgtgaattctttcttcatccccgcattcccaatatacccaggccacaagagtggacgtgaaccacagggtgtcctgtcagaggagcccatctcccatctccccagctccctatctggaggatagttggatagttacgtgttcctagcaggaccaactacagtcttcccaaggattgagttatggactttgggagtgagacatcttcttgctgctggatttccaagctgagaggacgtgaacctgggaccaccagtagccatcttgtttgccacatggagagagactgtgaggacagaagccaaactggaagtggaggagccaagggattgacaaacaacagagccttgaccacgtggagtctctgaatcagccttgtctggaaccagatctacacctggactgcccaggtctataagccaataaagcccctgtttacttgcaanaaaaaaaaaaaaaaaantttgngggngctgggcccgnaaagttttaaaaccat

SEQ ID NO: 450656 - DNA, 2276 bp, Homo sapiens
  misc_feature (2264)..(2264): n is a, c, g, or t
ggaaggcaagagatctaggacttctagcccctgaactttcagccgaatacatcttttccaaaggagtgaattcaggcccttgtatcactggcagcaggacgtgaccatggagaagctgttgtgtttcttggtcttgaccagcctctctcatgcttttggccagacagacatgtcgaggaaggcttttgtgtttcccaaagagtcggatacttcctatgtatccctcaaagcaccgttaacgaagcctctcaaagccttcactgtgtgcctccacttctacacggaactgtcctcgacccgtgggtacagtattttctcgtatgccaccaagagacaagacaatgagattctcatattttggtctaaggatataggatacagttttacagtgggtgggtctgaaatattattcgaggttcctgaagtcacagtagctccagtacacatttgtacaagctgggagtccgcctcagggatcgtggagttctgggtagatgggaagcccagggtgaggaagagtctgaagaagggatacactgtgggggcagaagcaagcatcatcttggggcaggagcaggattccttcggtgggaactttgaaggaagccagtccctggtgggagacattggaaatgtgaacatgtgggactttgtgctgtcaccagatgagattaacaccatctatcttggcgggcccttcagtcctaatgtcctgaactggcgggcactgaagtatgaagtgcaaggcgaagtgttcaccaaaccccagctgtggccctgaggcccagctgtgggtcctgaaggtacctcccggttttttacaccgcatgggccccacgtctctgtctctggtacctcccgcttttttacactgcatggttcccacgtctctgtctctgggcctttgttcccctatatgcattgcaggcctgctccaccctcctcagcgcctgagaatggaggtaaagtgtctggtctgggagctcgttaactatgctgggaaacggtccaaaagaatcagaatttgaggtgttttgttttcatttttatttcaagttggacagatcttggagataatttcttacctcacatagatgagaaaactaacacccagaaaggagaaatgatgttataaaaaactcataaggcaagagctgagaaggaagcgctgatcttctatttaattccccacccatgacccccagaaagcaggagggcattgcccacattcacagggctcttcagtctcagaatcaggacactggccaggtgtctggtttgggtccagagtgctcatcatcatgtcatagaactgctgggcccaggtctcctgaaatgggaagcccagcaataccacgcagtccctccactttctcaaagcacactggaaaggccattagaattgccccagcagagcagatctgctttttttccagagcaaaatgaagcactaggtataaatatgttgttactgccaagaacttaaatgactggtttttgtttgcttgcagtgctttcttaattttatggctcttctgggaaactcctccccttttccacacgaaccttgtggggctgtgaattctttcttcatccccgcattcccaatatacccaggccacaagagtggacgtgaaccacagggtgtcctgtcagaggagcccatctcccatctccccagctccctatctggaggatagttggatagttacgtgttcctagcaggaccaactacagtcttcccaaggattgagttatggactttgggagtgagacatcttcttgctgctggatttccaagctgagaggacgtgaacctgggaccaccagtagccatcttgtttgccacatggagagagactgtgaggacagaagccaaactggaagtggaggagccaagggattgacaaacaacagagccttgaccacgtggagtctctgaatcagccttgtctggaaccagatctacacctggactgcccaggtctataagccaataaagcccctgtttacttgaccaaaaaaaccaaatacaaatcaaagccacagcacaaacacgtgtggcggccggcctcgggccccgtagaaaaaggttcttgaaaccccatctcgcggtgggcccgcggggccccacagttagttgattgagtgacacaccgtggcccaaagacgtgtaccctcagaggaaacacccgtgggcccagagaaatggcgttgtgaatttctccccagattaatagaggccgggggcgagccggcgcggntctgaaacatcg

SEQ ID NO: 450657 - DNA, 2115 bp, Homo sapiens
ggaaggcaagagatctaggacttctagcccctgaactttcagccgaatacatcttttccaaaggagtgaattcaggcccttgtatcactggcagcaggacgtgaccatggagaagctgttgtgtttcttggtcttgaccagcctctctcatgcttttggccagacagacatgtcgaggaaggcttttgtgtttcccaaagagtcggatacttcctatgtatccctcaaagcaccgttaacgaagcctctcaaagccttcactgtgtgcctccacttctacacggaactgtcctcgacccgtgggtacagtattttctcgtatgccaccaagagacaagacaatgagattctcatattttggtctaaggatataggatacagttttacagtgggtgggtctgaaatattattcgaggttcctgaagtcacagtagctccagtacacatttgtacaagctgggagtccgcctcagggatcgtggagttctgggtagatgggaagcccagggtgaggaagagtctgaagaagggatacactgtgggggcagaagcaagcatcatcttggggcaggagcaggattccttcggtgggaactttgaaggaagccagtccctggtgggagacattggaaatgtgaacatgtgggactttgtgctgtcaccagatgagattaacaccatctatcttggcgggcccttcagtcctaatgtcctgaactggcgggcactgaagtatgaagtgcaaggcgaacctgaaggtacctcccggttttttacaccgcatgggccccacgtctctgtctctggtacctcccgcttttttacactgcatggttcccacgtctctgtctctgggcctttgttcccctatatgcattgcaggcctgctccaccctcctcagcgcctgagaatggaggtaaagtgtctggtctgggagctcgttaactatgctgggaaacggtccaaaagaatcagaatttgaggtgttttgttttcatttttatttcaagttggacagatcttggagataatttcttacctcacatagatgagaaaactaacacccagaaaggagaaatgatgttataaaaaactcataaggcaagagctgagaaggaagcgctgatcttctatttaattccccacccatgacccccagaaagcaggagggcattgcccacattcacagggctcttcagtctcagaatcaggacactggccaggtgtctggtttgggtccagagtgctcatcatcatgtcatagaactgctgggcccaggtctcctgaaatgggaagcccagcaataccacgcagtccctccactttctcaaagcacactggaaaggccattagaattgccccagcagagcagatctgctttttttccagagcaaaatgaagcactaggtataaatatgttgttactgccaagaacttaaatgactggtttttgtttgcttgcagtgctttcttaattttatggctcttctgggaaactcctccccttttccacacgaaccttgtggggctgtgaattctttcttcatccccgcattcccaatatacccaggccacaagagtggacgtgaaccacagggtgtcctgtcagaggagcccatctcccatctccccagctccctatctggaggatagttggatagttacgtgttcctagcaggaccaactacagtcttcccaaggattgagttatggactttgggagtgagacatcttcttgctgctggatttccaagctgagaggacgtgaacctgggaccaccagtagccatcttgtttgccacatggagagagactgtgaggacagaagccaaactggaagtggaggagccaagggattgacaaacaacagagccttgaccacgtggagtctctgaatcagccttgtctggaaccagatctacacctggactgcccaggtctataagccaataaagcccctgtttacttgaaaaaataaagtaaaaggatataaaagatttataaagtggtaatctttgtggataaattaaattgaaatcctcggggggggggcccggaccccaattcccccctttggggggtggttttacaattccactggccgccgttttac

SEQ ID NO: 450658 - DNA, 2106 bp, Homo sapiens
ggaaggcaagagatctaggacttctagcccctgaactttcagccgaatacatcttttccaaaggagtgaattcaggcccttgtatcactggcagcaggacgtgaccatggagaagctgttgtgtttcttggtcttgaccagcctctctcatgcttttggccagacagacatgtcgaggaaggcttttgtgtttcccaaagagtcggatacttcctatgtatccctcaaagcaccgttaacgaagcctctcaaagccttcactgtgtgcctccacttctacacggaactgtcctcgacccgtgggtacagtattttctcgtatgccaccaagagacaagacaatgagattctcatattttggtctaaggatataggatacagttttacagtgggtgggtctgaaatattattcgaggttcctgaagtcacagtagctccagtacacatttgtacaagctgggagtccgcctcagggatcgtggagttctgggtagatgggaagcccagggtgaggaagagtctgaagaagggatacactgtgggggcagaagcaagcatcatcttggggcaggagcaggattccttcggtgggaactttgaaggaagccagtccctggtgggagacattggaaatgtgaacatgtgggactttgtgctgtcaccagatgagattaacaccatctatcttggcgggcccttcagtcctaatgtcctgaactggcgggcactgaagtatgaagtgcaaggcgaagtgttcaccaaaccccagctgtggccctgaggcccagctgtgggtcctgaaggtacctcccggttttttacaccgcatgggccccacgtctctgtctctggtacctcccgcttttttacactgcatggttcccacgtctctgtctctgggcctttgttcccctatatgcattgcaggcctgctccaccctcctcagcgcctgagaatggaggtaaagtgtctggtctgggagctcgttaactatgctgggaaacggtccaaaagaatcagaatttgaggtgttttgttttcatttttatttcaagttggacagatcttggagataatttcttacctcacatagatgagaaaactaacacccagaaaggagaaatgatgttataacacccatgacccccagaaagcaggagggcattgcccacattcacagggctcttcagtctcagaatcaggacactggccaggtgtctggtttgggtccagagtgctcatcatcatgtcatagaactgctgggcccaggtctcctgaaatgggaagcccagcaataccacgcagtccctccactttctcaaagcacactggaaaggccattagaattgccccagcagagcagatctgctttttttccagagcaaaatgaagcactaggtataaatatgttgttactgccaagaacttaaatgactggtttttgtttgcttgcagtgctttcttaattttatggctcttctgggaaactcctccccttttccacacgaaccttgtggggctgtgaattctttcttcatccccgcattcccaatatacccaggccacaagagtggacgtgaaccacagggtgtcctgtcagaggagcccatctcccatctccccagctccctatctggaggatagttggatagttacgtgttcctagcaggaccaactacagtcttcccaaggattgagttatggactttgggagtgagacatcttcttgctgctggatttccaagctgagaggacgtgaacctgggaccaccagtagccatcttgtttgccacatggagagagactgtgaggacagaagccaaactggaagtggaggagccaagggattgacaaacaacagagccttgaccacgtggagtctctgaatcagccttgtctggaaccagatctacacctggactgcccaggtctataagccaataaagcccctgtttacttgaaaaaataaagtaaaaggatataaaagatttataaagtggtaatctttgtggataaattaaattgaaatcctcggggggggggcccggaccccaattcccccctttggggggtggttttacaattccactggccgccgttttac

SEQ ID NO: 450659 - DNA, 2189 bp, Homo sapiens
ggaaggcaagagatctaggacttctagcccctgaactttcagccgaatacatcttttccaaaggagtgaattcaggcccttgtatcactggcagcaggacgtgaccatggagaagctgttgtgtttcttggtcttgaccagcctctctcatgcttttggccagacagacatgtcgaggaaggcttttgtgtttcccaaagagtcggatacttcctatgtatccctcaaagcaccgttaacgaagcctctcaaagccttcactgtgtgcctccacttctacacggaactgtcctcgacccgtgggtacagtattttctcgtatgccaccaagagacaagacaatgagattctcatattttggtctaaggatataggatacagttttacagtgggtgggtctgaaatattattcgaggttcctgaagtcacagtagctccagtacacatttgtacaagctgggagtccgcctcagggatcgtggagttctgggtagatgggaagcccagggtgaggaagagtctgaagaagggatacactgtgggggcagaagcaagcatcatcttggggcaggagcaggattccttcggtgggaactttgaaggaagccagtccctggtgggagacattggaaatgtgaacatgtgggactttgtgctgtcaccagatgagattaacaccatctatcttggcgggcccttcagtcctaatgtcctgaactggcgggcactgaagtatgaagtgcaaggcgaagtgttcaccaaaccccagctgtggccctgaggcccagctgtgggtcctgaaggtacctcccggttttttacaccgcatgggccccacgtctctgtctctggtacctcccgcttttttacactgcatggttcccacgtctctgtctctgggcctttgttcccctatatgcattgcaggcctgctccaccctcctcagcgcctgagaatggaggtaaagtgtctggtctgggagctcgttaactatgctgggaaacggtccaaaagaatcagaatttgaggtgttttgttttcatttttatttcaagttggacagatcttggagataatttcttacctcacatagatgagaaaactaacacccagaaaggagaaatgatgttataaaaaactcataaggcaagagctgagaaggaagcgctgatcttctatttaattccccacccatgacccccagaaagcaggagggcattgcccacattcacagggctcttcagtctcagaatcaggacactggccaggtgtctggtttgggtccagagtgctcatcatcatgtcatagaactgctgggcccaggtctcctgaaatgggaagcccagcaataccacgcagtccctccactttctcaaagcacactggaaaggccattagaattgccccagcagagcagatctgctttttttcctggtttttgtttgcttgcagtgctttcttaattttatggctcttctgggaaactcctccccttttccacacgaaccttgtggggctgtgaattctttcttcatccccgcattcccaatatacccaggccacaagagtggacgtgaaccacagggtgtcctgtcagaggagcccatctcccatctccccagctccctatctggaggatagttggatagttacgtgttcctagcaggaccaactacagtcttcccaaggattgagttatggactttgggagtgagacatcttcttgctgctggatttccaagctgagaggacgtgaacctgggaccaccagtagccatcttgtttgccacatggagagagactgtgaggacagaagccaaactggaagtggaggagccaagggattgacaaacaacagagccttgaccacgtggagtctctgaatcagccttgtctggaaccagatctacacctggactgcccaggtctataagccaataaagcccctgtttacttgtgatgagtgagtccaagctgttttctgatagttgctttagaagttgtgactaacttctctaatgacctttgaaatcaagtccctgtaagtttacacttcccattacacaacatatccatggcactttaacctgtccaagagtcccctgaagggattccctctgacaagcacagtccctcttttgagatagctggccattcatgtagggccagttgtgggggttttagtac

SEQ ID NO: 450660 - DNA, 1795 bp, Homo sapiens
ggaaggcaagagatctaggacttctagcccctgaactttcagccgaatacatcttttccaaaggagtgaattcaggcccttgtatcactggcagcaggacgtgaccatggagaagctgttgtgtttcttggtcttgaccagcctctctcatgcttttggccagacagacatgtcgaggaaggcttttgtgtttcccaaagagtcggatacttcctatgtatccctcaaagcaccgttaacgaagcctctcaaagccttcactgtgtgcctccacttctacacggaactgtcctcgacccgtgggtacagtattttctcgtatgccaccaagagacaagacaatgagattctcatattttggtctaaggatataggatacagttttacagtgggtgggtctgaaatattattcgaggttcctgaagtcacagcctgaaggtacctcccggttttttacaccgcatgggccccacgtctctgtctctggtacctcccgcttttttacactgcatggttcccacgtctctgtctctgggcctttgttcccctatatgcattgcaggcctgctccaccctcctcagcgcctgagaatggaggtaaagtgtctggtctgggagctcgttaactatgctgggaaacggtccaaaagaatcagaatttgaggtgttttgttttcatttttatttcaagttggacagatcttggagataatttcttacctcacatagatgagaaaactaacacccagaaaggagaaatgatgttataaaaaactcataaggcaagagctgagaaggaagcgctgatcttctatttaattccccacccatgacccccagaaagcaggagggcattgcccacattcacagggctcttcagtctcagaatcaggacactggccaggtgtctggtttgggtccagagtgctcatcatcatgtcatagaactgctgggcccaggtctcctgaaatgggaagcccagcaataccacgcagtccctccactttctcaaagcacactggaaaggccattagaattgccccagcagagcagatctgctttttttccagagcaaaatgaagcactaggtataaatatgttgttactgccaagaacttaaatgactggtttttgtttgcttgcagtgctttcttaattttatggctcttctgggaaactcctccccttttccacacgaaccttgtggggctgtgaattctttcttcatccccgcattcccaatatacccaggccacaagagtggacgtgaaccacagggtgtcctgtcagaggagcccatctcccatctccccagctccctatctggaggatagttggatagttacgtgttcctagcaggaccaactacagtcttcccaaggattgagttatggactttgggagtgagacatcttcttgctgctggatttccaagctgagaggacgtgaacctgggaccaccagtagccatcttgtttgccacatggagagagactgtgaggacagaagccaaactggaagtggaggagccaagggattgacaaacaacagagccttgaccacgtggagtctctgaatcagccttgtctggaaccagatctacacctggactgcccaggtctataagccaataaagcccctgtttacttgaaaaaataaagtaaaaggatataaaagatttataaagtggtaatctttgtggataaattaaattgaaatcctcggggggggggcccggaccccaattcccccctttggggggtggttttacaattccactggccgccgttttac

SEQ ID NO: 450661 - DNA, 1796 bp, Homo sapiens
ggaaggcaagagatctaggacttctagcccctgaactttcagccgaatacatcttttccaaaggagtgaattcaggcccttgtatcactggcagcaggacgtgaccatggagaagctgttgtgtttcttggtcttgaccagcctctctcatgcttttggccagacagacatgtcgaggaaggcttttgtgtttcccaaagagtcggatacttcctatgtatccctcaaagcaccgttaacgaagcctctcaaagccttcactgtgtgcctccacttctacacggaactgtcctcgacccgtatgagattaacaccatctatcttggcgggcccttcagtcctaatgtcctgaactggcgggcactgaagtatgaagtgcaaggcgaagtgttcaccaaaccccagctgtggccctgaggcccagctgtgggtcctgaaggtacctcccggttttttacaccgcatgggccccacgtctctgtctctggtacctcccgcttttttacactgcatggttcccacgtctctgtctctgggcctttgttcccctatatgcattgcaggcctgctccaccctcctcagcgcctgagaatggaggtaaagtgtctggtctgggagctcgttaactatgctgggaaacggtccaaaagaatcagaatttgaggtgttttgttttcatttttatttcaagttggacagatcttggagataatttcttacctcacatagatgagaaaactaacacccagaaaggagaaatgatgttataaaaaactcataaggcaagagctgagaaggaagcgctgatcttctatttaattccccacccatgacccccagaaagcaggagggcattgcccacattcacagggctcttcagtctcagaatcaggacactggccaggtgtctggtttgggtccagagtgctcatcatcatgtcatagaactgctgggcccaggtctcctgaaatgggaagcccagcaataccacgcagtccctccactttctcaaagcacactggaaaggccattagaattgccccagcagagcagatctgctttttttccagagcaaaatgaagcactaggtataaatatgttgttactgccaagaacttaaatgactggtttttgtttgcttgcagtgctttcttaattttatggctcttctgggaaactcctccccttttccacacgaaccttgtggggctgtgaattctttcttcatccccgcattcccaatatacccaggccacaagagtggacgtgaaccacagggtgtcctgtcagaggagcccatctcccatctccccagctccctatctggaggatagttggatagttacgtgttcctagcaggaccaactacagtcttcccaaggattgagttatggactttgggagtgagacatcttcttgctgctggatttccaagctgagaggacgtgaacctgggaccaccagtagccatcttgtttgccacatggagagagactgtgaggacagaagccaaactggaagtggaggagccaagggattgacaaacaacagagccttgaccacgtggagtctctgaatcagccttgtctggaaccagatctacacctggactgcccaggtctataagccaataaagcccctgtttacttgaaaaaataaagtaaaaggatataaaagatttataaagtggtaatctttgtggataaattaaattgaaatcctcggggggggggcccggaccccaattcccccctttggggggtggttttacaattccactggccgccgttttac

SEQ ID NO: 450662 - DNA, 1653 bp, Homo sapiens
ggaaggcaagagatctaggacttctagcccctgaactttcagccgaatacatcttttccaaaggagtgaattcaggcccttgtatcactggcagcaggacgtgaccatggagaagctgttgtgtttcttggtcttgaccagcctctctcatgcttttggccagacagacatgtcgaggaaggcttttgtgtttcccaaagagtcggatacttcctatgtatccctcaaagcaccgttaacgaagcctctcaaagccttcactgtgtgcctccacttctacacggaactgtcctcgacccgtgggtacagtattttctcgtatgccaccaagagacaagacaatgagattctcatattttggtctaaggatataggatacagttttacagtgggtgggtctgaaatattattcgaggttcctgaagtcacagcctcctcagcgcctgagaatggaggtaaagtgtctggtctgggagctcgttaactatgctgggaaacggtccaaaagaatcagaatttgaggtgttttgttttcatttttatttcaagttggacagatcttggagataatttcttacctcacatagatgagaaaactaacacccagaaaggagaaatgatgttataaaaaactcataaggcaagagctgagaaggaagcgctgatcttctatttaattccccacccatgacccccagaaagcaggagggcattgcccacattcacagggctcttcagtctcagaatcaggacactggccaggtgtctggtttgggtccagagtgctcatcatcatgtcatagaactgctgggcccaggtctcctgaaatgggaagcccagcaataccacgcagtccctccactttctcaaagcacactggaaaggccattagaattgccccagcagagcagatctgctttttttccagagcaaaatgaagcactaggtataaatatgttgttactgccaagaacttaaatgactggtttttgtttgcttgcagtgctttcttaattttatggctcttctgggaaactcctccccttttccacacgaaccttgtggggctgtgaattctttcttcatccccgcattcccaatatacccaggccacaagagtggacgtgaaccacagggtgtcctgtcagaggagcccatctcccatctccccagctccctatctggaggatagttggatagttacgtgttcctagcaggaccaactacagtcttcccaaggattgagttatggactttgggagtgagacatcttcttgctgctggatttccaagctgagaggacgtgaacctgggaccaccagtagccatcttgtttgccacatggagagagactgtgaggacagaagccaaactggaagtggaggagccaagggattgacaaacaacagagccttgaccacgtggagtctctgaatcagccttgtctggaaccagatctacacctggactgcccaggtctataagccaataaagcccctgtttacttgaaaaaataaagtaaaaggatataaaagatttataaagtggtaatctttgtggataaattaaattgaaatcctcggggggggggcccggaccccaattcccccctttggggggtggttttacaattccactggccgccgttttac

SEQ ID NO: 450663 - DNA, 1648 bp, Homo sapiens
ggaaggcaagagatctaggacttctagcccctgaactttcagccgaatacatcttttccaaaggagtgaattcaggcccttgtatcactggcagcaggacgtgaccatggagaagctgttgtgtttcttggtcttgaccagcctctctcatgcttttggccagacagacatgtcgaggaaggcttttgtgtttcccaaagagtcggatacttcctatgtatccctcaaagcaccgttaagtgttcaccaaaccccagctgtggccctgaggcccagctgtgggtcctgaaggtacctcccggttttttacaccgcatgggccccacgtctctgtctctggtacctcccgcttttttacactgcatggttcccacgtctctgtctctgggcctttgttcccctatatgcattgcaggcctgctccaccctcctcagcgcctgagaatggaggtaaagtgtctggtctgggagctcgttaactatgctgggaaacggtccaaaagaatcagaatttgaggtgttttgttttcatttttatttcaagttggacagatcttggagataatttcttacctcacatagatgagaaaactaacacccagaaaggagaaatgatgttataaaaaactcataaggcaagagctgagaaggaagcgctgatcttctatttaattccccacccatgacccccagaaagcaggagggcattgcccacattcacagggctcttcagtctcagaatcaggacactggccaggtgtctggtttgggtccagagtgctcatcatcatgtcatagaactgctgggcccaggtctcctgaaatgggaagcccagcaataccacgcagtccctccactttctcaaagcacactggaaaggccattagaattgccccagcagagcagatctgctttttttccagagcaaaatgaagcactaggtataaatatgttgttactgccaagaacttaaatgactggtttttgtttgcttgcagtgctttcttaattttatggctcttctgggaaactcctccccttttccacacgaaccttgtggggctgtgaattctttcttcatccccgcattcccaatatacccaggccacaagagtggacgtgaaccacagggtgtcctgtcagaggagcccatctcccatctccccagctccctatctggaggatagttggatagttacgtgttcctagcaggaccaactacagtcttcccaaggattgagttatggactttgggagtgagacatcttcttgctgctggatttccaagctgagaggacgtgaacctgggaccaccagtagccatcttgtttgccacatggagagagactgtgaggacagaagccaaactggaagtggaggagccaagggattgacaaacaacagagccttgaccacgtggagtctctgaatcagccttgtctggaaccagatctacacctggactgcccaggtctataagccaataaagcccctgtttacttgaaaaaataaagtaaaaggatataaaagatttataaagtggtaatctttgtggataaattaaattgaaatcctcggggggggggcccggaccccaattcccccctttggggggtggttttacaattccactggccgccgttttac

SEQ ID NO: 450664 - DNA, 1561 bp, Homo sapiens
ggaaggcaagagatctaggacttctagcccctgaactttcagccgaatacatcttttccaaaggagtgaattcaggcccttgtatcactggcagcaggacgtgaccatggagaagctgttgtgtttcttggtcttgaccagcctctctcatgcttttggccagacagacatgtcgaggaaggcttttgtgtttcccaaagagtcggatacttcctatgtatccctcaaagcaccgttaacgaagcctctcaaagccttcactgtgtgcctccacttctacacggaactgtcctcgacccgtgcctttgttcccctatatgcattgcaggcctgctccaccctcctcagcgcctgagaatggaggtaaagtgtctggtctgggagctcgttaactatgctgggaaacggtccaaaagaatcagaatttgaggtgttttgttttcatttttatttcaagttggacagatcttggagataatttcttacctcacatagatgagaaaactaacacccagaaaggagaaatgatgttataaaaaactcataaggcaagagctgagaaggaagcgctgatcttctatttaattccccacccatgacccccagaaagcaggagggcattgcccacattcacagggctcttcagtctcagaatcaggacactggccaggtgtctggtttgggtccagagtgctcatcatcatgtcatagaactgctgggcccaggtctcctgaaatgggaagcccagcaataccacgcagtccctccactttctcaaagcacactggaaaggccattagaattgccccagcagagcagatctgctttttttccagagcaaaatgaagcactaggtataaatatgttgttactgccaagaacttaaatgactggtttttgtttgcttgcagtgctttcttaattttatggctcttctgggaaactcctccccttttccacacgaaccttgtggggctgtgaattctttcttcatccccgcattcccaatatacccaggccacaagagtggacgtgaaccacagggtgtcctgtcagaggagcccatctcccatctccccagctccctatctggaggatagttggatagttacgtgttcctagcaggaccaactacagtcttcccaaggattgagttatggactttgggagtgagacatcttcttgctgctggatttccaagctgagaggacgtgaacctgggaccaccagtagccatcttgtttgccacatggagagagactgtgaggacagaagccaaactggaagtggaggagccaagggattgacaaacaacagagccttgaccacgtggagtctctgaatcagccttgtctggaaccagatctacacctggactgcccaggtctataagccaataaagcccctgtttacttgaaaaaataaagtaaaaggatataaaagatttataaagtggtaatctttgtggataaattaaattgaaatcctcggggggggggcccggaccccaattcccccctttggggggtggttttacaattccactggccgccgttttac

SEQ ID NO: 450665 - DNA, 1419 bp, Homo sapiens
ggaaggcaagagatctaggacttctagcccctgaactttcagccgaatacatcttttccaaaggagtgaattcaggcccttgtatcactggcagcaggacgtgaccatggagaagctgttgtgtttcttggtcttgaccagcctctctcatgcttttggccagacagacatgtcgaggaaggcttttgtgtttcccaaagagtcggatacttcctatgtatccctcaaagcaccgttaagagctcgttaactatgctgggaaacggtccaaaagaatcagaatttgaggtgttttgttttcatttttatttcaagttggacagatcttggagataatttcttacctcacatagatgagaaaactaacacccagaaaggagaaatgatgttataaaaaactcataaggcaagagctgagaaggaagcgctgatcttctatttaattccccacccatgacccccagaaagcaggagggcattgcccacattcacagggctcttcagtctcagaatcaggacactggccaggtgtctggtttgggtccagagtgctcatcatcatgtcatagaactgctgggcccaggtctcctgaaatgggaagcccagcaataccacgcagtccctccactttctcaaagcacactggaaaggccattagaattgccccagcagagcagatctgctttttttccagagcaaaatgaagcactaggtataaatatgttgttactgccaagaacttaaatgactggtttttgtttgcttgcagtgctttcttaattttatggctcttctgggaaactcctccccttttccacacgaaccttgtggggctgtgaattctttcttcatccccgcattcccaatatacccaggccacaagagtggacgtgaaccacagggtgtcctgtcagaggagcccatctcccatctccccagctccctatctggaggatagttggatagttacgtgttcctagcaggaccaactacagtcttcccaaggattgagttatggactttgggagtgagacatcttcttgctgctggatttccaagctgagaggacgtgaacctgggaccaccagtagccatcttgtttgccacatggagagagactgtgaggacagaagccaaactggaagtggaggagccaagggattgacaaacaacagagccttgaccacgtggagtctctgaatcagccttgtctggaaccagatctacacctggactgcccaggtctataagccaataaagcccctgtttacttgaaaaaataaagtaaaaggatataaaagatttataaagtggtaatctttgtggataaattaaattgaaatcctcggggggggggcccggaccccaattcccccctttggggggtggttttacaattccactggccgccgttttac

SEQ ID NO: 450666 - DNA, 1210 bp, Homo sapiens
ggaaggcaagagatctaggacttctagcccctgaactttcagccgaatacatcttttccaaaggaaatcagaatttgaggtgttttgttttcatttttatttcaagttggacagatcttggagataatttcttacctcacatagatgagaaaactaacacccagaaaggagaaatgatgttataaaaaactcataaggcaagagctgagaaggaagcgctgatcttctatttaattccccacccatgacccccagaaagcaggagggcattgcccacattcacagggctcttcagtctcagaatcaggacactggccaggtgtctggtttgggtccagagtgctcatcatcatgtcatagaactgctgggcccaggtctcctgaaatgggaagcccagcaataccacgcagtccctccactttctcaaagcacactggaaaggccattagaattgccccagcagagcagatctgctttttttccagagcaaaatgaagcactaggtataaatatgttgttactgccaagaacttaaatgactggtttttgtttgcttgcagtgctttcttaattttatggctcttctgggaaactcctccccttttccacacgaaccttgtggggctgtgaattctttcttcatccccgcattcccaatatacccaggccacaagagtggacgtgaaccacagggtgtcctgtcagaggagcccatctcccatctccccagctccctatctggaggatagttggatagttacgtgttcctagcaggaccaactacagtcttcccaaggattgagttatggactttgggagtgagacatcttcttgctgctggatttccaagctgagaggacgtgaacctgggaccaccagtagccatcttgtttgccacatggagagagactgtgaggacagaagccaaactggaagtggaggagccaagggattgacaaacaacagagccttgaccacgtggagtctctgaatcagccttgtctggaaccagatctacacctggactgcccaggtctataagccaataaagcccctgtttacttgaaaaaataaagtaaaaggatataaaagatttataaagtggtaatctttgtggataaattaaattgaaatcctcggggggggggcccggaccccaattcccccctttggggggtggttttacaattccactggccgccgttttac

SEQ ID NO: 450667 - DNA, 1159 bp, Homo sapiens
ggaaggcaagagatctaggacttctagcccctgaactttcagccgaatacatcttttccaaaggagtgaattcaggcccttgtatcactggcagcaggacgtgaccatggagaagctgttgtgtttcttggtcttgaccagcctctctcatgcttttggccagacagacatgtcgaggaaggcttttgtgtttcccaaagagtcggatacttcctatgtatccctcaaagcaccgttaacgaagcctctcaaagccttcactgtgtgcctccacttctacacggaactgtcctcgacccgtgggtacagtattttctcgtatgccaccaagagacaagacaatgagattctcatattttggtctaaggatataggatacagttttacagtgggtgggtctgaaatattattcgaggttcctgaagtcacagtagctccagtacacatttgtacaagctgggagtccgcctcagggatcgtggagttctgggtagatgggaagcccagggtgaggaagagtctgaagaagggatacactgtgggggcagaagcaagcatcatcttggggcaggagcaggattccttcggtgggaactttgaaggaagccagtccctggtgggagacattggaaatgtgaacatgtgggactttgtgctgtcaccagatgagattaacaccatctatcttggcgggcccttcagtcctaatgtcctgaactggcgggcactgaagtatgaagtgcaaggcgaagtgttcaccaaaccccagctgtggccctgaggcccagctgtgggtcctgaaggtacctcccggttttttacaccgcatgggccccacgtctctgtctctggtacctcccgcttttttacactgcatggttcccacgtctctgtctctgggcctttgttcccctatatgcattgcaggcctgctccaccctcctcagcgcctgagaatggaggtaaagtgtctggtctgggagctcgttaactatgctgggaaacggtccaaaagaatcagaatttgaggtgttttgttttcatttttatttcaagttggacagatcttggagttgccactgtagtatgccaaccaaatgagttcataatgccggacagcgccgtcgttggggacgtgctggtgttaacaaaccgttag

SEQ ID NO: 450668 - DNA, 1470 bp, Homo sapiens
ggaaggcaagagatctaggacttctagcccctgaactttcagccgaatacatcttttccaaaggagtgaattcaggcccttgtatcactggcagcaggacgtgaccatggagaagctgttgtgtttcttggtcttgaccagcctctctcatgcttttggccagacagacatgtcgaggaaggcttttgtgtttcccaaagagtcggatacttcctatgtatccctcaaagcaccgttaacgaagcctctcaaagccttcactgtgtgcctccacttctacacggaactgtcctcgacccgtgggtacagtattttctcgtatgccaccaagagacaagacaatgagattctcatattttggtctaaggatataggatacagttttacagtgggtgggtctgaaatattattcgaggttcctgaagtcacagtagctccagtacacatttgtacaagctgggagtccgcctcagggatcgtggagttctgggtagatgggaagcccagggtgaggaagagtctgaagaagggatacactgtgggggcagaagcaagtctcagaatcaggacactggccaggtgtctggtttgggtccagagtgctcatcatcatgtcatagaactgctgggcccaggtctcctgaaatgggaagcccagcaataccacgcagtccctccactttctcaaagcacactggaaaggccattagaattgccccagcagagcagatctgctttttttccagagcaaaatgaagcactaggtataaatatgttgttactgccaagaacttaaatgactggtttttgtttgcttgcagtgctttcttaattttatggctcttctgggaaactcctccccttttccacacgaaccttgtggggctgtgaattctttcttcatccccgcattcccaatatacccaggccacaagagtggacgtgaaccacagggtgtcctgtcagaggagcccatctcccatctccccagctccctatctggaggatagttggatagttacgtgttcctagcaggaccaactacagtcttcccaaggattgagttatggactttgggagtgagacatcttcttgctgctggatttccaagctgagaggacgtgaacctgggaccaccagtagccatcttgtttgccacatggagagagactgtgaggacagaagccaaactggaagtggaggagccaagggattgacaaacaacagagccttgaccacgtggagtctctgaatcagccttgtctggaaccagatctacacctggactgcccaggtctataagccaataaagcccctgtttacttgaaaaaataaagtaaaaggatataaaagatttataaagtggtaatctttgtggataaattaaattgaaatcctcggggggggggcccggaccccaattcccccctttggggggtggttttacaattccactggccgccgttttac

SEQ ID NO: 450669 - DNA, 1406 bp, Homo sapiens
ggaaggcaagagatctaggacttctagcccctgaactttcagccgaatacatcttttccaaaggagtgaattcaggcccttgtatcactggcagcaggacgtgaccatggagaagctgttgtgtttcttggtcttgaccagcctctctcatgcttttggccagacagacatgtcgaggaaggcttttgtgtttcccaaagagtcggatacttcctatgtatccctcaaagcaccgttaacgaagcctctcaaagccttcactgtgtgcctccacttctacacggaactgtcctcgacccgtgggtacagtattttctcgtatgccaccaagagacaagacatgagaaaactaacacccagaaaggagaaatgatgttataaaaaactcataaggcaagagctgagaaggaagcgctgatcttctatttaattccccacccatgacccccagaaagcaggagggcattgcccacattcacagggctcttcagtctcagaatcaggacactggccaggtgtctggtttgggtccagagtgctcatcatcatgtcatagaactgctgggcccaggtctcctgaaatgggaagcccagcaataccacgcagtccctccactttctcaaagcacactggaaaggccattagaattgccccagcagagcagatctgctttttttccagagcaaaatgaagcactaggtataaatatgttgttactgccaagaacttaaatgactggtttttgtttgcttgcagtgctttcttaattttatggctcttctgggaaactcctccccttttccacacgaaccttgtggggctgtgaattctttcttcatccccgcattcccaatatacccaggccacaagagtggacgtgaaccacagggtgtcctgtcagaggagcccatctcccatctccccagctccctatctggaggatagttggatagttacgtgttcctagcaggaccaactacagtcttcccaaggattgagttatggactttgggagtgagacatcttcttgctgctggatttccaagctgagaggacgtgaacctgggaccaccagtagccatcttgtttgccacatggagagagactgtgaggacagaagccaaactggaagtggaggagccaagggattgacaaacaacagagccttgaccacgtggagtctctgaatcagccttgtctggaaccagatctacacctggactgcccaggtctataagccaataaagcccctgtttacttgaaaaaataaagtaaaaggatataaaagatttataaagtggtaatctttgtggataaattaaattgaaatcctcggggggggggcccggaccccaattcccccctttggggggtggttttacaattccactggccgccgttttac

SEQ ID NO: 450670 - DNA, 1302 bp, Homo sapiens
ggaaggcaagagatctaggacttctagcccctgaactttcagccgaatacatcttttccaaaggagtgaattcaggcccttgtatcactggcagcaggacgtgaccatggagaagctgttgtgtttcttggtcttgaccagcctctctcatgcttttggccagacagacatgtcgaggaaggcttttgtgtttcccaaagagtcggatacttcctatgtatccctcaaagcaccgttaacgaagcctctcaaagccttcactgtgtgcctccacttctacacggaactgtcctcgacccgtgggtacagtattttctcgtatgccaccaagagacaagacaatgagattctcatattttggtctaaggatataggatacagttttacagtgggtgggtctgaaatattattcgaggttcctgaagtcacagtagctccagtacacatttgtacaagctgggagccaggtctcctgaaatgggaagcccagcaataccacgcagtccctccactttctcaaagcacactggaaaggccattagaattgccccagcagagcagatctgctttttttccagagcaaaatgaagcactaggtataaatatgttgttactgccaagaacttaaatgactggtttttgtttgcttgcagtgctttcttaattttatggctcttctgggaaactcctccccttttccacacgaaccttgtggggctgtgaattctttcttcatccccgcattcccaatatacccaggccacaagagtggacgtgaaccacagggtgtcctgtcagaggagcccatctcccatctccccagctccctatctggaggatagttggatagttacgtgttcctagcaggaccaactacagtcttcccaaggattgagttatggactttgggagtgagacatcttcttgctgctggatttccaagctgagaggacgtgaacctgggaccaccagtagccatcttgtttgccacatggagagagactgtgaggacagaagccaaactggaagtggaggagccaagggattgacaaacaacagagccttgaccacgtggagtctctgaatcagccttgtctggaaccagatctacacctggactgcccaggtctataagccaataaagcccctgtttacttgaaaaaataaagtaaaaggatataaaagatttataaagtggtaatctttgtggataaattaaattgaaatcctcggggggggggcccggaccccaattcccccctttggggggtggttttacaattccactggccgccgttttac

SEQ ID NO: 450671 - DNA, 1163 bp, Homo sapiens
ggaaggcaagagatctaggacttctagcccctgaactttcagccgaatacatcttttccaaaggagtgaattcaggcccttgtatcactggcagcaggacgtgaccatggagaagctgttgtgtttcttggtcttgaccagcctctctcatgcttttggccagacagacatgtcgaggaaggcttttgtgtttcccaaagagtcggatacttcctatgtatccctcaaagcaccgttaacgaagcctctcaaagccttcactgtgtgcctccacttctacacggaactgtcctcgacccgtgggtacagtattttctcgtatgccaccaagagacaagacaatgagattctcatattttggtctaaggatataggatacagttttacagtgggtgggtctgaaatattattcgaggttcctgaagtcacagtagctccagtacacatttgtacaagctgggagctccccttttccacacgaaccttgtggggctgtgaattctttcttcatccccgcattcccaatatacccaggccacaagagtggacgtgaaccacagggtgtcctgtcagaggagcccatctcccatctccccagctccctatctggaggatagttggatagttacgtgttcctagcaggaccaactacagtcttcccaaggattgagttatggactttgggagtgagacatcttcttgctgctggatttccaagctgagaggacgtgaacctgggaccaccagtagccatcttgtttgccacatggagagagactgtgaggacagaagccaaactggaagtggaggagccaagggattgacaaacaacagagccttgaccacgtggagtctctgaatcagccttgtctggaaccagatctacacctggactgcccaggtctataagccaataaagcccctgtttacttgtgatgagtgagtccaagctgttttctgatagttgctttagaagttgtgactaacttctctaatgacctttgaaatcaagtccctgtaagtttacacttcccattacacaacatatccatggcactttaacctgtccaagagtcccctgaagggattccctctgacaagcacagtccctcttttgagatagctggccattcatgtagggccagttgtgggggttttagtac

SEQ ID NO: 450672 - DNA, 1291 bp, Homo sapiens
ggaaggcaagagatctaggacttctagcccctgaactttcagccgaatacatcttttccaaaggagtgaattcaggcccttgtatcactggcagcaggacaatgagattctcatattttggtctaaggatataggatacagttttacagtgggtgggtctgaaatattattcgaggttcctgaagtcacagtagctccagtacacatttgtacaagctgggagtccgcctcagggatcgtggagttctgggtagatgggaagcccagggtgaggaagagtctgaagaagggatacactgtgggggcagaagcaagcatcatcttggggcaggagcaggattccttcggtgggaactttgaaggaagccagtccctggtgggagacattggaaatgtgaacatgtgggactttgtgctgtcaccagatgagattaacaccatctatcttggcgggcccttcagtcctaatgtcctgaactggcgggcactgaagtatgaagtgcaaggcgaagtgttcaccaaaccccagctgtggccctgaggcccagctgtgggttgctttcttaattttatggctcttctgggaaactcctccccttttccacacgaaccttgtggggctgtgaattctttcttcatccccgcattcccaatatacccaggccacaagagtggacgtgaaccacagggtgtcctgtcagaggagcccatctcccatctccccagctccctatctggaggatagttggatagttacgtgttcctagcaggaccaactacagtcttcccaaggattgagttatggactttgggagtgagacatcttcttgctgctggatttccaagctgagaggacgtgaacctgggaccaccagtagccatcttgtttgccacatggagagagactgtgaggacagaagccaaactggaagtggaggagccaagggattgacaaacaacagagccttgaccacgtggagtctctgaatcagccttgtctggaaccagatctacacctggactgcccaggtctataagccaataaagcccctgtttacttgtgatgagtgagtccaagctgttttctgatagttgctttagaagttgtgactaacttctctaatgacctttgaaatcaagtccctgtaagtttacacttcccattacacaacatatccatggcactttaacctgtccaagagtcccctgaagggattccctctgacaagcacagtccctcttttgagatagctggccattcatgtagggccagttgtgggggttttagtac

SEQ ID NO: 450673 - DNA, 1167 bp, Homo sapiens
ggaaggcaagagatctaggacttctagcccctgaactttcagccgaatacatcttttccaaaggagtgaattcaggcccttgtatcactggcagcaggacgtgaccatggagaagctgttgtgtttcttggtcttgaccagcctctctcatgcttttggccagacagacatgtcgaggaaggcttttgtgtttcccaaagagtcggatacttcctatgtatccctcaaagcaccgttaacgaagcctctcaaagccttcactgtgtgcctccacttctacacggaactgtcctcgacccgtatgagattaacaccatctatcttggcgggcccttcagtcctaatgtcctgaactggcgggcactgaagtatgaagtgcaaggcgaagtgttcaccaaaccccagctgtggccctgaggcccagctgtgggttgctttcttaattttatggctcttctgggaaactcctccccttttccacacgaaccttgtggggctgtgaattctttcttcatccccgcattcccaatatacccaggccacaagagtggacgtgaaccacagggtgtcctgtcagaggagcccatctcccatctccccagctccctatctggaggatagttggatagttacgtgttcctagcaggaccaactacagtcttcccaaggattgagttatggactttgggagtgagacatcttcttgctgctggatttccaagctgagaggacgtgaacctgggaccaccagtagccatcttgtttgccacatggagagagactgtgaggacagaagccaaactggaagtggaggagccaagggattgacaaacaacagagccttgaccacgtggagtctctgaatcagccttgtctggaaccagatctacacctggactgcccaggtctataagccaataaagcccctgtttacttgtgatgagtgagtccaagctgttttctgatagttgctttagaagttgtgactaacttctctaatgacctttgaaatcaagtccctgtaagtttacacttcccattacacaacatatccatggcactttaacctgtccaagagtcccctgaagggattccctctgacaagcacagtccctcttttgagatagctggccattcatgtagggccagttgtgggggttttagtac

SEQ ID NO: 450674 - DNA, 1130 bp, Homo sapiens
ggaaggcaagagatctaggacttctagcccctgaactttcagccgaatacatcttttccaaaggagtgaattcaggcccttgtatcactggcagcaggacgtgaccatggagaagctgttgtgtttcttggtcttgaccagcctctctcatgcttttggccagacagacatgtcgaggaaggcttttgtgtttcccaaagagtcggatacttcctatgtatccctcaaagcaccgttaacgaagcctctcaaagccttcactgtgtgcctccacttctacacggaactgtcctcgacccgttcctaatgtcctgaactggcgggcactgaagtatgaagtgcaaggcgaagtgttcaccaaaccccagctgtggccctgaggcccagctgtgggttgctttcttaattttatggctcttctgggaaactcctccccttttccacacgaaccttgtggggctgtgaattctttcttcatccccgcattcccaatatacccaggccacaagagtggacgtgaaccacagggtgtcctgtcagaggagcccatctcccatctccccagctccctatctggaggatagttggatagttacgtgttcctagcaggaccaactacagtcttcccaaggattgagttatggactttgggagtgagacatcttcttgctgctggatttccaagctgagaggacgtgaacctgggaccaccagtagccatcttgtttgccacatggagagagactgtgaggacagaagccaaactggaagtggaggagccaagggattgacaaacaacagagccttgaccacgtggagtctctgaatcagccttgtctggaaccagatctacacctggactgcccaggtctataagccaataaagcccctgtttacttgtgatgagtgagtccaagctgttttctgatagttgctttagaagttgtgactaacttctctaatgacctttgaaatcaagtccctgtaagtttacacttcccattacacaacatatccatggcactttaacctgtccaagagtcccctgaagggattccctctgacaagcacagtccctcttttgagatagctggccattcatgtagggccagttgtgggggttttagtac

SEQ ID NO: 450675 - DNA, 1036 bp, Homo sapiens
ggaaggcaagagatctaggacttctagcccctgaactttcagccgaatacatcttttccaaaggagtgaattcaggcccttgtatcactggcagcaggacgtgaccatggagaagctgttgtgtttcttggtcttgaccagcctctctcatgcttttggccagacagacatgtcgaggaaggcttttgtgtttcccaaagagtcggatacttcctatgtatccctcaaagcaccgttaacgaagcctctcaaagccttcactgtgtgcctccacttctacacggaactgtcctcgacccgttgctttcttaattttatggctcttctgggaaactcctccccttttccacacgaaccttgtggggctgtgaattctttcttcatccccgcattcccaatatacccaggccacaagagtggacgtgaaccacagggtgtcctgtcagaggagcccatctcccatctccccagctccctatctggaggatagttggatagttacgtgttcctagcaggaccaactacagtcttcccaaggattgagttatggactttgggagtgagacatcttcttgctgctggatttccaagctgagaggacgtgaacctgggaccaccagtagccatcttgtttgccacatggagagagactgtgaggacagaagccaaactggaagtggaggagccaagggattgacaaacaacagagccttgaccacgtggagtctctgaatcagccttgtctggaaccagatctacacctggactgcccaggtctataagccaataaagcccctgtttacttgtgatgagtgagtccaagctgttttctgatagttgctttagaagttgtgactaacttctctaatgacctttgaaatcaagtccctgtaagtttacacttcccattacacaacatatccatggcactttaacctgtccaagagtcccctgaagggattccctctgacaagcacagtccctcttttgagatagctggccattcatgtagggccagttgtgggggttttagtac

SEQ ID NO: 450676 - DNA, 968 bp, Homo sapiens
ggaaggcaagagatctaggacttctagcccctgaactttcagccgaatacatcttttccaaaggagtgaattcaggcccttgtatcactggcagcaggacgtgaccatggagaagctgttgtgtttcttggtcttgaccagcctctctcatgcttttggccagacagacatgtcgaggaaggcttttgtgtttcccaaagagtcggatacttcctatgtatccctcaaagcaccgttaacgaagcctctcaaagccttcactgtgtgcctccccttttccacacgaaccttgtggggctgtgaattctttcttcatccccgcattcccaatatacccaggccacaagagtggacgtgaaccacagggtgtcctgtcagaggagcccatctcccatctccccagctccctatctggaggatagttggatagttacgtgttcctagcaggaccaactacagtcttcccaaggattgagttatggactttgggagtgagacatcttcttgctgctggatttccaagctgagaggacgtgaacctgggaccaccagtagccatcttgtttgccacatggagagagactgtgaggacagaagccaaactggaagtggaggagccaagggattgacaaacaacagagccttgaccacgtggagtctctgaatcagccttgtctggaaccagatctacacctggactgcccaggtctataagccaataaagcccctgtttacttgtgatgagtgagtccaagctgttttctgatagttgctttagaagttgtgactaacttctctaatgacctttgaaatcaagtccctgtaagtttacacttcccattacacaacatatccatggcactttaacctgtccaagagtcccctgaagggattccctctgacaagcacagtccctcttttgagatagctggccattcatgtagggccagttgtgggggttttagtac

SEQ ID NO: 450677 - DNA, 955 bp, Homo sapiens
ggaaggcaagagatctaggacttctagcccctgaactttcagccgaatacatcttttccaaaggagtgaattcaggcccttgtatcactggcagcaggacgtgaccatggagaagctgttgtgtttcttggtcttgaccagcctctctcatgcttttggccagacagacatgtcgaggaaggcttttgtgtttcccaaagagtcggatacttcctatgtatccctcaaagcaccgttaacgaagcctctcaaagccttcactgtgtgcctccacttctacacggaactgtcctcgacccgtatgagattaacaccatctatcttggcgggcccttcagtcctaatgtcctgaactggcgggcactgaagtatgaagtgcaaggcgaagtgttcaccaaaccccagctgtggccctgaggcccagctgtgggtaggaccaactacagtcttcccaaggattgagttatggactttgggagtgagacatcttcttgctgctggatttccaagctgagaggacgtgaacctgggaccaccagtagccatcttgtttgccacatggagagagactgtgaggacagaagccaaactggaagtggaggagccaagggattgacaaacaacagagccttgaccacgtggagtctctgaatcagccttgtctggaaccagatctacacctggactgcccaggtctataagccaataaagcccctgtttacttgtgatgagtgagtccaagctgttttctgatagttgctttagaagttgtgactaacttctctaatgacctttgaaatcaagtccctgtaagtttacacttcccattacacaacatatccatggcactttaacctgtccaagagtcccctgaagggattccctctgacaagcacagtccctcttttgagatagctggccattcatgtagggccagttgtgggggttttagtac

SEQ ID NO: 450678 - DNA, 934 bp, Homo sapiens
ggaaggcaagagatctaggacttctagcccctgaactttcagccgaatacatcttttccaaaggagtgaattcaggcccttgtatcactggcagcaggacgtgaccatggagaagctgttgtgtttcttggtcttgaccagcctctctcatgcttttggccagacagacatgtcgaggaaggcttttgtgtttcccaaagagtcggatacttcctatgtatccctcaaagcaccgttaacgaagcctctcaaagccttcactgtgtgcctccacttctacacggaactgtcctcgacccgtgggtacagtattttctcgtatgccaccaagagacaagacaatgagattctcatattttggtctaaggatataggatacagttttacagtgggtgggtctgaaatattattcgaggttcctgaagtcacagtagctccagtacacatttgtacaagctgggagtccgcctcagggatcgtggagttctgggtagatgggaagcccagggtgaggaactgaatcagccttgtctggaaccagatctacacctggactgcccaggtctataagccaataaagcccctgtttacttgtacgttgcgaaaacacacaaatctaaacataagcaacaccacaactgtttgcgcccagcctttggccccttaaaaaggtcttaacacccatactgtgttgggccacggggtccacaatatagtatagtgcaacaacgttgcccacaaggctgtgtcccaaaaggaaagccccggggcagaagacaaacgcggccggagcttcccaccccaattataaaaaacgccccggggggcaaaccagacgcgtgttctgcaaacaacacccaagagtcgcagtccagaaggcacaaacaggggcatcgtaaacagggagtcacaagccaagacccaattttagagc

SEQ ID NO: 450679 - DNA, 2246 bp, Homo sapiens
ggaaggcaagagatctaggacttctagcccctgaactttcagccgaatacatcttttccaaaggagtgaattcaggcccttgtatcactggcagcaggacgtgaccatggagaagctgttgtgtttcttggtcttgaccagcctctctcatgcttttggccagacagacatgtcgaggaaggcttttgtgtttcccaaagagtcggatacttcctatgtatccctcaaagcaccgttaacgaagcctctcaaagccttcactgtgtgcctccacttctacacggaactgtcctcgacccgtgggtacagtattttctcgtatgccaccaagagacaagacaatgagattctcatattttggtctaaggatataggatacagttttacagtgggtgggtctgaaatattattcgaggttcctgaagtcacagtagctccagtacacatttgtacaagctgggagtccgcctcagggatcgtggagttctgggtagatgggaagcccagggtgaggaagagtctgaagaagggatacactgtgggggcagaagcaagcatcatcttggggcaggagcaggattccttcggtgggaactttgaaggaagccagtccctggtgggagacattggaaatgtgaacatgtgggactttgtgctgtcaccagatgagattaacaccatctatcttggcgggcccttcagtcctaatgtcctgaactggcgggcactgaagtatgaagtgcaaggcgaagtgttcaccaaaccccagctgtggccctgaggcccagctgtgggtcctgaaggtacctcccggttttttacaccgcatgggccccacgtctctgtctctggtacctcccgcttttttacactgcatggttcccacgtctctgtctctgggcctttgttcccctatatgcattgcaggcctgctccaccctcctcagcgcctgagaatggaggtaaagtgtctggtctgggagctcgttaactatgctgggaaacggtccaaaagaatcagaatttgaggtgttttgttttcatttttatttcaagttggacagatcttggagataatttcttacctcacatagatgagaaaactaacacccagaaaggagaaatgatgttataaaaaactcataaggcaagagctgagaaggaagcgctgatcttctatttaattccccacccatgacccccagaaagcaggagggcattgcccacattcacagggctcttcagtctcagaatcaggacactggccaggtgtctggtttgggtccagagtgctcatcatcatgtcatagaactgctgggcccaggtctcctgaaatgggaagcccagcaataccacgcagtccctccactttctcaaagcacactggaaaggccattagaattgccccagcagagcagatctgctttttttccagagcaaaatgaagcactaggtataaatatgttgttactgccaagaacttaaatgactggtttttgtttgcttgcagtgctttcttaattttatggctcttctgggaaactcctccccttttccacacgaaccttgtggggctgtgaattctttcttcatccccgcattcccaatatacccaggccacaagagtggacgtgaaccacagggtgtcctgtcagaggagcccatctcccatctccccagctccctatctggaggatagttggatagttacgtgttcctagcaggaccaactacagtcttcccaaggattgagttatggactttgggagtgagacatcttcttgctgctggatttccaagctgagaggacgtgaacctgggaccaccagtagccatcttgtttgccacatggagagagactgtgaggacagaagccaaactggaagtggaggagccaagggattgacaaacaacagagccttgaccacgtggagtctctgaatcagccttgtctggaaccagatctacacctggactgcccaggtctataagccaataaagcccctgtttacttgtgatgagtgagtccaagctgttttctgatagttgctttagaagttgtgactaacttctctaatgacctttgaaatcaagtccctgtaagtttacacttcccattacacaacatatccatggcactttaacctgtccaagagtcccctgaagggattccctctgacaagcacagtccctcttttgagatagctggccattcatgtagggccagttgtgggggttttagtac

SEQ ID NO: 450680 - DNA, 2137 bp, Homo sapiens
ggaaggcaagagatctaggacttctagcccctgaactttcagccgaatacatcttttccaaaggagtgaattcaggcccttgtatcactggcagcaggacgtgaccatggagaagctgttgtgtttcttggtcttgaccagcctctctcatgcttttggccagacagacatgtcgaggaaggcttttgtgtttcccaaagagtcggatacttcctatgtatccctcaaagcaccgttaacgaagcctctcaaagccttcactgtgtgcctccacttctacacggaactgtcctcgacccgtgggtacagtattttctcgtatgccaccaagagacaagacaatgagattctcatattttggtctaaggatataggatacagttttacagtgggtgggtctgaaatattattcgaggttcctgaagtcacagtagctccagtacacatttgtacaagctgggagtccgcctcagggatcgtggagttctgggtagatgggaagcccagggtgaggaagagtctgaagaagggatacactgtgggggcagaagcaagcatcatcttggggcaggagcaggattccttcggtgggaactttgaaggaagccagtccctggtgggagacattggaaatgtgaacatatgagattaacaccatctatcttggcgggcccttcagtcctaatgtcctgaactggcgggcactgaagtatgaagtgcaaggcgaagtgttcaccaaaccccagctgtggccctgaggcccagctgtgggtcctgaaggtacctcccggttttttacaccgcatgggccccacgtctctgtctctggtacctcccgcttttttacactgcatggttcccacgtctctgtctctgggcctttgttcccctatatgcattgcaggcctgctccaccctcctcagcgcctgagaatggaggtaaagtgtctggtctgggagctcgttaactatgctgggaaacggtccaaaagaatcagaatttgaggtgttttgttttcatttttatttcaagttggacagatcttggagataatttcttacctcacatagatgagaaaactaacacccagaaaggagaaatgatgttataaaaaactcataaggcaagagctgagaaggaagcgctgatcttctatttaattccccacccatgacccccagaaagcaggagggcattgcccacattcacagggctcttcagtctcagaatcaggacactggccaggtgtctggtttgggtccagagtgctcatcatcatgtcatagaactgctgggcccaggtctcctgaaatgggaagcccagcaataccacgcagtccctccactttctcaaagcacactggaaaggccattagaattgccccagcagagcagatctgctttttttccagagcaaaatgaagcactaggtataaatatgttgttactgccaagaacttaaatgactggtttttgtttgcttgcagtgctttcttaattttatggctcttctgggaaactcctccccttttccacacgaaccttgtggggctgtgaattctttcttcatccccgcattcccaatatacccaggccacaagagtggacgtgaaccacagggtgtcctgtcagaggagcccatctcccatctccccagctccctatctggaggatagttggatagttacgtgttcctagcaggaccaactacagtcttcccaaggattgagttatggactttgggagtgagacatcttcttgctgctggatttccaagctgagaggacgtgaacctgggaccaccagtagccatcttgtttgccacatggagagagactgtgaggacagaagccaaactggaagtggaggagccaagggattgacaaacaacagagccttgaccacgtggagtctctgaatcagccttgtctggaaccagatctacacctggactgcccaggtctataagccaataaagcccctgtttacttgaaaaaataaagtaaaaggatataaaagatttataaagtggtaatctttgtggataaattaaattgaaatcctcggggggggggcccggaccccaattcccccctttggggggtggttttacaattccactggccgccgttttac

SEQ ID NO: 450681 - DNA, 2109 bp, Homo sapiens
ggaaggcaagagatctaggacttctagcccctgaactttcagccgaatacatcttttccaaaggagtgaattcaggcccttgtatcactggcagcaggacgtgaccatggagaagctgttgtgtttcttggtcttgaccagcctctctcatgcttttggccagacagacatgtcgaggaaggcttttgtgtttcccaaagagtcggatacttcctatgtatccctcaaagcaccgttaacgaagcctctcaaagccttcactgtgtgcctccacttctacacggaactgtcctcgacccgtgggtacagtattttctcgtatgccaccaagagacaagacaatgagattctcatattttggtctaaggatataggatacagttttacagtgggtgggtctgaaatattattcgaggttcctgaagtcacagtagctccagtacacatttgtacaagctgggagtccgcctcagggatcgtggagttctgggtagatgggaagcccagggtgaggaagagtctgaagaagggatacactgtgggggcagaagcaagccagtccctggtgggagacattggaaatgtgaacatgtgggactttgtgctgtcaccagatgagattaacaccatctatcttggcgggcccttcagtcctaatgtcctgaactggcgggcactgaagtatgaagtgcaaggcgaagtgttcaccaaaccccagctgtggccctgaggcccagctgtgggtcctgaaggtacctcccggttttttacaccgcatgggccccacgtctctgtctctggtacctcccgcttttttacactgcatggttcccacgtctctgtctctgggcctttgttcccctatatgcattgcaggcctgctccaccctcctcagcgcctgagaatggaggtaaagtgtctggtctgggagctcgttaactatgctgggaaacggtccaaaagaatcagaatttgaggtgttttgttttcatttttatttcaagttggacagatcttggagataatttcttacctcacatagatgagaaaactaacacccagaaaggagaaatgatgttataaaaaactcataaggcaagagctgagaaggaagcgctgatcttctatttaattccccacccatgacccccagaaagcaggagggcattgcccacattcacagggctcttcagtctcagaatcaggacactggccaggtgtctggtttgggtccagagtgctcatcatcatgtcatagaactgctgggcccaggtctcctgaaatgggaagcccagcaataccacgcagtccctccactttctcaaagcacactggaaaggccattagaattgccccagcagagcagatctgctttttttccagagcaaaatgaagcactaggtataaatatgttgttactgccaagaacttaaatgactggtttttgtttgcttgcagtgctttcttaattttatggctcttctgggaaactcctccccttttccacacgaaccttgtggggctgtgaattctttcttcatccccgcattcccaatatacccaggccacaagagtggacgtgaaccacagggtgtcctgtcagaggagcccatctcccatctccccagctccctatctggaggatagttggatagttacgtgttcctagcaggaccaactacagtcttcccaaggattgagttatggactttgggagtgagacatcttcttgctgctggatttccaagctgagaggacgtgaacctgggaccaccagtagccatcttgtttgccacatggagagagactgtgaggacagaagccaaactggaagtggaggagccaagggattgacaaacaacagagccttgaccacgtggagtctctgaatcagccttgtctggaaccagatctacacctggactgcccaggtctataagccaataaagcccctgtttacttgaaaaaataaagtaaaaggatataaaagatttataaagtggtaatctttgtggataaattaaattgaaatcctcggggggggggcccggaccccaattcccccctttggggggtggttttacaattccactggccgccgttttac

SEQ ID NO: 450682 - DNA, 1970 bp, Homo sapiens
ggaaggcaagagatctaggacttctagcccctgaactttcagccgaatacatcttttccaaaggagtgaattcaggcccttgtatcactggcagcaggacgtgaccatggagaagctgttgtgtttcttggtcttgaccagcctctctcatgcttttggccagacagacatgtcgaggaaggcttttgtgtttcccaaagagtcggatacttcctatgtatccctcaaagcaccgttaacgaagcctctcaaagccttcactgtgtgcctccacttctacacggaactgtcctcgacccgtgggtacagtattttctcgtatgccaccaagagacaagacaatgagattctcatattttggtctaaggatataggatacagttttacagtgggtgggtctgaaatattattcgaggttcctgaagtcacagtagctccagtacacatttgtacaagctgggagtccgcctcagggatcgtggagttctgggtagatgggaagcccagggtgaggaagagtctgaagaagggatacactgtgggggcagaagcaagcatcatcttggggcaggagcaggattccttcggtgggaactttgaaggaagcctgaaggtacctcccggttttttacaccgcatgggccccacgtctctgtctctggtacctcccgcttttttacactgcatggttcccacgtctctgtctctgggcctttgttcccctatatgcattgcaggcctgctccaccctcctcagcgcctgagaatggaggtaaagtgtctggtctgggagctcgttaactatgctgggaaacggtccaaaagaatcagaatttgaggtgttttgttttcatttttatttcaagttggacagatcttggagataatttcttacctcacatagatgagaaaactaacacccagaaaggagaaatgatgttataaaaaactcataaggcaagagctgagaaggaagcgctgatcttctatttaattccccacccatgacccccagaaagcaggagggcattgcccacattcacagggctcttcagtctcagaatcaggacactggccaggtgtctggtttgggtccagagtgctcatcatcatgtcatagaactgctgggcccaggtctcctgaaatgggaagcccagcaataccacgcagtccctccactttctcaaagcacactggaaaggccattagaattgccccagcagagcagatctgctttttttccagagcaaaatgaagcactaggtataaatatgttgttactgccaagaacttaaatgactggtttttgtttgcttgcagtgctttcttaattttatggctcttctgggaaactcctccccttttccacacgaaccttgtggggctgtgaattctttcttcatccccgcattcccaatatacccaggccacaagagtggacgtgaaccacagggtgtcctgtcagaggagcccatctcccatctccccagctccctatctggaggatagttggatagttacgtgttcctagcaggaccaactacagtcttcccaaggattgagttatggactttgggagtgagacatcttcttgctgctggatttccaagctgagaggacgtgaacctgggaccaccagtagccatcttgtttgccacatggagagagactgtgaggacagaagccaaactggaagtggaggagccaagggattgacaaacaacagagccttgaccacgtggagtctctgaatcagccttgtctggaaccagatctacacctggactgcccaggtctataagccaataaagcccctgtttacttgaaaaaataaagtaaaaggatataaaagatttataaagtggtaatctttgtggataaattaaattgaaatcctcggggggggggcccggaccccaattcccccctttggggggtggttttacaattccactggccgccgttttac

SEQ ID NO: 450683 - DNA, 1696 bp, Homo sapiens
ggaaggcaagagatctaggacttctagcccctgaactttcagccgaatacatcttttccaaaggagtgaattcaggcccttgtatcactggcagcaggacgtgaccatggagaagctgttgtgtttcttggtcttgaccagcctctctcatgcttttggccagacagacatgtcgaggaaggcttttgtgtttcccaaagagtcggatacttcctatgtatccctcaaagcaccgttaacgaagcctctcaaagccttcactgtgtgcctccacttctacacggaactgtcctcgacccgtgggtacagtattttctcgtatgccaccaagagacaagacaatgagattctcatattttggtctaaggatataggatacagttttacagtgggtgggtctgaaatattattcgaggttcctgaagtcacagtagctccagtacacatttgtacaagctgggagtccgcctcagggatcgtggagttctgggtagatgggaagcccagggtgaggaagagctcgttaactatgctgggaaacggtccaaaagaatcagaatttgaggtgttttgttttcatttttatttcaagttggacagatcttggagataatttcttacctcacatagatgagaaaactaacacccagaaaggagaaatgatgttataaaaaactcataaggcaagagctgagaaggaagcgctgatcttctatttaattccccacccatgacccccagaaagcaggagggcattgcccacattcacagggctcttcagtctcagaatcaggacactggccaggtgtctggtttgggtccagagtgctcatcatcatgtcatagaactgctgggcccaggtctcctgaaatgggaagcccagcaataccacgcagtccctccactttctcaaagcacactggaaaggccattagaattgccccagcagagcagatctgctttttttccagagcaaaatgaagcactaggtataaatatgttgttactgccaagaacttaaatgactggtttttgtttgcttgcagtgctttcttaattttatggctcttctgggaaactcctccccttttccacacgaaccttgtggggctgtgaattctttcttcatccccgcattcccaatatacccaggccacaagagtggacgtgaaccacagggtgtcctgtcagaggagcccatctcccatctccccagctccctatctggaggatagttggatagttacgtgttcctagcaggaccaactacagtcttcccaaggattgagttatggactttgggagtgagacatcttcttgctgctggatttccaagctgagaggacgtgaacctgggaccaccagtagccatcttgtttgccacatggagagagactgtgaggacagaagccaaactggaagtggaggagccaagggattgacaaacaacagagccttgaccacgtggagtctctgaatcagccttgtctggaaccagatctacacctggactgcccaggtctataagccaataaagcccctgtttacttgaaaaaataaagtaaaaggatataaaagatttataaagtggtaatctttgtggataaattaaattgaaatcctcggggggggggcccggaccccaattcccccctttggggggtggttttacaattccactggccgccgttttac

SEQ ID NO: 450684 - DNA, 1835 bp, Homo sapiens
ggaaggcaagagatctaggacttctagcccctgaactttcagccgaatacatcttttccaaaggagtgaattcaggcccttgtatcactggcagcaggacgtgaccatggagaagctgttgtgtttcttggtcttgaccagcctctctcatgcttttggccagacagacatgtcgaggaaggcttttgtgtttcccaaagagtcggatacttcctatgtatccctcaaagcaccgttaacgaagcctctcaaagccttcactgtgtgcctccacttctacacggaactgtcctcgacccgtgggtacagtattttctcgtatgccaccaagagacaagacaatgagattctcatattttggtctaaggatataggatacagttttacagtgggtgggtctgaaatattattcgaggttcctgaagtcacagtagctccagtacacatttgtacaagctgggagtccgcctcagggatcgtggagttctgggtagatgggaagcccagggtgaggaagagtctgaagaagggatacactgtgggggcagaagcaagcatcatcttggggcaggagcaggattccttcggtgggaactttgaaggaagccagtccctggtgggagacattggaaatgtgaacatgtgggactttgtgctgtcaccagatgagattaacaccatctatcttggcgggcccttcagtcctaatgtcctgaactggcgggcactgaagtatgaagtgcaaggcgaagtgttcaccaaaccccagctgtggccctgaggcccagctgtgggtcctgaaggtacctcccggttttttacaccgcatgggccccacgtctctgtctctggtacctcccgcttttttacactgcatggttcccacgtctctgtctctgggcctttgttcccctatatgcattgcaggcctgctccaccctcctcagcgcctgagaatggaggtaaagtgtctggtctgggagctcgttaactatgctgggaaacggtccaaaagaatcagaatttgaggtgttttgttttcatttttatttcaagttggacagatcttggagataatttcttacctcacatagatgagaaaactaacacccagaaaggagaaatgatgttataactccccttttccacacgaaccttgtggggctgtgaattctttcttcatccccgcattcccaatatacccaggccacaagagtggacgtgaaccacagggtgtcctgtcagaggagcccatctcccatctccccagctccctatctggaggatagttggatagttacgtgttcctagcaggaccaactacagtcttcccaaggattgagttatggactttgggagtgagacatcttcttgctgctggatttccaagctgagaggacgtgaacctgggaccaccagtagccatcttgtttgccacatggagagagactgtgaggacagaagccaaactggaagtggaggagccaagggattgacaaacaacagagccttgaccacgtggagtctctgaatcagccttgtctggaaccagatctacacctggactgcccaggtctataagccaataaagcccctgtttacttgtgatgagtgagtccaagctgttttctgatagttgctttagaagttgtgactaacttctctaatgacctttgaaatcaagtccctgtaagtttacacttcccattacacaacatatccatggcactttaacctgtccaagagtcccctgaagggattccctctgacaagcacagtccctcttttgagatagctggccattcatgtagggccagttgtgggggttttagtac

SEQ ID NO: 450685 - DNA, 1531 bp, Homo sapiens
ggaaggcaagagatctaggacttctagcccctgaactttcagccgaatacatcttttccaaaggagtgaattcaggcccttgtatcactggcagcaggacgtgaccatggagaagctgttgtgtttcttggtcttgaccagcctctctcatgcttttggccagacagacatgtcgaggaaggcttttgtgtttcccaaagagtcggatacttcctatgtatccctcaaagcaccgttaacgaagcctctcaaagccttcactgtgtgcctccacttctacacggaactgtcctcgacccgtgggtacagtattttctcgtatgccaccaagagacaagacaatgagattctcatattttggtctaaggatataggatacagttttacagtgggtgggtctgaaatattattcgaggttcctgaagtcacagtagctccagtacacatttgtacaagctgggagtccgcctcagggatcgtggagttctgggtagatgggaagcccagggtgaggaagagtctgaagaagggatacactgtgggggcagaagcaagcatcatcttggggcaggagcaggattccttcggtgggaactttgaaggaagccagtccctggtgggagacattggaaatgtgaacatgtgggactttgtgctgtcaccagatgagattaacaccatctatcttggcgggcccttcagtcctaatgtcctgaactggcgggcactgaagtatgaagtgcaaggcgaagtgttcaccaaaccccagctgtggccctgaggcccagctgtgggttgctttcttaattttatggctcttctgggaaactcctccccttttccacacgaaccttgtggggctgtgaattctttcttcatccccgcattcccaatatacccaggccacaagagtggacgtgaaccacagggtgtcctgtcagaggagcccatctcccatctccccagctccctatctggaggatagttggatagttacgtgttcctagcaggaccaactacagtcttcccaaggattgagttatggactttgggagtgagacatcttcttgctgctggatttccaagctgagaggacgtgaacctgggaccaccagtagccatcttgtttgccacatggagagagactgtgaggacagaagccaaactggaagtggaggagccaagggattgacaaacaacagagccttgaccacgtggagtctctgaatcagccttgtctggaaccagatctacacctggactgcccaggtctataagccaataaagcccctgtttacttgtgatgagtgagtccaagctgttttctgatagttgctttagaagttgtgactaacttctctaatgacctttgaaatcaagtccctgtaagtttacacttcccattacacaacatatccatggcactttaacctgtccaagagtcccctgaagggattccctctgacaagcacagtccctcttttgagatagctggccattcatgtagggccagttgtgggggttttagtac

SEQ ID NO: 450686 - DNA, 1267 bp, Homo sapiens
ggaaggcaagagatctaggacttctagcccctgaactttcagccgaatacatcttttccaaaggagtgaattcaggcccttgtatcactggcagcaggacgtgaccatggagaagctgttgtgtttcttggtcttgaccagcctctctcatgcttttggccagacagacatgtcgaggaaggcttttgtgtttcccaaagagtcggatacttcctatgtatccctcaaagcaccgttaacgaagcctctcaaagccttcactgtgtgcctccacttctacacggaactgtcctcgacccgtgggtacagtattttctcgtatgccaccaagagacaagacaatgagattctcatattttggtctaaggatataggatacagttttacagtgggtgggtctgaaatattattcgaggttcctgaagtcacagtagctccagtacacatttgtacaagctgggagtccgcctcagggatcgtggagttctgggtagatgggaagcccagggtgaggaacaataccacgcagtccctccactttagagcaaaatgaagcactaggtataaatatgttgttactgccaagaacttaaatgactggtttttgtttgcttgcagtgctttcttaattttatggctcttctgggaaactcctccccttttccacacgaaccttgtggggctgtgaattctttcttcatccccgcattcccaatatacccaggccacaagagtggacgtgaaccacagggtgtcctgtcagaggagcccatctcccatctccccagctccctatctggaggatagttggatagttacgtgttcctagcaggaccaactacagtcttcccaaggattgagttatggactttgggagtgagacatcttcttgctgctggatttccaagctgagaggacgtgaacctgggaccaccagtagccatcttgtttgccacatggagagagactgtgaggacagaagccaaactggaagtggaggagccaagggattgacaaacaacagagccttgaccacgtggagtctctgaatcagccttgtctggaaccagatctacacctggactgcccaggtctataagccaataaagcccctgtttacttgaaaaaataaagtaaaaggatataaaagatttataaagtggtaatctttgtggataaattaaattgaaatcctcggggggggggcccggaccccaattcccccctttggggggtggttttacaattccactggccgccgttttac

SEQ ID NO: 450687 - DNA, 1113 bp, Homo sapiens
ggaaggcaagagatctaggacttctagcccctgaactttcagccgaatacatcttttccaaaggagtgaattcaggcccttgtatcactggcagcaggacgtgaccatggagaagctgttgtgtttcttggtcttgaccagcctctctcatgcttttggccagacagacatgtcgaggaaggcttttgtgtttcccaaagagtcggatacttcctatgtatccctcaaagcaccgttaacgaagcctctcaaagccttcactgtgtgcctccacttctacacggaactgtcctcgacccgtgggtacagtattttctcgtatgccaccaagagacaagacaatgagattctcatattttggtctaaggatataggatacagttttacagtgggtgggtctgaaatattattcgaggttcctgaagtcacagtagctccagtacacatttgtacaagctgggagtccgcctcagggatcgtggagttctgggtagatgggaagcccagggtgaggaactgtcagaggagcccatctcccatctccccagctccctatctggaggatagttggatagttacgtgttcctagcaggaccaactacagtcttcccaaggattgagttatggactttgggagtgagacatcttcttgctgctggatttccaagctgagaggacgtgaacctgggaccaccagtagccatcttgtttgccacatggagagagactgtgaggacagaagccaaactggaagtggaggagccaagggattgacaaacaacagagccttgaccacgtggagtctctgaatcagccttgtctggaaccagatctacacctggactgcccaggtctataagccaataaagcccctgtttacttgtgatgagtgagtccaagctgttttctgatagttgctttagaagttgtgactaacttctctaatgacctttgaaatcaagtccctgtaagtttacacttcccattacacaacatatccatggcactttaacctgtccaagagtcccctgaagggattccctctgacaagcacagtccctcttttgagatagctggccattcatgtagggccagttgtgggggttttagtac

SEQ ID NO: 450688 - DNA, 2878 bp, Homo sapiens
agcggggcttcccaggaccctcagggagagcgggcagccttccaggtggacagaaatggactcagaactcaaggaagaaattcctgtgcatgaggaattcattttgtgtggtggagccgaaacccaggttctaaaatgtgggccctggacagacctctttcatgatcaaagtgtcaaaaggcctaagctgcttattttcattattcctggtaacccaggtttttctgccttttatgtgccatttgcaaaggctttatactctttgacaaacagacgctttccagtttggactatcagtcatgctgggcatgcgttggctcccaaagacaagaagattcttacaacatcagaggattcaaacgctcaagaaattaaggacatttatggactaaatggacaaatagagcacaaactagctttcctgagaactcatgtgccaaaggacatgaaacttgtgctcattggccattcaataggcagctatttcacacttcagatgctgaagcgagtccctgagctcccggtaattcgtgcctttctgctctttccaacaattgaacgaatgtctgagtcacccaatggcagaattgccactccacttttgtgctggtttcgatatgttctctatgttactggctacttattattgaaaccgtgtcctgagacaatcaagtccttgctaatcagaaggggccttcaagtaatgaacctagagaatgaattttcaccattgaatatattagaaccattctgccttgctaatgctgcctaccttgggggccaagaaatgatggaggtggtgaagagagatgacgaaaccataaaggagcatttatgtaagcttacattttattatggtactatagatccttggtgtccaaaagagtactatgaagacattaagaaggattttccagaaggagacattcgactctgtgagaaaaacatacctcatgctttcatcacccattttaaccaggaaatggcagacatgattgctgactccctaaaggatgacttgtccaaaatgtaaattggcctgaggaacaagcccccactgccagtacatggaggcagtcagtgtactagacttagtaggtaaatgtttaattttgaagactgatattagaaatgaagaaagtgagaacctttgtcttacaaaccaactctccgctcgccatgttataggctgaagtaaacacagttgatgaatcattccataggtttaaccatacattttccaagactcagggaacacagtgatctacacagagtcttgtgtttgcacaagatgcccagtggcaccatatggtttattttggtaggcaggatctttgcagatgaaaaaaaaatctacatgtacttgattttaattgagttacattgtagaataggctcctctggaggaaattatgaaatacctactagaaaatgtaaaataaatcagtgaatgttaagagtatagttagatatgtgaagtgtatgagattatgacaaggatacactcatgttccaggagcaggaagtgaacctgggtctcctgtaagacagaagatgaagatgagcccaggctaacttagcacagatcttggctgagatcatcaatgtgacgtctaatgtacctgcactagacagagaataaagttcaccagacattactctggtcagctaaccagataaagaattgttgaaggaccccaactgtgcctcctgccacaggacaaccagcaagttctatgctgagccttagcctcccaggttataagctccctgcaggctcctcctctccagagccaggatggagaggcactgggctgtcccaaagcaggcttggatgtgccaacgtacagttgctccttctgtaattcttgcactaaaactccattaaagaccatcaatgagccaaatagtgtgctagccattgaggatggagttcttagctacttaatgattcttttcttctggaaatcttctagtgaataatttttaaaagcttcttttaaactgctcagtaaaacattgccatacattaactctccatttctgcattaacttcatttgctggaaagaaattattttgttaatgaaccaaacccagccattaagttatgtgaattcaccttctctagacacattgaggtatggcagagaagacacatattccctggcctagagtgggctgacaatattgctgcctcccctaaattgactcaatcttgagaaccacatactgcagtgacagttgatcatggatcagaaatattcctttttctcctagaggaaatccctcatggcattatcattccctaaggacaatgagatgtccctccgctcaaatcctaaagccccctgatgaaagatttggctctgatttgctgccaacttattggtaagtgctgaatgagttactgtgctttggcatagcttctacatcacagcaagtgacttctcagaggggaaaagccaagctccagacaaggagtgctgttagcccaaggggaagagctaatagatacataggccgtaagcacagggctgtacacagatcctttattggcatctgcatgagaggcctagaaatcggatgttagaagctaggaatcatggctctgagcgccttgcatacaggagatactcactgatactaaatcaaggcatgtaaacaatactgggtaaatcatacctaccagaataaagagtaacattcagagcttttcttttatctgttattttaaatgttactccatatttcaaaagtctgcacgtatgaaattgtgtcttatttctggtttttagagcctaagaaagatactcattcttaattcctatttatcatctgaaaaccaaatgaatttttgaaataaatgttttaccagca

SEQ ID NO: 450689 - DNA, 952 bp, Homo sapiens
gggtatttttatttaatggtagtgagagaaaagggggtttcggtggaccatcatattcttgagactgaagttcattctgtttcattagggattagactaaaatggacaaacagtggaagaaatccattttccagaagcagctctgcctgtatgtcccagtcaaccacatggatggtctttgtgaaagttttaacttcctgcagagttaccgagtgctcagcgattgagctttgaccacacccgtgtttgttcctagtctgttcccagccataagcatctccacaagccctctgtggcttgtgtggcctgatgtccatggccaccaagggcctctcaccatacgcttctccactcaacctttggagagacacggaccaccaaaggcttgatttttcttcatcctacattatattcaaaacaaacaggctgggtgccgtagctcacacctgtgatcccagcactttgggaggatgagctgggaagatcgtttgaggctaggagtttgagaccagcccgtgcaaaaaacgagacctcgtgtctaaaataatttttaaaaaagagcaaaaaaaaaaagcaatttcagattaaaggagactgaagagacatgacaattggacacaacatctgattctgaattggatgtttttgttataaaagacattgttgagacaatttgcacaacttgaatgaggtctgaagattagctgggagtaagatgccactgttaattttctgatttcagtggttgtactgggaagaagtaagagagtgtccttgtttgtactggagacactgaggtatctgggggtgaggggcatcatgtctgtttactgtcagatggttgaggggaaaataatgttctttgtacttgcagattttttggaagtttgagatgttttagaatttgtaaaaataattatttttaaaaccccaccatgctatctcctgcatc

SEQ ID NO: 450690 - DNA, 553 bp, Homo sapiens
acgtgagcctccaaagaagaaagaaaaaaagaaaaaaaagaaagctcctgaaccagaagaagaaattgaggatgagctgggaagatcgtttgaggctaggagtttgagaccagcccgtgcaaaaaacgagacctcgtgtctaaaataatttttaaaaaagagcaaaaaaaaaaagcaatttcagattaaaggagactgaagagacatgacaattggacacaacatctgattctgaattggatgtttttgttataaaagacattgttgagacaatttgcacaacttgaatgaggtctgaagattagctgggagtaagatgccactgttaattttctgatttcagtggttgtactgggaagaagtaagagagtgtccttgtttgtactggagacactgaggtatctgggggtgaggggcatcatgtctgtttactgtcagatggttgaggggaaaataatgttctttgtacttgcagattttttggaagtttgagatgttttagaatttgtaaaaataattatttttaaaaccccaccatgctatctcctgcatc

SEQ ID NO: 450691 - DNA, 2722 bp, Homo sapiens
agcggggcttcccaggaccctcagggagagcgggcagccttccaggtggacaggtaacccaggtttttctgccttttatgtgccatttgcaaaggctttatactctttgacaaacagacgctttccagtttggactatcagtcatgctgggcatgcgttggctcccaaagacaagaagattcttacaacatcagaggattcaaacgctcaagaaattaaggacatttatggactaaatggacaaatagagcacaaactagctttcctgagaactcatgtgccaaaggacatgaaacttgtgctcattggccattcaataggcagctatttcacacttcagatgctgaagcgagtccctgagctcccggtaattcgtgcctttctgctctttccaacaattgaacgaatgtctgagtcacccaatggcagaattgccactccacttttgtgctggtttcgatatgttctctatgttactggctacttattattgaaaccgtgtcctgagacaatcaagtccttgctaatcagaaggggccttcaagtaatgaacctagagaatgaattttcaccattgaatatattagaaccattctgccttgctaatgctgcctaccttgggggccaagaaatgatggaggtggtgaagagagatgacgaaaccataaaggagcatttatgtaagcttacattttattatggtactatagatccttggtgtccaaaagagtactatgaagacattaagaaggattttccagaaggagacattcgactctgtgagaaaaacatacctcatgctttcatcacccattttaaccaggaaatggcagacatgattgctgactccctaaaggatgacttgtccaaaatgtaaattggcctgaggaacaagcccccactgccagtacatggaggcagtcagtgtactagacttagtaggtaaatgtttaattttgaagactgatattagaaatgaagaaagtgagaacctttgtcttacaaaccaactctccgctcgccatgttataggctgaagtaaacacagttgatgaatcattccataggtttaaccatacattttccaagactcagggaacacagtgatctacacagagtcttgtgtttgcacaagatgcccagtggcaccatatggtttattttggtaggcaggatctttgcagatgaaaaaaaaatctacatgtacttgattttaattgagttacattgtagaataggctcctctggaggaaattatgaaatacctactagaaaatgtaaaataaatcagtgaatgttaagagtatagttagatatgtgaagtgtatgagattatgacaaggatacactcatgttccaggagcaggaagtgaacctgggtctcctgtaagacagaagatgaagatgagcccaggctaacttagcacagatcttggctgagatcatcaatgtgacgtctaatgtacctgcactagacagagaataaagttcaccagacattactctggtcagctaaccagataaagaattgttgaaggaccccaactgtgcctcctgccacaggacaaccagcaagttctatgctgagccttagcctcccaggttataagctccctgcaggctcctcctctccagagccaggatggagaggcactgggctgtcccaaagcaggcttggatgtgccaacgtacagttgctccttctgtaattcttgcactaaaactccattaaagaccatcaatgagccaaatagtgtgctagccattgaggatggagttcttagctacttaatgattcttttcttctggaaatcttctagtgaataatttttaaaagcttcttttaaactgctcagtaaaacattgccatacattaactctccatttctgcattaacttcatttgctggaaagaaattattttgttaatgaaccaaacccagccattaagttatgtgaattcaccttctctagacacattgaggtatggcagagaagacacatattccctggcctagagtgggctgacaatattgctgcctcccctaaattgactcaatcttgagaaccacatactgcagtgacagttgatcatggatcagaaatattcctttttctcctagaggaaatccctcatggcattatcattccctaaggacaatgagatgtccctccgctcaaatcctaaagccccctgatgaaagatttggctctgatttgctgccaacttattggtaagtgctgaatgagttactgtgctttggcatagcttctacatcacagcaagtgacttctcagaggggaaaagccaagctccagacaaggagtgctgttagcccaaggggaagagctaatagatacataggccgtaagcacagggctgtacacagatcctttattggcatctgcatgagaggcctagaaatcggatgttagaagctaggaatcatggctctgagcgccttgcatacaggagatactcactgatactaaatcaaggcatgtaaacaatactgggtaaatcatacctaccagaataaagagtaacattcagagcttttcttttatctgttattttaaatgttactccatatttcaaaagtctgcacgtatgaaattgtgtcttatttctggtttttagagcctaagaaagatactcattcttaattcctatttatcatctgaaaaccaaatgaatttttgaaataaatgttttaccagca

SEQ ID NO: 450692 - DNA, 3924 bp, Homo sapiens
agcggggcttcccaggaccctcagggagagcgggcagccttccaggtggacagaaatggactcagaactcaaggaagaaattcctgtgcatgaggaattcattttgtgtggtggagccgaaacccaggttctaaaatgtgggccctggacagacctctttcatgatcaaagtgtcaaaaggcctaagctgcttattttcattattcctggtaacccaggtttttctgccttttatgtgccatttgcaaaggctttatactctttgacaaacagacgctttccagtttggactatcagtcatgctgggcatgcgttggctcccaaagacaagaagattcttacaacatcagaggattcaaacgctcaagaaattaaggacatttatggactaaatggacaaatagagcacaaactagctttcctgagaactcatgtgccaaaggacatgaaacttgtgctcattggccattcaataggcagctatttcacacttcagatgctgaagcgagtccctgagctcccggtaattcgtgcctttctgctctttccaacaattgaacgaatgtctgagtcacccaatggcagaattgccactccacttttgtgctggtttcgatatgttctctatgttactggctacttattattgaaaccgtgtcctgagacaatcaagtccttgctaatcagaaggggccttcaagtaatgaacctagagaatgaattttcaccattgaatatattagaaccattctgccttgctaatgctgcctaccttgggggccaagaaatgatggaggtggtgaagagagatgacgaaaccataaaggagcatttatgtaagcttacattttattatggtactatagatccttggtgtccaaaagagtactatgaagacattaagaaggattttccagaaggagacattcgactctgtgagaaaaacatacctcatgctttcatcacccattttaaccaggaaatggcagacatgattgctgactccctaaaggatgacttgtccaaaatgtaaattggcctgaggaacaagcccccactgccagtacatggaggcagtcagtgtactagacttagtaggtaaatgtttaattttgaagactgatattagaaatgaagaaagtgagaacctttgtcttacaaaccaactctccgctcgccatgttataggctgaagtaaacacagttgatgaatcattccataggtttaaccatacattttccaagactcagggaacacagtgatctacacagagtcttgtgtttgcacaagatgcccagtggcaccatatggtttattttggtaggcaggatctttgcagatgaaaaaaaaatctacatgtacttgattttaattgagttacattgtagaataggctcctctggaggaaattatgaaatacctactagaaaatgtaaaataaatcagtgaatgttaagagtatagttagatatgtgaagtgtatgagattatgacaaggatacactcatgttccaggagcaggaagtgaacctgggtctcctgtaagacagaagatgaagatgagcccaggctaacttagcacagatcttggctgagatcatcaatgtgacgtctaatgtacctgcactagacagagaataaagttcaccagacattactctggtcagctaaccagataaagaattgttgaaggaccccaactgtgcctcctgccacaggacaaccagcaagttctatgctgagccttagcctcccaggttataagctccctgcaggctcctcctctccagagccaggatggagaggcactgggctgtcccaaagcaggcttggatgtgccaacgtacagttgctccttctgtaattcttgcactaaaactccattaaagaccatcaatgagccaaatagtgtgctagccattgaggatggagttcttagctacttaatgattcttttcttctggaaatcttctagtgaataatttttaaaagcttcttttaaactgctcagtaaaacattgccatacattaactctccatttctgcattaacttcatttgctggaaagaaattattttgttaatgaaccaaacccagccattaagttatgtgaattcaccttctctagacacattgaggtatggcagagaagacacatattccctggcctagagtgggctgacaatattgctgcctcccctaaattgactcaatcttgagaaccacatactgcagtgacagttgatcatggatcagaaatattcctttttctcctagaggaaatccctcatggcattatcattccctaaggacaatgagatgtccctccgctcaaatcctaaagccccctgatgaaagatttggctctgatttgctgccaacttattggtaagtgctgaatgagttactgtgctttggcatagcttctacatcacagcaagtgacttctcagaggggaaaagccaagctccagacaaggagtgctgttagcccaaggggaagagctaatagatacataggccgtaagcacagggctgtacacagatcctttattggcatctgcatgagaggcctagaaatcggatgttagaagctaggaatcatggctctgagcgccttgcatacaggagatactcactgatactaaatcaaggcatgtaaacaatactgggtaaatcatacctaccagaataaagagtaacattcagagcttttcttttatctgttattttaaatgttactccatatttcaaaagtctgcacgtatgaaattgtgtcttatttctggtttttagagcctaagaaagatactcattcttaattcctatttatcatctgaaaaccaaatgaatttttgaaataaatgttttaccagcatttctgacctggtctggcctgatctctgtgttgggcaagagagggtacaatttgagcagttctcctgagttagactcggctcaaagtctctcttttaaagtgaaaagccacctttctcattgcttttttcataggtggaagaatcagatttcaagagactgaagttcattctgtttcattagggattagactaaaatggacaaacagtggaagaaatccattttccagaagcagctctgcctgtatgtcccagtcaaccacatggatggtctttgtgaaagttttaacttcctgcagagttaccgagtgctcagcgattgagctttgaccacacccgtgtttgttcctagtctgttcccagccataagcatctccacaagccctctgtggcttgtgtggcctgatgtccatggccaccaagggcctctcaccatacgcttctccactcaacctttggagagacacggaccaccaaaggcttgatttttcttcatcctacattatattcaaaacaaacaggctgggtgccgtagctcacacctgtgatcccagcactttgggaggatgagctgggaagatcgtttgaggctaggagtttgagaccagcccgtgcaaaaaacgagacctcgtgtctaaaataatttttaaaaaagagcaaaaaaaaaaagcaatttcagattaaaggagactgaagagacatgacaattggacacaacatctgattctgaattggatgtttttgttataaaagacattgttgagacaatttgcacaacttgaatgaggtctgaagattagctgggagtaagatgccactgttaattttctgatttcagtggttgtactgggaagaagtaagagagtgtccttgtttgtactggagacactgaggtatctgggggtgaggggcatcatgtctgtttactgtcagatggttgaggggaaaataatgttctttgtacttgcagattttttggaagtttgagatgttttagaatttgtaaaaataattatttttaaaaccccaccatgctatctcctgcatc

SEQ ID NO: 450693 - DNA, 2884 bp, Homo sapiens
  misc_feature (2783)..(2783): n is a, c, g, or t
agcggggcttcccaggaccctcagggagagcgggcagccttccaggtggacagaaatggactcagaactcaaggaagaaattcctgtgcatgaggaattcattttgtgtggtggagccgaaacccaggttctaaaatgtgggccctggacagacctctttcatgatcaaagtgtcaaaaggcctaagctgcttattttcattattcctggtaacccaggtttttctgccttttatgtgccatttgcaaaggctttatactctttgacaaacagacgctttccagtttggactatcagtcatgctgggcatgcgttggctcccaaagacaagaagattcttacaacatcagaggattcaaacgctcaagaaattaaggacatttatggactaaatggacaaatagagcacaaactagctttcctgagaactcatgtgccaaaggacatgaaacttgtgctcattggccattcaataggcagctatttcacacttcagatgctgaagcgagtccctgagctcccggtaattcgtgcctttctgctctttccaacaattgaacgaatgtctgagtcacccaatggcagaattgccactccacttttgtgctggtttcgatatgttctctatgttactggctacttattattgaaaccgtgtcctgagacaatcaagtccttgctaatcagaaggggccttcaagtaatgaacctagagaatgaattttcaccattgaatatattagaaccattctgccttgctaatgctgcctaccttgggggccaagaaatgatggaggtggtgaagagagatgacgaaaccataaaggagcatttatgtaagcttacattttattatggtactatagatccttggtgtccaaaagagtactatgaagacattaagaaggattttccagaaggagacattcgactctgtgagaaaaacatacctcatgctttcatcacccattttaaccaggaaatggcagacatgattgctgactccctaaaggatgacttgtccaaaatgtaaattggcctgaggaacaagcccccactgccagtacatggaggcagtcagtgtactagacttagtaggtaaatgtttaattttgaagactgatattagaaatgaagaaagtgagaacctttgtcttacaaaccaactctccgctcgccatgttataggctgaagtaaacacagttgatgaatcattccataggtttaaccatacattttccaagactcagggaacacagtgatctacacagagtcttgtgtttgcacaagatgcccagtggcaccatatggtttattttggtaggcaggatctttgcagatgaaaaaaaaatctacatgtacttgattttaattgagttacattgtagaataggctcctctggaggaaattatgaaatacctactagaaaatgtaaaataaatcagtgaatgttaagagtatagttagatatgtgaagtgtatgagattatgacaaggatacactcatgttccaggagcaggaagtgaacctgggtctcctgtaagacagaagatgaagatgagcccaggctaacttagcacagatcttggctgagatcatcaatgtgacgtctaatgtacctgcactagacagagaataaagttcaccagacattactctggtcagctaaccagataaagaattgttgaaggaccccaactgtgcctcctgccacaggacaaccagcaagttctatgctgagccttagcctcccaggttataagctccctgcaggctcctcctctccagagccaggatggagaggcactgggctgtcccaaagcaggcttggatgtgccaacgtacagttgctccttctgtaattcttgcactaaaactccattaaagaccatcaatgagccaaatagtgtgctagccattgaggatggagttcttagctacttaatgattcttttcttctggaaatcttctagtgaataatttttaaaagcttcttttaaactgctcagtaaaacattgccatacattaactctccatttctgcattaacttcatttgctggaaagaaattattttgttaatgaaccaaacccagccattaagttatgtgaattcaccttctctagacacattgaggtatggcagagaagacacatattccctggcctagagtgggctgacaatattgctgcctcccctaaattgactcaatcttgagaaccacatactgcagtgacagttgatcatggatcagaaatattcctttttctcctagaggaaatccctcatggcattatcattccctaaggacaatgagatgtccctccgctcaaatcctaaagccccctgatgaaagatttggctctgatttgctgccaacttattggtaagtgctgaatgagttactgtgctttggcatagcttctacatcacagcaagtgacttctcagaggggaaaagccaagctccagacaaggagtgctgttagcccaaggggaagagctaatagatacataggccgtaagcacagggctgtacacagatcctttattggcatctgcatgagaggcctagaaatcggatgttagaagctaggaatcatggctctgagcgccttgcatacaggagatactcactgatactaaatcaaggcatgtaaacaatactgggtaaatcatacctaccagaataaagagtaacattcagagcttttcttttatctgttattttaaatgttactccatattcacagtccgccgtttaaatgggtctatacgggngttgagcctaaaagaaacccctctaacccatttacctgtacaccgatttttttgcaagttttccgcccaaatacccgggggggcggcaccacccatggggg

SEQ ID NO: 450694 - DNA, 2744 bp, Homo sapiens
agcggggcttcccaggaccctcagggagagcgggcagccttccaggtggacagaaatggactcagaactcaaggaagaaattcctgtgcatgaggaattcattttgtgtggtggagccgaaacccaggttctaaaatgtgggccctggacagacctctttcatgatcaaagtgtcaaaaggcctaagctgcttattttcattattcctggtaacccaggtttttctgccttttatgtgccatttgcaaaggctttatactctttgacaaacagacgctttccagtttggactatcagtcatgctgggcatgcgttggctcccaaagacaagaagattcttacaacatcagaggattcaaacgctcaagaaattaaggacatttatggactaaatggacaaatagagcacaaactagctttcctgagaactcatgtgccaaaggacatgaaacttgtgctcattggccattcaataggcagctatttcacacttcagatgctgaagcgagtccctgagctcccggtaattcgtgcctttctgctctttccaacaattgaacgaatgtctgagtcacccaatggcagaattgccactccacttttgtgctggtttcgatatgttctctatgttactggctacttattattgaaaccgtgtcctgagacaatcaagtccttgctaatcagaaggggccttcaagtaatgaacctagagaatgaattttcaccattgaatatattagaaccattctgccttgctaatgctgcctaccttgggggccaagaaatgatggaggtggtgaagagagatgacgaaaccataaaggagcatttatgtaagcttacattttattatggtactatagatccttggtgtccaaaagagtactatgaagacattaagaaggattttccagaaggagacattcgactctgtgagaaaaacatacctcatgctttcatcacccattttaaccaggaaatggcagacatgattgctgactccctaaaggatgacttgtccaaaatgtaaattggcctgaggaacaagcccccactgccagtacatggaggcagtcagtgtactagacttagtagaggaaatccctcatggcattatcattccctaaggacaatgagatgtccctccgctcaaatcctaaagccccctgatgaaagatttggctctgatttgctgccaacttattggtaagtgctgaatgagttactgtgctttggcatagcttctacatcacagcaagtgacttctcagaggggaaaagccaagctccagacaaggagtgctgttagcccaaggggaagagctaatagatacataggccgtaagcacagggctgtacacagatcctttattggcatctgcatgagaggcctagaaatcggatgttagaagctaggaatcatggctctgagcgccttgcatacaggagatactcactgatactaaatcaaggcatgtaaacaatactgggtaaatcatacctaccagaataaagagtaacattcagagcttttcttttatctgttattttaaatgttactccatatttcaaaagtctgcacgtatgaaattgtgtcttatttctggtttttagagcctaagaaagatactcattcttaattcctatttatcatctgaaaaccaaatgaatttttgaaataaatgttttaccagcatttctgacctggtctggcctgatctctgtgttgggcaagagagggtacaatttgagcagttctcctgagttagactcggctcaaagtctctcttttaaagtgaaaagccacctttctcattgcttttttcataggtggaagaatcagatttcaagagactgaagttcattctgtttcattagggattagactaaaatggacaaacagtggaagaaatccattttccagaagcagctctgcctgtatgtcccagtcaaccacatggatggtctttgtgaaagttttaacttcctgcagagttaccgagtgctcagcgattgagctttgaccacacccgtgtttgttcctagtctgttcccagccataagcatctccacaagccctctgtggcttgtgtggcctgatgtccatggccaccaagggcctctcaccatacgcttctccactcaacctttggagagacacggaccaccaaaggcttgatttttcttcatcctacattatattcaaaacaaacaggctgggtgccgtagctcacacctgtgatcccagcactttgggaggatgagctgggaagatcgtttgaggctaggagtttgagaccagcccgtgcaaaaaacgagacctcgtgtctaaaataatttttaaaaaagagcaaaaaaaaaaagcaatttcagattaaaggagactgaagagacatgacaattggacacaacatctgattctgaattggatgtttttgttataaaagacattgttgagacaatttgcacaacttgaatgaggtctgaagattagctgggagtaagatgccactgttaattttctgatttcagtggttgtactgggaagaagtaagagagtgtccttgtttgtactggagacactgaggtatctgggggtgaggggcatcatgtctgtttactgtcagatggttgaggggaaaataatgttctttgtacttgcagattttttggaagtttgagatgttttagaatttgtaaaaataattatttttaaaaccccaccatgctatctcctgcatc

SEQ ID NO: 450695 - DNA, 3253 bp, Homo sapiens
agcggggcttcccaggaccctcagggagagcgggcagccttccaggtggacagaaatggactcagaactcaaggaagaaattcctgtgcatgaggaattcattttgtgtggtggagccgaaacccaggttctaaaatgtgggccctggacagacctctttcatgatcaaagtgtcaaaaggcctaagctgcttattttcattattcctggtaacccaggtttttctgccttttatgtgccatttgcaaaggctttatactctttgacaaacagacgctttccagtttggactatcagtcatgctgggcatgcgttggctcccaaagacaagaagattcttacaacatcagaggattcaaacgctcaagaaattaaggacatttatggactaaatggacaaatagagcacaaactagctttcctgagaactcatgtgccaaaggacatgaaacttgtgctcattggccattcaataggcagctatttcacacttcagatgctgaagcgagtccctgagctcccggtaattcgtgcctttctgctctttccaacaattgaacgaatgtctgagtcacccaatggcagaattgccactccacttttgtgctggtttcgatatgttctctatgttactggctacttattattgaaaccgtgtcctgagacaatcaagtccttgctaatcagaaggggccttcaagtaatgaacctagagaatgaattttcaccattgaatatattagaaccattctgccttgctaatgctgcctaccttgggggccaagaaatgatggaggtggtgaagagagatgacgaaaccataaaggagcatttatgtaagcttacattttattatggtactatagatccttggtgtccaaaagagtactatgaagacattaagaaggattttccagaaggagacattcgactctgtgagaaaaacatacctcatgctttcatcacccattttaaccaggaaatggcagacatgattgctgactccctaaaggatgacttgtccaaaatgtaaattggcctgaggaacaagcccccactgccagtacatggaggcagtcagtgtactagacttagtaggtaaatgtttaattttgaagactgatattagaaatgaagaaagtgagaacctttgtcttacaaaccaactctccgctcgccatgttataggctgaagtaaacacagttgatgaatcattccataggtttaaccatacattttccaagactcagggaacacagtgatctacacagagtcttgtgtttgcacaagatgcccagtggcaccatatggtttattttggtaggcaggatctttgcagatgaaaaaaaaatctacatgtacttgattttaattgagttacattgtagaataggctcctctggaggaaattatgaaatacctactagaaaatgtaaaataaatcagtgaatgttaagagtatagttagatatgtgaagtgtatgagattatgacaaggatacactcatgttccaggagcaggaagtgaacctgggtctcctgtaagacagaagatgaagatgagcccaggctaacttagcacagatcttggctgagatcatcaatgtgacgtctaatgtacctgcactagacagagaataaagttcaccagacattactctggtcagctaaccagataaagaattgttgaaggaccccaactgtgcctcctgccacaggacaaccagcaagttctatgctgagccttagcctcccaggttataagctccctgcaggctcctcctctccagagccaggatggagaggcactgggctgtcccaaagcaggcttggatgtgccaacgtacagttgctccttctgtaattcttgcactaaaactccattaaagaccatcaatgagccaaatagtgtgctagccattgaggatggagttcttagctacttaatgattcttttcttctggaaatcttctagtgaataatttttaaaagcttcttttaaactgctcagtaaaacattgccatacattaactctccatttctgcattaacttcatttgctggaaagaaattattttgttaatgaaccaaacccagccattaagttatgtgaattcaccttctctagacacattgaggtatggcagagaagacacatattccctggcctagagtgggctgacaatattgctgcctcccctaaattgactcaatcttgagaaccacatactgcagtgacagttgatcatggatcagaaatattcctttttctcctagaggaaatccctcatggcattatcattccctaaggacaatgagatgtccctccgctcaaatcctaaagccccctgatgaaagatttggctctgatttgctgccaacttattgggattagactaaaatggacaaacagtggaagaaatccattttccagaagcagctctgcctgtatgtcccagtcaaccacatggatggtctttgtgaaagttttaacttcctgcagagttaccgagtgctcagcgattgagctttgaccacacccgtgtttgttcctagtctgttcccagccataagcatctccacaagccctctgtggcttgtgtggcctgatgtccatggccaccaagggcctctcaccatacgcttctccactcaacctttggagagacacggaccaccaaaggcttgatttttcttcatcctacattatattcaaaacaaacaggctgggtgccgtagctcacacctgtgatcccagcactttgggaggatgagctgggaagatcgtttgaggctaggagtttgagaccagcccgtgcaaaaaacgagacctcgtgtctaaaataatttttaaaaaagagcaaaaaaaaaaagcaatttcagattaaaggagactgaagagacatgacaattggacacaacatctgattctgaattggatgtttttgttataaaagacattgttgagacaatttgcacaacttgaatgaggtctgaagattagctgggagtaagatgccactgttaattttctgatttcagtggttgtactgggaagaagtaagagagtgtccttgtttgtactggagacactgaggtatctgggggtgaggggcatcatgtctgtttactgtcagatggttgaggggaaaataatgttctttgtacttgcagattttttggaagtttgagatgttttagaatttgtaaaaataattatttttaaaaccccaccatgctatctcctgcatc

SEQ ID NO: 450696 - DNA, 2894 bp, Homo sapiens
ttccattggttgctggctagtccactgtcacagagtgccctttgatgcctactcctctctcttgctctgtgaagaggatgtcagtatagcacagatcttggtcatagcgctttctgatttccgggtgagtctgtccaattaaacaatccaccatacatgtcttgccatgctggagatgtccacaaagtgtcaaaaggcctaagctgcttattttcattattcctggtaacccaggtttttctgccttttatgtgccatttgcaaaggctttatactctttgacaaacagacgctttccagtttggactatcagtcatgctgggcatgcgttggctcccaaagacaagaagattcttacaacatcagaggattcaaacgctcaagaaattaaggacatttatggactaaatggacaaatagagcacaaactagctttcctgagaactcatgtgccaaaggacatgaaacttgtgctcattggccattcaataggcagctatttcacacttcagatgctgaagcgagtccctgagctcccggtaattcgtgcctttctgctctttccaacaattgaacgaatgtctgagtcacccaatggcagaattgccactccacttttgtgctggtttcgatatgttctctatgttactggctacttattattgaaaccgtgtcctgagacaatcaagtccttgctaatcagaaggggccttcaagtaatgaacctagagaatgaattttcaccattgaatatattagaaccattctgccttgctaatgctgcctaccttgggggccaagaaatgatggaggtggtgaagagagatgacgaaaccataaaggagcatttatgtaagcttacattttattatggtactatagatccttggtgtccaaaagagtactatgaagacattaagaaggattttccagaaggagacattcgactctgtgagaaaaacatacctcatgctttcatcacccattttaaccaggaaatggcagacatgattgctgactccctaaaggatgacttgtccaaaatgtaaattggcctgaggaacaagcccccactgccagtacatggaggcagtcagtgtactagacttagtaggtaaatgtttaattttgaagactgatattagaaatgaagaaagtgagaacctttgtcttacaaaccaactctccgctcgccatgttataggctgaagtaaacacagttgatgaatcattccataggtttaaccatacattttccaagactcagggaacacagtgatctacacagagtcttgtgtttgcacaagatgcccagtggcaccatatggtttattttggtaggcaggatctttgcagatgaaaaaaaaatctacatgtacttgattttaattgagttacattgtagaataggctcctctggaggaaattatgaaatacctactagaaaatgtaaaataaatcagtgaatgttaagagtatagttagatatgtgaagtgtatgagattatgacaaggatacactcatgttccaggagcaggaagtgaacctgggtctcctgtaagacagaagatgaagatgagcccaggctaacttagcacagatcttggctgagatcatcaatgtgacgtctaatgtacctgcactagacagagaataaagttcaccagacattactctggtcagctaaccagataaagaattgttgaaggaccccaactgtgcctcctgccacaggacaaccagcaagttctatgctgagccttagcctcccaggttataagctccctgcaggctcctcctctccagagccaggatggagaggcactgggctgtcccaaagcaggcttggatgtgccaacgtacagttgctccttctgtaattcttgcactaaaactccattaaagaccatcaatgagccaaatagtgtgctagccattgaggatggagttcttagctacttaatgattcttttcttctggaaatcttctagtgaataatttttaaaagcttcttttaaactgctcagtaaaacattgccatacattaactctccatttctgcattaacttcatttgctggaaagaaattattttgttaatgaaccaaacccagccattaagttatgtgaattcaccttctctagacacattgaggtatggcagagaagacacatattccctggcctagagtgggctgacaatattgctgcctcccctaaattgactcaatcttgagaaccacatactgcagtgacagttgatcatggatcagaaatattcctttttctcctagaggaaatccctcatggcattatcattccctaaggacaatgagatgtccctccgctcaaatcctaaagccccctgatgaaagatttggctctgatttgctgccaacttattggtaagtgctgaatgagttactgtgctttggcatagcttctacatcacagcaagtgacttctcagaggggaaaagccaagctccagacaaggagtgctgttagcccaaggggaagagctaatagatacataggccgtaagcacagggctgtacacagatcctttattggcatctgcatgagaggcctagaaatcggatgttagaagctaggaatcatggctctgagcgccttgcatacaggagatactcactgatactaaatcaaggcatgtaaacaatactgggtaaatcatacctaccagaataaagagtaacattcagagcttttcttttatctgttattttaaatgttactccatatttcaaaagtctgcacgtatgaaattgtgtcttatttctggtttttagagcctaagaaagatactcattcttaattcctatttatcatctgaaaaccaaatgaatttttgaaataaatgttttaccagca

SEQ ID NO: 450697 - DNA, 2643 bp, Homo sapiens
agcggggcttcccaggaccctcagggagagcgggcagccttccaggtggacagaaatggactcagaactcaaggaagaaattcctgtgcatgaggaattcattttgtgtggtggagccgaaacccaggttctaaaatgtgggccctggacagacctctttcatgatcaaagtgtcaaaaggcctaagctgcttattttcattattcctggtaacccaggtttttctgccttttatgtgccatttgcaaaggctttatactctttgacaaacagacgctttccagtttggactatcagtcatgctgggcatgcgttggctcccaaagacaagaagattcttacaacatcagaggattcaaacgctcaagaaattaaggacatttatggactaaatggacaaatagagcacaaactagctttcctgagaactcatgtgccaaaggacatgaaacttgtgctcattggccattcaataggcagctatttcacacttcagatgctgaagcgagtccctgagctcccgctaatgctgcctaccttgggggccaagaaatgatggaggtggtgaagagagatgacgaaaccataaaggagcatttatgtaagcttacattttattatggtactatagatccttggtgtccaaaagagtactatgaagacattaagaaggattttccagaaggagacattcgactctgtgagaaaaacatacctcatgctttcatcacccattttaaccaggaaatggcagacatgattgctgactccctaaaggatgacttgtccaaaatgtaaattggcctgaggaacaagcccccactgccagtacatggaggcagtcagtgtactagacttagtaggtaaatgtttaattttgaagactgatattagaaatgaagaaagtgagaacctttgtcttacaaaccaactctccgctcgccatgttataggctgaagtaaacacagttgatgaatcattccataggtttaaccatacattttccaagactcagggaacacagtgatctacacagagtcttgtgtttgcacaagatgcccagtggcaccatatggtttattttggtaggcaggatctttgcagatgaaaaaaaaatctacatgtacttgattttaattgagttacattgtagaataggctcctctggaggaaattatgaaatacctactagaaaatgtaaaataaatcagtgaatgttaagagtatagttagatatgtgaagtgtatgagattatgacaaggatacactcatgttccaggagcaggaagtgaacctgggtctcctgtaagacagaagatgaagatgagcccaggctaacttagcacagatcttggctgagatcatcaatgtgacgtctaatgtacctgcactagacagagaataaagttcaccagacattactctggtcagctaaccagataaagaattgttgaaggaccccaactgtgcctcctgccacaggacaaccagcaagttctatgctgagccttagcctcccaggttataagctccctgcaggctcctcctctccagagccaggatggagaggcactgggctgtcccaaagcaggcttggatgtgccaacgtacagttgctccttctgtaattcttgcactaaaactccattaaagaccatcaatgagccaaatagtgtgctagccattgaggatggagttcttagctacttaatgattcttttcttctggaaatcttctagtgaataatttttaaaagcttcttttaaactgctcagtaaaacattgccatacattaactctccatttctgcattaacttcatttgctggaaagaaattattttgttaatgaaccaaacccagccattaagttatgtgaattcaccttctctagacacattgaggtatggcagagaagacacatattccctggcctagagtgggctgacaatattgctgcctcccctaaattgactcaatcttgagaaccacatactgcagtgacagttgatcatggatcagaaatattcctttttctcctagaggaaatccctcatggcattatcattccctaaggacaatgagatgtccctccgctcaaatcctaaagccccctgatgaaagatttggctctgatttgctgccaacttattggtaagtgctgaatgagttactgtgctttggcatagcttctacatcacagcaagtgacttctcagaggggaaaagccaagctccagacaaggagtgctgttagcccaaggggaagagctaatagatacataggccgtaagcacagggctgtacacagatcctttattggcatctgcatgagaggcctagaaatcggatgttagaagctaggaatcatggctctgagcgccttgcatacaggagatactcactgatactaaatcaaggcatgtaaacaatactgggtaaatcatacctaccagaataaagagtaacattcagagcttttcttttatctgttattttaaatgttactccatatttcaaaagtctgcacgtatgaaattgtgtcttatttctggtttttagagcctaagaaagatactcattcttaattcctatttatcatctgaaaaccaaatgaatttttgaaataaatgttttaccagca

SEQ ID NO: 450698 - DNA, 1059 bp, Homo sapiens
aacttacggctagtagaggctcggtgtgaatcggccgaggctgcaggcagtgcccttcccggagcgtgccctcgccgctgagctcccctgaacagcagctgcagcagccatggccccgccctgggtgcccgccatgggcttcacgctggcgcccagcctggggtgcttcgtgggctcccgctttgtccacggcgagggtctccgctggtacgccggcctgcagaagccctcgtggcacccgccccactgggtgctgggccctgtctggggcacgctctactcagccatggggtacggctcctacctggtctggaaagagctgggaggcttcacagagaaggctgtggttcccctgggcctctacactgggcagctggccctgaactgggcatggccccccatcttctttggtgcccgacaaatgggctgggccttggtggatctcctgctggtcagtggggcggcggcagccactaccgtggcctggtaccaggtgagcccgctggccgcccgcctgctctacccctacctggcctggctggccttcgcgaccacactcaactactgcgtatggcgggacaaccatggctggcgtgggggacggcggctgccagagtgagtgcccggcccaccagggactgcagctgcaccagcaggtgccatcacgcttgtgatgtggtggccgtcacgctttcatgaccactgggcctgctagtctgtcagggccttggcccaggggtcagcagagcttcagaggtggccccacctgagcccccacccgggagcagtgtcctgtgctttctgcatgcttagagcatgttcttggaacatggaattttataagctgaataaagtttttgacttcctttaaaaaactcgtgccgaattcggcacgaggagtttttttttttaatttgtctccaataagcaatgtcttctgcccatccagcatgggaagtgggtcccacgtgaagggggcccaccacccactttgggagctgaaggcagagactcgggagcactaccggctcagactccccctacgctgggtgctcgtgc

SEQ ID NO: 450699 - DNA, 1080 bp, Homo sapiens
ccctctcctgcccattccgcggatgggcaatcccaggcggaactcccttgagggtctcagaatatctgggagacctcgggctcttgatctccgagacaccccgtttcgtagtggagaacagtccagatcggggaagtttattttgcccaaagccggttagaggccccctggccctcgattcccagtgcggggctcaggtgcgttgcagcctagacgggtcttactgtgagccgagcagcctctgggacctgtctgcttcccctaccccttgcaaagaagccggagcccagagctcccctgaacagcagctgcagcagccatggccccgccctgggtgcccgccatgggcttcacgctggcgcccagcctggggtgcttcgtgggctcccgctttgtccacggcgagggtctccgctggtacgccggcctgcagaagccctcgtggcacccgccccactgggtgctgggccctgtctggggcacgctctactcagccatggggtacggctcctacctggtctggaaagagctgggaggcttcacagagaaggctgtggttcccctgggcctctacactgggcagctggccctgaactgggcatggccccccatcttctttggtgcccgacaaatgggctgggccttggtggatctcctgctggtcagtggggcggcggcagccactaccgtggcctggtaccaggtgagcccgctggccgcccgcctgctctacccctacctggcctggctggccttcgcgaccacactcaactactgcgtatggcgggacaaccatggctggcgtgggggacggcggctgccagagtgagtgcccggcccaccagggactgcagctgcaccagcaggtgccatcacgcttgtgatgtggtggccgtcacgctttcatgaccactgggcctgctagtctgtcagggccttggcccaggggtcagcagagcttcagaggtggccccacctgagcccccacccgggagcagtgtcctgtgctttctgcatgcttagagcatgttcttggaacatggaattttataagctgaataaagtttttgacttccttta

SEQ ID NO: 450700 - DNA, 670 bp, Homo sapiens
ggcggctgggaggggcggggcggatgcggggacagcggcctggctaactcctgccaggcagtgcccttcccggagcgtgccctcgccgctggtacggctcctacctggtctggaaagagctgggaggcttcacagagaaggctgtggttcccctgggcctctacactgggcagctggccctgaactgggcatggccccccatcttctttggtgcccgacaaatgggctgggccttggtggatctcctgctggtcagtggggcggcggcagccactaccgtggcctggtaccaggtgagcccgctggccgcccgcctgctctacccctacctggcctggctggccttcgcgaccacactcaactactgcgtatggcgggacaaccatggctggcgtgggggacggcggctgccagagtgagtgcccggcccaccagggactgcagctgcaccagcaggtgccatcacgcttgtgatgtggtggccgtcacgctttcatgaccactgggcctgctagtctgtcagggccttggcccaggggtcagcagagcttcagaggtggccccacctgagcccccacccgggagcagtgtcctgtgctttctgcatgcttagagcatgttcttggaacatggaattttataagctgaataaagtttttgacttccttta

SEQ ID NO: 450701 - DNA, 1032 bp, Homo sapiens
ggcggctgggaggggcggggcggatgcggggacagcggcctggctaactcctgccaggcagtgcccttcccggagcgtgccctcgccgctgagctcccctgaacagcagctgcagcagccatggccccgccctgggtgcccgccatgggcttcacgctggcgcccagcctggggtgcttcgtgggctcccgctttgtccacggcgagggtctccgctggtacgccggcctgcagaagccctcgtggcacccgccccactgggtgctgggccctgtctggggcacgctctactcagccatggggtacggctcctacctggtctggaaagagctgggaggcttcacagagaaggctgtggttcccctgggcctctacactgggcagctggccctgaactgggcatggccccccatcttctttggtgcccgacaaatgggctgggccttggtggatctcctgctggtcagtggggcggcggcagccactaccgtggcctggtaccaggtgagcccgctggccgcccgcctgctctacccctacctggcctggctggccttcgcgaccacactcaactactgcgtatggcgggacaaccatggctggcgtgggggacggcggctgccagagtgagtgcccggcccaccagggactgcagctgcaccagcaggtgccatcacgcttgtgatgtggtggccgtcacgctttcatgaccactgggcctgctagtctgtcagggccttggcccaggggtcagcagagcttcagaggtggccccacctgagcccccacccgggagcagtgtcctgtgctttctgcatgcttagagcatgttcttggaacatggaattttataagctgaataaagtttttgacttcctttagactcttaaaaaaaaacaccggcctatcggtggacaggccgacggcggcaaggtcggccgttgaagggagcgggccagaggaataacgccgaatcgccaaccccccgtacaccaacaccacacctcaaaaccttacacgtcacgcatctcc

SEQ ID NO: 450702 - DNA, 707 bp, Homo sapiens
aacttacggctagtagaggctcggtgtgaatcggccgaggctgcaggcagtgcccttcccggagcgtgccctcgccgctgagctcccctgaacagcagctgcagcagccatggccccgccctgggtgcccgccatgggcttcacgctggcgcccagcctggggtgcttcgtgggctcccgctttgtccacggcgagggtctccgctggtacgccggcctgcagaagccctcgtggcacccgccccactgggtgctgggccctgtctggggcacgctctactcagccatggggtacggctcctacctggtctggaaagagctgggaggcttcacagagaaggctgtggttcccctgggcctctacactgggcagctggccctgaactgggcatggccccccatcttctttggtgcccgacaaatgggctgggccttggtggatctcctgctggtcagtggggcggcggcagccactaccgtggcctggtaccaggtgagcccgctggccgcccgcctgctctacccctacctggcctggctggccttcgcgaccacactcaactactgcgtatggcgggacaaccatggctggcgtgggggacggcggctgccagagtggacgcccggggtcaagcgcaacggcttcccggtggctctggctcgcgcggtctccaacgagatcgtgcgcttccccacagagagagcgt

SEQ ID NO: 450703 - DNA, 469 bp, Homo sapiens
aacttacggctagtagaggctcggtgtgaatcggccgaggctgcaggcagtgcccttcccggagcgtgccctcgccgctgagctcccctgaacagcagctgcagcagccatggccccgccctgggtgcccgccatgggcttcacgctggcgcccagcctggggtgcttcgtgggctcccgctttgtccacggcgagggtctccgctggtacgccggcctgcagaagccctcgtggcacccgccccactgggtgctgggccctgtctggggcacgctctactcagccatggggtacggctcctacctggtctggaaagagctgggaggcttcacaggggtcagcagagcttcagaggtggccccacctgagcccccacccgggagcagtgtcctgtgctttctgcatgcttagagcatgttcttggaacatggaattttataagctgaataaagtttttgacttccttta

SEQ ID NO: 450704 - DNA, 870 bp, Homo sapiens
aacttacggctagtagaggctcggtgtgaatcggccgaggctgcaggcagtgcccttcccggagcgtgccctcgccgctgagctcccctgaacagcagctgcagcagccatggccccgccctgggtgcccgccatgggcttcacgctggcgcccagcctggggtgcttcgtgggctcccgctttgtccacggcgagggtctccgctggtacgccggcctgcagaagccctcgtggcacccgccccactgggtgctgggccctgtctggggcacgctctactcagccatggggtacggctcctacctggtctggaaagagctgggaggcttcacagagaaggctgtggttcccctgggcctctacactgggcagctggccctgaactgggcatggccccccatcttctttggtgcccgacaaatgggctgggccttggtggatctcctgctggtcagtggggcggcggcagccactaccgtggcctggtaccaggtgagcccgctggccgcccgcctgctctacccctacctggcctggctggccttcgcgaccacactcaactactgcgtatggcgggacaaccatggctggcgtgggggacggcggctgccagagtgagtgcccggcccaccagggactgcagctgcaccagcaggtgccatcacgcttgtgatgtggtggccgtcacgctttcatgaccactgggcctgctagtctgtcagggccttggcccaggggtcagcagagcttcagaggtggccccacctgagcccccacccgggagcagtgtcctgtgctttctgcatgcttagagcatgttcttggaacatggaattttataagctgaataaagtttttgacttccttta

SEQ ID NO: 450705 - DNA, 881 bp, Homo sapiens
ggcggctgggaggggcggggcggatgcggggacagcggcctggctaactcctgccaggcagtgcccttcccggagcgtgccctcgccgctgagctcccctgaacagcagctgcagcagccatggccccgccctgggtgcccgccatgggcttcacgctggcgcccagcctggggtgcttcgtgggctcccgctttgtccacggcgagggtctccgctggtacgccggcctgcagaagccctcgtggcacccgccccactgggtgctgggccctgtctggggcacgctctactcagccatggggtacggctcctacctggtctggaaagagctgggaggcttcacagagaaggctgtggttcccctgggcctctacactgggcagctggccctgaactgggcatggccccccatcttctttggtgcccgacaaatgggctgggccttggtggatctcctgctggtcagtggggcggcggcagccactaccgtggcctggtaccaggtgagcccgctggccgcccgcctgctctacccctacctggcctggctggccttcgcgaccacactcaactactgcgtatggcgggacaaccatggctggcgtgggggacggcggctgccagagtgagtgcccggcccaccagggactgcagctgcaccagcaggtgccatcacgcttgtgatgtggtggccgtcacgctttcatgaccactgggcctgctagtctgtcagggccttggcccaggggtcagcagagcttcagaggtggccccacctgagcccccacccgggagcagtgtcctgtgctttctgcatgcttagagcatgttcttggaacatggaattttataagctgaataaagtttttgacttccttta

SEQ ID NO: 450706 - DNA, 987 bp, Homo sapiens
ccctctcctgcccattccgcggatgggcaatcccaggcggaactcccttgagggtctcagaatatctgggagacctcgggctcttgatctccgagacaccccgtttcgtagtggagaacagtccagatcggggaagtttattttgcccaaagccggttagaggccccctggccctcgattcccagtgcggggctcagagctcccctgaacagcagctgcagcagccatggccccgccctgggtgcccgccatgggcttcacgctggcgcccagcctggggtgcttcgtgggctcccgctttgtccacggcgagggtctccgctggtacgccggcctgcagaagccctcgtggcacccgccccactgggtgctgggccctgtctggggcacgctctactcagccatggggtacggctcctacctggtctggaaagagctgggaggcttcacagagaaggctgtggttcccctgggcctctacactgggcagctggccctgaactgggcatggccccccatcttctttggtgcccgacaaatgggctgggccttggtggatctcctgctggtcagtggggcggcggcagccactaccgtggcctggtaccaggtgagcccgctggccgcccgcctgctctacccctacctggcctggctggccttcgcgaccacactcaactactgcgtatggcgggacaaccatggctggcgtgggggacggcggctgccagagtgagtgcccggcccaccagggactgcagctgcaccagcaggtgccatcacgcttgtgatgtggtggccgtcacgctttcatgaccactgggcctgctagtctgtcagggccttggcccaggggtcagcagagcttcagaggtggccccacctgagcccccacccgggagcagtgtcctgtgctttctgcatgcttagagcatgttcttggaacatggaattttataagctgaataaagtttttgacttccttta

SEQ ID NO: 450707 - DNA, 905 bp, Homo sapiens
  misc_feature (886)..(886): n is a, c, g, or t
  misc_feature (888)..(888): n is a, c, g, or t
  misc_feature (895)..(895): n is a, c, g, or t
aacttacggctagtagaggctcggtgtgaatcggccgaggctgcaggcagtgcccttcccggagcgtgccctcgccgctgagctcccctgaacagcagctgcagcagccatggccccgccctgggtgcccgccatgggcttcacgctggcgcccagcctggggtgcttcgtgggctcccgctttgtccacggcgagggtctccgctggtacgccggcctgcagaagccctcgtggcacccgccccactgggtgctgggccctgtctggggcacgctctactcagccatggggtacggctcctacctggtctggaaagagctgggaggcttcacagagaaggctgtggttcccctgggcctctacactgggcagctggccctgaactgggcatggccccccatcttctttggtgcccgacaaatgggctgggccttggtggatctcctgctggtcagtggggcggcggcagccactaccgtggcctggtaccaggtgagcccgctggccgcccgcctgctctacccctacctggcctggctggccttcgcgaccacactcaactactgcgtatggcgggacaaccatggctggcgtgggggacggcggctgccagagtgagtgcccggcccaccagggactgcagctgcaccagcaggtgccatcacgcttgtgatgtggtggccgtcacgctttcatgaccactgggcctgctagtctgtcagggccttggcccaggggtcagcagagcttcagaggtggccccacctgagcccccacccgggagcagtgtcctgtgctttctgcatgcttagagcatgttcttggaacatggaattttataagctgaataaagtttttgacttcctttaaaaaaaaaaaaacaananaaaaaanaaagaggcgg

SEQ ID NO: 450708 - DNA, 2274 bp, Homo sapiens
  misc_feature (2010)..(2010): n is a, c, g, or t
  misc_feature (2014)..(2014): n is a, c, g, or t
  misc_feature (2016)..(2016): n is a, c, g, or t
gtgatgtccccgccccggttcccaggcaagtttagggaagtgaaaggcgccaggtgccagtcctggcctctgatgtaacccagcgccccgcagtcccgacacagattcctggatctcagccccatagcagctatgatcccgctgctgctggcagcgctgctgtgcgtccccgccggggccctgacctgctacggggactccgggcagcctgtagactggttcgtggtctacaagctgccagctcttagagggtccggggaggcggcgcagagagggctgcagtacaagtatctggacgagagctccggaggctggcgggacggcagggcactcatcaacagcccggagggggccgtgggccgaagcctgcagccgctgtaccggagcaacaccagccagctcgccttcctgctctacaatgaccaaccgcctcaacccagcaaggctcaggactcttccatgcgtgggcacacgaagggtgtcctgctccttgaccacgatgggggcttctggctggtccacagtgtacctaacttccctccaccggcctcctctgctgcatacagctggcctcatagcgcctgtacctacgggcagaccctgctctgtgtgtcttttcccttcgctcagttctcgaagatgggcaagcagctgacctacacctacccctgggtctataactaccagctggaagggatctttgcccaggaattccccgacttggagaatgtggtcaagggccaccacgttagccaagaaccctggaacagcagcatcacactcacatcccaggccggggctgttttccagagctttgccaagttcagcaaatttggagatgacctgtactccggctggttggcagcagcccttggtaccaacctgcaggtccagttctggcacaaaactgtaggcatcctgccctctaactgctcggatatctggcaggttctgaatgtgaaccagatagctttccctggaccagccggcccaagcttcaacagcacagaggaccactccaaatggtgcgtgtccccaaaagggccctggacctgcgtgggtgacatgaatcggaaccagggagaggagcaacggggtgggggcacactgtgtgcccagctgccagccctctggaaagccttccagccgctggtgaagaactaccagccctgtaatggcatggccaggaagcccagcagagcttataagatctaacccttatggccaggtgcagtggctcacgtatgtaatcccagcactttgggaagccaaggagggaggatcacttgaactcaggaattcgagaccagcctgggctacatagtgagaccacatctctactagaacttaaaaaaagttagccaggcacggtgataaatgcctgtagtcccagccactgaagccagaggatcgattgaaccagggagatcatggtcacagtgaactatgattacgccaacctgggtcacatagcaagactctgtttcaaaaaaaaagggggggcgggggacgggtgggtgcagtggctcacatctgtaaccccagcactttgggaggctgagatgggcagatcacttgaggtcaggagttcgagaccagcctggccaacatggtgaaaccccatatccattaaaaatatttaaaaattagccagacatggtggcacgcgtctgtggtcctagctcctcgggaggctgaggcaggagaatcgcttgaactcgggaggcagaggttgtcatgagctgagctaacaccacggcacttcagcctgggtgacagaatgagactctgtgtcaaaaaaataaaaaataaaaaatctaagggctcaggaaccagtttggacttgattttgaatcccagttcatccccttcctagctgtatgaccttgattgtgtgccttaaccgctctgtgacacagtctacctgtctgcaaaatgggaaacataatacctgccatcaggattgttgaggagtaaataaatggaaattggtggaaaaaaaaaaaaaanaaananaaaaaaaaaaacaaaaaaaaagcagggggcgccggcagaaaagataccactcgaggggggcaaaaaaataggcacaccagcaagtgtggacgaaaaaggggggccaccactgagggacgccaaaaagacgagcgagcggcacggaattaaacggggctacggacgaacagcgagacaggatatcggggaggacgccaacaaccaggaggggacagatggaacaacccacagaatagcgcagggaacaaagaaggtaag

SEQ ID NO: 450709 - DNA, 1928 bp, Homo sapiens
  misc_feature (1664)..(1664): n is a, c, g, or t
  misc_feature (1668)..(1668): n is a, c, g, or t
  misc_feature (1670)..(1670): n is a, c, g, or t
gtgatgtccccgccccggttcccaggcaagtttagggaagtgaaaggcgccaggtgccagtcctggcctctgatgtaacccagcgccccgcagtcccgacacagattcctggatctcagccccatagcagctatgatcccgctgctgctggcagcgctgctgtgcgtccccgccggggccctgacctgctacggggactccgggcagcctgtagactggttcgtggtctacaagctgccagctcttagagggtccggggaggcggcgcagagagggctgcagtacaagtatctggacgagagctccggaggctggcgggacggcagggcactcatcaacagcccggagggggccgtgggccgaagcctgcagccgctgtaccggagcaacaccagccagctcgccttcctgctctacaatgaccaaccgcctcaacccagcaaggctcaggactcttccatgcgtgggcacacgaagggtgtcctgctccttgaccacgatgggggcttctggctggtccacagtgtacctaacttccctccaccggcctcctctgctgcatacagctggcctcatagcgcctgtacctacgggcagaccctgctctgtgtgtcttttcccttcgctcagttctcgaagatgggcaagcagctgacctacacctacccctgggtctataactaccagctggaagggatctttgcccaggaattccccgacttggagaatgtggtcaagggccaccacgttagccaagaaccctggaacagcagcatcacactcacatcccaggccggggctgttttccagagctttgccaagttcagcaaatttggagatgacctgtactccggctggttggcagcagcccttggtaccaacctgcaggtccagttctggcacaaaactgtaggcatcctgccctctaactgctcggatatctggcaggttctgaatgtgaaccagatagctttccctggaccagccggcccaagcttcaacagcacagaggaccactccaaatggtgcgtgtccccaaaagggccctggacctgcgtgggtgacatgaatcggaaccagggagaggagcaacggggtgggggcacactgtgtgcccagctgccagccctctggaaagccttccagccgctggtgaagaactaccagccctgtaatggcatggccaggaagcccagcagagcttataagatctaacccttatggccaggtgcagtggctcacgtatgtaatcccagcactttgggaagccaaggagggaggatcacttgaactcaggaattcgagaccagcctgggctacatagtgagaccacatctctactagaacttaaaaaaagttagccaggcacggtgataaatgcctgtagtcccagccactgaagccagaggatcgattgaaccagggagatcatggtcacagtgaactatgattacgccaacctgggtcacatagcaagactctgtttcaaaaaaaaagggggggcgggggacgggtgggtgcagtggctcacatctgtaaccccagcactttgggaggctgagatgggcagatcacttgaggtcaggagttcgagaccagcctggccaacatggtgaaaccccatatccattaaaaatatttaaaaattagaaaaaaaaaaaaanaaananaaaaaaaaaaacaaaaaaaaagcagggggcgccggcagaaaagataccactcgaggggggcaaaaaaataggcacaccagcaagtgtggacgaaaaaggggggccaccactgagggacgccaaaaagacgagcgagcggcacggaattaaacggggctacggacgaacagcgagacaggatatcggggaggacgccaacaaccaggaggggacagatggaacaacccacagaatagcgcagggaacaaagaaggtaag

SEQ ID NO: 450710 - DNA, 2045 bp, Homo sapiens
attgcaatagagagagtttaatccacatacatccagctaaatgggagatgggagttttattacttgaatcagcctccctgaaaattcagaggctagggttattcaagaacagtttggtgggcaggagggctagggaatgggtgccttgctgcaatcctggagctgtggaaaacagttgctgagtcagcttctgggtggggaccatagagtcgctagtctgggtggagtcatccagttgtcagatatgcaaaaagcctaaaaagacatgttcgtggtctacaagctgccagctcttagagggtccggggaggcggcgcagagagggctgcagtacaagtatctggacgagagctccggaggctggcgggacggcagggcactcatcaacagcccggagggggccgtgggccgaagcctgcagccgctgtaccggagcaacaccagccagctcgccttcctgctctacaatgaccaaccgcctcaacccagcaaggctcaggactcttccatgcgtgggcacacgaagggtgtcctgctccttgaccacgatgggggcttctggctggtccacagtgtacctaacttccctccaccggcctcctctgctgcatacagctggcctcatagcgcctgtacctacgggcagaccctgctctgtgtgtcttttcccttcgctcagttctcgaagatgggcaagcagctgacctacacctacccctgggtctataactaccagctggaagggatctttgcccaggaattccccgacttggagaatgtggtcaagggccaccacgttagccaagaaccctggaacagcagcatcacactcacatcccaggccggggctgttttccagagctttgccaagttcagcaaatttggagatgacctgtactccggctggttggcagcagcccttggtaccaacctgcaggtccagttctggcacaaaactgtaggcatcctgccctctaactgctcggatatctggcaggttctgaatgtgaaccagatagctttccctggaccagccggcccaagcttcaacagcacagaggaccactccaaatggtgcgtgtccccaaaagggccctggacctgcgtgggtgacatgaatcggaaccagggagaggagcaacggggtgggggcacactgtgtgcccagctgccagccctctggaaagccttccagccgctggtgaagaactaccagccctgtaatggcatggccaggaagcccagcagagcttataagatctaacccttatggccaggtgcagtggctcacgtatgtaatcccagcactttgggaagccaaggagggaggatcacttgaactcaggaattcgagaccagcctgggctacatagtgagaccacatctctactagaacttaaaaaaagttagccaggcacggtgataaatgcctgtagtcccagccactgaagccagaggatcgattgaaccagggagatcatggtcacagtgaactatgattacgccaacctgggtcacatagcaagactctgtttcaaaaaaaaagggggggcgggggacgggtgggtgcagtggctcacatctgtaaccccagcactttgggaggctgagatgggcagatcacttgaggtcaggagttcgagaccagcctggccaacatggtgaaaccccatatccattaaaaatatttaaaaattagccagacatggtggcacgcgtctgtggtcctagctcctcgggaggctgaggcaggagaatcgcttgaactcgggaggcagaggttgtcatgagctgagctaacaccacggcacttcagcctgggtgacagaatgagactctgtgtcaaaaaaataaaaaataaaaaatctaagggctcaggaaccagtttggacttgattttgaatcccagttcatccccttcctagctgtatgaccttgattgtgtgccttaaccgctctgtgacacagtctacctgtctgcaaaatgggaaacataatacctgccatcaggattgttgaggagtaaataaatggaaattggtgga

SEQ ID NO: 450711 - DNA, 1236 bp, Homo sapiens
gtgatgtccccgccccggttcccaggcaagtttagggaagtgaaaggcgccaggtgccagtcctggcctctgatgtaacccagcgccccgcagtcccgacacagattcctggatctcagccccatagcagctatgatcccgctgctgctggcagcgctgctgtgcgtccccgccggggccctgacctgctacggggactccgggcagcctgtagactggttcgtggtctacaagctgccagctcttagagggtccggggaggcggcgcagagagggctgcagtacaagtatctggacgagagctccggaggctggcgggacggcagggcactcatcaacagcccggagggggccgtgggccgaagcctgcagccgctgtaccggagcaacaccagccagctcgccttcctgctctacaatgaccaaccgcctcaacccagcaaggctcaggactcttccatgcgtgggcacacgaagggtgtcctgctccttgaccacgatgggggcttctggctggtccacagtgtacctaacttccctccaccggcctcctctgctgcatacagctggcctcatagcgcctgtacctacgggcagaccctgctctgtgtgtcttttcccttcgctcagttctcgaagatgggcaagcagctgacctacacctacccctgggtctataactaccagctggaagggatctttgcccaggaattccccgacttggagaatgtggtcaagggccaccacgttagccaagaaccctggaacagcagcatcacactcacatcccaggccggggctgttttccagagctttgccaagttcagcaaatttggagatgacctgtactccggctggttggcagcagcccttggtaccaacctgcaggtccagttctggcacaaaactgtaggcatcctagctcctcgggaggctgaggcaggagaatcgcttgaactcgggaggcagaggttgtcatgagctgagctaacaccacggcacttcagcctgggtgacagaatgagactctgtgtcaaaaaaataaaaaataaaaaatctaagggctcaggaaccagtttggacttgattttgaatcccagttcatccccttcctagctgtatgaccttgattgtgtgccttaaccgctctgtgacacagtctacctgtctgcaaaatgggaaacataatacctgccatcaggattgttgaggagtaaataaatggaaattggtgga

SEQ ID NO: 450712 - DNA, 958 bp, Homo sapiens
tcgcggttcctggaagctaaagatgagctggttacatgaaaattaacctttggaatctgtcagtcccagtcttgaatgatcatacattctggctggtagataaaaccaattcctaacaaagagtctttgaaatgtttacaaagctctacatcaacaaaccaaaatgcaagataatacaagaccgggtcaggcatagtggctcacgtatgtaatcccagcactttgggaagccaaggagggaggatcacttgaactcaggaattcgagaccagcctgggctacatagtgagaccacatctctactagaacttaaaaaaagttagccaggcacggtgataaatgcctgtagtcccagccactgaagccagaggatcgattgaaccagggagatcatggtcacagtgaactatgattacgccaacctgggtcacatagcaagactctgtttcaaaaaaaaagggggggcgggggacgggtgggtgcagtggctcacatctgtaaccccagcactttgggaggctgagatgggcagatcacttgaggtcaggagttcgagaccagcctggccaacatggtgaaaccccatatccattaaaaatatttaaaaattagccagacatggtggcacgcgtctgtggtcctagctcctcgggaggctgaggcaggagaatcgcttgaactcgggaggcagaggttgtcatgagctgagctaacaccacggcacttcagcctgggtgacagaatgagactctgtgtcaaaaaaataaaaaataaaaaatctaagggctcaggaaccagtttggacttgattttgaatcccagttcatccccttcctagctgtatgaccttgattgtgtgccttaaccgctctgtgacacagtctacctgtctgcaaaatgggaaacataatacctgccatcaggattgttgaggagtaaataaatggaaattggtgga

SEQ ID NO: 450713 - DNA, 902 bp, Homo sapiens
tcgcggttcctggaagctaaagatgagctggttacatgaaaattaacctttggaatctgtcagtcccagtcttgaatgatcatacattctggctggtagataaaaccaattcctaacaaagagtctttgaaatgtttacaaagctctacatcaacaaaccaaaatgcaagataatacaagaccgggtcaggcatagtggctcacgtatgtaatcccagcactttgggaagccaaggagggaggatcacttgaactcaggaattcgagaccagcctgggctacatagtgagaccacatctctactagaacttaaaaaaagttagccaggcacggtgataaatgcctgtagtcccagccactgaagccagaggatcgattgaaccagggagatcatggtcacagtgaactatgattacgccaacctgggtcacatagcaagactctgtttcaaaactttgggaggctgagatgggcagatcacttgaggtcaggagttcgagaccagcctggccaacatggtgaaaccccatatccattaaaaatatttaaaaattagccagacatggtggcacgcgtctgtggtcctagctcctcgggaggctgaggcaggagaatcgcttgaactcgggaggcagaggttgtcatgagctgagctaacaccacggcacttcagcctgggtgacagaatgagactctgtgtcaaaaaaataaaaaataaaaaatctaagggctcaggaaccagtttggacttgattttgaatcccagttcatccccttcctagctgtatgaccttgattgtgtgccttaaccgctctgtgacacagtctacctgtctgcaaaatgggaaacataatacctgccatcaggattgttgaggagtaaataaatggaaattggtgga

SEQ ID NO: 450714 - DNA, 1996 bp, Homo sapiens
gtgatgtccccgccccggttcccaggcaagtttagggaagtgaaaggcgccaggtgccagtcctggcctctgatgtaacccagcgccccgcagtcccgacacagattcctggatctcagccccatagcagctatgatcccgctgctgctggcagcgctgctgtgcgtccccgccggggccctgacctgctacggggactccgggcagcctgtagactggttcgtggtctacaagctgccagctcttagagggtccggggaggcggcgcagagagggctgcagtacaagtatctggacgagagctccggaggctggcgggacggcagggcactcatcaacagcccggagggggccgtgggccgaagcctgcagccgctgtaccggagcaacaccagccagctcgccttcctgctctacaatgaccaaccgcctcaacccagcaaggctcaggactcttccatgcgtgggcacacgaagggtgtcctgctccttgaccacgatgggggcttctggctggtccacagtgtacctaacttccctccaccggcctcctctgctgcatacagctggcctcatagcgcctgtacctacgggcagaccctgctctgtgtgtcttttcccttcgctcagttctcgaagatgggcaagcagctgacctacacctacccctgggtctataactaccagctggaagggatctttgcccaggaattccccgacttggagaatgtggtcaagggccaccacgttagccaagaaccctggaacagcagcatcacactcacatcccaggccggggctgttttccagagctttgccaagttcagcaaatttggagatgacctgtactccggctggttggcagcagcccttggtaccaacctgcaggtccagttctggcacaaaactgtaggcatcctgccctctaactgctcggatatctggcaggttctgaatgtgaaccagatagctttccctggaccagccggcccaagcttcaacagcacagaggaccactccaaatggtgcgtgtccccaaaagggccctggacctgcgtgggtgacatgaatcggaaccagggagaggagcaacggggtgggggcacactgtgtgcccagctgccagccctctggaaagccttccagccgctggtgaagaactaccagccctgtaatggcatggccaggaagcccagcagagcttataagatctaacccttatggccaggtgcagtggctcacgtatgtaatcccagcactttgggaagccaaggagggaggatcacttgaactcaggaattcgagaccagcctgggctacatagtgagaccacatctctactagaacttaaaaaaagttagccaggcacggtgataaatgcctgtagtcccagccactgaagccagaggatcgattgaaccagggagatcatggtcacagtgaactatgattacgccaacctgggtcacatagcaagactctgtttcaaaaaaaaagggggggcgggggacgggtgggtgcagtggctcacatctgtaaccccagcactttgggaggctgagatgggcagatcacttgaggtcaggagttcgagaccagcctggccaacatggtgaaaccccatatccattaaaaatatttaaaaattagccagacatggtggcacgcgtctgtggtcctagctcctcgggaggctgaggcaggagaatcgcttgaactcgggaggcagaggttgtcatgagctgagctaacaccacggcacttcagcctgggtgacagaatgagactctgtgtcaaaaaaataaaaaataaaaaatctaagggctcaggaaccagtttggacttgattttgaatcccagttcatccccttcctagctgtatgaccttgattgtgtgccttaaccgctctgtgacacagtctacctgtctgcaaaatgggaaacataatacctgccatcaggattgttgaggagtaaataaatggaaattggtgga

SEQ ID NO: 450715 - DNA, 2087 bp, Homo sapiens
gtgatgtccccgccccggttcccaggcaagtttagggaagtgaaaggcgccaggtgccagtcctggcctctgatgtaacccagcgccccgcagtcccgacacagattcctggatctcagccccatagcagctatgatcccgctgctgctggcagcgctgctgtgcgtccccgccggggccctgacctgctacggggactccgggcagcctgtagactggttcgtggtctacaagctgccagctcttagagggtccggggaggcggcgcagagagggctgcagtacaagtatctggacgagagctccggaggctggcgggacggcagggcactcatcaacagcccggagggggccgtgggccgaagcctgcagccgctgtaccggagcaacaccagccaggtgaagggggccccgggccaactaggggcgaaactctagggctgccctgcctgggaggaatttcacgttgcctccgtttatccgcccgcagctcgccttcctgctctacaatgaccaaccgcctcaacccagcaaggctcaggactcttccatgcgtgggcacacgaagggtgtcctgctccttgaccacgatgggggcttctggctggtccacagtgtacctaacttccctccaccggcctcctctgctgcatacagctggcctcatagcgcctgtacctacgggcagaccctgctctgtgtgtcttttcccttcgctcagttctcgaagatgggcaagcagctgacctacacctacccctgggtctataactaccagctggaagggatctttgcccaggaattccccgacttggagaatgtggtcaagggccaccacgttagccaagaaccctggaacagcagcatcacactcacatcccaggccggggctgttttccagagctttgccaagttcagcaaatttggagatgacctgtactccggctggttggcagcagcccttggtaccaacctgcaggtccagttctggcacaaaactgtaggcatcctgccctctaactgctcggatatctggcaggttctgaatgtgaaccagatagctttccctggaccagccggcccaagcttcaacagcacagaggaccactccaaatggtgcgtgtccccaaaagggccctggacctgcgtgggtgacatgaatcggaaccagggagaggagcaacggggtgggggcacactgtgtgcccagctgccagccctctggaaagccttccagccgctggtgaagaactaccagccctgtaatggcatggccaggaagcccagcagagcttataagatctaacccttatggccaggtgcagtggctcacgtatgtaatcccagcactttgggaagccaaggagggaggatcacttgaactcaggaattcgagaccagcctgggctacatagtgagaccacatctctactagaacttaaaaaaagttagccaggcacggtgataaatgcctgtagtcccagccactgaagccagaggatcgattgaaccagggagatcatggtcacagtgaactatgattacgccaacctgggtcacatagcaagactctgtttcaaaaaaaaagggggggcgggggacgggtgggtgcagtggctcacatctgtaaccccagcactttgggaggctgagatgggcagatcacttgaggtcaggagttcgagaccagcctggccaacatggtgaaaccccatatccattaaaaatatttaaaaattagccagacatggtggcacgcgtctgtggtcctagctcctcgggaggctgaggcaggagaatcgcttgaactcgggaggcagaggttgtcatgagctgagctaacaccacggcacttcagcctgggtgacagaatgagactctgtgtcaaaaaaataaaaaataaaaaatctaagggctcaggaaccagtttggacttgattttgaatcccagttcatccccttcctagctgtatgaccttgattgtgtgccttaaccgctctgtgacacagtctacctgtctgcaaaatgggaaacataatacctgccatcaggattgttgaggagtaaataaatggaaattggtgga

SEQ ID NO: 450716 - DNA, 1879 bp, Homo sapiens
  misc_feature (46)..(46): n is a, c, g, or t
  misc_feature (48)..(48): n is a, c, g, or t
  misc_feature (59)..(59): n is a, c, g, or t
  misc_feature (61)..(61): n is a, c, g, or t
  misc_feature (109)..(109): n is a, c, g, or t
  misc_feature (115)..(115): n is a, c, g, or t
  misc_feature (152)..(152): n is a, c, g, or t
cgtactgcgctggatatctggcaggtctgaatgtgaccagatagtntncctggacagcngnccaagcttcaacagcacagaggacactccaaatggtgcgtgtccccanaagggncctggacctgcgtgggtgacatgaatcggaaccaggnagaggagcaacggggtgggggcacactgtgtgcccagctgccagccctctggaaagccttccagccgctggtgaagaactaccagccctgtaatggcatggccagggagcccagcagagcttataggatctaacccttatggcaaagtgctgggattacaggcgtgagccactgcgcccggcctcccctaatgccttcttttggtccaggtgtcctgctccttgaccacgatgggggcttctggctggtccacagtgtacctaacttccctccaccggcctcctctgctgcatacagctggcctcatagcgcctgtacctacgggcagaccctgctctgtgtgtcttttcccttcgctcagttctcgaagatgggcaagcagctgacctacacctacccctgggtctataactaccagctggaagggatctttgcccaggaattccccgacttggagaatgtggtcaagggccaccacgttagccaagaaccctggaacagcagcatcacactcacatcccaggccggggctgttttccagagctttgccaagttcagcaaatttggagatgacctgtactccggctggttggcagcagcccttggtaccaacctgcaggtccagttctggcacaaaactgtaggcatcctgccctctaactgctcggatatctggcaggttctgaatgtgaaccagatagctttccctggaccagccggcccaagcttcaacagcacagaggaccactccaaatggtgcgtgtccccaaaagggccctggacctgcgtgggtgacatgaatcggaaccagggagaggagcaacggggtgggggcacactgtgtgcccagctgccagccctctggaaagccttccagccgctggtgaagaactaccagccctgtaatggcatggccaggaagcccagcagagcttataagatctaacccttatggccaggtgcagtggctcacgtatgtaatcccagcactttgggaagccaaggagggaggatcacttgaactcaggaattcgagaccagcctgggctacatagtgagaccacatctctactagaacttaaaaaaagttagccaggcacggtgataaatgcctgtagtcccagccactgaagccagaggatcgattgaaccagggagatcatggtcacagtgaactatgattacgccaacctgggtcacatagcaagactctgtttcaaaaaaaaagggggggcgggggacgggtgggtgcagtggctcacatctgtaaccccagcactttgggaggctgagatgggcagatcacttgaggtcaggagttcgagaccagcctggccaacatggtgaaaccccatatccattaaaaatatttaaaaattagccagacatggtggcacgcgtctgtggtcctagctcctcgggaggctgaggcaggagaatcgcttgaactcgggaggcagaggttgtcatgagctgagctaacaccacggcacttcagcctgggtgacagaatgagactctgtgtcaaaaaaataaaaaataaaaaatctaagggctcaggaaccagtttggacttgattttgaatcccagttcatccccttcctagctgtatgaccttgattgtgtgccttaaccgctctgtgacacagtctacctgtctgcaaaatgggaaacataatacctgccatcaggattgttgaggagtaaataaatggaaattggtgga

SEQ ID NO: 450717 - DNA, 1999 bp, Homo sapiens
  misc_feature (1)..(1): n is a, c, g, or t
  misc_feature (14)..(14): n is a, c, g, or t
nagggcctttgggnagctcaaggatccttaattaatttaatcccccccccccccccccccgattccgggctcgaaggctgtgcggtctgccaggagctgcggccccgtccggcccgggctggcatgggttggaattggagcctatcccccaacccgaaggctaacagcatcatgtggttactaactgttcctcattcaccggttgatgcctcccagaaaaaaacgccgccagccttcccagaaagccccgctgctgttccaccaacaaccactggagggccccaaacacagctgtgcatctacacagcttcccatcactcacactcgacaggtgcccagcaagcccattgaccacagcaccatcacttcctgggtatcacctgattttgatacagcagcaggaagcttgttcccagcctaccagaaacaccaaaaccgggcgagacactcaagtcgaaaacctaccacctccaagtttccacatctaacttttgagagtccgcaatcttccagttcagagacattggggatccccttaatccgagagtgccccagtgaatcagaaaaggatgtttccagaagacccttagttccagtgctcagtccccaaagctgtgggaacatgtcagtgcaggcacttcagagcttaccttatgtgttcattccacctgatatccagaccccagagtcatcgtctgtgaaggaagaactcattccccaagatcagaaggaaaacagccttctaagctgcactcttcacactggcactcctaatagcccagagcctggacctgttctggttaaagacacccccgaggacaagtatggaataaaggtcacatggaggagacgacagcacctgcttgcttacctcagggagagagggaagctgagcagaagccaattccttgtgaaaagctgactgccatcagtaatctcaatagaaaagagatatgttttctggagtcataaaggaattcaattcctagggtttttgtttttgtttttgagatgtaatattgctctgttgcccaggctggagtgcagtggtatgatctcaccttactgcaaccaccacttcctgggttcaagcgattctcctgcctcagcctccccagtagctgggattacaggcaccagccaccatgcctggctaatttttttgtatttttagtagagatgtggtttctccatgttggccaggctggtctcaaaatcctgacctcaagtcatctgctggccttgacctcacaaagtgctggcccagccgagatttgttttctaagatactttgtgtcatgaacagttcagtttagtgtcatgaactattcacttcatatttttcttgtattaactgtttaaatttttaaaatatcttgtagtaactctttaaaatgtatgtaagtaaatggctgcagaaagtttttttagagaatcctgcttccatcagtaatacagcaatattaccccatccactaatggtctttgtttccttaaccactactcattaatccttaatcacctcattcaaactaattcattctgcatttttgagtaccaactcttgtcaggctcagtggcagcttctacgacctgatggatggaaaaaaatcaaactctgtgactctatggttgactgccacctctgcaaccttgactcatctgctgaaaaggcaagaagaagaaagggcagcaagccctgttttagggactacataagatgaggggagataagggggacatagatgagttctttaggattgcgtgtgttttgagtttttgtttctaactgaagaaatctgtcaatattaaatagggtgggaaaatggtttcttagaataactgttcaactgtgtgtaaataaggaaagttttcaatgagtattacttattgtaattaatgcagaaggacttccccagtcaaccgaatgtctcggccttttactcagacaagtagcatctcattaaacccattcatttagcattcattcagctggacc

SEQ ID NO: 450718 - DNA, 1670 bp, Homo sapiens
  misc_feature (1)..(1): n is a, c, g, or t
  misc_feature (14)..(14): n is a, c, g, or t
nagggcctttgggnagctcaaggatccttaattaatttaatcccccccccccccccccccgattccgggctcgaaggctgtgcggtctgccaggagctgcggccccgtccggcccgggctggtatcacctgattttgatacagcagcaggaagcttgttcccagcctaccagaaacaccaaaaccgggcgagacactcaagtcgaaaacctaccacctccaagtttccacatctaacttttgagagtccgcaatcttccagttcagagacattggggatccccttaatccgagagtgccccagtgaatcagaaaaggatgtttccagaagacccttagttccagtgctcagtccccaaagctgtgggaacatgtcagtgcaggcacttcagagcttaccttatgtgttcattccacctgatatccagaccccagagtcatcgtctgtgaaggaagaactcattccccaagatcagaaggaaaacagccttctaagctgcactcttcacactggcactcctaatagcccagagcctggacctgttctggttaaagacacccccgaggacaagtatggaataaaggtcacatggaggagacgacagcacctgcttgcttacctcagggagagagggaagctgagcagaagccaattccttgtgaaaagctgactgccatcagtaatctcaatagaaaagagatatgttttctggagtcataaaggaattcaattcctagggtttttgtttttgtttttgagatgtaatattgctctgttgcccaggctggagtgcagtggtatgatctcaccttactgcaaccaccacttcctgggttcaagcgattctcctgcctcagcctccccagtagctgggattacaggcaccagccaccatgcctggctaatttttttgtatttttagtagagatgtggtttctccatgttggccaggctggtctcaaaatcctgacctcaagtcatctgctggccttgacctcacaaagtgctggcccagccgagatttgttttctaagatactttgtgtcatgaacagttcagtttagtgtcatgaactattcacttcatatttttcttgtattaactgtttaaatttttaaaatatcttgtagtaactctttaaaatgtatgtaagtaaatggctgcagaaagtttttttagagaatcctgcttccatcagtaatacagcaatattaccccatccactaatggtctttgtttccttaaccactactcattaatccttaatcacctcattcaaactaattcattctgcatttttgagtaccaactcttgtcaggctcagtggcagcttctacgacctgatggatggaaaaaaatcaaactctgtgactctatggttgactgccacctctgcaaccttgactcatctgctgaaaaggcaagaagaagaaagggcagcaagccctgttttagggactacataagatgaggggagataagggggacatagatgagttctttaggattgcgtgtgttttgagtttttgtttctaactgaagaaatctgtcaatattaaatagggtgggaaaatggtttcttagaataactgttcaactgtgtgtaaataaggaaagttttcaatgagtattacttattgtaattaatgcagaaggacttccccagtca

SEQ ID NO: 450719 - DNA, 1958 bp, Homo sapiens
  misc_feature (1)..(1): n is a, c, g, or t
  misc_feature (14)..(14): n is a, c, g, or t
nagggcctttgggnagctcaaggatccttaattaatttaatcccccccccccccccccccgattccgggctcgaaggctgtgcggtctgccaggagctgcggccccgtccggcccgggctggcatgggttggaattggagcctatcccccaacccgaaggctaacagcatcatgtggttactaactgttcctcattcaccggttgatgcctcccagaaaaaaacgccgccagccttcccagaaagccccgctgctgttccaccaacaaccactggagggccccaaacacagctgtgcatctacacagcttcccatcactcacactcgacagggtatcacctgattttgatacagcagcaggaagcttgttcccagcctaccagaaacaccaaaaccgggcgagacactcaagtcgaaaacctaccacctccaagtttccacatctaacttttgagagtccgcaatcttccagttcagagacattggggatccccttaatccgagagtgccccagtgaatcagaaaaggatgtttccagaagacccttagttccagtgctcagtccccaaagctgtgggaacatgtcagtgcaggcacttcagagcttaccttatgtgttcattccacctgatatccagaccccagagtcatcgtctgtgaaggaagaactcattccccaagatcagaaggaaaacagccttctaagctgcactcttcacactggcactcctaatagcccagagcctggacctgttctggttaaagacacccccgaggacaagtatggaataaaggtcacatggaggagacgacagcacctgcttgcttacctcagggagagagggaagctgagcagaagccaattccttgtgaaaagctgactgccatcagtaatctcaatagaaaagagatatgttttctggagtcataaaggaattcaattcctagggtttttgtttttgtttttgagatgtaatattgctctgttgcccaggctggagtgcagtggtatgatctcaccttactgcaaccaccacttcctgggttcaagcgattctcctgcctcagcctccccagtagctgggattacaggcaccagccaccatgcctggctaatttttttgtatttttagtagagatgtggtttctccatgttggccaggctggtctcaaaatcctgacctcaagtcatctgctggccttgacctcacaaagtgctggcccagccgagatttgttttctaagatactttgtgtcatgaacagttcagtttagtgtcatgaactattcacttcatatttttcttgtattaactgtttaaatttttaaaatatcttgtagtaactctttaaaatgtatgtaagtaaatggctgcagaaagtttttttagagaatcctgcttccatcagtaatacagcaatattaccccatccactaatggtctttgtttccttaaccactactcattaatccttaatcacctcattcaaactaattcattctgcatttttgagtaccaactcttgtcaggctcagtggcagcttctacgacctgatggatggaaaaaaatcaaactctgtgactctatggttgactgccacctctgcaaccttgactcatctgctgaaaaggcaagaagaagaaagggcagcaagccctgttttagggactacataagatgaggggagataagggggacatagatgagttctttaggattgcgtgtgttttgagtttttgtttctaactgaagaaatctgtcaatattaaatagggtgggaaaatggtttcttagaataactgttcaactgtgtgtaaataaggaaagttttcaatgagtattacttattgtaattaatgcagaaggacttccccagtcaaccgaatgtctcggccttttactcagacaagtagcatctcattaaacccattcatttagcattcattcagctggacc

SEQ ID NO: 450720 - DNA, 867 bp, Homo sapiens
aaatgttcaggctgggcgtggtggctcacgcctgtaatcccagcactttgggaggccgaggtgggcagatcactggtctcaaaatcctgacctcaagtcatctgctggccttgacctcacaaagtgctggcccagccgagatttgttttctaagatactttgtgtcatgaacagttcagtttagtgtcatgaactattcacttcatatttttcttgtattaactgtttaaatttttaaaatatcttgtagtaactctttaaaatgtatgtaagtaaatggctgcagaaagtttttttagagaatcctgcttccatcagtaatacagcaatattaccccatccactaatggtctttgtttccttaaccactactcattaatccttaatcacctcattcaaactaattcattctgcatttttgagtaccaactcttgtcaggctcagtggcagcttctacgacctgatggatggaaaaaaatcaaactctgtgactctatggttgactgccacctctgcaaccttgactcatctgctgaaaaggcaagaagaagaaagggcagcaagccctgttttagggactacataagatgaggggagataagggggacatagatgagttctttaggattgcgtgtgttttgagtttttgtttctaactgaagaaatctgtcaatattaaatagggtgggaaaatggtttcttagaataactgttcaactgtgtgtaaataaggaaagttttcaatgagtattacttattgtaattaatgcagaaggacttccccagtcaaccgaatgtctcggccttttactcagacaagtagcatctcattaaacccattcatttagcattcattcagctggacc

SEQ ID NO: 450721 - DNA, 576 bp, Homo sapiens
  misc_feature (1)..(1): n is a, c, g, or t
  misc_feature (14)..(14): n is a, c, g, or t
nagggcctttgggnagctcaaggatccttaattaatttaatcccccccccccccccccccgattccgggctcgaaggctgtgcggtctgccaggagctgcggccccgtccggcccgggctggcatgggttggaattggagcctatcccccaacccgaaggctaacagcatcatgtggttactaactgttcccgattctcctgcctcagcctccccagtagctgggattacaggcaccagccaccatgcctggctaatttttttgtatttttagtagagatgtggtttctccatgttggccaggctggtctcaaaatcctgacctcaagtcatctgctggccttgacctcacaaagtgctggcccagccgagatttgttttctaagatactttgtgtcatgaacagttcagtttagtgtcatgaactattcacttcatatttttcttgtattaactgtttaaatttttaaaatatcttgtagtaactctttaaaatgtatgtaagtaaatggctgcagaaagtttttttagagaatcctgcttccatcagtaatacagcaatattaccccatccact

SEQ ID NO: 450722 - DNA, 935 bp, Homo sapiens
  misc_feature (1)..(1): n is a, c, g, or t
  misc_feature (14)..(14): n is a, c, g, or t
  misc_feature (333)..(333): n is a, c, g, or t
  misc_feature (338)..(338): n is a, c, g, or t
  misc_feature (341)..(341): n is a, c, g, or t
  misc_feature (349)..(349): n is a, c, g, or t
  misc_feature (357)..(357): n is a, c, g, or t
  misc_feature (373)..(373): n is a, c, g, or t
  misc_feature (375)..(375): n is a, c, g, or t
  misc_feature (393)..(393): n is a, c, g, or t
  misc_feature (399)..(399): n is a, c, g, or t
  misc_feature (402)..(402): n is a, c, g, or t
  misc_feature (406)..(407): n is a, c, g, or t
  misc_feature (437)..(437): n is a, c, g, or t
  misc_feature (443)..(443): n is a, c, g, or t
  misc_feature (445)..(446): n is a, c, g, or t
  misc_feature (450)..(450): n is a, c, g, or t
  misc_feature (454)..(454): n is a, c, g, or t
  misc_feature (460)..(460): n is a, c, g, or t
  misc_feature (472)..(472): n is a, c, g, or t
  misc_feature (484)..(484): n is a, c, g, or t
  misc_feature (491)..(491): n is a, c, g, or t
  misc_feature (513)..(513): n is a, c, g, or t
  misc_feature (518)..(518): n is a, c, g, or t
  misc_feature (529)..(529): n is a, c, g, or t
  misc_feature (552)..(552): n is a, c, g, or t
  misc_feature (556)..(557): n is a, c, g, or t
  misc_feature (561)..(561): n is a, c, g, or t
  misc_feature (605)..(606): n is a, c, g, or t
  misc_feature (670)..(670): n is a, c, g, or t
  misc_feature (675)..(675): n is a, c, g, or t
  misc_feature (681)..(681): n is a, c, g, or t
  misc_feature (693)..(693): n is a, c, g, or t
  misc_feature (718)..(718): n is a, c, g, or t
  misc_feature (724)..(724): n is a, c, g, or t
  misc_feature (740)..(740): n is a, c, g, or t
  misc_feature (776)..(776): n is a, c, g, or t
  misc_feature (815)..(816): n is a, c, g, or t
  misc_feature (819)..(819): n is a, c, g, or t
  misc_feature (841)..(841): n is a, c, g, or t
  misc_feature (857)..(857): n is a, c, g, or t
  misc_feature (872)..(872): n is a, c, g, or t
  misc_feature (888)..(888): n is a, c, g, or t
nagggcctttgggnagctcaaggatccttaattaatttaatcccccccccccccccccccgattccgggctcgaaggctgtgcggtctgccaggagctgcggccccgtccggcccgggctggcatgggttggaattggagcctatcccccaacccgaaggctaacagcatcatgtggttactaactgttcctcattcaccggttgatgcctcccagaaaaaaacgccgccagccttcccagaaagccccgctgctgttccaccaacaaccactggagggccccaaacacagctgtgcatctacacagcttcccatcactcacactcgacaggnacaanaanacaaattnacaacatncacaattacattaatntnctttcaaaatcatatttnctacancanccannccagcattcttaaaaacaatctaaacttanataaantnnaagngcancgcganataaagctcagnaaaaaataaaanaataaanagctttaaaaaatattatattnttgcngcgctaagcanatatttaaagcttaagcagcganttgnncgcntaaaaattatataagcagcgctgcaaaaagctgcaataagcaannggcatgctttaaagcgcgcgaaatatagcttaaagctgcataagctaaaaaaaagcatgctggncaaantgctangctgcagcgcanatttacgcagcatttaaatttgtgngcttantataaagaatgccttntaatgcgaaaaaagcagctaataattatgctgcagngcgcgcagaatgaatttaaaaaaggcgtaggcgggcgcnncgnaggcaatttatatagcatgcanaatatataaaaaatgngcaaataaatttatngcaaaagccgcaatgnccaatgctatatggcttttagcaataaaaaagcaggcaaaagctatg

SEQ ID NO: 450723 - DNA, 1477 bp, Homo sapiens
  misc_feature (1)..(1): n is a, c, g, or t
  misc_feature (14)..(14): n is a, c, g, or t
nagggcctttgggnagctcaaggatccttaattaatttaatcccccccccccccccccccgattccgggctcgaaggctgtgcggtctgccaggagctgcggccccgtccggcccgggctggcatgggttggaattggagcctatcccccaacccgaaggctaacagcatcatgtggttactaactgttcctcattcaccggttgatgcctcccagaaaaaaacgccgccagccttcccagaaagccccgctgctgttccaccaacaaccactggagggccccaaacacagctgtgcatctacacagcttcccatcactcacactcgacaggtgcccagcaagcccattgaccacagcaccatcacttcctgggtatcacctgattttgatacagcagcaggaagcttgttcccagcctaccagaaacaccaaaaccgggcgagacactcaagtcgaaaacctaccacctccaagtttccacatctaacttttgagagtccgcaatcttccagttcagagacattggggatccccttaatccgagagtgccccagtgaatcagaaaaggatgtttccagaagacccttagttccagtgctcagtccccaaagctgtgggaacatgtcagtgcaggcacttcagagcttaccttatgtgttcattccacctgatatccagaccccagagtcatcgtctgtgaaggaagaactcattccccaagatcagaaggaaaacagccttctaagctgcactcttcacactggcactcctaatagcccagagcctggacctgttctggttaaagacacccccgaggacaagtatggaataaaggtcacatggaggagacgacagcacctgcttgcttacctcagggagagagggaagctgagcagaagccaattccttgtgaaaagctgactgccatcagtaatctcaatagaaaagagatatgttttctggagtcataaaggaattcaattcctagggtttttgtttttgtttttgagatgtaatattgctctgttgcccaggctggagtgcagtggtatgatctcaccttactgcaaccaccacttcctgggttcaagcgattctcctgcctcagcctccccagtagctgggattacaggcaccagccaccatgcctggctaatttttttgtatttttagtagagatgtggtttctccatgttggccaggctggtctcaaaatcctgacctcaagtcatctgctggccttgacctcacaaagtgctggcccagccgagatttgttttctaagatactttgtgtcatgaacagttcagtttagtgtcatgaactattcacttcatatttttcttgtattaactgtttaaatttttaaaatatcttgtagtaactctttaaaatgtatgtaagtaaatggctgcagaaagtttttttagagaatcctgcttccatcagtaatacagcaatattaccccatccact

SEQ ID NO: 450724 - DNA, 1922 bp, Homo sapiens
  misc_feature (1)..(1): n is a, c, g, or t
  misc_feature (14)..(14): n is a, c, g, or t
nagggcctttgggnagctcaaggatccttaattaatttaatcccccccccccccccccccgattccgggctcgaaggctgtgcggtctgccaggagctgcggccccgtccggcccgggctggcatgggttggaattggagcctatcccccaacccgaaggctaacagcatcatgtggttactaactgttcctcattcaccggttgatgcctcccagaaaaaaacgccgccagccttcccagaaagccccgctgctgttccaccaacaaccactggagggccccaaacacagctgtgcatctacacagcttcccatcactcacactcgacaggtgcccagcaagcccattgaccacagcaccatcacttcctgggtatcacctgattttgatacagcagcaggaagcttgttcccagcctaccagaaacaccaaaaccgggcgagacactcaagtcgaaaacctaccacctccaagtttccacatctaacttttgagagtccgcaatcttccagttcagagacattggggatccccttaatccgagagtgccccagtgaatcagaaaaggatgtttccagaagacccttagttccagtgctcagtccccaaagctgtgggaacatgtcagtgcaggcacttcagagcttaccttatgtgttcattccacctgatatccagaccccagagtcatcgtctgtgaaggaagaactcattccccaagatcagaaggaaaacagccttctaagctgcactcttcacactggcactcctaatagcccagagcctggacctgttctggttaaagacacccccgaggacaagtatggaataaaggtcacatggaggagacgacagcacctgcttgcttacctcagggagagagggaagctgagcagaagccaattccttgtgaaaagctgactgccatcagtaatctcaatagaaaagagatatgttttctggagtcataaaggaattcaattcctagggtttttgtttttgtttttgagatgtaatattgctctgttgcccaggctggagtgcagtggtatgatctcaccttactgcaaccaccacttcctgggttcaagcgattctcctgcctcagcctccccagtagctgggattacaggcaccagccaccatgcctggctaatttttttgtatttttagtagagatgtggtttctccatgttggccaggctggtctcaaaatcctgacctcaagtcatctgctggccttgacctcacaaagtgctggcccagccgagatttgttttctaagatactttgtgtcatgaacagttcagtttagtgtcatgaactattcacttcatatttttcttgtattaactgtttaaatttttaaaatatcttgtagtaactctttaaaatgtatgtaagtaaatggctgcagaaagtttttttagagaatcctgcttccatcagtaatacagcaatattaccccatccactaatggtctttgtttccttaaccactactcattaatccttaatcacctcattcaaactaattcattctgcatttttgagtaccaactcttgtcaggctcagtggcagcttctacgacctgatggatggaaaaaaatcaaactctgtgactctatggttgactgccacctctgcaaccttgactcatctgctgaaaaggcaagaagaagaaagggcagcaagccctgttttagggactacataagatgaggggagataagggggacatagatgagttctttaggattgcgtgtgttttgagtttttgtttctaactgaagaaatctgtcaatattaaatagggtgggaaaatggtttcttagaataactgttcaactgtgtgtaaataaggaaagttttcaatgagtattacttattgtaattaatgcagaaggacttccccagtca

SEQ ID NO: 450725 - DNA, 1944 bp, Homo sapiens
gcaggctgtacgctcggagtacgggatgtgcggtctgcaggagctgcggcccgtcggcccgggctggcatgggttggaattggagcctatcccccaacccgaaggctaacagcatcatgtggttactaactgttcctcattcaccggttgatgcctcccagaaaaaaacgccgccagccttcccagaaagccccgctgctgttccaccaacaaccactggagggccccaaacacagctgtgcatctacacagcttcccatcactcacactcgacaggtgcccagcaagcccattgaccacagcaccatcacttcctgggtatcacctgattttgatacagcagcaggaagcttgttcccagcctaccagaaacaccaaaaccgggcgagacactcaagtcgaaaacctaccacctccaagtttccacatctaacttttgagagtccgcaatcttccagttcagagacattggggatccccttaatccgagagtgccccagtgaatcagaaaaggatgtttccagaagacccttagttccagtgctcagtccccaaagctgtgggaacatgtcagtgcaggcacttcagagcttaccttatgtgttcattccacctgatatccagaccccagagtcatcgtctgtgaaggaagaactcattccccaagatcagaaggaaaacagccttctaagctgcactcttcacactggcactcctaatagcccagagcctggacctgttctggttaaagacacccccgaggacaagtatggaataaaggtcacatggaggagacgacagcacctgcttgcttacctcagggagagagggaagctgagcagaagccaattccttgtgaaaagctgactgccatcagtaatctcaatagaaaagagatatgttttctggagtcataaaggaattcaattcctagggtttttgtttttgtttttgagatgtaatattgctctgttgcccaggctggagtgcagtggtatgatctcaccttactgcaaccaccacttcctgggttcaagcgattctcctgcctcagcctccccagtagctgggattacaggcaccagccaccatgcctggctaatttttttgtatttttagtagagatgtggtttctccatgttggccaggctggtctcaaaatcctgacctcaagtcatctgctggccttgacctcacaaagtgctggcccagccgagatttgttttctaagatactttgtgtcatgaacagttcagtttagtgtcatgaactattcacttcatatttttcttgtattaactgtttaaatttttaaaatatcttgtagtaactctttaaaatgtatgtaagtaaatggctgcagaaagtttttttagagaatcctgcttccatcagtaatacagcaatattaccccatccactaatggtctttgtttccttaaccactactcattaatccttaatcacctcattcaaactaattcattctgcatttttgagtaccaactcttgtcaggctcagtggcagcttctacgacctgatggatggaaaaaaatcaaactctgtgactctatggttgactgccacctctgcaaccttgactcatctgctgaaaaggcaagaagaagaaagggcagcaagccctgttttagggactacataagatgaggggagataagggggacatagatgagttctttaggattgcgtgtgttttgagtttttgtttctaactgaagaaatctgtcaatattaaatagggtgggaaaatggtttcttagaataactgttcaactgtgtgtaaataaggaaagttttcaatgagtattacttattgtaattaatgcagaaggacttccccagtcaaccgaatgtctcggccttttactcagacaagtagcatctcattaaacccattcatttagcattcattcagctggacc

SEQ ID NO: 450726 - DNA, 580 bp, Homo sapiens
  misc_feature (125)..(125): n is a, c, g, or t
tctaaggaagtcagcccgcctctcctctagtggtagaaaacttgaggtacaggcagagaaaagggaacaagaacaggttaggtgccttctgcagccacttcacatttcccggagtaggacagatnacaaagagctcagatcaaaacaacaaaggtccaaggcttagtttatcaagctcccatatacaagaaaaaatatcaaaaactggagaggactgttttcaaagcaacatcaaggcctgataaccagggtcacatatattcgtccctgttccttactctctgcacctcacccgttgcccaaatcagtccgctttgtccccagtctttcccttcccgaccttctcctttccaatttcagcatggatgcggtagtctgagaccaccaaggcagctgccaaacggatgccctgctgctccccttccaacccactgtgcgcacagctgtcaaggcaatcctcccaagcagacctcactcttgcccaaaacttcctcagcccctcaactctgaactgagaacaaaattagagactgcttggtctggcacattccaagcccaatagtcctgcatatggctgatg

SEQ ID NO: 450727 - DNA, 443 bp, Homo sapiens
tcgcctctgccacccctgagacagcaggaccaaccctcccttcctcctcctcagcctgctctacgtgaagatgatgaggatgaagacctttatgacgatccacttccacttaatgaaaagtgaatgaaaactttgccattgatttgatagcagagcagcccgtgagcgaggtggagactcgggtgatagcgtgcgatggcggcgggggagctcttggccacccaaaagtgtatataaacttggacaaagaaacaaaaaccggcacatgcggttactgtgggctccagttcagacagcaccaccactagagcgtgtggcacgccgggggtcccgcagcatcctgtgagcatttccgcggggaagctgagcacgtgaagctcgctggttctgtgcgaagggtattcctggtgctgaataaagggtgttgctgtcaaggctgaaaa

SEQ ID NO: 450728 - DNA, 994 bp, Homo sapiens
gggacgttgcgccgggtcaaaggccagcggcgcaaaatggcggcggcgatgaccttctgccggctgctgaaccggtgtggcgaggcggcgcggagcctgcccctgggcgccaggtgtttcggggtgcgggtctcgccgaccggggaaaaaaacacacacacgaaccaatgaagaaaaaaaaaaagacaacaaaagaaagctgagagagacgacaacaaaaatgaaagaaaaagaaaacgaaaaccaagaatagaaaatctagtaatcaacgccaatatcaaagataaagagacgacaaagagaaatgctaatcatagaactaggaggggaagctgcgtatacctagccataaagagaagaaaagaaaatctagaggacaaatgaaaggaaaatatggcaggcagcgaaacgaagagaactaaaaagatagctactcaatgagacaggagcatatctagccaggcagctaaaaatgcgatggaagacgactgccggagaaataccccggcgatgcatgaccgaagaacagcagaggaccagcggtgttgaatggtcaagatgcatgtgtatgaattcacggcgaaatgaagcgaaaaaatcgacaagggagagaaaatccccaaggtaaccaggagagaaagagagagaggggaagagtatcggagtactagattatccgagaagatgtagataagtggatataaagtgcgtggcaccgattctgtcaaatggcaccggccgtggccgaaaatgatgatactgttggaaagcggcgagcgcacgatgagatgaagaggtcccccgagaaaactcccgagtgcgagttagaagaggcccccgagatacggaagagggagaacgagggagatgcgggaccccgagaatggttgaatggcgcgaaaaagatggcgaaatggcagggttctcggcagaggtgacaacgccgtggctagggatacccgtccggacagcgtaggtcccagcgccaacaatg

SEQ ID NO: 450729 - DNA, 678 bp, Homo sapiens
gttgaatacttatatcaaaagaaaccttggtgctgaggtaaagtttctgtaggaaaatcagaagaaatacttgattctttccctatatttaccagtctttaatgggttgattctctagtttctgtttgttttgtgttgctataacagagtacctgagactggataatttataaggaacagagatttatttcttacagtctggaggctgggaaatccaaggttgagggctgtgtctggtgagggtggaaggtggaaggactggagagtgtgcatgaaggggactgaactccttcttctaccaggagcccgctcaccacctgtgagggcagccagaatccttcatgaggcagaaccctcatgacctcagtacctctgaaggccccgccctgtctctcaacactgttgcattgactattcagtttccaacagaggaactttgggggagcacattcaaaccatagtacctggtgaatgaaaactttgccattgatttgatagcagagcagcccgtgagcgaggtggagactcgggtgatagcgtgcgatggcggcgggggagctcttggccacccaaaagtgtatataaacttggacaaggaacagtggacgcccggggttcccgagcatctgtgagcaatttcccggggaacgtagcacgtgaagttgttgttttttgcca

SEQ ID NO: 450730 - DNA, 236 bp, Homo sapiens
ttaatatataagatttaaataaattttccccatattgcaagcaccctaacagttctggatggggttcttcctttcttaaaatcttaattgtgtctatttctgacttgtttccccctgaaatacataacattgtagccgtagttctggtttgcatataaatggaagtgatcttttttaaaattcttgtcccttattctcctgagactctcagatttaagtaaatcatatcaactttt

SEQ ID NO: 450731 - DNA, 1541 bp, Homo sapiens
cttagttcagggttacaagacttctgctgaaccagtgagctgacctctctatttccttccccacactgaaaatcctgatttttcaataataatttcatttgctttggaagcggttttattcttaaggtgtgtcctgttagaaatgttcctgttactctcttaaagtgttgggaattccttaggtccatttgtctcttttaaaagtttagttttctaactttgaaaaatataaaatatagtctcagtcagatttataaaacttggaagaaagtctaacgatcgtgctcgcgtcctccttcctttccacctcacagtagtaactgttcagtgctttcttctttggatttcatgtaaatcagtgaatatgtaggcggacccctggtattccccacatggatgagtggaagcttcctgtccacttacccactgcctggcatctccacgtagtcctgtgtcctccttcaccccatcgcggtattatggagacacttttttcattccgttttgatagtaactgaaagcatcagcacacaagcaggacgtgaagttaccagagtctttcccgcacatgcctatgagtcataaatgaccaggtggaagacacagtggatgaggagacccagtgtacggtagcagcaaacaagagaaaacacttaggaacaacctaaccggcattcaggacctctgtggcccaaggggaaagccggaaggacattgttggtctaacggattgcagagctactggcatttttggcattttagataaatctattccatcggtatcatgtttactgaggtggataactgcatggaggttctgtgagagaatgttcttatgaaacgcacatgggagcctgtgacagacaggcccgagcaatacaaatgtcctcaggtgggacagaacgatgtggtggagagaagagggcgtggcagagcccacggggcacgtgtcagcatttgctgggtccacggggacagaagggaaaggctctgtgctgctgggattcttgcagtgcctctccgcgtttggaactttattccagtgaaaagtagatgtgtgtgtaggccctgaatttaataaggtctacaatgataatagttaaatgaagcatgcaccatagattcgtgctgatggtacatgaatttgtgtgtggtgggttaaattgtagttagcaagtttgtgtatttgtttacgtaagtctttcttcttgttccaggtgaatgaaaactttgccattgatttgatagcagagcagcccgtgagcgaggtggagactcgggtgatagcgtgcgatggcggcgggggagctcttggccacccaaaagtgtatataaacttggacaaagaaacaaaaaccggcacatgcggttactgtgggctccagttcagacagcaccaccactagagcgtgtggcacgccgggggtcccgcagcatcctgtgagcatttccgcggggaagctgagcacgtgaagctcgctggttctgtgcgaagggtattcctggtgctgaataaagggtgttgctgtcaaggctgaaaa

SEQ ID NO: 450732 - DNA, 619 bp, Homo sapiens
gggacgttgcgccgggtcaaaggccagcggcgcaaaatggcggcggcgatgaccttctgccggctgctgaaccggtgtggcgaggcggcgcggagcctgcccctgggcgccaggtgtttcggggtgcgggtctcgccgaccggggagaaggtcacgcacactggccaggtatctcgctaaaaatgcccctgattacaccgagtactgtgcacttgtttgacttttcatcaatggcctaaaagtttatgatgataaagactacaggagaattcggtttgtaggtcgtcagaaagaggtgaatgaaaactttgccattgatttgatagcagagcagcccgtgagcgaggtggagactcgggtgatagcgtgcgatggcggcgggggagctcttggccacccaaaagtgtatataaacttggacaaagaaacaaaaaccggcacatgcggttactgtgggctccagttcagacagcaccaccactagagcgtgtggcacgccgggggtcccgcagcatcctgtgagcatttccgcggggaagctgagcacgtgaagctcgctggttctgtgcgaagggtattcctggtgctgaataaagggtgttgctgtcaaggctgaaaa

SEQ ID NO: 450733 - DNA, 627 bp, Homo sapiens
gggacgttgcgccgggtcaaaggccagcggcgcaaaatggcggcggcgatgaccttctgccggctgctgaaccggtgtggcgaggcggcgcggagcctgcccctgggcgccaggtgtttcggggtgcgggtctcgccgaccggggagaaggtcacgcacactggccaggtttatgatgataaagactacaggagaattcggtttgtaggtcgtcagaaagaggtgaatgaaaactttgccattgatttgatagcagagcagcccgtgagcgaggtggagactcgggtgatagcgtgcgatggcggcgggggagctcttggccacccaaaagtgtatataaacttggacaaagaaacaaaaaccggcacatgcggttactgtgggctccagttcagacagcaccaccactagagcgtgtggcacgccgggggtcccgcagcatcctgtgagcatttccgcggggaagctgagcacgtgaagctcgctggttctgtgcgaagggtattcctggtgctgaataaagggtgttgctgtcaaggctgaaaaaaaataaagcaaaataaaacctaacaaacaaaaagagccccaaggaaccaaaaaaaaactaaaaaatagaaattccttgtg

SEQ ID NO: 450734 - DNA, 1057 bp, Homo sapiens
  misc_feature (560)..(560): n is a, c, g, or t
gggacgttgcgccgggtcaaaggccagcggcgcaaaatggcggcggcgatgaccttctgccggctgctgaaccggtgtggcgaggcggcgcggagcctgcccctgggcgccaggtgtttcggggtgcgggtctcgccgaccggggagaaggtcacgcacactggccaggtttatgatgataaagactacaggagaattcggtttgtaggtcgtcagaaagaggtgaatgaaaactttgccattgatttgatagcagagcagcccgtgagcgaggtggagactcgggtgatagcgtgcgatggcggcgggggagctcttggccacccaaaagtgtatataaacttggacaaagaaacaaaaaccggcacatgcggttactgtgggctccagttcagacagcaccaccactagagcgtgtggcacgccgggggtcccgcagcatcctgtgagcatttccgcggggaagctgagcacgtgaagctcgctggttctgtgcgaagggtattcctggtgctgaataaagggtgttgctgtcaaggctgaaaaaaaaaaaaaaaaanaaaaaaaaaaaaaaaaaaaaatttttgggggcgcttgggccttggaaaagtttttaagacccatccggttgggcggcgcgggggccaaggaagggaacaggtgagacctgtgggcaacagcgcgggaccccacagggaaacccggggccctggaccacgggcacggagatccccaccaataaaacacaacggccgggggggggcaaaaacgagaagaggttgagagaacaaattccaaagtgtgggagcgtccaggagggacaaatcacgcgggactcatttaacccaggagggccaaagcgaggaggccgaaaatccaattataggccccagtctcggggttaaaacgaaaacagaaacaacaacaaacaggaagaagacgaacgagagaaggagaaagacaaggaaaaagagaaacagagagacagaaaaagagacgaggagacaaaaaggaagggaagaaaaagagaacgagcggaaagagaaaaaacaaaagt

SEQ ID NO: 450735 - DNA, 791 bp, Homo sapiens
gttgaatacttatatcaaaagaaaccttggtgctgaggtaaagtttctgtaggaaaatcagaagaaatacttgattctttccctatatttaccagtctttaatgggttgattctctagtttctgtttgttttgtgttgctataacagagtacctgagactggataatttataaggaacagagatttatttcttacagtctggaggctgggaaatccaaggttgagggctgtgtctggtgagggtggaaggtggaaggactggagagtgtgcatgaaggggactgaactccttcttctaccaggagcccgctcaccacctgtgagggcagccagaatccttcatgaggcagaaccctcatgacctcagtacctctgaaggccccgccctgtctctcaacactgttgcattgactattcagtttccaacagaggaactttgggggagcacattcaaaccatagtacctggtgaatgaaaactttgccattgatttgatagcagagcagcccgtgagcgaggtggagactcgggtgatagcgtgcgatggcggcgggggagctcttggccacccaaaagtgtatataaacttggacaaagaaacaaaaaccggcacatgcggttactgtgggctccagttcagacagcaccaccactagagcgtgtggcacgccgggggtcccgcagcatcctgtgagcatttccgcggggaagctgagcacgtgaagctcgctggttctgtgcgaagggtattcctggtgctgaataaagggtgttgctgtcaaggctgaaaa

SEQ ID NO: 450736 - DNA, 417 bp, Homo sapiens
ggccgtaaaagtcacacatggtctttttgtttttttccaggtttatgatgataaagactacaggagaattcggtttgtaggtcgtcagaaagaggtgagtaaaaaatctagtgaagagaggtaagctttcctaaaacttttatgtaaccaacaagaaataaaaattaatatataagatttaaataaattttccccatattgcaagcaccctaacagttctggatggggttcttcctttcttaaaatcttaattgtgtctatttctgacttgtttccccctgaaatacataacattgtagccgtagttctggtttgcatataaatggaagtgatcttttttaaaattcttgtcccttattctcctgagactctcagatttaagtaaatcatatcaacttttaaaaaattattctttta

SEQ ID NO: 450737 - DNA, 546 bp, Homo sapiens
gggacgttgcgccgggtcaaaggccagcggcgcaaaatggcggcggcgatgaccttctgccggctgctgaaccggtgtggcgaggcggcgcggagcctgcccctgggcgccaggtgtttcggggtgcgggtctcgccgaccggggagaaggtcacgcacactggccaggtttatgatgataaagactacaggagaattcggtttgtaggtcgtcagaaagaggtgaatgaaaactttgccattgatttgatagcagagcagcccgtgagcgaggtggagactcgggtgatagcgtgcgatggcggcgggggagctcttggccacccaaaagtgtatataaacttggacaaagaaacaaaaaccggcacatgcggttactgtgggctccagttcagacagcaccaccactagagcgtgtggcacgccgggggtcccgcagcatcctgtgagcatttccgcggggaagctgagcacgtgaagctcgctggttctgtgcgaagggtattcctggtgctgaataaagggtgttgctgtcaaggctgaaaa
